United States Patent Application Publication US 2015/0240253 A1 - sequence listing, part 36

SEQ ID NO: 169444 - DNA, 894 bp, Zea Mays
aagcgagcatagcccgagcatgtcgaaaagcgaccaccaaactggcctcccctattcgacaataagacactcaccgcgatggcaagtgaccaagctagccatcgcgtgcaacaagaaaacatttatccaagcgaaaatttgcctaagggtgcagtaggatacgtacaagtagtgcgcgaagtcacctaagggtgcgaagtcgtctactagacgcaacatttatccatgcaaaaattcgcctaagggtgcaaccaaatatgcacaagcagtgcgcgaagtcacctaagggtggaattcatttgatagactcaacatttatccgagcaaaaagtcacctaatggtgcaactggatacgcacaagaagtgcccgaactcacctaagggtgcgaagtcatctgtaacgcatcactcatccgagcagaattcgcctaatggtgcagctagatatacacagcaaaacacaaaagtcaaacataaaaaaatgtgcgaatacattcaaaagctgaagacccacatagtcgttcctcggtgaaggggggcgagggcagcgtttgacttaaattcgtcgagccacgacaatacaaatcttctaaggattacaaaggctccactttcgggattagaccaacctcccaaaaattaaacaacataagcctaagctctttgccttcaaaaagcgcactaaggtccgttcttcaaaacctcgctcagttgttggcacaagaacaatccagtgaggcccctcttccgattgtgctctcccttgcttgagggtgcaggggtgacatacgaagctcctcgtggagcgagacccatgggcgaggtcctcttagtcccataaggcgacgccttcgagagccctcgcctcctcttggtgatgcaccggcactcca

SEQ ID NO: 169445 - DNA, 640 bp, Zea Mays
gccataggcctaccctttggtgcatctacccattcagccacgcatacatccgtctcatcatcactgtcagtattgggctccaacatgttaaccccccgtttctccttttccctactgttcgtgtctctaaatcggctatactgctgtttatccctaacacgattttcatgggtaatagcgcgctgcataacttggtttatatcgttaaagtcttgtccctcttacttctccttcagataagacgacaaccctgcaaaagctaaatcggccaagtccctttcccctagagttaagttataacatctattcctagtttccctaaatcttttaatgtactcaggaacagtctcattatacttttgtctgactgtagtaagatgtgataacctaagctcagtttcgccacaataaaagtagtcatgaaattttttctccaaacacgcccaagtattaattgaattcggtgctaaagatgtaaaccaattgaaggcagtgctagacaatgacagaggaaacaatttaactttgtgggcatcagttatacctatatcatttacttgtgccaagtactgtcctacatgttcataggtggtttttgaatcgtctcccaaaaatttaacaaaatctggaattctaaaac

SEQ ID NO: 169446 - DNA, 376 bp, Zea Mays
ggtttcccaactctacctttgactttgactcagacttgggttgaactaattaactagaggcctagtttttgttcatagctaactcaatcgatgggtgccaagatggtcacctcactatggacaaggaagatgaggcagcaagggactagagaaatctcaacaacccacctctcgtagaagagaatgatcatagtgcctagtcactaaagcattgatgagtagttaatgatctttgagagcatgacagatccatccatgaccaaatttagatggttggtttttatggtcgacaagtctacgcaacacctaccccgaacattatgatgataaaactactatttgatcgacttacatcatcgcttccaagagaatatgc

SEQ ID NO: 169447 - DNA, 568 bp, Zea Mays
tgcatctggatgttttttttcagttggatatgatccatgctgtgtgactgattcagcacaacatgcagatcttactttatagttttgtgaacaatgaggactactgagtttaactgaacatcctgcaaagttgtcactaaagaacttactttttgaaacatgcagatcttactgcatgcagatcttactttttgaaacaactactgcatgcttcatcttctcaaaaagtgaaaaaaactgaagcatatcaatgcctcactaatgttatgtccagtatgcttgtaacccaatgttcttggaggctttaaactgacggcggagcgcctcccttacatcggagggaaaggaggagaaagaccagaaacaacccacccaaatcggcgccaaaaccgcccagatgaggcagcatgtctgccacctcagtgctggtgccgccggcgcctccgacgctcccgcgcccaccaccgaagccgctgtaaacgagcgcgctgaggtcgttgtcgcatgcaaattgcaaacaggcctcgcctaggaaggaagaaggaaagcgttgggtgggccacaccac

SEQ ID NO: 169448 - DNA, 546 bp, Zea Mays
aaatttcactattcttgctttacctgctcgatttgctgctgctgaaaacaaacatagactaacatgaatggatgcctagtggtttgcagtgtagtgtgtcctgttctggggttagtcaacacacactaatcattaccgtatctccatacatctgtaaggtaagtgctaaatatgtttttcacattcaagcagtatttgatgaattgacaaagtaaccacagggataaggtgacagaactaagggcaggtgttaataatagctaacttacatacccagtccacacgtatagagcttgaaaagcttggcattttgttccaatgtcttatcccattgaaagtagcgatcagataaggcagaaacatcctaggcgtgctacctggtccaaaagagtgtggaacttctgctcaataccttcgcaagcatgtcgagaagcaccatagttcgacgaaccctccactggaacattttacgaaacatatcctgatgctctctaaaatgcacctacgccaagatcaatcctagttcgagctatactctaatccaac

SEQ ID NO: 169449 - DNA, 308 bp, Zea Mays
gggtgacctaacccacctgtctctagtgttgcctttcctccatatcacttgtcaatttgttgcctcattgggatcccacaggtagcgataccgctttgcctcctagtgcgcattggtaggtaggttgtcggtgggatcctgccttgccatcgtggcactgctttgttgcatgcctctcgctatcttgaagggatattgtcgcaccatcgcaacatggcaacaactaccatttgctaccatcgttttgcgaccttgccaatgcgccttgcggcctcaccatcaccgcatgccctcactgccgcctgcca

SEQ ID NO: 169450 - DNA, 490 bp, Zea Mays
tctggaccgagctggcagaccagtctttcaaggcactgaagatagccttagcacaagctccggttttagctattccagactttactaagccatttatcattgaaactgatgctagtgggggtggagtgggagcagttctgcagcaaggaggacatcccattgcctatatcagtagatctttgggtcaaaaaaacttgggattgtctacatatgaaaaggaatgcatggccatactatttgctgtggagcaatggagaccatacttgcaacatggagagtttattattcagactgatcaccaaagcttgacccatctcgacgatcagagactgtcaacacagtggcagcagaaggccttgacaaaattgttgggattgcagtttcgtattcagtacaggcaaggttgtgaaaatcgagttgcagacgccctgtctcggcgtccgaatatggcccaagatgctactgatacacagctcaacacagtttcgac

SEQ ID NO: 169451 - DNA, 386 bp, Zea Mays
attcaacatagaatcatggcttgtcatctaaaaacatataaagtgcctttcagtgaaaagtagtgatgataatttaggatgtaattaaaggggggaaatgaagacgatcatggtgcagttcagactttcacagcagtattatgcaaagtatggaaaagaacactatgcggcaccaatccagggtacattctattggagcatactactctgaacaagatttttttaggacagaacaggcagtgtagccatgagagcatattcctaaatttctgatgcattgtggatacttgactggaaaaaaatcaatcatcgcatacttgattggatacttaaaaccaagaaaatggcatcaatccaactaaaatacataatcgaatagaccacga

SEQ ID NO: 169452 - DNA, 732 bp, Zea Mays
atggtagggccgggcccactagtcaccagcacgaggcaagcgcgggcgcgggcgcgcactgacaggcggggcccaccaggcggcgacccagatcgaaggggagagggttggcgcggtgctgacgtgtgggactcggggtccactggtcagcggccacgcgaggggagaatagagtggtcgtgactgggagactgcaggtgggttcccctgttaaggttgtcgtccacctcggccgcgcgctcagagtgagcgccatggccggagtcggcgacctcacgcgggcaaaggaggttacggggcagtttggttggccggagaaccctggcacgacagcgtggtgccggtgatcgccggtggctaatcaacggagcagggagaacaagggagagagaaagggaactctggtggggaaattcacctcgggtgaagcgcggacggcggcgaagcttcgctcggcggtggcagaccatggtcagggacagtggggcggccttgccgtggttgatctgaggctcaaacgatgcggcagcgagagggcttcggcgagctcgggcacgggcgggtggagcttgggtgggcgtgctgaggtggaatgaatgaggcagggggtgggcgtgtgcaggtacttaaagggggttgtggtggcggtttcgcgtggagaggcgatgtgggcgtgaccgtcttggcgtgcgtgcgcgtggcccgctcgacggacggttggaagaatgggga

SEQ ID NO: 169453 - DNA, 364 bp, Zea Mays
gggggatccgccgccgttgtgtcacgcgtgctccatcggcggggtcttggtcgtaggctagggggctccagcacgtgcccacgatggtgtttgtggcctcgtcgtgcgcgattggtgctcggggcgctgtgaattgctcatcggagcctcaccaccaccgcgggtctgcttcggcgcgtgggcaagcacgtcttcgccttcgacgccagtgagtatcatacccgcatgttcgtcgtagcctcctcatcatgtatcaccgttcgatttcgaggttggaccgagaatgtggatgggtcaaagcttcgccaatggcgtcgccgtgcctcagcgtaacttcgcccgggctatcaccggagagggggat

SEQ ID NO: 169454 - DNA, 752 bp, Zea Mays
ctgtgacgtcagtgttttagaaataacggctgagttatatcgagccacatcggcgttttagcggtaactgccgagtgaagacctgtgacgtcagtgttttagaaataacggctgagttatatcgagccacgtcggcgttttagcggtaactgccgagtgatgactgggcacttttagaattggtgcctggccctggaaaaccccatttgtaccgtgccgtcgcacacctctgctttctgagccctagccttactttccgcttccagacctcctctgcttccctttgatctcgcttccgctcagttcgccggcgggattgagatggcggccaagcgaaaaagccagaattccaccgtcgcgattattccgcccatcgatcccaacagtcaattgcctttcgtaggtaatcacatgtctgttgtttccgagtcagaccttcttcatcttgtctctgtcggagttcttcccccaaaagaggtttgctcttggcggatctgtcgtggggttaccgtcccgacggaggatacccacgagtccgttatttacgttccctttctcatccgcggccttgctcttccaatttctcctttctttcgtggtctccttgatttctaccatctaaatctgaatcatctgaatcccaactccattctgcaagtttctgtttttgttcacttgtgtgaagcctatctcagaattctgccgcattctggcttgtggaagtacctataccattgtcggcctggaatggc

SEQ ID NO: 169455 - DNA, 507 bp, Zea Mays
atatgaaatggtactagctattacaataaggtcatgacatcattaaaatgtttgtggctctaggccatcaccacatgcatcacaatagtcaggcgaataaaattattacagaccaggtgttcattacaaaaattaaaagcgctgccaagatgagaatccttctccccctttttggcaactagcaccaaaaaaggagagaaccatcagccacaaatcaccactgaggaggaggcggaccaaagaattgagtcgccaagttagccgcaaagttttcttcccaggctgagatgggggaggatagctgcctgaaggatcctggggaggaggatatgaagaggattgacccggatcccctggtggggaggcggggcaaactactcacgatcatcaaagtattattcttcttcttcatcttcatcttcagctgacataaatggcaccccataggcctgctggtgccattcatttatttctagtggcggaggatgaagaggcacatcaggcgag

SEQ ID NO: 169456 - DNA, 432 bp, Zea Mays
gaagaactcgaacgactaccttcgtcatgccaccgaagaagacagcagcgccaggggctgcccttgcaccgttggacaccaatcaagatgggctccttctaagggaggcccaaagccagaagaggaaagctattagcccaacaccacatgaagaagagttggaccaagaaatcagggatctagaagctattcatcaacaagtggagagaagaagggagaagatgcttcggatggctgagctccagaaaaagattgatggagtagccgaagagatgtgtcacatcacacaagacaacgagcaaggacataagccacaatagagagagcttcgccaagaaagtcctacccatgatgacatatggtatgaggactttcatcatgataccattgcttttgatgatgctttcccctagctatagaattgcaggctac

SEQ ID NO: 169457 - DNA, 481 bp, Zea Mays
atacggcaacaaatgctgcctcaaggcggcacaccggaaggtccacgtggtggaacccaccatcccgcgatatctccggtggttggagttcccaatcatcttcgaccgtagtgatcacctagacaggatctcgcatctcggggcttaccccctcgttgtcaaactaagtgtaggctcgaagcatctcaccaaggtgctcatgtacgggggtagtggcctcaatatcatgtacattcaaaccttcgacggactaggaatcgattgctccgcgctgcgaccaagtacggcactattccacagtgtcatccccagaaaccaagcctacccactcagacatgttacactgcatgtcacgtttgacgatccttccaacttccacaccgagcggctacagttcgaggtagtcgactttccggggtcctacaatgccatacttgggagaccttactatgccaatttcatgctcgtgccaaattacacg

SEQ ID NO: 169458 - DNA, 689 bp, Zea Mays
cgaaaactagggacggcgggttcatttccaacaaaccgtgggtttcttacgcaaaacaaccacgcgaaggggtatcaggctccctcaaccgttagatctaaaatcaacggctgagattagatctgcggccgagggcgcgagcgcgcgagcgggcgagtgctgataggtgggccaggggatgtcagcgacagggggagggcgcactaaccgaacgggcccaacgccaggggacatgggcgcagggcacgcgtgcgcgaagcgatatccgcgatctgggccgtgcgatcaagattggacgggggagatcagaccagggaggacgaatggctgcgggcgacgctgctcctctccacggcagtgatgtcgtcagagttggggcaagcgcgtgctagggtggctccggggtcgccgggattgggcagagagggagagaatgccacggcgaactcaatggcggggaataggccatgaatccacggacagagggggaagaacggcggggagaaggtctcgggcggaccgaaagagctccggtgaggcattccggccacggggagggggcttaaggcgcgctaaggcctgggctagcttcggcagaggcagaggtgacacgagaatctacaccggggagctaggtcgggctaaatcggctggccaccacgcaagcacggcggaccaccgtggccgag

SEQ ID NO: 169459 - DNA, 735 bp, Zea Mays
ctctataatgtaagttttgacatacattatttataatatacttttgtataaggacacactatccatgccacccaacccactccataactgtcaacccaagcatccgcaacttgagacccagctgggcgtggtacccaggttgaggaaattcatgaaagataacagcaaattcggagagtattagagacttgccctaacgaagcggacgttgatacaggacatcaggtaatatatacaatcccatgagatttttacgcatcatatgtacattgtttgcatctttcttttttgctggacacgaaccacaatatttgtcaacaggatttctgctttcatgttcgaaacaacatgttgaggaacacaaatatcacacctcaacccacatcagcatgcacctttatgagatcaaatatgtcaacccgtttgccgatatttgacgtgacaccacaaaaaatgttagtttagcagtctctatctcatgttatacttccattttacaattacattagtacaataaatattacataatttactaagcatatacctttgagtagggaggtgaaatggctgcagatgacatggaacacaatgacagtggaccagtctttgattagaccccaacttctcatgtctgtacagtaacatacatcttctctaatgcactttatgccattaaacaaattattctaatgttaaaacacttattaccaggttgcatctcaggatgatacattc

SEQ ID NO: 169460 - DNA, 316 bp, Zea Mays
tgcgcgttctgaagtgccaaagatgtcatcttagagaggggaacaaagtaagcgtggccaggacagatgcgcgggcgttgattaccatggcagcttgtaagtcagggaagcgagtccagcgacgatatgaatccgatggaggcgcccaagctggtgtgcgacggcgcctcgaaaagagtcccgcacacaattatgaggtcctgactctccactcctgtagaggtgcagtctggctcccgcgcaccggcgcacgtcccccgtcccggcctcccgcagtgcttcctattgcaacgcatgtcgcacgactccgtcacgc

SEQ ID NO: 169461 - DNA, 342 bp, Zea Mays
cttgctcgtcgatcggtcgggatagacctcgccgccgttggccacttaccgctgtgcgccacgtgctcaagcgttgtaccacgtcgctgtgaatcgcgtcttgcatgcctagtgatcaccggagagccgccacggtgaaagccactaagcttgcgcgacagtaaccttcttcctctctggccgccagcgcatcttcgcgaaattggacgccaccgctgtgggagcctataaattgccgaccccgcctgctccactaagtaattgtgcaactagtaaagcaacccatgcctcgaatcatccagtagagctccccaatttgggatttcccccaaatcaatcaag

SEQ ID NO: 169462 - DNA, 494 bp, Zea Mays
gccgaacatggctagatatagaatcatgagcggctaccacattgtaactgagttggactctaacttgttggcagtttcttcccatataaatatacatcatgtggcctcctatggaggatatatgcttaaacaatttggtggttttctctcatggtattagagcccacctcctaaagacctaaaccctagctgctaggactatccagaaaccctaatcctagccgccaaaaaaatcaatatgccatggtgagttcttcaactttctctgctagttcgcaacttctgttgagacaagcaattgcagagaaactcaacaagaacaattattctctatggagggcgcaagtcctgcctatcctccagggcgcccaactgcaatgttatcttgacggcttgtgtgccgctctgaccgagaagattgaagtttcaatcggtgacaagaagatgtagatcaatcctgagttgacatggtggttagcaattgagcaacaagt

SEQ ID NO: 169463 - DNA, 789 bp, Zea Mays
tgaatggtcaaatcataatccttaatcaatttgagccatcgtcgctgcctcaaattcagctccttctgagtgaaaatatatttgagacttttatgatcggtgtaaatgtcacaagactctccataaagataatgcctccacgattttagagcaaagaccaccgcgaccatttcaagatcatgagttggataattcccctcatgcttcctcaactgccttgagccataagcgatcactctgccttcctgcatcaacacacaaccaagaccaattcgagaagcatccgtataaactgtgaaacgcttaccactctcaggcaaagctaggataggggcgctcaccatcttgttcttcaatgtcagatagctgacctcgcaatcgctggaccagacgaacaaaacacccttctccaaaagtctagtcaaagacttagcaatgctagaaaaatttggtacgtagcgtcgataatatccagcgagccccaagaaacttcggattttagagacaatagagggtctcttccactccaccacagtcgcgacattcttgggatcaaccgcaatgccctgctgactaatcacatgccccaggaaagccacttcagacagccaaaaggcgcacttcttcaatttgccataaaattgattcttcctaagagcactcagaacgagacggagatgccgctcatgctcttcctcggtctttgaatatatcaggatatcatctaggaacacgaccacaaagttgtccaagaactcatgtaacatcctattcattgcttccataaaa

SEQ ID NO: 169464 - DNA, 868 bp, Zea Mays
cgggttggttcctaggaagttcagggactctttagcaaaatatcatggccaaagaggtatccgcgaaatctggccacaagattagaaaccaagggctaggattagatcgtacttaaaatgaataggtacggagcgaagaccgtcggatccaaatcctctggtcccaatattattatgcgctagatcgccctcaaccgtccatcctagatctacggtttggattagaagcgcgaaggggcatgcacgggtccaatcccaaacgttggccgaggatccaacggtggagataggctcatgtcgagttggccctatcttctaatcctggccactggtaacgcgatctacggctcacaggttgtcatctacctctagaatccagtagcgacagcggcgatccacacggtggcgcactccggcaagtagagcacccagggtcttaaacctagatacgattgaatctatgcagaggtgtggagaaatagaatccgatcgaagccataccaacggttgggagcagcagaggcggattggtcgcggtgggaggcgattagcgaggcgtagagaatgccgacgagcaattcgtcacccgaggcttgtccaacgcacgcagcggcaccgcgacttcctccagcgcgcctcttgcgacaaccctgtgtgccttgcgcactctacactccaacatcgatggtagacgatgtctacatcgaactctccaatcccgatctcaatgctggctccctctcaatcaccttctgcgctattctcctgggttctagtagaaagggaggatgtcgggagcgcacgtatatactcttaggcggccaggaatcatcaacggaatcccgagatcccggtctcccatctgcac

SEQ ID NO: 169465 - DNA, 814 bp, Zea Mays
ccgcctcccggccgtgcgccgcgtggcctagccgttctacagcaccgccgtgacaccttaaggttgtcccatcgtcgccgggaagcctgccacgccgcgggacacgaattcaccgcgcccgccttcttcttcatttccggccaccgcacgtcctcccgaaattcactggccaccgccttgccctcctataaattgagcccgtgaccagctccgtagggtcatcagctaaccagccaccgccaattagccacaatcgttcgccgaagctcgggaatttcgcgttcgccccaaatcgggtttccgccaccatagaatcaagctcacagcggccagccctttctaggtcagttcatccctccctttcctccgtttaagctttctcatgcgcctgcgatgcttactgacccgtccaattgggctatgggtctactgaccgtcgggaacgcatgggtcttgagttcatccgcgcgctctccgtggccagaccaaattagttcaccattcgtgcaattgggttggggaaaatactcgaggtagatccaatttggtgtctgatgctcggagaatccagccgtggccccagtcggccggttcaggtgctcgccggagtgctccccgcgctgccgtcgtcgtggacttgggcgtgcaaagaattagaaatctggggggctcggtgtaaagcgtcagagacccgttggaatagtggttgaacccgttcacagttagataaaaacgcgaggaccccggtgcaattctgccatcgcgcgcgggcgcgggcgcgcgtttcctgtgttgttgggccgtctggaccaga

SEQ ID NO: 169466 - DNA, 568 bp, Zea Mays
aaatgattgcatgttgtattggaaagaagaagcaaatgcagatttttgcaagatttgtcaaagatcaagatggaagcaggacaagcactcaggtgaaaacaaacaatcgacaaaaggaaaaaaattcctgaaaaaacttaacattattttcctctcaagccaagactccaacggttgtatatgtctcaaagaatagctactttcttgacatggcataatgatggtagagtggacgatggagtgatgcggcacccagctgattccaaagcgtggaagaattttgatgagctccaccgtgcttttgcatctgagccttgcaatataaggttatgccttgctggtgatggcttccaaccattttctagcatccgagtctctcataccatttggcctatattccttattcccttgaacttacttccttggatgtgcatgaagcagcataatgtaatcctttccatgttgattcctagaaaggaaggtcctagagatgcaattgatatttacttgcaaccattaatagaggaactgattgtgccaccggacagtgtccggtgcgccatgcccg

SEQ ID NO: 169467 - DNA, 727 bp, Zea Mays
acaagttattataagttgttagtcttgttgctgtgtagatttgggagaagagtggtttccaagctgggtgtcagggtttgtgttatgctattgcaaatagctaaagtagaaaatttagtgagtttggaagaagtttggggcgctataacttttgatccctgtatttttggtcttggactgctgcaacaaactaatagagctatagttggagaatacttttggttaacagagatgggtttgttgccatgtagatttgtgcaataacaaggcttgaacagggaggcgtagatggtgcagcagggctgtttcagtcaggttcagggtttggtttggaaactgaacaagatcatcccctgctgctcgtccttgttgtgtttataggttgagatgtgtatagatggagatatggatgtagcacataactaaggtctagaggcctcgctgctgggagaaatatcaggttctgaaccaggaatagaatatctgcactagaggcttaactgatgtttgctacctgcagtaaaggacaaaatggatatttagctaggggagcccgaccagaatcaatgtttggctgtgcttgagtgctacgtgggtgtgcaggggttgtgctggcacccagggagctcttcacctctatgaattgtgcaagttcagggacacctgccccaatttcagccactttaaatagcatggtttagtgggcagcagcaattaagtgcagcta

SEQ ID NO: 169468 - DNA, 345 bp, Zea Mays
ctaaaggggaagagaccaatacccgtgaagcttaccgcaccctaaaaatggactatgacaagaaactgaagaagctcgcccccgcaaggaaaatccgcaagaagaccaaaagtcaaggatgtcagactgagcagaaggaagaaaaccctccaaggaacccatccgacaccgaagaggtgtccctggccagccttgatgaccttctcaaggaatttggggacaccttagagaaggagttcgggagtaccctagatagcactcgtgtgtgatgagcttgtggtagcagggtgttgtgtcatgtaatggcttgatgtaatgaataaaataaccagttaaaaaaatggc

SEQ ID NO: 169469 - DNA, 426 bp, Zea Mays
gtgatgataaaaagaatagtattacacaaacaagtccatcattgcatagcataagatatgaaacgttactactggctattacaataatgtcatcacatcacatcattaaaaagtttgtggctctaagccatcaccacatgcatcacaagtcagacgaataataattattacaaaccaggtgttcattacataaattaaaggtgctgccaagatgagaatccttctccccctttttggcaacaagaaccaaaaaaggagagagccaccaagccatagatcaccactgaggaggatgatgcggatcaaagaattgatgcgccaggtgagatgcaaagtgttcttccccagactgagctgggggaggatagctgtaacatcccaaaatcccaacccaggtttgaaaccctaaccccccctaatttcccc

SEQ ID NO: 169470 - DNA, 631 bp, Zea Mays
ggcggcgggttcggagtttcctccccaccgcgggaagttcccgccccgtcttgagcacgagttcttgatggcatctggggaagaaaaacatacttgattattacatgccacaagtacaccacctttattacattatgccagactggtactaattatacatactcactggtacaactcaactttccttatttaatttacataaggaaaccacctactactatactactctagttatcttcatatttggctgctcccgctacactgacaactttgggagaacaatcatctgcgaggttcatggagggaggagctccataaagatccaactccccaaaaggtcctccaccagctgctccagatgctccggttcccattgctgcaacctccggtggcacgttcgggtgcagctggtcgtatagcacgtgcacttcctcatgcatagttttattgtacgcttgcagattctccagggctacgtttagctccatcactcgggctcaggcattcgcctcacaatcccagtatatagagcgtgaatttacggcccagtctatagccctgtctcgttccacgatctcccactacaagcgatcaacctccgctgacagctcagcaatacggcggctatctc

SEQ ID NO: 169471 - DNA, 595 bp, Zea Mays
gtttgaccaaatttggttaaacatttctcaagatatgaatttcttaagttctctgcctgtttaaaaagaataaacagaaatggtttaaaggaaaaagtttttgcatctgggtccctggcgaaagttctaagtttcattgcagagaggtcctcgggtcactattcatatgagtctctgactacgcagaaaaccccctagggttctgctaaatcaaactcgcggtccttcccctaatgaaacattaaccgtggtggaggaaagggcggaggggcttaccgatggtgagactgctctgatgaagtggtcgagggtgtaggggaggtcttgacggtcacaccgatgtgcggatcgtctccggcgatggtcggagtgggtcggtccacgcgcgcaggcgggcgagctcgtctgtggcgagggctttggcctatccagggcggtacagttcaattgaactggttagtgagcttcacgagaggttagggaagacatatgcgcgaggaattggaaaatggctcaccagatagctcggttcacgcgcggtggcgggtgaccgaagttcggcgagggcgattctgcttctccggtgaggcaatgc

SEQ ID NO: 169472 - DNA, 668 bp, Zea Mays
tcctcccatggccagcaagaggtagcgctctagcttccagcatcgatgctcctcctgcaggttacaaaggtcctggactaggtagtggtgcttctgccttgtcagctctagagctcctatgtgcatttagggcagaagtatagggttttgttgctatagtgggttgatattcggctagctaggagttgttaagctggaattaagctagaccgatggggcataacacatagggtgcttaggattttggaacaccacccttgaccccatagaatcgactcgagatcattgacccattagacctgggttcacgtactaaactcacgattcatgtcccatagatgtatacccccttgtaacatattgttttcaagtgtcgacccacaacctatgaccctgttgcttgacccaattgactcaggaacattatgactatggtcatgacaagatttagtgctagcatgtgaagaatgagcataaaaaaacattatggctagcatatgaaattctagcatgtaaagtacaagcatgaacatgcatatgagtagaaatattagaaacatgcttctttcccatttgttttacaaatttaggaaacccttgcccattaacattaattctagtgttttgcttcccatctctttggaagccaacaccatccttgattctag

SEQ ID NO: 169473 - DNA, 596 bp, Zea Mays
tggaatacactaactaagctacaataaagattataaaagtttggccaaaatagtttgttaaaaactccaagcaagccattcaagtggaggtttaatggggaaatctgaaattcagatttttgaattttcagcctctaaaccaaaaccgagcgcgttcaccttgatctctatctcaaaactctaagctcccattgacaaaactgtgcctagctaacccctctacctgatacctaaagatggcattgggacgcgtgccctggacacgtcaaacccgggatcttctctcagtgttcagcagtgagacaaacccaacttcacccctccatatctcttgatccagtcagcgaaacccacaagcctccacacacaaacggcaaaggaatgtcaggggaagagatctctcaacgggatcatggccataatctcaaagatttggagccaatccacgcttgaacacgacctctctctgtgctgcctcgtgctcgacgtcgtgcccagacgccagagcgcgcactggtgctcgcccgcgcacgccccgagcgtttgtcagagcccccctcagccgtgcttgcccgcgcctttaaaaccactcccgg

SEQ ID NO: 169474 - DNA, 315 bp, Zea Mays
gtaacagttgatttggatgttgtggtgctggtggaggcgatagagctaggatttcttggtgttgctggtatatatcgtggttttgttggtgaggatggaagtgttcattgtggaattggtgttggttgtactgatggggatggtaggtgtgggcgacaactctttggttgtcagccagttggtttctggccattcgatcttttgttgctttggtttcagagcaatccctggttgggtgtgccgagtcttcaccatggaaaaggcaatagaatcttcgttgttgcgggcctcgtcctctgcccctgcctctgattg

SEQ ID NO: 169475 - DNA, 666 bp, Zea Mays
actggacttgcccaataatgcaattcacgagtgagaaaccttgcaaagcaaattccatgcgaaatcatggatgaaactaacacagcacatgaagccacgcaaacacaaatcagaggaaattgaaattgaatcaccaaactggaacaaatcataataaacaggcgctggctgtcagctgtcagactcagagctttagcacgagagccaccacagctagagcgagtgacactgccaacccaccggggacggcggctgcgttggacagctgggacgacgtcggcgggttgaccttggagcagacctgcctgatctctccattgtggtgcgtgagcgcgcccagcttgctcatggcgacgaaggacgtggcgaagtcggcgaagaactcggtcgccggcgcggtggcgttggcctggctcgcgacgtaggcgctagtggtggtgtcgaggaggagggcggcgtctgtggagagcaggcccttgttgccggcgacgagggtgtagtagtcggcgtcgaaggtggtgggcgtgggagggtcgaggtagacgagggtggcgttgtcgccgggcttgcactggccgcgaagggtggccgtgtagttggcgtccagcgtggggtcggacgcgccgttctgcccgccgaagttgtacagccgcggcgacaccgtgg

SEQ ID NO: 169476 - DNA, 335 bp, Zea Mays
ttgatttccgtgttggtggcattcttcggcggcggaagcttgcgcccgaccttgtgcttgtacttctgcgaccgccaggaaaaaggcttaacacggcgacgtagaatcaagtctcgaagagagcagaatcggtgggctggtggtaccttgaagtcgacgccgcctcgctgtttctgcttcgccttcggcttcttcgaggaggacgcggcgccgccctttgggcggcccatggcgcaggtatgggaaagtggtgttcaccggcgctggcgcttggaggagtctaggtccggaggaaggggcgggaagtgagaacaggcggaaggcggcggaggagg

SEQ ID NO: 169477 - DNA, 780 bp, Zea Mays
ggtgatgcgcgaaaggacgatgaaaatactaaaaactcttgcaggaaagtggtgatagaaaatactcctaatggaggggacactctgaaagttaccatcactacctccaacgtcgggggcagacgtaggcaggtaaccaggcgagggtccctattctgcgcatcgcagacggtctggcgcatagacgtggatggtccgggacatcatcacatagtccagatcattcaagcggacggtccaacaacgcccaggagccgcgacgaccatgtacctttaaaccacgacaaccagaaataggtacgtggaaaactaacatagtcaagacagctggtcgattggtcaaatctggcctgacctttgatcaattattttctaaatatgtgaaaaaaaaggtcggcccaagtgatcggccaccaaagcggcctcgctcacccactcagaagcgacaacaggtaagaccgattggaccatcgcaccaatcggaaaggtcagtaggtcataatgtccaagtaagacctaacgtgcctgcatggacacgtccacccccatacacacctgtgccatatcattatgcgtacataccgccaccgccatatatcccgaaccaaatgtggagcatgccaccatatccatttgggatgccatagtaccccacttggggggcaccccaaacatctgtatttgaaaggttggcacctccagtacaagaacgattgagtgcccctcaatccggtcaccaagcataggtccagtaatattgccagattattcggccgcaag

SEQ ID NO: 169478 - DNA, 554 bp, Zea Mays
ttgcatttgtcttctccacgatacccttaaacttatcctttcataggggtttggtacaccagccaagggcccaatgatttcaactagtagcgctggtggcgcatactaatttgaatactaatagggattcattcagatgggacttgactgctaatgggttgtttactgttaaatccttgtaccgggcagttctcaacaatggagtggtaattaataacaaggacctttggaaacttaagatacctttgaaaataaaagttttatgtggcacctcaaaagaggtgtgtaaccttaacaatggataacttggctcggagaaattagcaaggtaatcagagctgttgctttttagcacaccggagacaataaaccacctatttttaggtgtacttatgcgtctttcatttgacgtttggtatagataagcacatggttaagacctccccgtgatgtgaatgatttgtttggggactcggcaagggtactgttggtcaaatcacgccgtttactactaactgtagcatttgcaatttgttgggccatttggttaaata

SEQ ID NO: 169479 - DNA, 848 bp, Zea Mays
ggaaaccgataagaacaccggtgactcccgtcgcacggccttgcgccacgtatctgaacacctctgtcgcgtcgccgtgactctttacagccgtcaaatcgtcgccggtgagctcgccacgactgaggacacgaacccactgcgccatgatccttccctgtttccggccgccaactctgcccggccaaattgagcgccaccgtcgaagccctttataaattgatggccggggcagctgcgctatgtcatcttgaagccatagcacccgctcccacccttaatcattcacccgagcccgtgaatttcgaacttcccccaaattcgatccctgccaccgtgaagatcagttcgccgcggccagctcgattcaggttagctcgagtccctctgctgcttgttctagcatccttaggtaccccgcaaaccccttgacccctttaattaaactataccgccacggatcaccgggaacacactcatctgtctgccacaccctcggttcacgtggacagagcttgatagctcaccaaccgtgcaattagcctagggaaaatgctcggagtaggtcggatttggtgtccgccgctcgggaacgccagtcattgccccgttaggccagtctgctagctcgccggagctccaccgcgctcaccgtcgtcgtggactttcccctgcgaagaaatagaaaccggagggctcttctgcaaaccgtcatcgactcagtgtaatagtaatagaacccagttatggttagccaaaaccccgagggcgtttctacaaagcctccaccgcgggcgcgggcgcgccccggtttcctgtgttgttgggccgcctgggctgaaaccggc

SEQ ID NO: 169480 - DNA, 1155 bp, Zea Mays
ctcgagggctcttatgtaaaagataacggtcgaaggggtatctgtgaatattacccgtccgatctgatccttacgcctaggattagatccaaaggtttaagtgactcgacgcacccggcaaccgttggatcgcatatccccggacgagagtctgccacgcgttgatctattttcatccctccgctacctgattgatggttgagattaaaaactacaaaaggttattcgggatctaatcatgtccatccatgaaaggaccgacggccaccaactcgcctccttcctctcagtgatgccacgcgaccccgccgcgctctacatcgcggagtccccatcggcgatcacccaaccggtgatctggcgccctgggccacgaggacaaacattaccgaggtctacatgattctaaggttttgaaccatctcacctgcgcagatgtcgtaggtcctaccatcccggccgcaggtggttccgcggcggaggcctcatgccgacgagcaatccaacgacccttctccagcaccaacgtactccgaaccacctctcggactacctggccatgccccaatgtcgtcatgcacgatgagcaaaggtagcagctctcttctctcccctctcgcttttcctcggtggcgatggcggcagcgtatggtttggctcaaacccggctactcctatgacccccaacatcgttcatattcatacactaaactacagacccgggtagcacacggtggctatggagaacacgacagacggttgcaatagcttgatcttccgagatgtctttgacaagtagatggttatggatcccggggcccacatgtcaccgacgtagcgtgtgggatagagtacgccccagcgggcccgcgcatcagcaggcccacatgggcggacgcgcgcacggtttggcggatggcgaaatacgtaccgggccggccagagatgctgcggggatggtgccacacaacggcgagggcagggcacatgggtgcacataagccgataagcgactgacaggcagcgcccgcccgtcggcgctagactccagggatgaggttgggccggcacggggagaaggcctattgggccgagatgacctagctgaggtaaggctttctcttttgttctatttttatttcttttctaatttgt

SEQ ID NO: 169481 - DNA, 388 bp, Zea Mays
ctcgcgctggcccattgccgcgccttaatctagcgccgacacctgggtccggaatgtcagccaccctgtgctcgctttctctgttgatcactgctcggtggggtcaccatgtcaggcttgtctcccacgcgagctccacaacagaacgccggattcgtcgctcgcctgtgcgcggattccgccgctgcccgttcttccctcccccgtatcacgcgcgccgctgttgggcagttgcaatctcccctggacggggtcacctcgctcgcttgtggagtggcagtcacggcgctgtgggaccgtccggtcggcttcatcgcttcctgtgttctcggtcgaagtcgccgtaacagaaccaaaccaaagctcgcgtggatctcgccggctgttt

SEQ ID NO: 169482 - DNA, 775 bp, Zea Mays
tggaaattaaatggtggtgggtcccatgttccacattttcatctctggcagaaatgatgaactgtaccatcttgtagtggccatatattttcctatgtccatccttgtggttatccatcttgtttgagtcatacaagaaacatagttgttggcctaactgtgattttttttcttatcatttcttatgtgcttactttcaaatgagtagcagggtgaattttacaatgatgatgatataagtttacatccttgacaagttgacagagttatttcatctatttgtgctatgttaattaacataggtattgcttttgctccagttctggtttcagtctagaaactgatcacaactcaagccctatatgtttgtggctttatgttgtacttatgaaggcgaacaaagcttcatttctcatcttgaccacctcatgcctgttttactgttttgtattgcctctactctgaatctctgatatgaatgtgtggctgtttagggggaggtatttaaaggcagaaggatatctgagaaactgcataaaattctctatatcgtaatctttgctttgctcacttgattatgtttagtaccatttggcctcagaaatgccattctggtgcatgcccttgtttgcttctttaacatcttttctggtaacaatatgaatgctgaaacagcatctatgcaaggctgtgttgtctgctggtgggaaaaaaacaccaattgaatatctttacagtaaaaataggaaaaatattctcattttttaagtttgga

SEQ ID NO: 169483 - DNA, 617 bp, Zea Mays
ttgagccgttgaggtatgcactcacggatcatgttttgcaaaatttattcaaaatcctaccgaagcacacgatttcatctgcaatccacacatgcgtcgtccaacgcatcagcttcagacgtgttttagcaatccacacatacggacccttaagaactcgtaccatgacaggtcactaccgggaggcgggaggcacgcaggtcgccctacaggcctacacatatcgttctccctctctttcacccatgacccatttataatcatttatactcccagatttgcttctcaccttttctgtatcagatccagcaagtgcgttagacataacctgggggcagcagaggactagccggtagcgtcaacaggctggatggagcaaacttcctcttctactcctcatctgttgccgctccaattcattccatggatgatgccctcattgtgctcgatgaaatgggcacatggtagagcggcggctggcagctcctactcattccatggatgatgccctcaatgtgctcgataacagccggctgccttgctccactattttatgctcattagtatgacaaacactgaaacagagcctgaggcacacaacaaaacaggagctagca

SEQ ID NO: 169484 - DNA, 316 bp, Zea Mays
atttgaagacactcttgtgaacatgtcacatgcaatacgcattcaaggattatttactttccctggaattaagcaattaacaacacttttattctcggatgacgagcgtatgctatacagattaaagtgggttaacgatggctgcagtctttggcttctcgtaattcgtgtcctcccgcttgagcttcttcacgagaagccccgagaagcacttgagccaggccaaaaggctgttgcttcccaagatgagcttcagaagcgccaccacagccaaggcttcctccccgctatttatccctaatcccttgaatggctg

SEQ ID NO: 169485 - DNA, 897 bp, Zea Mays
gacttaagccgattgctctgttagtagggtatagtggccaccctgagttaagtaagcgtgagcatgtcacaccgccttaagtcattgtcgacttaagccggttgctccgttagtatagtatagtggtcaccccgagttaagtaagcgtgagcatgtcacaccgccttaattcattgccaacttaagccgattgctccgttagtagggtatagtggccaccccgagttaagtaagagcgagcatgtcacaccgccttaagtcattgccgacttaagccgattgctccattagtagggtatagtggccaccccgagttaagtaagtaggccaattgacagcgaacaatttgagtgcctttgaagtctttttattgatgatatatttctcaatttacagaatacatcgtcgtcccaatagcttcagggatgtagctaggggtaaaaattcctgaggtgttctatgttccatgagttcccaatttccgtgccgtccatctgagtgagacgatatgatcccggccgagtgactttagctactatgaatggtccttcccataggggtgacaatttgtgccgtccctcccccgttagaatttggcggaggacgagatctcccactgcgaaggatcgatgccgtatggccttatcatgataccgcctcagagtttgctgataccgtgccgattgaatcaccgtgttcagtcgctcttcttcgagtacatcaacatcctccagcctagtagcttcagcttctgctatgttttcaaagattaaccttggtgccccgaacctgagatcagcaggtagcactgcttctgaaccatagaccatgaagaaaggtgtttttccatgcagagctcgactaggttgagttcttaggctccaaacaacatacggc

SEQ ID NO: 169486 - DNA, 653 bp, Zea Mays
ttctctaccagcttttgataggagcttgcccttccaacctgctagtctagcaccaatcttatcaattagaggctgcacctcaatccgtcgaagtttcctagagtgtaaaggaagacccaagtattttccagggaaggtcgagatcctcccgggaaaaagatgaatgagtgagctgaccgtatctgatggacaacgaattggaaagatttccgtttttgctaggttaaacttgaggcctgagcaattagtgaaaattgtcaagagttgtcgtaaattttagcgcgtaagatatggatgatttcatttgttgaaatctgcatgtcttgtgttgagccgggagtaaaatatagatatgtaagagttttacttgcattctggagattatacaaagtgtgcatgtactgctgtaccacatctttaaattaactgcaacacctagtataaatttctgtacgttataaatggaaaaacagaagggcaggtacaagagtcccaacattgattgttaagtgaagttcatcattgatgtacttaatactcatgacttggaatttggtggtactggtgccaatattagcacatgctatgggttgaaatgaaccaatagatctcaatctcaggcatttagaatttagatgtgatgcttacacggt

SEQ ID NO: 169487 - DNA, 343 bp, Zea Mays
aatccctacaacatgattttgttaaataatgaaaggaaggggacaaattagatcaagaaaagaaaaatgattcaaccggctatcgagaatttagccacaaagacaccctaagcctctgaccgctattaaacctaagcatttgcaacttcagcatgtcattgaagctgtccttccaagagaggaaagaagtggcaatgttcctgaagatgaagtcgttcctttgcttccaaatgcaccaaactatcactgctagaatatccatgaacaagttgtgcccaaaggcaccccttgcagcctcaatcatagggaaaaaatctaggttgtggcaccaatgaatttcaac

SEQ ID NO: 169488 - DNA, 320 bp, Zea Mays
ggaagacgggtatgattcgggtggcgagaaagaacacagagagaagtctattcttgctcttgcccctttcaatccggcgcactgggtttaggacttagaacacccctgcgcccctgctacttccggttctggtatacaccaaggcatgcatacatagacatatacagttactcctacttcctaggcctacttgaaagttgaagcaaaatagaaggctaacaccaggtttcatttgtagttgatagttgactaagtaagaagcctgatccactccaaatagaacacccgaattgcagaagtacattcttcgtatatattgc

SEQ ID NO: 169489 - DNA, 540 bp, Zea Mays
tccgatcgatcgactgactgactgattgagctgccgcatgcccagcaggccggcccaggcccagctgccaggcctggattagattggacacgacacacgatcgacaaaagtgcgtgggggccggggatggatggacatggaccccgacctatatgcatatatgcttgctggatgctagctgaatagcatagtacaaatgctcatggattggatccacaggttcacagatctactactggtaggtatcatctatactacgtacgcatgcagaggccgggctgggctgggctgtttgtatccggctgattggttgctcggttggccacatccagaaccgccagatgcattgaccgtcgatgagcacttgattggtaaactgcatgtcacggttcgaatttgtatacgcgggtgcagctcaggattaggtcaccgtgcattcggctgcatcagcgggaaagtgagatgcgcgcgttcgaaccgatgcaggccctcgtgagccaggaggctaggctgccgccaaccaatcacgcgatatgtgtt

SEQ ID NO: 169490 - DNA, 605 bp, Zea Mays
gtcggatggtgtattcaggctgcacagttgattcctcttcagctatcgtagttgcctcctcttccaaatcttcaacttgttcttcttatttatccttggatttatcaggaatggtgtaaaccttcgaagctacaatcttatctgaagcagggtcaccttttagagcgtcatctagtttttgcgcaagttcaatttcgacgttctcaacaccaagtgcgctatctctctttggagagggtggagcaaccttcgtctagaaagattcctcagtctttgtgaacttgaggattgctctcaaaatattatccatcctcttacctttccgaggtgtcccctcataagtcggcttcgactctggtcttggccttggtgcaagctgcaagctagccaaaggaatttcatcatggatgggtagctcaactacctcctccttaaccttattctccttctcctgcaatgaaggtaaaactattataaaacacttcaaggtaaactcacatgtctcagagaagattagaggaaaatcattaccttcggtagctcagaagaatcaaccttcgattcgatagccggtgcgggctcggcagcgatctcctcaataagaa

SEQ ID NO: 169491 - DNA, 348 bp, Zea Mays
ggaagaccttcccaaccagggttctgtatgctgcgtgtatcccacattgtccagcatggacctcttctagcagctgcttcaatgtatttgagagaatgtatttcatgaggactcccgatgcgccccttctgtatagcatctccccaatgagagtataatgagctgactgccttgcaattcgttctgctgcatttttgtcatctggttcctcctcattttttatgtacctgatgatcggctccctccagtcatcagaatttgactctggttggctcagagtattgcattcttctacctgatctagtgaaatgctcgggtgcggtttttcttgaacaaaaactccaggcg

SEQ ID NO: 169492 - DNA, 323 bp, Zea Mays
ggttgccctaacctaaagaccagaaggaggaggaggaggggcaagcgcatcaggtcgagggtgagcagtaagagcaaagacataaagggtattagagtcagtctcagatccaggatctgatgtagaagttgcagctggtgatgactctgacgctgactgtgatgcctgagctgttggcactaaagctagcactaaaatggtcactgcgggggtagcaaccgtagaaactggtggctgagtcagagaggtgagaacgacggacaaaggtatgaaactggggtcctgactgaatgcctggtaccactgaagtctaaagaggtgat

SEQ ID NO: 169493 - DNA, 571 bp, Zea Mays
aagacagcgcaacaattacttaaagacgcagccggaataatgttgattgaagtctatcattacaaccacactccgcacaaagccgcccacgtacgtagccggaacaatacaagcgtacgaaaacgaccaacaggccacaccatcattacaactacatacacacggcaagggcatcacatattacattggctcaacctttgggatgatacccatctccctgtagttgaacatcattatcctccattcctcaccctcaaaaagatttcgtagctcgccctcacctacactcgccccaattggcgaggataacaattctcgcttaccagtcccgtccacgcgaagaagatcactctccatctcactacgatgacgcctaccacttcgcgacaattcactcactctccgtttcgccaccgccctatgccgcttatacccagtactcgcgcccgggagcccctcggaaccctccacgcacggcgaaggctccgccgcaaccacatctaacgctgcaaaataatccaagtcctcatctgaagactcctccgtccacacaatcgaactcccagaatca

SEQ ID NO: 169494 - DNA, 503 bp, Zea Mays
caaaaattaaaaagcgctgccaagttgagaatctttctccccctttttggcaactagcacccaaaaaagagagaaccatcagccacaaatcaccactgaggaggaggcagaccaaataattgagtcaccaagttagccggaaagttttcttccccaggctgagctgggggaggatagctgcctgaaggatcctggggaggaggatatgaagaggattgacccggatccccctagtggggaggcgggccaaactgctcacaatcatcaaaatattcttcttcttcatcatctttagctgacataaagggcaccccataggcctgctggtgccattcattgatttctggtggaggaggatgaagaggcacatcaggcgagcggggagcaaatggcatacccatggaagaagcttgacgatggaggttgtcgtcagtctccccctgacacctagccagctcatgcgcatcggaagatatgtttctgcacatggaaaagaatgccgc

SEQ ID NO: 169495 - DNA, 661 bp, Zea Mays
aattttttattttggtcgttgttggagcgaaggccgaacacatcctcgatcagactaatctggctacaatcaaacatgttttggcgcaagtacaagtagcgatgggtacttcgactcataccagcatcgaggatttcgattgtggccttcgaaggggacgaagcgaagggccacactagtcaaggggggagggctcgctgcagctccacacatgcgtcccaaaggctcaaactcttttcctggcagcgaagtttaagtcccgacgaagtcaagggcacaacttcatggaatcgaggatgcaacacgcaggtgaaggccgcaccagattacagtgagaccctagatccgcctcgtcaccatctaggcccatttgtaagacccttcatgggtagattttggagtatgtctaagtcattgtacttcactccactgtgatgaccccgttgaggggaatattccgagaatgtagaagataaccaggggtacaacggtactttaggacccacctacccgtcggttacctataaataccccacactatacacgagtgggacacgcataacgagacgctacagttcctacctattgtttcgttgtgcacctgagctctcctattccctagtgattggacccacctgtccacgtgtcgcctggtcccaac

SEQ ID NO: 169496 - DNA, 785 bp, Zea Mays
gatggtgattctagctggtaggggcaagtcgagcatataacagagaaggacgaactgatctcttcgatcatatccgaggcaatctacttcaaacgcttataacaaattgatctaatcaaaccgagcaagaagtagatccatctgatgaacctagatccagacctaaaactacgcacagcctgcctctgataccactaaaggattatggggaggctacactagcgcaaaacaaaattttcaaccccataaaactaggaactactacgattatagatcatggaattaccactagacgtgttgggcagcggaagacgtctcgatgtagacggacacgtcgagtagtgttgtgcagtcgccagtgaccttcacatcctcgcgcggttcgtcctagtgctccagatgcagcacctccaaggtatccacacgtacagcgaggaagcgccacgttccgaactgctaggttcgcgacggtggccaggcgagggcgaggggcgggcgactgctagtttactaatgtcgaattagggttctcttaaccatgcacctacccctcattatataggcattctggtgggtttctaactccgaggcccgtcaataaccctaaagccttgtctaattttagatctaatccgagttaggattccttccccttaagtgtgtgacccaataggttcatgcagatatagacatggcccaagtactcttgacagcgacctctagcaagacatgtcaactcctatgtgcatgtatagatcatatcagacgaaccattgcaacattat

SEQ ID NO: 169497 - DNA, 287 bp, Zea Mays
cggctatgctcacaaaggcgttgcgcacttggtctggtgtatttgttatgtcggtccggcgcgcatgtagtcggtctttgcgcggacggtttggtgtagtcgttttgaggaagacttcgatttttcacacttgttgtgcttggtccggctgcacccttaggtgacttttgcacggatagtctttttgaggaagacttcgatttttcgcacttgttgtgctagtccggcggcacccttaggcgacttctgcatgaatagtatttttgaggaagacttcgatttttcgc

SEQ ID NO: 169498 - DNA, 357 bp, Zea Mays
tagagcgaagttggccggccagaacaatgctaggcgagagagggaagtggtggtgataggaatgtgagaggagagggattgttatctgttaggtcttatgaatatggaggaccggccggcagcaaacaaaaaagtgaacactcatcatagctgctgttgggtagggattcttttccatctcgcgtcctctggttgagagatatatatgtctgctgctctcgctatatagagggccagcctgccctgctagctagctagctagttcaagttctaggcacggatcggatcggatcgatcaacattaatttaattacttaattattagttccagacgaaattaatatatgttaaacaaag

SEQ ID NO: 169499 - DNA, 413 bp, Zea Mays
cgccagcccaactctcgcgccagccctttctgtcgctgtcatggtgggacccgggatgtcatagtctcttgtgtgccctcgttccactgtggtgtgggccaaccttgtcaggcttatccccttcgttgttcctgcacgcccggtaacagaacgcacgtagctcgtgcaatctcaaccacatcccgctttgttggcttcgtggcctggtgcataaaggcggagtcttgctcccctaactcgtccatcgggtctagaaatagatggagttctcgagcccctgcgaccgtgaacaatggcgggtatggtgggaatcactgctgaaccttgggtcaatcccgaacaaatcggtggccataacagacctccgctccggctcggactccgggcgccgcctgggtataaaaatcgtgtcg

SEQ ID NO: 169500 - DNA, 418 bp, Zea Mays
gacgaatccggcttcactgcgacccacgccagacatccccaatgtaagtaatacaaacgagctgcaatctcttaagaattatgtagatgaacagtgtgagcaaatgcaaaatatcataggggatatgcaaaacgactataggagattagcgcgtgcatttgacaaatctagcattgcaaatttcccatcacacgaggtagaattagggggtaatacgcgtaatacatcggctgtaggttgtcacgaccagtcacaacccctttatgggatgctgatggacacgtaccctgagcaaccgcaaatcggcagcaaaacagccgatctgcacatgtccggaccgtccgcgcgtgatcgcggaccatccgggccagccacgaccgggcccatttttaatgaagtacccaggcatgcacccgag

SEQ ID NO: 169501 - DNA, 1388 bp, Zea Mays
gtggggtccagtaatcccctcgatgcagatgactggcttcacacgatcaagaggaagctggaagccatcagatgccccaaaaatcagtgtgtccaactggcagctcatcagctttcaggaatggctttagcatggtgggacacctttagtgaggccgtcggagatgctacctgggcagaatttgaaacaacattccgtgagcaccatgtaccctaggggatagttcaactcaaggaggatgaattccgggagctaactcaaggcgggagaacagtcagtgagtatgtgcacaagttcacagagttggcccgttacgcgcctgacgatgtcagcaccgagtccaggaagatggcccgttttctgaaaggactaagacccaagcttaagaccatcctcaccagccaagacttcctcaacttttctcacctctccaacaaagctatccaagtggaaagggcaaaagaggaagaaaaagggcacctcaagaggaaattccaagttctccgagctcaacagcaagaacgtcaccagagagctcgaccctttgggcttccacccaggggaccaagcttcaataaaccatctagacccactccatcgcgctacagtcagcagagtcagagctcccttcaggaaccctccgttgcaagcaaccaaccgccagcaaatgcctgttggcactgcggagaccccattcacttcaagaataactgcccccagttgaaggcacctggacctacctactccaactcggtgaatggccccaagattccctcggcacctacctctaaggcacctccttccaacagtcagcagagcaggactcagtaccagggcagagcacgagtcaaccacgtcgacgctcaagaagcccagcaagccccgggagtagtgctcggtgagttccttgttgaatttactcccgctactgtgcttttttattcaggagcatcccattcctttatagccactaagtttgtggaaaagcatggcatcccctctacacccctagctatccctttggtcacccgaaccccgggatcagacctcctatgccaactcaggtgctcccaagtcagaattcttttaagtggggtagtgttcctggcagacttaaccgtcttgccatcccgagggattgatgtgatcctaggaatggattggctaactaagcacaagggtatcatcagctgcgcaagtaagaccgtccttctcacagatcgccaaggaaaatcagtttcctgtcaagcccagccgcccgccaacgatccaatgatgtttaatctagcagcagaaaacatgttcgtaatcgaagagtttgtggatgtatttccggaagaattgcctggaatgccaccagaaagaggagtggagttctatatagatct

SEQ ID NO: 169502 - DNA, 1013 bp, Zea Mays
ttcaaactctacttgaatttactttgaatttgaaataaaaattagaaaatgaaatagaaatagaatagaaataagaaaaacaactttggccgcttcctctctgcccagcccaaccatccgcgcggcccatccagctagccccattcgcttgccgcaccatgacatgtgggccccgtttgtaagggtcatcttcctccagctgctggaagtacgagcgaaccggacgccatagctgccgcaccgcagaccccagtttgccaagtctccttctccgcccgaatcacgctcaggccatgctccagccgcggaccccctccagtgccatgtgggctgcagcttaagatcactcaccacatcggctggcacgtgggtctcccgcccgcatcgtcttcatcgcgaggccacacgtaactgaatccgcgtatctgcagggtctgctcgactgcgtaaccgaatcatgccatcgggtgctagctgcccagttcgggtataattatcgatccctttcttcgcctcgccatcaaccgacgagaggagctaagaaccagtcgtcgcgggagagagagagagaatcgggccgagggggtaggaactgtcgcgtcttgtcttgggttgtgccttgtgttgcgggattacctacgccgcgccgcgggtccccagcgagttgccggctgagggcacccgcagagcttttgggcacgctcaccggtactggtggttagcgtcgcgccgtggaacggacccatcaacatcttccttacctgtaagctaggcttagtgggtagaagctatagcacctttggaccgcatgctgcaaatggcgccgccctggagttagaccggtaggaggtgaggagagagggtgtcgagggtagaagaagcaccctgcaccgttgcatctggatggttggtctggattagaatgctaaataccccttcatcgcattatatatgagccgtaggtattggaacgattgggcaggattggatcgtggcatggttgtgtgtgggcc

SEQ ID NO: 169503 - DNA, 1070 bp, Zea Mays
ggctaatgagttagtctaagataattatattttatgtattcatcgttggtgtaggttagagtgggttaaaaatataaattatgcgacatgttattggtgtttgaagacgagatgtgcaaagaatcagtttggtgtttcacccgtatagtcgataaatgttgttataaataattgcgctaaaatttggtcataagagtgcagtgggcacgtggtgtggttggatgtgataagtagattggaagtgtgggtttgtctgagcacgatgttgtcaaacgtgtatgtcgtaatgcgttatagtagtgattgtgttaagttaatcggtaatgtcttgggtgcacgccacaatatggttgtatgcaagacagggtaaaataaagtgtgctcgacataaatgtttggtcgttgtaggtagaaattgtcttggcttaagtagagaggtgatgacatgccgtaagcagtcatcacttcctctataattataagtcgagtctatacgcgttaggcgttccttaaattgtgcttcacaaataagtgtatgattgtgtttatgacttgaatagatgtcttcgagtgaactaataggttcctaaggcaattatgtgtaaggtgtttatagtgacgctttatcccgaaaggtgttaagtctgcgcataaataagagataagtgtattttgtgtagtgtggattgattttgagtgcatgtgtcgcaagaaatgaattagtgcgcatataggcgatgaatgggtgtgatgaaattgtgacatgccttcatagtcatcatgtcgtatgttggtgacctaactgaaggtcgtagagaagggtcgattacctatgtgttattattgtcaccttgcgattctgtatgaattgcaatgtgaagtagtaggctctctatgtgatgctagatgtctaggtagactttcgtgaattgtggtgctcggaccgtcaagatgaaggttaagtcggtcgatgccgattaagtagttaaaatgattaatggaataatcatggggttaaaactagaaactagtgttctctcacccgtttgggatgttgtagcccaattgcg

SEQ ID NO: 169504 - DNA, 483 bp, Zea Mays
ctgcgtttagttgtttttgtgggtgattcggaatgctagggtgccgtttggccatgccgccgacaatacgccgcggtggcgcctgtgcgccatggtggttcgagtagcttggggggagagagtgaggtgatgggcggctggtgaccgttgatcttgtgactgacggccagtagtcgatcctgaataccgtttgagcagggtgaatggtggtcgtcaatctttgatcgggtgggtctgtgatggcaccaaccattttgaatcctaaccgtgaatccaagatccgatggtttgcgtcacgtaccagttttctggggcgaggttatgatctgggtcgtcgatgcctgattgtgtggcccaagacgtacgcgcgttattcggaccgaagcaaaattgttaaagagcccctctattttggaagaattgacccgccatccacccagttcatggaagataatagtggggccctcggtttttacaaaacag

SEQ ID NO: 169505 - DNA, 742 bp, Zea Mays
tcttgttgcattttaaagcttttcttagtaacaaactctataaaaatgaattaaaagttagagtacctaagttaacacgaagatatctgcgttaacttgcaagaagaatcttactttgaagtttaagtaaaataaatttcctatgatatgatgtagcagctgatgtcctttttgagcttcaggaagccaatactcttagacatggtacctataattttagcaccggtgcggtcgcggatacatcccacaacttcttcatcgaccccgtcaaagagcattgagcctggctggtaaccacaggatattggaaattcttttagctctgacatgtcctcttcggagagctgttagccgcccatgtgccgtagattgaaattcactccttctgaacaggtttcttcaatcttcttccccttgtcagaagctactatggctacctccttctccgcaaccacatcggatatgagtctgtcaatttcggacaaagtggttgtatgattttcgtctttggttgcagcagtagctttggcatcagtcgatttagcatctttatctgttgaggctgagggcggggtctgttcaatggcttctagtatattcatcatgcgatgtttcttctggacccgtctctcccatcagtagccgaagagatttcctttttctgtaagaggctagtcagttccaaccccagaggacttagcggtgcgaacgggaaagactcagtcattaccttcaatatttc

SEQ ID NO: 169506 - DNA, 663 bp, Zea Mays
gatcgccgcagagagcgagcgccaccgcccgccaagccacccgagctccggccaccgtggccagcccacccctgccatccccagcccgcgatattggctcggttagcttcgccagagacccgtgaagctccccaagccctcagacccagcagagtctcaccggaggaccctaatcgcctcgccggacttcttccgctcaccggcgaatgtggatcgggtaagtctctaagccattctccaattcctcctgtgtaccgcctctgtgtcactcaatcaagccttccgagccaaccaattgaactgtctcactgtgagcaggccgaaatactcgccactgacgaacttcctcgcctgcgcacgtggaccagtcgacttcgaccacctccgacgcagatccgtacttcgacgtgaccaccgtaacctccctgacctccccgatctcgtcgtcggtaagcccctccgccctttcctccgccgcgggcactgttccaataggggaaggaccgcgagttatatttagggttaccccaaggggttttctgcgctgtcagagactcagtgcaataggaaccagaggacctgtttgtaaggaacctaggaataaaataccagggaccccagagcaaagtagattttccttttcattttgaatttcaattcttt

SEQ ID NO: 169507 - DNA, 473 bp, Zea Mays
ggattttttttctctccttcacgtctcatctccaggagatttttcccaccgccctcactagtttcttatccccacgtcactaccttctattcttatctgttgctcgtcctactcgttgcacggagctagaaaaaatcctatacgcgctcagctgccagggatatttttcatcacgcacgcatgcgctcgcctctggccatggcgttgaagctcagctcggctcctccggccaggttcatctccctgctcccttggactcttccagacctccacgccggtgttccttcatgtgccggtcagccttggtggctatcgttcattcctcgacgaagccaagtctagccatcaccttcctgaccgcgcgctctttctccctgcgcaggatgccgccgaccctcgcattggctgcttttttttttgtagaatcagtagagatgcccctgttgagaaatttattaagtatgcgaaacgaa

SEQ ID NO: 169508 - DNA, 752 bp, Zea Mays
aatacatacacagagaattatgacacagaaaacgagtgatttggcgatatagaggtcaaacgacgcgaaaacggcgtttgaacgatgaatagtgccacaggaggtttgaaattagaattcaggcatgaaatgacatggaattgagtcgatacttcacaaatgggtttatatgagtaaatatgagtgaagtgtgcgcttggtttgattttaggcgaagaaagtggaatttgggcacccggctcggaatcgatcgctagatatggggatttgtggaaatttggagcctgggatatcagattggcgtgaaatttggcgaatatgttactggaggtatcatgaaggtgcctgaaaaatttaggatcgattggagcaattttggctggtttgggtattttgtcgagcacctggcgtgtggggttctagggttttggtgaaatagccattttaggtggtgaaaccctccctaagggagcttggaacctgcaggggtgttcaagtaggaactatggtactacaacatgcatagggattcacaattcatagtgatttgaattgagcagtagaggtggaaaaagggagtggacatacttcaccactgaagaacagagagagagggaagatgcagtgaggctcaccagggaagaaggaaggcagagcctgagctgaaggagatcaccagagcacggccgccggcgatcgccgccggtgagcagagggggaagagtcgccagagagcagagagagccagtgag

SEQ ID NO: 169509 - DNA, 547 bp, Zea Mays
accttgtcgaacgatggcggcaggacgggagcgatgggcaccactggagcctccgcagccagagccaagggtggacccctctagtgctctggaaagagagaactacaacttgggtcggtcaaaagtttctttgcaaaggatcaaagaggttgaggcattaggttgtttccctacgagggctagcagagttgtgggattggagactgttctgcgacctgtggatgagatggtggtattcgaggatttttaatgtaggactttggtttccctgccatcaaatggtggttgatgttctggggctttgagcaagtttgtgtgggcagtaactacctatggagggactctatctgcagaggtatttaccaagcattactgccttcactggtagaagaaggttgttgatggtcatgttgaccaatttagaagttgtacatttatgccaaagagtgggaagatgaagggtctgcaatcaattcttcttgtgatgacggaaaaatacaatagcaagtttcactttgttgtgctcttgatcagcatgcagagcaga

SEQ ID NO: 169510 - DNA, 425 bp, Zea Mays
ctggaagcaagaaatcgatgttgtttttaagacagcggtgatgaggggagaaaaattatcatgggtcaggtaaggctttgggtgagcaacctttcctgatgacttttatatatactcgttggtggactgaccttggacaagtatgtcggcgacgacgggtggaatgggggacggggtccaagccccagtcagcctcatgccatcacctcctccgcgaccgtggcaggtgggtatggcttcttctctggtgtgggaactgtcgatgcgaagggttcggcactgatgggactctgatgggacgttgccatgcccccgatatagtcgctgcaaacaatgttatagggtgattgcattctaggaaaggacgacacttgatgcaaacgatgttattaatcttactccatgcattcgagataaaatttctc

SEQ ID NO: 169511 - DNA, 524 bp, Zea Mays
tgaccaagggctgaagaggccgactcataatgagttggtctcgagtttgcgatgatctccccctatgtataaaagtgcggttctttgctggcccactgttgcattcttttgtttgcgcacttagctgctcgctggcattttagaggtaatgcccgagtgatgcttgtgatctccactttttcgagttatgatctggcacttttgcgcctgacttatcgagccaattcatatttatgctgatgtatcccctcgagttctgaaccctaattctcgctttttcctccaccgcttctctgtttcctgagctcttgagtccgctcgcttcgcttaagggatcgagatggctcccaagaggaagagatagagtgttgatgttccaattattctgccaattgatcctaatagccaacttccatttactggcaaccacatgtctgttgtctccgagtctgacgtcttgcaccttgtcgaaactggtgttcttccgccaaaggaaccatgttcttggcgaatctggcgcgggg

SEQ ID NO: 169512 - DNA, 632 bp, Zea Mays
tgttaaagcagataaaatagacctcaaagtcctgaaaagaattctggaagctttcgaaggttgttcgggtctaaagatcaattttgaaaaaacggaaattttcccgatacggtatccagaatctttatggccaaatttagtggaagttttccctggaaagtactcaaaattccctggaaagtatctcggtctaccactccactttaggaatataaaaagaattgaattccagccaataatagagaaaatcaataaaaggctagccggctggaaaggtagacttctttcaaaggcaggtagggaaaccttggttaaatctgtgttgaccgcgcaaccgatttatctactaactgttttcccagctcaaaaatggttacttaaaaggattgataagatcagaagaaatttcctttggaaaggagaaaatatggactcatgcaaagggggtcattgtctgatgaattgggctacaacttgtttaccaaagaataagggggggcttggcatccttgatctagagcgctttgcaagagcgttaagacttcgttggctgtggcttcggtggacagataaagataaagcatggactagcttgcaactcccttgtgataaaacagatgttgatctattca

SEQ ID NO: 169513 - DNA, 949 bp, Zea Mays
agaacacgcttggctgcgggcgtcgaggccgcggagacgacgccggagaatgccctgtgggtggcgacgaagccgagcggcaggaggacgagggagaggaaggtggcggtgagggggaggggaagcttggccgccgccgccactcgcttgggcttgggcggccttcgcattttgtgtgtacggtgcgatctgggcggtgacgtgacggtgagccagtgagagtgacaaggacagtgaggagcgtcagatactcggattggattggagggagcccaacttttatagtttttttatagcatagtctagatacgggacatacggtatatctcctctaagaaattagaaatcgaatttaattgaagagtcatctgtagctctgatcaaatgtcgaatgaggacacttttggtgtggctgtgacccgattgcgcatcgctcagtatcccgcgtgatgtttttggataggacgacgttgttgatcacgactcaatggtatatgtggaagcacatcggaagacaaaatgattatacaagttcgagccatcgaaatgcgtaataccatacatcatattggtgctgagtactgagtttgctgatgatgctcgggttacaaatgagtaatggatggtggtgggtgaattctctatgtcaatctaatagtagtgaggttactatgagagggatgatcagatgatgtcattttgtagagtacccccagccttatataggtgaccggagatatatatccctttacatatgagactactattgtgcgccagctctttcatggttgttaccctccgagcttggcatgcaaacaatccgctatttgttcgtacgcagggcgcattattcaaaatcttgttggctcctatttgatacattcacgtggataatgccttaatgtcgtgctctccagaatccttctagtggagttatgttatctgcttc

SEQ ID NO: 169514 - DNA, 766 bp, Zea Mays
aaccaaggaaacttggggagtcgagcgccgccattggggatataggccaccagagcattaggggagggtacactgctgtcgcacctgggagtcccgtctgcatcgcgcctggtcaccggaggatcgtcgtgggagtcgccaaggctcaccaggggaattagtgaactcgttgtgtgtgggctaccgctgggggccatggaatttctcatcggaattcaaccaagccgcggaagctgcattgctcatgggcacaactatagaagtcgcatccaccccctcggtatgtctttaatcatgttcgccaagctcccagaatcgtgtagctccgttcggttgaagaattagggtcccgagttgcgagttctaatgtctccggtgggtttcgccgccgcggcacggggtgacaccgccattcgctgtattggcggaggggcagagaagaagatgacgcggggaccatcgatcgcacaacgaacgagttggattagatcggagacattcttgtcggtgttaatattgtggtcgtctatttcaggatgtgcggtggagatgagatcatgctttaataaaatcctgaccctaggatccagattcgtggcccgagatcacataccggttcaaagtggcacctaatataatctggaccgggagttttggatccaacggccaggccgcatggtaaccttttggcagtgccaactttgcaaaagagtccctggaaggttatggaatcaacccgccgtccacaacaatataaagatcatta

SEQ ID NO: 169515 - DNA, 437 bp, Zea Mays
aaaagccaatgtggtggaagatgcattgagtcgcaaagcttcctgtcatagccttacagtaaggacccctgacatcaccctgtgttaagagatggaaaagttgaacgtgggtatgatacaacacggaactttgacacaattaaagcttgagtcagttcttctacagagaattattgatgcccaaagaaccgacaagggtatgaagcatattcatgagaaaatagaagtcgacaaagcaaattgcttcagaaaagatgaccaaggaataatatggttcaatgatcgcatagtggtgcctaaagatgctgaagtctgccaatagattttggatgaagctcatcttagtcgatattccattcatcccggaagtactaagatgtatcaagacttaaagcaacactattggtggacaaaaatgaaaattgaaattgcacact

SEQ ID NO: 169516 - DNA, 498 bp, Zea Mays
tacaatgaatgtgtgtgggtttgggggtggggtgcgaaatttaaaggccccggataaacaaaaaacccagcactagcccgtttaaccatgggccgcacagctggtgccctacccgactgcccgtctagggatgaaaacggacggaaacagacggaaaaacctctctcccgtttccgtatccgcattttatcatcggaaacaggatcaggtccggaatagtcgggaacggaaacgggagcgggataaacggaattgcgaaaacgaacggaaacagaaatactaacggaaactcataatttaatacaaatagaaatgttattaatgtttgactagtgattgattggcagaacaataacataaaacaaatagatatagagaggcaacattctattgttgtttagttactaaatgtgtacatttagctacatccgatgttgtttaagactttagatcacttgtcatttgaaaagagccggtggttacaatggccaattgtgc

SEQ ID NO: 169517 - DNA, 540 bp, Zea Mays
gttgatggtgagtggcgggcacgcagtgaggcatcgcttggcacgacgagggtggcctaggtgtggagcggttgggcgaggatagagagggtgtgggtggggctaggttcaaatggggctaggagaggactattcagcggggagcatgacatgggcgtgttcatgcgcacgaactgagcgggggcggcagttgagaggaaaggggtggggctgacatgcgggcccatgccgtagcggcaaaggtgtggaactgctgacgcacgcgggtcgcggtgtcagctgggcacgcatgcgtgacgcttggtccacaacgctgcctactagctagcatgtgggctggctgggccacgctgagagggaagaggggggacgggccgaagagttgggctgagaggggagggagggaaagagagtttcgccttttttctatttttatttctgctttcttttcctatttgaatttagttttagtttttgaattcaaattcaaacatgttttgcaaatttctattgatacccaccaaagcaaaacatcataca

SEQ ID NO: 169518 - DNA, 621 bp, Zea Mays
aggagtttaggtgggtgtaatgggagaaaaggtcatcaaagtgagtgtcaagggtgtggagatatccggccatgtagattatggtggggtcatcctcattatgctctcttcctcacaaagcttggagtcttttcctccaagcagggttgtttttgttgctgggtgggaagtagcgaagggatgtctcgatgacttctttgttgtagttttggcaaaactggcagagggcttttagggcagcattttggcatgtgtcttggaagcggtggctagtagcggcgatctggaaagatggtggtttgggtagcttcggctttccccaggtagactaccatggagcacttctcaactccattttcttggtgttccttccagacatactccggcttctttcgaactcccagacgcagcgcacaactctgaagaaggtaagggaatccttctacctctgagcaatatgatgttttaaggacaaaggtggcctccatctggtagcaagagaagaagagttgttaatattggggaaagaagggaagattgtttaagaggttaagaggttttcttttgagtgaagctttttaggtcagcgctgcgatctacggccagtcgtatggttccgat

SEQ ID NO: 169519 - DNA, 500 bp, Zea Mays
agatcttgcggggaagcagatgcagttgcaggggaagcttatcaccgtgcctgtagccattgcaacgtggccggaccgccggtgtcgtcgtggacactccggcgatctcaattatgccacaccgtgactcttcactacgcggtagtaaccgtggcacacttaggcttaccctctctgaaccactgcaccggtgaacgccacgattgcaccaccagtgatcttcttcctctccgaccaccagcgcgccattccaaaattgaaggccaccgctcttgaacactataaattaagcacaccgctagctccgttaggtaatcacgaagccagagcacccgctcctgcctccaattagccaccatagctctctaatttctctttctccacaaatctgtttttcgccaccgtgaaagaaccctcgccatggctagcttgttccaggtctgttcgtgctctctattctcccgtttcagtgtcctttggttctcctgatgctcctcgac

SEQ ID NO: 169520 - DNA, 371 bp, Zea Mays
cgggagctgtccgaataaacgagagtgctagcaatcacatgacgcagccaagttcgtacgacacaaataatgcgtcgtgttgccaggacgcagccaatgcatagttgatgccataacttagccgattaataacgcagcctggtcgacgtgtccgagtacccactatacaatttaatcactcatcgtgagtttaaaagctcaacacaatataaatatttagagcgatttaagaatgcacaatatatccttcatatctttctgctaattatttactacggaaataaaagcagaaaaataataccagatttaatccataaacataacacatctgatgtaaaaaaaatgttctcatgtttaagcacacatttttc

SEQ ID NO: 169521 - DNA, 667 bp, Zea Mays
gccgtggagagggtagagggcggctgcccaaggggaggagaggaagagggagggggcggtggccaaaggggtggaaaggtaaggggctgccacaattgggaggagaggggggcaactagggtaggggagggaggctcccatccatcggatcgagatcaaagggccgaacatgctctcccatctgagctcccgaccccaacagaaaaaaatgccaaaagatctactgcttccctgaggaatgcctcctgaaactccaaaccccaatgccatagaacatgaaagaaaagagaaagaaatttagcttcttttcagaaaattgggatatcacagacgatcaccgacccgatctacagctcacccgagggctagacgcccagatggtcgtgcagccgcccctcttcttccttttctctctactcagggtaatggtggctcacggtatgcgcggacgggtacgaggaggtgctttatgtggttgaccggggttggaccgagggcttgggtggttggacgtggcctgagcttcgcacgatcggtgcgcgctccccgccatggatctcgcgcaagctgttaccgatcccagggtgaccgaccactgggcccaagttgtcagcgcaacagagatgcatagcccgagcacccgaaatcacagacagatgggcccctc

SEQ ID NO: 169522 - DNA, 1108 bp, Zea Mays
agctttttgcctcgagtgagacaacaatgttgtgcccgtgtatcagtgcttcatattctgcagcgttgttggagacaggaaactagagttgtagtgcatatttgagtttatctcctttcaggacaataaagaggatgcccgccctgatcccttgcaattttagtgacccatcaaagtacatcttccatacttccattaactcagggttctctaagacctgctactcggtccatctgatatgaaatccattagtgtctgggttttgatggtcgtacgtggccaaaactctatgtcatgagtcccttgctcacatgcccgcttggtggtcctccctactacttctctattgtggaatatgtcgcctatcaggaaacccgtaaccactacgactttgtggtcatcgaaatagtgtcgtagcttttgtgcggtgagtgttcttcttcatgtcgctcgactactaacatggtgcttaccatgtgagtcatgcatgaaatgtataggagcaggtcttcaaccggctgatcagtggtggccagattaggcggcttgaggattggcggggttgtgaagaatctttttagagccttgaatgtctcctgggtctcaggagtccactggaatctatctacctttttgagtagcttatagaagtgcatgcctctttcgccgagccgtgaaatgacttagtactgtcatgtagctggtgagattctgtaccttcttctatgatcacggtggctccattcatgtgatggcttcaatcttctcagggttggcctcaattctccggtatctgatgatgaaaccgagtagctttccggtgggtaccccgaacacacacttgtctaggataagtttccaacggtagcacctcaaactgtttaaaaacttgttagaggtcatcaataaagttctcggggtccttcgtcttgatcacaacgtcatcgacgtaggcctcctcatgcttgccccagtggttggctaagcatgtttggatgcctcactgataagttgcctcgacattcttgagaccgaacgtcatataggtataacagaattccctgaagggtgtgatgaacgtcgttttctcctggtcctcatccgctag

SEQ ID NO: 169523 - DNA, 1622 bp, Zea Mays
gctttaggccatccaaatttttttctctagtacaatttcgaatacccattctctaaatcctgggcccgcccctgcggacaatcgtttcagggttggggttcagaaccggtctagggcgctgagacttcgccatgaattgagccatcccatcggcttgatgttcctgctgtcgaccggtgccttcccctttttctggcccaactcaatgtgttatggcttgagctagagattgctagctagtcaccgctcggaagagggggaacaggtccatcggtcagtcggaggcgatcgcgtctcgaaactcacgatgttcgttcgaggcaaaacagaggtcattatgcctattgcctctaacctcgtgtatcctggctaattgtactgtatcgccgatagggccgatggtgaccagggactggtcgcactacctgagggtcggcgagcggctggtcctagcaaggcaaaaggtcccgctccctatggccttttgttctccttaggtttgagccccctcccggatggtgtcgttatgcgtaagaattctctgagtaacttgtagtcctcatagccatgtcagactgaatgctgatggttcggacattcggcttcaaggagcttttcgaagtgatcaggggttttctcagctggaggccttcctcacgtccagcttatcgtagccgccgatacattggctcattttcatcaccctattctcctcttcatgttgaggtgattgtcgacatcttcatctggacccctatcacgcccagtcttccgtttgcgactaccagtggtggctctctctacgtcctctcttgatgcatggcccgtcgcaatgtcgaaaagcttctttggcgtttgtggggtcttccgtcccagcttatgcaccgaggttttgtcggtggctccctaggtgaaggcgttgataacgttggtgtccgtgaggttgggcaactggttgcattatcgcgaaaagtgtcagatatagtccctcggtgcctcgtccgactactgccaacaatcgttagggtcccatgggtttctcgggcgtacgtacgtgccctggaaatttctaagaaaaatctcttctaggtctacccagccctagatgcacccagggtcgagggtattgagccaggtcaacgccgaacctactaacaatagggggaggttctggattataaaaccatcgcaattcgctccccgcgcatgacacacaagccgatagtcctctagctagggaccggggttcgattccctagtgtacttcgcgatagtgagggcctgtagtgtggtcgtgcgggtgcccgcaggatatggcaacagaaagcctatagccatgacggctgggggcttgggtgtcgatcctcgtcagagtcaaaccggcctcgctgcgccggctgtaccgatggtcatcgtttggccccttccatacctccccgacactccctgggtcaggcgtgctctatgctccctcgcttattttcagttccaacggggtgggatccgctcctggcccacttcagacttgatcagttgtctcatagaggcgtcgttggttgccggcactgtcgtagcgctctagtcaaccctcggcactattgtagaggtgtcgttggtggcaa

SEQ ID NO: 169524 - DNA, 453 bp, Zea Mays
ggtttagttccctagagtaggtccctgtgtcacccctgcctctgctgaagctagcccaggccttagcgcgccttaagtcccctccctgtggccagaatgcctcaccggagttactccggcccgcccgagaccttctcactgtcgttctcccctctctacccgtggattcatggcctcttccccgccattcagttcgtcatggcattctctccctctctgcccaactccagcgaccccagagccaccctagcccgcgccagcctcaactctggtgaccacgccgctgcagagaagagcagcgccgcccacagtcgttcgtccccctgatctgatcccctccgtccgattcagatcgcacgactcagatcacgaataacgcttcgcgcacgcgcgcctgacgccctggcccgcctgtcagtgcccaagtcccctggcgctgggcccgctcggtca

SEQ ID NO: 169525 - DNA, 660 bp, Zea Mays
tgagggaggaagagacatcgagctcaaaacaccattgagagaagatgaacaagtgtccctgcagtgtgtggacgctgacgttagactcttaatagagtagtatagaaataataatagcttacctttttgtaaccttactaaccagaattatacatgtacgtgatagatagaggagcatagtattagttggaccaaccatttaatttcatagttgttttaattagctggtatatttaagtttattcatttttcgctagtccgctatatttgtgtagtcttcgtgtattatcttggttaagaggaaagatgatattttttatctgtttatgtgttgacttttgggacctcaacaataccaatgctagatccaaatatatataccttgtgccagtcattgaggaggttgtcgggtcctcgtggttctcctgtttgaacttaactatcgcataccatctgatacaagtaaaacgacgttccagacctcaatcgagacatcacgagttctgcgggagcgagatggcatttggcctcacgggcgcaccaccgcgctacgttctagaaagtctatgaactgttgtgcaaatgtgtttctctgttttttatgatatcctcgtctacaaaacgctccctagaagaaagaacatcttcgtcaagttttgc

SEQ ID NO: 169526 - DNA, 531 bp, Zea Mays
ttctgttccagtctgtgtcttaactctagccgctcgatgtatagcgctacttgttagtcatcggctcgtcgttgtctgtctgacagttgccctccatcttctccatgacacgtgtgcggcctataagcacccacacccacacctaagctctagattggaaggcggtaatagctaatcgatcgggttatgtgagagatagatatcacatgggtcattgtaacatggatatgttccatgggctgcctgatgggccctcgataagtcatctagtagggtgtactaatgggcctcatctggatggagcaaaaccaactaaagagatgacgcactaggcgggaaaggatcccaaagaataccgcacaagaatgttatccttacgcatatatcgcagaaggattaatggaattctgaggatgtgtcctaggtccagaagttgttgtatgtagtgctcctcaccgcaaaaattgtgtcactatttcgacgaccacaaagtcgtagtggttacaggtttcccaataggcgacatactcc

SEQ ID NO: 169527 - DNA, 372 bp, Zea Mays
ggacctcgtacttgtccgcacaacccggacagagtcacggggtaagctggaaccaaagtgggaaggaccatttatcgtcaagacgaagtcgtctcccagcgcgtatagattaacaacacaatctggcgaagacctggaacattcctggaagatagacaaccttcgcaaattttttgtttgactcatcagggccaactcacccttgtaattccccaaacagttttattccggcccgcactcttttcctccccgggggtgaggtttttaatgaggtggagccatgtaatatacatgcaaaaaaatcccccgcaaaaattacaacgtcaaaaaaaagaccgcatcgacggtcttcggcattcgaccacaacgaag

SEQ ID NO: 169528 - DNA, 892 bp, Zea Mays
gtcgcagtgcgcttcatggcccgcattcctcctgaggggttcaagccagaggtcaccaaaacctctagcaacgtctggaaggtcactcgttaaagatgctagggcttatggggccctgatcattgtcccctctttgttgacgatgaagtcaagactcacgaagcgaatcgtcgctctaggggtcccagctgtgccactgtcatcgctggccatctggagcttagagggcttgtcgagaatgcgtaatgcccctacctggcattccaactataggtgtttcaaacctagttcgaccaagtaaatttgtgtgcccgttctaggcttcagatggtgtgtgcggtgggagcaagatttatactggatcgagcggaacgtccctacatccagtcttcgacggctcatggttcttgcacctttgctgatcaatgctcatagtaggggttacaagagggcaagagagggaggagaggctcacaagtctcttatgcggaggaagtggagctgagggctacagagctggagtcatgtctaagtcttggcatagcgacagggctccagtctccgggtcttcgtcgatgcctctttcctttcgttggtctgttcgtttgtcttctgtgtgtgcgtgtgtctgtcccctcggctggtggtcgacttcctccttttataggccaatgagggggtcggccatcggtggcttcctcgagaagtagtcactgggcgatggtaaaaccgagcgttctaccccggtgaagttgtgtgcatgcgtgagcatctgggtcacctggtcatcttgtattctttatggaagacggtgcgggaaacatggggcccaagtgccattacttgagctacgccgacccctagccttcgtagcctgggtcttagcgcggct

SEQ ID NO: 169529 - DNA, 363 bp, Zea Mays
ctggagaatagggttccagactggatcgaaggacacgaacatgccccggatgagctggtcgttgtggaggagggcacacacattcataggaacgacgggcgaggtaaagctcatgaatggcgggggtgacgccatgggaccggtgtgggtggggacaacacttttaggagaggcgcaactgcgcgagtagcgaggagagccgtccagaagggcgcgcacaaccactaggatcgagtcgggcggcgtggctgggagttggggccgatggcgcccgacagcagggaacggccgcggtggcgcggttgggagcagaagatgaggccacggcggggaggtggccaggacggagctgcgcgccgagcg

SEQ ID NO: 169530 - DNA, 367 bp, Zea Mays
ctcaattgtttcttgaatatacttttttgtagaaccaaattgaattttacaaggtggaatattgattagaaaaaggtgggatgctgaccaggaaagcgctactcccttgtatgaactagctggtcgatgattttgtttcccatcctttttgttttcttgacatccatttgttcattagggagcacataggtggaatgatgattaatgtttctacatattaatgtattttattataacatgttgccgccgtaacaatgtatgggtatacagctagttaactattaagaaggtaacgtagaccacccctgtgccctcgcctccccctctgctccagtgtcccgtctcccgaagtcatccgcgacagctg

SEQ ID NO: 169531 - DNA, 361 bp, Zea Mays
agtcgagctcatctgattcaacagtgtcgtagatcttttccccgtgttcttcagatatttgcaaagtttgatctttagcttcttcctgaaccgaccaccttccagcctctcgatctcttgattcttgttaaggacagagcaaacttcattaatagagtatgttcacctaacaaccagcttcaaacttactataggatacttgggtcaaaatcgagtgaattcaaagatatggcgcgtccaatttggtcccataccactgtgaccatttctgttttcaatttcagtttcagttacccaacaccatcctgacagagcaactttgggctgcagtttctttaatttttgtataacaactaaagag

SEQ ID NO: 169532 - DNA, 531 bp, Zea Mays
gccttcccgactcccactctgactccgccgatgggtcccgagtggatcgcggacaccggtgctacctaccacatcacccccgaccatggtatactcacctctgttcgccctccgtcttcctctcttccttcgtccatcatcttggcgaatggctcgtgtcttcctgtcacatctgtgggtgccgccggcactcccggctcttttcgcattcccgatgttcttgtcgctccttctttggtccacaatcttctttctattcgccgtttaccactgataattcttgttctgtcgagtttgactcttctggtcttactgtgaaggactcggcaactcggcgccccctcctcagatgtgacaacaccggccccctctacacccttcggcttccgcatgccacctcgtcttggtcttcgtcgcctgacacagctgctgtttttgctgccaccacaccttctactacctggcatcgtcgccttggtcaccccggacgcgatgccttggtgcaacttactcgtagtgccactatcccat

SEQ ID NO: 169533 - DNA, 565 bp, Zea Mays
ggcccgccgtgctttgaccgggtgggaaggaaaataagtaaaaaaagactaaaaataagctttactaggatttgaaccttggttggagggtttaaaatgcttagctacaccactctagccaactaaaccaaacttattttgtgtctaaactattaaagttgcttctaatatacaaataaatgcactggaaaataaaataaaaaaaccgggccgtgcttgggccggcacggcgtgccacggcagcggcccaagcccggcccgactaacgggtcgtgccgggccgtgccgtgttcgtgacgggccaaaatcgtgtcgtgccacgggccgcccgccgggcacggcccatttggacatctctaatctgcaccatcagagccattcaaagctagtagatacaacgggcagcagacctctttattgccatcttctgtaatacctcattagttaacaccatgttcatatcctcaataaacataatattcaagtgtggagcacttctcttgtggctcaaatttatcatcacatgcataacacaaggcattcacctttctgaacttcctaacgt

SEQ ID NO: 169534 - DNA, 1145 bp, Zea Mays
cccaggtcagttatgatgctatttggtatcccaaacctgaatattatgtcttgtatgaactccactgccttggctgaagttaaagaagcaataagtttgtatctatccatttggtgaatttgtcgatggtgaccaacacgtgagtatagtcttcctgagctttcttgaagggtccgatcatgtccaatccccagcacgcaaatggccatgttacaggtatggtctgcagctgctgtgctggtaaatgttgttgctttgacaagaattggcaagcttcacatctctggactaactcggttgcgtcactctttgctgttggacaatagaaaccagacctaaaaactttcccaaccagagttctggatgctgcgtgtattccacactgtccggcgtggatctcatctaatagttgttgcccagtgaccgaggaaatgcacttgatgaggactcctgtcgcaccccttctatacagtacgccccctatgagggtgtagtgggctgactgtctcgcgatgcgttctgctgcagccttatcatccagttcttcttcattccttatatacctgatgataggctctctccagacattagggtccgattctagttggctcagggtgttgcactcttccgcctgatctgagggaatacttgggcgtggcacctcctagacgaagactacatgtgggacctaggcccaactggatcctagcttcgacaacgcgtctgctgctgcgttgcagtctctttccacgtgatggaattccaaaccttcaaacttgtcttcaaattttcggacggccgtacagtatttgcccatggaatcagtcgagcaaccccaatctttatttatctggcttatgaccactaatgaatctttgtataccatcaatctcttaatgcccagtgatatggcaatgctcaacccattgattagtgcctcatattctgctatattattcgatgccaggaataatagctgaaacttacttgagttgcccacctccaggggcaatgaagaggattcctgcgcctgctccctgtagtttcagtgagccatcgaaatacatccgccatacttcagtagctttcgggttgtcaggaacttgttgctcggtccactctgatacgaagtcaactagtgcttg

SEQ ID NO: 169535 - DNA, 751 bp, Zea Mays
ttgttactgaataattgcagattatatctgttactaaataaagttagtttaaatatggcttgtcccaagcgtgcaatcttgtgctttgtgcatgttactatgttagtggtggatggaagagtttgataacatacattatagaattacatccatttagtcatagatcatgagaggattaaggaacagttctagtgcaaagaagctaatctttggtactgtctcgttaaaccataaggaaatgattgaaatgtaactcacctgagctgagaaaaaaggtaatgtgcatacagatcaatagatcattaatccaccaaacatatgctaggaaaatctctgttcctttttagctttccacttgataatggttcaaatgtgtgaacatttatttaggctaattgttgtagcctaatgtctggtgtaagtagtatctgggccctaagaatttggccacctcacaaacaagcatgagattattgttcttttaggacaaaacaatctatgaatgactccacggcatccttttgtagctttgttggacaatgtgatcatgttattgaaatccaaaagaccattcctgaggatgccttgaccatctcatattctattcagtgttgatccactgttatggtcagtttcccgtgtaatacacactgcgatctccattctccagttttccttggaattcattttttcgaaacaaaatcgttggaattcatagtcagaccccattgcagaatcatgttttctctgg

SEQ ID NO: 169536 - DNA, 433 bp, Zea Mays
gaattaagaaagaaagttctaagcataagcaagcaagtatgagatcaaggggagaatcttgggttgatctcaaccgactcgatcatgggaccgagtcaagtctataacatgtcctgttcgggatgcaacaaccttttggtcgagcccctttcacatgatggataataaaagggaagagtcggtcggtatgggaaccaatattcaccgttgtcaactatttcccacatacctagaactaatctaacctagtcgtggttagtaaagggaaggtcgccatcactcctcaccgtctttgtgggaagaacaactacccaaaggtaatctaacatttttatgcatctagtggctagtattaaggacaaggtccctagtttcttactacaaacatgtctaacacatctcaacaaattttaattctagtgattgagatgtc

SEQ ID NO: 169537 - DNA, 506 bp, Zea Mays
ctcgggatcacggctggcaacggagaggaatggagcagccggcgccaagaggacggcaagcagtagcgcggctccacacgagcagaactagagatgagcagggagaggcgggtaagcacacgacacacggacgacatttatatggccgaagaggaaggtagaggggcaccgggagggagatgaagagcatcagacaccattaatggggaaataacagtctgcagttagtgagaaaagaacggctgggttagttggggagatggatcgacgtggttgggtgggtgcgtagcgtgctccacactaaggatgcgacaggcgggcaagaatctgactggtcggcgtgtgcatgccccgacgaagaacagccgaaatgaaccatggagaaagtgatttgctctgacggatggggcccattgagcagggatcgtgtgggaggaaggaagccagaaaaatgctaattgtgcctcgcatgccaatcaaaggaggagacaggggatgaaccattt

SEQ ID NO: 169538 - DNA, 643 bp, Zea Mays
attaccgccaatactcacaaacgatgttggcccaaataaatccatgtgaagtaattccaaaggtcgatgagtagacatttgacttttatttggatgagtatttgccacttgcttcccggcttgacaagagctacacaatttgttcttctcaaatttcacatctttcaaaccacggactaaatcatgtttggttgaacgattgagttgcttcattccaacatgaccaagtcttctatgccataaccaacctagtgaagcctttgagaataagcaagttgtgagctttggctcactagatgagaaatcaacaaggtaaagattttcatatctaaaacctttaaacttaagattgctaccatcaacaatagagataataacatcatcaacagtgaaattgcaactaaatcctaaatcacgtaattgagctacgaatagtaaattaaaattcaaagactcaaccaagagcacatttgatatggaatgatcattcaaaatagcaattttacccaagcctttaacctttcctttgcgattatctccaaatgtgatactatcataatttgagcaatcttcctcactcatttgggtgaacattttcatatctctagtcatgtgttgagtgcatccactatccaacacccaa

SEQ ID NO: 169539 - DNA, 331 bp, Zea Mays
atatacatacacacactagcatgtaagagcctagatgcataaatgttatacaatagttcatggagtgacacacctttgttctacgccacatggtctccattataatcatgaattttcatcttagcttttgataggcttgattctttacaaagcaagatagttttcattgatgtccatcagtcttcatcatgacttggattgagtcaatttagcatgccaaagagaaacttatcctcttcaaaaatcaacagaaactcattctcttcaaagaactacacaaattcactaaaagaaaatgttagtcttttaaggacacaagatatagaatgag

SEQ ID NO: 169540 - DNA, 484 bp, Zea Mays
gcaggtcaagggagggagttgatcccaagtctctgcggatgattgaggcaagtgctaatatcgatcgtggatggcaattgctaaagtgttgtcctctatcccctggaggccctggactccttttatagcctcaaggagggaactcaggggtgccaaggtcgtcgtaatgtggagaggaggcgagcctaagcccctgtagcagtatggccactagaatggctcttttccttgctgctatctttgattaggaggatgatgtctagcccatgtatcccatatcttgaccaagcaaagagccgaggccagggttgggggctcggacacgtacccgagcccatcttgtggatgagttgtctgagttgtagttgttgaaatagtgaaaagtgcatggtaattcgtctcttatggcgtaaagtaggcttgacactagccctgtggtttctatagccatctcgttattagtagtttttgtggaagagttggt

SEQ ID NO: 169541 - DNA, 280 bp, Zea Mays
aagttcttgatgtctaggcagaatggatggttaggagggagaaattgtcgatgtttatcgaaggacgaatatttgccaccctttttcaaccaaatgaacctaagagcttccttgcaaactaggcatgggaacttaccgtgaacacaccaggcgcagaatagcccatacgccgataagtcatgcatggagtactggtaccaaacatgcattctgaagtttgtctttgtagctcggtcatacgtccataccccttcctcccaggcacgtaccaattcatcga

SEQ ID NO: 169542 - DNA, 479 bp, Zea Mays
catgctgagacatgtaagctccccagctagtactgtctattttggatgaaagtttgaaggggaccttagacatactaaaagcagaagggctggcagactcgatatctagaccggtgatcatcaccacatccatgagggcaggagtcaaaggcccatggccgaaaaagaagcagttgaaggcgccagaccaaaaaataaccaattaatttaaggaggttttcatccatctcaagaggatacagtgacaaggaaagcacatcggctatgcctatagtttgccattgaggccgataaatctggaccactctgctataccagactacctagcccttaaggggattagaccaagctcccaagcagccggcccaggaattcaaatcgaggttttagcggacaaatggaatgcattttgcctcacaggaaatcagatacactagtttttcataagagcgggggccaagacaaagcaaatctggaag

SEQ ID NO: 169543 - DNA, 475 bp, Zea Mays
ctaaaaatcaacaatgttggttctgtatgtatgtttggaattctatttagggctttatgttcctaaatgatttgtatcactgtggttcagtactatcaatatgcattgtgaattgtgatggtttttgcttctattttgctatacaggtggaggagcaaataagttagcagttcaaacaaattgcaccgttcttatgctagactgctgtaagaaacctttcccattgtaaccaaatttgtttctagaatctagatctgtggcaaaaatacaagaagccttttgcaactgaaactgaataaagcatatcttttggcgttttgtttctattcctgtcaacaattgaaaattcaatctaaaaagaacactacacgctgattatagcatattactaagcgacctattatcaaactggatgggttctcagtcttttctcacttggattgctgatggcttagtgggaaaatctgttactgca

SEQ ID NO: 169544 - DNA, 520 bp, Zea Mays
ggtgtgccgaagggaaaccactcgagtggatcccgcacctgacatgagacaacccgtcataaatgactcaccatattaactgcgcctggcgcaaagccacaacagaagtgatgatgtacctcccactcatgacctacccctcaagccatagagtactcatgacctatgaaccgccccgggttgtagagcacccaacacctatgagacccactaaccgtggtgcatttatggaccttgtatcccagctagcagcacactcatgacctatcagcactaggcctcagagtgcaggccgctggcagggcacaacacaatgagccacaccgagccccaggctacaatggccaggggtcggcatatcccaaatgatggtgcccgggcccacactaccggcgccgttcgtaataatgaatacaggatagccaagagatcgcaaacacgtgtggctttatcccatggtaagatgcccagttttaccatcatccggtggctcgttcttgaggaagccatcgtgggtcaa

SEQ ID NO: 169545 - DNA, 499 bp, Zea Mays
aaaacgagagggaagaggctatgagcggacctgagatgagctgaccacagcgaggtcacaccgctcggtgttcttgagtgatttgggggaaatcccaaactagggagttctagtggatgattcgaggcacgggttgcttctctggttgcacaattacatagcggagcaggcggggtcagcaatttataggcttccacagtggtggcgtccaatttcgtgaagatgtgctggcggccggagaggaagaaagttactggcgctcgggattagtggctttcaccgtggcaagctcccaggcgatcaccgggcatgcacgatgtgattcactgcgacgtggtcaagctctttagcacgtggcgcacgacggtaatcggccaacggcggtgaggtctatctgaccgattcgacgagcaagtgggtacggtgagcttagctgtgaccgagcccgagtcgatccaggcgccaagatctttactcgcccacagttatccgcatgtca

SEQ ID NO: 169546 - DNA, 439 bp, Zea Mays
ggcggtttcaaccgtggatgctgggaatgaatcggatgagtcggcttctaagttttctgattttggtgactctgggagttcggttgagtggacggaagactcgtcggatgaggacttggattactttgcgaccttggatgtggcggcggcggaggcttcgccgcgtgttgcggatgctgaagttgtgcctggtccgagtgctgggcgtaggcggcgaagggcggttgcgaagcgtagagtgagtgaggtggatgacggtcggcttcgtgtgggcagggctggcaagcaggaattgttgtcctcgccggccgttgcgagtgtaggtgagggggagttgcgaagtctttttgagggtgaggagcttaggataatgctatttaactatagggagatgggaatcattccgaaggttgaaccgatgtaaggtgtgatgccctcg

SEQ ID NO: 169547 - DNA, 494 bp, Zea Mays
cggccgcacgccgtgtatctcgcacggagaccggattcgtgggttatacaaaccaagcgttcgcccaattcccttgccctaccctattgagtccgcgccaacccagtcacaacgccgccaccatcgccgagaggtagaagaaccaccagggtagggctgtaatgacgccattcgtcgggtctgcggggtcatcatcgctggcgaaatctattcgttgcatcctcgaacgggattaggatcggctcgtgtggcgatttcgcgccggagttggcgctccgccgtgaaccctgcctgcaccgcggacggactgctccacgacgttatcaccggtatgatgcccttcatgttgttcgtcgtgttcgtgtttacgtgtcgaccttattgtaccgaggtatggggcacctaggccttgatcaccctcgccacggcgatggtccgtcgaggaagggagcggcgccgccgtgtgccgctggtgtggagaagaacctgcgtta

SEQ ID NO: 169548 - DNA, 907 bp, Zea Mays
tcggtaagtaatagggcaaggttttttccctcggcggcctatgttgaaggcgccctatgttgaagacgggattcgggaaaagaggcaatttgttattgcttaattatcatcgaatctcatacacgaggtaaataggcccttggccactaacaaaatggagatggaagtctcctgaactagtcagtaccgcgggttactgcaggcatggtttatgaggtgtcacctagtcgtcatctaggcgacatggcatgctgcgtgtgctgggcgtcggggtcaccacaacctcgggacatatggcgtctatcttatatgattaggtgtcagctatgcatcgaatggtgtcgggcagatgcctataggaccgcggtgaacaccggacatgaatctgcgcagggacatggggaatcgagtggtagggcaccaaattgacagcgggtaagaaaattgggtaggaatccactgcgccacaagggaaaagacagggctgagtctgaccgcacatgtgctctttgagggctagtttgggagctacaacaccggaggggattggagtggttaaaatcaccttcttattcataatttgggaaatcgatcgcttggagcccagacaacttcatgaagaggggagagaggaaaagaggaggcagtgggcctaattggatctcttggtggcaacagagacagtggccctgtatctcccgcttgagcgctcctctattgatgtcagtctcctctctctcacttctggctatccgcacctgccgccctctaccgtcagccaccctcaacatgtctgttcgcccgctttgagtcccgcaggtccatccgccccacacatgtatgtcgcttcaagtctgtccacacctgaatgtgctgtcctccccataggtcacaaggaacaaacaac

SEQ ID NO: 169549 - DNA, 499 bp, Zea Mays
tgttaaataacaagctaaataataagatatagaggttagtgacttaccaaaatttcactcatgagtcggattggacctaaaagtaactaacaaactaggtgcaaactagatccaaaagtagctaatgatttaaagcacataaaacgttttacattttagaacacgaaaactctaaaaatatggtttcaatctctaattagcgtttttgacgtttaagctggctctttcgttaatataaagaactggctggggatctgtagatctgatacgtttcatctgtagtcattcattctcggtctatgtactgctcagattgtaccgcttggaaagttcagcttgtcgttactgccggctgtggctagaaaacccgattttttttttcatgttagccctttttgttaaaatttagactctggagaaagtattctcgaaaataaaaaatttcggctagaaaacacgggttcaaccaaggactgaaaatttcaaggctttgtttttg

SEQ ID NO: 169550 - DNA, 637 bp, Zea Mays
attttggatacgaaaatactacataacatgctacaagtttcttcagtctgaatcacaatctataagtaactcatcttcgaagtcatccgtcgcgcaatcctcaacgacaacctcattccacttgttgcattgtcctgcatcacacttgtcaacaattctcttgtaataattggcttctgcttcatctacagcttgggagaatagctcatcctcagcctcagcctcatcagacttcttcttgtaataagccgcctctacctcttcggcggcctgagacataaactcatcctcttcctcttgagcaagtaatcctgcctcagctagtgcgatgagctcactcaatctagatgtgtcctcctcctcttcttcatgtaatcctgcctctgcaagagcgataagctcactcaatctagatgtgtcgtcctcctcctcctccgtcagctcaaccgtcgccattttatcctgaacatatcttgcatgctcctcatcgaccaaatagtttacgccacatccaatctctgcaaatataatgagcaaaataagttagcaaagtatagataaataaattgtactaacataattatagtatcatttttctcacccacttcccttaaggcgatcagcaagattatccaac

SEQ ID NO: 169551 - DNA, 1060 bp, Zea Mays
agggcatagtggtcaccccgagttaagtatgcgtgagcatgtcgcaccgtcttaagtcattgccgacttaagccgattgctccgttagtagggcatagtggtcaccccgagttaagtatgcgtgagcatgtcgcaccgtcttaagtcattgccgacttaagccgattgctccgttagtagggcataatggtcaccccgagttaagtatgcgtgagcatgtcgcaccgtcttaagtcattgccgacttaagccgattgctccgttagtagggcatagtggtcaccccgagttaagtatgcgtgtcaattgacagtgaacaatctgagtgcctttgaaacctttttattgatgatgtttttctcaatttacagaatacatcgtcgtcccaatagcttctgagatgtagctaggggtaaaacttcctgaggtgttctatgttccatgagttcccaatttctgttccgtccatctgagtgaggtgatatgatcccggtcgagtgacttctgttactatgaatggtccttcccatagaggtgacaatttatgccgtccctcccccgttagaattcggcggaggacgagatctcccactgcaaaggatcgatgtcgtacgaccttatcatgatagcgcctcagagtttgctggtatcgtgctgattgaatcaccgcattcagtcgctcttcttcgagtacgtcaacgtcttccagcctagtagcttcagcttttgctatgttatcaaagattaaccttggtgccccgaacttgagatcggcaggtagcactgcctccgaaccataaaccataaagaaggaggtatttccatgtagagctcggctgggttgagttctcaggctccaaactacatatggcaactctctgatccattttcctgtgaacttttcattcttgtcgaagactttctttctgagtgcttctaatatcatctcgttggctctttctacttgcccgttggctcttgggtgcgccaccaaggcatatttgatctaaatgctcttttgctcgcagaaatcgaagaattctaatctagtgaagttgga

SEQ ID NO: 169552 - DNA, 703 bp, Zea Mays
agatttgcaatgattttccatgatgaaccactcaagacaccatcctttaatactgtccttgagggcaatatcaagatactccactttcctcccctggcgaagctctaaacttgcgccgccaacaagctgatgctgcccccagccatcccgggccgacagtgataaagatactttcagagtccgaagtgggggagaatcccaagaaaagcctcgcacagatgtacgaaaatggcaacttgtagaattgagttagggttcagaagggtcaaatttaactcataaaaatcaaggaggccgcgaaaaaggggagatgggaagagcaagcccacacatgagaaatggaacgtaaacaacagattcatgagtatcctttgtcggaacagtgacatcgcggcagatccaccaagaacaaagctcttttggaagcaaaaccgcaatctcaacaatatggagaaggtcggattcagagatgacaaaaatgtggttaccagcgaatggaagctggctgttggggtcgatgggcgagatgattgcagcagcggtgctctgcctcttccgcttcggagccatcgcgattttttgggcaagacgagcgagccctgaattttagggaagcagagtagcggctgaagggaaaaagtgaagctagggctcggaaatcaaaaaggcacgtcggcgcgagtataaatggggtttcttgggt

SEQ ID NO: 169553 - DNA, 668 bp, Zea Mays
gccttacgataagcatacaggttggacaaccgttcgtcggttgttgaattcttggcaggaaccggaaccatcttgtcattgacagttgctggtgatgacacattcttgtcgggtggtggtggcaagggcattgggcccttggaataagatctaaatggggtaggcagatcccacttgtgtaactccctcttcttggctgtatcgcccacctcctcctgcaattgagcgagaacgaaggcagtatccaaatctttgggacgttgaatcattacagtggacttaatgtcatctttcaagccatcaagaaatttcatagtataatataggggacctgtgatagtttgataggcacaaagttggtctagcaattgtgcaaattgatcaatgtatgcagtgacagtgctagtttgtctgatgtggaacaacctacggataaggatttcatgctcttgcttgccaaagcggtccaagagtaattgacataactcctcccatgacatagacaatagtgtaggtttaacagactgtaaccaccgcgttgtgggccagaaaaggtcatggacaataatccataaactagggtggactgaaagggaaattgagttaaccatttcctataattaattttggtgcattgaatgtccaacacaaacaaatggactaactag

SEQ ID NO: 169554 - DNA, 853 bp, Zea Mays
ggccgatgcaaatttggtcattctgctcacacccttggtcccctgtccttgcttcctaatctcagggcttatttggaaattcaaatctcttttgaaattgaagtagggcttatttggaaattcaaatctccttcctaattgaagtaggttgagaaagaaatgaactattctttctctcagttctctccaattctgaaggaggtttaagtttccaaaccagccaaggaggtttaagtttccaaaccagccatgtggctctgataaattggcacctctgcagacaacgttaaccttgcatactggaaattgaagtaggttgagaaagaaatgaattattctttctctcggttcttttcaattctgaaggaggtttaagtttccaaactagccatgtggctctgacaaattggcacctctactgacaacgttaaccttgcatactgcagagcgaacatatattacaggcatgccattctagaaagcatttttggtgttctgttctcatctggtgccgcctcagcattaacacgtactttgtcaacgcagtcattagcagtcccggtatacgcaaacacctgtcgttaattcagccttcagttcttcagagacgtttgactcccaatcccaagcaagcacgccatcggtcgaccgttcccgttccgcgttcgggttcttcggagaatcaaacgctgcatagccctgttgcgtcggtcaccttgtctagaaaccgtgtacctttgtcctctctatctgatgcgccactgtcacggtgccaagtgccatgtgacatgcacagacaaagaagtacgtagtgcacgttttagctggcacgttagcatcagacctgtgtctt

SEQ ID NO: 169555 - DNA, 442 bp, Zea Mays
aagacgcaacggctccccctgcaaaaccattcgtgcagacccggtttctactggaagccatggatgagagagatcgagcagtgcaagggaattgggaccgtatgtttgaatctatggagtttgtgactgaaagactgaaggaggtggagagagtccagtagcaattgttgatgcagtcagagctggcggcagtggtggctgaacaagctgctgttgataggaatgatctgtaccggaagttggaggaaacaggacaagaagtgtctcagttgaggttggaacatatgggaagagagctgggcgaaacatcaactactactcaggaacaaggcggagatgtccgaaggaatcaacaacagtctcatggtgatcagaatcgtggaaaccaacagcgaggcatgagaggtgatcctcgccagtttactgattcaggtaatcaagc

SEQ ID NO: 169556 - DNA, 425 bp, Zea Mays
gcactaccgtggggcggtggcatgctccttgtgcggcggttcgccttcttcgcactcgaagaccagcacgccagctgtatgacttgtggaaccgggctcccgtgtcataggatggataccccagtgtgcatagggggagacttctcgtgacgtttcgaggcgagagcgggggagtctgcctttaaagaggggttcatccctcgagtagcagccatgccttgcttctctcccactcacggcgtcctctcgcctccgagcgctctgcgcccctttgccttcaaggtctctgctttgcattgccatagtttgtcatggccttgtaagttcatcccgagcgtgcccagactgagtgagtgctcgacatggtataccgcctgcttggatgggatgcgccggcgttcggcggaaggatttgcgccgacgcc

SEQ ID NO: 169557 - DNA, 723 bp, Zea Mays
caaaatatttaaaactcagcttatgattagcccttgtagccacagaagactggacatacggctgtagtttaagataaaccttatcacccacttgaaattcccgctccgatcggcgcttatcagcctgcgatttcatacgctgttgagcccgcaaaaggtgttgcctgacaagactaaccatcagctctcgttgagaaagccatgtctgcaaatcagtttgaactgaagcatcagccaaggacagacccaaatgacgcggttgacgtccataaagcacctcaaagggagatctgcccagggaagaatgaaatgctgtgttataccaatattcagccaaggacagccactgaatccattttgacgggcaagcatggacaaaactccgaaggaaggtctccaaacattgattaacgcgttcagtgtgcccatccgtttgagggtggtaagatgaactcatccgtagagtagtaccagccaaccgaaacagctcttgccaaagtttactagtaaaaatccgatccctgtccgaaacaatggaatgtggtagtccatggagccgataaactgaatccacaaataattgagccaccttaagagcagtgaatggatgcgacaaggaaataaaatgggcatatttggagaacaaatcaaccaccaccagcacagtattagcactaccagagcgaggaagaccctctataaaatccatactgacaatctgcc

SEQ ID NO: 169558 - DNA, 834 bp, Zea Mays
gatgcagctattgcagacacccctaagggtaaaggtggctgatggtaggtatttgatgagcaaacagtttataccagactgtcaatggtactgtggtggggtgacgtttcagactgacttcaagttgctgtctcttgatggttatgatctcatattgggcatggattggcttgagagccacatccccatgtccatacactgggctgagaagtggatgaaatttgtgtataaaggaaaagatatccacctgtagggtgtaatccccaagctgaaaacctgtaatcagttgtcggaagcacaactgaggggtctggtcaggcaagaagcagtggaacaaatgttggagttgagagttaccactgaaaaggaaggtcagcagatgcctgatagtatagccaagttggtaaacaagcatcaagagttgtttgctactcctcaaggtttaccacccaagagggcgttcgatcatgccatacctttgttacctggtatttctgctttcagacttagaccatacaggtacacgccccagcagaaaaatgagattgaaagacaagttaaggagatgttggagaatggagttattcaacatagctctagtccttttgcatcacctattcttttagtaaagaaaaaagatggagaatggcggttgtgtgtcgattataggcgcctgaatgcctctactgtaaagaacaggtacccaatgcccatatttgatgaaatcacagatgagttgtgtggggctactgtctttactaagttggatcacagagctgggtaccaccaaattagaattaaagagggtgatgagtataaaactgctttccaaac

SEQ ID NO: 169559 - DNA, 587 bp, Zea Mays
gggaggaagaagtggggagggggatagagcgtgatctggggtctaggcactcgggcggcggtgtctagatcggagtcggcggttgcaggaggaagagtggtgaggggaggccgatggttggttggcgagggctgcgcgaagcgtgcatgtgggggttgtgtcgtgctgggatgcggaaggcggtagttactgtttcagaagccgcagtggggaggagagaggtgggggcatgagtgtggtctacactaatgtcttaatagttagtagagatacttctatcgcacccaggttagaacaactgaacaactggtggacaaccctgttagaacatgagatttcctgtcaacaaactcgaagtgagtacgtataataaaaaagaacaacatatgcgtgcatgtgtggtagtcaaatactacgtgagaataagtttgcattttttactatttctgtcaagcaccatttgtagtactgggtacggcccgacagtccacccttaggcgcagacagtcagtgattacatcagatcaggcggattattacctcctacctctagcatgtttatcactttaaactcgtgtgagttgttg

SEQ ID NO: 169560 - DNA, 812 bp, Zea Mays
gaatgccccccggggactatactaactccgagcttatcttggaacgccccagctatttcctctcttactatatcgatggcagttggtgagagaccaccggctctttggtccaatatggttgagtttgtttggatgttggtatgttgttttcctctcccattggtttgggttttacggcacgttaatacatgccctatgaggctcataggactggccattcctttatggccttctgggggccggaaagtactcactctcacgggtttggtagattatattatggtgctggtgtgtcgtattgtgagatggggagtctagctgggacggatacggagttggatatccatccttctcaaaaaactctgtgccagaccgtccggttaaatacgcagaccgttcggctccatgcgtggactgtccaaccatgtggccggaccgtccgacattatatttgaactatctggcgtcatacgcggatggtccgaatgggttatctagggtttgcacggtatgtggcggcttgggtgcaggcctcggtaattcacttctaaaaatgggatcgatcgccgctggcccggacggtccgcgctcacgtgcggacggtccagacacgcgtaggtcggcaaatttatcgccgatgtgcatgggaggctcccaaggtacatgtctattggcatcccgtaaaggagttgtgactggtcgtgacaacctatagctgatgaattacgcgtgtattccctcagttcaacctcgtgtgaaggaagattcgcaatagtagacttatcaagcgtacgtactagccttttatgatc

SEQ ID NO: 169561 - DNA, 637 bp, Zea Mays
gggacgccctttgattcgcccttttctcctctggtgtgcccgatccgcgctcactggaccacttcttgtgcagccagagagccgccgctgtcaactcgtgtcctcgccacgccttagcttccatttgtttgttcctgggactcccctcaaggtaaccgttctagccccacccttattttcccctgtctcgcatttacctgctcgcgattgctcactgaagtatcccccggcccgccgtgaactcccctccgctgtctggccgcctcacctcctgttcacacaaaaccgaccccgccatagagttcgcacgaccctccctaacctcttcagctacccggaccgacccctcgcgccccaggaggcccagtctgcctcgcctctggtgatggcgccgccgtgcccgtggggagcgccgcccctggcttctcggcggagacaaaaccccctggcatgcatacagtccatccaactccaatcggacggtccgatttcaattaggccagatctaatctcgaccgcccgatctggatctaaccgttctccactctctccctcacccgcgccctgcgactgggaccggtcggtcagaccgtctcgccccaggccgctgacatccttggcccactggtcagtagcg

SEQ ID NO: 169562 - DNA, 362 bp, Zea Mays
ccagagtgctcattacaacgtcagactggtatgacggtccccactagaccaatgctaagggtctaatgacttcatatgaagtttcttgtatgcctaatagtgggggcaggtctagtgaatagtgtgattgtcctgttcgatgtggccatgttcacaaccatcggaccaacacactagagtcaacgctcacataaacttactagggagctactagaagcattagactagtctaacacccatcatcaaatcaatgctcaggtcttgacaatcgttgtaaatgtggtgctaggattaaccatcggactagcactatgtcgggccgatgctctatctattagggtatgacgcctattagaggcgcc

SEQ ID NO: 169563 - DNA, 465 bp, Zea Mays
atgcaacaagcctaaaacaaaaaaaactaatgaaactaataggaggttctggttgtagattgcagaaacacaccctacgtcctgcagtatagagcttggagcagtgacacagggagagaaaaagtaggtccttgctgcctttgctcattggagggagtttgttgcaggagtagaggatggctttcaggagtcactacacattacaagagatgttgtggcagactgccagggcaaaccaagaaccggaagattccacccagaacagctggaacaatcgggaaagtggccagagttctggccggtacaggatactgctttggtcgtgtcagtctcttcactgttacgaagcattccagccatcctggctggtaccggaacaatatttacatgcatggtccaaacaggctcttgtacaccgactgtaacttcttattgcagccttaaccatgcaatgctttgactgac

SEQ ID NO: 169564 - DNA, 757 bp, Zea Mays
atgtaaaattgtctacacaaagggatatcctaggatctcagccgttggatcaaattctaacgactcagattagatcgagcgcgcactgaaccggtacgccttaatagctgcacgatcccggatctgcggtcacagttgcgtttagcctccgatctcaccacgaccgtccatctagatctacggttctcaacacctctctcagctctatccgcccatggccgttcaaatccggatcaacggcccatgctacttcttcttccccaggcggcagaacacgaccgtgcctacgtagccgcggcggtgcacagggtcccaacggcggagccatggcggagcgattctccggcgagaaatgaacagcccagccaccgtctaatctccacggctcaccacacatcaacggcgcagggcgcgtcttcaacccttgacccgaactaggcgacccgcagcagcgctagagcgccacccggcggtactgcgatggcgtttcccacggctaaccataattgacgctccaaaccatagggagaaatcgatagagaactacgcagggaggtgcgagagacgaggaagtaacaatttaccatcttacgcgatgtagcaatccgatagggtgcagtggctccgtcgcgatactacactccgtcgagcaattgtgatcgatccagggaactcctccccttccccaactccaattcttcaccccgaaccttccctgattctgtctacggttgagggctggcgatagtggaacccc

SEQ ID NO: 169565 - DNA, 950 bp, Zea Mays
acgtctggaggcgaatcgaagatggagctgtacaaaatcaaagaggtggtcgcaatattgaggaggcggatttgggagaggagggtgataccttgaatcaaggtaacccatctccctgggaaggtcaagctaatagatctgaagaaaagaatgaagatagttggaaaggaaatccccatcctatgggagaagatggccccaaagattctcacgtgaaaaaagaggtaacccgcaattttaatctggatagatctggctgtgctttctgtcactttaagaaccatcttactaaggattgtcgacatcgctttccttgtgacatttgtggttgtgatgatcatgttgtgtttgattgcaaaaatgcttgccttggaattttggtccggaactttgtgctgcacaagttgaggatcagagttttttctatattgaagaaaaagtggataataggatgattaaagaaaaatccagcactgctattatcacggttattcaagggaatgttggagaaaaacagattgaattggaattcatgaacatgttaggcaagaacttatggagatggtttgctagatctgtgggggacaataagtttgtaatgagatttccagatcctaagatgataggtgatcttggatactttagacctttgggcatgagaacaactaaagctcagattacaattgacccttggacacctgcagtcaatgctaaaggttgcttgcaaaaaggttggttcaggattagtggcattccaatggagcaaagctctctggtgacaattgcaaaagttggtgggctcgtgggtaaggtgattgaaattgatgaaagaaccagactcagaaatgaatatgtgagagctagaattgcttgcagggatgtcacggctgttcctggagttgtggaaagttctcttggattgtttttgtatgattttttctttgaaaggg

SEQ ID NO: 169566 - DNA, 672 bp, Zea Mays
gaactccactacttttgccactagcgatgaactgccgactgttttccgagtcaaaggaacttcatcctcttcctccccgtcgtcttcattagcaacacaggcagcacacccattgggatcagcaacagatggagcacccacattgggatcagcagcagatcaggcacacccattggggtcagcatcaataaattcagtcacaggcacttcttcagcagcaggaaccgaagtaccaacatcccgatccaaactggatactcgccggaggcgtctctttttctttttctgctcatcagcagaaggatcaggttgattggctcggcaagggcgcctcgggtgagtactggcaggcttctgaatatccaaggtcgtatcagcctctgggaggggcgccaccaccaatgtcccagcaggagcagcatcagaagagtcctcagccagcaaatcaagcatagcacttatctctgcatcactaggattcaggggcacctcaaaatggacctgccgttcatcatcaggaatctccccgagcgaggcaaccaaggcgctaacttcttcagcagagggtcgcactctaaggcccaaactgccatcagtgacaggtggattcgacacaaaaagagtgaaggctttgggaggaggcaagttccaagctgagtatgctactggggc

SEQ ID NO: 169567 - DNA, 513 bp, Zea Mays
aaaatttacggagattatcaatatttcaggaatgctctaagtcttcgctggatggcattgttagcctgtacgcgctgggggacgccttcatcttgacgatgaagggaccctcccactttggctccagcttgccccgtgactctgtccgagttgtccggacgagtacgaggtccccttcgttgaattctcttgggacgactgtgtggtcgcgccatgcttttgtttgagcttggtatttgttgagggcttgcagggcaaagacacggtctccgtcgatgaggtccttggaagttggttcgtctacgtctgggacggctgaagtgcttgtccgcggtgacccatgttttatttcctgcggggtcatggcctccgatccatatagtaggcggaagggagtgaacctagtcgcccggcactcggtcgtgttcagcgcccagattgctttaggtagcaggtcggcccatttacccttcttgtcgtcgagaagcattttcttgatggccgtgaaaattt

SEQ ID NO: 169568 - DNA, 466 bp, Zea Mays
aatgtcgcacacggtggttctggtccgagaagagagctcgtggggccgatcgttgggcaagggagaatgacacgcagagatttgaacagccaaaatcgattatcatccacaagtaggattttaagcaatggatctgcacataaaagggaaccagggaggaaggtggggcatgatgcagcaatcagtaacagagatgacataaatgcagttgcagttgcttctagatcatctacaaagcccgtgaccagagcttcgttgtcgcgaagcaatctatcaaagggtggatccccaagtaggctagcacatgagacaactcgcacacgagtcccggctcctgaaaaaggatgtgtcgaagcttcaccttgtgttatgtctacttctgaggaagatgaatttagcaggctgttgaaagcaaaaatcaatgagcttggcatgtcggacaggatcgagtgtacaccaaatgatt

SEQ ID NO: 169569 - DNA, 687 bp, Zea Mays
gtgcttaggagatatctttttctttggttcaaatttaaatgtcaagtaagctgtttattgtagaagtgagtatccccatttaagaataaaaaagttcgcattaagttcaatgtatatgctggttgaccgaaccaagctgaagatatatagttgtctaatttaaaagtaatcagtctaggtagctattgtagaaccttgcttgcttgtagccaacagactgaattacaacagatcaagagatgcacacgtagactaatcaccaacatttgtatgccaactaaacacctgaattcagggcaaactccacacatccacaccaactgcggggacgacacgatattgcttttctctccattgttccatgcaaggacaatattggactgctcctagttctgctccagaccagcattatttcagtatgttggcatctatagccgtctccacccgccggcctcagtgccttcactcataaatcaagcattttctgtttgggatcaattgccaagttcatgtttgtttcacaaagattgaaagtttgagcattatgaaggatgttgtgctatgtttggttggtgccttggtggtcgtcaagcccaatattgtccttttgttgctgaactaaccattttgattttttggcccccttgtctctacctagggagaccaaacgcataggctggggcgctg

SEQ ID NO: 169570 - DNA, 296 bp, Zea Mays
taatgaggttaatctctttccatcttgggtcttggtgtctccattcgagttaggaacatgtagttaagatagctggggtacatgggtaggtcaaaatcttgtttatcaataggttagaatagatggattatgtaacctattaggagtgcatggccgagttggtctagggcactaatttaggagttagtgaattaggtgaaaaaggttttttcggtgtagagttcaaattagctaaccagtctatcttactagtattaatgatctgggttaatcaattctatcctttagataggagc

SEQ ID NO: 169571 - DNA, 720 bp, Zea Mays
ccaagtgctagaggatatgttaagagcttgtgcccttaagcatggtggtagttgggataagagtctaccgtatgcggagttctcttataataatagctatcaggccagtttgaagatgtcaccgtttgaggctttgtatggcagaaagtgcaggaccccactatattgggatcaaactggtgaaaggcagttgtttggacctgagattatacaagaagcggaagaacaagttcagcaaataagggagaatttgagaactgcacagtccaggcagaagagttatgctgatacccggagaagactacttgagtttaaggagggagattatgtctatttgaaggtgtcaccactccgaggtatgagaagattcaaagtcaaaggaaagttgtcccctcgctttattggacccttcttaatcttaaagcgagtgggagaggttgcatatcaattggagttaccggatcatctcgcggatgttcatgatgtattccatgtatctcagctgaagaaatgtctcaaggtacctgaggaacaattactaatggaggaccttagtgttcaagaggatttaacttatgctgagtaccccatcaagattttggatactttgactcgagttacaaggaataaagtgataaagatgtgcaaagttcaatggagtcaccacggagaagacgaagctacatgggaaagagaagaagagcttcgtatagattttcc

SEQ ID NO: 169572 - DNA, 1030 bp, Zea Mays
tcttttctgattgtgtggtggtgataaacttcaaactttccaaactgttccgtcatatgaatggactataactgggatcgtcagttgaattcggtttcttcttgacaggcaaaaaaatgtttcttcttctttttcgttcttttttccccgaatcattatatctttgccttcaaagaccctagaacattagaacaagaactcttttcctagggggaggctgaaacggccaaacctacactccagatccgagtgctttcatcagcaggcgcaaccaaattaattcagcgagacgagctaggtagcaccgtagaaggcaaatttatccccaaacaaacgaagacaaatgtatgcccgtagcaggcgagaaagcttcaatcctcaaatgagtgtatctatctatatacccacaaagtttacacagcttttctagcgagaattcaggtctaagccagaaatcgctctagctagctaaggactcacaaaacaaggtaagcaaaaggggcagaagtgaattaaccagcaaaagctctagcatctgggacacaatggccgagctggggatgccagctaccactaccaggacagaacaaacagtagtcgacctagagcagctttgcaaattgcaagagaacaacgctttgcaacaatggagatatatagggagcgcagacggacctgtcgttttgtcatggcagcggaggcgctcaggccatgggcatgctggtttctgacgccgtcttgatgatgtccatatatctccgccgcccgtgggtattgcagcagatcagcgaggaaggcgacggagagtagtgaggagctagatgtgggaagctctagctcgtatgatatgagccagcagcgcacgttgacttgaatttttgcaagccctacgctcctcggcagtcggcacccaacaacaactagcaaataacaagtgggcagtgcacctatcactccgcagcccgcagcccgcagcccgcagcagtacaagaatcactgcaggtccgtcggtgcaatatatcgctctgcc

SEQ ID NO: 169573 - DNA, 330 bp, Zea Mays
gctaggggtttcattactgtttggaatagttcgaagttggttggcagtgctatttttcagaacgagtatgctctctcggttgagttttctgctatatcgtcggatgaatcttggattgtcacaaacatttacgtgccctgttctccgcatgggaaaattgaattccttcgctggttctccaatattaatttgccctcggaaaagcgttggttgatcgttggggactttaaccttacgcgtaggcctgaaaacagaaatatcgttgggggacattaacttgatgctgaaatttaacgaggcaatcagtcagctcgacccgatggaaattcc

SEQ ID NO: 169574 - DNA, 440 bp, Zea Mays
gtgagccattttcaaatttctcgcgcctatgtcttccctgacctctagtgaagctctctgacccgttcaattgaactataccaccctagttaggccgaagtccttgccgccaatgagctcccccgcttacacgcgtggaccgacctactccgaccaccaccgccgacgatctgcacctcgacgtgatcgctagagacccccggacctcgcccgacccttcaccggagcaacctcgccgccggtaagcccctccgcccttttcttccgacgtggtcactgttccattaggggaaggatcacgggtttgatttatcagaaacctagggggttttctgcagagtcatagactcaggtgaatagtaaaccgaggacctgtctgtaatacacttagaacctttcgctagggacccagatgcaaaaccattttcctttaaaccatt

SEQ ID NO: 169575 - DNA, 641 bp, Zea Mays
gtccaacttcctaataacagatttaggagccggatatatcgataacatatataaaggaatgttagagagacaactattcagtaaagtcaatctgcctcccaaactcagaaatctacctttccaaccagcaagtcttttatccattttttccaacattggacaccaaagagacttactgacttttttattatcaatggggactccaaggtatttcatcggaaggcttccaacaggacaagtgaaaatgtcagcatacaaattagtgcactctttagcttcccctaagcagaaaatttcacttttgtgaaaattaattttcagccccgacatatgctcgaaaaggcagaggataaatttaagatttctagcaccttccaaacaatcttgaattaaaaagatagtatcatcagcatattggagacaacaacaaccatttggaataatgtgtgaaataagaccacgaatcaaacctttttcttgagctttttgaataatgcaagccaaaccattagcaacaaggttaaacaggaggggtgaaaaaggatcaccctgtctaacacctttatgagttgcaaaataaggaccgatcaaatcattagttttaatagccactttacctcctctgacagtcttcataaccc

SEQ ID NO: 169576 - DNA, 643 bp, Zea Mays
gagaaagataagatcatacactctttagtggaaaggttaaaatttagcaaagccaggctttctgctcaaactgaagctcatgaagccgagatgcaagagctaaggaagaaagttaccgaagcaattgagaactttaatgttgaagtggtgaaacacgaaatatgtgaaattgaaagatcaagggcacagaagaatgtcgatgagcttcatgctgccaaggaaaaatgctatgagatatccatggaatgcactaaaaatctaaagaacaacttttctaaaattggagcatattcctccgtggagaagtttattcgtggaaatcttgatgaagtgatttaatggataaacggcgaggtcgaagctttcgaggaagttttagcgacagaggggacttttgtgcctttgccggtgcctgtggggctatgtccatcttggagaaggttggctacgatcatgctaaggctgtagctcagccggacttcaccttctcagcggatgatattaggaacccttcagccgaagctactaccttaggtggaaaaatttactccaaagtatggctaaagggtggacaagaaattgctgatgaagctattaaaagaaatgagaaagaatctcatgatgccttagaagaggtcaaaag

SEQ ID NO: 169577 - DNA, 343 bp, Zea Mays
ggaagccggatcgtctgtgtgacatctccaccaaatcgatagttatcttcacctgacggaagatcgggcacccccgttcctatcaagtggtatcaaagactcaggtattaccgtcaggcttaccctagtttagtttaggtttttcatcctataactccagataattgccatacaaaaaatatattccactgtcctagaacccttgtttagccttgcaatttcgtttcagattgctttgttgagtttgtgtccgtgtcaagtcttgttgctggtttaggtcgtgtcgtcatcgtagttcaaccgctccatcgctgttatttgtttctgccgctatcccatccac

SEQ ID NO: 169578 - DNA, 789 bp, Zea Mays
atcatctgtttgaccaggattttgctcgtgaagctcattgatgtgttattggataaatggctccattatcgctagctgatgtaggatgttgtgatgtgcctcaagtactgtattgtaatccggtgggatgaaggatttctgtcccatcctaccacttccatacagtctaccctcgtgtcgtgacggaggaaaacctattccaacctggtcttttaggatactattgcaaaatggacctccggactcaatggcctcttcggtacagtacccctctatcatggatgcctcgggacgagcacgacttgatacatagtcattcaatattgacatgaaacgctcatacgtccacatttcatgcaagtacataggacccaatgcctctatttgtgctaccaagtgcaccacaaggtgcaccataatatcaaagaacaatggagggaaacacatctcaaactatgatattgtctccactgtgaattcctaaagagatgccaactcatcacggtcaattaccttttgtgaaattctattaaaaaagtagcacaaccgtgtgattgttatctttaaaaacaaaggatttatagccgtgatggcaataggtaggaatgtagtcaacatgacatgacaatcatgtgagttgtagttggtgaccgtcaggtctttcattgacacaatactccatatgctagagcagaatctggatgggactctcaaattcttgagccaaacacacataacatgtttctcatctacgttaagattgtagcttgctgccgggagatggtactt

SEQ ID NO: 169579 - DNA, 414 bp, Zea Mays
ggcaggggctcatttgtgaaattggctcggcgaaggggtatggttaattctgagccgtgagatctattccggatggccaagattaggtctggcttacgctgaatcggtatgcgatatggaccgccatatctaaatccaacggatcacagccgatctgaacctcagtcatccgatcacgatctgaccgtccagatataatagatgaaggggtacgcggatttataatcttgaccacacctccccaatccaacggcccccagagcatccctctacttctaatcgcggccacaggctagcagatcaacgctgggcgacgcgtcttcctcacaacacccccttctgctctttggtcaggcgggtaagccctcccatgacgacagcctaccagagtgaaagccaatcggtcccctggtg

SEQ ID NO: 169580 - DNA, 544 bp, Zea Mays
atgaggtggtgattctccataaaacacgagaagggaaaatatgaaaggggtggtttttatgattgacttgagaatgcatatggccgtgtaagttggagctttgctgggaatagtttaagaagaaaatgctttgaaaagcacaggttatcaattgaataaggagctcaacagtaatgagaggggtataaagcctgtatcgacattaataaggagagtggagattattttgaaacacatagaggtctgagacaagaggatccattatctcctttagtctttgatctagtatatggggctagttcgttcaagacgtggaagaggatttgacacagctcgggtatgcttaattaaggcctggcctagctggctagccagatggcatccagcagctctttactgctagaaataagtacgtacttgctaggcccccgatgcgcaaataatgcgggtcgataccttaatttgccgggcagagagaatattgcgcaactgaacggtgctgtgacggtttggtttggatccaaattacttcttgttaaaagac

SEQ ID NO: 169581 - DNA, 583 bp, Zea Mays
ggaatttggggacactttagaaagggagttcggaagcaccttagaaagcactcgcgtgtagtgtgacttgtggtaactgtatgcttctaatgaacttgtgtgatgaataaaataacatggttggaaaaaattggcatatgcatagtagtaattctctccccctggcaggtggcctcagataaaaccacgcctaccgccttcgggattggagcaaggtttcccctaggagctaaaggagaagccgatggagaagggagtgagacccacctccccgcacctccggagctgccattagatttagcccaagttctagccaaccaaacccgactcattgaagtcctcactagaagtctagagaatcagcgcccgaatggtggaagacctcaggacaggatgggagattttctaagactcaagcctcccacattcgctggatccagcaatccgctcgacgctgatgactggctgcgcatgataaaaaggaagttagaagccattggatgccctgagaaccagcgtgtccatctagctgctcatcaactttctgggatggccctatcctggtgggataccttcagcactg

SEQ ID NO: 169582 - DNA, 615 bp, Zea Mays
accgtacccggacagcggcggcgatgtaggctccaacggtggcgccattatcggcgatgcgcgccctaatgcccggtcacccaatcatgcatacatgaagctcttcacaatactggtaccgaagcgaacgtacggagggaggactcaccgcagattgcatagcgtcatgtcctgcccatggcggtcggtagctccatggcgaggagattgatccagtgtgcaattccagcgtcatccaccattcatccacccagacacggccacgtgcaccatcccagaagatccaagctgccccaggccagaccacgtgacacaaatggcaaagcaggcaagaccccgtggcggcggcaacttcctcaccctctctgctaattctcccagacaggtggaagcacgaacgccaatgtaggctacggttagatggcccagggggagagtcgcgatggcctccaatttatacctccgagcaacaacctagcgcggatatagctcaacatccccgagcatcacggcagcccggtaggattcatgcccatggatagggatgatactaacgaagctggcccgcacgtcattggcgcatgtgaggactgacagcagggtccactagtccat

SEQ ID NO: 169583 - DNA, 1083 bp, Zea Mays
tcaaagcaataaagaattaatttcagatttaaaattgattttttgacccgtcaatcataatcactgtgtcatctgcgtattgaatatgtgaaatacctcctggtagaacatcgttcaaaactccagagatgtgacctttggaaatccctacatccaaaagcacactaacggcatcagccaccaaattgaaaagcagaggggagagagggtcgccctgcctaagacccctaaaggtcttgaaatatttactcctaccaccattaatgttcacacatactttcccattctccactgttctcataaccatattggtccatctgtcagggaacttcttcaattttaaaacctcagctaaaaaaatcccatctaaccttgtcataggctttctcaaaatcaatcttcaaaatcagacctcttttttttaatttcaaatcatgaattacctcaggaagtatcactactccttcaagaatgtttctgttttttatgaagactgtttgattgcccccaacagccaccttggctacctgggaaagcctattagaaaggcctttcgtgaaaattgtgaaatcgacgttaagaagacagattggacgatattgcttaatcgaggtggcatctttaatttttggaaccaaggagatgaccccataattcagcctctgaatatctaaatttccgccatggaaatctctaaacattttcataagatctcctttgattaaataccaaaagtttttgaagaaggccaccccaaacccatttggaccaggggcagagtcaacatgcataaggccaatcgcctgttttatctcctcttcatcaaagggcctaatcaggtgaatggcctcctcagtagatagttcacttctaccttcccagaagtcctcgtgtaacttcatcgcacaaggaatagatggcccaaaaagatttttataaaaatcaaccacgtggtttctaatatctttctggttcaccaaagtacaagaatctgccaccaagtgcaaaatattatttttcctcctccgcccgttagcaaacaggtgaaaaaaactagaattagagtcacctttgagaaaccag

SEQ ID NO: 169584 - DNA, 421 bp, Zea Mays
ttcattagcaattttaatcatctcaagcgcttccttcagggccgcgtcagcttctaggttgtatggctccggtgggggagaaagttcagctacatcataaaatgtgtttgattagttccgaagctataaacggattacgaagctaaacctcaataaaagtacctataagcctcacacgctcagcaacttctacagctcttttggcttattcttgagcgtcgtgagattctttttcattctttctaatagcttcatcaactatctcacggtcgcccttcatccatacatcggagtaaaatctcccgcctaatgtagaagcttcggatgagggattttaaatctcgacggctgagaaagcaaattctggctgaacaacagccttggcatgttcgcaaccagcattctccaagatggacgtggc

SEQ ID NO: 169585 - DNA, 784 bp, Zea Mays
ggcggtgagagctacgtggttgacactgcggtagtgatcctttttctgtcgtttggtgtcgaagtctacgcctgatccgctggtaatcatgtggatgaccccgcggtaaggctgctcggcgaagtcctcttgcttgggtgctagtggcagagggctttgatgtggaggattttgatgatgcggtggaggagggaggacttggatctcttgatgatgatggtacaagtgattgggttggtgagggatctgctcgttgtggtatggttgctggtggtagtggtggggtgataagtatgtgcgacaactcgttggttgtcagctggctaatttctggccatcctatctttggtggccttagtttccgggcaatccctggtggggtgtgcacaatcttcgccatgaaataggtagtaaaaccttcgcggctgctgggcccgaactctgcctcttcctctggtgttggtgctgcgattttgttgtgtggggtactcctgacgacgaactatgtctccggtggggtgttggttagagatggtgcttaattgttgctggttgcggttttgcctaccggaatcgaactgcgccggcctgacccatgttctgctggactgcggagtgtccttggattttcactgagattctatcttgcgctggtgcagctcttcagacctggtgtacttttcgaacaattgatagaggtcttgcaagtttttgggcgggtctctgatgcagtggttgtacaagacaccggcgcgaagaccactaactgcatagtggattgcta

SEQ ID NO: 169586 - DNA, 580 bp, Zea Mays
gaattaattcagccggcgtggtttaagttaactctcgtcgaccagttctccaaccaacaggagtaagataattcacgttggcccttgcattagccgacatggattatataactcccgtcgactagaggagtggccgataggacttaattgtttctagggccgatcaaaaacccgcgcgatctctctcacgcgcgcaccgcctctctctctctctctcttctcagtgtgcacttcatcattgaccccgccactgcgttcccgcctcttcatcaccgacgctacatcgcgcgccaccttcgacgccgcttcgccgcctccggcgcgccctcgctccatcgcccctggatgttcccctccgtgtgtcgcgcctcacctccctagccgagccccttgctatctcgccgcttcaccgttgagcaccacctcctagctaagcatcgcctccctatgtgctcgttccggccgctgagcctctatctctgtccgtcagagctcacacgccggcggttcgacctcccacatcgtcatgtccctcgaagctgccgctacatgatcagagcgttgtgtccctatcccacca

SEQ ID NO: 169587 - DNA, 546 bp, Zea Mays
ctccttccactcggcaccacctttactgctagccgtttcccgcactcatgtcgtgccattaatagtcatggtcgagctcctccgtcggcatcctctccactcctctcgttgcgtatatctgcagtgccgcaggttcgcctcactcttctccctgctcgcccttgctgctctctcctcgctcttcgctctccactttgttgccgcgctcgccacccgcaaactgccgctgccgaagctctctgctccttcctagccgccaacaaagggcgtcccattattccctagcgctctcagccatctgctcagccccgtcgcgctgaagatggacattgagcagtcgtctcgccatcccctgctgtttgcgcacagcgatactcgccgtcactagcgcctgcacatcgctggagttcactgtcacgacgtcactagaacctctacgcccagcttgtcgcgccgaccgtcatcatcattctctgttccacgtcgcgacgatctgttttctctccgcaatccgaaggtaaaagaaaggtccaatttttacacgct

SEQ ID NO: 169588 - DNA, 551 bp, Zea Mays
catcaaatcctattgcgtccagaggacacatttaagacagcattccaaactcactcgggccattatgaattttgtgttatggcgtttggcctcacaggggcaccggctacatttcaaaaggcgatgaatgcaacgttgtcttcactgctccgccgctgtgtattggtatttttgacgacatcttaatttacagctctagttttgtggaccatcttcagcatgttcgggcagttttggaattgttggttcgtgataagtggcaggttaagctgtcgaaatgctcatttgcgcagcaacagttatcatatttaggacacatcatttctgctgcaggcgttgcaactgatccatcgaagattcaagcggtggcatcgtgggctaccccacgttcactcaaggaattgcgtagttttttgggcttggcgggttattaccggcggtttgtcaggcacttcggtattctggccaagcctttgacaaccctcctgaagaaaggatttatgtttgtgtggacttctcagcatacaacagcatttcaggcgctgaaggat

SEQ ID NO: 169589 - DNA, 443 bp, Zea Mays
gatggataaaatcgcttatgtcatcgtcatggcatctagaaagctcagacattactttgaagcccataggatcaaggtattaacatagcggagtctgtcagacatatacaacaaccccgaggcctccttatgaattgggaaatgggccatggaattatcataataccacatgtcattcgagtctaggagtgccatcaagccataagtgctagcaaacttcgttgttgatgggataggaacagataccccttgaccacccaccagtggaacgacatggacggttcattatgacggagcctggggctattttgggttcgaagtcacaacaatcctcatggctccatcaggatctaagtacaaatatgctgctcgtccaagtttcacgaatgacttcgatagatgcacgaacaacattgcagaatatgaagcaatcatactaggac

SEQ ID NO: 169590 - DNA, 770 bp, Zea Mays
aaaaaggaacaagcagaatcaacagaaaatgaagatggaggatcttatgaaggtcgtcaagaacaatgcctccccatcaagggcctcgccataaacattgatttactgcaacaacgaccctaaagcccttcgaaaagcatgcgacttccacatttcccaccatgaactgaatctgtcagttgaaaaggtgaatgataggtcagtaggaatgggaatcttcaggtcgtcaaacaaggaatagtattggtgggcggtaatggagtcagaaaagtcagctctacattctatcaatagatgacgatgaaaatgaggagggacctatccaagactaaattgttgagcccctacaattggttggtaggactcataactagacttaatgatcctattagacgtactcatgccaaccgagaggaagccagggcggatcatgagagaatacaagtgtccagtatcactgtcatcagcaaagttgtctaggctgagggaagttgaactctcaaactctacagaatcaacacaagggaagaaaagagggcttttcaggcccttaaaaagattttgaaccaactagatgcatctctagggttcaacctgctgtcagggagactgtataaggcttgaccataaccggtacatcggatctgtctatcagactcatatggaatgacttgcagctaggactgggaatgtgggaatgcatcgttgacagtacagatgagcccactgttggataaaccaatatcctgagtttcttaccactaagcaag

SEQ ID NO: 169591 - DNA, 434 bp, Zea Mays
gaagaagctgtatgaagagaagaaagttgtggatccttttattgctggtttttatgaatctatggcaaagacaaatacagagaaaattaccaaggagataatggaggatttgtctaaagattctaatgacattgatgattatgatgtggaaagtggagatgaagattctgaggaccggccctggcggccaagccataccatcttcgaaaaatcgaccattaaacaaagtcatattgacaccttgagaggaagatactttcgcgacatgtctattgtgagggttggaggagacagcaccgcccctgctcctgaggaaaatgaagttgttgtttaccgaagttttttgaaggcagaccttcggttcccgttgagcaaatttgtggttgaagtgctgaagatattccagatctttcttcatcagcttacccccgaag

SEQ ID NO: 169592 - DNA, 1427 bp, Zea Mays
  misc_feature (1338)..(1427): n is a, c, g, or t
gggcaggggagggacggactatggtaacgagtaatgatggggtgtctgttgcgcggggggaacgatgattgattcatttgttggatgctgctgctcctgccgagtactactattcttctgctcgggtcgcctcgcctctcatcctcctactgtactactagtcactagtagtcttcagtcaagaacaagtcatggcatgcaggatgaatcaaggagcagagcagccgcacggcatcggaaaacccaacaacatcctagtccaccgcccttagcctgcctgtgcctgccgtgcctaagagcagagtagcagctcgggtggcttggctgcacctacatgcaactcttctgaatattctagtgcgttgtactacgctctagataccatacgtatcgtaccagagattgatcgagagacctgcagttccctgcatatacgtactgtaccgtatggtctctgagctgtgctgcctctgtggcctgcccttggcccctgccaggctgccatgttggctttagctggagcctctacgtaccatggccttcgtacatacacggccaggtcaccagctgcccaaaaaaaaaactccaacgatcagcaggtaggtgtgcccattaagactgcactatgattgtaatatgcacgctcttcttaggttcgtttcaagagttattgaacatctagttctactgtaaacatacccttttacgtgaggtagtacatgtctagttcatcgcttccttgcattgtgtgggaggattaccaagttcgtcaactttgaccctgccaagctggagtgcttgcctgcctcaaggtggaacgtaaaagaggataggagaaagaacaaaagtggatggtaaatttacaactaacatattcacgggaaacttaaaaactttttataagaaggtggactgtatttatagtgaagatctaaccgattaatgtcttcatagaaatatcattggtaacaccttcgcttctgcttaactattataatgaagagcttaccgattaatctcttcatagaaatatcggtggtaacacctctttcgcttaatgattaggttttaggtttgaggtacgccatatcatacagaaggggtgcaaatatgaaacatgactattatcgacttttgagtcaacgataactgtcgggtatagtaattaagggtacctagattacacccctaaagcacgcgtgacctatagaccaccatcaaagcacgttccccaaagatgaaggatcataagccatgttttgcctgaggcctccctcaggggtcaccataactctggctcgcccgagcctgccctcggacggggtgtgttctcgagannnnnnnnnnnnnnnnnnnnnnnnnnnnnnnnnnnnnnnnnnnnnnnnnnnnnnnnnnnnnnnnnnnnnnnnnnnnnnnnnnnnnnnnnn

SEQ ID NO: 169593 - DNA, 620 bp, Zea Mays
aactgtgttcccctgtctgacactatctttcatggaataccatggagtctgactatttctttaagatatatccgggcaagggtggctcctctgaaggtagtttttactgggatgaaatgagctaccttggtaagatggtcgattataatccagatagaatcattccctttttgggttcgaggcagtccaattacaaaatccatgcctatttcttcccacttccatttgggtactggaaggggttgcagtagacctgcaggcttctgatgctctgccttagttcgctggcaagtgtcacaccgggccacatactgtgctatctcctttttcattcctctccaccagtatctggtcttgaggtctaggtacattttggtggttcctaggtggatggagtaggctaagttgtgagcttcgtcgagcaggacttctcgtgcttctcctttcggtacatacagacggtttctgaaccaaaggattccttcttcatctgtcttgaagtccgggagttgttccttgctagttttctccataagacctactgtctcggtgtccaggcgttgagccttgcgtatgatgtcttctagcattggcttgacttctaggctgccattgtctcc

SEQ ID NO: 169594 - DNA, 820 bp, Zea Mays
gggcaactggcgacaaagtggtgggggttgccacagttgtagcatccatcgttcaacccgccacgtcgctggctcatacaattgttgtggaaccgcgtgaactgactagccacaagcgacaactcctcatccacaaggctctccacctgctcctatatgatggtcaacaaagaagacaaagcaaacatagcagatgaggggttagaggaagcaccacctctggaccagggccatggtgggtgcattagggttctcaatcatggaccgggtttggtggtcaatctcaatggacttgagcttgctgaatagctcatccacggtgagagtctcatagttgggcgactcgatgatcgctaagaccttcacctctcaaaccctccgatccagagcatgaagtggcttgagcgcgctctcatgatcatcatagtgtaactatgccttgttggcacacatcttattcatgatggactggaatcgagaaaacatagtgtctatggtctctcgagccaagtgagcaaagttcacatactctcgccggcatgtctcaatagtctcgttttcacatgatcattgccctcattgaatttctcaagagtggaacagttctcatgagtcgtagctagatgtccgactcgctcaaactcacccgcgagaggcacgagaacaaagcgttgcgagttttgttgttcgaatcatgaaactccactttgaattggagtgattcgttcacttgcagcattgaatgcaacaacaaggaaaatctcccaaactttgtacccgatactctaaagataagccaacatgtggaccttccagtatg

SEQ ID NO: 169595 - DNA, 563 bp, Zea Mays
ggtagatccaatagccagtgcactcatagggcgatctgtgccgacaactgagctcggaagaatgattcccgaatcctggtagtgaacagatctgccgctataggttccctctgagctggtagccaagactccacaggtaggtgtctgaacctacgtacccgggctgtagtggcacgctgaagatcaatcagacgaggatcggtagcaaacggtcgcacctcggtctcatctcgctcccggaagcgggctggtggaatgggtgttgcggaaatgggagcgggagggggaacagtggaagcgagaatggtggaggtggtgggtatggcggaagtggtggatggctcgggagcgactggagctgccaaagtgggaggtggagtagtagctatggcgggtgtagagggagcggatgagcgaggtcaagacgcgaggcgacaaaccctgtaggcaatcttatctaacgagatctgcaactagacacctcgctttgcctactctgctgctgccgctacaagagctgctcaggctgctctatccagacgccgcttcttgcgaccttcctg

SEQ ID NO: 169596 - DNA, 512 bp, Zea Mays
gaaaaatctgggtgttcagaatcaatgcctcctgagcaaatggctttttaagctcatcaatgaggaggggatgtggcaaactatgttgaaacgcaagtacttaaagggcctacccattggggcggtggagagaaaaccgggcgattcccaattttggtcgggtttaatgaaagtcaaacataagttcctggacttcattaggttcaaggttaataatggaaccaataccagattttgggaggacaggtgggtgagctatttcaagcttaaagatcgtttcccttctctctataatctgactaggaaaaaagggagttcagtggctgatgttttcaggtcagtaccactgaatgtttcttttaggcgaggtttgatgggggcaaaccttgaggcttggtttagattggtgtcgctggtggtggctgttcaggttaatagtgcgaaagatgtgggtgagtgggatttacaccaaaataagaagttctcggttaattccatgtatctggcgctta

SEQ ID NO: 169597 - DNA, 885 bp, Zea Mays
atcatctgaaaatatttagtattactatcccctccaggagctccttgaccttcgctctttgataccactttatttcctcctcccggagtagctgagcaagcctattctataagtagttgcgcagatccagctccgaagtactcaactgaactacttcagctctcttatctaaatcatcaagcttagatatggtctcctttttttccttttcaacaaccccgaagtgtgctttgcccaaccccttaagtgttggcgtgccttcctaatcctggcttgccatttctccagcggagtagaacctcttgtctcatttacccaaatatcttttaccatatccacaaaaccatcccgcagaaaccatcctaattctaacttgaacggaggaattgtttgggcggttacaactcctgtgctaagaagcagaggagtatgatcggatatatttctcgacaaggcatgtatcgaagctctagggaattttccctaccattatgtagctaccaaaatccgatccaacttctcataagtcggattatccctagtattagcccaggtgtaccttcgccccaacatatgcaattctctcagatcaagaccatcaattaccgcattgaataggaatgaccaatgatgatcaaatctatcattatttttctcagatggagatcgtaaaatattaaagtctcccccaatgagaataggtaaagtttctgtattgctcaaacggactagctcagaaaggaattcttgtttgaagcagtcctgggcagggccatccaccgagacaagagcccaattaaaaccatctgccttatcatgcaaattaaacttaataaagaaatccccttacatgatggcaccaacatcaaagacatcaacgtcaat

SEQ ID NO: 169598 - DNA, 312 bp, Zea Mays
ccccgccgtgccctctgccacggtgagctccgccccgacgtccgcaacccgggacgcgctccaatttcccctccccctccccgaatcactctgctcgcgctcaccgccgttctctgcgcagccgccgaggtccgccaccgtcgactcgggctgtcgccgcgtctccgtcgccatcaaggggtccccggagttcgccttgaggtaaggaacctctcccgacccctcccgtcctttcttttgcctcccgtcgcgtttaattgctcgccggagtcccttagcgccaccgccgagccgcttcgccgtgggccgccc

SEQ ID NO: 169599 - DNA, 550 bp, Zea Mays
taacctctttgaagggtttcttaaccacatcaacatcgttgtcaacatggcatccatcaaagtgttgagatcagagggtacgtacatcgcaccagatggtcaggagcgaaagcattgttgcttgccgttgccgggacacagcactgatcaaatgcctgattgaccgctgggctggacgcttcttttgatttctatcttggtctcctcccctaccactactagcagcagcaggcaatgatgccatgtggtttgtttcagctctgcaggcgcctgcagaggtcgacggacaatgactatcagtgcatgatcagtatccagttattggtgggcacggattgtcacagttcagagaaaacagtagttgctgctgttgagaggaggagacagcgcaacgcttagactatccgcagccgttccccctatatttttccccctaaatcttactatgcagccacgtcagcaagattccctcccctaaatttactcgttccgcaaccgttccccctaaatattcccctacatatccctctactcattaaatatacatttc

SEQ ID NO: 169600 - DNA, 319 bp, Zea Mays
catgcaagttgctcagatagaaggactgacgaagatcgctatggtacagtgccaggaaagatctccagtgtcgtgaacctgatgctagtgatcctccgccgtaattcatgctcaattgggagattcgtgccgcgggagagatagataacgccgggatggggtgaaaagatccggggaggggtgaacccagtcactggccagaccggccattgtgtcctaccgcggttagtcgtgttgacatcaccggagctcaccgtttctccggccgtgacaagaaacgatctctcctccgtgtcgtaagggtcgtggcaaccaaccg

SEQ ID NO: 169601 - DNA, 496 bp, Zea Mays
catgtctctctttgttggggcatgttttggggaggggttcctcttcggtcggcgaaggtactcaaaacattgatttgtcaattattgctaagtctgtttggattgacgaagtctaccctcgttcgcatttaaacggcacacacgaacacgaagctaaagatgcttcggctctgcggtctgaatacatgatgaagaaccaggagggataaacagtgaaatctttaagtcttggacaacacgtttgatgaaggaaaggacaatagtacccttaaaagatcttgtagcttaaatgcaaaagaactaagggcacaattgtaattttatacgaaatttaccctagtccgctactataaatagaggtatagtgccatgcatacgagcaccctttggggggagaattgcattgctctgccttcgaagctgtgatttcctatatcttcgtattagtgtctcaagtcacgaaggtatgcatgtatttgtttgtaatcaaggaaag

SEQ ID NO: 169602 - DNA, 1049 bp, Zea Mays
atgaagaataggcatagaacattgcaatcatttttctctccagctctgacacccgtcatgcctattgtgcagccaagatcaaacctcaattctcaaccaacagtggaaaccgaaaccagtaacaatcaagcctaagaaattgcaactgaggaggctactgttgaggcagtagtaaatccaacttcacatgaacaagagcaagaaattccaccttctgagcaggtattcgatatagttgttgatcatgggcttagaaaaccatttttttatatgctactattagagtttatggtcgcttcggcccggaccttggctaatttctaggtccgccactgttcaccataagcccccactctttatatagccgagggaatgtgtgttcattgttacataaatattttgatggggtatgtcatatcctccattggacgtaatcttctagtactccttgtagttccaagaacatgctcgtccatcatttatgatcttgaccggattgtggaggagagttgcatcctgcaggtgtttgaagcctcactgtaatgtacatccccgaggatcgtatgagtagttccatagagtcctctcatttgtccttgtcttatattgttcgttatggcctgtaggtcctcgtttgtagttccaagggtgaggcatttgggcagtaaagggcatgtgtctaatgatcagagggttataaatgtggtgtcccttgctgagagattatgcttcttctaagttgttccgtcctattaggggtgtatggtctaaattgacttgttcagtacctagggttgggaccaagcgaccgaggtgactcaattcgatgtctttagggttatgtttgacccaatcaggggtttgggctagaaacacttaagataggtctatcccggtcgaggttacctggtcgtatctacggtggcaaagattggcttggtctgcttttcgttggggagttagcttggatccatcaaggttgggtcctactcggttgggctcatcttggtcaaggagttaggtcagggttgatcttgttcagggactat

SEQ ID NO: 169603 - DNA, 482 bp, Zea Mays
aaaattcctaagacacagagcacagcgccaaaggatggcgggttgattctccggaatcccaggggctctttaataaaactgacccgcgaaggggtacggtgcactctaggccgtccgattacaaaccgacgaccaggattacatccgcacgggatcgaaccggtatcacgccgagaccgaccgatctggagtctgtggctcagattcaaagtagccacgacctactcacacccgaccgatcctaacgcaacggtccagatccattcgcccgaaagggtacgcgatcctctaatcaccaccgtgcgattcccatcgaacgccacgaggtcatcgcccccttcctccacccgacgcaagcagcgccgccacggccacggtggattcctcgccggagttcaccagatcggcgccagcacccgaattaacccaaattgatagcttctacgcgcaccgagcatgacaacggactcaactgaaacgaa

SEQ ID NO: 169604 - DNA, 389 bp, Zea Mays
tgttcggctgctttgctgttgggtggcgctcggtcatctttgcttggcacccagttcatctctgctagtccctgactccccattcatctctactagtccctgaaattactgtatcgtgttctgtcactgaaattaacacactgtatcgtgttctgtcactgtatcgtgttctgtccctgactccccattcatctatgtaaatataacacactgtatcgtgttctgtcactgaaattactgcacataattccataaaccaatctattgttatacttacatgattttttcgttccctgccctgtcagcatctattttcctgacctatgatgacgactcaaggaggtttgcagccgacaagcaatgaagctaatatgtgcaccaacgacaat

SEQ ID NO: 169605 - DNA, 663 bp, Zea Mays
gttgacatgtcttgctagaggccgctgtcaattattgggccaagtaagagtacttgggccatgtctatatgtacgtgaacctatagggtcacacacttaaggggaaggatgtctaactcagatttgaccgaaattagatagggctttagggttactaatgggcctcggagttagaagcccaccagaacgcctatataatgagtggcaggggcgcggttaagaaaaccctaattcgccaccagtgaacgagcagtcgtccgccccttggcctcgcctagccgtcgtcgtgaacctagtagttcggaatgcggcgcttcctccctgtatgtgtggatacctcagaggtgctgcatctggagcactaggacgaaccactcgaggatgtgaaggtcaatggcgatagcacaacactgctcgacgcgttcgtctacgtcgagatgtcttccgctgccctacgcgtctaatggtaattccatgacctataaccgcagtagttcttggtgttatggggtcaaaaattttgtttttggtgttatgatgtcttccgctccccataatccttcaagtacaagatcacacaagaactactcaaaactggtgctcaaatctctctaaaatcactagaaggcgtggttccgaagtttcagagtgttggtatgccct

SEQ ID NO: 169606 - DNA, 472 bp, Zea Mays
tataatattgttagctggccagattaatacaaactaagaagacagaaatgggcggcaaggtaccgaagaaaatggcagagattgattgattgatggatggacggatcaaccaaaaattcgcagggtctgcgcaatgcatggcggccatccttgaaatcgtcatgcacaacatgatcaattagctacaaccggaatcttacatacagaagatggcttacatgcatgcagctctccaaattaaatcccggcaactaaacgtaattactggtgctaattacctagccagggatcggacgatcgatcgatcgatcttagtacagacttttttagctgtagcagcagtagttctagttggcgatcaactatcttttactacaccaaggcaaggcaactgcatggtgcgtggcagctcgcgcgcgcgatctccatctccatcgacgacgagatcgagaccggaccgtccaagtcacaa

SEQ ID NO: 169607 - DNA, 479 bp, Zea Mays
gaaagcaacgtgagaggcacgccctcgctcctggcagccgagaacgcgtctactgctcctgacggctaggtttccatcctcctctcctcagtctctcgatcttgctcttcttaggtcctgtgacaacaaatctctctatccgcatcgtcgttcttaggcgccgtcgtgaacgctacttctcttgcaggtaacaaccctaagttcttgatgttcgatatcttccatattttcctttttttcctcctccatacttcttagccttctccagcgccgtcgcgactgattttcaatactgtatttcctttattcggtaatttttctatattgcagttcatttgttcgataactgtggaggttcccaatcgcatattccgctcctacgaaacgacgtcgttctctatcaccgttgtcgacgctattgctgcagcaagtgaacgacaaaggtgacaaatcctacagaatccttttttacatagtta

SEQ ID NO: 169608 - DNA, 690 bp, Zea Mays
tatggatatgaacctcgacattttggtattcagacagatagcgttgtttcctccccagatttggatcagtggctgcaggaccgtgaagctatgactaccttgatcaagcaacacttgtctcgttctcgtgatcggatgaaacgacaagctgacaaaaatcgttcggagcggtcctttcaagttggcgatgagaggtctttgtcaagcttcagccctatgtacagtcttcattggctccaagatccaaccagaaaccggcgtacaagttcttcggtcccttccatgtgttgtctcgtgtgggaaccatggcatataaactggatctgccgacgtcgtcttcaatccaccccgtctttcacgtctcacgactgaagcaagcggctcccagtgatcggcaggtaactttggatattcctactgatattactcagctttgttatcctgaacaggtgttacgtcgtcggcggttactctcccatggcacccgcccacgctatcaggtgctcgtcaagtggtccggatggccggtctccatggctatgtgggaagaggaggagcgtctttgccaagagttcccaggttcgtctctttggggtcaagctgcggcgcaacggggggattgttacaccaccgggccaaccatgaaccatctacgccgcaagccgggcctcgtcacagttcttgtcgtat

SEQ ID NO: 169609 - DNA, 1057 bp, Zea Mays
tgtatatagggctacaagtttgctacaaacagattagcaagttgtcatgcaaaaattcaagaaaaatgcctctgaagattctcggtcagaacaattgacgaagcttctgatggtacagtactaaaaatatcccaagattagataacttcgccgccggtaaaccgtgcgcccgaattcacgtcggtcgccatgattcgtgccgccgggaaagagattgcgctaggccgtgaaaagatcaactcgcggatgagttcgggctactgtggcctcgttgttcctcgaccacttgcaccggcgacgtggctttgcggccgtcaccggagtttgcgcccttcaccgcgattgtgccacgcctcaggccattaaccacgtcatcgtgagttgtgatcattacccagtgaccgtcgtggcttcttatcccacaattgccacgaatcactgcgctagtaacatctcccctctccggccaccaccgcgccatccccgattcacaagccaccgccctcggagcctataaattgagtgtgtcgttggctccgcaaggtagtcaagcaaccaatacaccaactcgtgcctcgaattatccaccagagaacttcaatatgggatttcccccaaatcaaccaagaacaccgtgtagtgtgagctcaccatgcctagctcgttgcaggtccgttcatggcttccctgttctcgttttaacatctatatgtgctgtagatgcctagcagcctggccgattgaattagattaggctagatcaccgggaacaccacgggttgtcctcggcttgcgccgtcgacgtggacagagcgatttaggggtagaactctgaaattgatggaggggaaatggtgaataggagtcaaatttggtgtcagccgcttgggagcactgatagttgagttatccggccgatatgagctcaccagagtgcctgctccgccgtccacgatcgtggaccgagctctgtaaagaaatagaactagggggttattcttatagatgtcagcgactctaggaatagtgccgcgatcctgtttcaagttattcaaat

SEQ ID NO: 169610 - DNA, 789 bp, Zea Mays
caagaatcaaatatggaataagctattaacgaggttttttctacctcggggtttagaagaactcgtgaaggaataaatgatgaagcagcttgcaatcaattttcgaaactggaggtctgagatgaatacaaaatttgcaaagaaaggcctacacccgacaaaaaaatataaaatctcagaaggtcagtgggcagtatttttagagtagaggagcagccctgaattcatatctctaagcgaggcaaattcagaactatctaagaagaacaagtaccaccaccacttaggcataggtggttacaagcgtcatgttaataaatggagacaagaagacgccgagaagaagtccgtagggttgctgacactttccgagcaacttggtgaaaggatggctaattggatccatgctagaaaacccagggaaactgaggcgagtgtatcttttgatattcaaatgtcgaagaagctgcgaaaaacatatatgcaatggtagctaagcagagccaaggatcatttaagccacaaaaggagagagacatcctaaggaaggatggaaggaaggatggaaggaaccctgcgcatcatggtcgtgtacgaggaatctcgtctaaggaaggatggaaggaaggatttggaccacagtgggaaggtttgtacaagaaacttgatcgatacaaagaagagttgtcagattattttaagctggaggcaaagaaagagttcaaagacatgatgcctcaaatgctatcaaatcctctaccagaattgatacagtagttggcgagtgcc

SEQ ID NO: 169611 - DNA, 866 bp, Zea Mays
cacccatgagagttagttcagttagtggaaggacccaaactgatagatttttccctagtgcaaaggttcaaataagggggatagagtccctactgatttaatatttatggataaccaggatgcaactacagatgtcatcctagggatgaattggctaaccaagtatcaagccagtcttagttgtgataagataacggtgaagttagtgtccctatcaggagaagaagtgttagtagagttgatcttgtctggaccaagaaaaggaagttgtcatcaagtcaccgcccatattgaagagattaaaccattagaggctatcaatgtagtatcagaattcccagatgtgtttcccgaggagttatcaggtatgccacctgaaaggaaggttgaattttccatatagcttataccaggcaccgcccctatttccaagagagcctatcgagtgtccggaccagagttggtggaactcaagaagcagattgatgagttgtcagagaaaggctacatcagaccgagtacctcaccttgggcagccccagtgttatttgtggagaagaaggatggaacaaagaggatgtgcattgactacagatccttgaatgaggttactatcaagaataagtacccctgcccagaattgaagatttattcgatcaattgagaggagcctgtgtgttctcgaagatagatctgaggtcaggctaccatcagcttagaatccgaccttcggatataccgaagacagcattcatcaccaagtatggactatatgagttcatggtcatgacattcggtttgacgaatgcgccagcctacttcatgtacttaatgaacagtgtgttcatggactacctcgacaagtt

SEQ ID NO: 169612 - DNA, 704 bp, Zea Mays
ctgcaagtccctcccccctcggtcagggaagcagccagatgtccgcacaccgagctggatagaatctccgacccctttggagataacagagactaaattactgcttgctgaaggacagaggtctgactgctgaggctgtggtcgctgatttcgttttcaagaacatctagcctttaaaggatagggcataccctgcttatttgtacagtggcatcaacgattctacccggtttacgaacaagagaatccccactgaagatctaatgagccgagtggatatgatcctgaggggcagagtttcaaatgccggtgctcctgttgcctattctgcctggaacctgccaccacataggccattttccaagtttgtgtccaaccctcctgctcgtgatggtagtctgggtcttagagtgtggccctcttctgaggacattgaggctctgattgccccacttcagagtcttccaaaggatgagaggcagactcattttgagatgccagctagcactgacgacgtagagatagatgttgtgcttagtttgctggctggggaatcatctgactcgacccatgccgagccaatggctatcacagctggacaagaacttggtgaagcggtggagacacagaagcctgaaggtgctcgcctgaagcgtacactccgagtgagccggccaactgcacctgttgaggaaaagagaaag

SEQ ID NO: 169613 - DNA, 628 bp, Zea Mays
gaacaatggaagtgaatattcaagtgagtagcctcccatcagcttggcttaagcccagcaagcgtacgattagcgacccggtgaactcacatgctcagcaaggttgtggctatcggtggtctgaagtctgaacccgtctaacccgcacatcacgtaagctagcttctcgtcgtgggcatcgccgcccgtgagcttctccttcgctatctttcccttattcactgccttcccctttgtccacggatcagaaccaagctccggcgaggtatagcgaggtctgaagaagcgtttggagatgcagaaaatatatgtgatgtaaagggcgatgcgatggccgtggcacgacgcgagcagaggagaaagtcgatcgacccgggcgaggacacgagggtgatgctctcttggtaggcgggtgccatacgagactggaagctagaggtggagcagggcgagactgtgttgtttacgtcgtggcgtggctgctgtaggcgcacagcgaagtcacgcgggcacgacgcgaggctagatggcgacgtgcatgaatgggagaccaatcaccaagcggtgacgtggacgaacgggatgcagcctttcctcccgcgtttaatatatagaaattagtttggtt

SEQ ID NO: 169614 - DNA, 431 bp, Zea Mays
ctcctgcacaagatgacacgatcagggtgggggccagcaccaaccagccttatggctactattgggtggacaacgatagtcggagcgccgatgatatcggtcggtggagaggacagtatggacccctgtcatgagggttgacccttgattctttgtttggagaggtcgtggggggaggaagaaagcgatataacttctcctccaacgcttaagcccaccgccctatgaagagagcctatctctaggacgacagaagagcaagaaataaacaagttctaaaaaaccaccaccatttcccatgataggcgacttttgggccagcattggtgaggacactctgaggtaggacgctttccacagtccatggtcagccgagaggacgccaaggggtttcaagcggtactaccctcctaaaagggtgttgtttttgg

SEQ ID NO: 169615 - DNA, 428 bp, Zea Mays
ctgggctgatgagcatcacaagcgtacgagggtgttgaaacacggacaagaaggacgaggatggacctgtgggtggctgactatggtgcggtaaaccgatttgggggaaaaatcaaattcgtgcgctacggtggctaatcggcggtgaggagcggtgtgctgggttcgtaactagttagcggagcaagccggggcgtcaatttatagcgggcgactgcgagtacgacgaatttgaatggagaagagcccacgatgatgagggaatgagtcaccggagcttgctaacgtggcattcactgggcaaagacttacaactgtcgctggttatcctccaaaacatgccacgacgttgtgaaatggcttgaggcgtgtcacgaccgaggtaaacggcggcaaccccggcgacggtcgcatagccacatcgccgg

SEQ ID NO: 169616 - DNA, 523 bp, Zea Mays
ctggcaccctacttcggccgaaaccgaatttacgccccaaccagcgtttctcctaaattaattgcacgggtggtgacctactccgccctgcccacgggaacagcggaggctaagaacttttgctcgtgttcccggcaatgggtggcgatctaattcaattggacgagttggcgagcatcaccatcattcagagacataagaacaatgcgtgaattgtacggtgccttaccagaacgggctggccatggtgagctcggttcttgcggtgttttgggtggatttggggaaatcccaaattgaagatctcgggtagataattcagggcacggattgatgcaggagtttcttgactacatggcggagctacgggcgaggtcaatttatagagccctcaagcggtggccgcgaatttaagcgatgacgcgcggcggccggaggaggggaagagtactggcgcaacggcttggtgtctaatgccgtggcagttactccggcgagccacggggagtcgcaaaggttcacg

SEQ ID NO: 169617 - DNA, 357 bp, Zea Mays
cgcatcgcggggaatctggaggagaaataggaaatcgcgctcgtcaccttcctccaggcaaatgccgacgtattcgcatgggaaccatcacatatgcctgggatccccagcgaggtgatcgagcaccatctgaagatccaccctgacaccaaaccggtgagtcagaagcctcggagacagtccattgagcggcaggatttcatccgtgaggaggtccagaagctgctggatgctggcttcatcgaagaggtccatcacccagtatggctggccaatccagtcatcattcccaaggctaacagaaagctttagatgtgcatcgactacaccaacctcaataaggcctgtcccaaggac

SEQ ID NO: 169618 - DNA, 575 bp, Zea Mays
ggccggttaacgagaagcagggaacgcccatgcatcgtgatatatagagactgatgatcataagccactcgatctgtagccatagccgcggaggtacgcaaggtatcttgcagaactgaatgaaggaagaagatgcttacttatgccgccggtttgccatcaattgcttatacgatcaccttcacgtacgttagggagcgtatcagtaagctacgcacaacgatttgtaggtccaatccaaagtaatcgaatgaaccctaattaaagctgcgtgatagtcgccatcctatatatcctaggagcactcatcgatcggacgaccacactttcaaaaaaatacataggaggagtactcctaccgttagtcggaggaagccggccggccggcagcagcactatactatacagtacacacacacagccagcttccgagacaaacacccaattcctcaagagcaacacacacacacacacacctccattcatctctgatcaacctatccatccatcctagcctcctccgatccatggatccgccgggctccaacccagatggagtagtaaacatgacgagg

SEQ ID NO: 169619 - DNA, 878 bp, Zea Mays
gaggggcgggggcggcagcgacctcctccgtctgcgtgggttcgtgcagcaggctggtccggtcgttgaaggagcctgtgaagctaagcacgcgggtgatgaagccgccgccgtagctgttgcaggaggatgtgatccggttaagggccggccggatgatgttagagaaatccatatgttcacttcactaaaccaactctctaccgctacagtagctagctactagctagcctgtctgagtgtgctagcacttcagttgccactatattgggtgtatttatctttacaaagagcagacctgctgtcactaatataagcacatggacggatggagacgtgtgtctagtttcaaggttcagtttactagtatgtggatgacaaaatatatatgatgaatgccgatttgtaatagtcattccatatattcctttttaacaataaaatctaaaaatcagagaaatttttaattaagaatatagatgcacgatgctgctttcggttcccatccttagcttaaaacttttctcctctttttttttttttgctgagagtaattacatttctgaataaggtcatggtagtagtagcttctgaataacatctgacgttcgttgtgacgtccatcgtacgtgcacatcaaggtagggcatcaggaacatggatcggccggacagcgaacataaaataccagtcaattggtgtggagctggaagccaagcaagactgcctaatcttcaccgtctcagtctagcatagctgtaacaccgacgagacagtagagacaatctacatgtcaaagattccccatccctcgatcgatctatagcagctagcaatttgactccggccgatgacctgtaccgattgctagctgcagc

SEQ ID NO: 169620 - DNA, 515 bp, Zea Mays
ggaaaagagtgcaggccggaataaaactgtttggggaattacaagggtgagttggccctgaggagtcaaacaaaaaatttgcgaaggttgtctatgttccaggaatgttccaggtctttgccagattgtgttgttaatctgtacgcgctgggagacgacttcgtcttgacgataaatggtccttcccacttcggttccagcttaccctgtgactctgtccgggttgtgcggacaagtacgaggtccccttcgttgaattctcttgggacgactgcgtggtcgcgcctggccttcgtttgggcttgatatttatcgagggcctgtagggcgaagacacggtctccgtcaatgaggtctttggaagttggctcgtcgacgtcgggtactgctgaagtgcttgtccgcggggacccatgtttgatttcctgcggggtcatggcctccgatccgtacagtaggcgaaagggagtgaatccggtcgctcggcactcggtcgtgttcagtgcccagactgc

SEQ ID NO: 169621 - DNA, 642 bp, Zea Mays
accctctcgtgccacccgggctctggggctgtttttccggatggccagccacggcttggaacgtaccatggaccagaaccaacgtctgcgtgtcgccgccgccgccgccgccgctgtcgccgtcgccatcaagcaacagcagcagctgctcgggcaacgggtctcctactctgggcaagcattccagggacaccaatccgctgagagaggagaaaagagagaagtcgctgtgggttcccaagacgctccggatcgatgaccctgatgacgccgccaagagttcgatatgggccaccctcggcatcaagcccggagaccctggcactttcatcaagcctttccagtccaaggtcgagagcaagggccagaggtcggacgctgctcaggtcttgcaggcgaacccggcggcgatgtcgcgctcacagtcgttccaggagagctcttgacttcatacgcaaagtctgccttatatatagttttggtactgtaatccttacatgctggtagagttttgtggcatgcgaaaagtgacttcgtacctgaagcctatcttattgtttgtttcggtactgtattccttactacatgctagtagagctgtgcggtatgtggaaaggacaacagagagcttcttgtatagcc

SEQ ID NO: 169622 - DNA, 282 bp, Zea Mays
gttatctgaagaaagtggagtatttaggccatgtgtcttaacggcactggttggctcaagtagtgctggaaggacgacccatcttgatgttttagctggtagaaaaacatgtggatgtattgaaggtgatatcaagatttctggccataagaacaaagaacttttgccaagatagctggttatgttgatcaaaatgatatacagtaatacagtcgctaaaccctaaacccttgtggtatcaagatttctagccataacaactgaagagcccttgtggttttt

SEQ ID NO: 169623 - DNA, 484 bp, Zea Mays
gtcataggtgaacaatagcgacaagaccgcagtcccttaagacttcaccaactacgatgacgacgaccactatttcccatgctgcctaccaactcctgataggacacgcatacgacaaaagtgtgggccgaccctcgggcgaaaactctgcctcgcccgaagccgaccttaacctcgagacaaactctgcctcgtgcgagcccgagctcggctatctactccctgtgaatcccgcaagaggccactccttcaactgtgttgcgcacgttcgcgaatcctagagtgggctcggtcccggcctcgggcagacttccgtcttgctgtgagcacctagagggggggtgaataggtgaacctgtaaaattcaaacactagtagccacaaaacttagttatgagtgttagtatggctaaataacttgaagcgaggtcttgtgaacacaaataatcacagagagatcaacacaagacacgtgatttttatc

SEQ ID NO: 169624 - DNA, 368 bp, Zea Mays
atcgagtagacgtgaacacgccgtgccgatttaagtcactaccaacttaaaccgactgctctgttagtagggtatagtggtcaccctgagttacgcgtgagcatgtcacaccgccttaagtcatcgccaacttaagtcgattgctccgttagtagggtatagtggtcaccctgagttaagtaagcgtgagcatgtcacaccgccttaagtcgtcgctgacttaagtcgattgctccgttagtagggtatagtggtcaccctgagttaagtaagcgtgagcatgtcccactgccttaagtcgttgccgacttaagttgattgctccgttagtagggtatagtggtcaccctgagttaagtaagcgtgag

SEQ ID NO: 169625 - DNA, 398 bp, Zea Mays
ctaatttcccacgaaaagtccccagaaactgctaatactactgatgttcgcccacctgcagaaatccgttttttttggacaacaacatacccggattcaaacagcgatatcttctaaaatataattccgaatcgagcgcataagtactcgttggaaaggtatgacaaaaacatgattctcccactgatccccactaattgcccacgaaaaattcccagaaatcactagaactactgttgttcgcccacccactaaacttctggacagcaactctaccaattcgcatatgtaatatctattcaatggaattgcagcacaaataaacaagagataatcacaaaaatcaccttgaattctcttttcctccttcccaccaattctccaatcggaagttgcac

SEQ ID NO: 169626 - DNA, 402 bp, Zea Mays
acgagagaaggacagatgcgaacaccactggtggatagacattaaagtgtccaaggtttggtgttttgcagggaggtagccactggaactttggttgtgcagctcacctcatcaaagagccattacatatggttttactgctcactaccaacaaacagccaaaacttggtatactttccagtgaagaggggtctctagatccttagttgacacttcaaccttatcaccactcgaatacacaagtgcagccagtagtgagggaaaagatcttcttcagtgaccccattaaacactgaatccaacttcagctgtcctgctgctccatctgctcgcctccatgtttgagcccctttacctcacaaatcctctcaacaacaaacctaactcccttaaccaaactta

SEQ ID NO: 169627 - DNA, 621 bp, Zea Mays
tctaatttctcgatgttcgatctatgtccaaaaatttatcccagtccgtattctcaagcggaatctccaatgtttcgtcctctaataaatttttatccaactcggcttaaaatctctatgtctaatctaaattcgaaaatcaacatcgacaatgatttttattaatccgactcgttttatttcgataccgaatccgaagccgatcgatctcgattcattttatttctacttatgcgcgagaatttaatttccaagcaacacccaaataaaatgtctcagtctattttattctgtggcctctcgttcatccgtacgtcagtttgctctattccctgcgtaggtctcagccaacgaataagcgctgcgtaaatcggccgacagatgaccacttctctccaaccaaaaattgtcgccatcctgataaacaactcaggcgggagctattgtctcagaaaaataaaataaagttacttagctcatgagcaatcagcctttttctccttaaatatttcaccaacagctgtcttattttctcccgtacgctatgtcctgctctggctagcagccaacacccggccaccggctacgccggccaatggcagcatgccgcacctgctcgcc

SEQ ID NO: 169628 - DNA, 386 bp, Zea Mays
atttgctcaggtatattgcaggcaattgtgaccttggactctcatattctcatagaaagatgacagaagagttgaagctgattggatttaatgacagtgacatagggggcgatgtcgatcgtaggaagagcacctttggcatggtcttcttgctaggttcttgccccatctcttggcagtcgcagaagtagcagattgtagctccacttgtgaggccgagtacattgctggagcagttgcagcctgtcaaagagtctgactgggacggttgctgagtgagatcactggacaggtagtgccgccactggttctcaggatcgacaacaagtcggccattgaattggccaaaaatcccgtccttcacagccgcaacaagcacataaata

SEQ ID NO: 169629 - DNA, 290 bp, Zea Mays
ataagagaacaatgaagttagtgtccctatcaggagaagaagtgttggtggaattggtcttgtcaggaccaaggaaagggagttgtcaccaagtcaccgctcatattgaggagattaaaccatcagaggctatcactgtagtatcaaatttcccagatgtgtttcccgaggagttaccaggtatgccacctaaaaggaatgttgaattcaccatagagcttattctaggcaccgcccctatttccaagagagcctatcgagtgtccagaccagagttggtggaactcaag

SEQ ID NO: 169630 - DNA, 485 bp, Zea Mays
gtcccctccagcgcgcggtgctcctgccagccggcgggcgtagcaatccccatccctgcgagcgtgaagatcaggccgagctagcccctgcagtccccatggcaacctatgttcctgtgtgcgtgggcagttgcaaagaggaggaagaaatgccacgctcgatcccacccctgtccaattctccgtggctaagttttgtgtggcctagtgtgtgacttgtttgcaaccaataggaatacgccacatcactttaaatccgtgaatcactaattatatgttagctcttgcgttataaatatgttttgttttgttccggttgcgttagaattgtaacgacgttgcccacatgttttagttaattaagtggttatttatttacttatcctataattagtaaagtagcaatctacttaaatcaatttataattttagttctgctttacaaatacatgttaataagattatgcctactcgaatgtttttaa

SEQ ID NO: 169631 - DNA, 685 bp, Zea Mays
atttccttattattaaagcagctccaaaccgccagcaactaacctatccacgtcgttaaaaaatttcagatcattcgatcgtcaatcaacggagcgatacataatcaagtgctttcgttgtatccacgtcgctctatctattttaaatcgttcgatcgcagatcaatatctgtcgctccttcctccatctgtgtctgccattcgttgctcctagaagcatcgtgttgcgttttaaaaaaagaacatagaggagagcattctccggccgccggtttacccatgttgggcagcgaccaccgcgtcggcgaaggcgaggaagagataattcctccttcgtattccccattcaacctagagttctaggttttctctcttcttttctttcttttcgttcgccgctaacactgccgcctaagcctcacaccccgactgttgctgcactgcggcttggccttgccctcgatgcatcacttcgctcatcgtcatccttgtcttcggtctcgaccgtcccacgcctacatgttgtgccgcgctgtgagctatgcgctagcctttcccccctcccttctatccaaaccgacacctggaagaggatgtcgttgcggctgccatggatctgctccacgcgtgtattgttctatctcatgggtgatgtctaactatatgtttgtattcctgagtggag

SEQ ID NO: 169632 - DNA, 451 bp, Zea Mays
cttggcgctaaggctttgcaaaagaggttacaagacacttacaactgtagggtcagttatgatgtgacttggaaaggaatgcaggaagctttaaaagagatgtatggcaattgggatgaaagttttagtatgttgtataggtggaaggaagaaattttgataaaagcacctaatagtgtggtggagatagacacccaagttgtagataaaaaggtgcacttccatagatttttctgtgcacttgagccttgtatacaagggttttttgctgcgtgtaggccttacctaagtgtggattcaactgcactcaatggtagatggaatggtcacctagcaactgcaacagcgttagatggacacaattggatgtacccggttgcgtttgggttcatggattctgagagcaaggataattggctttggtttatgacacagcttcgaagggccatag

SEQ ID NO: 169633 - DNA, 1256 bp, Zea Mays
ggggcttggtgcaaaacttattgtactggacgacgggtatgaatatgccagggttcagggacctaatcgaaagaaaaaggacctacttttaatactctttacactgcatggtatgacagttttattttacaaaacgtagggtttctttagcaaagttgacacagcgaaaggggtatcggcacatgtccgtcgttggattcgtaattaagagtgcagattagatcactcttttaactgaaccggtatgcgacgcgggccattggattcgagatctacgccaggatttaatatatccacgatctaattcgagccactactcgccagatctacggttcagattccctcgctcgaagggctatgcgcgttatgatcgggaccgttcatttgagatggacggccagaactatgtcttcaaccctcttgtctttgcctacccctggaccgaccacaatttgtagccaccggcggcatctcgccggcgataagccgattcggcaccccgaagctccctacccccgcatagctatcaattcaacaatccgagggcgaggctcacacaatggtagctgactcaccgacgagggagacgtggtgaagacggctatggcgtgtggtagttcctcagcaccggcgaggtctccccagctgtccggttaccctcagtgccatacagagccacgaacgggcacggtggttctctggagatcgccccgccgacactctctcaggcttgctgacggcgtagacacgcggtggcttcctccttctctctcaatctctcctggaccaatggcggcactggatcattagctctcggcgtgggtgtaggttgcagatttccgacggccaagagggcggtgtcccggcgcctgcatgtatactcaggtcggcaaggatatcacaaggttgttgcgcgtcaaacacggtgtgtccgtgcggattttcaggctgagcccatggcgttcctgtgaaggggataaacctgacacgatgggcccacacgacggtgagaagaagacacggcacacgtgcggctatagaggctgaccgagcgggcctacgcgtaagtggctcaggcgggcattggcggaagaagtggaggtgggccgggcagcggcccacgcgggcgaggggagggaaaacagaaatgggccatgggtaaagatttcggcccatcagaaggcatgccccttttctttttctatttctctcttttttgttttattttaatattccaaattcaaaactgagtataa

SEQ ID NO: 169634 - DNA, 1061 bp, Zea Mays
gcctaccttggaattcttcctcacttcggtttgtggaagtatttgtatcactgtcgtcctggaatggctgggggacaacaccagctcgtgggcggtgcgagtctagagatgtgccgtgggaggaaaacagaataccttgatatcccactcaaggatagcattaaaggatggcgtttggagtgtttcattgtggaaaaccatggcaagtccctcccgcctcggtcggggagacagtcggatgttcgtactccaagttggattgagtctcctacagacttggagataacagaagccaaggttctgcttgctgaaatttgtttgttgaaggagagaggtctgaccgctgaagctatggttgcagactttgtttttaagaatattcagccactgaaggacagagcatacccggcttatttgtatagtggtgtcaccgactcaacccgagttaccaacaagaggattcttgttgtggatttggtgagccgactggagatgatcttgaggggcgaagtatcaaatattggtgctcctattgcatattctgcttggaatcttccagcttctaagtcttttttcaattttgtgtccaatcctcctgctgatgatagtggtttgggtcttagagtgcgaccctctcccgaacatattgaggtcctggttgcttcacttggtgatcttcccaatgatgagaagcaagttcactttgagatgcctacgagtccaggtgatgcagagataagtgctatgctggacatgttggctggggattcttctgactcggtccctgctggaacaatggctgttgcaaccatcccagagcttgaaaaaatcgtggacactcgaaggcctaagggtactcgcctgaaacgtctctgccaggtcagtcatccaactgcacctgccgaggggaagaaaaagaaaaagagacggcttcggcgagtgtcgtgtttggaccaggatgctggcccttctgctcctgctactgaagaagtaccggtggaactctttactgaagctgatcccaatgggtgtgaccctgctgatgctgaacccaatgggtg

SEQ ID NO: 169635 - DNA, 515 bp, Zea Mays
aaatgttgaagcccgaaatgaacctaatcattcgaattcttgctgagatttgctagggaaagagctagtgaacaaggaaatatacaagaaagtgcaagttgaagagcagagggaggcatacctcaatgaattgaaccctagtgacagagtaccagcagatctggccaggcaaggttggagtccccagcgctggtgtctcctcttccgtgcagtaggtagggagcttaggaatggcggtgagacgcgacagcggctctctgctcgggtcgtgacggcttcccggatcttgtggccggggacgacaaagcactaggggagatccagatcgtcgaagggggacaacaaggtgcgcaccacggtcgcttcaacaccaatgccgccttgattcgcaatggtggatcgctgtcgccttcctaaccgccgaggagaaggaaactaccgtcttccattagcaagaaaaatggttctttatatggtgatattagaataaaatacccaattaaattaaataaaat

SEQ ID NO: 169636 - DNA, 735 bp, Zea Mays
tcgacggagaaagagactcccatcatgaatctttgtttgtgacgaagctcctgtaatattcaacattatgctagaaacaaatggtcagacgtgtttttgaggatcttcggaagaggaaggccccaatagatgtcatctacataaacaagcataaaaatagtgatacctcccttgttgtaaaagaacagagaagtatcagatttggaagcctgaaaacccagtttcaccaacttttcactgagtcttgaataccaagcccttggtgcttgtttgagtccataaatggccttatcgagtttacaaacataatttggtctcaacttatcttcaaatccaagcggctgtttcatgtaaacatcctcctctagaatgccatgaagaaacacattttgcacatctagctgcctcaataaccagcctccggatactgctaaggataagatgtctctgatagttgctgccttgacaaccagactaaatgtatcttcgtaatctatgccgcgacgctatttaaatcctttggctaccaatcttgtcttgtacctaccaagaatgccatctgcctttgttttaattttgtatacccatttacaatctataagattttcactcccttttgtggaactagatgccaagtattgttcttaactagagcatcaaattcagcattcatagcaggtctccaatttttatcagctagagcttcagacaaaccttcaggttctccagtattag

SEQ ID NO: 169637 - DNA, 412 bp, Zea Mays
tgataccagattgttagcagaatttgcaggtaaaggaagaccagtaggaagataggaggagaaggagaagctgtcgtatagaactggagagttggtacagaatgagtttgttatgctttttctgatttctctcctttaccagctactcccctataacctccagcgttaccccaacttggagcacacgttcacacattccggccacattcggcccaccagacgcacagcgtcttacacacgccaatccggcccaaacaccttcacgcttgccttcctcgctcttgttccccttctagtttccacatcagcaggaacccgagctcttttatctcctttctttggtgcatccatcctcacagcgcgcagcgcagtcccctgaaaggctctctacgcagcgtgcttccgcggctct

SEQ ID NO: 169638 - DNA, 757 bp, Zea Mays
ccgagatgctgatctaagtcatccgactcccatggaggtggctgaggggccttcagcctaagaggtggctactgtagaagacctagcccccaaggggtggtgccgacagctacccagcccccgagggtgttgctggtagtgatccagctcttgtgggtagtgcaagctacaacccagcccccaagggtgttcaggtgtgctccctttcccatgcctccatggacgtccacgtcgggtcgtccccacctcggtccgatggagcgacggcggtacgtgcttccgcagttttaactggacgagtcgccttagaggtcggcgagctagatgcaaggagcctgctgtctgctggtggggctgaggtcaccccagatagtgctcttcagatcattcctgctaaccttccctcgtcgagccatgcctcagttcctcctgccctgggtctaccactgttcctcttcaatcttcaagtgagtcggcctcttgctctatgttgttcatattagcgaattatctttcttctgctcatctatttatgatcacatgattttgttgatggaatatctgcccagctgaaatcctgcggtgctactgttcttgaacaagctctgtctctgatgcaatggaatccattgctgctccagagacagatcgatgacctgaagacgtcgaatgctggttggtgatcttacagcttccccagttgtttctattgatcaacttgttcttattcatgcattccctttcagctgtgttgtcg

SEQ ID NO: 169639 - DNA, 320 bp, Zea Mays
agaacagtgcgcccgtgccgagcggcgcaaagtacacatcgtcccttctacaagaagcttcccctgcacgccaaggatatggagatctcggtcgtcagggcacaagaagattgccccagcagcaagtatttatggctccaagcgctatattctttatgtccctggacccacatgtcggggcccagtaccattgtgcatgcccccttcagctataaaaggggaggcatgtgacattacacataggctcaatctttcagatccactcagacactcacaagctcatacaagctaccaagcaatacatcacacagtggagtagg

SEQ ID NO: 169640 - DNA, 1131 bp, Zea Mays
atgcacatgtgtaccccatctgcaagtctgcattctccaaccttgccgaatgcttggttgtgctgcagctcggccggtggaacaatcttgacgacaagacatacatggaggtggatggactggagtcacgggatgccatcggctcgctcaagaaccttcggtacctgagcctccgtggtctatcacggctaacagagctcccaaaagggatcgagagccttaagaaacttgaaatcctggacatgcgaggctgccaaaacctagccagagtgtcggcaggtgtcatcaaacagttgaagcagcttacccatctggacctcaccgagtgctacatgttagagcacattggccgaggaatcacgtccctcacagagctgcaggtgttcaagggcttcgtgttcgcaaccgggactcgggggaaggaggcgtgccgaatacaagacctcagaaggctgaagaagctccagaagctcaccatttgcatcaccacggatgctaatgtaggcaagcgtgagatggcggatcttaagtacctcgctagccttcggaaactcacgattacatggagtgagataccaagcatactggagggtggcacgaagaaagcgagagagaagcgacgtggacttgttaagacgtggaccagctttcagttgccaccagacctcatgaaattggacatccggtgctaccccaaggaagagctagaactcgaatgcaacgagaagctcgagaggctctacttgagaggtggagacatgagaaggtgttccacgaaggaaccatcctccatcaagacactgcgtttgaggtatctcaggcactttgagatggggtggagtgatatccgttcaaaattcgagaaacttgaatatgtggaaatcgtagttaatgataagaatccgatggagataccagattttacattggattgggatggggtatggaccaaggatgagaaggaagagcataataaccaccagaggttgcaggcggcgcctaataaaaaagacgttgggatggataaggatgttcaggacgatggcagcgggaatcacaaaggtgcgctatatctaacgtgttgcatccttcacattcatatcagtttaatctttattcctaaacatatca

SEQ ID NO: 169641 - DNA, 417 bp, Zea Mays
cacgcattggggagaccttgagataaacgaaatctccttcctcaaatctgagttctcttcgtctgttgtctgcataacttttctgtcgactctgagcttcaagtaacctcttgcggattagggcaactttctcttcagcttctttaacaaagtcgggtccttctagtgccctttcccctacattggaccacattaggggagtctggcattttcttccatacaatgcttcgaacggtgacattttgatgctggcctgatggctgttattgtatgagaattcggcgtacgacaaactggactcccaatccctgtcgaacgttaacacacatgctcttagtaaatcttcgaggatcttgttgactctttttgtttggccatctgactgggggtgataagcggtgctgaaatctaacttgg

SEQ ID NO: 169642 - DNA, 550 bp, Zea Mays
ttccccaatttccagactttactgaacaaggcaccttgaaaacaaaaggaaagaactgtccgacaataaaaggaagtaccaagggcagacaagcagaaacacctggcaaaacaactcccaaggttcttagttccgctctggaaaccagagtgggaacaacaactatcaagcacagtgctctggacaacaaggtcataggagcaatcaataccagaaccagtagagaagcaacacccagaccaatcagaggtctagtgggcaacaacagaatcgtcagggaagcacagtgaacacaccggccaagaataacaatgcaactaccctagttcaacccaatggctatttcaagtgtggtgaactcggccactatgccaactactgccccaggcgtaacccacagacaccctagaagaacaacagctagagaactgaccagaactcacctgctcgtggatctacacagaacaagactccgcagaaccagagtagaggaagagtcaaccatgtgacagcagaatcagttcttgaggatgtcggtgtggtgtatggt

SEQ ID NO: 169643 - DNA, 384 bp, Zea Mays
cgctaatggacggggatgtaggggaaggtgcacgagcggcgggagcagggagggagcagttagggagtgcaagttgggcttcccttttccgtggaggttgcggccacgaaaagaataggaaaatagtatatcgcccatgcctctgcggctctgtgtacgagcggatgcacacaacacacgtcaagtcgtgcaagcatcgtagtacgcgtgaagcgcggaggtgagtcgaaaggggttcaggttttaaggaacctgattggctaagtagtgacgctagtcgattgaattattagttcgttcttctctattaaattattcgtcactttaagtttaaattcaacttcttgttttgactaggtttttttttcaaaacatgtggcgata

SEQ ID NO: 169644 - DNA, 685 bp, Zea Mays
gcaaagatatgcattgccgaaaaggtggacttgacaagggtgggtctcctagccatagaaaaccaagtattgttggcgttcaaccttctctcaattttagtaatgagaggtagatactcttttacttttggttttgtgagacccatcggcaaacccaggtaggtgaaaggaaaagtgccaagttggcaaccaaaaactatagccaactgtccagttttgactgtgtcgaggttgatcggcagtagacaagacttgtgaaaattgattttgagcccagttgcaagcgagaaagagtggaaaattcctttcagacaaaacaagtccctttgagacgccttcatgatgacaagtgtcataagcatattgaataaccaggaaatcagacatgatgtctctcttaagaggagcagagaagactcccatattagctaccttgttgatgatgcactgaagaaggtcaacaactattacgaagaggagaggagacagaagatccccatgccggacccctcttttgcataaaaaactgttacctggaactccattcagcaacacagccgaggtaccagacttaaggatggactgaatccaagagatccatctgctgggaagccaagatgcttatgcatttccaggatggcactatgaccaattgtgtcaaaagccttagcgaagtcaagtttca

SEQ ID NO: 169645 - DNA, 795 bp, Zea Mays
ggagagtttggcaccgccccgtcctcgccgcttgaccgtgtccttgcccggtaccgcccccgccgtgaggtctcgtcgtcgccgctgtgcggcattaatgccagcgctgtgcacctcaccggcgcccgccgagctccgccgctccccttccctcgggcgcctataaaaaggtcgccccgagcacctcctcccccgcaccgcacttagccaccactctcctccctcacccgagcccaattcgcggaagcgccgccgccgtctccctctccggtaagccttccccctcatctctcttcccctctgttggaccaacgagcaattacttaggcctatcagcttcgccacaccaccgcgaactcaggacaccactcccccaccctagtccctcgactgaagctcaccgacggcgcctcccgccgtggagctccgccacctccccgcggatagccccctcccgcccccctctagccaaattgagcccacctctaggttcgccagcccctccccgtgctaaggcacctacccgttgtccaagaaccgggccaccggcggcgaatcgccaccgagcccaccggcggccgggttctccccgcgaacggccggtttgccccgccgtcaaccgtagcgccgcccccccttccgctctcgctggcgcgtgggccccgcggcgacgacgtcatcccctcgcgcgcccgtgctgtcacccaccttgggccgcagctgggccggcgccctcgcgcctgcgcgcgcgctgcacctggctgggccagaaatccccccggcccaccagtgctg

SEQ ID NO: 169646 - DNA, 916 bp, Zea Mays
ccgaaagaagggacatcaatgcaaggattgtcccattggtaactatcccacttctagcttgtcaattatttcacatgtaactaggcaacccaaaattgcaacttgtgctagaaaggtaatgagtttaccaagtgctaacacaaaggacttttgggttcctagatctttgttgactaaccttgatagacccatcaagcgatgggtaccaaaatatgcttgacaagctttgcaggagaaggagatgatatgaagctctggggtgcttgagagagtcaattcaattcttattaactcaagctatcaatcttcaatgatctatatatccaagattgacccaaagttgttttgaattattatatctaaaactcatatcatctcggggaagatattgatgttgtaggaaataaagaattgtcctatgcgaaaaaatcaaggcctacaacatggaggaaagccaaaggatggtaacaattatgcttttaagtgcaagtatcttaaattatcatttctcatgtgtcttgtgtagtcacatagaaaaggaagcacttcaaatgtctttaaaattatgtcacctttctttgaagaaattcctctcatatggtagattgcatattcatcatctctatactatggcaatctacatgctttaaattattgtaagcacctcatggcatgttttacactaattatcctattatagccatgttctagatatagagagatattccaagttcttaaaagaataaggtgccatgtaaggaatccaaatccttaggacacttataaagggaatctctctttatatctagaatcatgagactaatgtttttgtctaaataacctaagtagtctcacatgtagagaataagtttctctatggaaatgcgtaaactaacatgaaaagacaagtcaatcc

SEQ ID NO: 169647 - DNA, 599 bp, Zea Mays
gcgcgagcttgccagcgcactgggaactcagttaagccatccctctataaattgagcccgagcgctacttcctcactacattacacacccgagtgcttgcgcaaaccactcaatttcgcaaaggaactcagttaagccataagcccctcctcgccgttcttagctccgtcgtgaaagacctccccgtggccaggtcaaattgagcgagccctccataattctatctcgtccgatcctccttagatactaagggtactcctgaatctgtttgatttaacacgcctgccgttatctcgccagaacagtcccttgtcgccgaagtgcttcgtaatccaccacccaacgcagaccaccttctcagtccatcattctgcccattcccctgccattctaagcttctggtaagttcttaatgcttaccatgccttttaattggttattagcgcgccgtggtcttgggaccaagcctggcgaacctcggtgtccgccctaaaccaagcaacgtggaccgtagtccataacagtcagattaggggtagggtgtgggtcggttatgcccagagaggtagccgggatgctcgtcgtttcgattagtgccg

SEQ ID NO: 169648 - DNA, 282 bp, Zea Mays
cggatgtggaggtggtagtgggggaggtacgatttgtacctcctggtggtgttggtatgcgtggttaggtggatgctgagcggggtcgtggttgtatggttgagggagttgttgatatgtgtgcgcgacaactctagggttgtcggctggttgcgcccgagacatcctgtctctggtggccttcgtttctgggcagtcccttgtagggtgcgcgcagtcttcgtcgtggaacaagcagtaaaatctgcatggctgctgcgcacgtccccggccccgaccacg

SEQ ID NO: 169649 - DNA, 474 bp, Zea Mays
cgcggcagaagccttttgcaccttaggaagttttgcctttgttggagggctcaaaatttctggcattttcattatttcttcaatctttggctcttcaggcttatcaaccttagtctcgactggctcgaatgtaggcgtctttggcactacaatcggctcttcagtactttgcacaatcagagcagcttccttggcctcggcagctgaagaggtccccgcaccaaatttaggcaccacagctggttcaatgtagcgcgaccggtgggtcagaaccttcatctttccgccctttggctcagctacagtggccgaagcggcagtcttcctctttttctcttgccttttatcggataatggtaatcagggtatacgaagccaatagcatcaaataccctatttaatcttttcttaccctaacttccaaaggctgcggacagagcattatctttggccttggagtatgctccaagtagt

SEQ ID NO: 169650 - DNA, 503 bp, Zea Mays
gtaatagtgtggcgtacagcagcaagtactactgtcccgtaccagctaaactacaaaggccatggaacgatcttgcattgggaaagaaaaaggaagacggcgatcgagaggtccattccagataatatatcacggctattatattagctagaaagggccgggatgccctacccagatgacagttcactggaaattcttgcattggtatcatatcgatcgatctcctagtgggtcggagactcggagtcgtccaataagtagtggtggggttagtcaactgcctccgtcgtagccctctagctagacatgatgcatgattatgcagatgccaattaattaacaatcatccgttattattagcctatcatgcatatacgaatacgacacacgctgcttgcatcagcatctctgtcgccacagcctgctgcgccgtgtatatatataactcctcctacagcagggcagggccatgaaatatctcaccgcccgcgcgcgcgcgccgg

SEQ ID NO: 169651 - DNA, 583 bp, Zea Mays
cgggcgtaaagactccagaacacgttgttttccgattgggccgacttttgtcgtagtttgttgtgcgaaaacggtatccattaacgtcatacccagaatatttcttgacatataagcaaagccgttggctacttgtctcaactcggcactcatagacggatctctttggccctgcaagtattcgcaagttaaaagatgctaaattgagttcaaagacgtatgtcttttacaaactaagcacgtaccttacgtttgaaccaggaaatgaaattgggcaacccatttctcgcaccctttctaagaagagtgtcatattcctgtggagtggggtcccttgatcgacgccagaattcatgaaggaattgttccatgtatggcgtcacctcttcaaggttggtcaatacatatagcatgatatgccaccactcttcatgtgtcagggtcttggtggtcgagccacttgcgcttccgagttggcctcgaaatatgctaaggttcgattcattgtcgccatcatggtaacgagggggtggattatgcacgctcggaagtttgtcaccacaataagttgttgtgaagtttg

SEQ ID NO: 169652 - DNA, 928 bp, Zea Mays
atgttggtgcctgcgtcatgggtgatggaggtgacaagtaggagcaaaggattggggaaagtagagggagaccaacacgaatgcgagggcgacacgcctgtgaagaggaagagaggacgacggggcgtgcaccggtgtgttgaggcaagacacgagtggctatagctaggcctgggtggcacgtggcctcggtcaggggagaggatcggctggtgctgaagccatgcacatggatggtggcgtggccagaggcctcgaccaagggagaggagcaatcggtggtctccatggatggcagcaagaagcaacaggctagggtagaggagaggtagctggcatctgactagggaggagggagggagagagatgactagatacgatgttagattggagaccctaactagggtacaagtgatgtagatagaaatgtatatgggatgggcctaagtccatcacagttgagacacaaatgtctaagatttaccattgcaatataccccattttgttagttcacaattctcctttctgacgaatcaatgcatattcaagaagtaagtacttttcatatatgcatgcatttgggcgcagtaattggtagaagaataggaaatgcatttcaatgaaaaacaagagctaaatgaaggaacatagctggaaccacttttattactctagagcattcaactcattgtctataaatacaatttggcttgggtcatggagcatccggatcccaagtcaaggctcaaaaaatggcattgcattagacattgagacctcccataacagagctgacatctcacatcatcacgttgctagttaggattgggatgcaacaggaagttttacaacactttctatgtcttctttgtaagaaatatcactataccatgactcacctttgccaaaactttaagtgggcaaatg

SEQ ID NO: 169653 - DNA, 398 bp, Zea Mays
ctgagttctccgagcaacagacaccgaattggatcgaccctaagccttttccccaacccaatttcatctaagaccacccaaggagcactggccacggcaaccgtgaaccctacggcaaggcagccgtgttcccagcgattaggggcggtttggttcgattggaagggtcggagagcatcaccaatacgtaagcatgctagaacagggatgaaaaaggaatgagcagacctggggacggctggccatggtgagggtgggtttcacggcagcggaaaatgatttgggggaactccgaattcgcggacctcagcgaacgatcggggctaattcaaggtggctggttagcttaggactttacggaactggtggggggctcaatttatagggagcgacagcgg

SEQ ID NO: 169654 - DNA, 570 bp, Zea Mays
agccgcactcttgcgccgtgtgttcatacttggtcactgactggtgggctccactcgatcaacgcgtttaccatcaccgttgcgtgggccccaggcgtcagcccgccttcttcgctgaagctgttgctgcggtgcccaactcccataaccgtcggccgccccagctatcccccttctcccctgtgttccgtcgcttcagcctttataaacggacaccatgaccgccccaccttcgtgtctaactcggagagaacaccaatgccatgtgccgtgggagagaggagaacccaggccaccgccgtcatctcatccgtgcaccaccgctcggagtcttagaaggggttgggggccatcgccggagcatcctgaacgtgcgtttggaagttgtgtgcattagaggtggagggttgccgggggattgttcatcggagctctcgcaccatcaccaagccgcagtccgccgcgggccggactcctacgcgcgccaccctcagtgagtacagtctcccctatctctaattgatccgcactacgtgttgtgtctgttgatcggggtttagggcattagac

SEQ ID NO: 169655 - DNA, 553 bp, Zea Mays
ctttttttctatgtttttgaactaattcatgtaaaatttatgtactatttttgtgaaattctgcgttccaaagaagccctgaactattctttctttttagctgttaaattgttcttcttgctccacggctaaacatggcattagctattggattgatcttcttgctctaaagaactggatgctgaaaatcgaggggctctgaatggtacggaaccgagctcatcttgcgttgcgtactgaatgcctagcgggttttattcgatatgaagacaagtattttacacgtggatatgttaatggacaagaaaatatatctactggatagacacatatatacgtacggggtcatatcgttctatctattaactatcaagttatgtaattattatggtttgttatattttgagttgaatttatttttgtgtgtttgtttagcattttgagtgattgatatattagaatttgagacttcactagcgggtacagttacccaatagataaaatcacccgcgtgcgtacgaatatgggtaagattctacacccacgagtagat

SEQ ID NO: 169656 - DNA, 583 bp, Zea Mays
ggtctgggcgctaaacacgactgagtgcagggcgactaggttcacccctttccgccttctatatggatcggaggccatgaccccgcaagaaataaaaatgggtccccacagacagtctcgtcagctgtccccgacgtggacgaacccacttcgaaggatctcatcgatggagaccgcatcttcgccctacaggctctcaataaataccaagcccagacaaaagcatggcgcgaccacgcagtcatcccgagggaattcagcgaaggggacctcgtactcgtccgaacagctcggacagagtccaggggcaagctagagcccaagtgggagggccctttcattgtcaagacgaaggcatcccccagcgcatataggctcgcaacgccaaacggcgaagatttggagcattcttggaacattgataatctccgcaaattttttgtttgactcatcagggccagctcgcccttgtaattcgcaaaaaacaattttattctggcccgcactcttttcctcccagggggtgaggtttttaacgaggcagaatcatgtaatatacaagcgaaaaatcccccgcaaaaat

SEQ ID NO: 169657 - DNA, 821 bp, Zea Mays
ttgttggaccctgcagttccaaaaaagcatgccatattctaagatctttcgatgctactgcctctaggatcatggtgggaacacctttatctccacgagtgaattgacctctccatcccactagacatttttcccattgccaatgcatacaatctatgcttccaagcatgccaggaaaaccacgagcttctgcgacttggaggaggtgttcgacctcatcagttcttggacccctcaagtattcttcaccaaaaacatctataactcctttagcaaaattacccaagcattccaaagctgtgcttgctgcaagctttaaattatcatcaagttggtcagttggagtaccgtaagctaacattttaatggcagtcgtgcatttttgaataggtgagagtccttcccttcccacacaatccaatctaccagtaaaatatggtgaccactcactaagtgcagcaacaattttcaagaacaatggttgccccattctaaatctctggtggaacatctcatcggtataaattggattagcagaaaaatagcaagcaacaagatctgcatttgctacctgacgaggccttggaacaaaccttctacggtagcatctccgttgtggcgactgttctagcaaattggagatgatatcctgaccaattccatcaagaaagctatatagaaattcttcttcagcaagaagatcttctactgtgtaaacgtcgtcagcatcattgaactccaattcttcatcgtcgccctgtgaataattggcactttcttgtggtctatttgctcctgacatctttggtaatgcatctgca

SEQ ID NO: 169658 - DNA, 381 bp, Zea Mays
attccagaggattattgcaaagtagaagtgacgacggttgcccaaggatccgaggacgacatgttagacatccctgggcctgaaggtatcgagaaacttggacaagctatcaagaattttatcctttggcctcgaagggatgtcgaattgattgattggtcgaattcgtcgcaggcccaaccgtctcctccttctcaaattgttgttcctattgtacatccttcacctcctcaaacttcacatgctgctcctcatcctttttctgacccaccgtctccgccacaagcatcaccattcagggctccaccaccttctcctccccatcctcttggtgacccactgtctacgccatcaaagaaatctaaacttcctatatcaaaa

SEQ ID NO: 169659 - DNA, 323 bp, Zea Mays
cctggacgagctgtacaggaggagcggcgaccagccggagaccgagcagcaggccgacgaggaagacgaagaggacgaggtcgaggtcgtggagaacgcgacgggtatggctaccgcgcgaagtcttggtcggaggcagcggcgcccggctgccgcgcgaaggagaacgcgacggagatagaggagaacacgacggagatggagaacgcgacggggacggaggagaactgacggcgacggcgctggggacggaacccggtttcaacgagactaatactgctctgaatccgttaatggagttggcatgtccattttagagtgtt

SEQ ID NO: 169660 - DNA, 662 bp, Zea Mays
tgcaagttatttcaagactcagaacactatttatagtactgctggttgatttccagagaggttagggtctctttagcgaaacagacaggccgaagggtatcgattaatctgagccacaaaatcgcagatggacgctacagattagatctgagccttgatgaaccggtatgctatgtcgtcatttgatttggagatctacggttccgcgatccgcacacaacatcgaccgtccgatcgcatctaacggtccagatctaaaacacgaaggggtatccttacaatctaatcctgaccgttcaacaaagatcggaccgcctaggttcgtcttcaacctatctcgtcgctcagcaagaccgggaggcgccccacccggcggagctcccactggcgcgacgccgaatttgcccgccccggtgaccgagctcccacagtgatgtgcgaaaaaccaaattgaagctaaggcggtaactaataaggtgttttaccggaagtaattgtgacgaagaaggccgaccgcggtgtgtggcggatccaagttcgtcgtggtcgtcggcaatagattccccgagctacggcgatcttcactcccattcgcagtcgcgggcgtcttcctcagacacaccccgaggacaggagcacgacgttgagggaaatcactggcg

SEQ ID NO: 169661 - DNA, 378 bp, Zea Mays
gtactcatgattggcagtgccatggatgtggatgatatagttgatattgagaatgagtccaatgagaataaagtgcaagccccaaccccaattatggaggatgtcaatgctcacagtgatgaccaagttgttggtgaaccttccgctgatgctaatgttgttgctacccctttacttggaaagaagaagaaattcttgggtgttgttaatcatgtggtgaaacagcgaaccactactcctttgagcaagctcaaggcatccaaggcagtagcatcaagcaaggatagagctattgttttagtgccatcacttgcaaaaggtttgtatatttttaaacttgcacaaattagtttcgcaagctttatgcaactagtaatt

SEQ ID NO: 169662 - DNA, 404 bp, Zea Mays
ccggggtggatggcgtcggcgcatcccatccaagcaggcggtataccatgtcgagcaatcactcagtctgggcatgcttgggatgaagttacaaggccatggcaaactacggcaacgcaaagcagagaccttgaaggcaaaggggcgcagagagctcggaggcgaaaggatgtcgcgagtgggagagaagcaaggcatggctgctactcgagggatgaacccctctttaaagacagaactcccccactcccgcctcgaagcgtcgcgagaagtctcccccgatgcacaccagggtatccatcctatgacacgggggcccggtcccacaagtcatacagctggcgcgctggtcttcgagtgcgaagaaggcgaaccaatgcacaaggagcatgccaccgccccac

SEQ ID NO: 169663 - DNA, 735 bp, Zea Mays
ggaaattagggtgcaaatctctctatcacatcattaggcacttggtgtgaagctctggttttgtgcttagactgtctccagttgagtatggaaaatagaggacgtgaaactgtagatgacactgtttgcagagaaaagtttgaaataaggtatgagataggggatctgctggagatagccttaggatttaaattatgcaaaaggattagagaatcccaattcacactccctcttgggcatcttgatcacttcagacctgaccatggctaatgataatggtggatgcacacttgctactcctagggcactaatgaaaccactaattttgtaattatgaaatctcaatcacctcactaggcaaaggctctccttttcactctaataggtttattcacctaaaaaaatgggcaagaaacctcagatggatgagacagaggggtatatatagctcaattataggaaactagccattgcccttccactgacctttcgcggatgcatcagacatgtctcatgaacacctacctcctgcatcagacacatccagtgcatgctccaaaagctagttcacaaactagttgttactatactggtatttggtgctatgcccggtgcttcaccagatatgtcaggtgagtatatagcttgaagtgcatagttgcagacctctctgagtaatccgtccaatgccgtatctagtgcctcactagacatgttcagtgagtacactgcctc

SEQ ID NO: 169664 - DNA, 312 bp, Zea Mays
tgaagaaacatactggatttggagtgagtctgaggtggctgaaagatcagagtgctttgataactaaaagtggtggctcaaatgagatgataatgcacacatatagggtctcttgtgcacagctccagctcaaagaatatttggagctagtgatgtggagaaatccaatgaagatggatccttgtcttccatgatccaagatttcgagctacagtaaaggaactgtgtaatccaatgaatcttggggcaaaatgattctttgccccccaaattatcactcttagacatatccacaatttttacaaataaatc

SEQ ID NO: 169665 - DNA, 437 bp, Zea Mays
gtacaaagatctgagatcatgatacatcttgttactgctgggatgcatggagaatttggaaaggtgagcttcatccaatattttctatctaagctcggggttcttaggaacaaccaatcggtctccaaaccatagaattcctttgttgtcctgacggaagcatttgtatttgtccaccttctgtccgatcatttccttaatgacttgaacacccttgtcaccaatctgtgccatgactatttgctcatgtaaggtgggttccaatgaaatataacttaaagcaccagaggaaacaacttctatgtttagcttgcacaactcatcacatagggtggtgatttttgcatccatactcacacagttgcactgggccttccggcttaaggcatctgctacaacattggccttgctaggatggtaatgcacttctaaatcat

SEQ ID NO: 169666 - DNA, 299 bp, Zea Mays
tcccggagcctgctgagcttcctgggcatcgacgtgatttacacgtgcccttccttggtacggagtcttgttctgctggctgacggtggagggcgccttgggggcggatgccgaggtattcttggggccattcaccgagttggagtaggcgggtcccggtggcttcagttgcggacagttgttcttaaagtgacttggatcaccgcagtgccaacatgcattcgtcggaggttggttgcttgccactgagggggaatggaaagagctctgactctgctggctgaatcgtgaaggagttg

SEQ ID NO: 169667 - DNA, 744 bp, Zea Mays
agcgtatgaaatcgaagacttagttatagataatttacgcaaattagatgatgggaacgaggtatgcaacagaattttataatgtattatttatgctgctctataacatttgtgccttcactggagtttgcgttatttcacaggaaattgtaatggggtctaatacaaatgaatgcaatgctaacgatgatcaatgtaatatgccgatattaacattggaacataacactgatatgcgtctgattgatagtaatgctacaaatgtggaagctagaaaggtaataatattgctatagtatatgatgaatatgtgaatatgaaaactgacttaatatctttgatttgtagaaactggagtttcatatggaaggtgtaaacttagcaagaccagataaggccaagcctaagggaagaacgatcaaaagtagtgagcaataagttcttaaattgggtgcgaaaggagctaagaagatgagcagggagtgccagaaatgtggcatagctgatggtcacaacagccgtacgtgtttaactgtggaggataatagggttcgattggctaacctatctggacgtaagcgagacagcctcctggttcaaggaacaaaagcataggtgcagcaccacagtggaatgagacatcaacgttgaaaaaacgaactgtgtatgtcggagatgatgattcatctggtagagagtagaataccataagatttatgagaaaattatattctggatgtaaat

SEQ ID NO: 169668 - DNA, 757 bp, Zea Mays
tcctgcttcggcctccgaaagccgaaggtagaaattgatgatgccgccgaagcgtgtcagaaggcctacaatacagtccgctccttcattggtacaagagatttaattcaagagcatataacattcagagtatggccgcttgtagaaagctgggaaatgccgaaggaaaccatcaccaagtctagcgaaggtgacctggtccggctgaagtatacatttaggtttggggataagttcgatggaccaaacaacgactggctgaaatgtatcgaagctacaagtgatgaactgcttggagcttataccaagacataagataatgggttatctgcagccttcggaggtcggggaaaaaaatgaatgaacagagtttttgacgccataggcttcgtctaccccgattaccgctacccgctgcggggacaggggaagaagagaaaagctgctgctttggccgccctagctgaacctgttccgaaggctgtgggcaaaaagatgaaggttcttacccaccgaccacgttatattgaaccggccgtggtgcttgagtttagcggggaggcctcttcagttgctgaaacaagagtgactgctccaattgcgcagagcactgaagagccagttgtaatgccgaagttatcttctgttaagttggttgagacgaagactgataaggataaggctgaagggttgaaagttgaaaaaatgccagagattttgagcccgtcaacagagataacagtgccgaaagcacaaa

SEQ ID NO: 169669 - DNA, 312 bp, Zea Mays
ggatttcccccaaatcggtccaaaacactgtgcatagtgaccttgccgtggctagctcgttccaggtccgttcatgctctctgctctcccgtttcagtgtccttagattctcctgatgctcctcaacccattcaattaagctaaaccgcgctagatcgtcaggaacacccgtattcatccttagttcgcgctgtctccatggatagggtgatttaaagctcagatcgtgcaactgatcgagggaaaatggttattaagggttcaatttggtgtcaaccgcacgggagcaccggtagtggagttatccggccg

SEQ ID NO: 169670 - DNA, 776 bp, Zea Mays
aaactttaaacttttttgacttcggcgcgttggaagtcgccgaagcagcggtttttctcttctttccttgctttcgcgaaggatagcaataatctagatacacaaatccaataacatcaaataccctattcagcctctttttgccaagagcccctaaggttgttgtcatggcatcatcttcagccttcgagtaggccccaagcaattcatcgttggttgcttcaatggcatctagctagtcatcatttggctcatcaaactgactcttatatttgaaggtgtactttaggtagattaaaccaccctggctagagccagcagcagcctccttcggcatctcccacccatttgcaaggggccatactctataagtgatgtgctcctagactaaatcccttgtgcctatgtaagtgcatattgtgttaaaagccgcctggcatgcttgtatatcattcccaagggcagtagatggtctcctaatgccgaagagagaccatataggacgttgaataatccccttgatatcctccctttcattcaggtcattcttcacgtagaaccatttctacatccaggcccccagccatctcttccaaaatgtgggaactggatagcttgtctcagagcgaggcacgaagccataacaaccaaagttgttgtgatactgctcctttccggtagccttcgtctcataagacagctcatggatgttgtagaagaattttgcatttggctctagtccctggctcctcatggcccatataaagatccccacc

SEQ ID NO: 169671 - DNA, 659 bp, Zea Mays
gctaaaccagccagtcactaacatgtgcattaacaaagttatataaagagtttaatccataggaatataggattgtgatccatgaccattgtgccgcccactatttgatgcattcctccagctgccccttcaacatgctagcgatcctaaaattttcagcaagatgagtgtacaattcaggcgcactagcaaaggacaccccatgttatcgatgatcctgtaaattcccttatttgaatcagtgacatgagtgaagcatatagtctcagacttttggggtacaagtgacgtcttgaatcatggcataatcgttcttttcattcttcattttcttctagtcatcatcaggtttctccttagaatcacctgtgtaggaccgttagaatctggaagagtatcagaatcatagtactgagatggattattgttcacatctacttgttttttactctttctcccgttgccattgggatcggcagcatgtcttggtgggccgtcaaaaggtgcttgaagcacactaaattctccaatagtttgttttcctgtgaagataaactctatttcatcatagaatggaattggaacgttgtagtgcttggctctcttgtgggcattctatatttgacatagaatagcatgtcttattagttacccagtgt

SEQ ID NO: 169672 - DNA, 499 bp, Zea Mays
ccaaaaaaaaaaaatctgttactactgcatccaggaagaacaagaaaccacagggtccgaactgaaaaaaacatttctgctggcgcgcggccaccgccgtcaccgcggaggaggtcgctgactttcctgaggatagagatgacaaaatggagaccggccagacaatggctgcaattccagaactaccccttggccgtatctgcacgcagctccattgaggcactcgaagggtcgaagggtgatgccggtattggacatgagtctggtgtggctgcgccgaactggtaggttactagtgccgtagtacgaggcttgggcgaccgtagtggagtcaagggctccacatggaagcttcagaatcgtcgggagccgtgctgccggcacgtgtgctgcccgggcacaagtggtggtcctcactgttcacccaccgacactgacagcgattttttcccctcctctatacactatcgactatccagcggcaaagcgcagcagagca

SEQ ID NO: 169673 - DNA, 981 bp, Zea Mays
gtcattacctgcaccagaagaacttaagctatattcttaaattttttataagccagttaattgaatagcaagctttctatagtacagttctattttttgtggctgaatgcattgtgaaacaccatttttactgtggcccaggtgtgtatcgctcacggtcctacatctccaaacccccttgtactgtactatgcaatgttgtgcttgatacaaactgaagcctaaaatgtaaagtgtacgcgttttgaagaagactgaggagctcttaagtaacaactgcttggtatgctgcagtttcaagacatagctcacaagtttcaggatgcaggaacacaagatgtacctgctcgttcgttatcttttttgctaacatttttactagcatcagtatgttacttgggtcacaagaatttctacaggtgagctcgttttcttgattaagagaataaatctcggcgcagcccctcggcgtcaaccagaagatgccacccatcactcccctctccccccttggaacaacaacatcgaaggttcctgcaaaaacggggtcgacgaccagttcccgggccctcccctgaacgtaacaagcatttaggtatatcttagcattttgttcctattagtaggttggcacataggtaatgacttttttacatgcctcaacacagttgtacaaatccattgtttcttggtttcggtatccaccccaaaacgccattcgtacataaagtgtgaaccttgaaccttgcatagagcttcatgctgagaaggagcccaatgtggtatacaaggggaagctcgaagcccagcaccacatcgttgttaagctctccaaccactctgactgggcaaaaaagaaggcgaatgcccagagccacgtcgttcccggtattccattcaccttcttttttaccctttctaattatgtgcatcttgtggtgggtgtaattggtagttcaaaacctggttgtttattttgag

SEQ ID NO: 169674 - DNA, 646 bp, Zea Mays
ccaatggagtcgccctgtttccactcattatgctcacctgcaactctgcttccgcatcattagtgtctacgtactactcagattaatcctgcacttcttttttcgttctgttcccctagaaatttactgtctggctgttgtttctcagaggaagagcacgtcgcaaccttccattttttacgctcagttgcagagtgctccgctgcagagcacacagtgaagctgtgtccgtttccccatcactgtcatcaatgaggtcgcctcgccatgcctggtcctcctcttcttattaatggcgtaactgtaccgcgcatatcccgcacctgctaatgttcttcttcgtccctcccgctccattcctccactgctgggcgttaacggagtaacagctacacctcatcttcttcgcccttttctatgcgagctttaatgcccgtttggtggctacgactactgtacgtactcgtttattgccactagcttcttcccccattgaaaaagctttattactacattctgctccgcaaagagagagagtgacctgatcttcccttcaatttggcgtcggtgttaatttggattcctacaagtgggtggcgtctcgcattcttggcggctgcgtgcttctttaatgcgctgacgcttc

SEQ ID NO: 169675 - DNA, 387 bp, Zea Mays
gctgagtttgaacatattgcgggatgtagggtgaacagtatgaagatgtattgaacacctcttttagctatgaaagttgaatagctgacgaagcaagctctttgtgcttattaatggtgtggtggcatgttcttgtagtgtagcctttgtcctcaccacaaaacaaatagaatggcttccttggagtcgcaccaaatctgccactaaagcttcagtctccccttcctctcggagcaggtggtgagaatgtgttttacaaagattgctgctgagagcttgcatgttgccctaattgactctatgaatgggtcattcattcctcaccctgtgatgggttatggatgcttcagacatgtcttggatggaatcttcctccaaagcctctgc

SEQ ID NO: 169676 - DNA, 730 bp, Zea Mays
caaggtcgacgatgcacgagatactgcccgggatacctctaatcccacgtctagaatgtcagagcaaacatccatcatatcaccaggttccaacaacatatcttcaggaatgacatcctcaagggcctgatcaaaatttgttatggataattcttgaaggctaacaagagcagacagagctagagaaggaatatcactatcccccctactacctctgtaacgccggctattcttacgaattagcggaacttctttctcttcttcgtcctcgtcaaaaatacggacaatagatggtgcacgatcacacccattggggtcagcttcaacaaggttacacccattgggatcagcttcaacaggaacacacccattgggatcagtttcaacaggatcacacccattggggtcagctggtgcacggatacactcgttggggtcagttggtgcacggtcacacccattggggtcaggttcaataggtacaccatcattgggatcaactttagtaaagacctctgctggtacttcttcacaaacaggagcagaaggtccagcatcctggtccaagcatgacagtcgccgaagccgtctctttttcttcttcttctcctcagcaggcgcaattgggcggctgacctggcgaggatgctttgggcgagtaccctcaggctttcgggtgtccaccgttttgtcaagctctggtataaccgtaacaaccattatttcagca

SEQ ID NO: 169677 - DNA, 849 bp, Zea Mays
tgccgatggaatcttggggccattcaccgagttggagtaggttggtccgggtgccttcaactgagggcagttgttcttgaagtgacttgggtctccgcagtgccaacaggcgtttgctggtggctggttgcttgcaacggagggtgcctgaagggagctctgactctgttgactgtagcgtgatggagtgggtccagatggtttattgaagcttggtcccctgggtggaagcccaagggtcgagctctctggtgacgttcttgctgttgcgctcggaggacttggaatttcctcttgatgtgccctttttcttcctcttttgccctttccacttggatagctttgttggagaggtgagagaagttgtggaagtcttggctggcgaggatggtcttaagcttgggtcttaatcctttcagaaaataggccatttttctggcctcggtgctgacatcctcgggcgcgtagcgggccagctctgtgaacttgtgcacatactcactgattgtccttccgccttgagttaactcccggaattcatccttgagttgaactatcccctggggtacatggtgttcacgaaaagctgcttcgaattctgcccaggtagcatctctgacggcttcactgaaagtgtcccaccatgctaaagccattcctgaaagctgatgagctgccagttgaacacgctgattctcgggacaagcgatggcttccaacttcctcttgatcgtgcgaagccagtcatctgcatcgaggggattgctggaccccgcgaacgtgggaggcttgagtctcaaaaattctcccatcctgtcctgtggccttccaccgcctgggcgctggttt

SEQ ID NO: 169678 - DNA, 636 bp, Zea Mays
ttagctggttgtacctagcaacggtctcgttggagccattgtttgaaattcaaggagttgttctctatggtgaaaaccaagggtctggccttaactggttggatcatacaacgattgtgcgtgagcgtatcgttctcttgggagacgttgtttttggagagccttcgcatgatccaaatgttgctttgttaggggttggttctgaatattaagttgtgtggcgttggttactgtgattatggcatgatagctgttggtacgtctttttcttttgtttttcgtggttgtgtacaccccaattgtgtagaggccggaagagttcttagtgtaattgtatcactcaatgtaattggctaagagtaatgaagcttccttgattatcacatagcaacaaaagttattatgttttaatattcaaacggaggtagattgatttcgggtaccttgtacaaattgttgggccacaaggcctccattttttattttggttatgttaggttggtttggttcacctagaatttggggtggagcaggccaacccagttagcgccagggtgcttgtgcccctaattttggtgttggaagtcttcagtgtagcaatggatctttgatagagagagtaaattcatttcactc

SEQ ID NO: 169679 - DNA, 486 bp, Zea Mays
gctgatgacggaacacactggcgccagtgtacctcgacaggatcctgtaagcaaaagcaccgagaaaaaggtcgattagctggattgcgtttgagctaatggggattaggagcggggagaacacggcaaggcttcgcatgtgggcgacggcggccgtatgataaaactggatacgcgggcgcggttgggacgtcgccgtcgctgggaaagacgctgcatcgccgggcggccattggcttgctggagcagcgagcagacacttatatattcacgggacaggcaagacttggcttgctgacacagttttcagttgtgtgttgcgagcagaacagtggatgtgaatgtgagaatggagctttcggttgcggtcttacggatccggcccatgcagtagcggacgtgttggcctgcatgggcgcggcctgcgaggctctgaatgggctgctacctattgtgcccagcatcgagttatctggactgagggct

SEQ ID NO: 169680 - DNA, 1047 bp, Zea Mays
actgtggacaaactatatacaatatagagtttgaaataagccatagatatgcgtctattggtgagctcacccttgtcccttaaggtgattccattgaactgacatggtaatctatagtgggcctagagtactatcaagtcctttaggagtaccacttagtcatgtagggggctttgtggcttctgtagtctaggtgtagccaattccttgcttgtgagtcactttgagtaacttggtggtgcataggtgaaagaccctagtctaattttggtaattgagtgacaaccttatgtggactaatacatgtttatattgagatacacatgtaagtagtccacaggtacacaatgcgagcaacacatatagtcatggcagagggatggcttatacatgttaaaaaaatgctcaactcatttgacgaaggaggtcattacatatgagacattacatgatgtcatgtggataggtgcatatgattaagagacatggctttgctaccatggacccagttgctagtgtgaagggcaaggcaaaggctttggagtgacagaccatgtggtggtgaagtttgagcaaagatttggcaccgatggaccaagagcaacaacaaagagtaagtgaagttgagatcgatgaaccaacaaggccacacgatgacatgaagtacataatatcatctacaaaagatgaagccaaatattgatttgtgtcgattacaaatggcttaatggaggttggatgcttgtgtagcatcaccaagatttgagatgaaattgaatgcacaagccaaagatatatttgtaggtcatttcattttacttgtctaaggttaagtggagaagtgtttgaccaaatttagaatagatggctgttggggcctaccttgccgaatatcctcaaatcaccttaccttaaacttgagaaagtatgtttcaggtgatgtatgaaggacaaatgaagctagccttcggccggagcagcctgcaaagggctttgttccgaacgtgcacttgccgtaggtgtgcaccaaagccgtcaccctcgacg

SEQ ID NO: 169681 - DNA, 409 bp, Zea Mays
ggacaattaagttgatgtccccactaggagaggaagtggtgaccgagttagtcctgcctgagccgaagaagggaagttgttatcagatggctgttgatagcagtgaagcagacccactagagatcatcaaggttgtgtccgagttcccagatttgttcccaaaggacctaccaggtatgccacctgagcgaaaagttgagtttgccatagagcttcttcctggaaccgcccccatctttaagagagcttacagagtatctggaccagagttagttgaactcaagaagcagatcgatgagctgtcagagaaaggttacatctggccaagcacctcgccttgggccgcccctgtcctattcgtggagaagaaagatggcaccagaaggatgtgtatcgattatcgagctct

SEQ ID NO: 169682 - DNA, 524 bp, Zea Mays
ctggctatctagaaaatgttttaattgttcaacccttttaacaaaaattgttgtctgtcctgctcatgaaaagaccccctccaaacaaccttgagtttagcaagtgaaacctcttaattttttttcttatgttggtgttttctaacccttgtgtgttttaccctgaagttgcacctacacaacttgtagacccccattgcttaaccgctagccaaaccgaaacttccttgtgcacgtggttacgtcaaaaaaattgttgtttggtgtctagttgcgcaatccctatcaaggccatgtttctttccataaatccttgcccctaaaacttcatagcatttctgttgatcatcctagctgatcatgtttgcctacctctcccttgtccgaatctggtaatcattttccttgtgaatcatgttgtggctttatcatccgaatctctggatcccttaatgattctgccctgaatgttgatcttgcctaaatctctcatttctggtcattctcatacccccttctctgag

SEQ ID NO: 169683 - DNA, 877 bp, Zea Mays
cgttgaaggagcttcttctcttgcctcagctaccttcggctcagaagagggagtcatgtcaagcctccgctttttggagattgccgccttcggctcatgagctgattttgccttcttcaaaatattcccatcctcctttactagcctggcagcttgtctgtttagaatactgacaatccttttccttttcaaacattcggcacccttgccaaatctttcatagtctggatattcaaaattgagtgcgtccatcatgcgattctacctttgttttggtcgggtgtcgaaggcggcagtcattaactggtcctccttcttggtgtagttgccaaggatttcattgcacatagtttcaatcatttctaaccactcttggaatggcttcttgaactctttatcaaacttgaaacggtaggggagccgaacaagttcgtgcttcttgcccccatccttcttcttgggcatcccccagccactagaggtcggaaatactctatttgccaagaattattgcaccagatctctagtgttgacttcggccgctaccactctaaactctacttcgactacttgtcatggggagccaaactgcatatggcacaagggtcttatcattctgaagctcaatatcagtagactcatgaccatagtcatcagcttctccctctttttctcatttgccttcatataaaaccattcacttttccaaccagttggccacttagtacggaagctaagaactagtgccttcgtatcctttcgatacacaaaattgtagcaaccaaaattctcaggaaggccatctgctctggccttcgtctggtaatgtagctcgtgcacccgacagaaagcttcggcattaggactcataccctgg

SEQ ID NO: 169684 - DNA, 299 bp, Zea Mays
aagaccagctggactattgcacccgcttaagatacctgagtggaactgggaagaaattggcatggatttcattgttggactaccccgcactcctgcagggtatgactctatttgggtgattgtggacagactgacgaaagtggctcacttcatacccgtgaggactaattacactggagccaagctagcagaattgtatatgactcggatagtttgtctacacggggtgcctaagaagattgtgtcagaccgaggatcacagtttacttctcggttttggaagaagttgcacgagtgct

SEQ ID NO: 169685 - DNA, 400 bp, Zea Mays
tgccttattattttctcttttttaatcgacagttgaaaaatggcatttaggggtatcttgagttctctcgttgtcacgtactattatgtctggctgctcatgggattagcatatagaagaaaatgtttgagaatagaaagaaggttaagaaatagggagcgtaggatggagaatttaaatgaactcattcgtgagactgatagaaaatgtattagtgagcttcgtatggatagaagaactttctttattttgtgtgagatgcttagagatgttggtgggctaaaggccacacgcaatatgaccatagaggagatagtggctcattttttctatacattggctcatcatttgaagaaccgaacaattggaaggattttatttcgaagcggcgagacagtta

SEQ ID NO: 169686 - DNA, 623 bp, Zea Mays
aaaatcgggagtaaacaaccctgtaaatcgctctatcaggtgactgaatgggctttcccatggtacagtatctgaagaagatcagattcccagctcagcttgccaccggtgatctccgccgtgattcatgtcgccggcgtcttgattcgtgctcggggtaagtggataacgtctcggggtagaaaaatatcatcgccgtcgttgagctggacaccaattcgactagccgccgtacccctcccttactcatcgtcgatcagataagatctcaccgccgtcgagccatcactgtcgttcgccgcgtgtccaaatgctttaccacgtcgtggctaaccgtgctatgcacgtccggtgatcgccggaggagcagccacggtaatagcaacattgtgcggccaccagtgactcaccccgtcttacagatcaccatccaccgctcaaattcgctgcactcatgaccgattgctataaatcaaagcctcctagagctccgtaggatcatcacgtgcccagccaccaagaattacccttagttgatcaccagcaagcgcgaattttacaattcccccaaatcggctcaaccacaccgcgaagaacatctcaccgtggctagcacaattccg

SEQ ID NO: 169687 - DNA, 448 bp, Zea Mays
gcagtggagctccaatccgagctctgattcctcctcgctttcggccgagcaacggtgagacctggcgcgggttgtgcggcaatcagcagctgagcggcagcagcaagggcttgagcaagggtagccagcgcgagtgcgagggaaccatctacgagcgtgagggcgaccagaagaaacattgtactgttttgcaagaatcaactctatgggtatgctacctctctgtcttctttctgtccagtagcttgttagaataagaatttcaataaaataagaaaacaaacaagatatgttgctttgtattattaattggttaatttgttagctgcatgtcttgtgtaagttgttcagtatagtcaattaggctgttcgagaaacaattgttccatttgtagtgaacttgtggggtatcacatcttgtagaaacaaatggtatgctaaatcccta

SEQ ID NO: 169688 - DNA, 682 bp, Zea Mays
gccgcaacacgactcgcttcccaccccaaggagttggggggcgcgagggatggagccgcggcttagcccgctgtccaccttcacgaggctggtgaacatccttccccccggatgctggaggaagaagcgggaaggagcgtcgcccccacggacatcctgtggaggtaggcaatgatggccgcctgaaggatgaagcagggcgtaacgtgtagaggttggaggccaagcccctctagcagcagcacgaagaaagacgggatcggcagcaccaacccactagggaggttggagacgaagaacacaaactctccaacggcaagatcgtcgtgaggagaggcaccgactcagatctttctggtgaacgccgacacaccccatccgagcaggttgtgcaccaagttgagtgccacctcaggctagaggcgctcgggaggatctagcaaggccatggtgactacgacggcataagagcgtggagaactcgagggcgaaagggcgatgcgagcgatgagaatggctaccatgctcgggggagtccctttttaaagaaggattcccccactgacgccccgagacaccgctaaagatctcgcccgacgcgtgcttgggtggccagcctctggcacgggggccagggcccacgagtcatactccttgggagttggcctccgtgtgcagagaa

SEQ ID NO: 169689 - DNA, 432 bp, Zea Mays
aatgattgtcaatgaagtagtgtcttgggttgcgtcgactgaactaactgaggcatgagtgtctgtaacatatctcttggcttatggtgcgtaggtgtgcatctagagatggcggtcaatggtgaaggtcatgtgtttgtgtcaatagaccgggagtgattgaggacaagcactaggacttgactgaggaactagagaagtcgagtgactaactgtggtgactaacatctgggggacaccgacaaatgcgaggactagcaagacatgtgaataggatatgaaaaacgcgtatggagtatgctacctacgatggtttggtggttgagccacaaaatcacccggtaatagttttcgtgggtctgacctcaaaatcctaggcatggtttcagcgagaatcaaaggtgccacataaagccataatgaaggttgcat

SEQ ID NO: 169690 - DNA, 576 bp, Zea Mays
ctaggccgattcccaagctactcggcccagccttgcccctttgccctagcttgttgggcccaatgcacattccgcgcggcccagaccatgaaccaggcgtggagagtatgactcgtgggcccaatagccagtgactgaatcggtgtacgcatgactcacacttccctagccggtggacctggcgcgtcagctcctcacgcgcgcgcccaccatcactcgacactgacgaccgggacccactgactggcgttgttcctcttccccgccgattttggacgcacgattaccactgccgcgagattctcagtcagctggcgcaaccgcttggcagacctggtgcccacacgactcggctaataaatgccgagccaaagcccctctcgccccttacacccaagtggagaagcccgacgagttcgccgtagtgggggagatcgagaactgagcgtggtgagtcacctcgggtaatcgccgccaacagctccgcttgggggtgttcgcgcggtcgtggggtgtcgttcgtgcaacgagatcgcgtagagttcggcatgggagaaggagggcggcctcggtgac

SEQ ID NO: 169691 - DNA, 573 bp, Zea Mays
caaccctaagtcgtttgacacgacttggcatagcttttgtctcggtttggacaactaggacaaagacaacttctcacccctatatctccctaccccgtccgtatccttgcttgggactcacatcaaaaaggtaggatttggtgcagggaagagaccgtacacgggggttttgccaagatctgcacgctaaggtgctcaaatcggccgttgaaccatggtagaagcaaacccacacgtgttcgacgagggctgacactcgggggcgcgctcagagcacgcccgtgcgcgaacccccgcgcacccgtggccgcctcgtgaccacgccttcgccatggctataaagcccgccctagtgtccggctatcttccccgttgcatcctctgtaccacgccaaactccccggagctcgcccatagctccgcgacctccccgcgacccgccagagccgcccgaggacaaccaccgtagccgaaccctttcccgccctcctccgctcgatccaagcccctagatagctcccctgggaggccgtgaagcttgccaaagcttgaaccgaggacccccgccaccgg

SEQ ID NO: 169692 - DNA, 429 bp, Zea Mays
gagtgtcgtgctattgttgcgcctggcgatgcccttctggctgctgattattaaccaaggtaggtgccagtggtggtggcagtggtaactaagcccaagcagcttgagaatgacttgccgaagcaattgatgtcgtgggttgctggttggccacatattcagggatatatggcgaatagcatgaggcagtatgcaagacctactttggctgattctgccgtgcttcggcttcagcgatctccttctgcttttggatcgtgacttggcacgtccttgttgtgtgtcccttatcctccccacagaataaacagaacaatctcctgggttgagtgctgaaccttcctccgaagcttcttccccctctgcctcttggagctggtggcctgtaagaggttgtttcattctcgaagattgtgagctttggtggct

SEQ ID NO: 169693 - DNA, 528 bp, Zea Mays
ggagcaggccagggtggcgcggcctcacccgagcgtcggaggtgcaggatggctcgccggcacgcgatgagcgcgtacagcagggctgcgcagtcgtgacttcgccgtggcatacacaggggcacaagacgcgaccaaagggaaactcgaccgggcgagctcgaacgggctagacgctcagcaagcacgacggcgcggagcgggcatgagctgggttgctcgccggcggcgctgtggctcgacgatggaacggaaggagatgatgcgaatgataaactgagaagaaaagggaagagaagaggctcaccaggatgggtatctcgctgaagaccgggaggggcgagttctggtgcagtgcggtcgtcgacatgagcggggcgacgaaggcgatgtgctacgtgggctgtgggagagaagagtggggctagtttggaggagggtcaagcgggtgcgctggcgtttgaaggggtgtcgaggacaggcggttgccgagatccttgtgacgtgggtaggagatggtttggaaga

SEQ ID NO: 169694 - DNA, 670 bp, Zea Mays
ggaggtttggaattcgaattgaggcacgaaacgacgtggaattgagccgatacttcacgaataggtttatatgggtgaatatgagtgaagtgtgtgcttggtttgaatttaggcgaagaaaatgagatttgggcactcggctcggaaacgatcgcacaaaacggggaattgagtgaaattgaagcctggaatatcggattggcgtgaaatttggcaaatatgttactggaggtgttgtgaaggtgcctgaaaattttgggttcaatcggggcatttttggctggtttgggcattttaccgaacacgtgacgtgcggtgaattaggtttttggagatatggccatttgaggattgaaaccctcccaaagggagctagaaacctgcagggatactcaatggccacataggaacacattgcaccacatggattcactggaattcacaggattttgaattgggcacaaaaggtggaaataatgggtgcactgcctagagaaatagagagagagagaagaaagagggagaaggggctgctcaccgagcgagggcatgagaggagcacagggtcgaggtcgccggagaacagtggatgtcggtgaggggagatcgccggcgagagggagcaaatcggtagagaacagagagcagagagcacagaggaagaagagag

SEQ ID NO: 169695 - DNA, 545 bp, Zea Mays
gtcaacaatccataaaacttagtatggacaatttcatggattaactatggatggatttgttgatgcactgaggccagagaatttactagtatgcacttcaatagaacccattggccgaccctataaatagaactcactggtcatctccaaagatactcacactcaagttgagtttagcctctgcctgctattatgttgccaccgtagcctcatccatcacgagcgccgacgtgcatcactgatcgtgggaataggtctcaacccttcacctttggatgtggagcaaccctattaatagagcccattggccatctctaaagatactcaaactcgagttgagtttatcctcttcctgctattgcgctgctgccacatcctcatacataccgagcatcgatgtgcatcactgataaggagaataggtcttcacaaccctgcgccttcgagatcttgcaccgagagaaggtgaataagatttttggaatcgttttgtgtgactactcactttcacttacagttcgtcgacatcgccttcacagaagtca

SEQ ID NO: 169696 - DNA, 296 bp, Zea Mays
ctgggaggcttcaaattgtgttgcgtggtgattttcgggatagcgccccactgcgatggagatgtagttttggggattgggcgattcctatgttcgctttttcgagtgttgcgtgcgattcagggttatctgccgtgtaattcagctacctgtctggggctcagatgaatgttgacagtttttggtagtgttcaattgatgccagttcagtgaccccagttataatcgagctgattctggtcagcatttcctcactcgctttatatcgctagtagatttcttgccaaaaagagctg

SEQ ID NO: 169697 - DNA, 526 bp, Zea Mays
ggagaacctaaacggatagattttgccctagtgcaagagttcaaataggggggatagagttccctgttgatctaatagttatgggtaaccaggatgcgactatagatgtcatcctagtgatgaattggctaaccaaatatcaagccagtcttagctgtgacaagagaacagtgaagttagtgtccttatcaggacaagaagtgttagtggagttggtcttgtctagaccaaggaaaggaagttgtcaccagtcaccgcctatattgaggaaattgaaccatcagaagctatcaacatagtaccataattcccagatgtgtttcctgaggagttaccaggtatgccacctgaaaggaaagtttaatttgccatagagcttatacctggcaccgcccctatttccaagagagcctatcgagtgtctagaccagaattggtggaactcaagaagcagattgatgagttgttagagaaaggctacatcagaccaagtacctcgccttgggcagccccagtgctatttgtg

SEQ ID NO: 169698 - DNA, 375 bp, Zea Mays
gcttccaaaggttcttcagctttaacaaaaagcggtggacgagtttcagaaaactccaagtacgtggtgtctcggggcccttggggttgacctctgcatccatgctgctgaaattgattcctcgcaaattcacgcaggaaacgagtgttgttagcggtggcattaactaaggcagcgatagcctcaaccaatgtgggaggtataggtggcgggtttggagtttcctccctgccgcgggatgttcccaccgcgtcttgagcacgagttcttgatggcatctgaggaagaaaaatatacttgattattacatgctgaaagtacaccgcctttattacattatgccgtactagtacaaattgtacataatcactagta

SEQ ID NO: 169699 - DNA, 1277 bp, Zea Mays
gtcccaaagcgtcacgggcaaggtctcccccgacgtgcgccaggattcccatactatgacatgggggccaggcctcacatgtcgtacaagctggcccaaagcgtgaagaaggcgaatcgtcgcacagggagcgtgcaaccgccctgcggttacacgcccttccgcctttcgccgcagccagcagtcaagaaggcgaaccgccgcacaaggagcgtgcaaccgtcctgcggttattcgcccttccatcttcaccgcaactagcagtcaaggaggccaaccgccgcacaaggagcatgcaatcgccccgcggttgcgccccccctcagcttcactgcaaccggtggtccaacctctggcatgggggcccgggcccacatgtcatacatccggcgcgccggttcctgggtgcaggaaagtcgcaccgccgctcgcgccaataccacgccttctcgagaccgtcgtagaaggctaaggagataaattttcaaaaccaatgcagcgactcgaggcaccccgggcatggcccaacaaagacattaagtacggaggtcacgggctagtcagccgcgggggcaggcgtggcagtcggtgtgaccataggcgggccggcagtaactgcatcaacgggtgcgtaggagaagcgagtcgatcgctagtcaaactctggccccacctgcaggctcgcatcctcccctgagacgggcccaggggccactgtcggtaccctggattaggggtaccccttactacggtataaaggcacgatgtctgcgcggctacccttaaccgcgtggagaacagccccaggggtatctcgtgagcagttaaggtggcgttctcggagatgatgccgtcaggcccagaaggtgcaggacccctatgcgcacaacctggacccccaaagtaaagcagctcggagccattagatagggttcggaccccatcaagtggctccggaccacccataacaaggtcacgggagaggaagtgtcgtaacctaggcatgggtccggtattgacgcgtgtccaggctctatccggagcgcctccgctccccgctcggccgaaggtttaatgcggcctcatggctgattgtccgtgacgtaggccagcgggcggagcatgacataagggctctgagccgcgcggcctccgcatttattgcggaggggacacgccgcctgtccacccttctgacaggtgatgtgcccccacgacatttattgcgtcgtgtccattctgctggcaggcggcgccagggccaccttgcagacggc

SEQ ID NO: 169700 - DNA, 582 bp, Zea Mays
gcggcattgctcaagatcccaccaacaagcacttacagctaccttttttttgtgtcgctgtgtctttatatagagcagaattaattactgttctgctgatgttgcgaatttgtatctgcttcttctgattaacggatggttcctataatgagtacagctgaaatctacaatgcaggaggtgcagagcagtgcgatgtactcgaagtctcgaacaacacagagattgctgcaggagaagctaggaagcctgatctgactgctaagaaggcaaagctgggcgagagcatggcttcagcccgctagttcagagcactgcttcagcagcagctccagaaaacttttcagtcacatgggatcagaaagcagctcaagctaccattttaagcagatatttttcgtttccaggacaccaagaaagccttgttttgtgggtagcacattacaaaattcatcttaatctggtggacactataaaaatgtgcatttatgtatagcacaccatatcaattaataaactccttttgtgcatagaggaggaagcatttccggtaaaagggctgaaatatctttagaattggtccc

SEQ ID NO: 169701 - DNA, 439 bp, Zea Mays
cgggaataccatgtttgccaagaactcttgcaccaaatccctagtactaacctcgaccgccaccactctaaactccactttggctacttggcatggggagccaagctgcatgtggcacaagggcctcgttattccgaagtttaaagctagtggactcataaccatactcatcagcttctccctctttttctcatctgctttcatgtaaaaccattcactcttccagccagttggccacttggtgcggtagctaagaactggtgcctttgtatcctttcgatacgcaaaattgtagcagccaaaattttcatgaaggccatctgccctggccttcgtctggtaatgcagctcgtgcacccggcagaaagcttcggcattaggactcatcccctggcttcgaagggcccagatgtagacactaagcctaacaattgcgttg

SEQ ID NO: 169702 - DNA, 550 bp, Zea Mays
ccaactgcgcgcatatgaaaccacaactgatcccttattttataccatgagattcatcgatggattgaaggatcacattaaatcatctgtaccgttacaacgtccctccaatctcgataatgcttgtgcgcttgctcaattgcaggaggaggtctcagaactggcaagatgggaacctcgcaagttttcctccactactacaccgaagccactgccatcacccctgccattgcctcgtccccctctaacagaggaggctcgtccgcggcatgggaatgacaagctgaattctctcaaggcttaacggcgggctcgtggattgtgtgacaagtgcgcggagaaatggacttcggggcatcgttgttcacctacagtgcagttacatgtgttggaagagatatggcaactcttcgacaatgcttccgaatcacccacagcagagcctgacacaacacctccagaagaattgctcaccatttctctgtcagcaatgtccaagcagtctggtcgacgcactcttcagctttcaggtgaatgccagggacaaccg

SEQ ID NO: 169703 - DNA, 373 bp, Zea Mays
tccttgtcagatcctctctaacctagttgttagctgtcttaaacaaccttgtcatgagccttctcgtcagatcctctccaacccagtcctcacatctattacttcgtccctaatctttttgacgccacctaaaccagtttgccttgatgcccgtttcgaccgtcgcctcctcttgacgcaacgctgcccgaccctgaccctttctggcgcctccacccccgccctgtcgtcgtcacgacatcggcccgcccgacaaagccaggtctcgctcatcgcaatgatgtgacccgtcttcgcgaccaacaagcttggcgaaacagcaagccctgtctctgagctggagacgtcgcttgaccccaccgctttattggca

SEQ ID NO: 169704 - DNA, 438 bp, Zea Mays
cggcgaagggcggtggcgaaacggagagtgagtgaattgtcgcgaagtaataggcatcattgtggtgagatggagagtggtcgtcttcgtgtggacgggactggtaagtgggaattgttgtcctcgccggctggggctagtgtgggtgaaggggagctgcgaaatctttttgagggtgaggaattgaggataatgctgttcaactatagggagatgggtatcatcccgaaggttgagccaatgtaatatgtgatgccctcgctgtgtgtatgtaaccataatttgtatgataaggctgcgcgccttcgttgatatagccgcgtccataggccactgctgcgcggagtcttttgggagcgacttcgattgtgcgcacctattattccggctgcacccttaggcgactttggcacggagagtccgactgcacccttaggc

SEQ ID NO: 169705 - DNA, 565 bp, Zea Mays
cggacgcagatgagacgacgctcagaagaccaacgaacaagaggaggacccggagaccggagctccacctccaagccaaggcttagataggactccaccttgtaaccacctccaccacgaataagagacttgggagcctctcatccctctttcgcctacttgtagcctttactatgagctttgatcattaatggtgctggtagtacaaaccacagatgactggatgtagggacattctgtccgaaccattataaatctcgccaacagcgcacaccgtccacatcccggaacacgcacaatacatttacttatcagagcgaggttcaaaacaccgacacctccttcttgtgtttgagagccatggtaaaatttccctaagtaggagacaatttggcaatgatgcccccaaccacgaacttgttaggcaagacatagtcaatgtgagcaagttccccgaccagaagctgattccatgagcccgttccacgacagaacgatcatccaccatcatgtcctcatggtactggtcattaacataaagttcacgtccaacatctaattttgt

SEQ ID NO: 169706 - DNA, 476 bp, Zea Mays
gccggagacaacacttggtggttggaccagagttgaatcaaggaaggcgaagaagcgtcgccttcgtgcactgcgggcacgtcgcccggtgccaaatgacttgaaaggtcgctgtttcaattgcttcgcggataatcacctcgctgctttctgccaccttgagccaaggtgttttcgttgcaagacagttggtcatcgctcctactactgccccgggcctgtgaaagctgacaggaaggttcctgtacatcgacggctgttgagaggaacggtttggaacagactttcgacagttgagccaacgatcgctgatcgtgttccgcagtatcagttgcctcgggtcccggtctggaagagacttcagccttctgtgcccctttcatgcaagaagaaggtctgtatctggcgtagaatctcccctccaggcattgagaagggtccagcacatcacatgatgatagcagggggagtggatg

SEQ ID NO: 169707 - DNA, 773 bp, Zea Mays
cggccccatctgggcgtaattgagctccagcccaccaagattcctcgccggtgtgggagcttcatcgcatcgccaccgtgtgccgtgggcagcctccctggcgtcgttcctgctcccggtatgccctcccatcttgcatgcgtttgctcaggaacgcgtaggtctctcaggtttcaggaatagggcgtcggcgtgccgggatggtggccaccggtgggctccgccgtgtgtacctatgtggcgctgcctcggagccgtggtaggatagctgaggagggtgaacggttggttgccgttgatctggaatgtgcggccaagatcagaacgtgcatacctctttgacgaaattaaatcttggccgttggggcgaatccgagggatgagtatggctgatggcgtgaacgtactacaaccatggatctctgatcctgcagccatcattagataccgattcacccaattgatacgatctaatctgggcccctgaactgggatcgaatggctaggatcgttagataccctttcggccgcccatcttatataaaagcccctggacttattaagtataaacccgcggtcctcccctgggtggttctgagtcttggtgtcttttgcgcagaaccccctgggtttctattaaatagtggccgcagtccaagtaactcagaaatctattaaatttaatacagaaattctttttaatgcaaaataatgtcccaaacttaggaaattcataacttgatgaatttagctccaaattgattcattccagt

SEQ ID NO: 169708 - DNA, 757 bp, Zea Mays
cggcacactaaaatgaaattggtcagtcgccaaagtcacagatgcagtgaaaccagtgcccaacgcacgcttaagctacgacacatgaaaaactgggtgaatgcgtgaagatgggggtaactacagcttatacgccactgtgcccacgcgctgcaacacttggaacggtccgaaaaacttgaacgccagcttctgatgtgctcgaacagccacgaacgactgaacatacggttaaagcttgagaaatacccaatcacccactgcgaactcacgctctgaacgacctttgcctgcctgacgcttcatacgtagtttggcacgctccaaatgctgcttcaccagctcagacattagctgacgctccttcaactaggaactcaattcagaagatgtaataacagtctgatctgcaatgccaaactgcttgggtgtgcaaccatacaatgcctgaaatggagacatgcctatagctgagtgtggagaagaattataccagaactacgcaacagacaaccaccgactccacttgtgcggacaggcgtggacaaaacaacgaagaaaagtttctaagcactgattgacacgctctgactgcccatcggactgaggatgatacgcagtgctcatctgaagctgcacatcagccaagcgaaacaactctttccacaagtggctgagaaacacacggtctctgtcagatacaatcgattggggtagtccatggtgcttgtacacttgatcatgaaagagcctggcg

SEQ ID NO: 169709 - DNA, 598 bp, Zea Mays
gtatcgatcacatagagccgttggatcatgcatcaagggccacgattaaataaagttatctgcgaaccggtacgcaacgacaatcgtacgatcagagatccacggtccacgaatgcccacaatccaatccaccccgaaccacacgattaaagtccgacggctcggatttaaaatgacgaaggggtaagctacacacgatcatggccgtccaacacgggatcgacgacgcacaaacgattttctctactctaatcttggccgaccacgcatggatccacggtccacaaacgttcttctaccctcagacaacacccaggcggcggcgccagataccgagcggtggcgaacccgccggagcttggctccgagccaacccgatagccccgcccaacctgaagtccctacacgcactgaggatgacatggtgagcatgcacgtagccgacttaccggccgtttaagcagtggagggagctcgcccaacgtccagcggcatagctgtccaacccagccctttcgacagcagaccacggccagggatggcggcgcaccaagctcacggtcgacaccaccacccgcgacactccccagacaaccgc

SEQ ID NO: 169710 - DNA, 428 bp, Zea Mays
aagactccaccctaggtatgtcaggacgatccataatcccaactcaagcgacgacaggggaaatcacacttaaggccatcaacacagctcgcaatcatcagggacacaacaaagttcctataggccaccagcaccaagaggcagaggaggtagaagcttcggtggaagattcagctcccaacaaagaatgttgttttgtctattatgtggggaagataaggggcatacaacaaggacatgccaagtcactattcagaagcagaaggaaaaagctaaagtcgaagcacggcagaatcagccgaagcaagtcctgcataccgcttcgtgctattccccatacatacccgagtatgtgggcaaccaacaacccacatcatcagttgcttcaacaagccactcacaagctgcatgggcccagctaccaccac

SEQ ID NO: 169711 - DNA, 383 bp, Zea Mays
cgaagacgaaggggcgcactacagcggggcggtggcatgctccttgtgcggcggttcgccttcttcacactcgaagaccagcgggccagttgtatgactcgtggggaccgagcccccgtgtcataggatgaataccccggtgtccatcgggggagacttctcgcgatgtttcgaggcgggagcgggggagtctgcctttaaagaggggttcatccctcgagtagcagccatgccttacttctctcccactcgcggcgtcctctcacctccgagctctctgcgcccctttgccttcaaggtttctgctttatgtcaccatagtttaccatggccttgtaagttcatctctagcatgcccagactgagtgggtgctcgacatggt

SEQ ID NO: 169712 - DNA, 731 bp, Zea Mays
gcgccgccataaccgagcaccgccgccaaaacatttccaccgccgccgctgacgaatccacgccggcagtgcctcattaacagccagaaccgacgcgggtggttcgccgacgcgtctagaagccgttcgtggtctttccgggtgcgattgtgggccaacgacgccgcaattgcccgtcgtagttcaagcgccgtgcggatccgtgctcctccatgggcaggctcgctacttcttcaatcgcgggtgagaacctccgttccgtgttcgccagcgcctgtatcgtgttttgcacatgttctcttctagggtagggcatccgacccctgtaacattcttcaccggcgaaaacctcgctggtatgccttgcggcgccgccgtggtcgggcagggaggtaggcataggcttcctggtcgttggatctgcaggggatggataggtttagatcagggcataccatttcgctggattaaaattggggcgttgcttcgtggatgtgtggtctagatcggatcgggatgtgggagttcctcaaccgttgataccggatctcgcgaccagggtggattgcggagttatgtaacacacatttctaatctgagccgaccatttcggatcgggtggccctggatggaggatacccctttggccgtggcattttactaaagagaccctagacttgtaggaaatgaacccgccatccctagtaactgtgcgctgagtctggtactcc

SEQ ID NO: 169713 - DNA, 524 bp, Zea Mays
gaacaccttatgtgcaactcagatttcagaacacatttttgtgcaactcagattttcagaacacgtgtgtgcatcatagaattcacatttcataatacatttcagacagtttattaaatataagtctacaatttaataattgttaaatagcctctaaatttttatgcccgccaaataatcacaccaaataagccatcccgccaccaaattctagcgtaatctatatacaccatcgcctttaactctaaacctaaaagaaattctacaaccaaccgcatccaccgcgccatccgtccacctcgccgccgcatccactgccccatcctcgtcgccacagccccatcgtccacctcgctgctgcatccaccgcctcatcctcgtcagcattgccccatccgtccacctcctcgtcgtcgccccatccgtccacctcctcgtcgtcgccccatccgtccacctcctcgtcgttgccccatccgtccacctcctcgtcgtcgccccatccaccatcgtcgtcgatccgc

SEQ ID NO: 169714 - DNA, 1021 bp, Zea Mays
tacgaaaagggtagaattcaacgctattgtgatggggccgataaaagcaagctttggcttgaagaggccattttgcaacataagtggagccacccaaacgacttatgtcgccttccacactgtggtggacaaaattggtacacggaacttggttcaagagttccttgcaaatagagtgttcccctacacaatccggctgaggatttcgaagcctaagaaaggcgatgatgaggtgtaacccgacatactcactttgctctatcgctttaaacaacaaccagtttccaaacgcccatgcactaaatggttagatggtattgcggtggtttgcaacgaaatccttggcaactacacaattgaagatgatcaactaatgacgacagccttcgaaagtcatgagaaatgaaggtttaatagagtcatggatgcgctgaggttcgaatatcttgactatcccaatttagccaaagaggctgacatagggataaaaagaaagagaatagttagtattttggagcaggaagccattagatcaattgaagcaaaaagtctaagaagaaactaaaggtagtcgaaaaaccgaaggtgacaacgagtgaagggccttctcacttagatacaaggaccccgccccttcaaagaagaaaagaacagaggctgcctccaacaaggcaaaggaaatgcttacgaaggttgccaagggagaccaaggaaaaaaggaaatggggagtactatgatttcatcacttggggctacccaaatactagaggtaatgaccctgttgggtagaggccaaacatgactttgatcatggagcgaaggctctacctttcgttcttagctaactaatacagaggactgaatgtaacaagggataatgttaagcggaggcccctaaatgattgacaccagataaggacttgctacgatgtggccctagagccctcgacgccaaccatctatctgaggagagcgaagggcactaaggcgcgaggactccggaggtggcggtgaaggcta

SEQ ID NO: 169715 - DNA, 436 bp, Zea Mays
ctcacgacctgcgtttttacaaggcaattttggcaccatttgttgccccactggggttgggtggtatttctcctagacagaacgaggtctgtttcgcggaatggtggaggaaatcaagccggcgagtgaagaaagatagaagggaaggttttcattctttcgttatttttggtgcttggaccctttggaataagagaaatatttatgtttttgagggtgcctctccttccctttcggtagcccaaaacttcagcagagaagaagttagattgtggtgtttggctggagctgctaagctccaggttttagtgagtgggtgggtgatttttggtcatggagggatggcttaactctctcctttctagaggtccctcttgtttgtgtcaggcgcggattcgtctttgttttttctcaactcctttcctcccaagttggg

SEQ ID NO: 169716 - DNA, 332 bp, Zea Mays
agtacgctgtggtgaacatagctacagagtagtactcgtggacaaaatcctccatcctgacatccctaaattcctgagctgttatcaagcatagggcatggatgcatggtttgcccgtgtgctgccactctttgcatgaacattaccacagctgagcattgacaatgtgcttcgaatgcacatcattattatcccttacctctgcaatgtagttgtcagctttccatactgctaaatgacctaaacctcttgtcctggcgtgtaggatatgcagaaccgatggtaaaatccgtccttgcaacttttgtgcaatcctcctcctcctgtgaaac

SEQ ID NO: 169717 - DNA, 450 bp, Zea Mays
aaaaagcttccgcctacgactacggtcctccacgatccaactccgagagcggagatcccccaacggcggctatccccggtggtggcctcccttctcggtttgtgcttgtcgcggtgctgcgtttgctttggctcacgcgcagaggaaggcagagaaggggaggaggtcgcgaggatggtccgagtcacccgcggccgagccccttatcgccccgtcaagccctggaaaatcggcgccgcagttgcgcgagcgcgggtcgtgcgggagagaggaacataagcggcgaagaaaaacgagctgacacgggtgccccaccagtcagtgacctggtccgtctaacggtgagtctcgccaactctggcccacctgccagtgatcgcaagggcgcgcggagatagctgaccagagggccggggcccgcgtggcagagggcgtcagcgtgggtgagcg

SEQ ID NO: 169718 - DNA, 563 bp, Zea Mays
atcaaagcagaaatcctgttgacaaatagtgtggttcgtgtccagctaaaaagaaatatgcaaacaatgtacgtataatacgtaaaaagctcatgggattgtatatattacctgatgtcctgtatcaacgtccgcttcgtcaggacaagactcaaatactctccgaatatgctattgtctttcatgaatttcttcaacttgggtaccacccagctgggtctcaagctgcgatgcttgggatgacagatccggtgtgggttgggtggcatggacagtgtgtccttatacaaaattataatataaataatgtatatcaaaacttgcattatagagtaaatgttgctgcatatactaaaaataacaaatgatgtttactgtgcatataaaaaaacctatgcacatgtagtctgtgtaatgttctgaatgtatgaaaaaagtgataattatatgactgacctactgattcatctgaatgtcgcgattgctctggcttatctatctcatcttctaaattatcagactcagcacgtagtacctcgtcgatcagctctataaagttgtct

SEQ ID NO: 169719 - DNA, 334 bp, Zea Mays
caatgacttcatgactctccaaggcagctacacgggcttgagctgtggtgagatccacatgcagctgacggttgcgcttctctgcatcttctgctcgggcaatcatccgacggtggtgccgagccaagaaatcatattgtgcatcaagggtgagcaggtatgcagtgaggtacacgactgtggggtcgtcctcaagcagctgctgctcttccaatgcacgcatcctggccatccaaactggacggtctctctgaaagggcggaaagaatctgagcgaggtgtcggccacttcttcttcatagatctaacacagggccctcaataccttgcgagc

SEQ ID NO: 169720 - DNA, 674 bp, Zea Mays
gacggcgttccccgcggccaaccacaattgacgctccaaaccacggggaaaatcgacggagaactatgcagggaggtacgagagacgaggaagtaacaatttaccagtttacacgatgtagcaatccaatagggtgcagcggctccgtcgcgatcttgcactccatcaagcaattgggattgttccaagggactccacccctttcccaactccaactcttcaccacggaccctccctgattctatctgggtcgagggccggtgatagtggaacctcgacgcggtgccccactcaccctctctctcctatttctctcgcgttcccccaggcgttttcttcttctctcaatccagtggcatggcgatcatggtgagatgaggtgagttgcgaagggcggcttcaaatatatggccaatggtacggcgcggggataagtggaggaggctggagagattcggttggcacgagaatggcagtcaggtctcgggagttgcgcgcgaagtttgttacgccagaggagaaagagctgaccacctgggcccgcttggaaatgagacgtgcgcggggacggcgactggtgaacggttgagacgctggagcgcggttcccgctggcaggacatgggcgcgcggggagggaaaataagaccgaccgagcgggcccacatgtcggtc

SEQ ID NO: 169721 - DNA, 624 bp, Zea Mays
ctttgctatagggattatgccttggtgccatgaaatattttgagataattaggcccaaagatgggctgtcagactgtcttaggtctgaaatttaggctgacagtgtgattgggcagtctttggacttagattcgaccataatccagtcagtgtttggctatggttactatagtaagtttgtagctggatcattaggctacaattttgctgcagagcattggtcttgttgccatggagatttgggaagaaattcgccctaaacattgactgtcaggctgactgaagaacaaacccatggtacaataaactgaaacagatcgcagattcatcccccttcaccgtcggtgcccgtcgcgccgcaattcacgccggtcgctgtgattcgtgcgccgtgacttgcggataactgtggtcgagtaaagatcttggcacctggatcgactcgggctcggtcacagctaagctcgccgtacccacttgctcgtcgatcggtcggatagacctcaccgccgttggccaattcccgccgtgcgccacgtactaaagcacttgaccacatcgcagtgaatcacatcgtgcatgcccggtgatcgccggggtgcttgccacggtaataggccacga

SEQ ID NO: 169722 - DNA, 409 bp, Zea Mays
gtcgggtcttccttcgagaggtggcgtgacatgtggcctaacatgatggtggggcaggcttgcttcctcgtccagtggatcttttccatcggtcccaagtagcagggttttgcaggatggcctttatttaatcgtgtcgctcaccctatcttgtccaccttgctttcggttcctcggaccttcgtcttcttcgcttagcctgtccttattttgctcgggtcttctgtcgctcctcccgtgacggactggcgtcgatccctaacgagtcaggggaaccttcaagccctcgttgggcgtggtttactggatgaaggcgggtggttgattccgaacgctgaggaggccccaaccccgcctcctggttatgtggtttcatttgttcgtttccatgagcgaggtctcgttgtcc

SEQ ID NO: 169723 - DNA, 5556 bp, Zea Mays
gggggaagtaaaaagggatttgggtacggtgggcaaagcagggacaaccagcagagcatgtgcatcattagggctcagggtgtgtttggttggactgaaagtttgttaacgacttgcataagttggaacacacacaatatctggagaatgcagagacggagaacagagtagttgagatagtacttggaaaggaagaagaactagagtctagagttctgttacagcataaaaaaccctacgcgccgccaaacccttatttaataatcggctggattactctgtgctgtttacccacgccggcccaaagacctttgggttgcgcttcctcagccttttggcccgacacggcccatctcctgctgttgcagccaaaccttctttgtcatttgccgcaccgatgactgcttcctccgcttcgctgacattccccctgctaaatccgctggttgtccccaaacagctgcatgcggaaactgctgttgcaagtcctgcgcaaactcccaagtagccaactccacgggcatgtgtgaccactggacaagaatttgttcactggactgccccccacgagccaccgtccgacgctgcaagatcttgacaggcacactgaactgaaattgctcattaggcagcactggagaagacaccaaacctgtacccaaggcacgcttgagctgggatacatgaaatacaggatgaatccgtgacgaagatggtaactataattcgtacgccacggctcccacacgtcgcagcacctgaaatggcccaaaaaacttaaatgccaatttctgatgagcacgaacagcaacagacgactgaacatatggttggagcttaagaaacacccaatcaccactagcaaattcccgttcagaacggcctttgtcagcctgtcgtttcatgcgcaatttagccctttccaagtgctgttttactaaatcagacatgacctgccggtcctgcagccatatagataaatcagtggaagcaatgacagcagaatccgaaataccaaactgtcgagggcgacacccatagagcacttcaaatggcgaccttcccgtagctgaatggggagacgagttataccagaattgtgcaactgatagtcacttactccattgatgagggcaggcatggacaaaacaacgaaggaacgtctccaaacattgatttacacgctctgtttgtccatcggattgcggatgataagctgagctcatacgtagctggacatcagcaagccgaaataattccttccacaggttactgagaaacaccttgtcacgatcggaaactatagaatgaggcaatccatgatgtttatacacttgatcgtggaaaaggcgagcaaccgtcagagctgtaaatgggtgtttcagtggtaaaaaattggcatattttgaaaacagatcgacaaccaccaggatgcatgtatacgaatgtgaactaggcaaagcctcaatgaaatccatagaaatgatctgccataaagaagaaggaaccggaaggggttggagcagaccaggtagcctagcacgatcagctttggcttgctgacatatcaaacagtgagtgacatatgtgtgcacttcagttttcagaccttgccaagcaaacagttgcttcaaccgggcatatgttaccggaaatcccgagtgaccgcccactgcagatgtatgaaaagcagctatcaacttctgatgcagatgagctgaaggtcctacccaaatgcgcttcttataacggagcaacccatcttgccaggaaaaatgtggaacggcggacgaatccacagcgagcttagcaatgatatccgaagaatgggtatctgccaaatatgtatcagcaacttcggtgacccactgtggctgacaggacgacaccgccaggcaactcgctgacactataggatgtcgcgataaagcatcagcaaccccgttctctactcctttcttatacacgatgcgatattgcagtcccaacaaccgagtaaacattttcttttgccatggtgtgtgcaaccgctgttcatccaactgagcaagactgcgatgatccgtatatatgatgaattccttaagttgcaagtaatggcgccaatggtcgacagcaatcaaaatggccaaaaattccttttcataagtcgacaacccttgtgatctgggtcccaacgccttgctaagatacgcaattgggtgaccggactgcaacaacaccgctccgaccccatgattgctggcatctgtttctaaacagaagggcaatgaaaagtttggtaatgccaaaacaggagcagacactaaagcttgtttcaaggctgcaaaggaagcttcgtgtgcgggagtccatacaaatatagcacccttttttagtagacccgtcagaggtcgagccaaaagaccaaaatgacgaacaaagcgacggtagtaccctgccaaacccaaaaaactgcgtaattccttcacagtcctgggagaagaccactgagaaacagcctgaatcttgcttgggtctgtagctactccggccgctgaaatgacatgaccgagataggataactgaggcctggcaaatgaacatttattcaacttaatttgccattgatactgtatgagtagttcgaagactgctcgaacatgctgaatatggtcttcaaagctcgaactgtagattaaaatatcatcaaagaaaactagcacacaacgacgaagtaatggtgctaatgttgcattcatggcgcgttgaaaagtggctggtgccccggtcaaaccaaaagccataactctaaattcatagtgacccgagtgtgtttggaatgctgtcttatgacaatctgccggtaacagccgaatctggtgatatcccgctgtcaagtccagactagtaaaccaggaagcttgccccaattcatccaacaactcctcgatgacaggtaccggaaaagatgtcttgacagtaatagcatttaagtgccgaaaatccacacagaagcgccatgaattatccttcttcttgaccaataatactgaagaagaaaatggactagtgctgggttgtataattcctgactgaagcatgaccgaaacttggcgctctatttcatctttgatagctggtggatatcgatatggtctgacatggacaggaacagcccctggcactaatggaatggtatgatcacactcacgagttggaggaagaccatttggtggtgcaaacacagctttaaattcctccaacaatgccatcagcacaggtgttaaatccaagtgtgcaaacagaggtggttcagattctatcatatctaattccactatcgacccaggtggaaaaacagcagacaatccatgtaatagcacccaggaacgttgatatggaatgatcatccacttttgggaccaatgcaccttcatcggactattagctgccaaccaatccataccaatgatcatatcatatgaagccagatccaaaactctcaagtcagtgtcaaacacgcagtgttgaacggaccatctagcgccaactagctggcaagaacacttcaaacgattgccatccgctacctgaaccagcactgacttggccatatcagttacacctgataacctcgatgccacccgggatgcaatgaatgaatgagaactacctgaatcgatcagcatcaccacttcaatgccttgaatcagtccccgcaacttcagagtatggttcaactccaatcctttaacagcagcaatggagatggccaaacattcagtctctatgatctgatcctcgaccacaacatcctcaggaatggtgtcttcatccccttcatataattcccagagttcctgtagagcatgtaactggactgtgggaggacacttatgatcacgcgaccacttctccgcacaacgctggcacaaccctttagctcgacgataagcgcgcaaggcagcaagtttgtcatccaagacacgagcacgatgttgttcagccggctttgtttcttcgatcacagctccagtcttgtcgggtcgtgctgtcaagaaaggaggcactgaagatttgccatacccctttcctgacgacgcccattctggacgtcgatgctccaaacgtcggtctgacgtggccacctcttcctgcagcaaggcgagagcgcaagcagaatccaaggaagaaggccgttgaagaataatagcagcacgaatgtctgaacgaagaccatccacaaaacgttgcacaaaatagagaggatccacaggtcgcccgtacgacaccaacttgtctactaatgaagaaaactgatctacatattcagttactgtgccatgttgacgaatgcgaaacaattgtctaataaacaactcatgctcatcttttccaaaacgctctaaaagcacgcggcaaaaaacaggccaactagataagtgtgaatgttcgtccagagatgaaaaccaccgagcagcccccccaacaaaatgcatcgacgctaccctgatccataggtgcggttctacttcatacatgtcaaagtagtcatggctgcgacggatccataatttggggttttcgccatcaaacacaggaaaattcaacttaggcaaacgaccacgcatcgcgccccccatggttggatatgacagatcgcccacatgctgatggaattccgaagtatgcacagctggagaacgaggcaatgatgaacacatacccttgaccggggtatggaggagggtggtgaccgacccaaaaccatcctcccggtggctcgattcgacgcggtgcccatggggcctgttggctggaactccggcaggttgttgctcgacagccggtggagaaggagcgaggatgcccgccatagcggacgaattgtccactacagcacgctcccaatttttggagatcttgcccacctcgagtcgcaggtcatccatcatcccttccatgttcatccgccaatcttccagcacaccagtggcttgttctagagcccccacgcagcggtcttgtccagtggtgaactccgagaaggtcgcgttccaacgcgactcctgctcggccactctgcgatcccacttggagtcatgttcagagaaacgccgcgacaactcatccaggatgagttgagtgtctggattcatgagaacacgtcggaggcgagcacgggtaaagtaatgctgctggtcgccgcgatccagcgcgtcaacacccacaagccaaggatcggtaacctttgataccacttgttaacgacttgcataagttggaacacacacacaatatctggagaatgcagagacggagaacagagtagttgagatagtacttggaaaggaagaagaactagagtctagagttctgttacagcataaaaaaccctacgcgccgtcgaacccttatttaataatcggctggattactctgtgctgtttacccacgccggcccaaagacctttgggttgcgcttcctcagccttttggcccgacacggcccatctcctgctgttgcagccaaaccttctttgtcatttgccgcaccgatgactgcttcctccg

SEQ ID NO: 169724 - DNA, 363 bp, Zea Mays
ctgatggaactctgaaattcagaatttcagtgtaacaaagctaactttggacttggattcaaccttgatccagtgctcaactaagtttaatccctatagtcgagttgtagctggtttatatcactacaatattgctgcagatcattggttatgttgccatttgaaattgggagaaaatggagctccaagatgatccgttaggccaacaaactgaagaaacgctatggtacagtacacccccaaactgaaacagatcacggttcacccccctacccatcaccagtgatccgtcgccgatggttgattgctcgccgcgattcgtgcaccgtggtcagcagataagcacgggcaagtaaaaatctg

SEQ ID NO: 169725 - DNA, 689 bp, Zea Mays
ccagtcttatttgaaaacaacgatcacatttttttctggtcgtcggttcatttggatgtggcgatgttgtgcctccaacagtccttacgaccaaatattttacgtggtcgtctatttttggtcgtcaatacttctttctcttgtagtgagccaatgccacggtcacgccctggtgaatcccaaactccactaccacacggacacgatatgggatgttgaggaggcttaagtcacgattccttccccaggcgtcgagaaatctcctggctcggtcagtgcacaggcaaaggcttagggcctcgagctccaactataaaaatatagaaaacttagtaactcaaagagttggatacaagaagccataccacccaagattatcggccccagaattcttgagagccgccaggcgagcccgcagacgtcgaatttcaacattagctatccctatggtggagcgagctacgcctagatccctctagagatcttccatcgatgtccataggggccaaagaactagacaacctagacggaagaccatgatctccccccggggcaaccaccaccctgagaaaggacaaggaagattgaaagggacaagagtgatacgacctaacgaaaaggaagaaggccactcgaaccaccgcctcgaagggccaccccttgaaaaaccacctcgatccatgacagcg

SEQ ID NO: 169726 - DNA, 667 bp, Zea Mays
gaatgggcaaagaattgctcagcggtaatgggcggtggaggcgggagtggaatttcttggccatcgttctcgataccactgtcgctagctccactggcaccaatagcggtgtggcgagtatccaccatctgcatgtttcagcaacaagtaattatcaggtgatgttgcaaggattgcaaacgaatgtaatcatccccgaataaattgacagggggagtaactgtggtaatttaaaacagaggcataataatccattcacgacaacatcactaattatattacttcatggtgtccaagcattctcgcacacacgcaagttgccagcatacatacactggacttttaaagtatggtcaacacaacatgatcccaagttctacatccaacaagtcttaaaaccgacggacaaactgacaagcttgacgacaaaagaacgcaaaagacagtctaatgtctagcgatacatctactagactacttctcgtggtcgctgtccatgctagaagcgttgtcatcttcttcaccggcttcgtcattctcaacaaccggctcctcctagtgggcctcatcaacatccatgccgttatcagcgtagataaagctaggctccatctctgtggtgccaggagggtagaacgagttaagctgattgtgcagctgatgcacc

SEQ ID NO: 169727 - DNA, 565 bp, Zea Mays
ggcagacggataattctttgttgtccgggaggcagtacaagaaatcatcttcatccgtaccgttaaacaccaaggcccccttcgggtacttcagttctcgggcatagtgtttagcttcaaaaatttcttcttcagataatttctttcccgaagcatgtcgaatgacataatcaagatcttcggagagtgtttcaggggcaagggattcggcctctttggccgcactcttctcaaaacctatattaatatctggagttattccttcggccttctgctcggtggcggcaagcttcgtctcagtaggcaatgtgggctctgcctcggcttcagcttgggttattgtagtctcgacttctatttgcttagtatcagctttgggttgcgttttgtcagcttcggcaaccttcttcaacggagcatgacatttggaatccgatgtgtccaaaatatctaatacattgaccatcctttttctcctaggtgttgtgacagaacttttttctgtctttggcactgctacttctgccgaagggcttagaatttctaacattcttgttccttcaac

SEQ ID NO: 169728 - DNA, 284 bp, Zea Mays
ctcctgtacaaggacaccctactttctactaacaacttaccctctacttttccaagtattgtctttgatgcattacaggaatatgagggtgtgtttcctgatgaagtgccaccagggctaccacctaagagagggattgaacatcaaatagaccttgtgtctggcgcttccctcccaaattgtgctgcctaccgcaccaacccagaagaaacaaaggagattcagcaacaagtggaagaattgattaaaaagggtacgtacaagaaagtctttccccttgtgtt

SEQ ID NO: 169729 - DNA, 800 bp, Zea Mays
cgcgtaggtgctacactgctacccccacgccggcggcagggcagtgtgcgcatcgatcgcattaacgccggcggccggggcggccacggccagaagtggtcgctctaaaacgttgcctttaactcggatcctaggcgtagactctacacgagagcggacccagaattttggcacgtctttaagcttctgtactgctgctctgttctggtgctgcatgaccatgcatgagctacgtatatagtactagtatgtacaggctttagctcgcccgtgaatcagacgaaaaaaagagaacggcgcgtgagtacggtactagcaagtgtatatacggtccgctgtccgctccatgcacggatggatgtccattattgagaaaaatcggtgctgcagagtcggatcgtcgtcacatgcgccaggtccaggtgtgtcacacagtgcacgtacttcgtacaagatgatttgcacatacgtacgtgtacatcacgagcacgagacagcgttaacgttatgtcggttgtgacactttggataattgagctccgtaaaagtctgaaccactaatgcccctccaattctctcggttctgtggcttccaaaatagtcctaagggtttatgtagcagcaagaagatcaatggtgctaaaatatcttattatttaattttaaatagtaagagattctagccttcttattccttttgctcccaaaaaaaaccaatgatgttgcgaggttaggagttttgttggatgcaagaagggtagaaagaaaagaaacacatcggagatcactaccggcctttt

SEQ ID NO: 169730 - DNA, 654 bp, Zea Mays
ggccactctataagcaatatgctcctacactaggtcccttgtgccaatataagtgcacacggtgttaaaggccatctggcatgcttgaatatcatttccaagggcagtgactagcctcctaatgccgaagcgagaccagatagggcgttgaatgatccccattacatcttctctttcaatcaagttgttttttcacataaaaccactcttgcatccaggctcctggccacctctttcgaaatgttgggactagatagctcacatcggagcaaggcacgaagccgtagcaaccaaaattattatgatattgttctttaccggtggccttcatctcataggacaactcatgaatgttatagaagcatttcacatttggctctaacccctggctcctcgcggcccaaataaaaattcccgttctgatgatagcctcgggggtaatctgatgaaggtaaatttcaaaagtcttcaaaacttcaaccaaaaatttatccaagggaaaccgaagccctgctttcatgaagcttctgtagacaactacttcgtcagcttcgggcacaggggtattgttgtctcccccagccctcacgatagaaatatcatggaaatatctacctttcattgcatcaatctgactttgtttaatggttgatt

SEQ ID NO: 169731 - DNA, 560 bp, Zea Mays
gagaaggggcactaaaactttagaaaccatgacttaattaagtaatgatcatgatagaagggataccctagcttttcatgtatcttcaccttggaaaaggatgctcaaaccctagcacccccctcttgagccattagacccccaagcactggattaatgggaaggataagcaaatgaccatttcatgacttaaacctcatgccaaagttgaagtacatttatatatctacaagaaagagtaaggaagttattccaaaaaggtcccacaaaacccccaaattcagcccccaagtgaagagcactcaagagcaaccaaattttctctaagttaaaaatcagccctcttctaaagatcagagatgttcacttagttgctggcgccaaatccataaggtccaattgacaaaaaggagccaaattacccaaggcacaccccagaaaaatttaaaaccaaaccagaaccgtttgacacggttcgacacaagttttgtctcgggttgaatagtgccgacacccctgacttggcgccaccatatctcccaaaccagacccgatcttcc

SEQ ID NO: 169732 - DNA, 2495 bp, Zea Mays
aggggccgttgtgcccaaatgctgcttgaagtggtcagtgatgaccttctcctttccttcctgtgtgacgaccaagccagtctcagtttgcaaggcttggatgaagttcttccttgccctagagcatgcccggagatggaaaaatcttgagttggcgtccccaaggcggatggcagtcaagcgggacctttgtctgattcgtgatttctcaacgagtgctagtcccaaggatttagctttcaatcttctgaggaggttcagttcgacgagagatagagtgcgcacttcctgagcagtttctaagcgaagaatcacttccttgactatggccagttgaagtttcgtgtctcctactttcactctcctccaagctttgatggccttggctgttcgcgctagtttgatgtgcaggcgcaagagtggttgctggacagagggtaacggcttattccaggccgagtatactgcttctttgaatccgtcaatgtgtgtccagaagttctcgaagcggaaggaggtgtttgttttgcgcattatctccccctgtaagagcagaggggtgtggtccgacatgagggagggtagggagtggatgtagcaggttgggaagaggagctcccaatcgggcgtgcagaagaatctatcaattcttgtcatggttggttcagcctgcccattgctccaggtgaattggcggccattcagacgaagttccttaaggtggatgtcatctatggtggatttgaatgaacccatgaggcgcctatttaggtttagattgttcttgtctgaagcctggtaaatgagattaaaatccccaaggactagccacctctcgtgcccctgggaggcaagggccctcaattcctgaagaaacaggagcttgtctgcatcgggttggggcccgtagaccactgtaatccaccactctgtgtcgtccgctttcatggtgatcatggctgtgatggcgttgtcggaagtagatacgttagagagtgtgaagaagtcttccgacacagcaagcaaaatgccccctctggtttggtttgctggccgagcaacatagttagtaaggaattttgaccctaaagtgtgtgcgatgacatggtggtctaccattgacagctttgtttcttggagacatacgattgtgctacctgtatcacgaacaagatcatgcatagtgtcccttctcgccccttcattgaggcctctcacattccagctcaggatttggcagtggcgttgagtcattcctgtaccagagaaaacccaacagcaactgcaacgcccgtcatacggactggcgtgcaggttctggaactgaaggtaaacatcacaaacacagcgagcgttgacggcatagaagaagtggagcaacccgctggatatattgaagtagggtacatgcagacaacaatggacgactgaagtttgtggccgcccagccggacacgcgaaacacacttgaaggcgcatatgtagacaaagcttgcgaaggtaatccgtagctgtaggcctctggctgctacctcatgccccaacgagctaacaataactaatgtagtgatacaagtggcagatcgcatcccctgaaacaagcagaagtgtgcacactttccacagacaaagcagatgacaataaacatacctaacatggcaaagttgtttcccacaacaacattccacagctcaagatgactgcagtccagcctcattagggtcatccaatccgcatagggcgaccaaagccttggtggctaggtgggtcagcgggccattgaacaggctgaagtagcgcttgagctcctcgtcagttgcccggttctgcctctgattagagcccgactctggtaggattcccagtcgcttcatgagcacttggcgcgcgcggctctgaatgtctccacgcggccaagcgatggccgctagcctcgcgctcttgcgggtagaagttcttgcacgtcccatgaaacttctttgtgtcttcttggggagctcataccgctgatcttgcgggcgcaatataggttgggcgacaggggcggagatgctgtcgatgaaagacgttgctgcttgcagctcctggtgcgacgccgatctgctgcgtctgcggtagacgcatccggggcggaagcggcacacgggtgtggtcgaccccgccgacatggtggtgccaatcgccggcgggcttgggggaggtgggtgcgtgctgtcgaggtcgtcgcggcgggcatccgaggtacagcgtgaacccccagcggtagagtccagaccggtcccatgctgacatcgagggacggaccgcgcgcgcctcccagggcgtcggcgaggcatccgttcccggctgcgaccgcgagcagccatggccatcccactgttaggggaggcgtcatggcggggacgcggtgacgggctcatgctctgtcccctgcctctgaattggtgatgccgctgctctcggccgcctccacttgatgcagagccatctatgc

SEQ ID NO: 169733 - DNA, 847 bp, Zea Mays
ggcgtacgtccgtgggccccgattcccgaaacatatgcagctaccgatgattgaccgttggccccagcaaaaaggtgcaaatctagccagctgtgcacggtgtccccaaggaacccaatcatggtcaccaaagaagggaccagcaggccgggcaatactgcacattggaaacatgacaacttcttgctagatatggagcaagaaaacttccgaggtttgtgagtttcattcagatacggagcgcgcggctaggccacttcatcagccacatatgcatcgtcacgcatcaagattcaaacaggaaaacttgcacatttcaaagtacagtgctacgcatgttagagcttggtgaagtacgcgctacaaataatgaatggaaaatttgcagcaagtgcagaagaaaaaaagaaaaataaaagaggagatgagagcgcgcggccgggcttggagagatcggattgatccacatttcagcttcggcttttgatgcaggtttggctcgttggtggtcaaagtacagcatcgtctcatggtcatggcttccaaaaagaagtgcaagcatcctgttgttaccaaaagaggagaaagagaaaaaggggggacttccgacttcggacgtggagttgcagcctaccatccccgctaggcgctagctagctgtggtactagtgtacctagtagtactggaacaggctcggcatctcccgcacggccccgaacgccggcgacgacggcatgacgccgagcccccacggcaggcacggcccgtcgacgacctcggccgcggcgtccacgccgaacatgcccagggacgccgccttcgccacggccgccgccgggccgtagc

SEQ ID NO: 169734 - DNA, 782 bp, Zea Mays
tgttcttcttagatagttttggatttgcctcccttagagatatgaaatcagggctgctcctttgctctagaaatactacccattaaccttctgagattttatatattttgtcgggtccaggcctttctttgtaaactttgtattagctcagacttctagtataaaaattgatcacaaactacttcattgtgtattccttcacgagttcttctaaaccccgaggcagaatgaacctcgttaatagcttattccacatttgattcttaacatcatctgacacatcactccactattggattgttatgtcaagattatctctaactaagaacccaagtgcattccaaaacttaggtaatgcctcttctagagctaggggctgacctttcgggctcacatatgagattatatatgagttgttaggaaacttgtttagtcctttgtcacctcttttctgatcgctctgcttccttttccttgacctcacgatggttgtcttggttagttccggtgtgtcttgatatcgtgccttggcttcatcgagtatcacatgatattgagacaaagacctcctattcatgtaataaaatgcataagaaatcatgcatgtctaatagacattgtgaaatcaactaattaggtacacacatgaaattaaggatgtgtaatttacctcatcgtctagtggatcataactagggtcacgttgcaactcatggcgagcggccctatctatgctaggacaagtgttgctagtcgtttgtgtcacacccagttttagaagg

SEQ ID NO: 169735 - DNA, 1399 bp, Zea Mays
ccgcatcgatccatggcctgcggactccagctgttggtgtgtagggcagggtcgttaaacgcgtgatcgctcgcctgacatgtttctgcgtgtgatgcgtgcgtggtaaccgactggtacgctgtttggtaacgcctctgggcgggcgactgggtgggagttggaagtggttgacttgctcctttcgtgcgctaaacgtgacgtgagatggcggctttcgtggagattgttaactcaaccggtgccttaacaggcacaatgattaccggtggttgcagccgtgactcgtcggtattgtcatgagcacctatattagggtgtcaacaatggaggtgcgtagcaaccgaaattgactacacacagagaggttttatagccagatagatagattagctgcttactgcatttatcccaaaaagaatgcaactatagcatgggtgcttcactgttcttctgtgcggctgtgcctagggtccagtttaatactttaaaattttgaccaaatttatagaaaattatgcaacgatgaatctattgatgcttactatttggtggtataattatttgtcgtttttataggaatttgacaaagatgagatagtttaacttaggtctatgccagagttgcacttgggcagcaaaggtagtgtcagtatttcacaacatgggtgcttcactgttcttctttgcggctgtgcctagggtccagtttaatactttaatgtcatgtagaggtattgctgatttaagtcttaggataaccacagttggtgaaggaatcaaaccaagaccagtgtggccattgaaagagacctcccaaccaaagtgaggtttggtcttgtacattccaacgccaatgacaagtacgaatacagaattctccttactgagctggacaaaatgtcacgtagaggtttgttctttattgtgctcttgggcaatgggggcagtagtggaacgcctgacaatcatagctcgattctcttttggcatactgttcgggtggatcatacaatatgttcaaggaagaaacagacatgctggtttcattgactaatgggtgatgctagcaggtgaccatttatgatcagtgccaagcctgccttgctggatttactattgttttctgcctgcttggagggggggaggggatcttttatgcttgatatcatttaactgttacttcagtcataagatccggagtcatttcttctatgtacgcacctgcctactgatggcctctacctaaaatcattcaatatcaagatccacaatcattgtcggtctgtacaggctccagttaacagatatttgaacacactgttaatctacttgggtgctatttcctaacctgattaacagatggctattatagagtagatatctgaaaatgaattgg

SEQ ID NO: 169736 - DNA, 371 bp, Zea Mays
ggccgcttgtggaaagctaggaaatgccgaaggagaccaccactgattctagtgatggtggtctggtccgactgaaatacacctttaaatttagggagaagtttgatgagccaaacgacgattggctaaagtgtattgaagctaccagcgatgagctgcttggagctaactccaaggccgaagataacgctctgtccgcagcttttggaggtcgggggaagaaaagactaaatagggtttttgatgccattggcttcgtataccctgattaccgctacccgctgcgaggacaagagaaaaagaggaagattgttgcttcggtcaccccaactgagcctgtgccgaagagcaaaaaggtgaaggttctgaca

SEQ ID NO: 169737 - DNA, 545 bp, Zea Mays
gcgaaggtgagcacggggtgaggtgaggcgcgcccgggaaggctttataggcgcgggcgagcatggccgagggcggggttctgacaagtgctcgaggcgtgtgcgggcgaacgccagtgcgcgctctggcgcttggcatggggtcaaacatgaggcagcacagtgagaggtcaagttcaagcgcgcattggctccaaatctttgagattatagccatgatcccgttgagagatctcttcccctgacattcctttgtcgtttatgtgtggaggcttgcaggttttgctgactggatcaagagatagagaggggagaaatctggtttgtctcactgccgcgcacagagagaagatcgcgggtttgacgtgtccaaggcatgcgtcccaatgccatcttctgacatgagatagaggggttagttaggcacaattttgtcaatggggtcattaggatttgagctagggatcaaggtgaacacgctcggtctttggctcaaggactgaaattcagaaatctgaatttcagaaatccctattgaaccctca

SEQ ID NO: 169738 - DNA, 463 bp, Zea Mays
ccaaggtgtaagaattcaccatgacctaggatgacagttggttttacaaaagggcagggtctctttagcaaaagcacgagccgaagaggtacacagccaccccagccgctggaccatagactagcggctcagattaagtctttgaccaaatgaaatggtacgcgccacaagcctttggatccaagatccatagcccacaatcccaccccgccacaacccatctgatccgctcgtccgtcgatatgtggcccagatttaaaatgccaaaacgacatcatgcatctaatcgtggccatccacggatgaatcgatggcatggatcagacgtagcgaaagggtacacttaggtctaatcccagccgtccacgggcccatgcatccatggtccgcggccaccgcaaccaccccgactccggcgacggcagcgcaaggcccttccctgcggtggcgccattactgcgag

SEQ ID NO: 169739 - DNA, 519 bp, Zea Mays
ggttaacgagcagcatgggaggcacctgccaataatgaatggaatcaaagaggatataaaaacactgctgacgttggaattggggagccccctattccatgaagttctggtcaacctcttggttcgcctcaaagcgttgcaggtacagttcctgtgttatccaataactgcattggttgttctttatctgccaaatgtgcattgcttgtgaaacgtttctacttcagaatatacactagtgtaaggctttttggtggtagaagcatgtatttagttatgaacgtcacgcttgaaggaataggcaaagcgccatcttaggtgtcttcagaagtgagccatatggaaaccttcgactgcttaggaggttttgcttgcaaacttcacctgttgtaactttcaaggcttctataggaccttcaggcaaaagcaataatttatttgtgtggatgttgccctgtcctaatctgcatcgctttagcaaataacctaccatgagaatgatgagggggaccattcacc

SEQ ID NO: 169740 - DNA, 850 bp, Zea Mays
gcttcggataaaaccacgcctaccgcctcagggattggagcaaggtctcccctaggtgctgaaggagaagttggtggagaagggagtgaaacccacctccccgcacctccggagctgccattagacatagcccaagttctggccaaccaaacccgactcattgagatcctcaccagaagccttgagaaccaatgcccaaatggtggaaggcctcaggacagaatgggagattttctaaggctcaagcctcccacattcgctggatctagcaacccactcgacgcttatgactggctgcgcacaataaaaaggaagttagaggccatcgaatgccctgaaaaccagcatgttcatcttgctgctcatcaactttctaggatggccctatcctagtgggatacattcagcgctgccgtcagagatgctacctaggtagaatttgaagacgccttccgagaacatcatgtgcccctaggaatcgtccagctcaaagaagatgaatttcgagaattaactcaaggagggagatctgtcagtgaatacgtccacaaattcacagaattggctagctatgcgcctgacgatgtcagcacggaagccaagaagatggcccatttcttgaaagggctaagaccagaactcaagactatcctcgccagccaagacttcctcagcttctcgcgcctctcaaacaaggccatacaagtggaaagggctagggaagaagaaaagggtcacctcaagaggaagttccaagtcctccgagctcagcagtaggacaggcaccaaagaattcgatcctttgggtttccacccaagggaccaagcttcaacaagccagctgacccac

SEQ ID NO: 169741 - DNA, 378 bp, Zea Mays
tagagacgaaaaggactggtgctccccaaggggatgagctaggatgaatgtaccctttttgttgaagatctgcgatttggagcttcaattctactaactcgataggagccatgcggtatggtctctttgcgatgggtgccgttccagggatcagatctatgtagaattccacttctctttctggtggcattcctggcaactcttctgggaacacatccatgaattcttctaccactggtatgctttctgttactacattaaacatcattggatcattggtgggtggctgagcctgacaagagactgactttccttggtggtctgtgagaaggactgtcttgtttgcgcaacttatgacacctttgtgcttggtcaacc

SEQ ID NO: 169742 - DNA, 507 bp, Zea Mays
gcgatggtagaggcacagtgatgggaccagtagaagtggacgcatcgatagagagcccgcagacgatacgagagggggagacatctccttagacgagtaagttgacgtaggcaagagggtgcaggatgtggtgacgttgagatgagagcgatgacagcggcatgggaacaggggtggaggcatcgacgaggagccaacgaaggatccaaaggggaaggcaaacggtgaccgcaaaaataatagttggtggcggcttcgtgtgaatggaatatagaaggagacgggcgcaggaacatgaaggattcaacgtgattgcacgaacggttttaattttctaagtgacgtggacactcgatgagatctagaatttcattgggttttaatataagagataagatatatgaacctaaagcggtaagaaacaaagtgacagaatgagaatacgtatggaagacctatctaagcatcctcaaactagtacagaaactgcatgataaccaatgtgct

SEQ ID NO: 169743 - DNA, 308 bp, Zea Mays
gccatacgttggtagccacagaaaatcctgggaactgttgtgtggccactttccacattatggctgcatgctacaggagacatcgcatgccaaaaaaatgccacgcatgcggggtagccagtttcctattttttcccacgcccatcacgcaagatgaggacaccagcaacatgcaggtggacccctacgacagttctacattttggctgaataccgcatgcagatccttctctctaatgcacttgcgcacgaccgttttcttctcatctccttcttcccaattgcacagcagggcttcttcttcttcg

SEQ ID NO: 169744 - DNA, 499 bp, Zea Mays
gacgactagaatgagcatgcatcatgattgtcgcataattgtctcttgtgcactaacatgcttctctcacctttattccgataataaaaacttgggaataatgcgatgtattgctatgttagaaatgccttaccccgtgtcagattggtaagtcttgttagttcgtgctatgtgtttgtcttgtcttgctagctaggtgtattgtaattgttcaaccctctttgccaataaaaaattgttgcctgttttgcccataaaaaggcccctccaaacaaccttgagtttagcaagtgaaacccttgtaaaaaacatgcttgtgttggtgttttctaacccttgtgtgtttcccccttgaagttgcacctgcacggcttgtagacacccatagcttgacccctaaatcgactaaaacttccttgtgcacttgttgtgtcaaaaaaatcgtttggtgtctagttgcgcaaactctatcaagatcatgtttctttccataaatcct

SEQ ID NO: 169745 - DNA, 327 bp, Zea Mays
aagagacttaaccgagtatttgatgcaattggttttgtctaccctgactaccgttatccaacacggggtcagaagagaaaaaatactacttcagcaaaggaagttgcttcagccgctcccagtgagccagcgccggagaggaaaaagataaaggttcttactcaccggccacggtatattgaaccggccacagtgcctgaatatgtcggtgaaacctcttcggctatcgaaaccaaggaaccgagccccctaccgaatgttgaagagccaatcataatgctagaaatgaagaagatagaagaaccaaaggctacagaaacaagtcct

SEQ ID NO: 169746 - DNA, 412 bp, Zea Mays
cggagaagcacattaacgattcaactgctgtccgcgtgcatataagcagttcataaacagttcatataaacgattcaactgtcgtcagcatgaactaaacagattataaacagttcatataagcagacacattaacgatttaacagttcatataagcagacacattaacgatctaaactagacagaatcacagaagcacattaacgatttaacggagagaaagatctagcgtttccggtttccctgccgcagaggaacaaaaaaactagcctccagtttccctgccgcagagcaacaactagcccaccatggattcaactgtgcaagcctaccatggggtcggaaaggttaccttggccggttgagcagggaagccaccgccggaggagggaccgagggagcagggagcgcc

SEQ ID NO: 169747 - DNA, 627 bp, Zea Mays
ctagcatagtccatctttagggttcggtatgcctcacgagtgttggcttcctcaccttctgccatctcgagactgtcttgaagagccgccttttcctccttaaattccttgatttgctgctctaggctttccacccgggagtttaggtgggtgcagtgggagaaaatgtcgtcatagtggttgtcaagggtgtggagatattgggaccatgtagattatggtagggtcatcttcattatgatctcttcctgacaaaagcctggagtcttttcctccaagtatgggtattttttgttgctgggtggaaagtagcggaggggtgtctcagagacttccctgctatagttttggcatagttggtggagggctttttgggtagcattctgacaggtatctaggaagtggtgaccagtagcggtgatctgaaagggagggtgatttgggtagcttcaactttctcccaggtagactgccatagagcacttctcaatcccattctcgcggtattccttccagacatactccggcttcttatgtatccccatgcgaagcgcacaactccgaagaaggtgagggaatccttccacctccgagcaataggatgtcttaaggacaaaggtgccttcc

SEQ ID NO: 169748 - DNA, 311 bp, Zea Mays
ggctaaatgtgctaaaaatagtgtgaaacctgctaatccatacagcacatatagtggtggtcagggcataagagagtgccaaacctgccatgttagggggcactatagcacaacatgccctcagaacccaaacagaagcagagcggccgagaacaaggacaaaaagagaagtgcgaaaactgtaggttggactccaagaaaaagaggtcgccaacaataaaaaaaggactagatgggaatcaagatgaggcacagagtgagggggatgatacacaacaatctgggtgcactatggcggtgcaggagtcagt

SEQ ID NO: 169749 - DNA, 654 bp, Zea Mays
gctcaatttggcttacatgaaatgatgattcttgagttagcactgagaaaagccctaggtgacactggggtgtcacaggactcgaccgcaagcgtcgccgaagagcgctcgcatcgctacgcagcacacaacaacaggaagaagaaaggctgggagagagagtttgaatgagtaggctcacctatgcactacggagcttcgacgatggcagagcgttggttagggagtttggcgaagctccgggcgcgtcgatgatggtgaggcgtgactgtgtgcgtggttgctgcgtgcaagtgcccgactgagctatacgtgatctaggatggaagagcggatggctgagcgtgcacgactttctgcgggctgctagagcagtagttgccgagttggcaggagcaagggatgaggacggttttttagtcctacgcggggagacggttgggggagttgaagccgacacgcaagcttggaacgatagcgagaggaacaagtgaggtggaaatggttgcatgcacagcacgtgaggcactacgtgatgaggcgacgcattgtggtaggtgggggtatacgaggtagacccaagcaacacgatgttcgcgagaagagtggtttgacgatctcacaaaaagggcgagaccgagaacgagatcgacg

SEQ ID NO: 169750 - DNA, 584 bp, Zea Mays
gcggtgtcgctgcgcgccgtgggcagggggatgagggtcgattccccgggtggatggcggtatgcatgggcttgatgtcttctccgcaccctgttgcgcgtatcgggttcaaggttgtgcaccggggcgttgagttttagtcagcggccatggcgccgccgtgctgggtggaaccaccgtcggcgtcgggtcggtcaggaaggggatgaactggataccattgactcccgatccgacgactcggattagataaacgctgtggccgttgatccttggtcctttggccaccattggatatcgggtcgacttagtacagatctaatcccagccacagaaatcagatctggcgactgagattagaatcaacttacccctacgtttatttaaatctgagccatccaatctagatccaatggctttgtgtgcacgataccccttcggcaggctactttactaattagacccttaacttattagtaaacaacccgtcgtccagtatcactgttggctgagtctcgggttacttacaaggaagcccctgcactctctgtttattacgcgtgcagtccagaagtcaatgaaat

SEQ ID NO: 169751 - DNA, 392 bp, Zea Mays
gcgagtgcaggaggcgaggtagcgatagatgacggtgacgtcaagtgacaaccattgtcgtgttgcgacagcgcggtgggaccctaatgagttagcgagggagaggtgacgccacggtcccaccaacagcttgcccatctgttggtgcggactaggaggcaaaatatcaatgttgtgtgcaggatccagacgagtcgacaagctgatgagtaatgagaaggcaaggtgcgctacagcgggcgggttaggtcaccgacttactggtcagtcgatgaccaaagaagcgagtgagccacgagtgggcttgcgctagggaagagaatcaaatggctcaggtgaagagtggactgagtagtgaagcgtcgagacaaaaatagattaaaacttagttt

SEQ ID NO: 169752 - DNA, 448 bp, Zea Mays
cggggtgcctgcagtagggattacaagcacagcgggagagaggaagtctctaagtccgtagaactgattgaggcaagtgtcaataccgaaagatttggaggaaaactactgagtgttcgtctgcccctggaagaactaccactgccctatttatacacctaggagatgtacgatgtgaatcccggggtcgtcgtattcccaagaaagatgtattggcgtcctgtgagtgacatgatggtgtactacgttgttgacttgtgcctgctgatttcctgttgatggccgagacagaggccgaggggttggtcgtacgtccgagcccccaggggaggggtcgtccataccgtagttgttgtaacagggcttcggtatgggtaaaagtatgcttacggggtgcgtcaacgtctttgtgccgggtgacgttgtgattcctttgctgcgattatca

SEQ ID NO: 169753 - DNA, 636 bp, Zea Mays
tatagttgttctcctgttatggtgaacccacaactttggtatgtgaatattttggcttcagctttgtctgtgaggtgatagcgtcctcgtaggtaaataattattggggctctctactctgtggtcattaagaggcttatatttctttgcccgtcgcgttcccttacgactggggcttcgatggtttgaaagaaaatgtctgaaggcatggggtctccccttgcagcggccttcgcgagtgcgtctgcctcttcgtttttgtttctgtctatgtgctagatggtaaaacctttgaattgtttttctaggcttcgtatgatagataggtattggaggagcgccggttcatgagttgtacaatctttttctatctggttggcgacgactttagaatcagtcctcacgacgcatgtttagacgtcgagtgcccttagtttgcagagtccgagaatgactagtttgtactctgctatgttgttggtgcagttgtctatctcgagagaaaagcataggcggatggcatatttgtacttggtacctgaaggagctataattattgttcatgcaccagcctccgcatgataccaggtgtcatcacaatgaattgtctagtgtgtttccaaatttggatgacca

SEQ ID NO: 169754 - DNA, 680 bp, Zea Mays
ggacggtcaacttggcacctaggccgtaatccttcaatctaagacgctctacgtggtaagtggatgaaggcgaattccatgggttcagtactttaccgaggcaaggtcatgcgcggttggttcgcggtgaagcacggcgtagcagaaaatcccaactccggcgtgagatccccatgggtccagcgagcttcacctcagttactccctcctacggcttccaagcgatcaatccgagtctagcatgactacaatggggacccaacccacccccgggtggttgcccgcagcggcggcgggttatcaccgtgcggaacacggaggcacgacggtgattgtggcgtatcggcagcggcaaagggcacgagagggcggtctctgaggtgcggccaggtctttatcccctgcactagtggaccccggatccggtttccacgcggaggttgcaacggcatccgagaagcgagcagagctcatggcgagttcgtgcgagcgtgggggagaggaaagcgctgacacgatgggcccacccgtcagtcaaatcatcaacgcgcttcgaaggaaggggtagcggcccacgcttcaaagactccagtcgtggtgcggtgaatgagcgagaggacccgcctggcggtgaagcggagaggggcgcgcggtgtcagcaccagtatggtgggtcgggc

SEQ ID NO: 169755 - DNA, 758 bp, Zea Mays
tcatagcaacactcttcacatgaactttgaacctcacaatttctttagagtttaaagagttaatatccacttcttccactgccccaatagtggaacccaattcacaaatggcctggtaattttgaagctcttccggcacattctcagccacaatccacactgaatgcagttttgacttaggcttagcccgagaactccaagaagaaacagaaattttggcactagacaacttcattttcaattcagggaaattaatcatctcatccaacctctcttgagaggggaattgcatgaggaagccagaatggcacttagtaactttccaagtgcggcccgaaggaaagtgaaaaccgaaatccttctcaagatcctcggccgtgatcaaaccctcaacgattttaaccaagccaataaaactgcgtttaggtttgttggataatggcttggcgaaatgagaagagtaaaaccctagcccatctgccgccataccaacactaggcatactgggtttattctgtttgggaagaacacactaagcggtgttgtgggtttccttgcgacagatctcgcaccacaaagatttaaaacactccctagcatgatggccatccataccgcatttttggcaaaaaaaaaaccctacgcaccagttcattctcagatttcagaatggtaggaggaggggttttgaggatacctggctaaccgccatcgccgggagtggagacagggatgtcatctttgccatcatgttttct

SEQ ID NO: 169756 - DNA, 472 bp, Zea Mays
gtgaaagaaacatagaacaatcattttgtttatgtgcacaagtgctgaaaatttttatcaagttgttcaaccagcttgctattatcatttggtgcaaaattttggttggatctgattgcaacacttgcattccattcatactccttgtctgcatcaaatctgaaaatttcttgcgcgtgtgtttgatctatttgcatccctcgtatcttgtggtcagcactaggcagggaacttctagatggatggttatttaactttacaacaacttggattcagattgcattccttgtttactattcccccaccaagctccacatataagccatcgtaatcggtactctggtcttgtattcgcttaaccatcactttcttgttaccaccacacatttttcttgcaacccgcagggacctcataagagctttggttggtaagagtggtgaggttgtgagattctatatagcttcatattcc

SEQ ID NO: 169757 - DNA, 585 bp, Zea Mays
agatggttatgatgtgcagaaaccaactaaaaatcagatgatattcttccccattcggcaggttagtcagtttatggtctttacgtcaatctaaaaagttatacaaacatttttcgatatcgttatgatgccattattaaatcgatgtatttttttgcttaaatgatacataaagaaggatgtacaagtccggccactcaaactgtaccggatatgtctactccagcatcccagcatgagacgcagttgacagacacacaggtacatgaattactgttaaggcaacaatatattcgtgtactattacaaagttgccctgatgaagctgacattgatccactggttcatacaaatataacaaaacagaccaaaacacctacaaccccagtggtaatgtttttttaattacttgtattttcattgaaggtttgcattcatcgttttctttaaatagcatataaccattacattttttcagggtcaacatggtaatgttggcaagaacatgccgaccaacacaaacgtcactcctcaagcaacaccacatacggaatcttgctcgccgatatttgatgcgacgccgca

SEQ ID NO: 169758 - DNA, 516 bp, Zea Mays
tttgcacatctttatcaccttatttcttgtaactcgagtcaaagtgtccagaatcttgacagggtactcagcataggtcagatcatcttgcacactgaggtcctccattggtagttgctcctcaggtaccctgaggcacttctttagctgagacacatgaaatacatcatgtacatctgacagatgatcgggtaactccagttgatatgcaacttctcccactcgctttaagatcaagaaaggtccaatgaagcgaggggacaactttcctttaactttaaatctcctcataccacgaagtggtgacaccttcaaatagacatgatcaccctccttaaactccagtaatcttctcctattatcagcatagctcttttgcctggattgtgcaattctcaaattttctcttatcattcgaacttgttcttctgcctcttgtataagttcaggcccaaagaactgtctttctccagtttgatcccaatacagtggggtcctgcacttcctgccatataa

SEQ ID NO: 169759 - DNA, 394 bp, Zea Mays
agcatctgcagacatgtcacacagttaggcctcagacaaggagacctcatctctccttacctctttattattgtagctgatgttctcctgtaacacctgaagagaacctgggcactaaacaaggcgaaggcaagatctgaagctgctgctggcgaaggcgtggcgaaggcgttgtcgggcagagcggtgtgagtgtcaagttgttttttcgtgtgggccgtgggccgtatggtgtgtgtgaggtcaggctagcccatgaaggggtggagttataagctgtaaacgaacaagagagttataaaagaacagaatttgaaattaccaccaaactcgcgggttgtcctcaacggcgacggcgattctagctcccatcccggtgatgctcaccgacggc

SEQ ID NO: 169760 - DNA, 1242 bp, Zea Mays
gtccagctccaacccctcgcttgctccagaggagatggaggtggtgtttgggcggcgactccggtcgggtgccgagcaagaagcggcgccagtccccctcccccgcatgctgtcccgtgcccaccaggtgctcagtgaaactgaggcagcaatttgcggtagtgggaggcgcttgaggctgagcaccagcgcctcagtgactggagcacccaactagaggagcgcaccaagtcggcgtcccgacagttcgcctccgagcggtcccaactcgagcaggaccgcaaggagtacaagaaggacctccagaaggtgtatgccagggagctagaggcgcataggtgggaaaagaaagtggccaggagggaggaggccgtgacccagagggaggccctcacgacagaattctaggccaagctgaatgcccttggaccagaccctggaagcccagcgggcccagcaggtcaaagctgtggaaaggctgcagagatggcgatgattgagtatgtcttgacatgcttccggagccatgaccccgccatatccttggcgccggtgatcgcgggtccaatggctgccacagaagatgctgcttgggagagcgtacaagacatcgtggagctggtggtcgagcgcttccagcgtgatcctactgacgacgagtagccgaatctgcagagacaaggcgagggttccgctgggaggtggctgtaataatttttggtcttgtaacatatcctaagaaccgtttaatcaagtaaaactagaacttatcttgtatgttatttgtccttgttgtgtgtagcgtcatcaacttccctctagtacttggcccccctgggaggtaggctcgacgtgtcgaggctggataccagtatataccaaagagaaaattggttgcccggtccctaggaggtagtctctatggtttgagactacctacccctggactaggacctgcacacagcttcggctttgaagtgttaggagcacacccataggacccatcgtctggtatctgtcatcctttgattcatgctacaggacctgcaggatttagcctaggaagccaagccatatgtccggacccataggatcacagctccaaatactagggtactcgtggcagagtggtggagcatgcaggcttagggtacagaaccaggctaagcagctacatagctccagaccactccaggagacgagcacccattctctagaactggaccccaggttgccggaccc

SEQ ID NO: 169761 - DNA, 1460 bp, Zea Mays
gaattttctatgaattattgaaggtttagcacttatttttgtattaaaaatccatttataaatcattttctctggttttattatgttctggactggtcctcaaaatctgagaacagcaggggcccagacgcaaaagatcctaagactcagaacactatgcagtaggacggcgggtttatttcaatgaaactgaggggctcttaagcaaaatgtccaggccgaaggggtatgggtgattctgagccgcccgatcaagtgtcgtccacacatctaggatcctacggtctggatcgcatcgctatttcccccaatcctggtcgttcattctaaaatccacggcaatagaatcttcttccacccagcccaccagacggcggcgctaggtacactgcggtggcgctgccacggcaagcacccgcccaggtgagcccgtgcacaaaaatgagcgcaaagagttgcagagcgatgcagacttatagagagaagggatccagggcttcctaccgggtcttgatgtagcggtggttgtggccacggagaagcgcgtcccagccgcagaggaagaagtccggcgaacgattcccagcaaccccggcactctccgcacacgtacgtgccacgagaagtatctatgaacaccggcaaagctcccacgcaaccgcttggttcgaatttacagtgcatgagccgatcgacgaccctggctccttgacttgcacagcggcaccctcttccactctggattcttggtcggtgcagtggtgtttggtggaggagaggccagggaagaaagcggaggcggaaaaaatactcccccacgcgaaggcacaacggctctagccgatgcgggcggaacggaaggccctgaccaaggaccatgcagaggagcagcgcggagttcgcgagaggttgaggaaggagatccccacgagaggggcccacacgaccgtcagcgaaacagagagcgcgcgtggtgatgaactggacaagcgggcccactggtcagagttctagggcacacgagcggcgcggtggagcggatggtgggctggctgcgtggagattggagatgggccgatgggatgaagttagcccaggcgtgtcccattttttttttattgtttccattttctattttaactttctactttccaattcaatttgagtctaggttttggaatttcagatttcccaaatagctaataccatcctaatgtgagtataaatttctattgttacaactttattgtttattattctccctactatttaaaatttaaatttgaatttaaacagtgttgtgaacttacactcaaattaaatattgaaaataaacttagtagtatgaaaggaggtttaatatgattatttcctttagtattattgttatttttttatagtctcctttcttcttttctcaaaatcctaatttccaaattaggtttaatgcccaattccac

SEQ ID NO: 169762 - DNA, 364 bp, Zea Mays
aggtgatgtggtcagatgttggctcaaagtgtgaaaggcatcttcacatttctgaccccattcaaatttttctcccttcttcaacaattctgtcatgggcttcacaattcgggagaagtctggaatgaatcgtcgataatacccggccaatcctagaaaactccgaatatggcgaacagttgtgggtggcttccagttcattacttcttgcaccttatctggatccactgctattcccttttgagagatagtgtgccctaagaatttaatctcctttagccagaaatcacactttgacaatttggcataaaggcggtgttctctcagacgttggagcactacttgcaaatgactagcatgctct

SEQ ID NO: 169763 - DNA, 715 bp, Zea Mays
ccttattccaggctggagcacaactgcatcaagcacttcacaaagttccaggaattcagcaatgactctgactgagattgcccctttcgcatcggagatccaatggaaattagggagagcatctttgaccaaccgtttgttggcaagacgtaagggcaccaaatcaaacattgcaggagctatgtccttaatacatctcccctccaaccatctgtccttccagaaaagggtattggctccatcaccgagcttagtaataatggctgcagcaatcagatttttaaccaccttacaaacatgaatggggaagtccgcccaaggcctactggggtctgttttctgcagccatggccagcgagctctcaaagcccaacagaggttctttaactcactaatcccaagaccacccaactccttgggactggtaaccttaggccaagccaagaggcagtgaccaccacaaaactctttcctacccctccagaggaagcccttcctcagcttatcgattgctttgatggcccaaacaggaaggtcaagtgccagagctgcataaatcatcttagccgtcatgacaaactgcacatgaatagctctaccagccctggtcataagttcagctttccatcctggcaaaaggctggccactctatcaacaatggcctgaacctggtcccttgtgagtttcttgggagacaaaggcaaaccgaggtac

SEQ ID NO: 169764 - DNA, 647 bp, Zea Mays
cctgtggctcggatttcatttgagaaggggtatcgcgaccttctaatcctgaccgcacacccagaatcaatggttacgatttgttcaagcggagggttattcggtgatctaatctacaccgtccgaattgaatcagacggcacgggagctgtcttcttcccccacgacaccctctctcctccactccaatcggtctacaccagggcggcgccattagccagaaattgagcccctgattcctacacccgacctccaaaatgaaagcagtaatacatggatgataacggtacaacacggttgcaggattactcacttcgattcaaaccactccgagcctcgcacaacgcgcgcggcggatctgtggcacccacagtgcgatggcgagcgattcccgagagcttgaccgcccttgcgccaacgccaataaccgtccagcccctcatggttcgcgcgccctccaactcgctgcccaagcgaacagagacatgggtgccccaccgacgttgcaggggatggcttggccggccatggcgcatggtagttccgtggtcgccaaagccctccggtgcaatgacgcagcacctgcgagtcataccagacttccagagcatacgccgagagcgagacgacgacaaggtcgagttccg

SEQ ID NO: 169765 - DNA, 421 bp, Zea Mays
cccccgcacagagctcgtctctcctccggccgccagcactgttcggccgaattcgtcaccgccgctcgctacgtctataaattgaccccgtcgcgagctccgtagggtagtaagctgtccagccaccacgaatcagcctcggtcattctctagaatccacgaatttggaattctccccaaactggtttccgccaccgcaaaactcagctcgccgcggccagctcaactcaggtcagtccaagtccctctgttgcttgttctagcgtccctagtccctcctaaagctcttagacccgcccaattgaactagaccgccacccatcgccgagaacgcttgtggtcatccgcctcacccgcggtcaccgtggtcagggcgtctctgtgtgtcgttcctgaaattaacctaggggaaacggtctct

SEQ ID NO: 169766 - DNA, 739 bp, Zea Mays
agcgtgttagcccgggcggttcggtcttcgcgtaggatggttcggcgtgttagtccggacaatcgacgatgagattagttcgggtcagaatcctgatttcttaagggattatctgaatatctcacgagattttgtttggatttcgtctgataatgccgtaacgggttcagacttccctcctataaatataaaggtgttttatcttatttatcttatgcattagctttaggagtagttttaaccctagttataatttttcaatcttaatctttacctcacttcgccgttacgtcgttttgagatactttaggtgacctaccaacctcaagatccgtcttcctcaatgggtcctcccaggaggtggggtctatttttttccttgaagctccctacaccgtttcggatggtccttctatcaaccacagagagatcataaagtcttgcacactgcaaacaaaccttagggatcgttagtatttagaccgaaatggtgccaaaacatgtgaacatgatagcgcaaggtgtggttgcacggtagcatcacgatttcccttgagccagagcttaagccaagaacggggtacagtgtctcagaaaatggccgacagctaccacgatactgcaactcatcccccacagcatcttcacagaagcacaagccaacaactgccatcagggcatcacttaacaaagacgatgaccagagcagcaagccagcaagcattaacaaacgagaaag

SEQ ID NO: 169767 - DNA, 520 bp, Zea Mays
ggttaattcaggaatatcacagggtgtcttttacaaaatgacacggccgaaggggtacgaagcttttctagcctctggattagaaatcaagggctaggattagatcggccaaacattgaaccagtacgccacgatatccctcggatctaaatctaacggtgataactcattatccggagatccaatcttggccattggccaaagatctagtggcctggattaagcgaccgaagaggtatgctccccgtctaatcagagccacacatctggcaactgacgacaaaagccccatcttccccaaccttcacagcaccaccgagcacgaaccaaccaccatctgaaaggctcagcgcgacaagcggaccacgaccaaccacagaggaggccacttaccccggattcagcgccgatgaagctcgacgacgttgcatggcggcattgaaacgacggagcaccaccggcgtacaaatactgacgcgcccggctcccattttggttggcactgacccaacgatttccc

SEQ ID NO: 169768 - DNA, 613 bp, Zea Mays
tccgtccgccattaggatcgttgatgaaggtcggtgcagcgaaggttgcggcgatgtcttcccgtcactggctgcgcaccctctcagatcggtgttagggtttgtcggtggggagtacgactctagcgaactgtgttatccgagccgctggcccccatccttttatttagcgcagtgtgacaggggcccaccaaccatatagggttgggtgcccccgatcagggcgcgatcaaaggccaaagatgtccgttgggcccatcttggtagagatcaatccaacattctcccccttgatctcatcattcactttttaaactttaaactttaacttcaacacttttcactttactcgttccatcacagataagtgcatagagcatgtttcatcgtcacaatcaaccgccgatagatttgacagctacaatacacatctccgatctgaaacagttactttaactttaggccctatttatagtctaggaatcataggctttcccttaaacccatgccggctacatgtcctttgaacactttgggtggtaagccttttgtaagcggatccgcgagcatcttttcagttcttatatgctcaagacttattatttgatctcgg

SEQ ID NO: 169769 - DNA, 455 bp, Zea Mays
tgggtaaacacgttccgaacaaccgacagcatggatgacaaaattgaagcttggggaagcttcacgggttcaccaggggttatgtacatgcttgaatttggactaggcaagagtagaaaagcgggttaacagagagggcgtcgcgacgacgttctactggacgatttggtgttccagagtgtaggcttcggtaaagtttaattggccggctctgagagcaatagaaggttgaagacaagctagaacaggaagcaatttggtaggtactaacccgatgagtgctggccacggaggagtccttcacggcagcgcgaagaacagggcggaatggatttgtggactgtgtgagttctctggtgaaattgagtcgattgctcaagtgcttgtgtgcgtgatgtggtgaagaagcaggatccgggctcaatttataggccgatggccagagttggatgagg

SEQ ID NO: 169770 - DNA, 663 bp, Zea Mays
caataagtatacttcaagtaaactaggccaccttcgcttgagctagcatcggtttccttcggcatttcccattcgttaacaaggggccctactttgaaggctatgtgctcttgaaccaagtctctggtgccaatgtagctgcacacagtgttgaaggccatcaagcaggcttgagctctttcaatatttacaacggtaggcctcttaatgccgaagcatgactgaatgggccgctgaattatatccttgatatcctccctctcaactaagttttttaacatagaatcattactcgtccaagaccctggccacttcttccgaaaggtcggaacagggtgtctcgcatcagagcgatatacgaaggagtagcagccaaaattgttctgatattgttccttcccagctgccttcgtcaggtaagagagttcgtagatattgtagaagcagtcggcgtctggctccaggccttggctcctcattgcctagatgaaaactccaactttaatcaaaccttcaggagaaatctaatgaaggaatatttcaaacctcttcaacacttcgaccagcattctgtgcaggggaaatcatagcctagctttcataaaacttcagaaaatcactacttcgttttcctcaggaagaggaacagtgctctcccctccg

SEQ ID NO: 169771 - DNA, 1528 bp, Zea Mays
ttgcgggtctttcggactgctgagtcaagaatctttattggcttttctcggtactagagatctttttgaatctgaattgattctgccttgatgtggttctctggtacttgcaggcacttacggagctaggacacatgaaaaacattatgaatatctgacatggattctggtagctcaaggcggtatgatgcgggtcccactctgctaatgacgggatagggaccgacgaaatgcggtgctaactttcctttcatttggaaccttttgacaccacgcatcagggagaccttgaggtatacaaaatctccttcctcaaatctgagttccctccgtctgttgtctgcataacttttctggcgactctgagcttcaagtaacctcttgcggatcagggcaaccttctcttcggcctctttaacaaagtcaggtccttctagtgtcctttcccctacattggaccacattaggggggtctgacactttcgtccatacaatgcttcgaacagtgacatcttgatactggcctgatgactgttgttatatgagaattcggcatacggcaaactggactcccaattcatgtcgaacgtcaatacacaggctcttagtaaatcttcgaggaccttgttgaccctctccgtttgaccatctgactgagggtgatacgcgatgctgaaatctaacttggtgcccatagcttgctgaaggctcttccaaaattttgaggtgaactgcgtccctctatctgacactatctttcgaggaataccatggagcctgactatctctttaagatatatccgggcaagggtggctcctccaaaagtggtttttactggaatgaagtgggccaccttggtgagacggtctattattacccagatagagtcattccctttttgcgtccggggcaatccggttacaaaatccatgcctatttcctcccatttccattcaggcactgggaggggttgcagtaggcctgcaggtttctggtgttcggccttcgttcgctggcaggtgtcacaccgggccacatactgtgctatctccttttcatccctctccaccagtatctggctttgaggtctaggtacatcttggtggttcctgggtggatggagtaggctgagttgtgggcttcattgagcaggacttcccgtgcctctcctattggtacacacagacggttcttgaaccaaagaactccttgttcatctgccctaaggtccagaagttgctccttgcgagctctttccataagtcttgcagtctccacgtccaggcgttgagccttgcatatgaggtcttctagcattggcttgacttccaggttaccgttgtctcctagacatgcatttagctgagctgattccttcttccaatcttctaaaaagttggtcccctttatcccgaaaggttttcggctgagggcgtctgctaccacgttggccttcccggggtggtaatggatctcgaggtcataatctttgatcagttcaagccatcttctttgacggaggttgag

SEQ ID NO: 169772 - DNA, 570 bp, Zea Mays
atggtattgttcctttccggttgcctttgtctggtaggataacttgtgaatattgcagaaacacctagcatctggctctatcccttgactcctcatagcccatataaaaacccccactttgataaatgcttcgggggtaagttgatgaaggtatatttcgaatgttttcagaacttcaaccaacatcttgtgtagtgggaagcaaagcccagctttcatgaagcttttaaagaccaccacctcatcagctttgggaaggggaacgatgctttcccccgtccctcactatagaaatatcatgaaaatatttgctcttcatcgcttcgatctaccattgcttgatagttgacttcccaaaaacaacatggctcagcctccacgaccgatcttcatcatcttcatttccactctccactatcactatcgctggaatccccagacaacccagctagcatctcattggtaatcttttttgcattggtattttccatgttatggcaaatgccgaagcttagaaattagtcaagctcgcaaagagaataaggctaaaatagcaatcacaacgcaaac

SEQ ID NO: 169773 - DNA, 691 bp, Zea Mays
tgaagatggatccaaaaggccgaaaccctaattgcgatcggtggggtctgaaagaggtgcctcaaggatctcaatcttggaacaagaaccggaatatcagttggagattgaagccaaatctcggtaaatccgacatcaaggaagacattgtgacttcttcttctggcgatggtggccaatcaggtattctcaaaaccccccctgtgttgaaaaaaagagattgaaaatgttcgccatcctttctatcaaaaatgcggcgtggagagtcatcatgctagagattgtttcaagtctttgtggtgcgatatttgtcgcaaagaaactcacgtgactactcgttgtgttcttcccaaacaaaacaagccctgcatgcctattgttggtatggcggctgacaggttagggttttattcttcccattttgcgaaacccttatccagaaaactgaaaaggagtttcatcggtttggtgaaagttatagaggggctgatttcagcaaaagatctggagaaggattttggatttcatttcccgtggggcaaaacttgggaagcaaccaagtgtcacgcagggttcttgatgcagtttccttctcaggagaaactggatgagatgattaattttcctgaattaaaaatgaaaatgttcagggcaaaaatttcagtctcttattggagttcacaggctaaac

SEQ ID NO: 169774 - DNA, 540 bp, Zea Mays
gcggtaggggggtgattattccggccgccacacggtcactgatctttccggccatgcttggtcaccagcgccgctcttctctgttcgtccacgccatcaccgatttgactgctttacggtcgcggttgaacgtggcaagctccaagagaagtaccgcgctcggtgtcgtcgttgatcgccagtagggtccggtgatggttatcaccgtgaccgccgtgatgctcacggagcctataaatccaccctgctctcacttcgttcgtctcaaatcaaccaagcccagctcttcattcctcagttgcgaatccaacaagccactagccatcacgttctatcccccatcctatgtgatcaacggaatttccctgaaccggtttcttccgccgccgtgaagaactcttccgaggccagcactcctcgggttagtgcatacccaattgattcgagttcttgcttgttttagccccctgttgctctcagagccggccaattggagtttacctgagtctcatcaccggaacacccctctgcgccgtagaa

SEQ ID NO: 169775 - DNA, 350 bp, Zea Mays
gttttggcggtatatgtgaatgattgctcgtgtcctgaattgtggtccttttccttcctataataggttaaggtgagagaagggggtcgctacaagagtctaagggtcgggcgaagcggatgaaggtcggacattgtcatgtagttttttatcctctggagttctcaccagtcgagggacgtcatagatgaagcctcctccctctgtcaggatactgtagtcacacctaggccatcccagagcatgtcgttgcactttgtcatgtccagtagcagtttattcggtgtccttgtttgacttcctatctacggagtggttaagctagtgtccgcctccatgctgtgatggat

SEQ ID NO: 169776 - DNA, 474 bp, Zea Mays
tagtgccacaagtcaggagacgatctggtggcaccaagagcttctttcagatgcgcacttgatatggggtagagatcgtttctacaccggccttcaaacagtgtcctcttggtagcttgatccttaacaagaaaatgatttggataaaattcaaggtatgcatgatgatcagaagtaagacggtgcatagatataagatttttatcagtagtaggaacatgaagaacatgattaagtttcaaattggaattgggggtactaataatagcatgaccaatgtgactgatattcatacatgcaccgtttgctgcacggatttgatcttttcccttgtacttctctttcatggagagcttctcgagctcttcaatgatgtggtcggtggagccggtatctgtgtaccagtttgtgtccactccatatgaatgtgtcgcagtcgatgcactcctctgattgggataagactcctcatcg

SEQ ID NO: 169777 - DNA, 2082 bp, Zea Mays
tccacatacctcgtgtgcacctgagtctgtcaggtgttcgtcggagaacctcacgtcgcggtgactctgccgcggccacggggaaacgtcacagtggtatcaaagccgacgatcttcggagaccgtcactacggcgccgtcaacaaaaccgtccgtgcagacccgtttgctgctggaagctatggccggagcggagctgaagggagaggagcgttgggataagatgatgcgggtgttggagagggtggatcggcgattggaggcgctggaatcagggcaacagtctgcaaacgaggctgcgcgaaaggcggaggaggaacgtgtcatcctggcacgacaggtggacgagacagggaagacggtttcgcgtcttcgactggaatggatggcgcaggaaatggaaggtatggagtctgatcctgagagggagaatcgtggtcgacgagagtttggtagaagaaatttggaggagagggagcagtatcagtttggagggaatagaaatttggaagagagggagcagaaccagtttaggggaaatagaaatttggaggagagggagcagtatcagtttgaagggaatagaaatttggaagagagggagcagaaccagtttagggggaatagatatttggaggagagggagcagtatcagtttggagggaacaggaattttcgttccattgatttgccaaagatgtccttcccaaagtttcaaggaattgaaccagggatatggatcactaagtgtcttgagtacttcatgatctaccaaattccagagttcatgtgggcatcttctgcttctttacacatggagggaagggctggtaggtggatgcaggtgtacaaaatgagacaggggttgggtgactggtctcattttgttcgagctgtacaggacaagtttggttctgaagagtattctcagtgtatgagggaattggttcatatgacacagagagctagcttggatgaatatattcaggagtttgaggacagtcgatatgcaacaatggtgcataatccaaggctggatgagactttctttgtgtcccagtttattaaagggttgaggggagaaactaagggatatgtgatgtctcagttgcctagaacagttgacagggccatagctctagcccagatccatcaagaggttttggagaagggaggatacaaatttcagaaaggtctacagtcaaacaaaggtctgggaggtactgtcaagttagatgtcaaaatgggtggaggatcgtcagatatgactaaggaaagacaattgagggacttcagaagattgaatggtttgtgctttggatgtggggagaaatatgaacctgggcatcaagccaagtgtcctaaaagggtgggtcctcagctgcatagtttgactgtggaagatatgggactgctgttatcagatgaagttctgcacaatttggatcaggaggaccaaacgttggaggaatcctacaagctctcactaaatgctatcagtgggacggatcaggaggggtgtatgagagtgagagcactgatcaagaatcaggtgatggtgattttggtggactctggtagttccacaacttttgtcagccagaagatggtgaacaagttgaatttgcaaactgaaagctgtcaagctattagggtgaaagtggctaatggggagatgatgcagagttcaaagaaggtgccatgtttgtcctggtgggctggtggacatacttatagtacagatatgagagtgcttgagttggaagcatatgatgctattctgggttatgattggttaaaggtccacagtcccatggagtgtgattggaacaataaggtattgacctttgtggacagaggggtgcaggtgcagttaaaaggggatgggaatgaacttagggaggtttcccaggtgacagcgctgcagttgacaaaatggatgaagggtaatgaggtatgggctctagtgatgctagagcaagttccagtggagaaagatgacaaggtgcaagaatctttggagttgttgctaaaagagttcgaagatgtgtttgcagtaccctctggattgccttcttctag

SEQ ID NO: 169778 - DNA, 775 bp, Zea Mays
cggggctcccgcgcgggaaggtcaggtcactgttgtgatcactgctcgaattcgtcgggtcgtctgggcttgcgtcgatctgatcttgtgtcgttccactttattgaacgttcctccctaggcccatgaagggatgacattgtggattattgggcccatgggcccctcgcgaggtatcttgtccttctggtggacccaggggatatccgtcccccacacatttacatccagaatataattttatcataaatcttatggtattctactctctaccagatgaatcatcatctccgacatccaccgttcgttttttcgacattgatgtctcattccagtgtggtgctgcagctatgattttgtttcttgaaccaggaggccgtcctcgcttacgtccagataggttagccaatcgaaccctattatcctccacagttaaacacatacggctgttgtgaccatcagctatgccacatttctggcacttcctgctcatcttcttagctcctttcgcacccaatttaagaacttgttgctcactacttttgattgttcttcccttaggcttggccttatctggtcttgctaagtttacaccttccatatgaaactccagtttctacaaatcaaagatattaagtcagtttttatattcacgtatttcatcaaatattgtagcaatgttattacctttctagcttccacatccgtagcactactatcaaccagccgaatatcagtgttatgttccaatgttaatatcgacatattacattga

SEQ ID NO: 169779 - DNA, 463 bp, Zea Mays
gtgagggagagagtggagaacggtcagatccagattgagcggtcgggattagatctggcctaattgaaatcgagtcgtccgattggagttgggaggactggatgcacaccagggggtttttgtctctgtcgggaagccaggggcggtgctccccgcgggcacggcggcgccatcgccggaggcgaggtagactgggtctcctagggcacgatgggtcggtccgggtagctggaaaggttggggagggtcgtgcgaactctatggcggggtcggttttgtgtgaacgggggtgaggcgaccaaacagcggaggggagttcttagcgggccggaggatactccggtgagcaatcacggccaggtaaatgcgagacaagggaaaataagggtggggctagaacggttacgttgaggggagtctcaggaacgcacgaacggaagctggggcacgacgaggacgcggg

SEQ ID NO: 169780 - DNA, 606 bp, Zea Mays
attgcttcgattgctctaatcttttccgggttcgcttcaatgcctcggtacgaaaccaggaatccaagcaacttcccggcggaaatgccaaaaacgcatttgtccgggttcagcttcgtgtgggttgcccgtagcttgtcgaagaccagggctaagtcttccactagggtcgaccctctcttagtattgaccatgatgtcatcgacatagacctctactttgtccctaatcaggtccccgaaagtcttactcatcgcccgcacaaaggttggcagggcatttttcagaccgtacggcattacaacatagtagtacagcccatccactgtcacgaaagcagtatgctttctatcttccctagacatctggatttggtggaaactagagtaagcgtccaggaatgataacagatcgcacccggaggtagaatctacgatttggtctatacgtggcagtggatacgggtccttgggacaggccttattcaggctggtgtagtcgatacacatctgaagttttccattcgctttggggacgatgactgggttggccagccatatcggatgatgaacttcttcgatgaagccagcgtccagcagtttccgg

SEQ ID NO: 169781 - DNA, 402 bp, Zea Mays
cggaggtgatcagaccaggggaaacagatggctatccgtggtccgagccgttcgatctgaatcggacggaggggatcagaccaggggaaacagacggctgtgggcggcgccgctcctctccacggcggtgaggtcgccagagttgaggctggcgcgagctaggtggctctggggtcgtcggagttgggcagagagggagagggcaccacggcaaactcaatggcggggaagaggccatgaatccacgggcagagatgggagaacggcggtgagaaggtctcgggcgggctggagtaactccggtgagccattccggccacggggaggggacttaaggcacgctaaggcctgggctagcttcagcagaggcaggggtgacacagggacctactccggggaact

SEQ ID NO: 169782 - DNA, 637 bp, Zea Mays
gaggattttgccgccggacgaagctcttcatggccagggcctcccactccgcggttgtaggtaattcctctcttcctagctcgaattaacagtagcaccatgtattagctattagagccgggtttgggtcacggggggaggtcaggactcgtcatcggagtaggcttttacacatcaccgcccaacgccgtcgtcagtgcaattttgggcttagtctgtggcattgatcctgtaaactcgtgcacccaatcacgctcttcgtatttgttccatgcacgtcgaagttcgggcttcggggagagattttcgtgaccaccggtcatggcgccgccgtcggagctcggtcgccgccgtgcacggtctgagggtaggaggaggttcgtgcaccttcagattcgctgtggacggccggattaaatctgggcgtatccccttaggtgatttgatctgggccgtagggcttgatcggacggttcgtggtagatcgagcttcataaaatctgaactgttgatcctagatcccctggtcacgatagcataccggtttgtagcggatgagattagatctacgccgttgggtttggatctaacaaccaggaatacgagataccctttcggttggccccttttacttaag

SEQ ID NO: 169783 - DNA, 465 bp, Zea Mays
ctctgagtggctgctgtcttttgctgctttttctgtttacatgcttgatagttcacccgtgtgcctaatgctgccggtgtttttagaagtaatcgctgagtgatgtttgatactgctggcgttttagaggtaaccgccgagtaatgtctgacactgccggcgttttagaggtaaccgccgagtgatgcttgatactgttggcgttttagagagccgggtaatgcctgaaactttgctttcccgagtagtgacctgacacttttagaaatagtgctcgaccaaggaaaccccatttatacccgcaccgacgtgcttttttgatttctgagccctaacttcactttttgccttcgaaccactcctccgcttccttgagatttcgagcatgttcattccgccagagaaattgcgatggcgccaaaacggaagaggaagagtaccgctgctgcgctcatcccgctcatc

SEQ ID NO: 169784 - DNA, 513 bp, Zea Mays
acaagtttccacatagaaatcagagatcaaagccctacaaagtgctctatcaggtgctctgaatggggcttcccattgtacagtagactaaaaaagatcacaggttcgctgcacctcgccgccggtgatcccgcgcccagattcgcaccggtcgccttgattcgtgcttgtcgcgtagtggataaccgagggggtaaaagatcttggcgcccggataggctcggacccggtcactggtgagttcaccgtaaccactgggtctgcggctggccgagatgatcctcgccggcgttggccgcttaccgaccatacgccacgtgcctagtagctttaacacgtcatagtgaaccatagtagcaagttcgtccatcgccggaggctttgccacagtgaaagccacgatcacccgcgccagtacatttcccctctctccggccgccagcgcaacttctcaaaattagacgccaccaccgtaggactctataaattgatgccccagtgagttccgctagg

SEQ ID NO: 169785 - DNA, 403 bp, Zea Mays
cgggtgcaaattcagcacgcaggtgtgcgactcgcacgcgcgcaacgtggtggcgtccagggcgtccaggatggggatgagcccgtagccaccgctcgtgcagtgcggccgtcctctccgtccggcgctctcggtccagacatgggatttctcacgcgatcgcgattcacagtgacacacgaccagagagatcagcacgggaagagaatggctgagaagttccagatcttttaccgctccaagtctcagcaccagcctctcaggtctcgcacgtttttacatctctcgttcgtggacgtgagaggtgtgatggccatttgttcgtttgttgtgcgtgtcgtgtcgccccaaatgggcgtggatccgtgtgagttgtcttgtctgtgccggagggagggcggtc

SEQ ID NO: 169786 - DNA, 536 bp, Zea Mays
tggcggtctatggacgattgcgtgcacaatgggtgctcggttatatccgaggggtcatcgagctcgtacatcggcgggggaacagcgaattgctcgtcgacgtccttctcccgcggggatttacgctctcccatggcaagcctttctcaccgtcgatcgtcggtggtaagcatctctgtcgaattggactgtggcccctctacgcgtaggactgttcaggtaggagatgatcaccggggaggagcgtggttgggctcgccggcgtggctccgtcgttggcatatgtgccgccaggtctaactggtgggaggaaggggaaagtgcactagccgtccgttctgtgactaacagatgggattggatcggctagataagcgattcggcgatgaaatctaaggtgttgatcattgcaccaacgaccacgattagaaccgcataccggcttggccagatccgattggggccgtagatttcgaatcgggcggttgtggctggattgggtttcataaaatctgggccatcagatctcgatccag

SEQ ID NO: 169787 - DNA, 393 bp, Zea Mays
gatgattcatgcagggattgggaaggatattaccaggagtgtgaaaagatcagatggggagtgaatcaagccagcctcaccgtacccacttgctcgacaacatggcctcacgaccaccaccgttgtgaccgctgtttaaccggaatccgccacactactgaccctgttaccacgtcgcagggtgtcgtgtgagttggttagtcaccgttctaggtctctaccccaataaatgccacgttgtgcgactccagtgactcacccctctctccggtcgcctgcctttcctttcaaaatttggagacaccgctcttgaacactataaattgagcatgccacttgctccgttgggttgtcaggaagccagagcacccgcccttgcctccgatcgtccac

SEQ ID NO: 169788 - DNA, 476 bp, Zea Mays
gtcctaaccaatctcatgtaagatgatactggtttctttcattatcaactcaaaatcctcagaaatggagggtacagaactcgtgtggaaaacacggcacaaatttttaaccacaaaccataagacaataggcgtaaccatttaatctagcggtctggtcttctaggttcttcaagggcgaatgctctttgatctacagataaactgtgagactttcaggttctggtctgaaacattactcccaattgccgactccagtaagtcctcgcagaaatcattgaacatagcagtcagccagtcacattgtttagtcaggactaaggactacataacaatcatgggtgtaaagcctaaatgaaaaaaaaaagaagtgtatccgcatagatcattgagcaaataagcttacgtaatgtaaacatcctcaagaatatcaggtgctgagttaaatcttctgctattcctcagattttggttct

SEQ ID NO: 169789 - DNA, 610 bp, Zea Mays
ggagaccagagcaccgtagctagaagataggagagaggaatcccggttcctcaacggagtaagccggacagcaccgggatctccgcagaagcgcagatcacaccggaggccggagggggagagggagaccggagctaggagagaggagagtaccagtgccagtgccgccgtaccggaccccggagtcccggttcctcaacggagtaagccggagcaccgggatctccgcagaagcgcagatcacactggaggccagagggggagaagaagataggagagaggagagagatgagggagaacggagcaccgggatctccgcagaagcgcagatcacaccggagggggagaagaagacaggagagaggagctagggttatggatctgagttacccggttcacaaatgcgcagatccgagcgggggagagccggagaggatctccgacgagcgacgatcgatctgagcctgggcggagaaccggacaccagagacagagatggagaccgcagaccggagccgagcgcttagcggaggcggagggaacgaggaagagagttcgccggtcgccgcggctgagagagagcgattgaggctgtgaggcagtgagcgag

SEQ ID NO: 169790 - DNA, 973 bp, Zea Mays
gctatatattcttgtaaaccacatatggaggaggcacgcaataaactatttcctaaccccttctctctcaagcctgcggttgaggagtttatcctcacccgagaagacagacgtcggctacgagctacgtagtcgtggtccggccagtcaggggtttgatgcccttaacaaccctaaaaccctaaacccaccgaccatccgatcctatgagtcgggagacacacgggtggtggtcgttgccaagaacatggaagaacgctaggaatttctcgctgacatccgcgctcgtctcgagcaagctcaggcatttcagaagcatcactttaacaagacccatcatgttgtttcgtacaaggtcgatgattgggtgctgctacgacttcgtcaacgcccggttgcgtcgctgccctaggccacctctggcaagctcaagccacgctacttcgggccctaccacatcaccgagatgatcaacgaggttgccatctgcctcgctctcccacctcaggctcgcctacacgacatgttccatgtgagcctcctgaagaagttccattgcgttccaccagaggctcccccgccacttccactggtccacaacgacgtcattactctagagccggaacgtgctgtccgtcgacgagtcgctcgtggcatcgagaaggtcctggtccactcgaagggctagtctgctgcatcggccacctgggaagatgtggtgtcgttccgcgccaagtatccaacatttcagctcggggacgagctacctctcggggaggggagagatagtttcctgttattagctcctaaattagtgggttgattccttcctattattagctcctagattggggggatgttccttcctattattagttaccaaagtagtaggtccttcctattatcagctcctaaattagtgggctgtcggctatatattcttgtaatccacacatggaggaggcaagtaata

SEQ ID NO: 169791 - DNA, 598 bp, Zea Mays
ccctgggttttcttccccccttttctctcacaaaacatccctcggtctactatttgcatgagtcactgaccttacacaaaaccccctggacttaacctaaatctaacccgcgatccttggctggctggaacactacccggggcgaaagtcacggcggcgaggcttaccggcggcagtagagctccagtgggttggtcagcgacgttggggaggtcacggcggtcatgtcggtgtgcgggtcggcgttggaggtcgctggagctgctctggccacgagcgctggcggcggaggtcgtcggcggctcctgctccggccaaaccacgacggtagggttcaatcaaagtgcacggggagctccacagggtggtgtagaggctatgcgcgcaaggaattaagaaatgttgcagtgggttacccggtccacgcgctccagcggggttacgaactccgacgagcgtgagcgcactgttccggtggggctggtcctcggctcaagctcgggcaagcttcatgacctcttgaggaagctatctgagggctcggatcgagcggaggtgggcgggaatggtttggccacggcaggcgccctcgggcggc

SEQ ID NO: 169792 - DNA, 482 bp, Zea Mays
aagacacagtatggttcaaagacaggatatgtgttcctgagattgacagccttcgtgagactatattgaaggtggcccatgactcggattattctattcatcctggtagcactaagatgtatcaggatttgaagcaaaagtactagtggtatgggttgaagagagatgtggctgcacacgtggctatgtgtgatgtgtgccaaagagttaaggccgaacaccaaagaccaactggactattgcacccgctaaagataacaaaatggaagtgggcagagattggtatggatttcattactggattgcctcgcaccccgaaaggatatgattctatatggatgattgtggatagattgaccaaagtggctcacttcattccggtcaagactacttataaaggctctcagctggcaaaattatatatggctcagattgtgtgtttacatgatgtaccaaagaagatcgtatctgatagaggttca

SEQ ID NO: 169793 - DNA, 1476 bp, Zea Mays
gcagtcttcacatctaactgttcaagctcaagatcttgcatagcaacaatactcaagaaagtataaatagaactatgctttacaactagagagaaaacatcattataatcaattcatggtatttgactagaaccttttgcaactaaccttgccttaaaccttggaggttcacttggagatgaatcctcctttcttttgaagatccatttgcagcggacggtcttcttttctttaggcaagcgaacaatgtcccatgtaccatttttctcaagtgactaaatctcctcttgcatagcgaacacccatttgccacgaccattggaaaccattgcttcaaggctctgcactgcaatcaatatcctctgcataactcagagcaaaagcaatgttgcattcttcaaccaatctctttggaggcctaatatctcttttggcccttccaactacaacagactgttgtggttgctgcacaacaggagaagaatgctcagtagacaaagaatcatcaataatgggtgaaatatcacgaacctgtggatctggaatagcagcatcctaaaacatactgtcatcctcatttaagttctccacctgcaaacttactttatctagaaacgacggttgaacattagatgaacggttagcatagtacattttagattctttgagaacaacacttctactcaacatggccttcttggtttcagggttccacaatttgtatccttttgcccctgaaccattacccaaaaacacacactttgctgctctaggctctaattttccattatcaacatgagcataggcggtgcaaccgaccaattttttttgcaatttagtcccttttttgaaaaaaaaacatgtttggccccttggacgacttaatgtcgtttttacaccctttgctcggcgccataggccacggcgccgaggtaacacgtcttggagccgaggtacggtcgagaagtgctgcgatggcggctacgtggcaagacctcagccccgagatccatggcgccgagatctggctgcctgccacggtcggttgcatgcatggaaaaaaagatagaggaaggggatttgtcctcaggcggcaagatgatggccgccacaactttttgatgacagcaactgcatgcaaacaaaactgaaagcttctgggatagaggagagtcaaaactgggagacgagaggcccatgcgctagtaaagcgaggacgtacaagacaagagggagtagatggaacgaggctacagtaggctggtgaacggagaagcaatggtatgtgttcaggtaggcaggctgcctctgcctcgtcttcatccgtctgttgatcggcatggtccgcgtgcagtgcggcctgcaaccccagagtgacagcactggaacggtgcatatgccggcaccacgcccaagtgtacattgtacaactagctcatttactaatcgttgtttatttatttacgcaaaccgtat

SEQ ID NO: 169794 - DNA, 566 bp, Zea Mays
gcctgggcccccatgccagaggttggaccactggttgtagcaaagctgagggggcgcgcaaccgcggggcggttgcatgctccttgtgcggcggttcgcctccttgaccgctggttgtggtgaagatggaagggtgaataaccgcagggcggttgcacgctccttgtgcggtggttcgccttcttgaccgctggttgcggtgaaggtggaagggcatgtaaccgcagggcggttgcacgctccctgtgcgacaattcgccttcttcacgcttcgggccagcttgtatgacgtgtgaggcctggcccccatgtcatagaatgggaaccctggtgcgcatcaggggagaccttgcccgtgacgcttcggggcacgagcggggaaatctgcctttaaaaaggagttcatccctcgggcagtagccatgcctcgctcctcttacattcatcgcgcccttccaccttccgggcctctggatggggcgtgccggtgttcgctagggggatccacgtcagggccacccccccagcggtctcaccgctggggagctcgcgctcttcgtttcctg

SEQ ID NO: 169795 - DNA, 596 bp, Zea Mays
agaacttgggctaggtctagtggcagttccagaggtgcggggaggtgggtctcactcccttctccgccagcctctccttcagctcttagggggaaacctgctccaatcccggaggcggtaggcgtggttttatccgaagccatctgccatggggaaaagagttactatcatgcacatgccagtttttttcaactagttactttattcattacatcaggtcattacataatgcagcacacaactaccataagctcattacatgcgagtgctattgagggtactcccgaaatccttctctaaagtgtccccaaactccttgagaagatcatcaaggctggctagggacatttcctcggtgtcggacgagcttcttatcccggcagggggtagggctggaggggcttcttccttctgctcagtctgacatccttggcttttggtcttcttgcagatttttcttgcgggggcgagcttctttagtttcttgtcgtaatccatctttagggtgcggtaggcctcacgggtattggtttcctcgccttctgctatttcgaggctctcttgaagggacgtcttttcccttgtaagttccctga

SEQ ID NO: 169796 - DNA, 312 bp, Zea Mays
tccctggccgtcgatgcgagagttgagggtcgagattagagctctggttggcggatctggcggcgggtgctaaaccgtaggatgagtaaaggatggtctggattggatccaactgtgaggttcgttcttaggtgtttgcgccatcgatctgggatcgaacggatccccatcgatctggcttgtttaaaatctgggatgatggatctagatccaagggccagcatcacacatgggtctaggactgctcggatccattgatttgaaatcggacgaccctaatggccccgtaccccttcacccgagccatgtttc

SEQ ID NO: 169797 - DNA, 564 bp, Zea Mays
gatgggttgcacttacttaggatcttgagctccaagtgtggtgtacttttcccaacttaagtcacatgtgatgatgggcttacttgtgtagtcttgggtgaaaaccctaagtaacacctggggtgttacagtgtagcactgcctccgaaccatagaccatgaagaaaggagtatttccgtgcagagctggctaggttgagttctcatgctccaaacaacatacggcaactctctaatccactttcctgcgaacttctcattcttgtcgaaaactttctttctgagcgcttccaatatcatcccgttggctctttctacctgcccattggctcttggatgcgccaccgaggcatatttgatctgaatgcttttttgttcgcagaaataaaaaaactctgagcttgtgaaattggatcctaggtcggttatgatgctattcggtattccgaaactgaatattatgtcttgtatgaattccaccgccttagctgaggttagagaagcaatgggtttgaactctatccatttagtgaatttgtcaatagcaaccagtacatgagtgta

SEQ ID NO: 169798 - DNA, 450 bp, Zea Mays
caagcctttgattgtctctggcggagaggtttggtacgcgctcaatcctactccccccgcctccccctacctgccctcgccagcccacctacacatgctgcgacctctccctccgcgaaagccgcgaccgcaccaaccaccgccgcgaaggtatcaaggtgctgctctccctcgaggatggcgcactcgcaagttgaaagcccagacgaacgatcgattcagacactggcgacagcgctggcgtgttcaagctatcagttttatagtgcccgcacatggcaaaattgggagagtggcgtctgcccgaccgattcttgccggatgccgggtggtgattccttctggtgggctcccgtcagtggacagtggcatctgcccgctccgtctgtgatccttggtcccctaaacactgctttctctctctcgtttttttccgcatgattttgatta

SEQ ID NO: 169799 - DNA, 418 bp, Zea Mays
gcagatccacgagcgggggtgttctggtcattcctctgattattgcttttccgaggtgtctgctggttgcgccttgggcagttgttagcatagtggcctagctcaccgcacttgaaacagccattgggttggactggtgcgttgttgcttctggcctgcatgtttacagcgccaccttgatgattctgtgaactcccgccagacctctagttggtctgagagttgctcctttgttggttctgactttgattatttctctagccttgctgtccagagcgttgcatctgatagttgtttccaccctgatttccagagcggaactgcgaaccttgagcgttgttcgggcgggtgttcctgctggactgaccttgaaattttcttttgtggtcagatagttcccttcttttgctttcaaggc

SEQ ID NO: 169800 - DNA, 521 bp, Zea Mays
agggaagaaagcatagcaaccccttcccccctcagtcgacctgcccccggctcggcctagccagcccacgtcgtgccctcggcccacctggccaccatgactccatagcctagcaggtcgcgcgtgcgcccataccccacaccccgcgcccctccatgcgcacccacggtcgttgccgtgccatgcaccccgctccgtgccgcagcccacccaacaaccacgcgcgacactcagttagggaccctcacgtcaagacaatcttctccaacttcctccgtgtgcacgccaaatagtcgcccacatcgcacagctcacgcaaccaccactcacgacacccatattcacatctggcactctcatctaacccctccccacactcccaaaccggtacgcatctcttcctatgcctacacattgcttcgccttgcctcttgcctagaaccaccatccaccggtaccacgatgcgctgagcatcgccgcgtttgtgccctgcctcgttgcgtcggagcttcgccaagcc

SEQ ID NO: 169801 - DNA, 440 bp, Zea Mays
ccaaatttcaatactgtttttacctctaacaggcagagcccaattattttcaaccaaagtcctaaactcaggtctaagcctccaacataactcatatctaaaatctctcctagcagggggagtaaaatcagttttgagacataaaggcacatgatcagaaaaggatctactaagaccagaaacattcacattattataatgcagatcccactccgggctaacaagaaatctgtccaacttctcataagtggggggatttctattattagaccaggtaaaaagcctaccacttagatccaattcaatcagatcatgaacatcaataatagagttaaataaggaactccacttattggtaccaccaggtttgttcttatctgattcttttcttagaatgttcaagtcgccacccatcaacattgggtgagagcatttggaac

SEQ ID NO: 169802 - DNA, 773 bp, Zea Mays
ggcgcggagatcaccggcagcgagatgccttgaacctggattcttgttcagtccactgtaccatcgcgatcccattcagttgttctgacagagcaagttcaggagctcttttctcaaatttttatgtaacaacccactaatccatctgtagcaaagttgttcttctacaaaccagctttgattttgttatagcaacctcgataaaacagccactggatcctatgcaaaatcgatctcaaagttcatcctagtttagtgacagtcgaatttcagtttcagtggtgactgacatcctaacttgaggtccatttttctccaatttccatacagttccaaagcttagtcacttaatcaaacttgaactactaacatagctctaccattttgttgtaatgacttagggcaaaaccttcatggattaagagatacaagggcataaacctgacctaatgtcactcattttcagagtttataccacatggtgccattggggcttttgcaaattactccattttgctccacatcacttgaaaatcttccaatgtaaatgttgtttagtttttgatactctaccactttgatatatgcacgttggtccaaaagtgtatagaaattgaaatcgccttatagggcacaaattagggtttctagggctcttattagggttttgagtgttctagggtttgtgtgccactcaaatccatcaagtttagtctcttatgaacatttccactaacgtttgatataatactcaatttggtatcacacatacc

SEQ ID NO: 169803 - DNA, 482 bp, Zea Mays
agaatcaaaaagaaacaaaaatagaaaaaggagaagaaagggattggaatttgaaaaagaaaaagaaaaagaaaactctctcccctccctcggctgggccgaattccagcccagctcgcgcgcgcccgcatccccctctcttcccagcccaggcggcccaatccgcgcgccgcttcctcctactgacatccgggccccgcccgtcagcgcctcgctccctccctctctcgcagactcctctcgctggcagccagggcccactcgtcagctccatctccctcgcccatccctcaccggcgcgatcgccgccgagtgctccctcgcctcgtcgcctcgccattaatgctcgccagcctccgcgacaaccccgccactgtgcttgagccgacctctcaccccctcagcctgcccgagccatcccaatcggcgttagcgccattcccgcccccatggcgagctcgccggtgctcgccgtctccccc

SEQ ID NO: 169804 - DNA, 412 bp, Zea Mays
agccaaacagcccaagcgtgagggaggttccggaggaggctgtggaggtcaatggagatcgtccccacgatccaggtgagcacgatgctgtcgaggcgcacccacgcggcgggtggcgccacgccggcggggtcgcagaggacgtggtcatccagagcgtagcggcgaagggtgaggagtaagtcacgccagcgtgcttaggacgacaactctggctccaggacgacaggaaccatgaggcgaatgttctggacactcccagtctgaaggtggagctgagccacgagcgggtcagccgggtcatgccacaacaccgtggggatggtgcggggtccggtgccgacggtcggtgcggtcgagacgccgtacactccgcccacggtgtcagaggaggtgaccccgccgtcgtggg

SEQ ID NO: 169805 - DNA, 425 bp, Zea Mays
cttttggagggcaagtctacttctgggacttgtcagtttttgggtacttcgtcggtttcatggtcttctcaaaaacagtctagtgttgccttgtctaccatagatgctgagtaggttgctgccgctagctgttgttcgcaattactatggatgatggctaccttacgggattttggcttggattttcatcatgtgcctctgctttgtgatagcacgagtgccataagtgttgccaagaatcctgggctgcattcgaggaccaagcacattgatgttcgctttcactttcttcatgatcattatgagaaaggcgacatcgaattgcgctatattgataccactcaccagcttgctgacattttgaccaaaccccttgatcaaaaaacttttgttcatttgcgaggggaattaggtgtatgtttccc

SEQ ID NO: 169806 - DNA, 711 bp, Zea Mays
gggggtgcccgatcttccgtcaggtgaaggtaactatcgatttggtggagatgtcacacagacgatccgacttccaatcaacacgactagaaccccgcaatcgcagcatcacttctcctctggttatcaaccgtgcactgcgcgattgacctcgccacgaggactaattcctgcctgagaatcgaagacacaagcaagaacaagaaagaacacaatctagaatattgcggaagacgattcaccagcggggtcactgctgtgtcagggccgtcgggtggaagacgatgccgtcgccgtagatattgagatgaccggtagggattagaataagtgtttggcaaaagataactgtgggatcgttgatatgcggtgcagatctaatcggggatacctcctggatgagttaatccgggccgtaggtttaatcggacggttcggaatgcgttaggcttcataaaatctaaagcctagactcctgatccgatgatggcgatcgtgtaccgatttggtcctctctagatctaatcctgggcacacatcccatatccaacaaccgatatcgcgccataccccttcgctgcgcatgttttgcagaagaccccttatggttttagagaataaaacccaccgtccatagtagtggcgcgctgagtcttagagacttttgcaccagacacccctatgttcctgtttaattgacgcccagtccag

SEQ ID NO: 169807 - DNA, 407 bp, Zea Mays
cactgccgacggaggaggagcaatctgaacggcggcggcagacttctgagcacaacggcggtggcgaaataccgagcgagggcgacggaggagcaccaatctaagcggcggcaggggaggagcagagtgaacgggaggagcggccgaaggaatcgcagcagcggctcccgccgccgttgaggaacgggaggagtgaacgggtccagcgaatgtgagatgctagcaaaggtgtcagccacgtcttgatttggagcaggggcaaaaaggtccaagcaagtgccctctcctctgtttatgcatcgaataggtgataaatggcattttgtcggtaaacaacgtgtgaggatggtgcactagcgaagctcttgcacataatggcattcgggcgaatcccacgttccataatg

SEQ ID NO: 169808 - DNA, 527 bp, Zea Mays
ggtttctgggatcatcgcgaccttttcgcccacgcctccaacctataaaagctcggcctcgcgacctccttaggccatagactcgaaccgagctcgtgcaccttgtccagaaacataaaatgggggaaacatcaccgtgggtgagggaaaatcgggccaccatcgtgggacagccaccttggcgtcgtctggcatccaaaaatcggtctgggggtgtgcgcatcagctcaggggtgttctccggtgagacattttgtgccgtggggtatggttcaacaacgatttctcaccggacatgggattccaccgcagaaccactccttaccgtggccggtgcgtctaggggcacggactgtgtcatgggtcccctggcctcgatcgccttgtcactctcgtcgtgttgcaccatcaacgtcgaggtttgggctgctgtgtggggatcctgtaggttgcggccatggcaccaccacgatggcgatggcgtcaccgcctggtctcggcgtggggaggaagacacacgatcgccg

SEQ ID NO: 169809 - DNA, 690 bp, Zea Mays
aagggtggacttgcggtgacactgcgactgcggcgagcaattcgctcgcccccggagcactgacgccaccaccgagaccacgaacacaccccccgagctccaacgcaacgtcgcagcgccacaccgaggcccaatctacagcgccaagtaatccccgccgatggccgaactgcgagaaggtgtggcggcggcgcacgcgaaattgaggaggagagagaagagatgagattcttatagtgcctagggacgaagccgaggtggggatttcggtcaatggctccgaggttcgcggcaagttccgccacggccgggattccgcgatctccgcggcggcaaaagcggtcgcggcatgctctgttgtgaagatgctcctgacgagtagggcccacatgacagtgccagagcgcacacgcgacgtgaagagaggggcatcgggtcccacttggcggtgaagtaaggcgcgcgagtcacgagcgtcccggcgagcgcgacagaaatgctgacaacgtgggtcccactggtcatcggtagtagcagtgcgcgcggttgagggaggttagatgggccgcgcgtggagaatttggcccaacaggcctcctttctctttttcctttatctttttcttttttttttctttttttaagtttaatttgaattcgaattttaaattcaaatttgtgccaaatttat

SEQ ID NO: 169810 - DNA, 369 bp, Zea Mays
ggaggggtggtggaattgatttgcctcctaatcgacacactcggtggatatatagacaaccccagccacaaccagcagagatgaatcctcctaatcctccatcaggcggtgttgacccactgattgcagctcagatgaggatgatgcagcaaatggcggacactatggcagatatgcgggcacagatgcagcaggaacgccaggagatgcgccaggaaagagaagagatgtgctaggagttgcgctaggagcgagaagagatacgccaggagagaagggcgcaacagcagctgcaacaacaattacaacaacagcagcaacaagtaccattgcctcccccaccaccaccagttccacctcgggacaagc

SEQ ID NO: 169811 - DNA, 674 bp, Zea Mays
ctgcgaaattcctcactgccttaccaagtgacatctcgcagactaatgttcctaatctgccaaaagttggcctgcaaaattcctcactgccgtaccaagtgacacctcccagactaatgaaggatagcaaggcaataggatagaaacaaacgagaaatacggggggtgtgtgtcttttaggtcagggcttctggaagtcaccacttcaatcctgagaagagaaccatggaagccctttcttgatttaggttaccctacaaaatgaaatctgcaaggtgatgccatcacgctaacaaaaccagttccacctggtgaacatttttttctggaagctcacaaatttgcaggaagaacattgtaaagaagaagaaaaaaaatagtacgagtaccaaactagcaacacaactccccttgtgcaaaggtaacttcgtcttcaaaagaaactaagccctattgtagacatataagatcagacactaaaacaaaatatcttaatccatacatgtcgacctgtattagcagcagcatgttaatatttgcaaaattgataagttgacgcgtgaatgtaccattcattttcttttgaaggaatctgctctccagacatgctctattcaaatattttcaaagctcttgactagtccacctcaagaaagtactcatgccattgccag

SEQ ID NO: 169812 - DNA, 444 bp, Zea Mays
tggaattctagcccttcgaatttgtcttctagttttcggacggcggtgcaatattttcccatggaatcattcgagcagtcccactctttgtttatttgacttatgaccacaagtaaatctccatataccatcaacctcttgatgcccagtgatatggcaatgctcagcccatgaatcagagcctcatattccgctgcgttgttggatgctgaaaatagtaactgaagagcatatttgagttgttcacctcctggtgcaatgaagaggattcccgcgcctgccccctgcagtttcagtgatccatcgaaatacatccgccatacttctgcagtctctgggttatctggcatttgttgcttggtccattctgatacgaagtcaactagcgcctgagttttgattgcagttcgaggtctaaactcaatgtatgagctcctagttcac

SEQ ID NO: 169813 - DNA, 279 bp, Zea Mays
attgctcgttgttcagcggggtagctgatggcctcgacctgaagtactaccctcgtcgttcgaccggcagtgctggaggtgtgattgtctcgccagttagtgagggcaatcccaggctgaacaacatggtcaacttggctgctatgctcaacatagagttggaccacgcccttgacgagttgggcaaggtttgggcggaggttgtggaattgcgtgttgagtgcgcagcacgccactatcttgatggtggttctcccgcccctgtcaggattcagcacc

SEQ ID NO: 169814 - DNA, 590 bp, Zea Mays
cgcatggacgtaggaccagtcgtgctaccattaggagcagcgatggtgcgctgggtgtgtagtgatggaagggagggacaacctggggcgtgttcgtggatgtgcaaggacacacccagcgagattactggtctaagtcatgggaggagtcactagagtcaacgccgtgaaagacggtgcgagagttggggttgcgataggaagcgttggtgttgacgatggggggcaggggcagtgtcgcaactgatgcgacaactatcgctggtgggagcagacccactacctaccatgtggatgtgagagcagcactcgaagagcctcttacttgatgtgccactgtcgctagttgataatcgagggtacaaggactataccaccgtaatgattcaacaaaggggtcttagtgtgccactctactttctaccacaacgcatggtgtagcctagttatcaggaggtaaccacaaccttgggcacgacaagggagaccttggaggtttggaccaccgaggcgttataccctatgttcttttttggtggattggattacaagaggttggctaagtcctattataatagactagatagagc

SEQ ID NO: 169815 - DNA, 673 bp, Zea Mays
ttcggatttggcagccggggagcagtgaattcatcgtcgatgttggatttcgccacggttccgctgtactacgtgggcaaggccactgccgccccaatccgtggtaaggaatctaccattactttcgctagagatcatacaatgtttttcattatacgcttgtgcattcgggcgccttgtggcgaggattggctggtgctggccatgtcgctgccgtatccttgccctgcgccaccgtagccaaccagtggggagaaagaaaggctctggtaccattggatctcctttagatggctcggatctattgccacgtatcgcttcggataagaactaataggaacccttagatcgtgatcggacggatccgtccgtgcgtgctcgtttaaaatctccgtcgtcgatgggggatccatcagccgccgtggcgtaccatttcggggtttacatagtttaatctgaaccgctgatttgggatcgtgtggatctgagcgcaggataccccttcactggttctttttacatataagcccatgcagaatatagaaatcaacccgccgtccacgccagggactctctgagtcttagaaacatttacactgtagcccctgtactcttcactatttgatgcccaatccagtgagtattgaaaatcagaaattaatatcagaaatta

SEQ ID NO: 169816 - DNA, 321 bp, Zea Mays
atcactactcatttgatgtcacaggaattgtgctaggaaatggaacaactcaacctgggtatgctcaataatgtagaagcaatggttatggaagttgaatctactttggaagaagagattcgtaaaggacaagagtctgatgagaaaatcaaagaaattaagacacaaattagtttgggtaaagccccagatttcacggaagatgatcaaggcacaatattgtttaagaagagaatctacataccggaaatcgaacacctgcgccaacttattttgagagaagctcatgattcagcttactctattcaccctggtagtaca

SEQ ID NO: 169817 - DNA, 611 bp, Zea Mays
gtacctactccctctgattctgaacataagttgttttagatttgtgcatatgaactgaggaagtattgaagtggtattactgtcgtgcacttattacatattgcaaaagatacccccaccataggtgatagcattcagttagcaaaggcataagcgtgcccttgatataggcaagcatgatgagggggtgacttaatccctttacctgaggtcgttcttctcttgtatcctgagttactgtaatatgtagctttgttggtggtgggactgaggtgtgcgttgtacttcatttgtactctactctacttttcttttaatgaaatgatatgtagctttcctatatgttcaagaaaaaaaatggcataagcgtagagaataaaattatggccagttgcctggaaactctgatgatttacacttaaaaagtatgaaaatataaaatgacttatattcaatttggagggtgtaacaggcctaaagcctccaacaggacacaggaacagagtatcacacaagagcacaagtgttttggtggctaggatgacttaaccttttctggttttctcttctattaatatagctaatgtgagctacaaatcaggctgtgatgg

SEQ ID NO: 169818 - DNA, 346 bp, Zea Mays
gcgacccgccagtgccgcccgagagcaaccaccgtggccagcccctctcccgtcctcctccgttcgatccaggccctcagttagcttcctggtgaagccgtgagacttgctcaagcttgacccggggaccctcgtcaccggaatagcccaatcgcgctcaccggagttctagaacccgccggcgcacgtggaccgggtaagcccctgcaccgttttccaattctttgcgcgcatggcctctgtgtcaccccgtgaagctcctcgagcaccctatttgaactataccgccgtggtttggccggagcaggagccgccgacgacccctgccgcctgtgctcatggccag

SEQ ID NO: 169819 - DNA, 390 bp, Zea Mays
taagttggtgtccctatccggaaaggaagtagtaaccaagttgtacttaactgaactagaagaaggagactttcaccatttatcagtagatgacaaggagtccaatccgattgaaacaattaggattgtgtcagaattccccgatgtattccctgaggagttaccaggcatgccacctgaaaggaaagttgagtttgccatagagcttatcccaggcaccgcccctatttccaagagagcttatcgagtgcccggaccagaattggtggaactcaagaagcaaattgatgtgttgttaaagaaaggttacatcaggccaagtacctcaccttgggcagccccggtgttgtttgtggagaataaggatggcacgaagaggatgtgcatcga

SEQ ID NO: 169820 - DNA, 1062 bp, Zea Mays
caggcagaggcagatcccaatgactggagagaaccaatcatcagatacataaaaacgaggaagaaccagagaacaaagccgtggcggagcggatcgcgagacagtcggcccactataccattataggggtctgctgtatagaagaggtgcagggggtcctcatgaagtgcattcactcggctactgggatgcacctattagatgagattcatgccgggaagtgcggcgtacatgcagtgtcacagactctagtgggaaaagcttttaggtctggatcctactggccgacatcaaagaatgatgcagccaagttagtccagaagtgcaaggcatgccaattcttatcaatgcagcagcatctacccgcacaacagttgtagactattcctgtgacctggccgtttgcatgctgggggctagacatgattgggtcgttcaagaaagctcaagggggagatacccacatactagttaccatcgacaagttcacaaagtggatagaatacaagcccatcgcctctttgacctcagcaaaggcggtggagttcaatcaggaaataatgtttaggtttggaatacctaacaacatcattaccgtcctggggttaatttcactagtttggaattctttgacttctacgagcagaggagcatctagatcaagtatgcatcagtagcacacccaagagctaatgggcaggtggaaagagccaacgagatgatactcgatgcactcaggaaaaaggtgtttgataaaagcgagaagcttgtagggaaatggatcaaggaactgccatatgtagtctggagctcgcgaactcagtcgagccgagctttacatgaaaacaccccattcttcatggtgtatgggtcggaggcagtgctaccagccgatctgatctttggagcacccatattaacatttgaaagcatagctgaagcagaagcaaccaggctagaggacatcgatgtactagaggaagaacggctaaatgtagtcattcagtcggccaagtaccagcagaccttgaggcgctatcacgacaaagcagtacgacatcg

SEQ ID NO: 169821 - DNA, 608 bp, Zea Mays
ccgtgatagatgtggagcgacatgtccttcgatgcgaatcatgtcataaagctaagtcttgtttaaaccctcatggcttatacactccactacctattcctagtgtgccttgggaagacatatccatggattttgttcttggtttaccacgaaccaagcagggaagggattccatttttgttgtggttgattgatttagcaaaatggcacattttattccatgccacaagagtgatgatgcttcacatattgctgaattgtttttcaaagaagttgttcgtttacatgggattccacgaaccattgtttctgaccatgacactaaatttttgagttacttttggaaaactttgtggggaaaacttggaacacaactactgttctctacaacatgttatccataaacagatggacagactaaagttataaaccgaacattatcaatgctgctgcgagctattctcaagaaaaatttaaaactttgggaagaaagtctaccacatgtcgagtttgcatacaacagagctgtacactcgactactaaattttgtccatttgaaattgtatatggcttcaaacccactgctcccatagatcttttgtcattg

SEQ ID NO: 169822 - DNA, 517 bp, Zea Mays
aggaaagggagttgtcaccaagtcaccacctgtattgaggagattaaaccatcagaggctatcagtgtagtatcagatttcttagatgtgtttcctgaggagttactaggtatgccacctgaaaggaaggttgaatttgccatagagcttattccaggcaccgcccctatttccaagagatcctagcgagtgtccggaccagagttggtggaactcaagaagcagattgatgagttgtcagagaaaggctacatcagaccgagtacctcgccttgggcagccccagtgttatttgtgcagaagaaggatggcacgaagaggatgtgcatcgattatcgagctttgaatgaggttactatcaagaacaagtaccctctgcccagaattgaagatttattcgatcagttgagaggagccagtgtgttctcaaagatagatctgaggtcaggctaccatcagctcagaatccgaccctcagacataccgaagacagccttcatcactaagtatggactat

SEQ ID NO: 169823 - DNA, 351 bp, Zea Mays
tggcttctttgaagctagttatctgaagattgatcctacgtcgtgaagatcgggcatcgtgatgcatcaatagtggtcaccctgagttaagtaagcgtgagcatgtcacaccgccttaagtcatcgccgacttaagccgattgctccgttagtagggtatagtggtcaccctgagttaagtaaacgcgtggattgataataaacaactcgagtgcccttgagaatgaagtctttttattgatgatgcactttccattttacagaatacaatgtcgtcccaatagcttttgaaatctagctaagggtagaacttcctgagatgctctatattccatgagttccctatttccg

SEQ ID NO: 169824 - DNA, 641 bp, Zea Mays
ggggtaacaaggattatggcaaggaaagactccatcttgggtggtgatgcatctgaaaatatggtttgacttttgtccttccttgacgaggttgatattctcttctcgggtcttggtgttatcatccaagttaaggacattcggttttggtgtttccttctggggtttaggtatgtagatggttgtgaaatgtgatatagatgaaacatggtttttttggtttttaggttggactagataggttagaatcttgtttgaaatagattgggggcgagaaaggttatggtaagggaagatttcatcctggatggtggatcctgacttttgaagatcttttctggcttatgttcttcattgccttgatgaggtcgatcaccttcgatccctagtcttgacgtcatcatctcagctagggacatatagttaagatagcttgtagataagaacatatagctaataggtagatggcataggacgagtgtgctatggccaaacctggtctagttgctttgttaggttggctaggtacaaatctttaggaacatgtagattaggtgggtaggttagaatattttgttgtgaaatagatagtttaggcaacctaacaagaatatataggttaggttgtttgtgtattggtc

SEQ ID NO: 169825 - DNA, 689 bp, Zea Mays
ttcaactgggccgacatagagttgaggacattctgcaagcacaaaagttagcaagggaacctgttcgtcaacataagtaacgcaaggtaaaaatcagctcacctgaaggatagaaaggaataaggaaaatcccataggtggaggcaccggtacactatctgatgatggagtatcagtggaagcaatattgagagcatcactcaaggagacctcagtttcgacagcaagcagcggattcccagtatccgggtcgctgacttctaaagtgaccggaccgacaagaggaggggaagaattgtcaccatgggttcctcatattgaaccggtggtgatccggcatgaacgtccatagaagcacccgaggaggaaccaagctcagcacccttgggctagtttatccttggcggcaccttcggaagctgaagcaccctcgatcatgcacacaagagctgaataaccctgtcctgcaacgtcaagagctagtgtgttcccgcgagctaggccaccctccaaggtcgaagaagcgtgagaaactgcccgggttattccttgcctgactggattactagctaaggggatgtcatccagaacctctgtacagacgacaacactttcagtttcaggtggctccaataaaaggtcttcagggataatctcctctagtgcatggtcgatggcagacatcgtca

SEQ ID NO: 169826 - DNA, 566 bp, Zea Mays
gtcgcagcagcagcgtggcgttcttcagggacgtaattttcatcatatcgatgccaacagttgacagctgtgtgtcctttcttgaagcagacttgacatggttcactgcttgggttggagcgtcggttactgtagccacgttgtctccctgttcctgcgctgttgtcatgtccgcctggtacacctgcagcgttgctgtggccgcgagcaggtggccgagcacgcccacgaccacggcttggtcctcgagaacgccccaatgtcctgcaatgttagcagatccaaactgctctccttcttggattaaatccattcttgtttcatagcttagcatctgagaatataattcttcaacagatattggctccacccttgcaacaagggcagaaacaagcgaagtaaactcacggtccaacccagtaatgatgtattcgacgagttcatcgtcttcgagaggacgtcctgctgctgccatatcatcagcataccccttcatttttgcaaaatattcagcaacattcatgttacccttcttggtcgtcgagagagcgatgcggagattcaca

SEQ ID NO: 169827 - DNA, 924 bp, Zea Mays
tcgcattgcggctgaggcgtgtcctactctgcacagggcatggacatgctttcgtcaggccgagcaggtgtgaatgaccgctttgcttactgatgtgggcagttgtgtgtcagcgccacgcgtaagccttgtacagtgcaccacgtgataccaaggaagacagttgtgtctcaatgccgcgcgcgtggacagcgccatcatgagcggtcgtttgctcgggcagagcgcgcacgtccagcacattaactcccgcacacatcagtgcgcccggtccctacatatgtcagcatatcaggtacactccacgactggcacaagccggcaaacggggcggaagacacgcctggttagaagttgcacggcggccgaggaagaacatctctgctgctcaatgtggtatatatttaatactagttcgttgcagcccagctgtcagggctgctcagcacccttgtaacttgcaacccttggactataaaagggatggcacatacgatacaagggacacgctctttggacccaatctcattcagactcaccacattcaagctctcaagcaatacaactcacagtggacgtagggtattacgcttcggcggcctaaaccactctacatcctgttgttcttgcattcttgcacctcttgataggcataccctaggcagccccctcttacttaggattaggcgggtgcattctgccacctggctggagtttacctccgacattttgtgctcgaagtagggcgctttgacttaggttttcgcctgatcttttgcttggcatcatgattcagatagctgagcaacttcttagtttttatttggaaatttcttagttttcgcctcatcttttgccgagcaacttcttagtttttttgcctgaaactgtaacatgttcctcccgctaacaactcaacatcag

SEQ ID NO: 169828 - DNA, 411 bp, Zea Mays
caaagagtaatctcgaagaccacaccaaatcaaactgtgccttatatttgggcatgtttgcttctgatttaagcgggtgtttggggctttgggctgcagctgattgaatagcccagccggtcagctgcatgcctgcagcctatcctgcttagtgcagcctcttctctctggctgtatctgctgctgacttggtgcagctgctacggtgttggtgggatggctactgcagctggaaccagctcgaccgaacaggatgacactgtttctagcaatgctaatagtgataaccaacagtctagcacaatgtgtcaccaggtagcaatgataatagtcataactagcagcccagcataatgtgtcaccaggtcgatgtctagtttgctctactaagaattattaagtagtacattc

SEQ ID NO: 169829 - DNA, 555 bp, Zea Mays
cacgagcttctctatcagacgaaggccagagaagatggtcttcatgagaactttggttgttacaacttcgcttaccgtaaagacatgaagactccggtagttagctatcgcaccaaatggccaactagttggaaaaatgagtggttttatgtgaaggccgatgagaagaagagggagaagctcaagacgctagtactgagccctctaagcttaagcttcgggttgactaggcctctttgcgacatgctgcctgggtcaccatgccgacaagctgtgggagaattcagagtagtagctgagcagatcagcaccagagatctggttcaagaatatctggcctataaagtgttccctacgctaagcgaatggaacatgccgaagctaaaggggacaagggagaagaatgaacttgtacgacttccttgtaggttcaaattcgagaaacagttcaaaaaaccataccaagaatggctagagatgatagataccatgtgcaatgaaattttggggaatttcactaaaaaggaagatcagttgatgactgcggcctttggc

SEQ ID NO: 169830 - DNA, 380 bp, Zea Mays
gttcgatcaggaaccccgaggcacttcttcaatttagattcatggaacacaatatgtactgcggatatgtttctagcagttgaagtcggtatgccactggttcgcattgttcaagaatgggaaacgggccaatgtatcggggtgccagctttccttttaccccgaatcgattaacacccttcattggtgatactttcaggtacacatgatctttgacttgaaagaacaagggtcggcgtcgtttgtctgcataacttttctaccaagcttgagcttctttcaagtggtgccttatccgttgaacctttgcttctgtttccttgactaagttagacctgaaaaaccaccgttctctaggttctgaccaatttaaaggtgtc

SEQ ID NO: 169831 - DNA, 454 bp, Zea Mays
gtttgacgacggtgagaaccttatccacgggcggtgagcaaaggggaagggattacggctggccggagtggcttctaggtcaccggcggcgaggatttttactgggctgtgcttatctgatggccacggcgcacgaatcacagcgagcaacaatcaacggcggtagcacgaatctatgcgcagggaggtcaccggcgatgagcgagcagcgctggcagtctgatctttatcaggctactgtaccattgaagtgggattcagttggcctgacagtcaattttcaggcatggtttgctcacaaatcccaatgataacatactccatgctctgcagcaaagttggagagctatataccatctacatttcggctataatgattgaactcatttgatcactagatcaaggttcaattcaaccccaaagatggctctgttacactgaaaacctgaatttc

SEQ ID NO: 169832 - DNA, 764 bp, Zea Mays
ggagtggataacgtcggggaggggtaactcgtacgtggcaccatctcctgagctcggccggagttactcaccggcggccgccgtgactcagtgaattctgccgcggtggcgctcatgccgtagttctccctcactgtaccttctaccgacgtggttggcatgcgctagtgatgttgtccgtggccgtgtggtgatcgccggaccgccacgactataaatagccattgggttcacggcgaagggtgatcatcgcaaacacagtgactagatcgaagtcaaattcgcaccgccccctccaccttctcccaaatcgtttgcgcacggtgaaagcacagcttcttacggcccagtagcctcaatccccaaaaccaatttcaaccagagccaccgcgacgccgttttcccccaaattggtctgccgcatcgcaaagaacagcccgcccgtggctgggccactctagtgagttcctatccaattaaagtgttgtttccatgcctctgcgtgcttgcgaagctcatggtgacgtccgttcgctctaatcgaccatggtttggcgggaacgtgtgctcccaagctcggtgtccgccgtgcatgtggacaggccattctcagtgcgttcgggtcaaattaatgtgtgttccggggccatcttaggtcaatgaagcctccccgatggttagtttgggcagttttcgccggccatagccggtacagacctcgtccgggaggaacggcgagcgtgccgtgactagggaggtgtttg

SEQ ID NO: 169833 - DNA, 301 bp, Zea Mays
gctgtcacatccaaataagatcaaacagtttttcatgtggactagtatgaggaaaatgttcttcaatggtgtactggacgctccatttgccaacaaaccaagcctgaacgggtaaagaaccctagactcttgcaacccctcgttgtccaagatggtgcttggaaggtggtcttgatggatttcattgaaggtctcccgcaatctaatcaggccaattgcattatggtaattgtggatacgttctccaaatatagccattttatccccctacatcacaattttacagctttgttagtggctc

SEQ ID NO: 169834 - DNA, 469 bp, Zea Mays
gtgagttcggacgggactccgaagcggtagacaatgttttgacagttgaatttttgggcggtctttgatgttattgtggagactgccctggcctcaatccactttgtgaaatattcaatggcgacgaaggtgaacttgagattcccttgagctgtgggcagtggtccaacgatgtccaacccccagcgttgaagcggccatgtatgggcgatcagcttggtgaattgcgaagggtggcctgagcgaggagagaatttctggcatgctttgcatgaccgtgtgactcgattggcagtgcaaattattgcgagccagtaaaatccctgacgaatcaccttggcagtgagggccctaggtccagagtgggagccgcatgttccgttgtggacatcgcggaggatttctatgccttaggttttggttatgcatttcagcatgggctgactgatcccctttttgtacagctgac

SEQ ID NO: 169835 - DNA, 417 bp, Zea Mays
cgaagttgaagatttaaagaagaaacttgcagaaacgagcgaaaaatttgaagttgcagtggcgaagcacgagataagcgaaattgaaagattaagggtacaaaagaatgtcgaagagctccgcgacttcaaagagagatgctacaaaatatccttggaatgcgccaaaactctaaaaaatagttttgcaagggtgggagcatattcttccgagcaaaaattgatctgtggtgaccccgatggtgtcatctagtggatcagcggagaagtcaaagcttttgacgaaatcttaagtgatcgggtagatttctacgcattcgctggtgcacgaggggtcgcggcgaccttatagaaagtcggttgtgaacatattaaggctgcagctcagctaggatttgttctctcgatggatgacac

SEQ ID NO: 169836 - DNA, 567 bp, Zea Mays
tacgtgggccggtgacgtgtcacccgagaattggggaagcggatttaaacagacagttacgacatcataaacctacgtataaattgcataaatggctgttacgcccacgatcagcgcgtccacgatcctagaatgaagcggataatggatatgcgccgtgaatatcgcgtccacgataatggatatgcacatgggcaaaaggaaatattcaaaagcttccaaaaaaaggtagacagtacgaatcatttgttagggcgtgcctggctgaagggcgtaatttgatctggaagatggcggtgccatggggtaaagagtcaatcagtgagtatacgacgctgacatcagttcatcgaacaaatccatgcttggatatcgtaacaatggtgcaggaagaacaacaaggagggaaccagtttacctcggatgcaagtgcgcatatgcaaacaactactgccgtaggggcaattactccaccagcagctttgagggccccgggggttgatgatcagaccacatttgaggcatcgaggatgacagtaaatcaaggaggatagcaccttaatacta

SEQ ID NO: 169837 - DNA, 486 bp, Zea Mays
gtaatcccacaatgaaatccatactgatatcttcccattttcaggttgggattgataaggattgtaacggtccaacagccttcatatgtatcgccttgacacatctacaagtgtcacattttgccacatagcgtgtgaattctatcttcatcttagtccaccaataatgttgtttcaagtcttggtacattttagtgcttcgagggtcaatggaataccgattaagatgagcttcatccagtatttgttgacagactttagcatcctttggcaccactatcagtctttaaaccatatcactccttgatcatctttcctaaaacaattagctttgccggcctccattttctcatgaatatacttcatacccttatcagtcctttgagcatcaataatcctttgtagaagaactgactcaagcttcaaatgtgtcaaagttccttgttgtactatctccagatttaacttttccatttcttgacataa

SEQ ID NO: 169838 - DNA, 569 bp, Zea Mays
cagggaactgccatacatggtctggagcctacgaacccagcctagccgagctctgcatgaaaacacctcattcttcatgtgtatgggtcgaaggcggtgctgcctgccgatctgatctttggggcgcctaggctgacctttgaaagcatagctgaggcagaagcaaccagtctagaggacattgatgtgctggaggaggaacgactaaacatggtaattcagtcgtccagataccagcagactttgaggcgctaccacgacaaagttgtgcgacaccgatcctttgcagtcggagacttggtcctccgccgagtactaatgggggagggacggcacaagctatcaccacaatgggaagggtcgttcgtcgtggcagaggtcacacggtcgggatcctatcggcttactcagatggatggcactgaggtggggaactcatggaatatcgagcacctcagaaagttctacccttagtgatacctcaaaagtctcgagggcaagttgtactctgtaatcagaagatttcattatcaataaagctttcatcttccaaaggcattcaagctctt

SEQ ID NO: 169839 - DNA, 538 bp, Zea Mays
ttcatccgaaaggaggtccaaaagctgctagacgccggcttcatcaaagaggttcatcacccagtgtggctggccaacccagtcatcatccccaaggcgaatgggaagcttcggatgtgcatcgactacaccagccttaataaggcttgtcccaaggacccgtatccacttccgcgaatagataaaatcatggattctacttccgggtgtgaccttttgtctttcttagatgcctactctggtttccatcaaatccagatgtctagataagataggaagcataccgcttttgtaacagtggatgggctttactgctatgtcgtaatgccttatggtctgaaaaacgccttgccaacatttgtgcgggcgatgagtaagacttttagggacctgatcagagatagagtagaggtatacgtcgatgacatcgtgatcaagactaagagatggtcgaccctagtggaagacttaaccctggtcttcgacaggctgcgggcaacccgcacgaagctgaacccagacaagtgcgtctttggtg

SEQ ID NO: 169840 - DNA, 848 bp, Zea Mays
cagggctcaccggaagaatccatgccggcgccgcctcccttggcgatctcgccgccagggagttcgtgcttttcacctcctacatttcttgcgggttggcgctgccgatttcgtctttcttcctactgctgctggaggagtttgggcttcagcttcaacacctcacgccccactccatcctccaggcagccaccttcgtccacctctgcgagatgttcataggtgtggccccctgcacttccctcttccactacttcttcatgttggtcaagtccgggaagactagggaccacatcggtgcctactacttctagatgaggccagatctggccgtagtctacatccccacctttggcggtgtgagatgggaaatctggcacagcaactgggtgattgtcagcaccaaggcaacgaccacctcgtcctgccgtccaatgggtcagcactcgaccgcaagcaatggaggaccaagtcgcccctcttgccaaagttcctgcccgttttggacaggatcaaggccttggccatgggcgacctgacatcaatgcacgtggtcgacgacctcctgaagcaccggatcatgcctctgtagaggaggccacgcctgtgctgctggttcaccggcccgaacgacatccgtaggatccagcgcaggctggacaccgatctgtcctaggacgagctagaactcctggtggggggattactggggagacttttgtccctgaatccctgatactcccctaggccatctcgacgctctgtgatgacctgggcctgaggacggcgatcttggccacgctgccgacccccgatgacagtggcgtgacggttcactagaccggcgg

SEQ ID NO: 169841 - DNA, 523 bp, Zea Mays
aagtaagaatgatgaggatatcctccactattacccattggcaaagttggacggcgaccgtgtgagcctcagaattatcccacctctcttaactttgggaggagtaagtcactttaaaagggagagtcacccttaccccattggactagtcttttggggcgattgggcctttcactgagttaggtgtgcttaatgaattgttgggctccggtcaactctaattttttgggccttagccaaccccacctaggttgggtgtatcaagccgcctgctcagcggtgttgaaggtcctgaatgtcacaggcgagcttggttctgagggggctagatctcagccgcccacttgcccaagtggtgttgtcacatgctgcaatctcttctcttttctactactataatgtagactttcgacgtccgtgtgtcgtgcaatcgtgcgtcgcccctcgcccgcccaagtacccgccaaccgtgcatgcatcctccgctgctagcgcgtgcgtttgcacatggatggatttggat

SEQ ID NO: 169842 - DNA, 533 bp, Zea Mays
ctgaagtacgtaaagtaacaccgtcgtcgatcatgcaacggcaacggcaacacggcatatgtatgtgaagaacaggcaggaacgaaaatgcaagttgtattggtagctgatgtcccggcggtgaagtggcgctcaaggcttgtcgtacgtgtgaccagaccagctcttgtgagagttttgtctttgactcgatgtggcttacgtacagctagctgcgccacaaattaaagagcccaccagttgctgcccggtacaattagttaattcattaaccgaaggtttgcccagttcagaggcgtataaaagctgcacactttcagctaggctgggaatgagacgaattcttactgtgctaagtcgattttaacacggacacgtacgtcgggcgtcaatcaggatacggacctttcggaaaacaaagcagccagattgatcccgacaggaagccaccaaagtgtatggtcagaactggtttaaaataagaagggggtttcggtcagatatatacagtactggctacaacaagttcagaa

SEQ ID NO: 169843 - DNA, 669 bp, Zea Mays
ggaaaagttgccaattattggctgaaggcgagtgagatgttgcatcaccgatacaccttgttttccacaaaaaggtggtggagggtgatcaggatgaagtcacgttccactgagcatcgatcaatagcaataataaatacttggttgaagaattttggcatgtgggatatcactgataagccatgattggacggttagcaaggtccaactacatgaaatgctgtgcaagggagttaaggtgcggagtcccccttcaataccgatttagggggagagctgagaaaaatgtcaccaaagttcaaaaaggagcatgtaaatttgttggaaaatatactaattatgaaatttcaatatcgatttagtgtaacatctagaggtgatcagatgggctaggctatatgggccgacacgaggcatagccattttggcctagcacaggcagacacgatacgatagtaaccatgcctgggccgatctgtggcccatcatgggccttatttgggcatgcaaacaatctcatcagttggcacgagaacgacccatctattgttggtccatgtagcatgatgtgaggcatagataacccatcagcctaagcatgacccaagacgacccttttgtggcccaaccttacttgctccaatctagcctaccatatatacatcaatg

SEQ ID NO: 169844 - DNA, 747 bp, Zea Mays
cattatattttgcgtcgagtttcagatctctttctgacaaccacaagagcatttcggcggtctgtgtaaaacagcgaaagcaccagcattatttgcattgcaaccatgtgtgtatatggtctactcactgcgcgcggcgttctaagtctaacgctgggatagggattaatttgcacttgcgcatcctgctacgcatcttggctttcaggccgtagtagagaagagaggtcacgagggccggagtgtttgttgcccatctgcccatcgtctccttcgcttcctctggccggtcgattagttagttattctgccgctatcatatgctgcctacatacggcgtaacatatttctgcggcttgctgaaacttgcgggcaaaggaactcgggcttccgaacccaatgattagagcgtcaaatccatgacgttttagacgtacgtacgtacgtaccgcgtgctagctcttttttccccttcccctgcctatgacgaatcgttggcaagcataataataaacctagctaatgcgttgaagtcattttgtactgactttttgatgcgagggaggaggtggatttggtaacctataatgcagcgagtgtcaaatatttgttccaacaaatcttcggaaacaatcttttgacacagacgatgatggcaccggatccgatcgctcagtccaattctaggtgccacgtttccggctttcatttttattttctctctctttttgttttagaaaacagcga

SEQ ID NO: 169845 - DNA, 458 bp, Zea Mays
ggatggtatgcgctgtgggcgcaagatttatactagttcggacaaaagatccctacatcgagtgttcgacggcttacgctaccgacaccattgttgatcaatgctcatagtagaggttacaagcgagcgagagatggaggagaggctcccaagtttcttgttgtggaggtggaggagctaagggctacagagtagagtcctaactaagtcttggcttagtagcagggtttcagcctttgggtcctcatcggtgcgacgtccttcctcccgtcgatccgtcgtctttgcgtctgggtgtccgtctaggcattcatgcatgtgtgttctctgttcgtctggggacaacctgtcgttttataaaccaaggagggggtcggccaatgttttaccccggtgaagccacatgcattcgtgagcccctgggtcgcttggttgtcttgtattgtttatagcggatg

SEQ ID NO: 169846 - DNA, 867 bp, Zea Mays
aaatcatatctgcagcgtcttcattaacttccctgtaactttgccaccaagcaagggatcgtcccttcaattgttgcacagccagcagtactttgtctctatcatcagcatggacaacctccaacttcatctctatttcccttagccaatcgtccgcttccattgggttatcagaacctccaaacttgggtggttgtagacgattgaagtctccaatcttgctattattttggggaactactggtctgaagttgccttggttcccctgagtttgagcggtgagagcggttactagcatttctaggatccggttctgctgttgcattacagaagccaggtccacgggtgcgagtgcacgtggaggtgggggtagctatccattttgcaccatatctaggatcacattacgtgcagcttgattcccttggttgacctcatctccacccttctgagcgtggagtccatgaactcagctcgaacggcgggacatctgtggtcaagggtagggatgattaggttacttcccttagtagattattggggtatacttatgtgtatatatatcatctcacacaatgcacataagtgaaagcactcaagcagcacacaagcatttattccacatgcaggcattcacgatacaacaaggtacaatttcgtgtctcgaccttttaagggtcgaccgaaacaacttggctactggttcctatggcacggtcttcagggtctctttcttcagattcacgaggagatgcgggaggtgtgggtggcactgattcagaaatcctcctgcgggggtggtacaaagagtacaaagggattccctccaggggtggtgactcgacagtggtcctgggctggcattcc

SEQ ID NO: 169847 - DNA, 359 bp, Zea Mays
atttacgaacctcgttgggactccctaaatcaatgttggttctaaatccatcacgaaaaccatatttcggccaccgttttgtgttgtcccactgtcccattgactacaaacctatctccagtgtcatgtgttgtcttcatgtcgtcgtcgcgatcttctggtcttccatcgacaacttcgacctaacaagacattatggaagattgttgtgctagctcaattaaaaatagaagatagatcgcgaaaaccatatttcggccaccgttttgtgtcgtcccaccgtcccattgaccacaaatctatctctagtgtcatgtgttgtcttcatgccgtcgccgcgaccttctggtcttccatcg

SEQ ID NO: 169848 - DNA, 292 bp, Zea Mays
caaatgcacaacaaaatacctgaaagtatgagcattgttcgaaaactgtagaagctagatgtatgggttgcaacatttgataacacacaatcacacattcatattcccaaaacactaagatctcacagccgtactattgttgtatactacttgtcttctattcttactttaaaatgtatgtttgccttcatcacgaaacgtgacagtatttgccttaatacagtccacctatccctgttcagtcatctgtcagtctatttgtttaaatggtaacatggttctctcaccggag

SEQ ID NO: 169849 - DNA, 439 bp, Zea Mays
agaatactccacgatcgaagtcctcatttgcttggtcgaagacttcgaaatgcctgcatccctcttgggacaaaacatttgtagccccctcacaagtaacgagagacacgtaggacatgagacccatcacgatagacgagagcgactctagctcatcttgcaaccaccctagaaagcagatccccacctcctcccccgattcgtcaaagggggcggtctgcgcgccaaggtcacagtacacatccacgaaaagtgtgtgtgcctgttcaaccccagcgtgagtggaagactccgtcctttcgcggcggccgtgcatattcttcatctccagctctaggtcggtagtgcgcttgtgggcagctcgagcctttgcgcgggcagcctgagcctccgcacgacctttttccgcatcctccttctcatcagtaagtcggcggcc

SEQ ID NO: 169850 - DNA, 679 bp, Zea Mays
gctggttggagctggggttggctgtggcggtcgtccccatggcagtggcggtgggtcagagcttgggatgatagtggcggtcggggatcgtccccactccccacaggtggcgcgcgggtcggagctgtggaagaagaggggtggcagttgaagaagaagctaggcggtgttgtggtgggcggcgttgtgcgatgcgcctataaggtatggtggctaagcgcagggaacaagggaagggcgaggacgatatggggcgagtgggtgctggggaagggttactggtttagggttttttcattattgggcaagcacaagccgacaagggcactaggttgttgggccttgcctcggccttgggctgatgggccttaccttggccttgcaatgagactgagccgctgaggcatgtccacctgtggtctggagggaggttgggttcaagccgtgaccgtgtggcactggtgagcatgtgactacgtgagtcttcagtttaggtcttttttttgcctaataatgggccttttcgtgcctgcataaacgagcgtgctcatacctgaccgtgggtcacaatcttgacccaagcacagcccgatattgggtcgggccagcccaacccaaaataatttcatgttgtgtcatgcttggatcgtgcttttttcttgttttgtactgacccatc

SEQ ID NO: 169851 - DNA, 394 bp, Zea Mays
gtttaatattgtcggtgtttcgaaccagctccgacaagaaaatttgtttgtgtgcgttccatggtccaaatggtgtgttcggtgggtgtaagatttatactggttccgggagaacacccctacatccattcttcggtggctcacgctattggcacctggttgctcaatgctcgtagttagggttacaagtgggcgagagagaagagctcctaaaaatctcttatgcatggctagatctaaggactacgggtctggtgctctctgctaagccttaagcgtcgtggtggttcgctccttggcctcggcctctgtggtcctctgggtcttctggtctggtcgtccgttcgtgtgtatgcctgtgttcgtatatggctctcctttctcatgttggccg

SEQ ID NO: 169852 - DNA, 993 bp, Zea Mays
tggaagttgggctgtcagacggatgttggcctaaaggttagactaacagtggcattagatcaactttagagctgaattgtgcttgatcgggtggaggtatgagcaagaaccttataacaaaattaaactgatatgatggacaacaactttgttgtgatcggcttgatagattgttgaacgaaagccgaagagaaatgatcctcaaatcgctctgttaggcgcgctgaatggacatcgccatggtacagtacactgaagaagatcctaagtgtcgtgtgctcaccgtcgatgtcctgctgatgtgattcgagctcgcgccacgattagtgctgctgagacgtggatcaatgcgtggtaaaaagatctccgactcggattcgatgatcgaattaccgctctagccacggacaccacgtgtcctcaccgtgaatcatccaccgtcgccgtagccagccaccggacgctccggccgtccacgtagctggttggaggctcgcgtattgaaccaccgtaaagggttcgcggtaagtccgccacgttactggcctgtggacacagttgaggctaacgtggagctccttgggctatcacctccgccgcgagtcagcgatcaaattgcccaccgtcatggtgacttccttcaaattgagcctacgctcagtcccgcatctccgttacgcaccctagccaccctttgtttccgccgttccaccatcgatagccaagaacaccagtttttccccatcggtggtcactagcgtcgccgagcagtgcaaccgcgtggtcagcctttcctaaggttagtcatagttgtttaactcgtgtttcgtggtctatagatcatggtgaagcttatgcgcttgcccgtttgaactctaccgcacaggattaactggaacaccgtcgtgttgttcggtgaacgccactgaaggcagtgtccacgttgaccggccaactcgtagctcctccggacaaacctaggtgagcatcgta

SEQ ID NO: 169853 - DNA, 491 bp, Zea Mays
tagcaaggtaaagtcagtaaaaaagaacgaagttacactaaactcattaatctcacagaataaaggtgaagctacagttctcgcccactctaaagtgtttccttgttggttatgtgccatgtgagtgacagcaaaaaaatatatatatataattatattcgtacacataactagaagccactaaacctagctaccattattggcgaccccgtagtcatgtttttaggtcgttattcccctttttcagagtctgtggcagatgatacgcagacgtatgccacgcgattaaaatattccatcggtggattgcacgaatcattccgtgtaaagacaaaagtcgattgaaatgaccaaaaggcggtcataatcaccatcacgtaccccgctgccgccctcctcgtgcaaatactattatatcttcgcctccgcctccaaaacctcaagcgctacgggcaccagccgcaccactccgctggagatggccaaacggg

SEQ ID NO: 169854 - DNA, 980 bp, Zea Mays
gatttttcaaagcatctttcctaggatatgcgaagttcttcaacgtttttctctaaatgatttgtccattgttcgctaattccttgtttagcttctgcgactgcgcacttctctttagcttcggctagttgcttccgaaggtcttcaatctcaattttttgggcttcagattgggttttgaagttagcttcgtccctctttactttgtccaccaatgtaagcagaattttgtcttttttccaaagcttcgttcctcggcttaataacctctgtttgaaggttattgagagcaatagtgcaactctcgtcttcggcattcttttgcgcccttaaggcgttgctaagtattaagccctacacgaaagaatgaatggatcaatataagaaccaaagactaattcgaaattcataaaattccaaattcacaatatttgtaccttcagactgttgtacgcaaggctatccgcgagatcgtccttcgtcatggcacaaaggccaacttcgagcttcggaaagcccatacttctggccatctcccgacagacagataattctttgttgtctgagaggcaatataagaagtcatcttcgtctgtgccattaaacactaaggccccttttgggtatttcagttctcgggcatagtgtttagcttcaaaaatttcttcttcagataatctttttcccgaagcgtgtcgaataatataatcaaggtcctcggaagacgcttcgggagcaggagcggcagctttttcaggcaaaatctgttctatacactcttcttccgctgccttttctccagtttctgaggatttctccttggcaggcactgaaggcccagcttcagcgtcggcctggctcagtatagcttcggctttggtcagctttgtctcggtttcaatctgtatttttgaagccttggcaatttttcctggagtagagcttgaagtttttatcgtctccagcacatctaatacact

SEQ ID NO: 169855 - DNA, 350 bp, Zea Mays
cggccatagtacatagattcaaccgaagaaaaccccccatcattttcatcacctaaatttcaacggactgaatttggcacaggttttcttgcactccgtcagcctcattgctggctcgacgtagagtcacgagacgccatctcgcgacctagctagcaacttacttaggcatcttgcattcttgcttatcagatgagtctcccatgctactaatcagtaaccaatactggaatgtggccgtcaaagccatacatacacacgaagatgctttgatatacgaatgctgcagtcagccatactgcccccgccaaagtctgaaagcgtaggagccatgtgcgtgcgcgtgattg

SEQ ID NO: 169856 - DNA, 578 bp, Zea Mays
cctgggtgctttaaccacgccaccgtgtgtcaccctagcccatccagtgatcgccggtgagcttgccacggtaaatgccaccaatcgcttgcgccagtgcccccccttctctccgaccgccaccgcacgatcgcgaattcatgggccaccgctcaagggccctataaattgagctcacgctcggctccactatgtaattgtgcactcaacacacccactcgtgcctccaattactcaccagagcccccaaatatatcagttccccgaaatcagttttccgccaccgtgaacaagctctcaccgtggccagtgcacttcaagtccgatcttgtcctctgctctcttgtttcagcactcttacatgcccctgatgctcctcgacccatccaattaagctagaccgcactagatcatcgggaacacttctgttcatccatagttcaccctgtcaccgtggatagtttgagtaagggctcggattgtgcaattgagcgaggggaaacgattattaggtgttgaattaggtgacaaccaagttagagcaccggccattgcttatcttggtcggtacaggttcg

SEQ ID NO: 169857 - DNA, 443 bp, Zea Mays
gtcaaaatgtatcatcctcgaaaacctctacgggaaaaatagatgatacgacataggccttgtgttgatgttgcctcgttaaaaactttgaatgagaaacccaaacaggggaaaaactcatgcaaagaaaagagtacaacatgatgtaaaaacaagtttttccgatcaagaggaaactccccctgatctttgcaaattactaagtcatctcatacctgctctcgaacacatttaaaatgtgaagtaaggtagagacttagttcataacttgtttttcatctaaataacacaaagtatattatcttcatagataataaggtcagtgatataaaatcatgaccaccacataccttcagtatgtagtatatcattctgtacaatcccacgaagtgtacagaagtatgtcattgatcttgtacctggggatcttctatagatatcca

SEQ ID NO: 169858 - DNA, 606 bp, Zea Mays
cagaaaagaaatagaggaataagagaattacataaaatatacctagaagtatattttcagagttagtactttaaatgtgcaaggtagtttgaagacaaatgtgccacagtgtcagatttacatttgaatttgaaaagaagtcaaaataaaataaaagaaagaaaatcaaaaacagagaaaaaaagagaaaagaataaacgagttcggccactgggccgattgtccccaccggcggcccacttcccttctcctccactcccgcatagtccactagcgccattacacttacaggcgagccccactgaccagtccttcaacccatgcgccagaagcttcttcctcccccaacagaatcgcacgcgttcactgtagaccttccccctcgtcgtgcgcttcacccagtcaacagcttgccgtgagctcagcggactccgtcgattccgccgtggatctcggccactcgcgttccctccacgttcagcttctcggccgttgatcagtcatccgcgctggccacgtttctcccgcccttcttccccaaatccgcgccgagctcaactaccgtgcgcaactgattctgcgatgtccgggcgccttcctctcaac

SEQ ID NO: 169859 - DNA, 629 bp, Zea Mays
ccggtcccatttttagaagcgaattaccgaggcctgcacccaagccaccacataccgtgcaaaccctagataacccattcgattgttcgcgtatggcgccagacagtccgaatataacgccggacggtccccgtatttaaccggacggtccggcacagagttttttgaggaggatggatatccaactccgcatccgtcccagctaaactccccatctcaccatacgacacaccaacaccataatataacctacctaacccgtgagagtgagtactttccggtcccagaaggccagaaaggaatggccagtcctatgagcctcataggacatgtattaacgcgccgcaaaacccaaaccaatggggaggaaaacaacataccaacatccaaacaacctcacccatattggaccatagagctgggggtctcccaccggctgccatcaatatagtaagagaggaaatagctggggcgttccgagataagctcggagttagtatagtccctggggagcagtcatatcggaaaccttatgatatccaatttgaccgtctcccatacccacaggggaccagaatacccgaattcgcaaagttttcgggtgaccaaggaaagagcacgcgtgagca

SEQ ID NO: 169860 - DNA, 603 bp, Zea Mays
ctcgagaacacagtttattgtgctgccatctcaaaagggctaatgttagttgttatcatgctaatgtgccagagatgaggtgatatgttggcatgcaaagtcctattttctgcagtaaaagggaggcaatctatgtctgcagtcataaaatgagttcggatgacagctgttgtatttcttcagggggttgaaatgctcagtgcttgactgcttgtgcatccgagcagcaacaacatgcacacaaaataaaccattgtcatagttagagattcagtgggctgctgaaatgggctgtccagacctccagatcaggtcagctccatctcgattgtgtgaaacacataggcagaccagaatctacagctattcctttttgaagcaaaatgtcccctagttgggattcgaaatttacacaccggcaaattcagccacaagcttgatgtgttagaaagggtgacagtgtgcatgcacaaagtcatccaaacatcagcaaattaactttaacaacagataaaacgtacagctgctatggccctaatacctaagcttgggacatgaagagttctttctctgacatcatacccagcatcatgcaccagcagt

SEQ ID NO: 169861 - DNA, 746 bp, Zea Mays
gtttcaactcttgatgttcttgaatccgctgttgcggcggaaaaaagtgctatgcattcttacaaacaggcaagtgcagctgtcgattgtgctaaggagacagtggccaagtattctgaggtttgtattctgaaacttatactgagccaggcaattattgagattgtatagccctgtgattgaattgtgaacttgaggaaatgtgaagtgagttaatccttgttgcttagccctgtgatgatttctttgaaaatactgaactgtatactacactttttttgatgcgatgaaatttgtgagggctttggctgttatcagcctgttagacctgaggcttgaggtaatttgagattatgaggtggcttagccctgtgatgaattctttgaaaatactgaacatgtatactacacttcttgtttttatgcgacgaaaattgtgagggctatggctgtttcattgaaaaattggacctgaggcttgtggtaatttgagattataaggtttcttagccctgtgatgttttctttgaaaaaagtgaactgtatactacccttgttctttttatgctaaaaaattactgagggctttggctgtttcagcctgtttgatgatgttccattgattactgagggctttggctgtttcagtttgtttcatgatgtgccatgtttgcaaaattctccagttcagttattcatatggctgttttcagtctgtttgatggtattgtttggtgaccttgaac

SEQ ID NO: 169862 - DNA, 372 bp, Zea Mays
gctaactatgcatttgagccaacgattgttcagcgccggatgaatttaatggtgagaatagtcttttaatatgttaaaaatttgaagagtcgaagtgtgcatgttttctttgcctactaatcattgcatgttttgtagactcctccaccgctttgtgattttgagcagtggattgacacagaaatctcacagaaagacaagaagtggttggagaatcttaaaaagtgggatggataggacaaagagaggatggagaaaagacgagaggagcttgctgccgagcaacaacgggaagacgagcaggaaatgaggcgtgttgctgaatgcagggaagagaaggagaagaaacttgagcgtgcatgtcgtgcaaag

SEQ ID NO: 169863 - DNA, 324 bp, Zea Mays
ctataaggtctggtatctccacggggagacacgtcttgaatgagagacgcatgtagaagttgatgacggtgaagatggtgataggatggaccagatgcttgaggatctatagcctgaattggccctagatcatcatgattcacctacactagaggtttagaagttcttcgacatcctcaaagtgtcagaagagcctcttcacgagcacactgatatgaccattctcgaattcatgacctggctgatgtcaatcaagtccatgtttgcattctcaatcaattgttacaaggaactcaaggatttgattagcgaggttcttcaaac

SEQ ID NO: 169864 - DNA, 518 bp, Zea Mays
caacttttctatagcacatatctacagaaaacataatttagttcaccaaacatacagcacggggaaatcactgcgtgcagtccaaaacaacaactaataattttcagctcctatataattcaagaattgccgcgttttagagacttgaattattctaacactttaccattcgttagggttaaattaattaaatgaggactaacaagtagacttactaatctttatacaagttatttcgtgcgctaaaactattatacacaattaatcaacacattcaccacaatcatcaaatccggcatatatgtatattgaagcgcttttcacccactagtgcgcattttaacttagacaccacatgagcactactaatttttgcccacgaccataaccgtacgcatttagactaaaacaagcaattcatcgtgaccacgaacttaacccaaaaccatctaacaagactgctaacccattattatagcactccgagacacaatatgtatatagcaatcacttatcgc

SEQ ID NO: 169865 - DNA, 549 bp, Zea Mays
ttgcctccacgtcagccgcggtctttcctagtcatcgctagctagtctgtgtgtgctgtgttgtcgtaaggggtcgtcgtaggcctttaaaaaggaggagagtacgtccagcgcacgaggccgtcttctcttcccaaacccatcccgccgttctcttcctgcttcgttcttctctccacccgtcgctcctccctcctctcggcgagggagacccccctctcttcacagcgtggattattccattcttcgtctgccggtaagtcacccgcactactaccgcgtgctcggatggccggattcccatgtcgggcctgttggcccttgcttccaggcattgcattggttttgttcttctcatctgaaccaaattcctgaccccttccactgtttctatataccaagtttgccgtggcgcgtcatcgatggcttgactctgatcgtcgtcggcggtgttgctgttttccagagctccaagatcgacaccgacagcatagcacctcctggtacaatacaagtcgtctcctccctctctctctctctctctctctc

SEQ ID NO: 169866 - DNA, 394 bp, Zea Mays
gtcacactatctctcaggcaggtatagctgttgatcctgataaagtgcaggaggtgatgaactggaagccacccacgactatccgtcagattcggagttttctgggattagccggttattaccgaagattcatttcggatttctctcaaattgcgaagcccataactaagatgttgaagaaagaagccaagtttgtttggggtcagaagtgcgaagatgccttccatgcactgaggcaacacctgaccacgtcaccagtattagcacaacccgacagcagcaagccttttgatgtgtattgtgatgcctctggcactggactaggttgtgtcttgatgcaatacaaccgagtcattgattatgcctcaagagcactcaggcctcatgagcagaa

SEQ ID NO: 169867 - DNA, 536 bp, Zea Mays
gcggtgagggttatccgagcgaccgacgagctggggggaagtacagcatgcttagccgcaaccgagcttgagtggatcagacgtcgagatctttactgggttgtgcttatccatggccatggcgcacgaatcacggcaagcaatcgatcaacggcgacgggccaccggcgacgagatctttttggcgctggcggtctgatcctcccgatagcactgtaccatggaggagttcagttaaatgaacctaacagccaaatttgaagccaagttttctctcgatttccgatgataactcataccaagctctgcagcaaagttgtagagcaatatgccatctacaatattgccatatgatgttgccccaaaaagccactgcatctggtttgaaattgggcttgaagttcagggcatccacctgtcagtctgattttcagacctagtcagcctgacagcctgactttaggcttaattatctctggatttttcttaacaactgagctcacaaccttaaacaaagttgttctcctatgattgag

SEQ ID NO: 169868 - DNA, 574 bp, Zea Mays
aacgctttgacaagcgagttgttttcattcaacatatcgagcagtgacgacaccatttcagggtctggctggccagcagcaccatcatcggtctcaaaaatgcctagcctattctgggtctcatgctccgtgtcatatgtgtacagttgggcaaattttggttgtgtcccacgctgtggaagtagggtgccaatcctatggtgcaccaccccattaattttgaaaacataaggtgtagtgtcgttatttatcgttttgtcgatagctgcaccgaaagaggtgaatgcaaacaatgaattgtacggccggataagcctcaagaaacgcctcgagcgagtacctccatcaaatttcaaaagatcagcaagcaaaggcggcggacgttcaaatggttttaggttcaccttccctcctttgcagcaaaggttgtacacaattttcctctaggtggagaaggaatcgtttttgacacgctcttggaaccagaaaacaacatggcaatatgggcatatgtgttcaggtccaccgtagtatgacctctcagggtaggcatctacataggaagaagagaaag

SEQ ID NO: 169869 - DNA, 776 bp, Zea Mays
tgaagattgagatgggaaaactataactagacctacactacatcagctcctaaggcataacaatggtaaataagataattgaattggttcgattggactgtgttggcggttctcaattggtcatacccctttatatttctaaggggtctggacccgttcctggacgagatctaacagattcctgtggataggttaggataaccatgcatgtgataagtactcccacccgagttaatctgatcacggaacgtccgagccacatggcaaaaccgtccagctgtgcccaggtgccaaatatggtgcccaatacatgctctctagcttttttgtggagcttggtgaaccaaaagaacctagtaataccagccactttcgggaaacaactgattccgcaacttcccctgttcccgaaatatgaactctagcccgatgcaagtcactgactcttgtgatcagacaatatacctatttgatagaactctaacacacaaaggtcatttaggattgcatcctcttcaataatggctacctgatcaacgtatcaaaaaggtaaaaattgtggtccccacaccccaaataagcaaacggattgggcaagcaatacaaattcatcgccatactattccgcacttgagtaggacaacacatcggtgatgagtagactggaaagtaccatgacatccctagaggtagatgagcaggcgacattgttgcaccactttttggggcggtttagtcggctttgcctttgcacagatcgcctctttgactttgat

SEQ ID NO: 169870 - DNA, 804 bp, Zea Mays
tgccaaggcacattcagaggaacagagcaccaagtcggaagccggaggagaagaaaggggccgccgtgcacgcaggccgaatcccagggttgtgggccgcgactggattaattaatgggccggaggccatgtaatgagatacttaaacagcttgtccgctgagaggaaggtcgtcgagaatgatgaaccctaattctactgttcttcttctcctccatctcaccttctctagttcctgagacttgtggcggctattctgttgtctggattgttaacaattggtatcggagacaccggtctctgggctggagaaatcctacttcacgcgccgcgccaagcatttgggagccatggagccgaacctcaagctcgccatcgacgagcagtccaagctactccgcgacatcagcgagcgcctagcggcgcaggatgcgcgctggcggtcgttggacgcgtcggtcactcggaacgctgcgtcgatccagcaattggagacgaccgtgtccaattccgtggctgctaccctgcggacggagatcgattcccacgtcgccgcgaccgtcgagcggctcgatgcggtggaggcggcggccgtgtcccgggtgggggcgttggagtccgccactgcggcgttcgattcctggcgcccatacatggaagcgtcggtggacgacctcaagtacaccatgaatctggtgcggcaagacctcgccaagcaacgcgctccaccacctccgtccccgacaccttcgttcctccacgcgaccggcgtgctgggttcctacccgtcgcccggggcaccgc

SEQ ID NO: 169871 - DNA, 581 bp, Zea Mays
gtccaaccggtgtcgtgttacgcgaaacgatgccaattgcctaactcattttcaggcggcttgaattgcttattgaattcttgcgactgttcggcgagcggggtaggaagtggacggtcacccctcggcctctttaaatagcacgctggccctggctattttctttactcgtccttgatcacttgctctcttattcttcgtcacttgtccacttttcgcacgaccatgggcaggggcaagaagggcaagggacgacctcgccgtgccgacggcaagcacaagcgtcctccaagtccgccctcggaggattttggtgactcgaagtactcggaggaagcttcctccaagtatgatcggtcgcttgctcccgcatccccatggcgtcgtccaaggactcggacgactccatggggctgtccaccgcggcccgagcgtactggcgctccatcgagcgtcccgggctcggtgggtcggacgactcggaggagacctcctcggaggaggtggaggactcctccgactccgaggagtggagcggcggtgaggatgatggcgacgaggacgacagcaagggcggcaac

SEQ ID NO: 169872 - DNA, 949 bp, Zea Mays
gtaggaaaaaagatgataagggcagcaagaaggccaagggcgagaagaggaagcgtctccgactccctcgtcggaggacttcagtgactcagagttctccagtgaggggactcctccgctttcctctaggtccccatcatttgtctgcacggatgactcgatggggttgtccctgtgggagagggcgtacctccatggtctcaagcacgccggtctcgatgacttggaggaggatggggacgacgacaggtacgaaggcggtgatgaaggcggcgtgaccgacaaggatggcggtgacggcgacagcggcgacgtcaacagcagcaggggcagcaacaggggagatggggacgacaggaatggcggtggcaaaggcgctaggagttgcggtggcggtggggtgaaaggcggcgatggcgacagtgatgccggtggcgaggcaccactgacttaagaagtagtagatgtagtgtaggggtagcagtaggggtggggatattttgcaagaatcagttcataatgatctgattctgtccatgtaatgacacccctatatataataaagttgccaccttccacctttgcgtactgagttctttccttttccctgtatcccactttgtgtttgacgtctgatggctagtatcaagctctttattttgcttaattttctgtatcattcatcttagttttgatgagtgacttatgtcgtccgacttatacaccaagatgagttctctatctgactcaacctgtccgacttaacttgtctgacttatcacctttatttttgattctgagggatcatttccctttgcaccgaggcagtgataggtcggcgttactcgtatatatgtgcttactgtctgacgattcttggcagaaaaccctagtgttgtttccatcataacaaccttcttgaaaattctcctgctctgacgactccgcg

SEQ ID NO: 169873 - DNA, 478 bp, Zea Mays
cttggccaccctcagcctcctcttgtgttctggatttttctaaagtccttgctagggtggaaattgcccttcgtcgtgctctgttcgtctctgtggctggtacacatcctgggtttctggttctgacgtgttgaaggaggtgaggcattgttttggtgttaagttggaggacatgaggattcatcagacctaccctgaagacttcctgttgtttctaccggatgaagacacaacaaccaaggttctcaacgaaggaagacctctgaggggacccgtttcagtttgatgctcaaaagatggtccagatttgctcatgcatcctcatcgtcgatggctgagttggttgatgttaaattaataggcattcctcaacatgcctggtgtagatctacagctaaacagttgcgtagggactcatgttgggttgaagcattacattcagaagctatggaaatgagggattttcagccttgatggt

SEQ ID NO: 169874 - DNA, 535 bp, Zea Mays
caaaagtctagcccccttgaatccaaattgttaaacatcatcttgggatcatcatttcatgtagccatcattcaatgtaactagtatttcatattcaaatcatattactttaattcaaacacttgcaataactacccatatgcaatttaacccaataggtatcaaggcacaagataaacaatatctaggatgtccttaaggtaacaaattagacacatgcaatatgaattatgatggttaaaagtgaataggtaacaaggatagtcccatgttatacttgcctttgacttgagatccttcttctatagatgacaaccttcaaatactcgattcttgatcaccacataattctcatcgacttgacacgatcataaaataccacacaagcataccagacaagcacatgcatagcatacacatattcatctaaattagaatagtacaacaatcaatgaaaacacaagatgaaaagatcataaaactaatctacgcatcactacgatcacgtggataggtcgttcactcaaaacggagc

SEQ ID NO: 169875 - DNA, 772 bp, Zea Mays
caacgggtagcactgcctccgaaccatagaccataaagaaaggaatgtttccatgcagagctctgctaggttgagttctcaggctccagacaacatacgacagctctctgatccacgttcctgtgaacttttcattcttgttgaagacttcctttctgagcgcttccaatatcatcccgttggctctttctacttgcccgttggctcttgggtgcgccatcgaggcatatttaatctgaatgcttttttgttcgcagaaatcgaagaactctgagcttgtgaaattggatcccagatcagttatgatactattcggtatcccgaacctggatattatgtcttgtacgaattccactgccttagctgaagttagagaagcaaagggtttgaactctatccatttagtgaatttgtcgatagcaaccagtacatgagtgtatcctccttgagctttcttgaagggtccaatcatatccagtccccagcacgcgaatggccaggttacatgtatggtttgtagttgttgtgctggtagatgttgctgttttgataagtactgacaggcttcgcacctctggactaactcggctgcatcactcttcctcgtcggccagtagaaaccagacctaaagaccttcccaactagagtccttgatgctgcgtgtatcccgcattgcccagcatggacctcttctagcagttgcttccctgtagccgaaagaatgcatttcatgaggactcttgatgcgccccttctatatagtgtttcccc

SEQ ID NO: 169876 - DNA, 928 bp, Zea Mays
gtggacggttaggaagtgcagcccctagaatgagatcaatttgatgctcaatcccacgaattggaggtagtccagtcagtgtttcttgtggaaacacatcttcaaagtcctgcaaaagatcagccacaacactaggaagagatgttatgtcgttaggagaaatcaaaacatatttgctcacaagtacaaagagcacttgatatgggttgttcctcacatctctatgctcagattttgtggctagcataactagatgttctccctcttctttctttttatcttttgaatttggcttgtagcactcactcattgaattgtggatggcacttaatttcttttgctcttctcctcctctacttgctgcactaattccagttttcttttgtaagtgttcagccatgatttgttgaggggtcataggcttgagtacatactttctcccattcagatctagtgtgtactgatttgttattccataatgctgaaaataacagtcatattgccaaggtcttcccagcagcaagtgacacacagacatgggtgcaacattgcaatccactatgtcaacatactctccaatcttgaatgaaactttcaccttataaccaatcttgatatctcctgattcattcaaccattggacatgatatgaatgagggtgtcgccgcaacttcagaccaagcttttcaaccttctcacgacctacaagattatgatagcttcctccatcaataatcacctttagtactttgtcttgcacttttgctctcgtttgaaaaagattatgtcgctgtccaatttcagcttctttcatttgaacactcaatatttgtgtaaccacaagagcggtaccatgctcaaattcacatcccatatgttcttcaaagttatcaatgtcatctacatttcctgcttcagcttcctcttc

SEQ ID NO: 169877 - DNA, 515 bp, Zea Mays
acaaattggcaggaaccgtagcggcggctatggagcacaggggcacaaacctccctggtataagcaataggtaagcgccagctgatgaaacaaggaggggctgcaatgcaaggcggcttgcaacctaatctagggctagcgtggcgagagttcacacaaggcggctagcgagggcaaatcgagtaatgtggtgtctcgacttgtaatctgggaaaggtggatgggatagcggtggaaacaaataacagcgacggagcggttgaactacgatgacgacacgacctaaaccaacaacaagactcgaacacggacacaaactcaacaaagcaatctgaaacgaaattgcaaggctaaacagggttctaggacaacggaatttttttgtatggcaattttctggagttataggaagaaaaacataaactaaactagggtaatcctgacggtaatacctgagtctttgaataccacttgataggaacgggggtgcccgatcttccgtcaggtgaaggtaa

SEQ ID NO: 169878 - DNA, 465 bp, Zea Mays
gtgaaagtaatagcgatcgtaacagttggtattcggagccgtgctggagcaccaccacgactaccggacgaggctgcaattgaaggccgaagctatggcaccggcgaagagtgatgatctggtgacgtagttgttggcgaaaattgaggaagggaacaaagagacacatccgagaatggaggtgacgcagacggcgattggcaacatggaatccacggtgaagagcgtgatgggggaacaagtggagttccagaggtggcgacccgaagtggagaccagggtgacagagatcgccgaggcgctccaagccatccagccaaggtgaatgaagtggcgcagagatctgtatctgcttcatcgaaggcagaaattaaggcgacgaatggtgcgtcgggtttcgcacatctggaaccaccttctacggagacgatgcacgggcataatcgccaccactcgtcagaccct

SEQ ID NO: 169879 - DNA, 537 bp, Zea Mays
agcctccgcgccgcggcgccgcggcccccggcggtgaggacggacgacgaggtggagcagcagcacacctccatagctaccgcaccagcaacgacacacaaaaaaagaaacaagaaaaattaaggaactaccttaaccctcccctgtcctaggaacgaatcaaatgcttatatgcttgcttaggcagcggttagtcacgctctcgctacgcgtcgcacgccaacagctatctagtctatctatctgcttggagttggaggcgtggcgtggcgtggcgtggcgagtggatgagtaggcgaggaggagacgggggagagcggtataaaaataccgcgcggcggaggcgggggcggaggcggggaggacggaacggaaggaaggggaaggaagcacgcaaggaaggagggacacgagtccggaatggcagttcggccggcgggtgcgcgcgcgtgggggcgagcgaaacgaaagaaagggatcggtggtgcccactgctcagcctcggtgtcctccgtttctaccgcgcgtcggccgtgc

SEQ ID NO: 169880 - DNA, 623 bp, Zea Mays
tggtgttcagaaggttagaagaggtgattaacaactcattcttctcctctctctctccctctataaaatggtgggtgcttggccttgggagcttacttggccattcttttaagtgaatatatcccattagagctaaagcaaacctctatcactccttcctggctaggattaactttgagtgagattgagaggcctttagtgcattgcattgagagttgcatcttatagcataatagttgttgtggcttggaattatgttgttacattagtgattgccatcatctagatagcttgaaacttgtgggatcatcaagcaccataaggttattgtgtggttactccgattgaagggttatggggggctctatgctcattcccttgggaggctcgcaaagtgttatttcagtggaatcatctaggctcgggaaagtttcttatgatccactagttccactctagtgcccatgttgttgggccaaggttgtgtgctcgttgtgatctaatagaatccgcttcaataggaaataagttgtcgagcaaccgaactttcagataaattattgtatcatttgcccgcacttgtttgatctccctacacctatgcttacaattctatatttcta

SEQ ID NO: 169881 - DNA, 496 bp, Zea Mays
gaagatcacaaagagaagcaaccaagacctcaatatcttcaggagagggttgcactctaagacccagaccactatcaccagcaggaggattggacacgaaactgaaaaaggacttaggaggtggcagattccaagcagagtaggcaacaggagcaccaacatttgatactttgtctctcaagatcatgtctagccggctcaccaaatcctcagcaggaattctcctattagtaacccgagtcgagttggtaacaccactgtacaagtaagctgggtatgctttgtccttcaagggctggatattcttaaaaacaaaatcagcgaccatagccttgacagtcagacctctctccttcagcagacagatttcagcaagcagaaccctagcttctgttacttccaaggcagtaggagattcaatccaactcggagtgcgcacacctggctgtctccccgaccgagggggagggacttgccgtggttttcgacaataaac

SEQ ID NO: 169882 - DNA, 400 bp, Zea Mays
cgcgggcatttccctgccggggtgctcggctcactgggtgaacggaagaaaggagaaagcacctgtgtcgttgatctcaggatgaacggcccagggtcagatagggttagggccgtgggatggttgttgtgcggcccagatcaaccttatagttattgaatcacaggaacggatcgtgtccgtagatccgtggatgtgcgcttgggatcttgtgtagacgtggcttgatctcggacgatgatcccggatccatgggcctgggttgcgtacaggtataggcgctggcagatctaatcgtggacgtaggtcttaatccaacggctgatcgcggccgataccccttcggcctggcatatttacgcatgaaaccctctggtcctaagaaaataacccgccgtcc

SEQ ID NO: 169883 - DNA, 1235 bp, Zea Mays
ccttttcccgaagaggttgaggctttggttgcttcacttggtgaaatccccgacgacgagaggcaggttcatttcgaggtgcctttgaatccgagtgatgcagaaataaatgcaatgctggacatgttggctgaagattcatctgatgcaacctctgctaaaacactggctgtagcacccatacccgagtctggcaaagctgtggatattcaaaggtctgatagtattcgtctgaagtgtcctcgccgaactaatcatccaacctctcctgctgaggggaagaaaaataaaaagagacgtcttcgtcgagtgtcatgcttgaatcaggatgccgacccttctgctcctgctgctgaggaagtgccagtgccagtttttgctgaagttgaccccaatgggtgtgacccgactgatgctgaacccaatgggtgtgaccttgatgatgttgatcccaatgggtgtaatccggccaaagttgatcccaatggctgtaccgttcgtattattgatgaagatgaggaagaggaagaggaaattcccttggttcggaagaacagccggcgctacatagccagcggggagagtagtggtgttccttctccagctttgtctgctctcattggtctgcaagaattgtctctggcaaactttgatcagactctcgaagacatggtcccagaagatctgttgtcagagccggcagatggtggaatgatggaagtttgtgctaacgtgtctgatgccaggttagaattatcccgagcagcatctcgtgccttgtcgaccttggagcgcggtcttaagagtcgagaggctgatctagattgctccgttcccatggaagttgttgaaggtccttcagccttagaggtggctgccacaaagagctcggtcctcaacaatggtgctagcgtttgcccagcccccgagggtgttgccggagatgatccggctcggatgggtagcgcgagctatgacccagcccccgagggtgtccgagtgggttctccctctcatacttccatagatgttcatgtagggtcttctcctccgcattctggttgcatggcagcagcacgagcttcgggtcaggaagtcgccttagaggccagcgctcccgatgacagagttttgatttctgctgatgacgccgaattggtccccactgatgtattgcagattgctccggttggtgatccttcatcgagctatcaactaacttcccatgatttggg

SEQ ID NO: 169884 - DNA, 559 bp, Zea Mays
caatctcaaaaacttcagcatcatacttcacattttccaccttcacgtgcaatagcattctattaaaaccttaacaacatttcatgatactatgatagactatctcaaataaaattactcatctcacctcctatgtcaagcttcaatctataaagttatggtcagcaagtcgtgcaaaacattgtaagctgctggagatagcctaaacagtatagtatgcagtgcaaaactgtgttttgcacggccatatgcatattgctataggctaagagcactaaatcaatcaattagcaagaaagggcaaaaatacaacatgtacaaagaacggcgataggctacactgaacttaggtattatgcaatacagctggtgtctgctaactctaatgttgacatatttgtaaaacgccccttgtatcttacaccaaattgtatatttcatctgactaatgttttttccgcagacgggactcagttcccattaacactaatgggagttaaagcaccactacaagtaatattagtgattctgtcaatgtccaatataatgcatgtcaaat

SEQ ID NO: 169885 - DNA, 762 bp, Zea Mays
ctagtccttacggctctttaaagagttggatggttggacagagatgtcttcagcgtcctttggattgtacctaccttaatggatgcactcctagccaggcacgtgtgccggacacttagggtgccataattgtgttagccctgcatagaggttcaaggggcatttcagatcgtggtgctagaaagtcttatatggctagtatgacctatgtttgttttagctcagagcgactggggttcgagtaagcctagtctaagtgactaggttggctcttgctttctttgatctatggttgggagtcgactttgttgggataaccaggtcgaggtttgcttgggacaacaaaggttagggttgacctggttggtgtgactataggtcatgattgctatggttggggctgattcaattgggatgaccggatcaggggcgacctagttgggatgaccagttcgaggctattcgagatgatctgggttggtcccaacttggttggtgtgactatagccatgtccactcggagcgaccgaggttagtgccgcctggtcggagtgaataggtcagggtcaacctggtcgggatgattaggtcagggccgacttggtcgggatgaccaggtcatgcctcacctagttagagttgattaggccatctttggtctaaatcgagttttgtccattgtgctcttatcttagagtgagctcttggtctatcttgagctaccctcgatatgggtacacaactcatagctttcaatatgca

SEQ ID NO: 169886 - DNA, 363 bp, Zea Mays
acatcctttgcctttgccctggagatcgccatgtcagctactttaacatcttcatacgcctctagtctcgaactcctcctcactcctctgcctgctacccgtttttttgccttttgctacctggaagccatcatttaaaccaccctcatccttttgaacattctcactcccctgagaatcttacatcaggcctcccacttttttagcaaaatcatcatctgcctcttgagaactaagcaaatcatcctcattatcatcatagttaactctgtcaccatcctcctcattctccaaaggatctatctccatgttttcctctagtattttcccagtaaatccacttaatgtcttgcaggatttttc

SEQ ID NO: 169887 - DNA, 399 bp, Zea Mays
ccaccctggagtttacgtgggtgcagtgggaggaaaggtcatcgtagtggttatcgagagtgtggagatatccggccatgtagacgatggtggggtcatcctcggtaggatctctccctgacagggcctgaagtcttttcctctaggtgggggtatttttgttgctaggtgggaagtaacgaaggggggtttcaaaaacctctttgctgtagttttggcatagctgttggagggcttttcgggcaacattttggcaagtgtctgggaagtggtgtccagtgaaggtgacttggaaaggagggtggtttggataacttcggctttctcctaggtagactgccatagagcacttctcaactccgttttcgcggtattccttccagacataatccggcttct

SEQ ID NO: 169888 - DNA, 558 bp, Zea Mays
cactattattagaaagtgtaggggtctgactcagtaaacaccccgaggggacggcgggttgattagtggattctacaggggctcttttacaaaatcaaacgacgaagggggatcagatagtactggtcgtccgatcagaaatctagggctcaaattagatcacgtgttatatgaaccggtattgaataacggccactggatcaagatccgagggcccgagttcaatgaagccgaaatcaatctcctcccatcgatgagcgatcaacggtccatgatgctcgatgccaagaagccgcccagatataatcgtgtgcgtacactgtggatccaacggcccaggcctgtcttcctcccccagcgcggcccgacggtggcgccacccacctaggcggtggtgagctcgccggcgcgagtgaatccggtgcccaagttacaatccccggccccgcgacttctacgcgatgtccaaacccacccgaacgcactggtctaacaatcaccggaatccgcgcaacaccggcgcacacccacggcgagcagcaggagcacaaatccggc

SEQ ID NO: 169889 - DNA, 380 bp, Zea Mays
aggtgcctaaggtgcaaccatctggagcagacggtggtcccgtcaagacatctaggtcggcgtggattcctcccagaccactcgcatcgtgggcaatctggaggagaaataggaaatcgcgctcgtcgccttcctccaggcaaatgcggacgtattcgcatgggaaccgtcgcagatgcctaggatccccagggaggtgatcgagcaccatctgaagatccaccctgacgccaaaccggtgagtcagaagcctcggagacagtccattgagcgacatgatttcatccatgaggaggtccggaagctgatgcgcgctggcttcatcgaagaggtccattacccaatatggctggccaatctagtcattgttcccaaggcta

SEQ ID NO: 169890 - DNA, 941 bp, Zea Mays
agcggtcacctcgacgccagtcttggcccttccggacttaacaaagccgttcgtggtggaatgcgacgcctccacacacggctttggcgcagtgctcatccaggaggcacatcccattgctttcttcagcagaccggtggcaccacgacatcggttgcttgcggcctatgagcgagagctaataggactggtccacgccgtccgccattggaggacatacctcggggccagcgcttcacagttcggatggaccactatagcctgaaattcctcttcgatcagcgcctcgccaccatcccacaacaccactgggtgggaaagctgctcggcttcgacttcggcgttgaatataagctggggtcccagaacaccgtggtggacgccttatctcgcagagagacgctggaggagggggttgtcctagccgtctcggcaccgcgattcgactacatcacacgtctgaggcacgagcaggaggctgaccccgccctgatggccctctgggacgagttcgcggccatcacccgcggcgaaccctgggccatcatcgacaacctgctcacctacaacggcatgctctacgtccctccgtcatcacttgtcctccaggagatcctagccgccgtacatggtgacggccacaaaggcgtacaacgcaccctccaccgcctccggcatgacttccacttccccgacatgcgccgcatcgtccaggacttcgttcgctcctactccacctgtcaacgatgcaagaccgagcacctccacccgggcggcctcctgctgccgctaccaattccgttgggtgtctggacagacatcggcatggacttcatcgaggcactaccgtgtgttcgcgggaaatccgtcatcctcaatgtggtggatcacttcagcaagtattgtcatttcattgccttagctaacccatacactgctga

SEQ ID NO: 169891 - DNA, 1537 bp, Zea Mays
acctcggacgaaacacccaggtagacgctgagaagctacgaccccggtaagagcccttgaccaacatctcacaaataaaaccatcgcatgtgcgaacccttattaaacgaggaaaggggaattgagatatactcgtgcgaccttccgttgtgaaggcggatactagtacacccgaccagccatgcctccattgtttttcgctcctccttcttccgtaacagcccaaacacagaaaaagtatcgccataaggcgagattgagctcgacacctaggtaccccttgcacagggcgatgaaagcagcaatgtgttgaatcccattcggattcagtttatgaagctacacctgcaaatacttgaagaaggtcataatgaaaaggttaagggggaaggcaagacctcgctcatggaaacgaacaaacaaaaccacataactgtgaggcagggttgggccacctcgacacccagaatcagccagccaccatcagaagcagacctcaccagacgagggcccaaaggttctcctggcttgtcaaggattggcgccaatccgccgtagcgagcgcaacggacaacccgagtatgagaagcatgggccgagtgaggaagacgaggaacaagggaaccgaaagcaaggtgggaaagacacggagagtggaacaattaaataaaatctgccctgtgacaccttgctgcttagtgccagcggaggcgatccacctaacgagggggggcaggcctgacccaccaacgtgttagaccactggttgcacccaccacctctcaggcagaggcaagttgtttcttcatgcacaataaaatgggaaacacaagagtgaaagccatgcattaggaaggggttttcctcgaatttcatcgtcctttacataaaggaaccctgagtcttctgtcgccataattctaggctcggggctaggcgcaggaccaaacatccaaaagagaagagggaagacctatgattgaggcaatattggaagctcactattcccttcctatcatagtgcttggcatgactatgagggcaaaagcgcacgtcaggaaaccaaaagatggccaccagaagagggccctaaggagcccatcatatcaagtcctctgaggacacaacgtcggtggctttgtcgtatccctagatcaagttctcgaaggccatggacaaagcttcctgaggaagtgtcgctggagcatgaagatcaacaccagtgtggagctgggcgatgacaaaagcgacgatggtcccatggtgaataatgtcgtggtccatgacattctagacatggctggagatgtcaagcaagcgctgcagacgggtcacaccacgggtgtggatactttagtcactatgtcgatctcccgacgaagccccgctagcttagcttcccgccctactcagaaataaaagaatggaggtctgaacatccctaggaaacaaggagagctaaagagcatggtgagaagcttactcaatgcacgagcctccatggtggttaaccgagcttggaggcccacgatacgag

SEQ ID NO: 169892 - DNA, 828 bp, Zea Mays
ctcacacggttgccgtctgactacaattgggccaactgggccaattgtgtctttgccaacgggtaatattggaggatgttctcatcaaaggcccccaacattagtattcaagagttttatgaaggctggacttcgttttcccttgcataagatgctggtcgaagtgttgaagacatttgagatataccttcatcaacttactcctgaagctttgattaaagttggagttttcatttgggctacgagaagccaagggatggagccggatgccaaatgttttgcaatattcacgaattatcttactagacgaaggcagttgggaaagagcaatatcataataacttcggatgctagagctttgtgtaccggtctgatgtgaggtgtcctatgccaacgttccaaaaaaatggccgggctcatggatgaagcaatggttttatatatgtgaaaaatgatttgagtgagagagagaggatgtgaagggcgtaatccaacgcccatccgttcacgcttcggcatatggaggccttcgatcgcaagtggaaacgaagtacaagcatgcttgatggccatcaacaaagtgtgcacttacatcggcaccagagatttggttcaggagcatattgcttataaggtatgaccgcttgttaatgactgggagatgcggaaggaaactgctgccggctccaacgaaggtggcctggttaatctgaggtacacctatcgctgcagaagtcagattgacgagctgaatgatgactggcttgaagcttttgaggcaaccagtgatgagctactaggggcttacacgaaggtagaggacgaagc

SEQ ID NO: 169893 - DNA, 366 bp, Zea Mays
atcattatctggtacattttatagtccttagccttaaagtggtaaccacttcctaactgattttaatctaatctaatctaatacctatcgaagatacatagcgtgtaaggcctatccttttacatagatcgaattgctcctactatctgcaccgatcggttagaaacagttgctccaatccagttaggatttggtgctaacacgttccccctagtttcgctaaaatatttttataccaaagctaaaccttttgccttggaaaattttcatcacgtgtcagcggtcaagcatactttagtggcagttgattctgcattacgctaactctcctcacatcccgtgccttagcacttccacttccaaacc

SEQ ID NO: 169894 - DNA, 344 bp, Zea Mays
ttctccctaagaaagttgttgccttgtctgcaagagattttagaccaattagcttaattcatagttttgctaagttggtcaccaaaatgcttgctaatagattgggcccctaccttcaagagttggtggcatctaatcagagcgcctttgtgagaggcagatcgattcatgacaacttcatgttggtgcaacattcaattaagtctctccacaagaagagagtctctagtttgttcttgaagttggatatctccaaagcatttgattcggtctcttgggccttcttgattgaagtgctttcacatcttggttttggtcctgtgtggcgaaatatgatctcaaat

SEQ ID NO: 169895 - DNA, 908 bp, Zea Mays
caaactagcagaatggcagttctgtaaatagcgcagatttttcagcactagtagaaatcaaaggcacgtttccaaaggagtaccagcaaacgagctagaaatattctgaacttttttatcactaatccaaaatcacaattgatggaagcacacaaaatttcacttgaaacagagttgtattgtggcctagagaaattcacaaaggatctctaaaattcctgaaaacacttaaacaattttttaaattatcttcccgatttttttgaatttttcgaccgaaccaaacaggccgtaggcgagtttgggtcaccccagaatggagtcaggaatctgctgtaaaaatttgagctcaaacggagcaccgagcgaaaagttatgcccgttttatggaaggtacctcaagttatggttttccagggcacaaattggtaggaaccgtagcggcggctatagaacacaggggcacaaacctcccaggtataagaaataggtaagcaccagatgatgaaacaaggagggctgcaatgcaatgcggcttgcaacctaatctagggctagcgtggcgagaattcacacaaggcggctagcgaggcaaatcgagtaatgtggtgtctcgacttgtaatctgggtaaggtggatgggatagcggcggaaacaaataacagcgatggagcggttgaactacgatgacgacacgacctaaaccagcaacaagactcgacacggacacaaactcaacaaagcaatctgaaatgaaattgcaaggctaaacaagggttctaggacagcggaatatattttttctatggcaattatctggagttataggatgaaaaacctaaactaaactagggtaagcctgacggtaatacctgagtctttgaataccacttgataggaacgaggg

SEQ ID NO: 169896 - DNA, 640 bp, Zea Mays
gagcacgtgagtataccctccttgagcctttttgaacgacccgatcatatccagcccccagcacgcaaagggccaggttacatggatagtttgcaaatgttgggctggcaagggttgttgcttcgataggaattagcatgcttcacacttctagaccaggtctgttgcatccttctttgctattggccaataaaaaccatacttgaaggcttttcctaccaatgtttttgatgctgcatgtattccgcattgccatgcgtggatttcatccagcagctgccttcctgtagttgagtgaatacatttcatgaggatccctaccacacctcttctgtatagcagaccccctatgatggtatagtgacccgactgcctttaaatgcgctccgcggtggccttgttgtccggttcttcctcgtttttatgtacctgataattggctctctctagtcgtttggatctgtttctgcctggtctaccatgttgcattgttcagcctgccctgcggtgatgcttggttgctgcacctcctggacaaaaacttcgagcggaacctgggcctgactggaccctagttttgatagtgcgtttgctgttgcattgcgatccctttccacgtgatggaattccaagccctcaa

SEQ ID NO: 169897 - DNA, 285 bp, Zea Mays
aaaagcttaatgcaaaaacgttaaattggaccgagataagttgatctgaactgactattcgtgattaatctattccactgtttacaattatggaaatttgtctgattcctatgtaaacaaaagcggactaaaatctcagtcccgatctcgtttggttcgattcatgtgttttttgtctcgatctaaatctccaaatgtaaatgatgggtgaaaactcatctgattccgaaaaattcaccaaatcaaatcctgtccaattgttgctgtcaatcctcactattcgac

SEQ ID NO: 169898 - DNA, 710 bp, Zea Mays
gaaacctagagaatgacaactagaaagataaaaactaaagatatgagactagttggattagccttccccttatttatagggatattacatattcccaacttgcccctaggcagttagtgccaaaccacttaaccccagaggcgttatgatccaactcaaaggtctataaatttgatgcttatgggctcttcataactttgctttgcatcaacataagcttcacaatgatgccacatgctccctctagttcacgtttaaactccacccaagtttgaggcccaaacctaagaaatcatatgctcgttgtttttgaagcacaaaccactaaacccatcatgagtagcatattagatacacccctccacaatattgatacatgtcatagctagtcctcgaccacccaatcaccaagtcccctaacacctttgctttacttagtcaacacaatctacttatccatcttgtcttgcacttatcagtacccctaggtgtcacctacctcaactagtcctatggcttctctagtcccttataccaagtctcaatgtctattctttaaagctcttagtccatcaacacgagcccaatcgaccttcaacatcattgtaggtcactatctctattctccacacttgcacaacacaagccaagagacattttgcatagcaccacactcacatcatgattagtctccgaactcaaccaaagtt

SEQ ID NO: 169899 - DNA, 826 bp, Zea Mays
catataccctaggggattgttcaactcaaggaagatgaattctgggaactaactcaaggaggaagatctgtcagtgagtacgtgcacaaatttgcagagttggctcgttatgcacctgacgatgtcagcaccgaaaccaggaagatggcacgttttctaaaagggctaagaccagaactcaagaccatcctcgccagccaagatttcctcaacttctcgcacctctccaacaaagccatccgagtggaaagagcaaaagaggaagaaaaagggcacctcaagaggaaattccaggttctccgagctcagcagcaagaccgtcaccagagagctcgatccttcggtcttccacccaagggaccaagcttcaatagaccaggtagacccactccgtcacgttacagtcagcagagtcagagctccttttaggccccctcggttgcaagcaaccaaccgccagcaaatgcctgttggcactgcggagaccccagtcacttcaagaataactgcccccaattgaaggcacccaaacctacctactccaactcggtgaatggccccaagattacctcggcacctgcctccaaggcaccccctccaacagtcagcagagcaggacccagtaccagggcagagcacgagttaatcacgtcgacgctcaagaggcccagcaagctccgggagtagtgctcggtgagttccttgttgaatttactcctgctactgtgctttttgattcaggagcatcccattcatttatagccactagttttgtggaaaaacatggcatcccctctacacccctagaaatccctttggtcacccg

SEQ ID NO: 169900 - DNA, 1050 bp, Zea Mays
gcccttgtaattcaccaaacagttttattctggcccgcactcttttcctcccggggggtgaggtttttaatgaggcggagccatgtaatatacacgcaaaaaatcccccgcaaaaaaaattacgtcaaaaaagaccgcatcgacggtcttcggcattcgaccacaacgaagtcaccgcgaggggcagcgctggctaccctcgcgtgcgacactccgcgcaaaagttgcctaagggtgcagtcagactagcacaacaagtgcgcaaaaatgaagtcttcctcaaaagactatccgtgcaaaagtcgcctaagggtgcagccggattagcactacaagtgcgcaaaaccgaaatcttcctcaaaagactgttcgtgcaaaagtcgcctaagggtgcagccggactagcacaacaagtgcgcaaaaacgaagtcttcctcacaagactatccgtgcaaaagtcgcccaagggtgcagctggactagcacaacaagtgcgcaaaatcgaagtcctctttaaaagactatccgtgcaaaagtcacctaggggtgcagccggaccctccgtgcaaaaaccgactacgggtgcagccggaccaacacaataaacgccctagatcaagtgcacaagtcccctacgggcacggccggatcagcgaaggcacacagcctcatcatacaaattatagttacatacatacagcgagggcatcacaccttacattggttcaaccttcgggatgatacccatctccctgtagttaaacagcattatcctcaactcctcaccctcgaaaagatttcgcaactccccctcacccacactcgccccaaccggcgaggacaacaattcccgcttgctagccccgtccacacgaagacgaccactctccacctcactcactctacgcttcgccaccgcccttcgccgcctacgcccaacactcggaccaggaagaacttcagcatccatcacacacggagaagcctccgccatagccacatccaaggccgcaaaataatccaagtcctcatccgaagactcctccgtcc

SEQ ID NO: 169901 - DNA, 302 bp, Zea Mays
gtgaacggtaccgcgggtaatgtagcactgttcatccgcgtgaactgtaccacgcctccccggccaacagcccgacgacgcccaaacgtcgaggtcctggtcctagaccccaaacctacatctcgtactacctccgtaaccctagatccataatagttctcctgttcaatgcaatattgttgcaaaagttcatcagattgattatgcatgacaatcattctatattgtattccgtggtgtctagcaaaaaaaggttaccataactcgattgtcaccgggttttgatgaggttaattttgaca

SEQ ID NO: 169902 - DNA, 563 bp, Zea Mays
cgccagtgcggatttctcgcctcaatcctacctccttgcgcctttaaataccggctggggtgctctgcgattcaacaatcccgtaatgtatcgaggctgggagatcgcagcgttgagcggagcatcaaaaccagtggaagaggtcggagagagatagagaacggccggtgcggatcttcatcaagcgcggtgtcgagcaaaggaaatggagaggggagagaaaagatgaagccgccgtcgatccataccctcggcttgctgcgtcctgggtgggtgtcctaggagatccaccataataccgtgattgctcgccggtgtaaggatctaaccgctgggccgcgggtcacgtgcgcagggcacctcgcagcttgtaccaaggtatgatgactcccccattatgctcacttccgccccctcttgcatctgcgcttggtttgccgttgatggacctgggagcaccgtcgggtgcgactctgatgtgctcgcggccgtgggggtttgggcgccgcctgtactgatcaggggaggaagaaaggctcctcgccatccaatccgtgatgaag

SEQ ID NO: 169903 - DNA, 930 bp, Zea Mays
aagaagaacgaagaaagaatttaggagcaagtgcaagtttgtggactataaaatactataaggtctgcatgtgtttgctttccttattttccattgctcggtcttgtcaattatatgggaattcattgaggatgcatgcattcttatgttgttatgttaaatcgtttaaatgggtcattcttggtacaggggttggagacaagcacaaccaaagaagggtggaagtactttgaagatattaccgatcaaaaaaaggattttgtctaggtagatgaccaagatggcagtcatactgagttagcatttagcaagaaacgaattgctgataggaaatagtggcttacaaatttctaggttaactctcactttctccgtcccaaattataaggcattttgtcatttatggattcatgatgtttactatgtatctaggcataacatatatacatggcaaaatcaatgaatctaggaaaactaaaatatcttataatttagaatggagggagtacatcttttcccaatttgtcatggtttgtttatgtgggatcaacactaaatatgcaaattgatattcagcatggaacatacatggaccaacgtgagaagcaagtcaagtatagtgatcttatcaacacagagttgatgctcttctcaatggcagtccagcatcgagcaataccttgaatgcttgatggccttaaaccaggctagaggaagattctgttttgttcattcaaaaggaattttttaaggaagctaaggtgtgtctttttacctatctttacattacagattatctggggtctatttatttattttttctgttgattttttgacaacaggtggctcacttctcttgttatgtgttagaacactcagcataccactaggtgcgataacagtgcaaacttatgagatgcttgttatgat

SEQ ID NO: 169904 - DNA, 716 bp, Zea Mays
cttcaagaaccgtttggggacctcgcaacaaacttccatggttttcaacttacctgctttgattcagccgattgataatctaacaaagcttgagcaccctttctcgtatcatgagattgatcaaatcattacacgtctgccatcaaataaatcgtcaggtccagatggctttaatacggactttgttaaaaaatgttggccggtaattgcccccgatttctatgaactttacaacaaattttttgaaggatctctctgcatgcatagcattaatgggtcatatgtgactctcattcccaaaaacagctctccggattcagttggtgattatagacccatctccctccttaacacgagtgttaaagtgctgacaaaaatcttagccaatcgtttgcagcaggtgatcacaaagctagttcatcagaaccaatatggtttcatcaaggataggtcgatccaggattgcttagcctgggcttttgaatgtatttctctttgccacaaatccggaaaggaaatggtcattttaaagcttgattttgagaaggcttttgacaaattggaacatgcagctcttatagagattttgaggcataaggggttcggggataaatggattcactgggtttctatgattcttggttccggttcttcagaagttcttttgaatggagtccctgggaaaagatttcactgcagacgcggagtcagacaag

SEQ ID NO: 169905 - DNA, 950 bp, Zea Mays
cggagtgttccttcgcgatggcggcgaagcgaagtaggtaatgtcgagcggacttggacaggcggcgtagatgcaggagacgggcaatgggaggggagcgggagggcataaggaggtgaagaagacttgcagtgacttctgagagcggcggtggctgcggcgggcttgcagcccgggggagaggagggcgcgaaattacgcctcggtcggaaaagttgccgggctaggtttggcagagaaaggagcgatggtgttgttgccttttagttgctacccgcagtggacgcagccgaagttggaaccgcgccgcggcggccgcctccaccggcatcccacgctcctctcccactccgtgcgcccgagccgcgaaggggcgcagaccacccaccacccatcgtctcaggcttcggcacccccagcgtctgaaggcagtccgctactccgctcctcgcgtcctgtttccactcgcgcgggatcacctggccgagacgtgacgtgaggaggagaaggcgtcgacgtgaagatggacaaggcggtggactgcgactacgacgatgaactccggtacacccgcttcaagtacccctcttgttgctctgctttctcacgaagattattggattaaaggtccaacgtatggagatggttttgtgcgtacgggtgaagccggacaaacgtgggaaaggaagaaaggcgagagtaaggataataacatgcaggtctcacgtcccggatatcaaatggtggcgaattccatcaatctccttcctcctaaacaaatgcggagcaagatcgttctcatcctctcaatcaaacgcaaaaaaaactatttttttaaaagaataagatggggtaccgttcccatcttagaaagttggaacaggcctattccgtctcttgttgtccccaaaccaaacgaaatagcaacgatggtgcgtgcaataagcaaa

SEQ ID NO: 169906 - DNA, 377 bp, Zea Mays
atgcaatcctatgattcggtacgcactactgaccgccagatccagatctgagggtcggtaggatgtccacgtatacatttgatcccagacgcacgccaccgatccaagggctcaaattttatttggcgcatagggatacaccaattcaatctgaaccacccactggcgatcggacggccaggaggcccttcttccccatcgccccgctaagacacgaggcagcgccgcaacagtcccacggcgaagcgtcaccggcgcatatccaatccagcaccccgaagctctcccccagccgacgactatcgaagaggcacgcgtgagaagctaggaactgtgcagggcacccataccggtgattggtgtgccgagtaatcccg

SEQ ID NO: 169907 - DNA, 453 bp, Zea Mays
ctcaaacttgttagttggtgcaaaaaaaagaaaagattagaccctactcctataaacatgtttaacctaaattggtaccttaagaacaactcgatcattcacaactacctaacctacctgatatattgctttatctacctatcccaccctaaaagcacatgtaaaccccgttggacccatcttataattctcgaccatctacctgtctaaaccgtctaaatcctagtggagacaccaagatcgaagatgatcgacctcatcaaatcgaggaaggataagattcaagccagatcttcaaaaggaatcaagatccacaatcttggatagaacctttcctcaccctaccctttcttaaccaaacctatctatgctctaaagacatcttctaccctacataataaagtggacatacatatatatacccatgctctcctaatcactcactaatgaaaa

SEQ ID NO: 169908 - DNA, 476 bp, Zea Mays
atgcgcagacttagtcaagcgatccactaccacccatatagcatccctgccccaaggggaacgaggtagacccaccacaaaatccatggtgatatgctcccatttccactctggaatttctaatggcttcagtaaacctacaggccgcttatgctcggccttcacgggcagacatacttcacaggcggccacatacttagaaacgtcaaccttcatccgcttccactagaagttttgcttcaaatctcggtacattttggtttcgccagggtgaacggtgtaaggcattttatgagcttctctcaagatatccatcttcacctctgatttctgaggcacacaaagacggcccctgaaacgaaccaaatcattctcatcaacggtgaacccccgtggtttaccatcaccaaccctctttcgagcttcctgcaatagacgatcctgctgctgagccacacacactctctccatgaggg

SEQ ID NO: 169909 - DNA, 327 bp, Zea Mays
ctggtggagaatttttgttgtcgatggaacctattgaagcagtaatttctcgatgaagaacttcagcagcctgcttgcactcctcccgcggtggtggcttggaaacacagcagcctggcgatgtttggttttagcgaagcaaagcggcagcctgacggcactatcaactggggagccgagagcctttcctactcccataccctgtatttatagaagcgagtactagcagcagttgtgcagccgcgcgcccttcttatttgattttggcattagcgccaatgacgctggacgatgtgggatttgaatacgtgagcacagtgactttga

SEQ ID NO: 169910 - DNA, 636 bp, Zea Mays
gatcaaatcttctaccttgtttcgtatcgctgctatctttttccttcttctcacttcactagcatctaagggcttctcctctaataaagtgccttcctcatcaaattgcttctctctatgtaacatgtaaataattaggtaaaaaataattcataattaggaacgtaaaaaatatatggcatggtttattttaccttttgcatcttgtctgccatctcttcaaaatataagaagatggaacctcataaagcttttcacctcttaatgttagaataatatgacgacatggaattcccatcctctcaaataatttgcatgtgcaggttccaaatatcattgattcactccactgaaccatcctttccctcatagatccttcattaattataacaatcttggcaccctcttgctgcacaatttgtacaacaaagcaatggtccctagcagctaccacttcattttggaataatctgaacacttgatgcgtgtataatatgcttatttgcttctccataggccatggtgtactcaatagtggtgtcctatgaatactaatcatatctgcttgtagctcttcatgtcgttggcactctaaggctgtttcaaatcgaagccaaaactcaacaaaactcaatt

SEQ ID NO: 169911 - DNA, 275 bp, Zea Mays
ccaagaagcacacttctatgcgccagcccagggaggtctgccctcaatatacccggtctgttgccctacactcgtgtatatccagttataaggaaggggttcgaccctcagaactgttcttatgtggaccttattcataaagtttgcgatcattattactatctcaccgcccatgcagttttattccctggctggtatagcgacgtccaagctgagtggtcagacccggcaactagacgatggggtggtttgaggccatgaagtcgcttggtatg

SEQ ID NO: 169912 - DNA, 467 bp, Zea Mays
aaaccattataggcattatctcctcaattgtttttcctttataaacactcttaaccgtgaacacaactgattaatcggttttacacaatgtagaggttgtgcaactttacccagaagtcgtgttacctagttgccaaggttggcaagacctctacacctcttctaaggaagtgaggcaaggtttagtatgagacctttataaaggattccttgtgtgtactggttctatgacaaaatatatggaggcgatcttccgtaatatctctcaaccccctatctcacacttaggcactttcaagggcatcaaccccaccacctagtcaagcgtaggtgtggccaaagagtcttccttcatccccatctgccataactaatgtcaacaaaggttcccctaattacttggccaagactagagcccatatagtccttgtggttgtactattttcctgggtgatcgctcggtgaac

SEQ ID NO: 169913 - DNA, 548 bp, Zea Mays
ggcagaaatgaaaagcagggagcccccatccccacgctgcaaggctgacatacgttgcctccacattgcgaagcacaacctgcatcattctcgtgacttgtgaagcaacccaggtattgatgcaaagcaatcacaattaatcaattcaaaatcataagataagagaagggtactgatgatccagcagaacctcgtattgattgaggccttgcgttgcatataggtgtgcatgcatgcatgcatttctgatcaccgcatgctactagctactacagcagattcgtcttctgcctgcacactgcatttctgtatgcctcgagccctgcccccttccctgtttttacctagctagtatctctatgcatgcatgaatttgtctgccagcatctgctcctctaggctctatgtgctttaaaacctttattacccgcctgaaacagcatgctgttaagcaggagtggaaacacacaaacgcatgcatgctgctctgccaaacgcatgcattctcagcacagcgtcagctagggcgtatgggacggcagcaacaa

SEQ ID NO: 169914 - DNA, 1182 bp, Zea Mays
attctagggaaaataaggagcctaggaaaattggtctcatatttttaggatttttctgtaattttctacatatttttaaagctccactgaaaaagaaaaaggaaaaattgtaacagtattgggccaattctaactcaaacggcccaacaccagaggaaaaagggcgcccgcgcccgcgcgctctggtgactttgcagaaaggtcctcggtgttctggctaatctgaaatgagcataaacactattttcaggagtcgctgacactacacagaaaggccctccagtttctatctcttccccgcgaatgcccctgaccacggcgcgttgttcgttcatcacggacaaggtctgtaccggccatggccgacaaagattgctcaagctaactatctatgaggcttcactgacctacaacggccttagaacgcacactaatttgacccgaacaccccgagaacgaccggtccacgtgcacggcggaaaccgagcacgggagtacacgttcccgcggattgggagtggtctagttcgatttaacgggtcggtgagcatcaagagcaagcaaggatgttgaaacaaggaaaccgagggtgagattggacctgaatcgggctgaccacggcgaggtcaagttgtgcggtgttcctgagcgttttgggggaaatctcaaattgaagctttctggtggaggatttgaggtgcagaagggtgcgctagatgctcgaatacataacgaagctaacggtgcactggatttatagactccgggggcggtggctctcaatttgaccgcgatgtgttggcggccggagacggggaagaagcctggcgcgcgcggttacgtgtccctagccgtggcgggctcatcggcgatgatgggacggcagtagggaattacggcggtgccgtggaaaggctcggacacgcggcgggcacaaagatggcacgacggcggcgagcggctttatctacggcggtgagcaaaggggaggggtgccgtggccgatcggggtggcttccagctcggcggtgacgactatcttttgacgccgcgaagttatccacttacccgagcgcaaatcgtgacgccggcgacgtgaatcacggcggagaggttaccggcgtcgagctgtccaagctggcgtccttatcagtgcactgtaccatcgaggagcttgttcag

SEQ ID NO: 169915 - DNA, 429 bp, Zea Mays
ttctttggttttgggtctttctctgtgttgttcacaaatgatccggcggttttaggcactgccaaatctagagtctgggtaatgaagaataattgaaataaagcacctgactttcagaagcaccttatttttatgctcattttggtaatatgaactcttgcagtttgtcactgtttctcagccgataaatgctattgcgttcgtgatggatgggttgtactactgtgtgtctgacttggcctatgttgcatactctgtggtatggatttagttttctatagtatctctattaggttgtcatagctagacatagcgggattctggcatgcttacaatattttgccatatgtgttgctcagttctttgttggggctgtttcatcagcattcctactttccattgctcctaagcttggtgttggcatgtgtc

SEQ ID NO: 169916 - DNA, 695 bp, Zea Mays
accactatgccccgctaacggagcaatcggcttaagttggcaacaacttaaggcggtgcaacatgctcatgcttacttgactcggggtgaccactatgccccgctaacagagcaatcggcttaagttagcaacaacttaaggcggtgcaacatgctcatgcttacttgactcggggtgaccactatgccccgctaacggagcaatcggcttaagttagcaacaacttaaggcggtgcaacatgctcatgcttacttgactcggggtgaccactatgccccgctaacggagcaatcggcttaagttagcaacaacttaaggcggtgcaacatgctcatgctgacttgactcggggtgaccactatgccctgctaacggagcaatcggcttaagtcggcaacgacttaaggcggtgcaacatgctcatgcttacttgactcggggtgaccactatgccctgctaacggagcaatcggcttaagtcggcaacgacttaaggcggtgcaacatgctcacactcacttgactcggggtgaccactatgccctgctaacggagcaatcggcttaagtcggcaacgacttaaggcggtgcaacatgctcacgcttacttgactcggggtgaccactatgccccgctaacggagcaatcggcttaagtcggcaacgacttacggtggtgcaacatgctcgcac

SEQ ID NO: 169917 - DNA, 587 bp, Zea Mays
gtgattatggaaggcctggcagtccaacaatatccccataggttattgtgtgagatgttgtacaccatcttattagacttgttatatttcactcctttttttgggaattttacttggattagtgcaacctaatttctgttccagtgaacgtttggctggtatagctcgaagcctgtttccttatgtaccatttcttttccacggcatggaggtccagcttgtttccttgtctaatatcatttttttttctcacagcatggagggggccaagtttttatatctcttcagggattagttcaaagcttgaaggatggaagtacatcgcgtggaatcattcttattgcaaacgcggctagtgcgtctcgtcatctaacccattgtggtttggagcatgacataaatacagcggttagttgattaacacagtatatctgttagaattgaacatagaacaactgtcgcttgaatgcctaaacttgacttttccgtgacttatatcacagacatcttaatctgttagtcattcgcattgttcttggcattttatgaagaaaaattcagtagtcataatctggaaggcgttgata

SEQ ID NO: 169918 - DNA, 507 bp, Zea Mays
ttcctttggtggaaaaaccccaatctcttaaaggtggagaaggtcagattcgaagataatagacttgtgattaccagcaaacagaagctggctgttgggatcgatgggagggatgatcgcagcaacgacgctttgcctcttccgcttgggagccattgcaatctctcgggcggaatgagcgggctcagaatttcagggaagcagaggagaggttgagaaaaaaagtgaagttagggctcggaaatcaaaaaggcacgtcggcgcgagtataaatgggtttcttgggtcgggcattatctctaaagtgccagatcaccactcggaaaagcaaaagcctcagtcatcactcggacattacctctaaagtactagcactgtcaggcacagacaaattttcaaccacgaaaacaaaaaccaacacaacagtggtcatttgaagcaactgcgtccttgattcatactaaaggaggtaacacaaactcgaagccgacccattatgagtcaacc

SEQ ID NO: 169919 - DNA, 493 bp, Zea Mays
agaccagaagagtcaaactcgacagaacaagaattatcagcagtaaaacgacgaatagaaagaagattgtggaccaacgaaggagcaacaagaacatcgggaatgcaaaaaaagccgggagggccggcggcacccacagatgtgacaggaagacacgtgccattcgccaccatgatagacgaaggaagagaggaagaaggagggcgaacagaggtgagtataccagggtcaggagtgatgtggtaggtagcaccagtgtccgtgatccacttgggacccattggcggagtcagagtgggagtctggaaggcagccagggcggccgcgtcccaaccaatcagcccggacgggggtgcggccggcggcgtggtccacgacgaagtggtaggcgacgatgtccagggcgacggagaatgcgacggagaggcgaatgcaacccccggcggcgaggtgaagtccgacggtgcaccagcgaacatggccgccgggggac

SEQ ID NO: 169920 - DNA, 516 bp, Zea Mays
actttagcttttgaaaatgctcaagtgtatctgaccaaagacactgcccgacccattctgctctgctatgttgaaaacatgtccgagctaccagcctaccacgttgcgcccgacttaatgcgctaacttatatccttgtcaacggtttcttggtgcatgaaccctagctttgtttctccttcgccgaattctagccttccgaactcccactctttcttgcgttgctcttgagctattatacctgcggggtcacaatggcgcccaggaaaaagaaacaggatgctgccatgccggatatccccccgatcgatcctgatagtcaacttcctttctgcggtaactacgcttctgtcatctctgaaattgatctcttcaaccttgtcgaagttggtgttctgccgcccaaggagttatgctcctagagaatctggcggggaattaccgtcccaacggaggatactcacgaggtggttgttttcgtgcctttcctcatcagaggattggccttgctagttt

SEQ ID NO: 169921 - DNA, 740 bp, Zea Mays
cttggagatgccgaaagaggccatcagcaacccccacgaaggtggtttggtttgactaaaatataccttcagatttggagaccaatttattgagccagacaacgattggctaaagtgtgtcgaagctacaagtgatgaactgcttgggccgtactccaaagcggaagataatgcgctatctgtggccttcggaagccggaaaaagaggagactgaatagagtttttgatgctattgggttcatgtaccctgactgccgctacccgtcacgggggcaaaaaagaaaaagtgcaacttccgggaaagatgatgcttcagctgctccaagcgagcccgcgccaaagagaaaaaaggtgaaagtccttactcaccgaccgcgcttcattgaaccggccatagtgcctgaatttggcggtgaaacctcttcggctgaaaactgcggttacgcagaaaactgaagccaaagaacctgcggttacgcagaaaactgaagaaccggccgcaatgccgaaggcaccaccagccaaattaggtgagccgaaggccaatagtattgaagagacagaggtcgagagaacaaaaatattagaagttataagcccttcggcagaggtgacagtgctgaaggcgcaaaaggatcttacaacaacccccaagaggaaaaggatggtgaacgtactagatgtactggagaaaataaagacttcaagctctactccagggaaaacaaccgaagcttca

SEQ ID NO: 169922 - DNA, 579 bp, Zea Mays
gctgattgctccgttagtagggtatagtgatcacccttagtcatgtcatgccgatttcaagtcgagcccaatctaagtcagttgtcaatcaagagcttgaacgcctttggaaaatgaaagctttattgatggtgaaaccttctggttacagagtacaactttttcgagagttttgaggcatcgctaagggtagaactttctgaggtgctcaatgttccatgtgttccccacttctgtgttgtccatctgagtaagccgatatgatcccgaccgtgtgacctctactaagatgaatggtccttcccatggtggtgacaacttgtgtcgcccctcccccgttagaactcggcggaggaccaagtctcccacttcaaaggattggtgccacagagctttatcgtggtagcgccgcaaggtctgctggtacctgactgaatgaattactatgttcaattgttcttcctccaagacatcaatgtcttccagcctggttgcttctacctcagctatgttttcaaaggtcagcctcggcgccccgaagatcagatcggcaggcagcactgcttccgaccaataaac

SEQ ID NO: 169923 - DNA, 546 bp, Zea Mays
acttgttccttgtgctttggcgccatcaccagagccttccttggtcaccgattgacgatgagttccaacataaatggaggcagcacatggtcccccatctctgatcccctcccctccggtagcttctggtgctggtgttccgaccacatgggtagacaacgaggcacgaatttatagtctagcgggactcggtcttatccctggcgagagtgcaacaacccaaggaggggtacacggagccgacgcttaggttgttacgatctggttgacgacgatgctgacagaacggtcccacacaccgatcacagcaggacgagggcgatgccggtgggactgcatgatggggcccgcatgccagcaaccttatgcctaggcgctcgcgcgaatagaagtggtggggtgagagactgtagtactagccccaccagttgacgctgatgttttccctcccccatgggtcgtgcggtttggttgtaccaacatgtaattaggtcgcgcagttgcgagggagaagcagagtcactcgaccgggggaaggagacggcc

SEQ ID NO: 169924 - DNA, 632 bp, Zea Mays
ggcagaaaagttatgcagacaacaggcggagagaactcagattgaagaaggagacttcgtctacctcaaggtctccctaatgcgcggtgtcaaaaggttccaagtgaaaggaaagctagcaccacgattcgtcggcccctatcacatcattggcaaagtgggactcacagcataccgtcttgaattaccagaacccatgtctgatatccacaatgtgtttcatgtgtcccagctccgcaaatgcctgcaagttccagaaagtcacatcgaagaagagacaatctagattcaaaaagatcttcagtaccgagaaaagccaataaagattcttgactcagcagtccgaaagacccacaacttagaagtgaaactctgtaaagttccatggagcagagaaggagaagaggaagcaacctgggaaagtgaggactctttgaggagggaatacccttaccttttctcgagccctatctgaatctcgacggcgagattcctttaagtggggtaggtttgtaacatcccaaaattccaacccgaggtttggaaccctaatctcctgacccccttttatctctccctaatttctccctcataggacatctcatcatatgcatacaccttgattgttagaa

SEQ ID NO: 169925 - DNA, 1166 bp, Zea Mays
aaaagaataaagaaaatcagaaatggtgcatgggcccaaacctgctggaactcggcccagtacaccttcgcgcggccagagccagacgtgcaccgcgcgctgcctgtggggcccacatcccagtggatcagcctgattccactcgcgcccgcgcctgcgctgtgtttctctggcgcatgggaccgctggtgcagctcgctcttcttcctcaacagaaaacgcgagttcttctacgcgcgcgcgcggaatccgcgggcgcctgacccgctcgtggctagaaaaccggcttccgcccggggtataaatctctgcactgctcgttgactcttagcccctaatcacgaggatttcttggccactaccaccggcgtcaagggagagaaccgagagagagaaagagtagtcccgccgccgcggccacagattcatggtcctatcgccgttttagcctcaagttgtgatcggagcccgtcgccaggatataccgcttgattcgggagcttcctcgtgtgacttgggtgacctggcgcgggtgaatcgctcgccggaaccttacatccgccgcggtgccgcacctcaccatggccagggctgtccgcgctaccaaccgaggtgagaaccccctttccgtaatcgccatcaccccctctaggtttggcaccggtcaattttaaggttggggcgtccaggcttcgaattgcaagtccgtggtgatgctccgccgtgtcgctgtgctgcgccgccgcggcgtgagcgaggttggggaaaacgatgccagccgtaggatgggatatcgacgatccagattagaaaccggggttcggttaatcgggaatcgtggatgcaggatctaagggcgcagattcgatctggggttggggcaccgtggtccgtcgatcttagatcgggtggatcctgtcgcgtaccgtttcgggttaagttagatgtaatctgagccgtccgcactggatcgtgtgtcccagatgtgtggataccctttcggctctcgaatcttactaaagagtccctgggcaatttaataataaacccgccgtccaccctgactgtactcagagtcttaggaatttttacgcgccagcccctgcacttctctgtatttgaggcccgatccagaaacttgggaaaataggaaattaatattagaa

SEQ ID NO: 169926 - DNA, 537 bp, Zea Mays
gaaattttaatatttaatttacttagaaatggttatataaatgtcgtggtttcaaaaaccgaggacatagtagaatttttgtttggtgagagaggcaagcatggactcatttcgaatggtgaatcaggagactcaaacaggaggtttatattggttcaggctcgtgccagtgtagtgttgattgtggtattgttcaaaggagcgtgttacaaggaactcttttatagtttaaggagaggctcttacataggggacttgttgtctaaagcagggtgcgacctgttgtctaaggttgtcctactgacatagttctcttggcgtcgtcttctagtacgtgtgtagtcgtatgtctggcatggctggtcactctgtctatccggtatacgagtcactgtagaaaccatggtgctaaggccccgtgtagcggtgcctagcgggacccacgaggcagagttgggggatactgaggccgtacacggcaacgtctcatcccattgtcaaagatactccatcacccctatggcgcatcgtggcgcc

SEQ ID NO: 169927 - DNA, 461 bp, Zea Mays
atcggctacaaaggaaaatggccacatgcatagacctcacatatggaaaggctgtcagtacagccttatctgttgaagccaaatacacaaattctggaaagactaagggattcgatggtgagaggcctaatcagggccaggcgaagaagcaacggtttgtgattcgaccctcaaaccaaaatcgccctttttctcgtccaccttcatttcccttcaaacagcctatcattatccgccccaataatactcccactaccccaaagcagccgggtgccccaggcactcgatttcctgccttgcctagttcttcaactgggtgctttaattgcggcaagtcgggacattttatcaaagactgcccatatcctaggcaaaaccaatctaatgcttcgcaaggatctgggaaatcagttcagccaaaaggaaatgctatggggaagaatacgaagaagacggggcgt

SEQ ID NO: 169928 - DNA, 353 bp, Zea Mays
tatcatgtgaatgactccacgatatggctgatcggcgaagtcttcctgctttggggcatgggggatgttctgatgttgctggtgtggtggtgggggtggaggaggtacgatttgtacttcctgatggtgttggtaagcatggtgcggtggatgcggggcgggagcgtggatgtatggtggagggggtggctggtaattgtgcgcgacaattctgggattgtcggctggctgcgcccgcgccattctgtctctggtggccttcgttttggggcagtctttggtttggtgggcgcagtcttcgccgtggaaaaggcagtagaatcggcgcggcggctgtacgcgccctcggcccc

SEQ ID NO: 169929 - DNA, 557 bp, Zea Mays
gacaaaggccagggcagacggtttacatgaaaattttggttgctacaattttgcgtatcacaaggatacaaaggctccagttctcagctatcgcaccaagtggccaataggctggaaaggtgaatggttctatatcaaggttgatgagaagaaaagggggaaactaatgacgatagttatgtgcccgctaactctaaactttggaatgacccaacccctatgcaacatgcagctagggtcaccatgccaactggccgcagtagaattcagggtggtggctgaacaaatcagcaccagagacctggtgcaagaatacctagctaacaggacttctcctacgtcaagtgattggggcatgccgaagctaaagggaacaaagaagaaatatgaactcgttcgattaccttatcgttttaagtttgagaaaaaattcaaggagccttgccaagaatggctggaaatgattgaaactatgtggaatgaaattttggggaactacactagaaaagaagaccaattaatgacaacagtcttcgtcacctggcccaaacgaaggt

SEQ ID NO: 169930 - DNA, 410 bp, Zea Mays
aaacggtccggctaaccgagccgaacagtccacctatgaccaaaggcgtcagcctctaaacgaagcaaggaaagagacgcaagggcaaagcacatatagtcggctgatcaaagccgactctacttttgatcagttgctctccaaaaatgctagcaaaaagatcgttccacgtgatcggtcaacgaagaaacctcggtcacctgctaaaacgaaacggtcgaacaaaacagcccaaaaggcgacgcgacaaacatcgcctgttcatcctatgagaccagggtactttccacccgtttattcatcgttggtatattatcctactcaaatgtggaatggcacgacgatgaatccatggtacatttatagtccctttgtctatccaggctgggggcacctccattctattcatt

SEQ ID NO: 169931 - DNA, 595 bp, Zea Mays
gaccactagcgaatgtgagtaattttttatgcatgggcttaccagagcctctccttctctgtaggatctacctgcgactgtgaggaaacaatgttgaccactagcgacgtacatacatacatacatggtcggcccttgtgttgtgtccctcgctcagattcataaagcaaaggatagctagccacggctacagagcttcaccgcctgacggttttactagcagacaagcacctggattgtggatcgtactcatactccacttggtatgcatggcaagtggattggagccgttcaccaggtatctgaaggttgccaagaagatatgtcgtgttcctagttctgagatcctgtaataaaccacttgtgcacgacctctctctattatccctatggcttctagcttttgtcatcatcaccaccaaaggccggagaatgggccggctaccgaacagcgctgacgacttctacggactgtactagcaagcgatgccaaggggaccagagagagggctgctctgcttgggttccaaacaccagcatatcgacgaccagacagatacataacgacctcacgctccccttaaggacctgggcc

SEQ ID NO: 169932 - DNA, 735 bp, Zea Mays
tagaaagatcttcgtcgccgtcgagctggaacccacctcggtcagccgcggtactcctccccttgctcaccgcccggggataaggttttcaccgccgtcgtgccgtcgccgttgtccgccacgtggctctcactttccaccgcatcgccgtgactccctctaacttcccgtcgaccaccggagttactgccacgccactggacacgtattcaccgcgccaaggttcttcctcatctccggccgcccacactgtccgctcaaattaagcgccaccgccccagggatctataaattgaccccgcagagagcttcacaacatcatcacccacccagccaccacgtattgctagcaattgttcgcccgagctcgcgaattttgaattcgccccaaatccattctccgccacccgaaacccaacctcaccgcggccagccttattccggtcagttcatctccttctctccctcgttcaagatttcccttaagtctacgatgcttgccgagccactgaattgaactaggagcccgccaatcgctaggaacacgacgatattgccatgatgttcacggccaccgtggccagagcacaccccttgatcattagtgcaattatgttgggggaaatactcccctggtcatggatttggtttagtcgtagtctaggcgccggtcttggagcaattcggccggtctgcgtgctcgccggagttcatcctccacgcgacgccgtcgag

SEQ ID NO: 169933 - DNA, 494 bp, Zea Mays
ggccgatactaatctatacttgttttatccattaccaggttccttctactggtattaagtattttaaaaaacatgaatattatacagcacatgattacaagcacgatctttcctatggtagacgaggattagtactagcgtgatgccaaggtacaaaagttgtggatggaggatggaggctgattcttgtgcatgtaagtttgatttattcattcccagattgaacatgtggtgtgtttgatctagatttatactaatacaatcttccatttcctctataccttaggtttctaaattctaaacaatgctctcaggctatcaaagtctgaacatgttgtataaggctctaaattctaaactagcttctcagtgtttcatcaacctcgatgcttgcaccatcccatccaaccacaccaatccaatgatagtttaacattttacaaggtcattttttgtttcgtagttagcttcagagtacctgttgcccattaaag

SEQ ID NO: 169934 - DNA, 665 bp, Zea Mays
agaattatatatggctcagattgtgtgtttacacggagtaccgaagaagatcgtgtctgatcgaggttcacagtttacctcaaggttttggagaagctttcatgagaatatgaatgcgaagttcaattttagtacggcttatcaccctcaggctgattgatagacggaaatgactaagcaggtattggaagatatgttgagagcatgtgcccttcagaatggaggaagttgggataaaagtctaccatatgctgagttctcatataataatagttatcaggccagtctgaagatgtcgccttttgaagctttatatggaaggaagtgcagaactcctctatactgggaccagactggagaaagtcagttctttggacctgaactgattcaagaggtagaagaacaagaccgtgtaattcgagagaatttgagggtagctcaaaccaggcaaaagagctatgctgataataggagaccactggaatttgaggaaggatattatgtgtacctcaaggtgtcaccacttcgtggaatgaggagattcaaagttaagggcaaattgtcccctcgctttattggaccatttagagtttttaggcgagttggagagatggcctatcaactcgagctacctgataatctatctgatgtgcataatgtattcc

SEQ ID NO: 169935 - DNA, 792 bp, Zea Mays
caagaacatcctgggcaagggcgggttcgggaacgtgtaccgcggccgcctcgccgacggcaccacggtggccgtgaagcggctcaaggaccccagcgcgtcgggcgaggcccagttccgcacggaggtggagatgatcagcctcgccgtgcaccgccacctgctgcgcctggtcggcttctgcgccgcctcgggcgagcgcctcctcgtctacccctacatgcccaacggcagcgtcgcgtcgcggctgcgaggtacgttcccctcctgaatgcccccctgtcctgtcgtgtcgtgtcatgtcaccccatgcatgtcgttcacgtcgtagtatctctgtcgcggacggggtacgaccgtacatgtctcggccagccagtggcttaattgtgccggcatcaaggttcgtgcggggagattacgcggtcggagcgagtgggaccctccaccacgcgcgcggaagtgcacgcaagagtcatggagggtgtacagtacccagcagtcaggcgtggtcgcgcgtcccctgtactttggcgcggggaccatatggagcgccagggggggcggagaccacaggcagacaccaccgcactcgcgatttgtccacatccgtgggcggtgggggcatgccatcgctgctcgccctcccagtccctgcggtgcagcgcccccaccccaccccacccgccaccgcgcggcgcgacacgaagcacaagccggagcgtatctgcgcgtaccgggtagcagcggtagtaccggcacgacgacgcgagccacgagaagcgggtacga

SEQ ID NO: 169936 - DNA, 831 bp, Zea Mays
tgcaaaatgaggcattgtttttgacaaataatctccaaacttttcagtaacataatatttatatatgtcaatatatgcaaatattctcatcttatgataacatgtacaccagtgaactgttgaattctttttttgttttcccattttattggcagaactcggatgcaattagtaagatgagcagaatagttagattttggagatcgatacaagttaagaggacaggtataatattcataataattgtcttcaatttccattcataatgcgcattatatttcatctgacatataggcacaagacaaaaactatgcaattgcatagctacaaccagtatgcttcacataagagaaaaaaagacaccactcaaaaagtacaatacatgcgatggaaaacccaaagaagaagaaaataagggggagctggttgttttatatactatatatatataatataggagtatatataaccctccttatgaactcaactcaaggaaggattctgagaacaatcttgaggcggcaacgatccttcaacccccagcaataggatggaagctgaaaaccccaaagatgcatgcttattgtgctatgatcttacactttgtagacatgatcacggtggttattgatggctagccggcatcatcatcaccatctcgatcagagaaaaaggaggaaaaatagttattaggaggatttctcagtcgcatcatttttgaacaacagataaaagggtttcagctggccagggccacacgggaggtgctctcctcggcgccgtccgccgtgctggagcaccacgcgtcgtcggatatgaactgcatccagg

SEQ ID NO: 169937 - DNA, 483 bp, Zea Mays
ggggaggccgccgcctctgtgggcgcgcaagccgagggggtgggatgacggccacgcgaagggggaagagtgctgtcgccacgggggaggggttgcatggagggtagaggaggtgaggaggggtgctgccgccgagtagggagatggaggagagagagggaggggctgcatgtacgggaacacaaaaatgtagaaactccatggacaacaatgaagggaagtgcaccgaagaagaggaccctcgccggaaccgaggaaaatccgtcgattgacggcaaactggaggtcggatcatcgaatcgaaagcactaggacaaagctctcaacgagacgaatggagcggtaccatcagatttcaccaatgacgcatggattgaaagtaattgctcacgagagttggaaccgccccgaacttcgatgagcaattccaggaattgtggatctaaactgggaaacggtttcaggatttgaaaagggtttgac

SEQ ID NO: 169938 - DNA, 367 bp, Zea Mays
ggagaagttttgaaattttttgaaatttatcttcatcagctgacccctaacgctatcgttaggctcagcatcttcatctgggccctccgaagccaagggatagacccaaataccgaagcattctgccgagtgcatgagttgcactaccaaacgaaggctagagcagacggtctgcatgaaaattttggctgctataatttcgcgtattgcaaggatatgaaggctccagttcatagctaccgcaccaaatggccaaccggctggaagagtgaatggttttatatcaagaccgatgagaagaagagagagaaactgatgacgatggtcatgtgcccgctggctttaagcttcagaatgaccagacctt

SEQ ID NO: 169939 - DNA, 997 bp, Zea Mays
tgttaaggagaaagacgacgagtggagattgtgcatggactatcgacgtttgaatgcatatactgtgaagaatcactttcccatgcctatcttcgatgaaatcaccgatgaactaaatgatacccatgtgttttctaagctggaccatagaccgggggtatcaccagattcggatgaaagagggtgatgattatgaaacaacatttctgacgcaccacagacattacgaatataaggtcatgtccttcggcctgacgggagcacctgccacatttcaggaattcatgaacaaaatcttagctccgttgttgcgaaaatgtgtcgtggtttttctggatgatgtcttggtttacagtaggaacctgaccgagcatgtggatcatctggaccaagtgttcaaactgttggatcagcatcaactgaaactgaatcgttcaaaatgttggtttgcccgagatagtctggagttcttagggcacatatttagtgcagttgtgctgtccacagaaccaaccaagatacaagcaatacaagagtggccacgtcccaccagtgtcaaagatgtaaggagtttcctcggcatggcaggttactatcgtaaatttgttcggggtttcagcatcatcagtcgtcccttgtccaacttgctgcgtaaggataccatttttgcttggactgacgaaacagaagaatccttccgcactttgaaactgaccctggctcaagctccagtattagctctacttgacttcagtaagtcattcaccattgaaactgatgcaagtggaaaaggaattggcgctgttctacaaaaggagggacacccgatagcgtatataagcaaggccttaggtccgaaaaacatgtgcctatctacatacgagaaggagtgtctagctattttattcgcggtggatcggtggcacccatacctgcagcaccaagaatttataatcaaaacttatcaaaaaagcttgacacaactggatgaccagcg

SEQ ID NO: 169940 - DNA, 581 bp, Zea Mays
tgtgtgcgcgtccggctgcatcgtcgaggagttacagatggagtagtccgtgcaaccgtaccttttgcgttcgccgccagaaaaaattgatggtagatcaaattccagaatggaaagagtaatgttcacatttgtgcaatattttgtttacagtgaaccaatctatattactgtaaagctatgggttctctaaataacaacaaattccaaatcattcagtggcttacgttcttttcaaattgataacgtggtgatgaaagatcgggtcatgtgacttgtagttcaatatggccagcaactccagcagggtgagaaagatcatcatcaggttctaaaggatttctcaaagttgcttgatgatcaggtaatgctattaaatagaaatatgtgcaaagtcattagttcaaactccctgatctgctttaacttgcaaactttagcttctctctagatatttaacttgctgattgtaccatcaacatggtgaccaagacggtgctactgatctaaatgcagtgctaaatgatgtcctttgctttgagcttttagctattgcttgggcccttaacacttctagggtt

SEQ ID NO: 169941 - DNA, 796 bp, Zea Mays
ggacgaccacggtgggctctagggtcttagggaaatggttaggcgcgttcagggcgacacggcgaacacaatcgtgggcatcatgccgacgtgggagcaccagaggccgcagaccgcggcgaaaaggtctcgtggcggcgcaaacttactccggtgagcaattatgcgacgaccagtgcaataaacagggaaatagaggcgtggggaggttgcttaccaggagcgcaaacccaggagtgcctagaggacggcggggaggcggtgaagtctcgggtcgacggcgggggactccggctgcacgggaaacactccggtgagcgcggaccgggcaaacaaaaggggttgggggcgaaccgaggggcgtcccgagctgctgacggtgaggcagaactcgccggggcaacgaacgcgacgcgggcgcaacgagagtcacggaacggcggcggtccctggtgagcggcggcggagctcggctggtcgcgtgcacagggtgagagagggggcgagagagctcggttgagggtgcaaatgagcagggggaagtgggcaagcagggcacatggtataaaggggcaagggcgtgtagaggtggccagagaacgcgtggtcgtgggcgcgtccacggcgggggaacgtgggcgagaggttagggacgcggagggggctaacgggtagggtccgcgaggcagagagaaagagtgcgcgcgtgggaaagaaacggcgctgacaggtcggccccacagagcagcgagagagagggagagagcgcgtgggttggcgccgataggcgggaccc

SEQ ID NO: 169942 - DNA, 448 bp, Zea Mays
tatgtagggttctacatgttttcaactgattctccgcgcccggtgattgtaggtgtggtgctccaactgattctcctgcgtcgtgcccatggtgcagcctggcagaggtggtggcgacggggagcaaccactgtcgaggatcgccatggagagggtcgtcgatgacgcagcacatcaaggtcccatccctctccctatctcacactcatgcttctactcgacccctcgatgccccaacgatccctctctgccccttcgcccaagcggccagctgcggctcctcaccgaacgccaacagcccccaacggttgtattttcatcccagcagtagcaaaaaatgactcaagctcccttgttcttttaggatcaatagcaacaatagactaacacttgtagttacgtgactccactaatagtggtttacatcagctggagggttaatgtagcc

SEQ ID NO: 169943 - DNA, 1171 bp, Zea Mays
atagaaaagaaaagaaggcttccaaaacctgttctgggcccaaacctgagttcgtggcccagtaaattcaaccacgttcagcccaccgtgacctgcgagcggcccaacgcggtcacgcccatgcactcgcgtcgtctgacgtatcggacccgcgcggcagtggctactcgtgcgttctctgtgaaggtattgcaccaaccgacaggcggggcccgcagtgcattctaagccgcacgcttgcctcactatgggtcgctgcggggtgggcccgggtcgtcagacatctcccgttccttcgtagcttgattcggacgaacctaaccctagcgcgcttctcaggttctgttgttgccgccctcgggcggccttaaaagggtggagccgagtccttcccttccttctcccttcgtcgccgcgcaataacagacacccaggcaccgagggcaaacgtgacagagggaagaaaatcagccatcggtgaacacgtgaaccacgcgctctcgggcattcgtgggaagttctagtgcgtcgttgtaatccctaggagcattagcaaccgtcaaatccaccattgaagtctttgcgctcgggcaatcgttcgccggagcgaggtttcggcgaaggtgagggctcgtccgtagtcagaacaccccgtagcacgatagtcggtaagcattccttccctgtgttcaccatggcctgttcttcgtgttgcacgctttggattggtgttcggagcacaacaagtgtggcaatgccaccctacacgagacctccgccgcgatcaggggcggcgccgccatgcggtctgccatgtgccgggagatagctctgtggccgtcgaacccagatgaacggtcaagatcatatcacacatgtaccccttcgtgcctgtaaattggaccgttcaaacaaaatcctaccgatggattggcgtatcgagccttttaaaacgaagactaaatccgggtcgtccgtcttagataggtcagacccctgtcacgcactgattgattgtaaagtagatctaatctggagcgtctgtctgtgatcgggtggtccatatggcaacataccccttcatcgtgttcaacttgcataaaagcccctgatgaagtagtaaaccaactcgtcgtccatttcttgtataaactaattgcattcgtgcccc

SEQ ID NO: 169944 - DNA, 1042 bp, Zea Mays
aaaaattctcacctcgtacgggtgcccctcgcaatttacaaagctcatcgcacacacctagccactatagcgttggggcctcgatattgtcggaccattgcccaccgcgcagggcaacctcaaatttgccttcgtcgcagtcaaatacttcactaagtggatagaagccaaggctatgtcaacaatatcagcgaagacagagcagaagttcttctagcagaatattgtctgtcgcttcagagttccgtccgagttgacagtagacaacgataaacaatttgaccatcaggactttagggaattctgcaactccatcgacacgaaggcagtattcacgtctatctaccacccacaatccaacggggtagtagaacgtgccaacgggaaaattttcagcgctataaagaagagacttctagacgataaaaagggcaagtgggtcgagcaactacccgaagtcatctgggcactcaacacaatggagttttaagccactggattcacccctttcatattaatgtatggatccgaagccatgactctacaagagctaaagcacggatcacaacgaacaagcaccacaactacaccagatatcgacaagtcaacagcaaaggacctcctcgacggggatcgtatcaccacacttgaagcattgaacagatatcaagcacaagcgaaggcctagcgggacaacactgttaaccccaaagaatttgacgaagggacctcgtactcgtcagaaccagcagaacataatcccgaggtaaactcgagcctaaatgggaaggggctttcatcgtcaagaagaaaacgtccccaaacgcctacagactcacaacacaatccgacgaagacctcgagcattcatggaatgtagacaacctaagaaacttttatgtgtaagacaaacaattccaaggccttcgcacctttgtaacacctacaaatacgttattccagttgggcccgcactcttttcctcgcagggggtgaggtttttaatgaggcggtgccatgtaataaagcactaagaaacccc

SEQ ID NO: 169945 - DNA, 1123 bp, Zea Mays
agctgttgttgcaccaactgaaccattagtttcctttcgtgcatccaatcttgtagcgcagggactatacaggaatccctcaggtccagaccgagttgccttggaaggtgtccatacaaaacttcaaaaggagtgtatcccagagatgagtggtaactagtgttgtaccagtactccgcgagtgaaagccacttcctccattttgaggggcacgcatgaacaaaacagcgcaagtaggtctccaagcattggttcaccctttctgtttggccgtcagactgtgggtgatatgatgtggtcatgcgaaggtctactcccaccaacttgaataattccttccagaaggcgctggtaaagatcatgtcccaatcagaaataatggcttgaggcaacccgtgaagttttaacacttgatccatgaactgttgtgccacagacagagctgtgaaaggatgagtcatagggataaaatgaccatatttagaaaaagtatccacaatcactaaaatgcagttggagtgacaagaatgagggagtccttcaataaaatccattgaaattgttttccaagcaccatccgggatagggattggttggagaagtcctgggtatttgactctttcaggttttgcttgttggcacacggagcactcactgcaccaagttttgatcatctttttcattcctgtccaaacaaaaagcttcttgattttatgatacgtaactgcaaaccctgagtgaccaccaattggagctgcatgaagactaaggaatactttccatggaaatcctgatgttgctggcaacagaatttggtttttgaagtatatgagaccatctttcaaagagtaagatcctgaataagaatcagtagctagagcttgaaggagttcggtagtttcaggaaactggagataagcatcagatatatcctgcagccatgtgggttgattaaccgaaactgctaagagttgctcctcggttctcctagataaggcatcagccaccatattgttttgtcctgctttgtaacatattttatatcttagccccaatagtttcgtgagcgctttttgttgccattgagtggtcaggcgttgatcatcaagatgtaccagactgc

SEQ ID NO: 169946 - DNA, 774 bp, Zea Mays
gggtgggttagttacctagagagacctctctggggcggttgaacgaccacaaggacaccgtgagggccctggtcgacggcggcggagacttggctgcaaggtgaaggtccggtgagtgtgatccgaaagaaatattgggtctaggggaaaatcagagggtttctcatgttgctggtgaggaggcggagctcaccgaggcaacagatgcgacataaggtcgatggtggccacggaacggatggtggaccatggtggtgctccatgggcatgcgagcggagcgagagagaggagcgagggggtctactagggcgcaaccgagcgaggggagtgagtgagtgtgtgtgggctctacaaaaggggtcgggcgcataggggagtggccgagaaatgcgctcgtgggcacgtccacggcgtaaagcgtgggtgggaggttagggaaggggaggtgtctgataggtggggttcgcgagccagcgagggaaaacgcgcgaacaggcagccaacgctgacagagcggtcccaccgagtagcgagagagaatggatgcgtgcaagaggaaaccggcaccgataatccggctgcaccaggcagcgggagggagagcgcgtgcacggacgggggccgtcgctgacaggtgggacccacctggcaggcgatgcgggcgcggcctggctgggctggattgggccgaactgggctaaaattggtttttctttttccagggattttctaaatgtttcgctttttattttccctatggatttcaaattaaa

SEQ ID NO: 169947 - DNA, 1052 bp, Zea Mays
tgatgattgacctttgagtttatgatctatggtactgttctaacaaatgtgtatcacaatgatgaacattatggttgaacaaatgaacaatttatttgccttggtaactaatcaattcaaatttcatagtttgcatgtctcatctttattaatatagttttatcagtattttgtatagttttttactctgtgtattcttttggtaatattgtccaactgtatttcaggttaactttgatcaggatgctacgcctatcacgcttttgatatgctggcggccaacgtgaatgcatctcacttaaaatcgtgcttgttacctttcctccccggatgttcatccttagcaacttgtactgtgtaatggcagaagaaaaacctactcttttgtatatatcaactgcccgttgttaaaccttttgctacatcgcacggctgcaaactgtgctctacttatttgtgtggctaaagtcttttggcaacccagaaatgcattttattccatgactcacttatatgctaccaatttcgtattttttgtttttttaaaatcgagtattatttttgttgatcaaattagccatttgcacatatacgatggcataatattctgtaatttatttcaaattgtttgatttcgttcctctttggtttgttgttgttttgaatggaatcatgtgcgtgctattgaactggatgtctggatttatccacaatttgcaagtgcagtgttattgatgatattgcttaagaattgcttcaaacataagagggaggcgacaagtatagcgtccgatagggcgctgccttttctagtaataataataacccccaaaggtccaaaccgcggcggcaggcgtaccggtggccgccttggctgctgaccaacccaggacgtgctccgcatccggattcgccgctgaattcctcgggagcggaccagagcacgacggtacggggacgggaacccagccgcgaacgactcctgttcccggaggtggccacggattggccggccgaccccgcggtataggggcggctcggctcctgccatg

SEQ ID NO: 169948 - DNA, 513 bp, Zea Mays
aaaaaggacaataagtttgtgtggactccaaaatgtgagggaagtttccagatcatcaaagagaagcttacaaccgcgcccgttttgtcactgccagatatacatcaggatttcgtcatcttctgtgatgcttcaaggcaaggcttagggtgtgtcttaatgcaaaatgagaaagttattgcctatgcatctcgcttactcaagccacacgagcagaactaccccacccacgacttggagttggcagccatagtgcacaccctaaaaatatggaggcactacctgattgggaacaaatgccacatcttcactgatcacaaaagtctgaggtacatcttcactcagccagacctcaatctccatcaaagaagatggcttgaattaatcaaggactatgacctcgagatccattaccaccccgggaaggccaacatagtagcagacgccctcagccgaaaacctttcgggataaaggggaccaactttttagaagattggaagaaggaatcagct

SEQ ID NO: 169949 - DNA, 284 bp, Zea Mays
cacaaaggaaataatggcggatttgtgtgaagattctgacgatagcgatgactatgatgtggaaagtggggatgaagattctgaagaccggccctggcggccaagccataccatcttcgaaaagtcgaccattaaacaaagtcaaattgaagccatgaagggaagatactttcatgacatgtctattgtgaggtttggaggggacaacaccgcccctgctcctgaagaaaatgaggttgttgtctacagaagctttatgaaggcgggtcttcggttcccattga

SEQ ID NO: 169950 - DNA, 723 bp, Zea Mays
caagaatctgaacgtctttggaaaacgaaagctttattgatgatgaagtcttcaaattacagagtacaatattccttcaagagttttgaggccttgctaagggtagaattttctgaggtgttctatgttccacaagttccccacttctgtgttgtccatctgagtaagccgatatgaacccggccgtgtgacctctgatacgatgaatggtccttcccatagtggtgacagcttgtgtcgcccttcccccgttagaattcggcgaaggaccaagtctcccactgcaaaggatcggtgttgcacagctttatcatggtagcacctcaaggtctgctggtacctagccgactgaattactgtgttcaatcgttcttcctccagcacatcaatgtcttccagcctggttgcttctgcttcggctatgctttcgaaagttaacctcggcgccccgaagattagatcggtaggcaacactgcctctgacccataaaccatgaaaaacggggtatttccatgcagagctcgactgggttgagttctcaggcttcagaccacgtatggcagctctctgatccattttcctgcaaacttttcactcttgtcgaataccttcttttctgagtgcttccagtatcattctgttggctctttctacctagccattggctcttgggtgtgccactgatgcgtacttaatctggatgctcctttgctcacagaaat

SEQ ID NO: 169951 - DNA, 615 bp, Zea Mays
gtgtctcttccatccggccacctcatctccctcctccgctcaccacggctgggctagtaccgttggatcggacgagatctccgctaccagaagtctacgaaatccttggaagcgatctccttgccgcacgacgtggacctccaccatggacgcatcgcgagcaccacgggtgagagctaggatttcggaatcctaacgaactcggacctcgggtgataaaggggagctcccgtgacctatttcttcccctctgctactctctcgcgcggatttctttcctcagaacaaaaaaatcgctgccaccagtgaggtataggaagcagcgccgccgtcggtgagagagaagaggcacagcagtccggtgcgggcgcgggaacatcgccgggccatactgggtacgaatgggagctcgccacggctgattggcgttgtcgcagcgcggggaatttctcggcggacggcgggggaagcaccgcgcctcgggtcgtcgcggactgcctcacctacaacaatattctgggtgagaacctcgccactaatttcgctttgaactccgcattgcgtaggtgaagttaattgtgatatgaaccactggttgccgaaatcgttgttcgc

SEQ ID NO: 169952 - DNA, 370 bp, Zea Mays
gggtcacacgccgacgcactccagggagggatgcggtcaccgacggcggcaccatggccgggaggttccccaagccccgattcccgaccgaatccgatccaaacgcggaaacataaagcgaatcacgtccaggcttcgtcgagggttactcacagtgattcaaatcgctacgaactccacacacggcgcgcgatggatcttgtgcccggtgatgaaattctggccgccccaacggtcattccctccttctccggccacgagcgccccccaagcaacgtattgaagcccccagaccccctgtggaaccccgactgcaagctgaggccgagggcgacgttggtggtactctctgctcacagttctcccctcg

SEQ ID NO: 169953 - DNA, 326 bp, Zea Mays
ggcctctttgtgatgggtgccgtaccagggatcagatctatgtagaactccacttctctttctggcgacattcctggcaactcttctggaaacacatccatgaattcttctaccactgatacgctttctgttgctacattaaacaccattggatcattggcgggtggctgagcctgacaagagactgactttccttggtggtctgtgagaaggactgtcttgtttgcgcaacttatgatgcctttgtgcttggttaaccaatccattcctaagatcacatcaattccttgggatggcaagacggttaagtctgccaagaacactac

SEQ ID NO: 169954 - DNA, 657 bp, Zea Mays
ggcaaataaagagttcaaagacctgatgtctcaaatgctatcaaatcctcctctagaattgatgcagtagttggcgggtgtgatgtttgttcaacagatgaccactccacagctgcaaataattccagcagctcaatcgccggcttccaccgattgtacaaccgtcccaagctctatcgcgtcaacgagaaataaggttcgttatccatttgatgacatcacaaggcatgtggcgtgcacactagttataagatatggtattaacaataatcgtacaaagaaagtaggaacaggtgttgcgatcctaggacgcaagtttcatggaagcgacattccagatgattattgcagggtagaagtgacgacggtcgtctaaggatccgaggacgacatgctagacatctctgggcccaaaggaattgggacacttggacaagccatcaaaaatttcatcctttggcctcgaagggatgtcgaattggttgatccaccaatgctgtcgtcgtcgcatccccaaccatctccgcctcctcaaactttagtacattttgtacatccatcatcaccttctcaatcttcacatgctgctcctcatcctctttctaacccaccgtctccgccacaagcatcaacatttaggacaccaccaccttctcc

SEQ ID NO: 169955 - DNA, 587 bp, Zea Mays
ggaactaacatgttcccggcgatccagggcggtctaacctaattgaatgggtcgagtagcttcaggaggacttaaggatgctagaacaaacgaccagagcgcttgaactaacctggagcaagctggccacggcgagggcaaaccgagcagagttcttgagtgatttgggggaagtaagaaattggagctctctggtgaacgattggatgcaagacttggtggcttggtgcgtgattaccctatgaagcttgcagtgcgttcaatttataatgggcaagagcggtggccggtgaattagacaacgacgcgcggcgactggagaagacaggtgttactggcgcgagactcagtggcatctaccgtggcgacctcaccagcgacgagccagtgctaccgagcggtttctagtgactcaccgcgacggagtaaagcatcgaggcacgtagcccggctggataacggcgaacgccattgatgccagcgcgactaactacgacgagacacgatggcggtgagaacagtggttggagtttatccccagcgtgatactttacaccgaggagtgtttatctgagtttggtcgggcg

SEQ ID NO: 169956 - DNA, 468 bp, Zea Mays
ggtcctcgtcgcaatcccctcaccggtcaatgtctcagctatggaaggaaaaatcacgtcactgccacagaaggaaacacatcccctcgcagcaatccagcacgcaggaatcccatcgccgacgacgcgcaggaccaccccgcccaatcgttcttcccatgcaccgcggatgccccgcccatatcctccgcgccccaaacacaatccacgcctcgccgccatggaaggaatcgcaacccaatccactcatcgccatccagcgcacaggaccaccatcggcccgcatcccatagcaagtttgcaggaccaccctgccatctcattcttcccattctacgcgctagccctgcttggaccttccgatgctagagtacttcccattctacgcgctaggcccgcccagatcttgcgatgctcgagtataagatggaagacacctctctcagcgctcaaatctagacaccacac

SEQ ID NO: 169957 - DNA, 816 bp, Zea Mays
atgcattaaacatctcgctgttcaattagggccagcacgcacgaaatagccagattatacattaattggacgtcgcatatgagcagaatttttattgatccattacgtttttatgtatatgtgttgtttgatttggctcgaacatcatatatgaagaacgcagcagcacgtctccctatccctacatccaaacccttcctagtgggccctagcagtgctccccggccccctttgttcatattttgcacaacatgcatagatgttagtagtgctgctgcatgcttttttgtgtagtaatggaatgcatggtcatgaactgaactgaattgatttgcgcttatctttttattgctcctttacgttttttatgtatatgtgttgtttgatttggcaggaacatcatacatgaagaacatagaccgacctccatctaatctaaaacggattataattcagtctactcaagagtgctttagtgtcgacataccccgtgttccggcggaaactgttagacacaaaacaaggcaggctgctgatgaggacgatgactttatgccattatcgaagaagcgtaactttgatgacagtcctccaaaagtcttgaagaagatagttacaaagcagaggaaagtagtggaccccccccccgacaggttagaatttatggtcaatggcaatatatcattttctgtgtgaaattatgttgtgttgaggtttgatttaaacattgagttgcaattatgcagatgtaaatgtttacgctattcattgtatacatttttcagcagaggcttaatgtgagatgcaatccccaag

SEQ ID NO: 169958 - DNA, 475 bp, Zea Mays
ggcggctgtatccctctacacggcgcacggtggtgcagcggatgatttggagagcggtttacgggtaaagaaggggggtcgtgcccacgtcttaaggattggagagtccacgcagcgagagagaggaaagcggaacggtggttaaatccacccgccgaggtgaacgcaaggtcggggcgctcgcggtattctcgggaggttgaagacgagttccacgcgggacaacactgaccaatgggtcccacatcgcggtgacctgccgtgcgcctgcccacggaggtccaccggccagccaagacacgcgcgcacaacggataccgacatgtgggcccgcctgtccggtccggctgaggagcagcgcgcgcgaggcaacaatagtcgggccgcgcggggtggtttctggctgctgggccgaattgaggttccgaagcccatttaggctaggttgattttattcttttcttttctattcttt

SEQ ID NO: 169959 - DNA, 309 bp, Zea Mays
gaaaggcccaatcgccccaaaagactagtccaatgggggaagggtgtctctcccttttaaagtagcttcctcctcccaagttaagtgaggtgggacaattctgaggctcacactgtcaccgtccgactacaattggaccaacttggccaattgcgactttgccaacgggtaatagtggaggatgtcctcatcattcccaccttcttaaaatgggccctagcttcggataccagatgatacacccagcccaggtggggttggccgaggcccaacaaattagggttgcccggagcccaacagttcattaag

SEQ ID NO: 169960 - DNA, 1054 bp, Zea Mays
cctaccacaacaccgaagcatcggggatcgcaggaagaaagggctacaccgtgcatcgaacgacatcgccgccgccaccgtcgagggctcgtcaccggttgggtgtctccgcaggtgaatcaccggcgctgggtccctgaaaaccggttggggagcttcgccatgttgctagaaagctgctagtatccccctctggtggtagccggctctggtgacatgacaattgctccccgatgtgcgaatgcaatcgggtaatccgcactctgccgtgggcaactcgcttgcgtccgcgtcggggccctggcgcgtggtctggtggtactgggccctcgagacatgcgggtggaagtcgtgccctgctattagagtttggtggtcggcgctctcggatctccccgtcaacacccgtctccaccgcagctccttgttccgtggatctggaccatgcgactcttgattcacaggtatagacctgcaaactgtttctgcatagtctctgcctcgcttagctacattttacggttgggttggtctcttggttgttggggaggggcgtgtgatggcaatggcgccgccgccttgtgcctacgccgagggacccggtaccagggaagaagaaacagtcttgaccgttggatcatgatctggcgcgcagacttagatgatgggcatctggccgttcgttttgcgatgatcggctaggattagaaaatacttaccctttttgcggggattgatccgtggccgtaggattagttgtcagtggccgagatttaatcgcaaccatattaaatctagtgcgttgatcagatcggatggccctggttgcatggcaattcttttaatactggaatctaatctagaccgattaaaccagatcgtgcggctgatgattgcctataccccttcggccatgccactttacacttaagcccctacacttttgttaaaccaacccgccatcctcccaagtcaaaacaaattacaaccgagccctagatctttataagctagcccctgcgctctgtagaatttgtaccagcagtccttagcc

SEQ ID NO: 169961 - DNA, 712 bp, Zea Mays
gccgccagccggccacattgcgtcaccacgcgtccacgcctcgacgcctcgtcgccaacgtctgcagcggtcaagccctactccatcgctcgccggagagacaggtaccggctagcagccgcactccacagtctccactcctcctgctctgacctctccgcgtctggaaacagggactagaacatgccaccgactgggggtgctgctgctgatggctctgctgttggctcgtcgtcatcggcatccaaggccaagagcttcatcctggatccaccattgccggtggtggtgcatagcaccacacttcctacaccaaatccaacatcaggtaaagcactgctctgctacactggtagttgtgtgtgttcagtatataatggtagttgtatgtacatgtatataatggtagaaacatctattgaattgttgttaggatctaagcgagcaaggtcagaaaatatgtgccaaaaccttagtggtttgtgtctacatcaaaatgatggcagtggtagtggttctggtgcagcagcaacaaatgatggctgtggtagtggttgtggtgcagctgatgtaggtagggatactttgccaagtggaggtggcagcggtagtgttgctgctgcagcggatggaggcggcaatagtgaacaagccatcaatattgaggatgatgtccctactggaaaaaggcagaaaaaatgcacatctgatg

SEQ ID NO: 169962 - DNA, 724 bp, Zea Mays
cacatggagatggagttgacaatgctaggctgagtgcatcaatggtgttgatggcaggagagggggagggagagggagaaaaggtattatttttctattcttatggtggttagtaaacttgtggatatacgttgttataaactagtattttatagatgaactatacaatgttattcagttaaattatatatagaatatttaaatgactatagactgcttttggagcaagcaatttccactctctgcctcgcctggtggttccgagttccgacgacatcgcccatatccagagttccagacacacgcggctgtcgtactctgctgtatacactgcacgtctgcacggctccgaggactatatattggcacttgctacgattgatgatagaagaccgcaggcacttcgttattactactactacagatacatacaccgacagcgcagagagccggcagtaatagactaatagttgcgctgaaatcacacctctttcttgattggctgtatatgacccggccggcctgctgatttcaacgctgctgaatgctgacactgtgcacatacagatacagctgcacgacgtacgcgcgatagatcctgcacataatgtgcggacactgttccgaattttctcgcctcactgtgcttgcatgaaaatatggttggcagagtacgtaggagaggccggtgctagctagctagctagctagcattgaatcgtcg

SEQ ID NO: 169963 - DNA, 670 bp, Zea Mays
gtgatagagtcatagactttaggatctagcagaattcactcttagactcgtccggttcttagcgatagattgattgactcgtgaactagtgcaatggtgaggtggaagagaaggtgggggagtatacagtctataccttcgggcccgggtggattgtggcggtcggcgtcaacgtcgagtccgtgtgtggagcgccatcgcctagacttgtttctcctcctccttgtggatcagggacttggggtggcatgttggtggccggtagggtagaaccattagggtctaccgacgtcatggagagttgggcgttttcggccactcaaacgataaaggagatcagatcctcttaggaattttggtgtctagggttaccggagcaagaagcattggcttccgtgctgacccttgccttgattgatatagcgtctatgaccgaaggcaacaaccatggatagggttgtactttgatcggggcgcaattagtcaggatatgcctagacttggtgatcttgatcgagctagagaacacattcaacatattgctcataattggactctctgatctgacaatgttcacactccacagtgttgtgtgggcccttgtgtgactccacttgccataacactactccacccctccaagatagtttgttctaaagctgtggcggtt

SEQ ID NO: 169964 - DNA, 2070 bp, Zea Mays
agagctaattctatcctttcttttttaactcaggaactgtctgatgatgatatatgggaaacagcttatgaggtccttcctgcttctctatttggcaggtaattttcaacagaacatgtatgcctggttgtttgcactaactacatgtgtatcttcatatttgaagtatacatttaaagttctaactcagcttccttaacaacacattcccaacagtggaaaagtagacttctctgaagggaaaagggaaaagaaacgtaatttcttgaagggacgaagaactaagactgaaggatcaaagccatcacctcaagtggaagatggctatgcccacattcttgatctgatccgaatacaaatggaggcaaggttttgttcacaaactggttgttttttcatgttagtttaacaagcaaatttaggtattcactgcctagcttatcattattttccaatgttcacatggatgccagatattaacgctttttggttccttcattttattttattgctgagtacaggagtcttttatgatcttaggaagcaaagtttttagctaatatatcagaggaacctctctactctctctttcatcagtccctttaaaacctttttctatgttgtccttgagacttcagaaattatagattattttgcctcattgccattttgagtcacttgtgtatatcttcactacaaggctaagaaatattctagataggactcattaggcaaaattcttccagatttctagatagtgctaagcgcaatccttggtatatcactacagctcctaagttctgttggcaaatttgattttccaaccgaaagattgcgtgggcaatgtcagaaaagacaggcaagcacctataatcatttctatctgcagtatgccagtatgggtctttaatcatttctatcttcttgtgtcttgctattgtctctgtttctgctatccaggcgaatgtttttgaagaactacttctcttctcagcatctcttgagtatgatacaagcaacacataacggatagttctctctaagctaaaaagtacataggcaagtgctctcatccatattttataccatttcatattaatagcaataagactatcgtctttctaaaaaataaacaagtgtttcacctttctcttcgcaacggactgattaacagtattaatttcattgtatgtatgcattgttaaatattccaccggttcactgatgaagaagtctatatgagaagttactttgcagtgtgtttgatattctggaagatgggcaactcgtagagttctttttttctttattcactacatatcattgtatcttctctggtatgctttaaaaggatcacaccctgctaccacatagcttatttgttcatggacagcagtgttccatcacgagttcttgaatgtactatctaatttgactaccaggaggctgatgagatactgggaaaaagaaagcaaggtacactaaaccctcgaagtcagaatcgctgaagaagggaagactggaaataacaaagcaaggtgtaccgcaatgaaccaaaaaaccaaagcaacataacaaagcgaggaccggtggaacgattacctcaaatcgctgaagaagggacgactggacgatttcgtgaccggtggttgttcgccaggtatccaatgcggcagatctacacgagcggcatgaacgatgagcacatgaatccggtgccgaaacggaaatcaatcgaaacaaaagaaacagggatcccaagaagaggaacggacggcggcgacggagtcgacgagaagaaaggagcggttgcagttagggggaaaaggaagacaacacagcagaggggcttcatataagagattgggagaaagcagcggcatgggcgctgcggtggaaggacagggcacagtgagtcgacgctgttacggatacggagtacgctgagagggacgacaagtcgcggatttatcggattttgaaatccggtgaacagcatcacagggtatgggcacgcgaaacagaccacaacggagagaactgaggagagaggagatggacactgaccag

SEQ ID NO: 169965 - DNA, 646 bp, Zea Mays
ttaagcggcaaaaatttggatttagcggtgtccacacaggaggcaaggcagacaccagccgacgcgtagcttgagcatgcacagcgcctccctaaaactgaaactaagttcccagccggcctgacagcccaatttcaaacgaattttactctgacaatttctccgacaatttctaagcaacatgtaaatcgtccttaatcaaagtcgtacactgatcgatgctctttcactttggtataataaccatgatgaaattcttcacggatccaacacaggagagcgccaaagttcgctagaaatcactgaaactcgacttcagttttctgaatatgcccattgtatagaaccgaaccactcctccaaactgaacatagttcagtttcagatccaaaactggacagcacaaactgaagcacaaatttctcctagttccaaacaaattcagaggtatattgtttaataaaatttgctccccaacaatatctctcccagtttgttgtgctgaaaatcgaccgcaagtttgcagatttggaagttataggagcccgatgctgagaagagcaaactgtttctgaacattcaatggaccgaactgaacctgaaattgcagcactctccttttcttccaactctgaattttctcgag

SEQ ID NO: 169966 - DNA, 282 bp, Zea Mays
ccttgccagcacattgcaatatcttacactcactcatcccgacttggcgtatgttgtccagtaggtctgtctctttatgcatgatccccgtgagccccatctcgtgttgatcaagcgtttcatttggtatgtcaagggcacgttgtcctatgaccttcacatcggcactggcccgcttcagttcttgactacttacacacatgcagactgggctggcggtccggattcccggcgttctacctccggttactatgtctatcttggtgataatctcgtcttttg

SEQ ID NO: 169967 - DNA, 399 bp, Zea Mays
aaattcctatttcattttccctgattttctaatttcctggactgggcgtcaattataggaaagggcaggggctaacgcataagaaatcctaagacacatagcgctactgtgtggactgtgggtttaatcaaccggacccgagggtttcttttgtaaaacgacttcggtgaaggggtaccgaacgatcctagccgtttgatcggctgcatacggtcaggattagattccatctaactctaatcagaacactacgcagaccctaggatcaaaatccaacgaaccagatctaaccacaaacggtgcgctagaatccaatataatgcgtccattcggatcgaacggtcatcattccgttttaacccgattgaaccctgcccgcagatatctgatccaacggcc

SEQ ID NO: 169968 - DNA, 455 bp, Zea Mays
cggcggccgcgcgcttccagcgcgaccctgctgatgtcgagtagctcatacctgtagaaatgaggctagggctccgcttgaaggcggatgtaataacttttgtttttgtaagatacttttgggaactatcaattaaacaactcttatctgtatggtacttgttcttgctgtgtgtggcgttaccaactcctctcctggtacttgacccccctgggatgtaggctcgacgtgtcgaggctggataccagcatacctaagaaagagttggtgacccgaccccctaggaggtagtctcgactgggacctggacctgcacacaaccttggctaggaagctttagtagtgcacccataggacccactaactggtatcttttatcctttgattcacgcaacaggacctgcaggatttagaccgggaagccaatccgtgtgtccggaccccctagatcacag

SEQ ID NO: 169969 - DNA, 720 bp, Zea Mays
ttagtcctttatgtgccttcgctggaatgacaactacataaccaggacaaagtatatctattgcaatgactactcggaaccagaatagggaaacaaataacatgaaccgacatatgcactatcaggctacatgagcagcaaagcgctaaacatatactaaatgtcacaaatgacaacaactggaatatgcagtaacagactacatgaaaatgcactaactccatcaatatttattttctccatagatttgcagtaactccatggcatgctggccaccacccaataactaagttaaataaacaaatgtcaggaactaagataaatacacaaatgtgaaagaagagtgacacaaagtaatcaaacctaagttgaaggtgtagcttcatttctcatgatcttagcccgtaagcccatgtagtatgtccttagctcttctggcatagcagaaagatatagggtcataattctctcttcatccctctatctctgcaattcaacctcttgtttctgtagttcgacctcttctttcctcacctctagaaggagcttttcatttgtaacccgctcctgttctagtgcaaatgctttattgaatctctcctcttttttaacttccttctccccatcagtgtctttcttttgtgcccacatgttttctaaagttgttgttacactttttcttttttcttgtataattgctgcttttgactttttcttgcc

SEQ ID NO: 169970 - DNA, 580 bp, Zea Mays
ctggggaatgccatgtaacctgactatctctttaaggtatattcgggcaagggcggctcctccaaaagtggtctttaccggaacgaagtgggccatcttggtgagacgatcgattattacccatatggaatcatttcctttctgtgacctgggcagtccggttacgaaatccatgcctatttcttcccacttccatttgggtattgggagggattgaagtaggcctgcaggcttctgatgttcagcctttgttcgctgacaggtgtcacatcgggccacatactgtgctatttcctttttcatccctttccaccagtatctggccttgaggtctaggtacattttggtggtccctgggtggatagagtaagctgagctgtgggcttcattgagcaaggtttctcgtgcctctcccactggcacacacaagcggtccttgaaccagaggactccttgctcgtctgtcctaaggtccggaagttgctccttgcgtgctcttcccataagcctggctgtctctgcgtccaggcgttgagccttgcatatgagatcttctagatttggcttgacttctaggcca

SEQ ID NO: 169971 - DNA, 403 bp, Zea Mays
cgaggaagaagaggaaaacggaagacgaacatggcggcctaactggcatgcatgacatagatgctcctcaggagatcgagtacatgggatagtggcactgcgagtaagctgaagaaaggcatcacgtccggggtgtccaaggcgacgatgccaggtagtagtagatgtggtggcggcaaaaacagcagctgtgtcaggtgacgaagacgaagaagatgtggcgtgcgggagccgaagggtgtagagggggccggtgctgtcacatcagaggagggggtgccgagttgtcgagtccttcacagtaagaccaaaagagtcaaactcgacagaacaagaattatcagcagtaaaccgacgaatagaaagaagattgtggactaaagaaggagcgacaagaacatcg

SEQ ID NO: 169972 - DNA, 423 bp, Zea Mays
gccggccatggatcgatcccgcatgcggcagggttcgtagcggatgggagtcgcctggcgcgcgcgcgcggtcgagcagtcgattgatgagggaaaccaaacaaagctctggatgactaattaggtttttggctgttcttttttggccagcacaagtggcgggaggcgtaatcccgggaacatggggtgatcccggcgcgtcgggggtggtcggacgtgaggatgacatgtggggtctccatgagctgcgttgcttaacaagcgggcgagctagcgttatcgtagcatatatgcatggggcgtcgtcgtcgcctcggcctcctcctcttctcacgctcttcaccttcgcatcatgtgcctctactccatgtttttctctgcataaggatttttttgaacaatttccgtaaaaaaatgtagcca

SEQ ID NO: 169973 - DNA, 314 bp, Zea Mays
gttgggccaggccgcacggccgccggatccgccgtccgtccgatcgccggcacagcagggtacgcggtggactggattaccgtagccatggattatggtatggccaggcctgactgcctaattacccgtgacccgagttattttcagatgtcagcgttacgagagagcgagtggacaggtcgtcagtgacgccactgtgaccgcggacaggttgaaaaaagtggagcgccaaacgggtcgacattcgaagaggataggctacacggcgtttccagaggtgttcgatgcttgaacctctccatgtgcgtttcacg

SEQ ID NO: 169974 - DNA, 1179 bp, Zea Mays
attgggtcttaagttgggctatcagtcatcattgaagactgaattttgaccaacagtggaatcagatgaactttgcgattgagttgtgggggatttagtggatgtttgtgcaggatctttgtaacaaagttgtagttggtacattggacaacaactttgatacaggcgggtgagtgagtttccacacaaaaattgaagaacaaggccctacaagttgctcggacaaagggactgacaaagatagccatggtacagtgaccagaaagatctccggtgccgtgagcctgacgccagtcatcttttgccgctattcgcgcttgcctgggagattcgtgccacaggagtgatagataacatcgagtcaaggtgaatatatctggggaggggtaaacctagtcactggccggaccggccatcttgccccaccacggtcagtcgcgttggcatcaccagagctcaccatttctctgaccgtgacacgcaacgatctctactctgcgtcgtaagggtcgtggcaagcgaccggttatcatccctggaacaattccctcccacgcgccatgatgagttggccaccgtaaaatatcctagccacggtaaccttgttctcaatccaaaattcgtgataagcttggtcggaggctataaattggaagcaccccctgttccgcctaatcattacgaactcagtgaaccactcctcgccctcgatcgtccaccgtagggccctaatttggaatttcccccaaatccattctccacgccgctgtgagcacctccttcgtcgacccactgtcctgtccctccatccgtcttcctagctgtcgttcttgagtcctggtatgttgctaaagcttactgtgtccccaatttgtatgttactacactgtgtcattgggaacatgtcgggaaagtcgctagctctgcagttgtgcgtggactgagctctagaactgcgttcaggttaaattagggatttctagtggattgccaggggtggaattaagtgtataccgacttagggcatggattgttaggtgttgcagccggtacaagttcgccggagcgtgcatgatgtcgtccaccatcggggacttggtcttgcgaaggaaagaaaggagaggggcttaagtacgattgtcagtgagacagggaatagtgcgtagggattctttagct

SEQ ID NO: 169975 - DNA, 646 bp, Zea Mays
ccgacaccagcaagagggggcatcattgttgtcgaggtcgatggcagcactgctgccaaacagggctcgagcatcctcttgttcgttatggtcttcgagctggtgctcctcctcaatagcggccagatcaatatcatcgtccatgccatagatggctggatccccactgtatgtctggctccttgttagcgactccggtccctcaatagctatgtggcaccgtcacaagaatgatacctatgagaaaacaacaagatttggcgttgaacatctgtgcaaaaagggagacatagcagtggaaagactaagatttgaaaataaaactcacccgagtcgcatgagaggctaagcaccaccgcgaggaggaggagcacggtcgttggactaaggcactaagaggatgctaggatggggattagggtttgggatgcgagagcagggaaggggatgagaggagttgaggagaaagagaagagattcaagagtatagatgtccaaacaagtcgtcgtcatcatcgggagtggagaagaagagaagcgatttcgccagctgccaggagaggagggagatggatttagggtttccacagcggacagaatgaatgagtacgaggagttggagaggcagggtatgggtcgggcgtgg

SEQ ID NO: 169976 - DNA, 1051 bp, Zea Mays
gtcagtttcatccttctagagcgattgataaaatttgatcttctcaagctggtcactccaaagttgaatgttgtgttattacttaataaccatgtgtgatgtctacaccagcgtctatgtatttcactcagtgcataaatattctgttcttgcttgagtgcggtgttattgtttcactaataaaagctaataaaaatacaatgtgcttatataaactgattaaactttggcatgcataatggagacttcatataattcacagcatgctaaaatgcgctgatagttggatgttgtgttagatttgtatactggcccactatatgcagtgcaacaaataaaaacttaataatactaataattaactcgtgtataaagtataaacacacaagaaaacaaagcagagaccagatcaaatgagtatacatttttgttgcattggtatagaagcctccaaattaaggaattggtacccaatattcacctgccaccattattctatatagtgggcaacatatagtgttatgtatatttatgttaatcaatggaagatggatgtatagctatctagaaaattattggtacagctagctaaatcttgtgggccgatagaattggctagctaattgcaaaggttggttagcttagctagctatatatagattcaatcgagtaccagaatttagtgtcattagtactgatttaggtgttcgaattggacagctatattaatcacctaattaaatgtaatgtgttatgcacgtgcccttaccttatgtccaaagagaaaataaaacaaatgaaaaggatactcttatctgtaaggaatgtttatgatgagtgcaatgtctgaactatatatgcatgtgtagtctgatgatagtataagatttgcacgaatatgctgcttagcttacccaggggcacacaatttgcacaaatcacttctctttggtcagttggaacaaacagaagaagccagtattaagcctttgggattcttacctcacaaagaaagcaacaaaagcatgtgccaaagacaacaacaaccaag

SEQ ID NO: 169977 - DNA, 513 bp, Zea Mays
tagataggttggatcattataactttctgttatttctggatacactgttgcaattaaagctgaaatatgatcttcttggggcagtaagaggaattcagaaggaatttgtatccatgtgggctccatttctcctggtttttgtatagctggtatattgtcgttgccaatatttaagatccatgcactaaaatctgcaagttcagttttttcgctatctgttaaatccgttgaacgaagtctcatgttttgtgtaagatgtaggactgtgactgaattccaaagtggcgaattggttatagcagcatttataatttgtgcacgattgccaccttctatcacaggtaatatctgtctaggatcacctcctagtacgatgaccttacccccaaaaggaatggtagcagattgagcagatttcaaagaaagtaaatcacgaagggaacgatctagggcttcaaaagcatttctatgtgtcatgaatgcttcgtcccaaattattaaagaagccgcttc

SEQ ID NO: 169978 - DNA, 748 bp, Zea Mays
gatggctcctggccgttagatgcagagcgtgggcatatcctttgaaggcgaattggagcaccagggtgataggaattcttcatcagaattgctccaccgccgcggggccatatatcaccgtgggtagggctccttgcacctcgattctgggttaaggggaatcgtctagcatggcggcctcaattgctcgtcgctgctgtgcatccacggtagcaccgctcttcgtcgtggcccggttccggcaccaccttgtcgcacggtatggagccctctgttacttcgccttaattacttgcacgcatagggctatcatgtttgggaaagagttactggtgtgccgagaacgcctccggccggcgagtgcgccgccgcagggaaaatgtgtgtcgtcggatagcagagaggaggaggaagaagcgttgtgagccactgatgtgtgatgggcgatccagatcaactgggcgcactgtctcagctgggcgcgtggtgagccgatcgatcacggttgaacgcctacgattaggcccttacgtatcccttcgccagattggttaccggctgtccgatcagaatcccgtgaccaagattcgacctcagtcattttaaatcaatgtcgtggatcggcgatcttgcggctgagattagaaccaacttaccccttcgttttataaaatctgaaccatcaacttttaatccaatggctgtatatggccgataccccttcggcctggttgtctttcaaaagaac

SEQ ID NO: 169979 - DNA, 542 bp, Zea Mays
ttcgctcggtgctttgctcacagccaagacaattacatagtgtgagtttctcaagagatgtcaaattcatgagcagagcttcctgaggcagagtttccatataagaaaggaagagtttcctcaggtagggtgggagagggttgatgatgctctgagtctgagttgctcgtcctccgatggaccatcgagagaataacctgtcacatttgtgtatggtcactgactcgagcgacgagaggccacagaatccagctccttcctccatgggtaggatcagattcttacaccctgtgaagttgacatctctcagcgagctagagggtggaaaatgcagtaccacttcctcgttgtcctcatctgatggtgatgccatcacatgcaaagaagaaagtgctggaaaacatttgaataattttgacaaataatttttggtaggtgtaaatcgtccaaggtagagagattggactgtgggtagcacaacaccatcatccagtcctctcaaaaatgtttcctcacatctagtgacatttatacgtctcaag

SEQ ID NO: 169980 - DNA, 800 bp, Zea Mays
gtcctgttatggattgaacatgtgggcactatgcacgatgctgactagggtcgcacgagtagggatggcagtgtggcgagtttagggtgggtcctggtggggccagggacgagtctgatatccctccatgggaccgtgactttggggacccaaattgttgcaggttcccggcgatttttgtctcttactcgcgggtgctccacgagccctgaatccctcttaccctagctgtcgcagcctctaacctatcgacttttaacttgcagaggtgcacagactgtagacgatattctcttctcccgctcccatccagggtctcccctctcctaccgcctctcctcccaccctccctacttccctcactcgtccgcttcttctctcctcctcacccaatcgataatggctagtgttgtcacaatactaacacaatagctattatgaggtgtcggatagtactcaatggtccgatagtgcatagagttggttgttgagggtgcaatgtctatatctcttcttggggctataaatagacctcaaatcaatcattgagaagtatgtgggctaaggaagatacaaagtgagttaagactcatacacaatagctctagacatctaagtgataaaagaatcactcaatgattagtgtaaattctttatgaagtgcttatgttagttggatcgctatcattaggaattgctctaggtttaggcctagttgttagaaatgagtttagcttacccttgacgcttgcccacgtcattgtaatacttctatcaggagggcctataagtcttatgag

SEQ ID NO: 169981 - DNA, 568 bp, Zea Mays
tgaggacgagcatgcatcctgattgttgcatcgtgttggttgtttgtgcacaaatatgcttcattcacccttattctaataattggtgattgcgaacaaacatgcttttctcatctttatttcgataataaataattgggaaaaaatgtgtgaagcattattgtcctataaacaatttttagttttgtttgttatgtcctttagacatatgtttatgtggtctgtggttcttcttaatttgaccgctagtccaacttgtgtttgtgtcgatagaatgttggtggtatgtttgcataaagtcaaaattagaccatgtcctcacctaggagccatgacccaaatcgatgttaattccctgaaattttccccagtttccaaatgtggacgagtctgaatttccatcgttacttcaggaccaagtttatatcaataggtgtttaggtactcttctcgtagaaaatagatgcacatgagcttaagataaggatctcgagtacgtgttctcgtcgtttaatatgtgactcttcagtggtcatgttttcttcccaagcttcgccttgtttcggtt

SEQ ID NO: 169982 - DNA, 549 bp, Zea Mays
ctgacggaagaattgaattgccgttgatggcacttaagcaccgtacgcgcacacctgtgaggggagaagaaacgaccggattcaagtggagagatgagggctgaccgacaccattgatggcggtggccgagtggggaagaggagaggtctgcagttactggaatgaagagacaaccgccgaaggtggtccaagaagaccaacgggcgggcggctgtgagtcatgctccacggaggcgaggaggcgaaggggcagcactacggcgggagcttgagcggcgcggcatcggctggctatccggcggcggcatagtagcagatgagcagcgcgtaggaagaaaagccacactgacgcacgaacgctccagaaagaacatgagttgatggggcctacacgtcatagaatgaggaaagaaaagaaaaacaaaaaaaaaacaagagattgagacggacgggatggacgcttcatttttgtttttttaattccttttcttttcaaattttccaaatcgtttaccccttcttttctttaataaagataaacagaattt

SEQ ID NO: 169983 - DNA, 615 bp, Zea Mays
agaccgactggttgtccctaagaacccagagctcagaaagaagatattggatgaagctcacctttcaaaattttccatgcaccccggcagtaacaagatgtatcatgatctcagatccttgtactggtggaccagaatgaagagggaaattgttaagtatatatccgaatgtgacacctgtcagagagtcaaggccagccatctgaaggtagcaggcaccttgcagccccttcccataccatcttagaaatgggaggatgtttgtatggattttatcgtgggattgcccaatacctcccggcaccatgattctatttgggtcattgtggataggttgaccaagaccgctcatttcttgccagtgcataccacccacaagacagagaaatatgcagaaatctatgttgatcaaatagtgtgtttgcatggcattccgaagaccattgtatctgacagaggagcactatttgtggcacgcttttgggagtagctccaagaatcacttgggacccgtgcaataagaagctcagcataccatccgcagacagatggtcagacagaaagagtgaatcaaatcctcgaagacatgttgcgagcctgtgtgctacactatgg

SEQ ID NO: 169984 - DNA, 680 bp, Zea Mays
atcaacagtgcgatatttcttacccttagtcgttatccatctgcgctgggcacgaatcacaacgacgggcgcgaatccgggcgcacggtcgccggcggtgagtcatctaaaactggcgttctgattcggacactgtaccattgaaaacctgattcagggcgcctcacatacagatttgtagtgtccagatcttggattttcgtataagagcttgctaattcatctgtagcaaacttgtagccctatgatccagctacaaatcaactatagcaactaccctcaatcgagcaatagatcttactctaatttgacccaaaagtttggccaatgtctttggtgacctaaattcagtcatcagagtgactgacagcacaactttgagcttatttttctccaaactttgtatgtgatcaaatcttagttgttctcctattatagctctagacttttgatgtgttgaccctaggcaaattctttgtatttttagaactacagagctccaaagtcagccctattcactaatttttagacttagtcacatgagaggtgtagagtggctttttgcaaataagcccaaacctcatggtttgatttgcaattcttcaaatatgtgaaccatatgatttgaggtaccctaacaccttggtttttgcacttagatccaaaagtgtgcaaaattt

SEQ ID NO: 169985 - DNA, 759 bp, Zea Mays
aaagaaagtcctcatcatgtcttcctcgagtgaggagtccctagggggctcatcacccgcagaaaaaccggatgcagaagatgtacgatgatgaggaggaggtggaggaggagagtggtgatggtaaccagagccggaaggccgcgggtcaccaggaatgggtcccggacccgggtagggaggaggaggatagtgaccagagccggacggcctggggtcaccgggagtgggtccctgacccgagtagggaggaggaggatgaggaggatccgaggtgtggaaagggtcatcatagtcctcgacctcatcctctagggtaatgaatggcacaccaaactcctgttggtcccactcattaaggtctgcggggaaggtaggggctagaggtggaggagacccgggagggagaggatgaccagtctcggctgcataacgaagaaaatcctcatgcagccggtcggtcctacgacggcgcacagactcctcgaccgcccgggtgcggcacatggcgaagacgccaagaaggcccttggccagacgaatgaaaagtccccggcctctaccccgtccctggctcggaccacttcctctcccgctgcggtccatcggacgtgaggcagcggcggcgcgagaggaggatgggtgatgtggaggctgaggaggtggctcatcagaggaggcagggcctccagaccctgagggagcccgcttcgtacgagcagctgggttggaggaatcaacccagtagggtacgtagcg

SEQ ID NO: 169986 - DNA, 785 bp, Zea Mays
gcagtaccgctgcaggtagccttaggttgtctccaacaagagactgtaaacatcatgtaccctaaatatagaggttttacatgtctagtatagctccaacaagaaacgctaaaacttctgctaaaatatagcatgcattcctggtttacaacatttggcggagtggcgaccgctcgctatcaactgttcacacgcgcgccgcctcctcctgttctctcctgcgctgccttggaagcttctggaggtcaaagcaacaacactgctgatgtggagcaacttggttcagctgcaacgctgacgacatcaaaaagttgtaaaagaagggctagaacgaggaaagagaggagatcgagcagatacttgggagtcggaaatcgagtgcagaaatggaggtggcattgcccgtgacgtctccaagcacgatgatgtcgacctccatcacatgacgcaaccacatccggtgaagaatgttgagctcgatggaggcgacgctggccacgggctcagagctaggactgagtgacgatggccacgcgattcacatctgggatggggcaagaacaaagcagacacgaatccgggaggggcgttgctagccatgggcgcagattagggaacggtccgacggccatgtgcagaggaggatatgatccaagactggggctacctactgtttggtgagaagaaatatggtaggtcaacgacgagcaaacccacaacgacccatttatggtccaaaacattgattttgttgatatagaggatgtaatttagaggacgctgct

SEQ ID NO: 169987 - DNA, 655 bp, Zea Mays
ggaagcatgggtatatatatgtatagtcatcttattgtttaggataaaagataggttagggcaagaaaagcctaggataagcaagtttatgatgggaaataattccatgttgagtggtaatgcatctgaagattgtgtttgactcctctctttccttgacgaggttgatattttcttctccggtcttgagctcattgattcgcggtgactgcatatcatcgggggtgggggaatgtggttaagatagatttggatgagataggctacatgatgtaggtctaaagttcatttgatgttaggtgggaatagacagatttatgcaatccatcatgacactattggttgggttagctcttatgttcacggttgagttggtctaatgcactaattttaggtttaagtgcatgaggagagaacaagatttataggagtaggatccagtttatttgactagtgttaacttgttaagggctgtccttaggttagctcaacttaaggttagacttcatcaggttagattaacctattaggttggatcagatctagaataaatcgatatatatgactattttagactagataagatctaaatatttttttgattagctcatggttgttaaactagggtggataagtatgcttattaggataagat

SEQ ID NO: 169988 - DNA, 585 bp, Zea Mays
attatagcaaaattctgcccatggtaaccatttcagccatgatttaggacggtccccggctagacagcgaagatacatgatgattattctgttaacttctgactgaccatcggattgtgggtggaatgtcgagctcatctgtaacttcactctagccatggtaaacagttcagtccagaactggctagtgaaaactgtgtcccgatcactgactatcgagcatggcagaccatgaagtttgacaatttcgtcaaagaaggcctttgcaactgatgcagctgaatatggatgccccaaagcaatgaaatgaccatacttagagaactgatcaaccactgttagaactactgacttgccaccaacctttggaaatccttcaataaagtccatcgatatatcagcccacaccatagagggaattagcaagggttgaagtaggccggctgggtgaagatgctgagtcttgtgttgttggcaaactgcacagctgcgcacaaactccctgacactttggagagctttagaattgtaaaatgatgtgcgccacctgtgagctttctgcacgccttcatgaccagactcgtg

SEQ ID NO: 169989 - DNA, 381 bp, Zea Mays
aatagctttgtgtgtaggcactagacatgtttggtgcacccacatgacatgcttggtgcatccacgtaaaatagccattggtctactagtcatttaatgaccattggagatttggcatgtggtattaaatttgatgccttatggccttctccaacacatgttgcaaccctctcaaggtccctcatttggtaagggtctggtgcaacagtggacacttctggtgccctatcggcgcctttgatgatcatgtctggtgcacaccatgatgtctaatgtccctggttgcagttgcccttatgacattgtatttggagctcttgtcccatagtttatccggtgttgcgccaaacatgtctagcgctatcgatcagtctgttccac

SEQ ID NO: 169990 - DNA, 939 bp, Zea Mays
tcgaatatgttttaatggatagtttagcatgtttgtttcatggaggaagattcaaagaggatgaagagttcgagaatatacaatgtgaagtgaaaatgtttgagatgacacgtagctttagtgatcttatttgccatataagtagaagacacgagcaatagtatttgatgcctcaattcaaacatgtgggtggcttaccatagtcacatttagacactggtagtttaggatggacatatgcatccttacaagtctggtagtttaggatggagatggagtgtccatatgtttgagtttgtgtgtgtgtgagagagaaagagagttgtgtgcttgagcattgatggggtctggtcaaaagttagcattgtagagcattgttggactccaatgagctctatttcactcgagtgtgtgcgtttgagctatctgtttgctcggtctttgcattgttcattattccaaaagatactgatagtattgttctatctataacatgaactcttctttgttagaaaccgtatagtgggttgtctgcttgttgtaattatattgcatcaagtgttgatgtgaagacaatatctgcaaacttgctccattgattaatactttggagaccatccatccttctacatttgtattgattaccattgtatccatgtgtgggtagtcttttaattgaagatcctcttcagagaatgttattggtaaatgagaccatcgtgtcttcttgtatggttcatctcctaggatggtttttactctttgaaagtagtttttcctttattgcttactttcatgttccatattgtttcctttaatgattgttagtatcttgactttgcttgctattattatatttgtattgactatcgaatgcatgggagatctacaaccttagttattttgttgataggtctttgctacaaacacttcttatta

SEQ ID NO: 169991 - DNA, 566 bp, Zea Mays
gcttgtcaaatgcctctcttaggtcatggataaagctctcaatctgtcgagtattgaccatgatgtcgtcgacgtatgcctccatagtccttccgatcaaatcaccgaaacatttgaccatacatcgttggtatgtggcccctgcgttcttcataccgaacgacattgttacataacagtacgagccgaaaggggtgatgaaggatgtcgtgggatggtcggattccttcatcgcgatctgatggtagcgtgagtaggcatcgaggaagctcaaagcctcacaaccagatgttgaatcaaccacctactcgatacgcgggagggggaacatatcctttgggcatgccttgttcaagctagtgtaattgacacaaatcctctatttcttgctttatttttggaccaatacagggtttgccaggcattcagggtggttgatttctcagatgaatctggcagcgaggagcttgccgatctcctccccaatggccttgcgtttcccatcgtcaaagcggcgcagccgctgtttcacacggtttgacccagggtttatttgtaaagaatgc

SEQ ID NO: 169992 - DNA, 666 bp, Zea Mays
cgagatacattggaccgttcactatcttggcccgagtgggcagcctggcttatcgcttgctattgccggattccatggcaggggtacacccggtttttcatgtctctatgttgaggaagttcctgcgggatccggaccatcagattgagatggaaccaattgcggtgcagtaggatctgactctggagtgtcatccggtgcgtatattggaattctcggagcgtgtgttgaggaagagatcaattaagtatgtcaaggtcttatggactaatcagtctgagcgcgaggctacgtgggaacttgaggagctgatgcggtagaagtacccggaactttttgttgtgggtaagtgttgttgattcattaatcttttcttttgtcattccgatagaagcgtcagaattcgaggtcgaattctttttaagaggggtagagtgtgatacccggtttgcaaagaagagaagttgggggttgttctttttgtttttttccctcatccggttgttgttttggggatttggaattttgtggaaaacattcacaactagggcagtagaatttatttggtttgacgcttgcgttgcggtcgggagctgtcgcgtgggttagttggaccgcaattggtgtttcggcccattaatcctcccaaaccctagccgcctccct

SEQ ID NO: 169993 - DNA, 744 bp, Zea Mays
taagactcgcatagtagataagttcacacccctactcaggttagctgcatacccatcagggaacatcaacatcttgatccactaaagtacttccttcctctgggccctgcttaggacgaaatcggccttaggccttctccatgtctttccaccacttggcagcttcatctcttggtttagtctatcacataacactgccagatctactcttgcatttacgttatcctttgacttatcaggaatgtccataattgttgcccaaagtgcatcgacaaaattcttttcagtgtgcatcatgtcaatgttgtgtggaaggagcatgtcgtcataataggggagccgagtcaagccagacttatgtgtccacatatgctgctcaccatatcccacaaaaccaccttctgtattagccacgagcccatctatctattgatgaatttcggcaccagtcatcgttgcaggtgggcggtctgtcactatgacacctttcgtaaagttcttgatgtttaggtagaatggatggtcaggagggagaaattgtcgatgtttatcgaaggacgaatatttgccaccctttttcaaccaaatgaacctaagagcttccttgcaaactgggcatgggaacttaccgtgaacacactaggcgcagaatagcccatacaccggtaagtcatgcatggagtactggtaccaaacatgcattctgaagtttgtcttcatagctcggtcatacgtccatacccc

SEQ ID NO: 169994 - DNA, 532 bp, Zea Mays
ctgaatttgccgtcggagcttcgtttctgccgtgaatgtgttgtgcatcgtgggtgacatcaccgcctcgtcaaatcttggtatggcgccccctatccaaatcacgagtaggtgaatttcattttgcgtgattcctcggggtggtttgctcgtcgggctcgcggttagcgcgacaccggtgagggaccgccgtactctaggcacaccaccgtactctgccgtcgagggtaggagtggtcctctgtgtcgtccaatcctagcgtgacggccaggattagaactacgcgtaccgattcgcactgcgcatctgaggcgtcgatgcagtgtcgggcggttaggatccagtcacgtgtacgataaacctggacttgatctcagatcccagggctccgtttgcgtaccggttcgggattaaactgatctaatctacaccgtccgcttacgatccaacggccgagatctgatagttcccctttgcagaaccatattaacaaacgaatccctggccaatgcaataatcaacccaccgtcc

SEQ ID NO: 169995 - DNA, 389 bp, Zea Mays
gtttttggattgtgcatcaaaattcaggaaatgcaggggccctggcgcaatttgcactaagacacaggcaaccacaggacggactgcgggttggtttcctaattttaggagggctcttatgcaaagtcgtcggccgaaggggtatcggtggagatgagccgttggatccgatttggatggctcagattagatccgacgcccctcaaccccgcgagtgaccctggccatcggatcctcgatggatgattcagatttagtaatgaccagatcgaatagctcccgccagatctgaatcgaacgccgcagattgactcggtcgaatcagtatctagggtataatctcgaccgtagaatatcagatcgatggccacagcgttatcttcttccct

SEQ ID NO: 169996 - DNA, 401 bp, Zea Mays
tcatgcagtatctcacggctgtccgcagtcttgagagacaatttaagggctttaccttgcagcatgtggaccgagccaagaacaaggaggtcgatgcattggccaaagcagcagccagaggcgaggccttgccctttgacgtgttctaccatgtcatcggcacgccagccgtccgcagcccagagggcctacaaataacaaacggcaccgagggccaccgcatagtcaacctcatcatgaccgaacactggcaagcaccaatcaccctgttcctgcagggatattaccatccaagcgacatcaacgaggctaagcgcctcaagcaccgaagccgagacttcgcactcattgaggaccagctttacaagaagggggtcagccaacccatgcttaaatacgtc

SEQ ID NO: 169997 - DNA, 372 bp, Zea Mays
gaagtactgcatcctgagtggttagcaaatcttgttcttgtactcaaaaagaataaagtgaattggcgcatgtgcgtcgactatacggatctcaacaaacactgtccgaaggatcccttcggacttcctagaatagaccaggtggtagactcgaccgccgggtgttctgtgttgtccttcttggattgctactccgggtatcatcagattagcctagcaacagaagacgaggaaaaaactacattcatcaccccgtttggagctttctgctatacctccatgccgtttggcctcaaaaacgctggagcgacttaccatagagccattcagacatgcttagccgatcactggggcaagcgtgtagaagcttat

SEQ ID NO: 169998 - DNA, 523 bp, Zea Mays
ttatcatgatcgatcctggaaacattcgccaaataagatgtccattactggaccgacttcattttgcagatcaattgctccgtcctgtgccccgaaggaccctcacaacattggttcgttcagcgaacctcaggtaccaacatgtcaggacctggaagaaagcatgtccctgaacgaacatgaggatgcggctggaggtctcaacgaccatccgtactcgttcagcgagcctcaacctcaaacatcagcattcataactccgagcaagaacaaggcatcgatccagtccaagaaagggaaggcctctcccagcatcagtgaggagtgggagaagctcatcatcatcgacgacctcgacgacgactttgccagccccgcacatcccagaaccgctgttcacaaacctccccgccccaagccaccgtccccagtgaagccgctggacgagaagacttcaaggatcctggagaggctggagccccccagggcgaagaagcagagagcgaacattgttagcaaggcc

SEQ ID NO: 169999 - DNA, 416 bp, Zea Mays
gggcaaccttttatttccactttcatctttatctgagaagttgtgtttggctgtgttgatagtcagtgaagatgctcatttgttcagtattatgaagacttctatatatcttttcttatgctgaaagactgcaaggtcagatttgatgtgtgtatgcttactacagatgtctggcaacacgtgcagaggtggaagacgtgctcagcaggagcagcgggcaccccaagttgaggcacctcagcagtagttgccaccaccatccgcaatgaccattgagcagatgtttcggatgcaaacccaggcagtccaagcaattagtcaaactctagcaactatgcaacaagtgcagcaacagcaacccccacctcaacctcaaatgcaagtgtagatgtcgcagatgcctagggacaagcggg

SEQ ID NO: 170000 - DNA, 499 bp, Zea Mays
ctccccatccctcgccgcctcgcttcaccccacctatggtcgccgctgctcgcatcgccctgcggcccccacctctctctccctttctcctcgcaacgccgcccccgtttgtccaccaagtcaccacgcgcctgggagatggatcaaggggcgcgcagcagtccggtcaagacacgctcaacgaaagcttcaagatagcacgggagatggaagccccaccatcggctaggaatcgttgcatcacgtcatccgattcctctcccttccgttcctttgctttcgtggtggatgagaagaaagcggcgaagggcgcatcggaaaagagagcctggaggaggaggcacaccatccttcctcttgcacacggagtcctcaagctttctcctcaccttgctggaattccgggtgccatacatcatctctgtcggcaggcatgttgcccttctgcctcgctcgcagttcttccaagggctgcccgtctgtgtggtctggtttggtt

SEQ ID NO: 170001 - DNA, 867 bp, Zea Mays
gacaaaaaagagataattgtttgtaattagagcatttgtctcaagcaccaattaccaacaatacaagacaaaaagtacaaacaaaggagcctccactacctacatggggtggggagagctggacatggtttatggagaaagtgacatgggcaagtggagcactacttaaatagggatactacaatcaataaagtgacatggaccagagccgcactatctagggactactcggctactccatatggatcagagagccgcactatctactccacaattcatcaggaccacagccacaatgcccctgtcaattagagcctcaccttcttgaagaaagctggagccacaagctggaggggacctggaggcgtgctggagctgttgacacgctggatctgcaaatccggcgctggagtggggagagcggctagctggagacgcgcgccggacctgggagctccgcgcaggagcaggatgtgccctctgggagcgcggctgctacttgcggctcctccacagcgagcgtcgcggcgtcttcctgaccggctcctcccggctcctccagatccggcggtgggctgtgagcggcggcggacgagtggctgtgagcggggcggcggcggacgggctgtgagcggcggcggacggtcgattcgcaatcgattggggaaaaatcccttctaaggggacggacagggggccacatgtcagttacggcctccagggccacatgtcagttacggcctccagtcccgttctttaacggagacggcattcgagcactaaatggagtaaactttcgatctcgaggctaaaactgagtatgaacaaaaaacaggtatagaaatgaggtgtgcacctcaactaggc

SEQ ID NO: 170002 - DNA, 785 bp, Zea Mays
cagagggacagggactgacctgtggatggctggccacggcagggtacgattcacggcgacggagaactgatttggggcgaattcaaaattcgtgagctctggcgaacgattgctagcgattcacggtggctgggtgggtgatgaccctgcggggccggtgggggcttcaatttatagggctcaacggcggtggccgggaattttaacggcgacgcacggcggtcggaagggcagggaattactggcgcgcatgaactcgtgtccaccgttgtggcgacctcaccggcgacgattggacagccgtagcgagtcacggcgccgtggtggaaaggcaaagccacgtggcacaaggccgagaggcggcggttcaccggcgaagctatccgcgccagccgcaaagcagaagggggagatgacggtgagtcaccggagtgacctccagctcaccggcggcagagatccttttcctcgcgacgttatccatccaccacgagcgtgaatcttgacgccggtgacacgaatcacggcggggagtcaccggtggtgagatttttctgccgcggccgatctaatccacaatagagcattgtaccatggaaagcacctatttagagcggctgacagagcactttggagctccattttctcccaattccatgtggtaccaaacccaaacacccataacaaagttgttcctctttaataactctacaactttgttatagcaaccctaggtagattctcactggatcttagtcgaaatggctctcaaacttggatccaag

SEQ ID NO: 170003 - DNA, 428 bp, Zea Mays
cggtgaggcatccaaggaggtcggggaggttacggcggtcgcgtcgaggtacgggtcagcgtcagaggtggtctgggccggccggtccacgtgcggaggcgggggagttcgtcggcggcgagaaatgcagcctgcacacggcgagacagtccaattggttggcttgggaggcttgaccatgtgacatagaggaggtacacggaaggaatctgtgaatggcacatagacttacccggttcacgttcgatggggagcggaagaagtccggcgaggtgattcgggtcctccggtgaggctctgccggctctaagggcttggggagcttcacgggtctctggcgaagttagccgagccgatatcgaggactggggatggctggggcgagctggccacggtggccgaagctcaggttgcttggcgggcggtgg

SEQ ID NO: 170004 - DNA, 386 bp, Zea Mays
gaagttagtgtccttatcaggagaagaagtgttagtggagttggtcttgtctggaccaagaaaagggagttgtcaccaagtcaccgcccatattgaggagattaaaccatcagaggctatcaatgtagtatcagaattctcaaatgtgtttcccaaggagttaccgggtatgccacctgaaaggaaagttgaatttgccatagagcttataccaggcaccgcccctatttccaagagagcctatcgagtgtccggaccagagttggtggaactcaagaagcagattgatgagttgtcggagaagggctacatcagaccgagtacctcgccttgggcagccctagtgctgtttgtggaaaagaaggatggcacgaagaggatgtgca

SEQ ID NO: 170005 - DNA, 550 bp, Zea Mays
agcaccgtcgttcggccatccctgggtggtcgggcgggttcgccagggagcgcggctcgtgcgcagggtatcctcgggcttccttggctagattggtgactatctgggaactaggaatccctcaccggcgctcggttcatgtcgcagacccgccctgaaccgtggacgagctcgctactccttcaatcgcgggtaagaatctcccttccgtgctcgccatcaccccgtctaggtttagcaccggccaatttcaggttaggggcgttcgggcatcggattgcgcgtccgccggcgatgctccgccgtgggtgagcagtgctcagctgtcacgtggatttgggggagagaagaagaaccgtgggccagagatctagaattcaagggctgagattagatgattgcatacccttccgtagcattcggcctgatccgttgatctagatcggacggatagaatcaaatccagaataataaaatcctccccgtcatatttgcatccaacggttctagtcgcgtaccatttcacggccgcgccgatctaatctggggc

SEQ ID NO: 170006 - DNA, 699 bp, Zea Mays
cgcgcagtcgtcaaggaggcggcaccgaggatgtcggtcgacttcgaggtcctcgtcatggatcttgatccaacagtcgaggtggaagaacaccggctccagacgtttaacaggaggacgctaatactttgttcgatgtcggtaccagcatcaacctagacatgcctaggacggagactggcataggccccacaagacgtacccctaccgactctatggcccctactgatgtggcttgcactgctgccagtgatgatcgcggtagcaacaaatcaaggaagagggcacccagatctaaagtctagaacgacttcgaggagctaactcatgtcatcaatggtaagagggtcaggtatggttccatttgcaagtactataagcagactttgagtgccaaaactagctacggtataggccacttgctctggcatctaaagtgtaaactatctgtgaactgcttgtgatctgtatttgattctgattgtgatctgtatttgaggaaattgtatgtgttttgtgcctattacttgaactgtatgtatttgagtaattctgtatgaagtatatgtattcaggcccggctcagcacggtactgtaatgcttatcgtgctcccgacaagacatgacacggttaactcactattgtgtcatgcctgggccatgcccaatatagttgtgctggcatggcacgacacgag

SEQ ID NO: 170007 - DNA, 1151 bp, Zea Mays
cgctgattttctggacatccgatgggttccagctttcttttaatcgtgcgcatccaattgtctgcatcgagggggttgctagacccggcaaacgtgggaggcttgagtctcaggaaatcccccattctgtcttgcggtcttccaccattcggtcgttgattttccagacttcgagtgaggacctcgatgagtcgggtttgattggctaggacttgggctagatctaagggtagttgcggaggtgcggggaggtgggtttcactttcctctctatcggcttccccttcagctctcaggggaaaccctgtttcaatcctagaggcggtaggcgtggttttatccgaagccatctgccagggaagagagtcactattatgcacatgcaaattgttttcaaccaagttattttattcattacaccaatacattacaagcatatggctactacaggctgtactacacgagagtgttccctgaggtactatcgaactctttctctaaagtatccccaaattccttgagaagatcatcaaggcttgctagggatatatcctcggcgtcggaccaatcatctatcctgggggaggtggggctggaggggtcttcttcttcttctccgtttggcaccctcggttggtggtcttcttctggattttcttcttgggagcaagcttctttagcttcttgtcatagtccatctttaaggttcgataggcctcacgggtgttggcctcctcgccttttgctatgtcgagacactcctggagagatgtcttctcttgcttaagctctttgacttgctgctctaggctttccacccgggagtttaggtgggtgcagtgggaggagagatcactgtagtggttgtcgagggtgtggaggtatccagccatgtagacgatggtggggtcatcttctgtggggtctcctcctgacacagcctggagtcttttcctctaggtgggggtatttttgttcctgggtggaaaatatcgaaggggggtctcagggatctcttggcttcagttttggcacaactgtttaagggcttttcgggcaacattctggcaagtgtctgggaagcggtgcccgatgaaggtgacttggaagggagggtggtttgggtagtttcggctttctcccaggtagac

SEQ ID NO: 170008 - DNA, 560 bp, Zea Mays
ccctagtgagctctgttaggttgttacgtgtccagtgcaccagccctcgcctccaattagccactgtagctcgcaaattccaaacttcccccaaatcgggtttccgcgccaccgtgaacacctcgccgtggctagccctctgcaggtcagttcaagcttttttgcttgatgttctagcctcccttgagtcccctgctactcgtagacccgtttaattgaactagactaccctggatcaccaagaacacgtcggattgttcttggtttttgctgttgtcgtggacaaaaagattccgacccggattagtggaattagttgagggattaaggtcgccgggggtggaattaggtgtcatccaagcttgagcgccggtcattgtgtatcttggccggtacaggctcgccggagggatgctcgtcgccgtccaccgtcgtggaccaggtgctgcaaagaaatagaaatgcgggggcctccgagtaaatgtcagtgagagattggaatagtgtttagggctctttaccagttattcaaatggctaggggcctctgcgcaaatccac

SEQ ID NO: 170009 - DNA, 500 bp, Zea Mays
gtggccgtggacgtgtggtcaagccaagcttcttgaccaaatctgaactcaccaaattattgcagcttccgccatcaataataacacgtgcacgccgattctcgatggagaagaaagtctggaacaaattatggcgttgcagcttctctgatgatttaggctgagaaccaagaacacgctgcaccatgatgctttgaaggttcaccgtagcatcagcaccaagcatggcatcatcattagcagcaacatcactggagtcatcatcgtcaccctcaccgtcagaagcactaatgtagccatcatccgtagcaatgtatgttcgctgactccggcaatccttcttcacgtgaccaatcccatgacaacggtggcaaataatacccgaagaacgaccactagaaggtgttgcaggtgctggtgaattatgtttcttggcgggtacctacaaaggaaggttaccaacatgtgcagcaggtgtcaagggagtatgactcgaggca

SEQ ID NO: 170010 - DNA, 569 bp, Zea Mays
catgcagattggtggggatcagcagctggacaatacaccagtcagggagaaaaactttgctggaccatccaggtcaccatccacgacatagcacatgccagtccagtcttcagaaatcactcgaggtggaagtcaagtcattacagacccctacaacacccggtgctgtggagtttgcaacaccaccaacagtgacccccgacctagatgcagatcatgatgatgatgctccacgcagatacaaaactcttgaacacattcttggttcaggcaatgctcgagtgcaaaatgacatgggactcgttgaagagttactagcagcaataggtgatgaacctgccacaactgaagaagctgttcaagacccactctggcgtggtgctatgatagaggaactgcagtctatcaaggagaacaagacttggtcacttgtaacattgccaaagggacataggccaataggtctaaaatgggtttacaagctgaagcatgacgaaaaaggagacataatcaagcataaagctagattggtggcaaaagggtatgttcaaaggcatggagtggacttt

SEQ ID NO: 170011 - DNA, 952 bp, Zea Mays
gcctccagcccgcagccgagccagaggctctgccaactccctttgctctctgattcctggcgtttccctctcccccgccggcgatctccgtccaccgacggtgctccggcgactttgggcccctctccttccctccctcggtgagcagacctctccctctgttctcctctccctctctttctggtgagcagtggcccctcacttctcccttttgtgcaacacttcaaatcttgagaaatctggtgaatccctgttgtggttgtgagtctctgtgtgtattgagtatccctgcaggttcttagctccttcgggagggttttcccacctcaaatagccatttcaccgaaaacctaattccacgcacgccacgtgctcggtgaaatgcccaaaccagccaaacttgctccaattgaacccaaatttttcaggcaccttcacaacacttccagtaacccaaatttttcacgccaatccgagattccaggcttaaatttcaccaaatttcccgttttgagcgatcgtttccgagccgagtgcccaaattcctttttcttcgcctaaattcaaaccaagcacacacttcactcatattcacctatataaacctattcgtgaagtatcggctaaattccatatcgtttcgtgcctcaattcgaattccaaacctcctatggcactatttatccttcaaacgtcgctttcacgtcgtttgacttctcgatcgtctcatcttgtgtttcctgtgccatatttctcttgtgtatgtatttattcacatttcatatacttatgactatgtgactaatacgtgctcacctcttctgtcatttcagtgaccttgattgcccgtgtgccgtctcccatcctgcctggatcgtcacctctcgtgtgagctttccaggtagtcatctcattctttgctacatctatcggtcacttttgctctgtgctt

SEQ ID NO: 170012 - DNA, 473 bp, Zea Mays
gggtccaccaccgccataatccgaggtgaagatcctctaactttgttcgtcttgctatacacgtcgagtagtatttgttcgtagtggattaggggcatcgttgtggctgggcgacctcgccgaggggcgtgtgccgccgcgctggtcaatagcgttgtcgcgtacttgagtcttgggaggctgttggcgctcgggaaccattggatcgtttgccaacggtagtgattcaattggatcgggctgcatctggtccagtggttctgagatggacgtgtagatttgatccaaccgaaacgctttggtagttagtcaagggtcattgttctccgatcggtcagattccgggtgatccgttccgcttaggatccgtgccgttgattcttaatctagtggccaaactgtcgtagccatccgcgggttgatcgggtctaatctgatcccttgagtttcgatcgggtggtcatggacagcgg

SEQ ID NO: 170013 - DNA, 894 bp, Zea Mays
gcgcggctggtcccggctgctgtcgatgatggagcccaggaagtcgcggccgggcgccagcgccgccgctgccgccttgcgctcgctcgccagctgcaggatcagcgaccggatctcgtgcgtgagcttccagatcctccggttcttcctcgtgggcaggtgcctgagcgacgggatggtgaagatgacgctggtctcggacatgaggcccgacagcgccctgagccggaggaagatctcccgccccctggagtagtcgcccccgaagcaggccctggagatgacgtcgaaggagaagctccggatgtcctcgtccacgtcgagctccgcgacgccgcccggcgcggcggcgaccttgtcctcccacgacgtcagcagcggctgcgccgcgtccaccatcagctccaccatgccctgcgcggcgcgcgcacccaacgaatcgaacaggtaaacacgtatggacgtcgatcgatcggaatcggatgacaagacaagcggcgaccgtagtcttccttaccttgacctttgccatgtagaactcgggggcgatgagcttgcgctggcgatgccagtcggcgccgttggccttgaggacgccgcggccaaagaggggctcctggcccttctgcaggtaggtgggcttgcccatgtccagcgacacgcaacgcccgatctcgcggatcagctccgggtccgacacgtacagcgccggccggcggcgtagccagtacaggtacgtctcgcctgcagaaaacacagaacaaaaggcggtcggttcccgcgggtcagttgagatttcaaaagaactcggaatgactgctcttgggctggaggagaagtcgtgtcttattgggcagacaatgcatgcggcagctgtttcgacccgttatcttt

SEQ ID NO: 170014 - DNA, 314 bp, Zea Mays
ggcccatgaactttagcaaaaagctgcaactttgctcgttttcaatatccttattagcttaagatggtagatgatagaggggctggcttgttgttccttgtcagggaaacatcattagggtttctatccctaccttacatttcaagctccactctgcgaatagtgcagaacattgttttgtctgtctatatagctggtctagtgacctcagccatactctttgtactgggtgtagtcagcactagtactgtgactggagtctcagaccttgattatttaagatgcctccatggttccattcaagtattttatga

SEQ ID NO: 170015 - DNA, 1741 bp, Zea Mays
gcccagataatacttcagtaatcctaggtctgtcatcttgaaaacaactgccatctgtttcttgaatagcttgatgtcatcacaattggttctagtgattatcaaatcatccacatacactcgaaccaccaactatgatttgatgtttctcctgagataaatagcaggttctgaactgctctttttgaagccaagagacttcattgtcctgtccaacttttcattctaggctcgaggtgcttggtgtagcccatatagtgccctcctcagtttgagcaccttgtgctctttgctagtgaccacaaagcctgctggctactgcacatatacttcttcacccaattcaccatttaagaatgctgatttcacgcccatatgatgcattcccaaccctcatgtgctgcaagtgtaataagcaacctcactgaatcaagcctgactactggagcaaatacatcatcatagtcaataccatgctgttgtgcatatccctttactaccagttgtgccttgtgtttggatattgcaccttgctcatcccttttcaccttatatacccgtttgagaccgattactttgcgccctagaggaagatctgcaagtgtcaaggtctggttatcttcaattgatttcatctcctccatcattactttcctccagctcggactcctttctgcttcaccaaaggagactggttcatcagcacttactgcatgtaactcctcatctagcaacctccttgttgcataaccaggtagagttgtggattcaagtagtccatctatcttgcagaacctgagtggatcatcttctgctcgataggcatctagatattcatcaatatttccctccggtggtgaagcaaattccactccctgcatctcattctcctcttccaatacatgcactgcatcacatgaggggtcagaggggacagacccccagcaaattgctcatctttagattccccagagtcttgctcgtctccagattcctcagatgcttcttcctcaggatgtgtttgcttcctgatggcatattccattataaacacatcctggtcttcattggctgagttggtgtcccatgggtttcctagtcccactgggcctgctcatcgaagatgatgtcccttgaaacatggacgcgctcggtgatggggtcgtaggcgtggtacaccttcatgccttcttcatagccgatgaagatcatcttccttcctcgatcctccagcttcttcaaatgaggtacagtgttgcggatgtagacgatgcaaccgaacgtcttgaggtggtgcactgccggcttcttgccgtgccacgcctcaaatggagtcatcccatatacactcttggttgggcacctgttcaaaacatacacaactgtttttaccgcctctccccaaaaccagccagggagtttctttgccttgagcatactcattgttgttgctataatagtcccatttcagcgctccactacgccattctgttgaggactgtacggcgcagtgtgttgtcggtgaaccccaccagccgcacaatactccacgaactcacccgaggtgaactctcctcctcgatcagtttggagtgtcttcaacttgagtccagactctccttcagcttgcatctgaattattttcacagcatcaacaccttggtccttcgacgagatggcagccatccacatgtatctgctcagatcatccaccaacaagaagaagtatttgttacctctt

SEQ ID NO: 170016 - DNA, 582 bp, Zea Mays
caattatctacgaccgaaggggtatgggccatcctggaccgttgaatcagagttggacgtatgagattaaatcatgtccatctgaactggtacagccgtaagatcctaatcctacggtcatgattttatgaaatgagatccaacaggatctgaatgttaacagatcagtggtccagatcgaatttccgagccgccatctaccgcatcattctttggcccgcgatcgagatcccacggtcaagatctccccacccttcatcacagatccgatgggtcacgagtttcttctccccccagtgtccggtaagctgagcggcggcctcgcccagccgcacggtggcggaccacgccgcaggccgattccatggcgaccccgagctctaatctctattcaagcgagtgttacgcgatatatgaacacgatagcggcaaaacgtacccaagatggtagcgcagaggtgcttgcccacggtgcgagcgaaacccacggcatgcatgaagctcctatgacgaatttcacgagctccagtcagtatccacccgtggagacgacctgaggagatcctgcgcacaccgacgatg

SEQ ID NO: 170017 - DNA, 598 bp, Zea Mays
gcgcaccaaaattagggaagtgcaggggctaaactataaaattcccgagactcggactactagcgcatggactgtgggttgattatagctaaggtcagggtttctttagcaaaatggtcgccgcgaagagtgagtgaatgagagtcgtcggatgaagcagggacggctcggattagatcaactcacaaccgaaccggtacgctatggaatccctacgatctaaatccaacggtcacagtattatgagagccggcccagatctgagctgatcgatcatgattcaaccgcccggatcttacggaacgaatgggtatgatatcaactaatccgagccgtccaaaaccgatccggcggcgatggcgccatcttctccccaggcggccgagcccgacggcgcgagtaccattcacggcagagacatcaccggaggaggtgaatccagggctccaatgccaaaaccctaattcgctaggtgctatactaccgcaggaccagggtgagtacagcgcagggcttactcaccagagatggacggcggttgaggccaatcgcggcgcacgacagatcttgcggactccggcgagcaatcgccaaggtt

SEQ ID NO: 170018 - DNA, 380 bp, Zea Mays
tcaatttatagataataatcaatagttagaattcaaaccacaaggagatggaggtgaactggtcactggtggagcaagaagtagcagtcgatagctcggcacccgacaacagtagggacactcggacagatgacaaaggagatgcttgagtggtgttacctgctggtggagtggccaagtggtggtgcgctaggcaacaacaggtagcttccgtcgagtgctggtcaatgagtcactggcagcgctggtctatgttgcctgggccttcgatccacccctgctcgcaggctcgcacccatggctcccactttcactcagtgtgattgtgtcatcatgccatgcggcctttgctgttcacactccgcccccacacattccgc

SEQ ID NO: 170019 - DNA, 301 bp, Zea Mays
gtgaagcctcatagatagttagcttgagcagtcttcgccggccatggccggtacggaccgcgtccgggacgatctacgtgcgcgccgtggtcaggggcattcgcggagaagaaatagaaggggaagggcctttctgtgatttgtcagcgacacatcaaaacagtagaagaacctgtctccagatagataaaaccccgaggccctttctgcaaagctgccagggcgcgggtgcgcgcgggcgcctttctccctctagctgggccactgggctgaaatcagcccagtactattcacatgtttt

SEQ ID NO: 170020 - DNA, 500 bp, Zea Mays
aaaaagtgccatagaaggtttggaattcgaattaaggcacgaaacgatatgggatggagccgatacttcacgaataggtttatataggtaaatatgagggaagtgtgtgcttggtttgaatttagtcgaagaaaaagagatttgggcacccggctcggaaacgatcgctcaaaacgggaattttggtgaaatttaagcctgggatctcggattggcgaaaaattttgcaaggatgttgctggaagtgttgtggaggtgcctgaaaaatttgggttcaattggagtaagtttggctggtttgggcatttcatcgaacacatggtgtgcggggagttagggttttagggaaatggccatttgaggtatgaaaaccctcccgaaggagctaggatcctgcagggatacataatggggacaaagggacacattccaccaactggattcattggatttcacagaaattggatttttgcacaagggggtggtgacttggatgccac

SEQ ID NO: 170021 - DNA, 943 bp, Zea Mays
gttaagagtactcgacaggcggcagtggcaacccaacaacattcatacacacacacacaaaaaaaagtatactagtagggaactgaaaccaaaacatggagcgcagtagtgcagatcgattgttcatttctcggctgcgccgtactacgcggttcgccgcctgaaattgtttccgagggcatccaatccacatatctttttcacaaaggttttgctgttgggtgtcgactgtcgacgcaagaaagagaccgccttttgctgctataatttcattcccttttcccggctgtccaaatccatagccgtagaccgacgcaagcaggcaggcaggcgtaggtgaggtctacccgcccgcccaacaagtttccaagcgttccctctcatgcttgcttgacgtggagtggttaggtcacacgcacgcacctcatcgcccacccctccaccgccgcgcccgcgccggtccccagccacagccaagagaacacgcacgaaagacgaagaagaagaagaaaaacggcagtagatgagcggcggcaagccggcagccggttgatgaccgaaagatttttaaccaaaccacgagcagcagcaacgagacgtagctttccatacatcggctgtcctgtccttccttgtttatccccacagcaataacttcctcttctgctgacactggcctgggaagtgggattctgatgccaatttaattggccaggtaggcgccctgaattgccacacctaccggcccgccccaacccaatcatacatccatacggctacgagcgacggagcgagcgagggaagttgatgttgtagatgccatccttcctctcctccttccggatcgtagtcgtggcttgactcagcgtagcggccagggcagcggccatgtcgtcgtcggtccggcacggctcgtcgaggggccaggcatggtgagttaagt

SEQ ID NO: 170022 - DNA, 624 bp, Zea Mays
ctaccattgaacactaaagcccccttcggatatttcagtctttgggcaaagtgtctagcttctagtatttcttcctgggataatttcttccccgaagcatgtcgaataatgtagtcaacatcttcgttcggagcttcgggaccaggagttttggtcttttctggtacaatttgccctgtcgttttttcctcaggtgcggcagaattcgtctcggtggacactgaaggcccagcttcggattcggcctgaacttttgtagcttcagcaaattttcttaggggcagggctcaaggcctttgtagtctctatgacagcgtctagtacgctggccatcctcctcttcttgggagttgcggtaggaattctttgcatctttggcaaatttgcctctaccggtgggcttacgttttctggcacttttattactttttccacctgtggctccgcgaccttatcatctttaacttcggctggcccaactgtaggcaccttcggcactatagtcggctcttcagcgctctgcacaatcggagcagcttgctttgattcggcagctgaagaggtccccgcgccaaatttaggcaccacggccggttcaatgtaacgtgttcgatgggttcgaac

SEQ ID NO: 170023 - DNA, 567 bp, Zea Mays
tcacgtactgtacttaaaaattatatacacacatgagagagggaagtgcacaatactactaataaggggctgtttggttccttcggtcactctcataaactttagtgactacattttaatctctagaaatcatatttgaaagatcttttttaggcacatcgtttggtattttaaggatactaaaagtaactaataaagtttaggagggggaactaaacatcctctaagtatgcgatacgggagtgaaggattccaaagagatagatattgtcaaatctgagacggcactcggtactaccaaacgaggaagttgcaagatgcaataaaggcagggaagcggtacgttgacacatggtaaaagagaggctcaggaccaaagatgggcatagctagcatagagatggagggcaaagagaagatagcgttctacatctctatctatctaggagtatcggtccaagctgcacgcgtagtcacacgatctgagctcacatgctgatactgttgtcgaaatctggccggggaccactcgtgttgtgtcctccagctgaggagctgcatcacgaa

SEQ ID NO: 170024 - DNA, 479 bp, Zea Mays
agtagctctgccttccaattaaggaaaaaaaatagagtgtacaaggttgagagcctagccaagctctcaagtcacccttacagacaaggaggaagccccctagggagatccctaactcattcttacagaagcggtttcacccctatagagagagaagatccttattaacactccccacattaattgttcatatgacgttgaatcgtcgatattctatgtatagactgaaggattagcatgatgttttcatgcattggctatattattgaaggttggagtatctagtgtatgctaacaatctccagttcagtatgtgtctgaaagccatgtccatatgttcactatctggattattagtttatggactcaagaagtaaaaggttgccccccctatattttcattgttgttttccagtacctgtagctgactacagtatgctctgctgatgttgtgttccctgtgccgtgtagaacacacc

SEQ ID NO: 170025 - DNA, 624 bp, Zea Mays
ctaaattgaatgggtcagtgagtaccaggagcaagtaagggtgctgaaacaagaaagcagagggcgagatcggacctgaatcgagctggccacgacgaggcctctttcacggtggcggaaacacagtttgggggaaatgagcaattcgtggtctctggtgaacaattggaggtaattgctggtgctttggatgcgtgactaccctacggagctcatggcgtgctcaatttatagagtccgtgagcagtggcattcaatttggacgaattgtgctggcagtcgggaggggagctgagtcactggcgtggtgattagtggctttcaccgtggcgggctcaccggggatcaccgggcatgcctaacacgagcgactgcgacgtggtaattgccgaggcacgtggagttcggtcggcgggcggccaactccggtgaattatctgaaccggccgcaaagcagaaagggggtgcggcggccagctgcaaccgtgcccatactcaacagcggtgaagatctttctatcctggggtgttatccgggcctaagcgagcacaaatcacctcgccggcgtgaatccacgcgcgggggtcaccggcgtccagggaatctgaatctgctgatatttt

SEQ ID NO: 170026 - DNA, 506 bp, Zea Mays
gtacggtgcggtttggaccgtccggtcacacgcggacggtgaggatttgatccgcgtggtcgggagacggcatgcgcagggaaccgttggatgtgaatacgacgggtaggattttattacaccagattcgtttccacccgtccgatctagatgaacggaccaaaacaactcaacgcgagagggtaaacggggactaatcctagccgtccggcaggagatcaacggcccacgcgttttcccccaatcaccagacgagcgacggcggcgccgcccggaaccacggtggttcaccaccggaacccggccaagctcgcacccagaacaccaatcccgcgctcctacggcactacgcttagccctatcgaccacgaacccgatggcggctcaaccatccccggattccaaacagagaaccccgcccgcgcaaggttgtggcggcgccattgccgacgacgtgaatcctcaacaaaggcgcaccaatccccgaatcaagcagttctactcgt

SEQ ID NO: 170027 - DNA, 797 bp, Zea Mays
ccgaaggcccaaattagatcgcgaagggttacgccgcaacggccatcggatgaccgatcaacggcccacacgaccccatcgatcaaagtcgcatcatatcagattaacggttcagatcgcaccaggccaaattggtttcggactactaatctgagtcgaacacagggagatcaacggccaccattcatcttccagccctcgtcgccgagccgcgatgacgcacggtgattctgcgggaatgacgacaccccggcgacgagcactctgcgtgtcctaggggattctgagccgatgcccaggtttgctagctgcggctccgcccttctcttcccacgacgagcgattgccagcgagggccgagcacacagaatgcagttggggcgaggaaccatggcggcacacctttttctctctctctcacctctcatgtgtttgctcgcgctgcacgatgctcattgctcgcgacgcctgtatttatacggtcctgagcccgcgtggttgcgcagcaggcggatgcggcggttgtaacagccaccaagatcactggagggagggttgttaagcttcgcatagatccagcaaagaagacggagtccattcgggtgcgcccaccgtcatctgtttgagtccgccccaaggagaacgtcgaccaccaggccgggtccactgtgcagtggcgcaatcccccaatgcgcgtgggtggccgaccagtgtaggtgagggcccattttggtggttcggattcacgcggtctgttgtcgcagcgagcctttcgcgaggttggtgaagaaaccgac

SEQ ID NO: 170028 - DNA, 984 bp, Zea Mays
caagaactggatataaaacaggcatctaaactatcttgaaacaacttaactcttttatgtagctatccagaaattctttcgaaatgacaggcctcaaagttgctgttttgttattttttgaaacacaactcggaacggatcaacactggtgggaatatagtttccttctcttttattcttctctaatacaatcgtacattctgactgaccaactaactggctgggcccttagcattgactgcatgctttgcaccaacctccaaatacaaccatggagctgataattgcttttttcgctgtctgctctttgagttctggaagagaaaatagcacagttactgtgtttttttttgttaacttgttatctattgcactcgtgcaggggtttgcactgtcatgtttgcatgccagctaagatacaagttgttacttgttaggggtagctcaatgccaagaattgctgatcatgagtttactactactgtggtggatgaatcaccactatgcaagttattttcactaatgtatctgattggatggctgccttttcggtcataatggcatgtgatgggcacatgaaggcctcaattttggtatggtatggtaactctgattccggccatgggatactggagctagatggcaaaattctaagaacaatcaattgttcctagtctgatggcaaatgttatgctgatcattatgacatttgtctgtactaccttgtcatgattatcaattatttatatattacatttgcttatttaatgaggagaaatataaccttaaggcctttaaagtgtttgttgcacatcttcatggtccatacgctgggttgattgttccacccttagtgcatctctacgtccacattgtagagcttttgatagttacatgatgctgaacatagtgcatgacctattcattaatacaagattggcagaagagggtatctttaaaggcaaaaactgctatgcaatcaag

SEQ ID NO: 170029 - DNA, 1760 bp, Zea Mays
tgattttattattctagaaaactatagataaacaaaaaagaataccgagggtaaagggatctcaacggtacggcgcatgtgctgagactcgcagtggcagccacgccccgtcttcttcccggtcccgggcggccgggccccaggtccgggagcgtacagcgcagcaggagcccgccgcacgccgccgtcctactccggtactccctactcctgcaatcctgctccacacctcgcccgcctatccctcgtctccccacccagtcacctcacggccatccgtccatgctccaccaccagcagccagccgttccgacaagctccaatcataagataggaggcaccaccctcggcaaggaggagggacagctcacgcgcgctgcctgcccggcactggactcgagcggatcgacacatacacgcacgacgtagacgatacacaacaacagtacgcggggcgggggcgcactgacacacgcccgccccatcatccctgtcccccgtccgtccatctccccactcgtgcgagatagcgatgctcctgagcagaagctccaaagcctcatgatggcagcaccggccagagccggcattcgcagcagctgatcgaccgagatcggacaggcacgccaggcagctcatcaatgggtacgccactctgcactcccatgccagccagctcttggccgcttcttcttcttctgcctcttcctttcctttggggttccccatgctttttctttgccaactctgaggctcttgcccgctggtgccgacgtccgtgggggcagtgcccacatcggtgtgcatagataacccatccattgggtttttttgagtccttggagctctgtgttcctcggtctctgcgaaagcagtttccttcttcctcatccttttgtttaggagtatttttcattttgcgaaacgagcacattttaaccttccacaaccccactgcaaattttcaagacgataatcgatttatcgttggttagtcgctctggagtctggtgtgttcaaaggcgagacgggcgacgaatcttggttcccgaatcccaatggcgctctgtgctcaataaaagtgtgatggtcacatcgatcctctcgccagctcttgctcccctcctcctcctctgcttcttattccttcttctaaagctgcaacgattccaacctttacctcttttgctttcgcgatgtttctctttcccttttgatcggtttgatgtgacagtcttgtcaccataggcatcactccttcttgaccgcatccgcatcagtgaccgaccggtgacactgagcactgacggcactcgcattgctctctgctccttcctggttggtggtgttggtgagcaggacgagcaggaggaggaagcaagaagaatcctgggagctcgcgatgccgaggtggggggacgcggaggaaggagcagctgctgacgaggctatcgcggcggcagcggcagtgaggctggccaacaagatccggaagcgccgcgcggtgtcgtcgtcggggggctcggacccggcggccgggaggcggctacggtccaggaggcccgcggtgctgctgccgcggcgccggaccagcgcgggcggggacatgtcggagtcgtcccgtggccggcattgccgcggaggcggtacccgcctcgccgacgggacatggccgtccgcgtcggcgaggaggctcgtcgacgcgttctggcaggatatggacagcgacctgcttgaaggggatgcggcggcggcggcgg

SEQ ID NO: 170030 - DNA, 694 bp, Zea Mays
aattcgcaataaaagaaaaacagaaaagtagctcaaaccccctctccctcggccttttggcctagctcgtgcccccctctctccatctgccctgtggatccaactatcggtgccaacctcaccagctgcgcgcgctctccctctctctgtgctgagggcccgacccatctgcgttgtgtcgtttccctccgcgcgcctgtgcctctaagctccgtcctccccacaaccgtcgctgacctcgcccacgcatgcacgctgaaaagcccagccacatcgtgccccacattccccagctctttttgagccccgcgcgcacccgcctctctcccctgtctcattttacctactcacaacctctctcgcgctcagccgctgcctcctgagctcgccggtgatctacgcctaccatgccgaccacctggagctccaaacaccacgccaaggctccccgagcaccgtcccgatgcaaggaaccatccccacgtctttcctgccctgattttgttccctctgcggtgaattagtgctcgccggagtcgctacgcgcctgtctgccacgcccgctcggtgtccggccgatttagccccgcctcgtgcatgcgctttggccctaggcgtcccacatccctcaccagaccttgtgtcggcctcggcgcacccgatgacccctcctcgtagccgatattgctcgcct

SEQ ID NO: 170031 - DNA, 347 bp, Zea Mays
cagaaattcaatcttggcttcattagattgaggtccatacacacaagtaagccaccaatggtgtccctccactgaacaaaactgcacagaaatactatgaatgtctgtcctggtagctccagtgatccccaaatgtcgtctccaagcaataaggattccaccccttgcaccaatagaaggtagggccaacgaaccggtaaaatcagatcccaacatagagaggagagtactcggagaaggttgtgccatcttagtttcttgaagacagattatatccgcaccataacaattaaggagctcacggacagaattctgtcgagccagagagttgagacctctaacattcc

SEQ ID NO: 170032 - DNA, 607 bp, Zea Mays
atgaaagtcacttgtcccaatcctttccatagtgtagcacacatgccctcaacatgtcttccaaaatctgattcaccctttctgtctgaccatctgtttggggatggtatgctgagcttcttattacatgggtcccaagtgactcttgtaattgctcctaaaatcatgccacgaacggtgctcctctgtcagatactatagtccttggtattccatgcaagcgaattatctggtcaatgtaaatttcggcatacttttccgtcctgtgggtggtgtgtaccggcaagaaatgagttgtcttggtcaatctgtccacgatgacccaaatggaatcatggtgccaggaggtattgggcaatcccacgataaaattcatgcaaatatcctcccatttccaagatggtatgggaaggggttgcaaagtgcctgctaccttcaaatgactggccttgattctctatcaagtgtcacattcagatatatacttcgcaatttccctcttctgtaacaccccactgatcccacacaatggatgataccaaaagaaacctttctacaaaacttatgcaacacatagagaaagaaagtattgcaaaatccggcagca

SEQ ID NO: 170033 - DNA, 354 bp, Zea Mays
ctcgcctctcctctccggccgccagcacccctcagccaaattcttcaccgtcgctcgacgcgcctataaattgagtgtgccactagctccgtagggtagtcaagaaccccgccaccaagaattaccctcagtggatccccaacgagcgcgaatcttgcaattcccccaaatcggttcaaacaagccgctagaacacttcgccgtggtcagcccgattcaggtccaatctcgccctcggtttccttgtttcaacatccttgcttgctcttgatgctcgccgacccgctaaatcgaactagaccacccccaatccgcgggaacgtgtgctcccatgctcggtttccgccgtgcacg

SEQ ID NO: 170034 - DNA, 1052 bp, Zea Mays
gtcggttggtattcatatacttatgaaatctatcaaaggatttaaagaatatatattctaaaaaaacattggttattactgaaggcggtaactttcttttactggattattaagtggctacagcaacagtgaatgatcatacggttagtagaagcccagagagaccatatatctacacgcgttgcaatttactctgagcaaaatacgactatagatataagcaaagctgtcaagtggacaaggtgagctgaggctcacagcagggaatctttgtggaggacaatccaagcccccaaccaatacaccaacacagatatgatatgagtgccacccatgcacacatggatatgatgctgtcaattgcacacagaggcatcgatccaatcaaatgatggttttctttgccccgctgatcatccattccactcaccactcaccttgtgtccgtacgtcccttcttctccctcagtgaaagacagaaagggtgggcatggactgcagtgcatctttggaagaagggtgttttttgcacagatgattattagctacctcttgcccagggaagaagcagctgcagctagcagcatcattctctttccctcaactttcaccagacccctactccatttgcaacaggaattcattattgatgcaatggcagatgcattcaataaatggaatcatgctgattttgtgccgccattgccagccagatgctgcctcagacgcacccccaccacgtacactagcatcaaatggggaggcgaggctagctgatggtgcatgtggttacagcagggagcaggggggcatttaccagctggaattagtcgatgcatgtactaccattgttataggacttagctgtggtttcacatgcaaggcacacccctctcttcatgtgatatccttgctttgtgcatgacccactttattttgctctcacattaatttgttactgtcgtgtgtctggtgtgtgtaagtaagccaattaatcgtgttgttccaataaataacatgttttaatcttaagtctatagcagtgaaattcc

SEQ ID NO: 170035 - DNA, 871 bp, Zea Mays
gtgggcattagttgtcgttgcatcccactacgagatcgacctcaagcgggtgtgtgaaggctatatcctacctgacgaggatgaccttgccgaggcggaggtccggaggctcgacgacgtcgtcgaagggctaggctcctcactggctcaccactttgaggaagaggtggttctactagtctccccactcggcactgggtcctactcggccgtgacgcctctagatgatgctgagggtactgcctcccccaccttctgttgcttgagctattcatcctgcgggattgtaataaactcttaagcccattatgtgtgtaatgtcctgagactttcatatttgttctggggttttgttgtgcactttttctcgtgttttgtgtttatcgtcctatccttttgcagagttcctgtcaaaacgcgagttatcttcttaagagaaggatggtgagtgagggaaccgtatcctagaggcgtaggtgttctcgcggctcagccaccctttcctatcgggatgtctcctgttcttttatggttccgtcttatgactagggcgaaagcacaaaactcgttttttaaagaaaaaactcctgagaaaaagtggcacagagggggttacccgcttctagcccccaagggaggttcagtctagggaagacagggttgagccatacttgaaggttagactttttatttataagtatttggatacataacaacttggaaatctaaggttaaaagcgacatagctattcgatgttccaagcattcttgtagacttctctttattcattgccgagcttgtatgtccaatgtttcaacacctttgcgatgatgaaaggtccttcccaaggaggagtaagcttgtggtgcc

SEQ ID NO: 170036 - DNA, 444 bp, Zea Mays
gtcagagcgtgcacctttgagcaacgaacagttgctattccggccatctgcatttcatttcttcttttccccgtcgatgcgttcatgtccatcaaccatcgtgcatgcatcctccattcctccccgacaaaagaaacctgcccggtcggatcgtggccaccatcgggaaaggtagcccaggccgtcaccaccacgacacgagagagaaaccagtccaagtccagtccggtcggatcgtgcagtggccaccagcgggaagcccaggggccagggcgcgcggcatcaccacgagcgcctcgaatcacacacacctccatttggtaacctggaaaggcgacgcaactcacatcggacacgataccagcgtcagcgtctaccctctacccccggtgccgctgcacacatcatcgtgcggccagcggcctccggcgcggtggaagcggt

SEQ ID NO: 170037 - DNA, 521 bp, Zea Mays
tgaagatgcccgtggagtcagtgagccagaaaatcagatgtacgtacgtgcgtaccttagaggacataggcgagttggagtagctggagagcgtcaggtcaccggcggtgagcagatccaccaccgctatcgcttgaggggccttggtacaactctttgtcgctaggttggtgggcagattatgatgagtaaaacggcaccaccccacagccgctgcaaccactttcctcgcgtttctatgcattgaagacacgacgtgtgtgggtctgctgaatccgctttaccgtcccctacggagcgtcatgcatgggttgttgggctcctatcgcggtgcatttagcatgggcccaattgccatgccggtcgttgctatgaatggaagacatggcgtgtgtgggtttgtgtcattgtgtgggtgactgaggcgctcgtgcgctgtgcggggcgtagattcgctgaggacggggagtggatagacgaattgggttagatgcgatcgatgtgaagagaatgtgtcttgt

SEQ ID NO: 170038 - DNA, 487 bp, Zea Mays
tgagaggaattatcctacccatgacctcgagttggtcgttgttgtgtttgccctaaaatcgtggaggcattatctttatggtgagtcttgtgacatttacaccgatgacaagagtctcaagtacattttcactcagaaagagctgaatttgaggtagcgtcggtggcttgagttgataaaggattatgatctgtcaattcaatatcatccaggaaaggtgaatgtggtagttgatgcccttagcatgactggtgtcccgaaagtggccatgcctttgattgcagatttggatcgtatgggtgttgctttgtgctatgttggcactgctagagacgagactcagatgctcattcaatgttcccttcttgatagagtgtgtgtggcacaacagcacgatcgtttgttgcaggaggctcgtaagagagtcgacaatggtaaacctcgagagttcactattgatgagaatgatttggttcattttagagga

SEQ ID NO: 170039 - DNA, 1281 bp, Zea Mays
gccgttcccaatttggacttgatcatcaccatgatagcgttcccaaatggccaggcgatctaaatcactggtgatgtgatcagtggcgcctgtatccggaaaccaatctgtatccaccttgtacgaggatttggcggcaacattagcggatggttcttcgtcatcaagggaggcatccattcggtaccagcatcgacgagcagtgtggccggcaacttcacaaatttgacagatcggaggtccagagccacgaccccgtccacgaaaaggcgagccacggctccggcccctagactaaggagtaccacgaccacggtcagatcgaccgcgaccacggaacgagccacgacgcccaacaaaatttgccgaggcaccaagattcagctgctgttcagtgtgatgacgaagttgacgtgcttcaaacgccagtagatgagcaaaaacatcatccaaggttggagtagacggtagggtggtcatggtagtaacaaatggatcatattcgactggaagacctgcaaacagataggcaagaaactcctcgtcacgaagaggagagtcagcagccgcgagttcatgggcaagaccacgaaccttgttgaagaagttggacgccgtcagatctcgcttcttgcatgtagcgagttcagtacggatctgaaccgtacgcgtccgtgaagcggatgcaaattttttgtgcagagagtcccaggcttctttcgccatggtggcagtgacgacatcacgtagcacatcttccgtcatggatgaagaaggccactgagtagctgctgatcacgatcataccagcgatcatattctgggttggcaaggacagcggcaccggagtccgtagtcgtggagattgtcatgggaggcgctggtgtggatccatcgagatggccgagcagcttagtgttgcgaagaaacgacatgagttgggcgcgccagagaggatagttggtggtggtgaggcgtatggtgactgcttgatgcatagagatggcagccatggtggaggaggaagacatcatagcggaagaggtggtggaaggggaggaggaggagattccgacggtggtagtggacatgctaaaccttcggctctggtaccatgtgagaaggaaggcagcgcgcctctctagggtggcctactcttgattatatacaccacgaggattacattgggtggttacagccggagagatatccggagagaatcaaggaggagacgcagctccataattatcctgaattatatactaccaaatatgtctaata

SEQ ID NO: 170040 - DNA, 630 bp, Zea Mays
gggtgataagcggtgctgaaatctagctcggtgcccatagctttctgaaggcttgtccagaatttggaggtgaactgggttcccctatctgacactatctttcttgggatgccatggagtctgactatctctttgagataaattcgggcaagggtggctcctccaaaggtagtttttactggaatgaaatgggctaccttggtgaggcgatctattattacccagatagagtcattccctttttgcgtctgtggtagtccggttacaaaatccatgcctatttcttcccacttccattcaggcacggggaggggttgtaataggcctgcaggtttttggtgctcggccttcatcctttggcaggtgtcacactgggccacatactgagctatctctttcttcatccctctccaccagtatctagttcctgggtggatggagtaggctgagttgtgagcttcctcgagcaggacctctcgtgcttccccttttggtacacaaagacgatttttgaaccaaagggctccttgttcatctgccctgaggtcagggagttgttccttgtgggctttttccacaagtcttgttgtctctgggtctaggcgttgagctttgtatatgaggtcttcc

SEQ ID NO: 170041 - DNA, 526 bp, Zea Mays
agcaggggtcaaggcttttgtggtctccatgacaacatctagcacactggccatcctccttctcttgggagttgcgacaggagcctttggcgcattcggcaattctgcctctgctggtgggctcagaatatccggcattatcactgttatttccaatttttgctctttggacacataatctttggcttcggttggcccgactgtaggcaccttcggcactacaatagacccttcagcgctccgagcggcgggagcgtcttgttctgcttcgacagtggaggaagtcccctcaccaaattcaggcactacgaccgtttcaatatatcgaggccggtgcgtcaaaaccttcattttcttgcccttcggcacatcggtggtggccgaagcgacatttttcctcttttttcctttcctcaaggggtagcagtaatcaggatatatgaagccaattgcatcaaaaaccctgtttaatcttttcttgccccgacccccgaaggctgcggacaaggcatcatcttcggccttg

SEQ ID NO: 170042 - DNA, 619 bp, Zea Mays
gtttgcgcgggcaaatttctcgccgaagtacgaccttcgccgcagatccgcctgtaccgcggccagtggtcaccgcctacttcaacaccggtatgatgtatctcaatcggttcgctatgtcctcctgttcgcgttgtgctaatcaagtgtcgggatcgggtcttgggtcatcgaacggcctgctccggcgggagggctcaaccgcggcctggtgcgccgcctcgctcaggctggtggaggaaggtgaagacgcatgacccctgatttgataaccaacggccaggatcatagcgcagcactgtttcagactggggccatctgggccgtccgatttggggtgaaggagtaggatttgggcgaacttcataatatctaggccgtcgatcttgaatctgacggatcaagtctcgtaccagttcggttgattatagatctgatctacgccattgatggacaattctacagtccagatcaagtaaaaccttgcgccgagcctgttttgcaaaagggaccctagggaactaaagaatcaacccgccatcctatcgggggagcgttgtgtctggggtattttaccctgatggccctgccttcctctgtattaatgcgcccagtccag

SEQ ID NO: 170043 - DNA, 728 bp, Zea Mays
ctacaataaagattatgaaagcttgtccaaaatagtttattaaaaactccaaacaagccattcaagtggaggttcaatggggaaatctgaaattcagatttctgaattttcagcctttgaaccaaaaccgagcgcgttcaccttgatccttagctctaatcctaatgctcccattgacaaaaatgtgcctaactaacccctctacctcatactagaagatggcatcgggacgcgtgctctggacacgtcaaacccgggatcttctctctgtgctcggcagtgagacaaacccaacttcacccctccatatctcttgatccagtcagcaaaacctgcaagcccccacacacaaacgacaaaggaatgtcaggggaagagatctctcaatgggatcatggccataatctcaaagatttggagccaatccgtgcttgaacacgacctctctctgcgctgcctcgtgctcgacgctgtgccagacgccagagcgcgcactggcgctcgcccgcgcacgccccgagcgcttgtcagagcctcgcctcggccacgctcgcccatgcctttaaaacctcccccgggtgcgcctcacctcaccccgtgctcaccctcgctggccaaacgcccctccttagctccggcgagctttcctccgcccgccatcaccgcccgagcctcggccaccgcggccagctcactccagccacgtccaagttgcgcctgcccctcga

SEQ ID NO: 170044 - DNA, 596 bp, Zea Mays
actctgtgcaaaagtcgcccaagggtgcagccggactaccacaacaagtacacgatacgaagtctttcgcttaaaggagaccaacagtccacattgcaatacaagttgcagttacatacactcagcgaagggtcactagacccaccgcacaaataaacacaactatgccctccgttaccgccgcgcaacgcgagggcaccatacattacattggctcgactttcggaatgatgcccgcctccctataattgaacaacattattctcaattcctcaccctcaaaaagcttccgcagatccccctcgccaatgcttgtcccaatcggtgaagacagtagctctcgtttcccaaaccgatctactcgaagacggtcccactccatccccatccgacggcgcctaccacttcgcataaactcgccaatgctatgcttcgacaccacccttcgtcgccgacactaggtcctcgcaccaggaagattagacaccttgccaacctccacctgccgcaaggactccgccgtggccgcatctaacgcaacaaaataatccaaatcttcaccagacgactctttgctccaggacaacggactccca

SEQ ID NO: 170045 - DNA, 340 bp, Zea Mays
aggaaatatccaagagggcctaaatcaaacatcttaaactgctcactaagatgttgttttacttgagaaatatgttctggatcatcacccgtaatcaacatgtcatcaacatataatagaagcaaggtgcgccctcgtgaagaggaataaagaaataaagcgggatcatggtcactaggggtaaaaccagcagcccttatgacaacgaagaacctttgaaaccaagcacgaggggcctgtttcaatccatataaagctttacgcagacgacagacatgtccgaaaggaatatcaactcctggtggtgggtgcatataaacttctttatgtaaatcaccat

SEQ ID NO: 170046 - DNA, 498 bp, Zea Mays
tgtggcgaaagaaaacatgttagaaagagggctcagatgtttttaagtttcggtaataatgtatttgatgtgtggtttgttgtgaggataaatttttaaaatgcggattatgtgttgggaaatacatcgataggtgtctatgtgaaaagtgtattgttttatgcatgtgatcgatgattgggatagtcgaggcgaatgaggagtatgattaatcctgttagagtcactatgttgttgatgccttgtgcgtaacatggggacacgtatgtgcgtttgtgctgtggtgtattatagtggtggtggcgtaagatatttgattgaggtgtgcgggtatatgccgtaatatggttatactcgcaacgaggaaagatgtatgcattgtgtaacacgacacttaggtcactattatataatcgtgttaaggatgctcatgatggtcgtgtgattgaggagtgatgtagtggcaagcgagaagtaagtttagtttttcaaacggtt

SEQ ID NO: 170047 - DNA, 661 bp, Zea Mays
gcacaataatctctttttttgaaatatgacaaagatgaatatattcaaatgcccaggccagacagtcctgaatggttcttcctttgatgaagccatattgatttttgtggacaagggaagtcatcactgtctgtaaccggttagccagcagcttagtgatgattttcatactattattcagaagcgagattggtctgaagtcacccactactctggcattatccttcttcggtatcaggacaatataagaaccattaatgcttcgaaggcaaacatccccgtggaaaaattggtcacataagtcatagaagtcttgtgaaataatcggccagcattttttgataaagttggtattaaacccatcaggtcccggggatttatcagaaggaagggccgccacaatactatcaatttcttgctttgaaaaaggctcatctaaccaatgcaagtcactgcggcagagcaacaaactagaaagatcaaagacattgtccacgaaatcggaggagcccaagcgacgtttgaacgcattccaaagcaaattggctttgagctcatgccctgtaaagactgaaccactttcatctgagagcaacgcaattgtatttcggccatgccttaccgttgcatgggcatgaaagaatctggagcagatatctcc

SEQ ID NO: 170048 - DNA, 942 bp, Zea Mays
ttggacagtcacaccggtcaccgtttgccacctgcagtgctggtaagaacgttgtaagagcggggtaagacgcttcataatttgtattccaccacccctgagagatagttgtagggttcacattgtttgttgcctgtttgtctctgttttgtgctaacaatgacaggaccaaagaatcaaatggacaaggacaaggggcctaaacttaacgacaatgagtgtgtctctcaaatggaattgaaggagatgatgtgcgcgatgactgaagcttttaaaaaataccaggactctgcggcgacatcctatgagtagcttgatcgacgagttgataaatttgttacacgcatggacgtactggaggctcgtgcccccccaccaactccagccccatctcactctcctgtggacgacgacgacgatgacgatgatgtttatgcaccgctgccacaacgcttcgcacgtaatcgacaaggtatgagaggtaatggtagacatcgtcatcataatcctcaaccagaccatgatccatttgctaagattaagttctctattccaccgttcatgggttcttatgatgctgaagcttacttagactgggagatgatggtagaacaaaaatttaattcccatcttgttcctgagcagcatagggttagacaagccactagtgaatttagagattttgctatcatttggtggaatgaactagttaacacacgtgctgcaccacaaacatggaatgcgttaaaagaggagatgcgagctcgctttgttcccccttcttatagacgtgatcttcgaaaacaattgcattgcttagatcagagagacatgccggtacaggaatactaccaagagcttcagaaaggtatgctacgatgtggggtagttgaggatccggaggatcaaatggttaggttttatgggggattgaggcgggag

SEQ ID NO: 170049 - DNA, 571 bp, Zea Mays
cgcccattcctcagactactctcgggcgtgcccaacctcgccagcccgccgtgcaacgtggctatggtggcaagcagggcacttgagaaaataataaaaagatcatttgttaagcaaccaaatcaaatgattggggctgcgattgtagcctctgaactgcagctgattggttcggatcggaggcatcccaattacaccaataatgaaggctttccttgagcttatcatggatggaacaggggggaaatttgggcagaatgcagagtcgagttgttgagaacaaatttgtagccagaacaacctcccaatgatgggaatttggtgcaggatcctacatcggcgcccattcctcagactactctcgggcgtgcccaacctcgccatcctgccatgcaatgtggctgtggtggcaagcaggaagtcacgctcctcccaatgccacactcccggcctaggtcctcaaggctgatgctgaggagtaggaactcgtcactctagcacttcggttttctgaaatctgaagcagaaacgagatctcatctagagcttcagtgttctagcgaccagggag

SEQ ID NO: 170050 - DNA, 368 bp, Zea Mays
gaagccgttgcatccaaagttgttataagacaactcatgaatattgtagaagcatctcgcatccggctctagtccttgactcctcatgacccatataaaacctcccactctgattagaacttcgggggtaagctgatgaaggtatatctcgaatgtcttcaaaacttcgaccaacattttgtggagttgaaaacgaagcccagctttcatgaagctcctgaataccaccacttcatcactttcaggaaggggaacaatgttttctcctccagccctcactatggacacatcatgaaaatatttccctttcatcgcctcaatatgcccttgtctgatagtcgattttcaaacaacaacgtggcttggcc

SEQ ID NO: 170051 - DNA, 595 bp, Zea Mays
ggaggatagctgcccgaaggatcctggggcggaggataagaagaggattgacctggatcccctggtggggaggcgaggcaaactgctcacgatcatcaaagaattcttcatcttctggagtcatgaaaggcaccccatatgcctgctggtgccactcattgatttctggtggaggaggatgtagaggcacatcagtcaaatggggagcaaatggcatacccatagaggaagcttgacgacgaagattgtcgtcaatctcccgctgccgccgagccagctcatgcacatctgaagatatatttctgcacatggaaaagaatgttgcaataccatgggccagactagcacccatcccgcgaccatgacctcgaccacgaccatgaccatgtagtgtgggagatccgcgaccaggagatggacacgagggtccggcagcagcaggtccacgagagctagagggggatttcctcagacgccctgctggattttttggatcaatccagaagggggtgtaagatagatgtcttgtgcctttctcatagcgaaactgagtcaccacttcaatcatcttcatgatgaagggggcgtgaagaca

SEQ ID NO: 170052 - DNA, 870 bp, Zea Mays
gtgagccccaaaacaatcatggaatatatcgatgcacatgcacacgtacaatacattatactagtggaaactgtattctacatgtcgccatgtcggcatctatgtagcttatgatgattgttggtgaacgacaatgttccccgtgtggtcgttgtcacgcttttgggccatgaaaggccggtccgtattatagcaaacatactaatactctatcatatactactgtacaagaaacagtcctgctgctggcacaaagataacgacattagttgaattaagcagatgcaagttgggacggcgcctacatagctgactcgtctcgcatatatatgttcgatcgctaatatgtgtgtgttggcatggacctgtcgtacgtgcgtatgcatgcggacgggacgatgtctggatgcatgtaacattgtgggacattcgtaagcgttacatgattatatgtattcatatcaatttttcatataatacttaatacatgtattctaatctttttttattcattgtgctcgacaaaagcctttattgctgagtgccaccccgcactctcggcactctcggcatagactctacgtatgggctcataggagctctttttgtcgagtgtcgtgtttagccggcactcggtaaagaagacctgtttgccaagtgttgagcgtaatactcggcgaaggctctatcaccatcacttggcaccgtctatcagttggcactcggcaaagactttgctaagtgtccgatataaagtagtcgacaaaaagggtgttgtcgatgatcggttcattgagctctctttactgatcgcttgtggcactcagcaaagacctctattccattagtgaagttatctctaaaatcaag

SEQ ID NO: 170053 - DNA, 773 bp, Zea Mays
cgtaggcgtgtatatattagtacccccgacatatcaccacataagtgcgagggaaacggtctttcagagttaaaagagaggcgataagtcggacaagttaagtcgggcatgttaaatcgggtagaaaactcattccggcatattagtcggatgataggagttagtcgtctaggctagagcacaagggtataggaaactaagtgaagtacatagttcattatcagccattggacctcaaacatagaatgagacacagggaaaaggaaggaactcagtacacaacatcgaaaaatggcaactttattatataaaggggcgccattacatgaacataatcagttcattacaaactgactccaacaaaagatccccactcctactactacccctacacaacatctactacctaagccggtggtgcctcaccgccgtcgccaccatcgccattgccgcccttcgccctgccgtcgtccccacaaccgctgccgctgccctcgctgttgttgtcgctgttaccaccttcaccaccacttctaacgccaccgccactatcgtctttaccaccgtcgctgccaaccttgtcgtctgctccaccttcatcgccgccatcataccctttgtcctcgccctcattcttctcctcatcctcctcctcgaacccctccttagactccctcgagtcatcgagaccggcacactccagaccactgaggtaagccctctcccatggggacaaccccatcgagtcatccgtgcagacggacgatggggag

SEQ ID NO: 170054 - DNA, 452 bp, Zea Mays
ttccacatccgcgccctcgcttggatcgagagcgaggaggggtatcaccatggatctcctgttcatctgaagagtcggattctaccactgatgggttccttcgtcgcaccattctaagaaataagagatagaacctatgatgagcaaggatcaaccacgtttgagaagaaatgcataagagattgaatcatgcacttcaaccgttcatatgagcggttcaactacaatgaacaatatcaaatcgctaatctcaaacagtgtttgtgacaaaatgaagatagcctaagtgttgcaatcacttaaaccaaaatatacccaacgaatgatacataagataatcaagaacgcgtaggatcgagtacaaggaaataacatagaacaatacctcgatccgaagatggggttcaagatctcccaacgagaaggaggaagatggtggaaacacgccggga

SEQ ID NO: 170055 - DNA, 437 bp, Zea Mays
atcgtccagaaacttgcagagcttgagaaaatagtcataaattatcggagcttgcgatgacatggctagatcgagcagaccatgccccgccgctagcgtcaaaagctaagttgatcagttggtagtgtctacgtccacggcccccctacgcctccttgagttcccccttggccaccggcttaagctagaaggcgatgatggggaaggcgtgtccgagccatgcggggtgtggaacaagatcttagtgctggaggggaccttcttatggctaagagtggaggcatgcacatatgtttgttagagcggggtggcggccaggcgcggcatgcacgaaggcttgttggagatgggtggcggacaagcgcgacatgcatggcgggaccttgccacggagtcgcgggcgagcggcatcctgtgtcagtccagcgaggtgggag

SEQ ID NO: 170056 - DNA, 995 bp, Zea Mays
ctgactttggagctctgtatttctaaaaatacaaggaatttgcctagggtcaacacatcaaacttgtagagctataataggagtgcaactttgcttaagtaactaagccttgatcacatacaaagtttggagtaaagggagctcaaagttgagctgtcagactaaggctctgtagttttcaggaaaaacagttgtacagggccgactttgggaccatgtggagctcaatttgaagggtatttgactaaaacctttgtaacaagattaaagttggtttgtaggggagtaactttgatgcagtcgacttactatgttgttgtacaaaaatcaaagaactagtggtgtgaagttgttctgtcataaacaagccatgcgaactgggcaatactgaaagccagatttagagcaccatggtctcagtgagatgcagtcgatttgagagcaccagatctaaaattctatgcagttttgatccaagaatcctatagcaaatttgaaggctgttgtctgtgaacattttttattaatggagattaccctgttcttaacaagaatcaagagaaagagggggtgaaaggaggtcggttcagcagaacaatgaagatcaaagaaccggaaatatctacagaaggaaaagatcactggttactgtggtttcggatgtgtgcaggtgaagtggagataggaacgaccgtggtcagataactatgggctgattcacggtcccgcgagcctagccggagcctggccggagatttttcgcaagtgctcgccgtggcgcggtattttgtcaccgtgtcactcgcgccaccaccttacctcactatgcctcttccttacatggtagtcatgcgctaacaatgcattttgtggccgcggatcgttagctggaccgtcgtgcctataaatagcgctaggaacaacgacgaggcactcaccatttcaccagtgagctcgatagaagccaaaattcgcactgcctcctcctcctctcc

SEQ ID NO: 170057 - DNA, 806 bp, Zea Mays
cggaggatacccacgatgcgattattttcatgccttttctcatccaaggactggcattgacagtgtcttccttctttcatggccttctttttttattctctaaatcttacgcatctgaataccaattctgtgctttaaatcaccgtgtttgtccacctcttccttggaattttcccaaactttgggctttggaaatacctttaccattgtcagcctgggatggccgaagggcagcatcagcttgtcggaggtgctagtttggaacttcgttgaggcaggaaaactgaatacctcgatattcctttgaaagatagtattaagggatggcgctttgaatggtttaccatggagaatcataagaagtcgcttcctgctcgctcaggaagacagcctgacgtccgaacgcctagctggacagaggtcccgaccgacttagaccttgttgaggccagggttttgctcgccgagatatctgtgttgaagaacagaggcctgaccgttgaagctgtcattgtcaactttgttttcaagaacattcaacctttgaaagatagagtctacccgacttatctatacaccggtgttaatgacccctctcgagttgctgataagcggatatctaaggaggacgtgctgagtcgtgttgactcgatgctgaggggcaaagcttcgaatgctggtgctcctccttcatactctgcttggaatcttccccctatggtaagcgccactgtatatgagtttctgtacttgtcgtacgtagtgcccttaatgtgccattttgtcattgcagaggtccttttcag

SEQ ID NO: 170058 - DNA, 492 bp, Zea Mays
gaacaatatcaaaccgctaaactctaacaatgttcgtgacaaatgaagataatctaagtgttgcaagcacttaaactaaaatgtacccaactaatgatacattagataatcaagaacgcgtaggatcgagtgaaaagaaatgaaatagggcaataccttgatccggagatttagtcaagaaatcccaacaaggttgagggagatgatggagaacgccggaatgaacagatcttcaacaaaatcttccaaagatgagagggcacaagtaggtttttggagtggagaaggtgtgaaggagagagaggaaaaagagtgggcggcggcggctggaaagtgaaactgagaagaagagaagaggggagagggagtgaaataggggaggagtcgaccggtcaaaagacagaaaaccggttcaaccggtttctggtcaaactgtgcagtaaaagcgcgcagaaaaaggtattgactgcgcgaaatttctggcagtctgac

SEQ ID NO: 170059 - DNA, 828 bp, Zea Mays
gtggatttcatgcctccgatgagatcctgggctcgctcatccatggtgatgtcgatgtctgcctcccagaacaattattcggaggtggctggcgccttttggagtatggctcgaacgaaggccgagtcgttggatccccgttagaagtcttcaattacggccacctcagtgacttcagggatgcatttcctcattgtttgaaaccttttaaggaacgatcagagggtctcatcgttctggcgcctgatggatttgagctcccatggctacgccggcttatcggagagagattggaagttcacgataaatcggcgactgaagtcactccaatcgtcgatgcagtgccgaggtagatgtcggagccactacagcacgtcttaccctaggacaatgggcaagtacgccatcatgacgtcctccgttgccccagcaacccgggtggcagttgtgtagacggccaaccagcctgccgggtcctgcttaggctcgtacttgtcaacgttcgagaccttgaagttgggaggccattggatggcctagagacacggagtgagcgcgaaatctccgcacgtgtcttcctgccgatgttcatgttgtcggtcccggggaggggattcagtagtaggtcgtctcgaccgtccccggaacggaccactggttgagactgccgccgactcaacttgggtgccgcaactccgtgctggtacgccgtgatccttgtcgtattcctcccgacgccttatctcattttcatgtcgttggtcgtgcgaaacactgatggtgctctgcgcgtctcgtcggctattgatggcatgacgcaggtcattc

SEQ ID NO: 170060 - DNA, 738 bp, Zea Mays
gagaggaagcttacaaatattctgagatgataaggggcttcgggggaagatttcatccaagacatgttagaacaatacacaacccaggacaaagtgaagacaagagcagccataataaagggcagtagagtcactcccaatcaacaaggacacaccataattccttcagaccacctgcccaagaggcaggggaggatgaagctttggaggaaaatacaactcctagccaagaagactattctacctgttctatggagaggataagggacatacaacaaggacttgccaagtcacaatacaaaagcagaagaaaatagctgaagccgaagcaaggcagaatcagccaaaacaagttcttcatactacttcgtactactctccatacatcctagagtatgtacgcaaccaacagccacttcaacagcctacaactttagttgcctcaataagccactctccggctaggtgggccttacctcaaccacccacatcagtcccaacttcgtcttataatcaacagccttaagggcaatatcaggatcaacaacaacgtgatgcgagggaagagtccgaagctcgaatagttaacaacactgttctataatctaaacacatatactaaagcactagaggggctggatcaagaatccaaagctatcttcaaacaacctattgtaatttttgtttcttttgctttatatttgcccccaaaaaacacttcaagaaggtccatccttt

SEQ ID NO: 170061 - DNA, 633 bp, Zea Mays
gtcagattggtgaaccttgttaggttgtgttatgtgcttcccttgtcttgctatctaggtgatattgtaattgttcaaccctttttgcaaaaaaaggtgttgtctgtcctgctcataaaaagacacccccactttaaacaaccttgagtttagtgagtgaaacctcaaaaaaaatatttatgcttgtgttagtgttttctaacccttgtgtgttttacccataaagttacacctgcacagcttatagaaccccacagcctgactgctagaccaacccaagtctctttgtgcacttgttacaaaaaaatgttgtttggtgtctagttgcgcaacccctatcaaggccatgtttctttccataagtccttgtccctaaaacgtcataacatttctgttgatcatcctagctgatcctgtttgctacctctccttttgcctagatctggtaaccctttttcttgtgaatcatgttggctttatcatccaaatctctggaaccttcatcgattctgccccgttatcaggttatctgctataacccgttctcaagaatcggatgttgatctcgcctaaatctctcatttctgatcattctcatacccccttctctgaggattatgacgctgttttatc

SEQ ID NO: 170062 - DNA, 779 bp, Zea Mays
gggtgctagagagacattagtttggggctggtagtagggttgctggtaatattctatgttttgttcctcatacccaatcgtgtatggtctgatgtgatacccgtatggtctagttacgtgctcggacggtccgaacgtctccactgtccctggcgtggttttcgttggctcatcacgggggatggggtcaactgctgctggatgaagaggatgtccgagaagaaggagcttggtgtggtgttgtgcattccctccatctactttgagggcagagtggtcgggatggtcgtctgtggtgccttcaggtcgcgccggacctagaggcgcacacttctcattgccaaatgatccgactccacacccgagtgggtgatatggacatcagagtttgttgtgtcagtagtaggaccttagtcggtcgagccacaagtgtcgcaacgcccctggggtcgactgattttggcatgatcctccgcggaacgaaaacccaccgaggttctcgcattgtcggcaaaattttcgctggcgccgttcatggcgaccctgcagccgcttttggcaccatcagggaaggtttcttcccgggtgggtcagctatgcggtgtaggatacctgcctgatctgtgatgcaggagatagatgtaaagtggaagacttctctggcatcgaaggtgatcatggtgttgaaggtgattgccatggagtcgttgtttatgcacatcaaatcccctacctagcgtgccagctgtcggagttcaggaccactgcgcaccacgggg

SEQ ID NO: 170063 - DNA, 415 bp, Zea Mays
ggctgagggtacctttggcattatagccggatcttcagccttctgcgtaggaggaatgggctcttttggttcagcagctgaagaagtctcgtcaccaaactcaggcaccatggccggttcaatatagcgtggccggtgggtaaggaccttcatctttttgcttgtagccttcggcacaggttcggctgaggcggccacagcagtagctttccttttcttcccttgcccccgcagcaggtaacagtagtcgggatacacgaagccaagagcgtcaaaaactttgttcaatctcctttttcctcgacctccgaaggctatggacaatgcattatcttctgccatggaatatgatccaagtagttcatcacttgtcacttcgatgcatttcaaccagtcatcgtttggttcatcgaac

SEQ ID NO: 170064 - DNA, 818 bp, Zea Mays
ttttgaatttcctgccttctaatcgttgctagctgctgcatggttgctaaatattaatgttttctctattactttgaacagacgtttgaacttgatttgtgttgctgagtggtgcttgctggacattactggatttttaggtaaccactgaaacatcagcgccttctttctctaataaaactctaatgttcaccatatattgcattttgacttactagggaatcctagaattggttatagatgcttgattcaataggatatctctcttttcgttatagctctatggcatgcatgatttatggtaaaatgcatatacagggacaaccataggttcaaatgttcaaaaacaaaaaacttgaaacgaagaccacctagagaacaaatttgcagctgaaactacttatagccagttttacttcagttgcataataattcactgtaactgttaagattatcttgattaaattccttgtgtggtgcttgatcgtagctttagtaattacaatgttgtccttttttattttgtttatatctagctgcacgagctgcactttgcttctgaacgatcctgtttgcctgcaaaggacactgtacacttttctgccctgttggaaaaggtatgtttcccctctactcgtttaatctgcaatggttgtatgatccattctgtaattgtctgccttggagtaacatacacacagattatagcttgttaacataaatctgaactttttttaatacggaactgttttcttgtcccattccctttctttaaattacttatgtacaaatgtcattgccacaaatgtgattccctc

SEQ ID NO: 170065 - DNA, 576 bp, Zea Mays
cagttagtaagtatcatgacaaatttattcaattatcacgatatgctccagatgaagttgtagatgatgagaggaagcaagagcacttggtagagggactgaatggaccactgcagtatgcactggttgctcacaccttcccgtcatttcagagactcttggacaaagctctagctattgaacacaagtgtgctcaactaggagaaatgaagcggaaggccattacctaggtgcagggtagcagcagtgttcgtccttgttatgttccgccctaggaccagctcgtcctagaggaggaccacgcccagctcagtatgcaccacaggggactccacaaacaccccacactcgtcaggctgcccccactggcacccggcaaggcccacaggacagaggacaggccccacatgcttcaagtgtagtcaggttgggcactatgcaaatgcttgtctgatggggaactccagcacacccgctcagaacaagcaacagactccaacctctggcaagggattcagcattgccaaggtcaaccaagtcagtgccgaggccactacttatggagcggatatcgct

SEQ ID NO: 170066 - DNA, 788 bp, Zea Mays
agtggtttggcaagcatcacagggttatgagaatactcaaacgagggagcagaaggtgtgggctgacctgaatcgcgctggccgcggtgaggctgtttccacggtggcggagactgactttgggggaagttcgaaattggagctctctagtgattggttgcgaacaatacgtggtggctgggtgctggatgaccttgcggagctaggggagggctcaatttatagggagagcgagcggtggtgatcaatttggccgagccgtgctggcggccagagatgaagaagaacgcgggtgcggtgaatacgtgttcagtgtcgtggcagtaactccggtggtcgacgggaagttagagggagtcacggcgatgcggtggcgaggtttggacacgcggcgcaaggtcggacgacggctgtcgccggtgagtttatccgaagtggtcgtggcaagtacggtacggtggccggaattgtttatcggccggacttatccacgacgaggacccatacttgatcccaagtgttatccactcggtcagcacgaatcacggcggccaaaaacgcgaatccatgtgcggcggtagtcggcggcgaggtgcactgcatctctgatattttgctactgtaccatgggaaattcagtttatgacgcctgacagagcaacttcagggcaattcttctccaatttttgcattacaacttcgtcatctctttgcaccaaagttgcagggctaccatccagctataactttgctacattggattcctacaaaaagccactggatcctgc

SEQ ID NO: 170067 - DNA, 871 bp, Zea Mays
cttaagtcggatgatgagctcataagcaagaaccagtaacctttgaatcgattatttcaaaatcaactcaaagattggaggcttgtgagggacagatatcccccgggtccacttggcgggcaaaaacttcgcccggggccacgtgacagttgcccctctatgacatcccgacgtgggccgggcaaagggaaacgatggaagcgggccaacccaggagtgcgatgggcctaggcccggactagtcgcggattgggcgtgatcgtgttgaggccgtttgtctttcccgcgcccgacatcctcaaacgctagagatagctcggatcgaaggcgtctggttttactcgggacaatgaaggttgtttgctattaattaggagataagcaggaaaagtatgatcaacatgtacgctggaagcaccctatggtcgtgtatataaggccaagggggaccccctccattttcatctcattagcatctcacagctcggtagacaccacctataacactactcacatacaaagccatcctaggaagaagggtatgacgctcctcatagcggcccaaacctactgaaaaccgcctctctctctctctctctctctcccaagcacgaaccatcgagttacgatccacgacaccgtcctacccaaaagcaccacgagggtatccccgggtgtgcggtcggacacaaaacaccgacaccttaaggtgtcacttctccgccttgcaccaaatttcggcggattcaccccggccgaatccatcggtggacaagtaggatgtcatatcaagcaaggggtcagtctaagggccctgaccccctacctggtgcaccaaatgccagaggtggaatcctccacccggttggca

SEQ ID NO: 170068 - DNA, 558 bp, Zea Mays
tttaacaaggacatcaattttgagctcaaccctaaaccctatgcggatcgaagatggaaccaaccctcgatcagacctcacacttaccacctgataagatttttgacacagggtaacaagccatggcgaacaaaggcatatgtggcaggggggagggatgggcttaaacttcgtaggatgaagcccttttccatgtacgtgaccctatcacgcaagatcgaagacccgtgaaaggatcatgatgcccaagaggtggggtgaattgggcttttctaaaaatcaacaaatattaaaccctaaacaagagcctaacttcacccaactactagcaataagtaaatactactagaaaaatagcaaccctaattcattacttcaaatacttgctaagcaattgaacaaagtgaaatgctcaaattaaatgcggaatgtaaagcaaggttaagaagactcctacaattttttgccgaggtaacgaagagtcggcactcttccctagtcctcgttggagcacccgcgcaagggtatcgctcccccttagtcctcgcaagaaccaag

SEQ ID NO: 170069 - DNA, 767 bp, Zea Mays
aaaggacactagaaggacccgactttgttaaagaggccgaagagaaagttgccctgatccgcaagaggttacttgaagctcagagtcgacagaaaagttttgcagacaacagacggagagaactcagatttgaggaaggagatttcgtatacctcaaggtctccccgatgcgtggtgtcaaaaggttccaaatgaaaggaaagctagcaccgcgtttcgtcggcccctatcccgtcattagcaaagtgggacccacagcataccgccttgaactaccagaatccatgtcagatattcacaatgtgtttcatgtgtcctagcttcgtaaatgcctgcaagtaccagagaaccacatcgaggcagagacaattcagattcaaaaagatctccagtaccgggaaaagccaataaagattcttgactaagcagtccgaaagacccgcaactcagaagtaagactctgtaaggttcagtggagcagagaaggagaagaggaagccacctgggaaagtgtggactctctgaggagggaatacccttaccttttctcgagccctgtctgaatctcgagggcgagattcctttaagtggggtaggtttgtaacatcccaattttcaacccgaggtttggaaccctaatccaacccccctcttattatccatccctaatctcccctaggttttctcatcatatgcatacacttggtttgattggaagcacctcacttagattataatttttttatcccctaagtatatctagttaa

SEQ ID NO: 170070 - DNA, 493 bp, Zea Mays
tagcacaacaaatgcgcaaaaccgaagtcttcctcaaaagactatccgtgcaaaagtctacaccaagaaactgtccgcgcaaagaccgactacaggcgcagccagaccgacataataaacgtgctagaccaagcgcgcaacgcccctatgaacatagccggatgcgcgaaggcgcacaacctcatcatacaaactatagttacatatgtacagcgagggcatcacaccttacataggttcaaccttcggaatgattccatctacctatagttaaatagcactatcctaagctcctcaccctcaaaaagacttcgcaactccccctcaccccaaccggcgaggacaacaattcccgcttgtcagccctgcccacacgaagccgaccgccatccacttcactcactctacgcttcgccaccgcccttcgccgcctacgcccagcactcggaccaggcaaaacttcagcatccgtaacatgcggagaagcctccgc

SEQ ID NO: 170071 - DNA, 993 bp, Zea Mays
ccatggtacagtacctggatcagattagatcgccagtgcaggactctcaccgccgacgaccgatccccgccatgattcgcgccaccaccgttgagatttacactaccagtgattagataagcttgccagatagtaacccttcgccggaggataattccggtgaatcaccgccgtaccccatgtgccttgtggcttgcgcagataaactcgtcggtgaaccgccgtcgcacggccttgcgccgcgtgtccaagccttgccaccgcaccgccaccattcactttagctccccgttgctcactggaatagctgccacgacgttgaacacgtatttactgcgccagtgttcttcttcatctccggtcgccagcacggctcggccgaattgatcaccaccgctcgctatccctataaattgaaggccgggactgctgcgctaggtcatcacgaagccgacacacccgttcttcccctcaattgcccaccatagccggagaattcccctttttcccccaaattggtctccgccaccgcaaagcacaactccaccgtggctagtccgttctggtaaggcaccatccaattcgtgcgttgttctcgtgtctttgtatgctggtgatgctctccaacccgtctaattgaattaggccgccagccattgccgggaacacaagcaaaagtccttagccttcgctgtcctcgtgggcagggcggagtatgtcaccaaccgtgcgattaacttaggggaaatgctcggagtaggtctgatttggtgtccgccgctcgggaacgccagtcgttgccccgttaggccggtctgccagctcaccggagctcggtcgcgttcaccgtcgtcgtggacttcaccctgcgaaggaatagaaaccggaggactcttctgcaaatcgtcagtgacacagtgaaagaaccagtctccagttagccaagaactcgaggcccttttcacaaaacagccatcgcgcgcacggccgcgg

SEQ ID NO: 170072 - DNA, 1043 bp, Zea Mays
ataccgccctggctcacacatgccattcttctccatagagagtgctatacggagggcagtccaaggcgaattgatccacaaatccctaccaaggttatcggcacaaggaatcgcgcccacaggaatatgcggcttggcggctaaggcatcaccgatgaccaatcgggcggcatcagcacattaatcagcgctcgattcatcgctaattgaagcagagaaggtctcaagaggaaggagggagttcttacaagcaattagtcggcaccgaagccagcacacgcggaagtgcggattcaccacgaacttcaaccctgatgacgaaatccgtgctccactcgccgtcaccagtccggccaagtcaaggccgtgccattgcgagggtatgcggatgcccaggtgcttcttcccggtccggtcgcggccacaccacacgcagagctcgcggcgacgcagagcgtggtcacgacgacggtgcttctgtgctggaggacgagggtcacgccaatctttataggggcagggcaagcgcccagcgcggatgaggggatttttcggccggttagttgcacctgcccagcgagatttgcgcagcgaccaggaggaatcccgtcgcgagccatgagatgcgcgagttgttgaagatgacgcttctagacagtgggccccacttgtaagcggtgaggttggcgcggcctgagacaagagcgaggctgtccaacgggacccagctgtcggcaccaacacacgagtgggctgcgcgggatgggaatgaagatgggccgcgagcgtaaggtagaggaggtgggccagaatgaaggtagccggcccaggcgccatgtcttcttcttttctaatattttctatttttgttcccctttcaattccaattccatttagctccaaattcaaattcaaaggttttgtggcaatttctttatccacagattacattatgccatgacaagttctaatttgtggatattatttatgtttttatttccctaatatttgtttgtttctctcttctaaatttttgaatctct

SEQ ID NO: 170073 - DNA, 781 bp, Zea Mays
aattcaacaatttgatgtagctactacaacctcatctagtatttgttagtaatatataggttatatgatatgaaatgctaatggttattccaatctatggttgatgaacagttctgtgacattggtccacatggcaccaagattatagtgttcaatctgtggtccaacgacgatggtaatttggagctcgactttgacacagatccggaggtaaccatcaaatacatcacttgaattatttaacataattattgtttttattgttaaagtagcattcttaagtccgatgattgtgtctattggaatactgttgcaacaatctaaaaccattcttataaaatttgctgtgttttgttgattgtttttcaataaataggaatttattttcttgaagttatttgttgtatactgttagagtgcgctttgtcagttttttggtgttccctgctgggttgctcatgaaagtccttgttgtttgtttgtatttcaggatattatgattagtggagcgccaaatccagaagaaattagaaattctgtaaaaagggctaatgagaaccatttggcaaatcgactacgctattctcttagggtgagtatcatatagtttaacattcctgcacaataccagtgagctggttgctgacatagcattgtgcaggtctatgcttctgtgttgtatctgcagctaccagattactttaggatcatacttcgagggcaagaagttaagcgtcatcgcattgccgctgacctaatatatcctgaatgcatcagttat

SEQ ID NO: 170074 - DNA, 724 bp, Zea Mays
cttgatgcgtgttcaagtatttttgggacaaagatataaacaacatatgactcatatcctaaacaaatctgaaattcatggtagtgaaataagcaaaactatttaaatggaggtagtgatccacgccatctggtttgaaataagtagtctttggattctgtagaaatcttgcagcttcgaaactgaaaagaaaataatataagtaagtgatcaacaacattaatgtttcatgatgttctatattgtacccgtgcataaatttaaatggaggtagccaattatacacaagaatcaagttaacaacaatatcattgttgttggacatccctgcgagatcaattgcccctgacgaaacaacctaagaactggatgtgctactgaatgtgtatagtctagaacaatactgtactcaactccaaaccactccctctccccaaaaccgatatgcactgaattgcatgtcttggtgatgcatggataattgatgttccttctcctcctgttcctcctcttactccacctattcccacatcttgggggacaaaggcagcttcagatcttcctgagtcaaaacatgcaacttaggagccaataccttgctacatttcaatgcatgtcctggttcatacttctcccaaaagcaaaacacaagccatgcactctttcagttctctccttactgcatcccctattctctgccactcctcttaccacagtcccgttg

SEQ ID NO: 170075 - DNA, 840 bp, Zea Mays
ggagctgaatttgaggcagcgtcggtgacttgaattgattaaagattatgatttgtccattcattatcacccggagaaggctaatgtagtggctgatgcccttagcaggtccggggttccaaaagtggccttgccgttgatcgctgatctggaccgtttggggatcgctttgtgttatgtcggcagcgttagcgaggagactcagatgcttattcaatcctccctcatggagagagtgcgtgcggctcagcagcaggatcgtctattgcaggaagctcgaaagagggttggtgatggtaaaccatgggagttcaccattgatgagaatgatttggttcgtttcaggagccatctttgtgtggctcagaattcagaggtgaagatggatatcttgagagaagctcataaaatgccttacaccgttcaccctggcgaaaccaaaatgtaccaagatttgaagcaaaacttctggtggaagcgtatgaaggttgacgtttccaagtatgtggccgcctgtgaagtatgtcaacgcgtgaaggccgagcataagcggcctgcaggtttactgaagccattagaaattccagagtggaaatgggagcatatcaccatggattttgtggtgggtctacctcgttcccctcggggcagggatgctatatgggtggtagtggatcgcttgactaagtctgcacattttattcccatgaagaccacaaattcagcttcagatttggttcccttgtatatgaaggaagtagtcacgcttcacggggtacctaagtccattgtttctgatcgagactccaaatttgtatccaaattctgggagagtcttca

SEQ ID NO: 170076 - DNA, 475 bp, Zea Mays
agcagcagctcatgcatttagtcttctgttgccgtccagtctgttctcttgattctctttctctctggtgatccgccccgatcacacacacattcagaggccagagagcgacgacggacgacgacagccgggcacagtactgtctgtacacgtatggcacggctttgttattgtatattggtgacgagatcgagctggtaccttagcttcatccatgagctagccttcagtacaataatacaccatagaactactactgcatggcttcagttgttctgtacgtgttgggatcctgggcaagttttcaatgtgtgtgtgtgtgtgtgtgtggtcgcctgacatgagacataaagagagatcgccaagagagggacagacgagagagcgagggggagcaacattttccaacagctgttgtgcagtcacgtattgtagctatcggagggcctctttgggtacgtacactttctctttg

SEQ ID NO: 170077 - DNA, 456 bp, Zea Mays
caatgctgaatgttggcaccaacgttccagttgatcctgacaggaaggttggcctgcagttcgcgtctctgccgatctgatgctattcgcctattcctcgggaaatcaagatacaagctccaaataaattgggtaatgattactagcaagcacacacttgacactagacgcctattcctcgggaaatcaagatacaagctccaaataaattgggtaatgattactagcaagcacacacttgacactagacgcacctcgtagtcacatgcagaaaattatgtttctccgcaactcagttttacagaactggaacctctcgtttacacctaagttgccatgtcatattgtaacgtttcgtgcattcgttctaaaatcgctactacttattaagactgtaagagtagtctgccatcattccatgttctgtcatttcgtgttctgtctttctcatttccc

SEQ ID NO: 170078 - DNA, 773 bp, Zea Mays
aacttcggcatcagcttgagcttgtgtagttttggtttctgcttgcccgatttcggcttcggcctgcgacttggtttcagttggaacgactttctttgtaggagcagggctcaatgcctttgtagtctccagcactgcatccagtacgttggccatccttctcctcttaggagttgcatcagaagtcttttgcatctttggcagatttgcctctatcggagggctcagaatctttggcattttttcgtcaatctttggctcttcagccttttcaaccttatcttcgactggctcaactatatgcgtcttcggcattacagttgattcttcagcgccctgtgcagtcgaagcagtttgtattgctttggctattgaagaggaccctgcgccaaagtcaggcaccacagccggttcaatgtaacgcgaccggtgggtcggaaccttcacctttttgcccttcgacacaggctcagctggggtgacgaaagcggcaatcttcctctttttctgttgccctcgcagcgggtaccgataatcggggtatatgaagccgattgcatcaaaatctctgttcagtcttttctccctccgacctccgaaggctgcggacagagtattatctttggccttggaataagctccaagcagttcatcactggtagcttcgatacacttcagtcagtcgtcgtttggctcatcaaatttctccctgaatctgaaggtatacttcagtcggaccagaccacctttgctagaatcggtggtggtctcct

SEQ ID NO: 170079 - DNA, 286 bp, Zea Mays
ccagtgctcgatcggccctctctcggacagtgccacgaccatgaggaccccacatcctgtcataaagcgccccagccgacctcttttacacatcatcttcaacctagaaaattctgcggtcgaagtcctcgctcgcccggtcgaagacttcgaagtgcctacatccttcgtgggagaaggcattcgctgccccctcgcaggtgacaagatatgcataggacatgaggcctgtcacgatgaacgggagtgactccagctcctcctgcggccacccaagaaagcgaag

SEQ ID NO: 170080 - DNA, 273 bp, Zea Mays
cgaggccgtcgacgttaggaaaggagagggctctggggcgtagatcctcggttcaaggtctgagattaaatccacgcggtaccgattcagggattgctgctcggccgctgatccaccatcgtgcggtcatgtgtgtgtagatcgttgagcgcggggaaccgtagatctttgatcaaacggtcggtgatgcgtaccgtttcagtgatactgcgatttaatctggagcgtaggtgtatgatcggacggcttagatctgtccataccccttcggcc

SEQ ID NO: 170081 - DNA, 513 bp, Zea Mays
gtgtgaggcgaagccgcgactcatctcgctccccaccaccgcgaggctgatgaacatccttgaagccaagcaccggtggaagagtgccgctctcacaaggtcgcatacctccaacaaaggaaaaacaagaccggtagcatcggcccgctagggaggacaaaaggcacaaactctctagtggcaagctcatcggaatggataatgtcggcgcaaatcctttcgctgagcgccggcgcattccatccaagcaagtggtataccattccgagcactcactcagtttggatgtgctcggggtgaagtcacaaggccatggcaaactacggcaacacaaagcagaaaccttgaaggcaaaggggaacatagagctcgaagatgaaagggcaccgcgagtgggagagaagcaagacttggctgctacccgaggggtgaacccctttttaaaggcagatttccctgctcgcgccccgaagcgtcacgggcaaggtctcccccgatgcgcaccagggttcc

SEQ ID NO: 170082 - DNA, 419 bp, Zea Mays
ccatctccttatatccttcaaccaaactaattgccatcaggagcctaagtttcacattaagatcacgtaggatgtattacctttttttttcactggcatccacataatccaaaacatactgggataggcaagtaaacctctcaaatagtccatcacactcgcttcttcaccttactttagatccaaaaacgctttgaactttatttgtataggggcttctggaacatgacgtgcccgaaatacctcacagaattcggcccaagaaatttgatgtccctctggctataacgcaaggtattctgcccaccaactaaacttggcttccagtcttcaaaaacaaggaaaggtagcatagaaaggcaaagacagacaacatgaacaaggtagatgaaacacgtactaaagctactacatagggg

SEQ ID NO: 170083 - DNA, 514 bp, Zea Mays
tatatggggctatgagaacatcgttgagaaagaacggtccagggagcaccgaggcacctacagaggtgaccggaaaagtggaactgtttccaacgacgatcgaggtagggtgtgtgaggggaggtgagtgggagcgagatagcatgcctgtggtgggagtggtgtgataggatgctccggagtcgatgacctagtcagatggcggaggggccaacgccatggtgcgatagtatgtggcggcgagggcgatagggtcccagcctccagcgaacgaaggccacgtcgtcgtgggagacgacccctgtcggtacccagaatcaggggtaccctcttctacagtatgaaggtgttgtacatctacgacgtctccaggtcacacggagaacggctcccgaccccaccgcatgggcaggtctaaaggcaccacgtggcaaggaaaggtaatacatccaggatgtatcattgggtccgaacctccacagtaggacatcggacccctgtgcgtacaagcccg

SEQ ID NO: 170084 - DNA, 530 bp, Zea Mays
atcaggtccttcatttgctgttcccaatggtccagctcccattgcagcaacatcggaaggcacgtccgggtgcagtcgagcatacaatacatgtacttcttcatgtaaagtattacagtacaattgtaggctttcgagggacgcactaagctctaccacatgagctagagcttttgcttcgtggtcccaagcgattgaacgcgagttgacggcccaatcaatgaacgaatcccgttttgaaatctcgtactgtaagcggctgactttggctgacaattccgctatactatgactgtgctgctctcgtgccctattcctgtgacgtagctctgaccaaagttgttccacgctggcttccaggtttccaattgggtcattactgccactactacttccttcgtgcctagaagctaactgatgtcgtggcacgccaaaaggtccagtagatttgcgtgttgttttcctagtacgcgccatatctccataagaggggaagatttattagtatattcttaaacatgatgcatgca

SEQ ID NO: 170085 - DNA, 581 bp, Zea Mays
ccgccgtaagcttcgcgagtcggttaaccgcttcagccttgccgccggaagtgaggaagaagcaatggcagtgccagcaaagtgaggaggaagcaacgtcacttgccagctccgacactcaggaaaattaagagagagagagagagaagagaaatgaaacccaccagcgcaagagtcctcgacccccgggggtctttcctgcagacatggaacaaggtgttcgtgatatcgtgcctcgtttcagtctccgtggactcgctcttcctctacgccccggcgatcgacggcgacatcggctgcctgtacctggacgacaagctggagaagatagcctgcctcctgcgctccctcaccgatgccctgtacctgctccgcatggcgttccagttctccacagcctttgcggctcccactcctcccggagcgtttggccgcggtgtcctggtcgacgacctgctggccatagcgaagcactacctgtcgacgtatttcctggtcgacgtcttggctattctgccactgccccaggtagtacggtaccctgttctgttctttacgccacagatacttgtatatcgatc

SEQ ID NO: 170086 - DNA, 413 bp, Zea Mays
ttattatccattctcaattttctttcctttttagccatgaatcaagtcaactagtaccatgttcgtgtgttgcgacaacacacaaattatttgataaaactttatatcaattcatgttccaataatgtaccctactttagtcaaacacacaaaaaagctatggagtattccatactgaaaattcataccagagatgaaaagcattgtccagtctatctggtcctaaattcacattcacgcatgcaactaatagttaaactcttgtgcactgccatgaacgaaacctaacccagcaacaaaatgtggaacgacaaagcaataggagaggaggcaacaattgacaacatggtaagcaacaacctttcctcggccatgaaagcctaggtcgtcgtttgtacgttcctcttcagcag

SEQ ID NO: 170087 - DNA, 420 bp, Zea Mays
ccagggaccacaatcgtgtgtgcaagcggttgttcctcctcgatggttttgaggaggaagacggcgcggccacggagaccgtcgaggacgtgggcctgaggacgccaggccctagccagggtcgcatcaacgacacgatgcaactgggggtcgagctcggattcgcatccctcgtcgccttgctggactcgggtagcacctacaacttcatcttagaggccgctacccttcggaccagactgcctctacagcaccaacctgcctcacggttatggtcgccaacggcgaacgcgtcatgtgcgttagcgtcatccgtgacattccgcttacaatcggtggcaccttgttccccgctgatctctatgtcatgcctttggcgatacgatgtcgtcctcggcacccggtggctcgccatgctcg

SEQ ID NO: 170088 - DNA, 1047 bp, Zea Mays
ctgtgtctcccgcttgggaatggcctcaagcgagtcgtgactacgtctcccacccgaggacggcctcgagcaagccatgaatgcgttctcccgctcaagggcgacctcaggcgaggcgtgaatgtgttctctcacccgaggatggctttgggcaaggcgtgactgcgtctcccgcccggggttggcatcgagagagccgtgactgtgaggttgtcttgggcgagtcgtgactgcgtctctcacccagggttggccccggtcgagtggtgactgtgtctcccgccctcgagcaagtggtgactgtgtgtccggacctcgggcaagtcatgactgtgtgtcccaccctaggccacacttgtcaagctgcaccctaggccaccacccttgtcaagctgtgaatgtgtctcctgcccagggatggcctcgggtgaggcttgactgtgtctcccacccgagggtgacctcgggcgagccgtgactgagtctcctgcccgaaagtggccttgtgtacaccctaaatttagggtataatttttttctaatatccactaaattcaggtgttaccctcccttttctttgattttcttttccttttctctaaatagtggagaatgtctttattttatatctatatgtaagcatggtaaaataaaatactagaggtggttttgttgttccatcatgccgaagcatattttatttgatgagtgattttgtggagcatgtatttaataagaaattcgatttgaattggtagagagaatagaaaagaagagaagataaagaaattaggggagaaaaggaaaagggcccatccctcccttcgcctcccggctggcccacctggccccttcccccgcggcccagcacgccctcccctcctcgcgtgctagccagcccaggctgccagccgcggcccagctcgctcccacgcccgtggcccagccacccaccccggtcggcccacgcgcgctgcgcaggcacagccgcgacctcgtccatccgcccacccctagccagctggcccacatgtcagcgtggtgccc

SEQ ID NO: 170089 - DNA, 384 bp, Zea Mays
ctgcgttgttgatcttgacgacgcgttcttcattcttgctttctagtgccaattagtacctgcggttatatgtgaattttgagcattttttgttgattagtttacttcttgactacgagcggtatcagaaactatcttcagaagttatatccatgaattattagagctcaaatatgatgttgggatcagaagactgcccccgttgtacctatgcgttgattattgagttgagtacacaataatgattgttaaacaacaggaatcgctgtcttgattttgctatggttcgtacttgtgcaattttgttcacatcctttcctcgcgtaggtgatgggcagtgggtatgagcagcatgcgtcattatttaccacttcgacctgtatg

SEQ ID NO: 170090 - DNA, 410 bp, Zea Mays
acaaatgctttttatcacttagacccaatttttaagtcaagcaaagtttttttagttcataaatttataagcgcatgtgtggctactacactctattgacctcgttgagatcaactccaaaaaaggaatcgacctcttcggaccaaatagcatcttcgtacaactcaaccatcaaacctcctcactattaggagcaaatgatcatgtctcgatgtggaagacgattatagcttcacatcaccggatagtgtcggattgacacgccttattgaccacgggcacaagcgcaacgcaaaggtaaccctgcaatgagtagcaacatgtcccttgccatggagaagagaatgatgaataagctctacaaggccaacaagaatataagtcaataaaaaatatacgagcacttcact

SEQ ID NO: 170091 - DNA, 1391 bp, Zea Mays
cactaggtcccatgtgtggttggtcagcaaggcctcataatgctcctccatagcactacgctagtgggggttagcgagcgcattactaacgaaggatgatacatgagagggaggtggagcggtggggccatgagcaccagctagtctataggtcggagaacaccagtcaaccgttgcttgaccattgggtgggcgtggtatgggtcgtggtggatggcgtctagatggtgcaccaacggcttggcatgggaataggttggggcactaggtggctcatcggtagagtgaactagtggacagggacacacatgttgctagtagacattggcaggatcgatgaaatgagccatatgtgtcgagaagtatagggtcgtacgtggcatgatcagaggtgatagggtcatacgtggtacggtcgaaggtgacaggacctcacggggcactgttggactaagagaaagttctgtatgatgttgggagcaacaagtatggtgttgagctacaaggggccaagaaggactaggtcacgtacctaatgaggtgacaggcagagtcgacacattgctgacaatgatggaagaaggaaagatggggttgtagggatggggtaaagagacagtaccttggtcaggagtggtgtggtatgaggcgttgtagctagcaacccaatcggtggaagtagcaggagtgggctacaatgacatgaggtgagaggagagatccaacggagacaccctcccacagagcctctaggatgggtgttagggtcgccactatcgagcaggctcacatcaagtatgggcggtggtgacggcatggcctctatcatcatggagacattatcaacacttcggaacacaatggtcctagagagtggtgggcctcgggagggtggatgaaggctagagggtggtggagctcaacacagtagcagagaactagattcatgtcctgatcaaaggccatgaacgaacgtgccccgaaggaattatgcatcttgaagggatacacgcacatagtacggaggcacgtggaccacagtggagcgaaagataagcgtcgagagagcaggtgcagaaagggatagctcgacaccctcagggcgcccatgcccctatgttgctggaggaaggggacaactaggagcggtgtattgggccacgatagagaagggggagagcgaggaggactatgcggccactgatggatagcacgacagggcagtccacgtgcaaggcgaggaacgcctggcacagaggagtgtggtgcgtgggcacggctgtagagatcgttgctagcgagcgtactccatgaagggcaggcaggacacacactgaatggagaggggatgtcggtagtgtgggctccaacgcgagggaaacagatgacag

SEQ ID NO: 170092 - DNA, 895 bp, Zea Mays
aattctgattaaatctttagaactgtctaggaaaaatttagttgttcagtctgttaagattagtgttgataattccaatgttgattacattgcttctgatgtagataataatactcataatgatagtgtggatgatgggttgtctgatcttgatgatgttatggtacttaaaaaaggtcgtaaaattcgccacaggaaaaaaactgtgagaaaaaaataaggctggtaaatctcccaataataggaacatccctattaagtggagaggtcagactgaagggcacaccctgatttgttcagaatgattggtgtgatttggaattgtcagggtctcggtaaagaagtgaaaagtgaattcctccgggatattatcatgaaagagaaaattaactttattggtttacaagaaaccaacaagaaagactttgaagattcatggttgaatttcattagtggtaacaggaacttcgtttgggtctggtctccccctattggtaggtcgggaggtttgctggtaggatttgattatgtcatgtttgatgttagagagaaagaattgggtgaatttatgattaggactctggtgattcaaaaagaatcagggtttatttggaactttattaatgtttacggggctgctcaaaatgaccaaaaacagaaattattgagtgagttatcctctttctgttccaagtgttctcatccaatgttgattggtggtgattttaacattcttagaaaagattcggataagaacaagcctgggggtactaataagtggagttccctttttaattctattattgatgttcatgagctgattgaattggatctttgtggtagacattttacctggtctaataattgtaatccacctacttatgagaagttggac

SEQ ID NO: 170093 - DNA, 559 bp, Zea Mays
gtggggaaatcgccaccgaccgcctggcgctgcgttcgtgcccctctctaccgataattccctctctccagttgtgtcacctcccttggtcggtagaagttcaccctgcgctcgaatttgactcgcgtagtccccgaaatttctcgtcggtgtggtgcgggccgccgtgcacgggaattgggtgttctcatcactcgggtttcagggagccacccacctttgtgtccgaaatctcctaggctaggtatagcacctaacgttctgtgaaatcgtgcaccgagggtcgatttggagtttccggccatggcgccgccgcggaagcacaggcgccgccgcgtctggccaccaggaagggctagggcgcagtgaaagcgcgtgggccgttgatcttctaagcgacggtcgcgattagataaagcgataccccttcgtgggattggatctgggccatcgatcggtgatcggacggccttgtgcgctcgcgggtttataatgacgagatccgatcctggcccttggatctgatctgaacggtccgaatcttcccataccccttcac

SEQ ID NO: 170094 - DNA, 439 bp, Zea Mays
gtatgaagtgggcttcaacaagatggtccgctttgttcctcatgtggcttacaatgagttggagaaggcgagccagttccgtcatggcctgaaaccttctatcaggcatgccctaggagcctttccattgggggatttccgtagtacattggagcaggaattgggtgtggagatgcaacaccagtacaccatggagtcacagaagtcttcaggtgttgatcagcctcgtggccaggacgcgaggaggggcaacactggaggtccaacccacaagaggggcaagtcttagcaccaccaccaccacccctaccatggcaaatcctttgaatcgggtacttcgggaggaagtactcagaggtttcgggctgtccctaagcccgggctggggctggtgtgtttccgttgtggtgatgcgcatcgccgtgcagagtgccagtgg

SEQ ID NO: 170095 - DNA, 469 bp, Zea Mays
gtatgatcaagaacacaaactgcttatttctgctcctagaacaacgaataggttgtatattgcaaaatttggtatgtcttcacctgtcagtttacttgcaaaatctgaagaaaagtcttggcaatggcatgcaagatatggacatctaaatttcagggctctgaatgatttaggcagtaaaaacatggttgaaggcatcccaagtatcaagaaggtagagtaggtgtgtgatggttgtgttctgggcaaacaacatagaaaaccattcccacaggtgtcgagttttagagcccaaacaggattagaactggtccatgctgacttatgtggaaaaattactccaagaaccatagggggtgcattctattttctggtggtggtagatgaccatagcagatacatgtgggtagagattattagcacaaaagatcaagcattggaatattgtaaaaaggtaaaatagtgagct

SEQ ID NO: 170096 - DNA, 408 bp, Zea Mays
tggacaccaattttggtagagggaatttagatttctttgattgtcgtgaatcccttgatggctgtggagaaggtggtggtgtcctaaatgttgatgcttgtggcggagatggtggattagaaagaggatgaggagcagcatgggaagattgtggaggtgatgatggatgtaaaggtactaaagtttgaggaggcggaaatggttggggataagatgacgatggcattggtggatcaaccaattcgacatcccttcgaggccaaaggatgaaattttttatggtttgtccaagtgtctcgattccttcgggcccagggatgtctagcatgtcgtcctcggatccttggacgaccatcgtcacttctaccctgcaataatcatctggtatgttgcttccatgaaacttac

SEQ ID NO: 170097 - DNA, 333 bp, Zea Mays
gggtggcatccatggcgggggcatggagatgactcgatggcgagggtgtataccggcgagctccttcttcagcagcggggcgcggataggaagaagccgaccggaggtagcgtccctccacatcgaggagagagactgctaccatgagatagaagggagggaacgggtgagcgttgcggggagaggggtggttctgtagtagctaatgcaaagggagaggacggccgccggaacagctgaacattgccttagctctccgtgcaacccatcacgaattttagacatcatgtggcctgcaaacaagatcgtgcatccgacaggagggatatgttc

SEQ ID NO: 170098 - DNA, 384 bp, Zea Mays
gaaacatgttttagaagtaagatctataggaaaaaattgatgaatcgtttttcctggccgaagcgctctctcttattccagtacgcgcgtcttctccgattcgacattcttcacatccgccgtgcactgccaaaaacctaaatcaccacgccgccacccccgacgccgtctgtgctgtggtgcgctgccgcccccgacgccgtctatgttgtggtgcgccgccgcccccgacaccgtctgtcctgtggtgcgccgctacccccaacgtcgtctgatccatgagattccttcatatcgcccctgtacttgccccttgagactcggacctctagtcgcctgtcctgtggtgcgtagacatgttcttgttgctcggctaatcgaaag

SEQ ID NO: 170099 - DNA, 553 bp, Zea Mays
atatatatatatatatataaagtctctaagcacattcatgcacataagaagtgttcattatagaaaaggtagagttcaaagcacattcacgaaccgccgcggctagggttgttggagctttggccgctgcctccgtccggagttgggtacgcgaatagcgagttgacgaagccatgcatcgttccacttccttcctgattgtcctacggagcgagaatgcaatttgtcagaaatcgtatatattaactactgaactgtcggcgatagctatagagttagaatacaaacctgtgctccaggggcaggtagctgtgccggcggtgtggtaaactgaggctgttgcggcacaagtccctgttgaatacaagaataatacatattcatgagtgcagtgcggcacaagtcgtcgtttttactgtgtaactagataatggacatagaatttcttaccggaggtggaggagggcccatagggacgaacgtccattgcggcggaggcggaggggccacgtagggaatgccctgctgctgagctagtaactatttgtcggcg

SEQ ID NO: 170100 - DNA, 743 bp, Zea Mays
gttttacttagtagtagactctgaaaaaataaccttcattagaagtaaccttcatctcgaaaacaacaaaaagttaaggtaagaactttaccttaaaattagaataaaacaagctaccagcgatatgttgtcgccggtatctgctgaggtcggcctcaagcttcggaaagccaacactcttcgatagagtgctgacaaccttcgctccactacggtctcggaggcatcctaagctctcttcgtcaacgccaccgaagagcaatgctcctggctggtagccgcaagatataacataatctcttagttcttctttttcagccttcgataactcctgaccaatcatgtttcgaaaattgaagtccccttcctccgaaattttttcggtaatcttcttctctttgttaaataccttcttcccttttccaggcactgtggccacggttgcctcggcagttgcaacagtttcttcagtggccatatccaaaatcatcttatcaatatcagaaaatacgccttcaagatttatggcttcggccgccgcagcttcggcagttgtagtttcggtgggagcaacttcggcagctggtgtttttgacgccgaagccaatgatggcgtttcttcaatagcatcaataacagtaataatcctttaccttttttcagcaggcttcttgattgccacaggctcctccttctataaaagcttcatcagttgtggccctagtggacttagcctgagtggt

SEQ ID NO: 170101 - DNA, 363 bp, Zea Mays
aggaacgttggtttctaagggtgtcatatcttagggtttggtaattctgttcactaggcgctagaaagagattagatctcttgtgaattgtggcaactagggtttaagaaagcacatgaattggcttccgtctcagtctctgcctcacctttttatagtgcctatgagtcaagggtcacaaccataggataggatcgtacccccgattttggtgcaataagttgtagattgccccatactgagtttattggcaaagttcaaagacatatcatgtattctcgtgtttgttcttggcttttctcgttctttgacgatgtggagcttgttcttcgtttgatagattcttgaacacctcctaagaag

SEQ ID NO: 170102 - DNA, 521 bp, Zea Mays
cggtatgttcccatgcctagtttgcaaggaagctctcaggttcatttggttgaaaaagggtggcaaatatttgtcctttgataaacattgacaatttctccctcctgaccatccattccgcctagacatcaagaactttatgaaaggtgtcgtagtgacagaccgcccacttgcaacgatgactggtgccaaaattcgtcaacagatagatggtattgccgcacgggaggttacctattcctaacgatgaagattacaacttagacccggacacatatgatggagagttcttccaagaagatgggctagaagggtgatttgagatagacttaaccgaagctatcggaatggacgtagatatcgaaatggttgttgatgaggaggatgatgaggtgcaaaatgataatgacttagtaatccttgaaggcaatgacattaatgacgaacttgcgtcttctgatggtgttgagattgaaatggttgatagtgatgatgagagttatgatccggctaaccccgag

SEQ ID NO: 170103 - DNA, 856 bp, Zea Mays
aaaaaaggaaacagaaaataaaaagaaaaaaaatgaaggaagatttacctgtgtggtggcgctcggcccagcaccattgccatattccctgtagcccacgtctcttcttttcctttatttaatcctcttgccgcacatgatgtcagcatgacacaagtgtgacatcaagcaagcaacacatgcagtcgtatttccatgcacacgtttacttctacgtagtcgccgtcgccgacatgtggaccacaggatcacgtacgaagctttgcgccttgctcgttcagaactgtgtcttccttccttatcgtaacaaaccatgccgaagtccgaacaccgcgcacgcttgaccactaaaacaacctccgccgagattgtcgtctgttgtaacgtcccagggcagatctcccctggccgtggggaatataaaacccaaccccgtacctcaggttctccatctgggccgatcacgagaacgctgagagcctcgccatatccgaagacatagagagctcgacatcacctgccaccattgccaggaaggtgtagctgcgagggaaactttagtcatgccattgttctatctcggtgggcggccgtggctagtcgccgttcacctggagcgcgtgcgagttcatcaacggagattagttctttccaccgagctctcagcgataccctggacaacatcgccattgccctcgccataggtacgactcctatatttgttgttttcctggttatgcatcacggtcagaacatatctacaccggtggccgagttcgtatgtaccctgtacacgactcgacagccatgtagcccattgtgtggccagactctagccaacgagatcatgccacgt

SEQ ID NO: 170104 - DNA, 478 bp, Zea Mays
caaaaacatgattcaacctcacgttggaactgcagatatcccaacttctcaacatttcattcttcagcgcatattttctaacaatcttaatagcctctgactcaacttctcgcacgaaagcggcagcatctcgaccatgcaagtctatggcgaaggctgggcttcataccaatttatcccccagggttggcatccggcgaggtataattttgcccagaacccacccgtgcgccgaaggccacactccgcaagcaacaaattcttccatgaaatcacgaccactgctcatgcgggctacgtagcgaaagacctgctcattctaatcccctttcatcaccttgaactgttgaaacgctacataacaatgggagcacaagatagcatggggcaaactaggcaacccttcgacgtcgccaggcaccacataaaaccagaactcccactagttaccccacttattcttcgcacacagaacaat

SEQ ID NO: 170105 - DNA, 689 bp, Zea Mays
acactttcagatcatcttgacaggggcgagcttcttcagtttcttagcatagtccatctttagggttctgtatgcctcatgagtgttggcttcctcgccttctgccatctcgagactgtcttgaagagccaccttttcccccttcaattccttgatttgctgctctaggctttccacccggtagtgtaagtgggggcagtgggagaaaaggtcatcaaagtggttatcatgggtgtggaatatctggccatgtagattatggtagggtcatctgcattatgatctctccctgacaaggcctagagtctttttctccaagtaggggtattcttgttactaggtggaaaatagcggaggggtgtctcagagacttccctattgtagttttggcatagctggcggagggctttttgggcagcattctggctggtatctgggaagcggtggccaatggcggtgatctaaaagcgagggtgattggtgtagcttcagctttctcctaggtagactgccatggagcatttctcaattctattctcgcggtattccttccagacatactctagcttcttgtggatccccatgcgaagcgcacaactccgaagaaggtgagggaatccttccacctccgagcaataggatgtcttaaggacaaaggtgccttccatctggtagcaagagaagaaggg

SEQ ID NO: 170106 - DNA, 858 bp, Zea Mays
agcggaaggtacacgagtcagaccaaataacacgcaacaaatgacattttagggtgggcttatgacttatcctcttcctaatagggtttgtagttgtgaattggttaataacactgcacactacacatgtttgtcatgcatgatggtgatctacgtttttccattagctttgaaaatgggtgatgaccgaagaagggatatgtatgatggtttcaatagtgacaccttgggacactctgatgcattggttaaggttgttgacgaattcgtggcgcgcgcatttgctggtgagccacgtgtgacgaaatgcccgtgtactaggtgttgaaacctgatccgactggacaactttgacctctccatttatattcgcaaatatggctttaagacatactatttggtgtggcacaagcatggagaggtggatgctcctacgaagtcgaacacagacgaagacgtagactgaatggaggacatgctagatgacattcgacatgagtatctatcgctggagaccgaccgaccccgccggaggaagtgcaacaaatttacaaattcttgaagccgcggatgcaaaagtgcacgagggcaccaaagtggcgtacttcaggttgtaacacgacttatggtgatgaagtcagcgcagtcacgaccctcaccacgacgacgaacttctcttctctcagacacgacggagaacacgatctggttttcccctactaggcggccagagggtacgaatttctagggcccgatcactttatagagtcgagcacgtggtcaagccgatgaagtcatgcagcatagatcacgacgggtggttgcgtttcaaaacagccctccgatctctacggcctc

SEQ ID NO: 170107 - DNA, 812 bp, Zea Mays
gattgaaggggtgaaatgggagagatcatagttcaataggtattgaggttcgctataaaaatctggagaaaagatcttattccattttgtgttccagctgtccctgggtattctggagatgtagataaatgttggctcggggttatctgtggataggctcaaagttaaaatatctaggttgcaaagagtcgtgtgatttactgctggtgaccaccttgtctgcctgcctgtttctgattgggtgccaccagttttggttcatcagttggtagggtgctgatcctccgtgtcgctcatgcagccaaactgcatgtccacgtgcttgaagttggtggtggtgctcgcatgtgtatctctaggttgagctttaggttgatccggcgtggtcagtcgtctttcttccttggtcaccatggttctcggtcgagttaagtagtcatgttcgcattcccttcctccaaatcactagtacatcagaatcgctgtcaccctgcgtcttggaaaaacttcagtcccgttacttgctcctgcccgggttcacctcgagctgtgctgccgtctctacttgccaccacgcctcccaaccccaccttgccgtggcttgaacacctcgatgtgtggcatgcccgtgggaagcttgttctgtgatctccataggtcagtgaaactttccctgctggtattttgaactttgcggttgtcggttgcctagaacacgcttgcgccgtcgtggtcttgcaccgtggacaacctctgcaccgacctgttaatctgtgccgtccccggtgatcctcacgcaagaaccgtagttg

SEQ ID NO: 170108 - DNA, 583 bp, Zea Mays
ttgtaccttatccaccacgtggaagtaggtttataaggttaagactcactcgaatggttctcttgtgtgctataaggctcgattggttgctcgtggtttccagtaggaacatgaccgcgattatgatgagacatttgcttcggttgctcacatgatgactattcacactcttcttgttgtggcctctattcgtgagtagtccatctcttagcctaacgtgaatgcctttcttaatggtgagttgcatgaagcggtctacgtgcagtcgctacctgggtattctgttcccgagggtatggcttgtcgtattcgccgctctctttatggttttaagtaagctccacaagcttggttttagcgcttttcgtctatggtcactatgattgggttttctgctagcgctcatgatcctacactttttgtgcatacttcatctcgtggtcggactcttctccttctttaagttgatgatatgatcatcataggagatgatcctgagtatattgccttcgttaaggcatgtctcagtgagcagtttctcatgtctgatcttggtcctcctcattattttcttgcgatatag

SEQ ID NO: 170109 - DNA, 547 bp, Zea Mays
ctacgaccttgccgactgcgcctcacttgttcctcggtcgtcctctccttgcctctcgcctccgtgcgctcggcgcggcactgctccctccatggcggtacccatcccctactcctacggcgccaccacgtacgacctacccccatccgtccttgcccctactcctctgactgcagcacccataccttccactgctcccatggcccctagcccctttggccccaccttcgtactggctgccagcaccccctccttcctagctccgcctagttccgccgggatcactatgcgcgtcttactttatgacggccagcttgtccggggcactttcgtgtccttccatccggcctggaacccttttctccgagactgcgtcgagctacatcctcaggcgggtcgtcacatgcctggaccgcttgtcttcccacgtgttgtgatcacctccctagcgatcgagcccttgttgtctccctctcctcctagtgcatccttaggcgggcactgttctatggagttcgatccctgggggttcagcatacaccacctc

SEQ ID NO: 170110 - DNA, 840 bp, Zea Mays
gcgctgacgactgggccctctgggcagtctccatcgttgggcggtagttggcttgggccaatgacgtggggacctggttgtcatcactcacctcccgtgttcttcacgaatcttaacaaacctaagccaaccttgcgatttcgccggcagtgtgggggcaagctgtttgagatacttgtgggcacactgcatcagctggtcttatctaccccctggtcctataaagtgctgggtccgtgaccccctccttggatccccgcaagactgggaagtcatcgcttgagagagggagagcagtgcatgaggaggagggtcgccgcaccactacgcctccgttgctgctctgtggctgccgtgtggttgggtagactcgccttgacacaagaacgtgcccgtgcaggattgaggccgtgggtgcaaccggctgccggtaaatttctcaccggaattgcatgacaccaccataccaccacccgtcgcggtcagctcggttgctttcatcattttggggaaagcaacatgacacaacattctccatcattgctggtatgtatagcactatttgaagcgaagctataggcacgtgggcgggggtctggtgaactcctgcaatggcgcgccgtcgtgggccacggaggcggagagctacaccgccgtggccagctacggggtagaagatgaacacgaaccgtctgtttgttgatgagcgccttagattagatgaggggagagcgggttcggccgtcgatcgacgaatgcacggtctggattagatctgcaccgtactggttcaatggttgatcccagctcttggatcgagatcgtgcacaccagaacaga

SEQ ID NO: 170111 - DNA, 740 bp, Zea Mays
cttggactgggcgcataatttcagagaacaccaggggctagctcgtaagtttcctaagactcagaactccccctctaggactgcgggttgatttataaataattcacggtctcttatgctattctgccatggcgaaggggtatggtgtagtcctagccgttcgatcaggagccaacacacacgattagatcgatcgccaaccagagtggagttttgtccacgatcgctcgatcgatgaccgacgatcaggatcaggccacgcactaatcctgatctaagccaatcgctactacatcaatgacccagattgcgttcaacgaaacggtacgttatgttctaatctcgtgcgcccacgtccgattcgacggccaagatttctttccccaaacaggatatgcgtacggcggcgctggcggaaaccgcggaaaggccatggccggagcacctcgattccgcgcagctagccgccaatttctaaattgaatcgtgatacactaaacctagagcagggcgaacagtaaggtacccaacatacctcggttcagggtgaggacccttctatcgatgtggcggcgcagatccgcagtggagcacaaccacggcgaggaattcctgtggcgctagtgactaatttcgagcgaagctgatgcgaccgccttccaatcggccactagaagccttcaggtccacaccgggagtgcagacgacggccaacccggatttccctcgcgacaattccc

SEQ ID NO: 170112 - DNA, 664 bp, Zea Mays
gtcgacggactagaaggggtgggagtcgaggaccgcatgaaagtggcgggggaggctcgttggcgttggactggaagcgtgaatgggtagcaacaacgtggactgaagagtgagtggtagttggaagggcgactacagtaggattgaggtgcaagcaagaagtggcgactacaagcattagaggggatgacctgcaaggtgcaggctgcggccaggggcactgtagccgtcgaccagacgccaacggtgctacggtctatgggacttaaaaggggacacgacacacagcgcaggaagtcatcaaggctagaaagagtgatcaacggtgtggaattgggagtgcttggggtttagggagttagggttttctctttattgtgtaataatatgtgttaggctaaaaataaactatggtccgatttcggatatctaatggataacctaagggtgagaggtaatgtcctaatacatgcccacccaattttgggtcggatatgcggctgacccacaggtcaaaaatgtatccatatccggcttcattaggtcggatatcagaagttggtgaaggaggttattaagatcttaagaaaatcgtgaagttgaagttgtaaacctttaaaatacattttgatataagttattttatttattatttatatttaaa

SEQ ID NO: 170113 - DNA, 1613 bp, Zea Mays
tctctctccggacctcttccggcgaacattggatcgctccagaatcttcaagtgctcgtcattcagaacaactcgctctccggccccattccggcgagcattgccaactgcacttcgctgtacaacgcgagcatggggttcaacgagttctccgggcctttgcctgccggccttggtcagctacagaacctacacttcctgtccttggcggacaacgacaagctgtccggcgacataccagaggaccttttcgactgcagcaacctcaggacgttaaccctggccgggaacagcttcaccggcagcttgagccctcgcgtcggcaggctcagcgagctcagcttgctgcagttgcagggtaacgctctgtccggggcgataccggaggagatgggcaacctgacgaagctcatcgccctgcagctcgggggaaacgggtttgtcgggcgcgtcccgaagagcatctccaacttgtcgtccctgcagaagctcacgctgcagcagaaccgcctagacggcgccctgcccgacgagatcttcggcctgcggcagctcactgtcctcagcgtcgcgtcgaacaggttcgtaggcccgatccccgacgccgtgtccaacctgcggtccctctccttcctcgacatgtcgaacaatgcgctgaacggcacggtacctgccgcggtgggaagcctcgaccatctcctcacgctggacctctcccacaaccgcctcgccggcgccatccccagcgcgctgatcgcgaaactgagcgccctgcagatgtacctcaacctgtcgaacaacgggttcacgggcccgataccgaccgagatcggcgccctcacgatggtccagtccatcgatctgtccaacaaccgcttatccggtggtgtcccgtcgacgctggcagggtgcaagaacctctactcgctcgacctctctgccaacaatctcaccggcgccctgcctgccggcctcttccctcacctcgacgtcctcacaagcctgaacatctccggcaacgagctagacggcgacatcccttcaaacatcggcgcactgaagaacatacagacgctggacgcgtcacggaacgcgttcacgggggccctaccgtcggcactggcgaacctgaccagtttgaggtcgctgaacctctcctggaaccaatttgagggtcccgtgccggactccggcgtgttctcgaacctgagcatgtcgagcctgcagggcaatgctggcctctgcggctggaagcttctcgctccctgccgccacggcggaaagaaggggttctcgaggacagggctcgcggtcctagtggtgctgctggtgctggccgtgctgttactactggtgcttgtgacgatcctctttctcggataccggaggtacaagaagaagggaggctctaccggtgcaaacagtttcgcggaggacttcgtcgtgccggagctgaggaagttcacttgcagcgagttggatgccgccaccagttcattcgacgaaggcaacgtcatcggtagcagcaacctgagcacggtctacaagggcgtgctcgtggagcccgacggcaaggtggtcgccgtgaagcggctcaacctagcgcagttccc

SEQ ID NO: 170114 - DNA, 596 bp, Zea Mays
aagaaatattaccaaatattatgtaaatagcacacctttccactcttttgggatgtgaaagactatcctgttataacccgtgggattatcagccggcacaaatggtgggttcagtgggaaaggatatgtgatatttgtgtagattggtcctgggaaaaaaacatggaaatgccatctcatcagaacagacgaactgtatgtagcatggcacttgagaatgctctaacgtgaagttatgttgaccggttaattgatcttaggtatatataccagaattgaagttgatgcggctgcgctaacaggtagcccaagaaaatacactttcaggatggtctgcacaatgtctttttctctaataattttccatgtggagtactcctactcactctgtatggctgtatctgcagctaggaagggaaatgatgagtcgcggtgagctcatctggactcctgaacatcgctcatcccaatttcgtttccacctccgctgctccgagcacctgacttcaaacttccaagcaaccaactccccattaaacgaagtggcccacagtctaccttccctataataacgaagaaagaatattagaaaaagg

SEQ ID NO: 170115 - DNA, 782 bp, Zea Mays
ctcaaaaagactatccgtgcaaaagccgcctaagggtgcagccggactagcacaacaagtgcgcaaaatcgaagtcttcctcaaaagactatccgtgcaaaagccgcctaagggtgcagccggactagcacaacaattgcgcaaaatcgaagtcttcctcaaacgactatccgtgcaaaagccgcctaagggtgcagccggactagcacaacaagtgcgcaaaatcgaagtcttcctcaaaaagactatccgtgcaaaagtctacaccaaagaaactgtccgcgcaagaccgactacaggcgcagccgaaccgacataataaacgtgccagaccaagtgcgcaacgcctctatggacatagccggatgcgcgaaggcgcacagcctcatcatacaaactatagttacatatgtacaacgagggcatcacaccttacattggttcaaccttcggaatgattcccatctccctatagttaaatagcattatcctaagctcctcaccctcaaaaagacttcgcaactccccctcacctacactcgccccagccgccgaggacaacaattcctgcttgccagccctgcccacacaaagccgaccgccatccacttcactcactctacgcttcgccaccgcccttcgccgcctacgcccagcattcggaccaggcacaacttcagcatccacaacacgtggagaagccttcgccgcagccacatccaaggccgcaaagtaatccaagtcctcatccgaagactcttccgtccactcaaccgaactcc

SEQ ID NO: 170116 - DNA, 360 bp, Zea Mays
ccaaattcggatgagcactgcgccctaattcatgtagttacttgcaaatcggttcgcatcaaagtggtgcattaatcaatgttttttcactttggtataacgaccataccgaaaatccccatggattaagcacacgacgatgcccaagttggctcaataacactgaaccctagcttcagtatgaccaaatgcagtaattgcatttctttccccatcagaccgactgacagcgccacttcaaggcaccattacttctgttttcacatagcaacaacccaaccttactttagcaaagttatgctcctatataccaccttcaacttcatcatagtgaccttggacttaaacccactgaatcgt

SEQ ID NO: 170117 - DNA, 348 bp, Zea Mays
ttcctgcctcatttcttttctctcccactcggtcgttcttgtttcagctgggagctgcacggatgtccgagcgagcagtctgtgccacgatccctgcagtgtggagctccaccacaaccgcgatctcttcaggcagtaacaggcgacgttatggctaaagccataaatggcattttgattgccgccgcaagctctcccacaccggcgttctcttccctcctctcgcgaccgttctgattcttgtgtccgacttttgcttcaaatctccatcaatggagcagttacgacttccgtttctctgtgaatcaatatggcacaacaattgacatcgaggagcattgattcctg

SEQ ID NO: 170118 - DNA, 596 bp, Zea Mays
gacagacttcatctagaactgtggatcttggttcctttggcgatccaactcgatctttgaagacttgagttgatgcttatccttctttgacgtggttggtctttattcttggagttgtcatccgagttaaggacatatggctaaggatatatgtttaggatagccagggtatacgaggtaggtaggtttgaatagagttttactttgcttttggaatagatgaactaggcaacctgtaatgtaggttaggtcattgttcacggacgagttggtggaagacattaatttaggttaagatatgtttgtagagacggtgtctaacctatatcaccaaattaactaacctgttaataactcactttagattggatcatattagactacatagaatctagattaggttggatataactagataagatctatttatttaggctagatcaaggttgttactgtagaatgggataggtatgcctattagaataagataaatccataaggataaggtagaagttgaatcctttgaggtcagttagatctatcttttcaaggtaagatgaatctattaaggtaagagggtatcttttaagataaga

SEQ ID NO: 170119 - DNA, 539 bp, Zea Mays
ggtgtgccggcgttcgccggaaggatctgcgtcggcacctctcgtgctcttcctctccaaccttccctgcgggttggtgctgccgatctcgtttttcttcatgctgctactggaggagctcggcctccaacctcagcacttcacgccccgcttcatccttcaagcggtcatcatcgcctacctctgcgaaatgtccgtgggggtgacacttcttcctccagcatacggtcggaagggtgttgcgcagcgaccttccggaggcgggaagcaagctgagctgcggctccatcttttgcgtgagcttcaccagcatcccatggtgcaccaccatgaactggtctagctccaactccatgaggtgggaagcgagccgagttgcggctccatctctttggctttaatggccggggtgctgcctgcaacagcgaccgctggcccggctgctgaagacgccgcccgggaggtcgtacaagatgccgtggagacggcggccgcgcgcttctagcgcgaccctactgatgtagagtaggtcatacctg

SEQ ID NO: 170120 - DNA, 521 bp, Zea Mays
accaatttcaaggttctagcccctaatctctctgcccacagtgacagcgcgatcaacggatagaccgaggcgttcccggcgatcaagcatggtctagttcaattggtcgggtcgagcagcatcacgagcatgcagggatgctaaaacaagagcgaggagggcatgatcggacctgtggagagctggccacagcgagctcacacagtacggtgttcttgaccaatttgggggaaatcccaaattagagcgctctggaggacaatccgagacacgagtgggtgcgctggatgcttgactacctagcggagctgatggcatgctcaatttatagggcccgagggcgatggctcgtgaatttggaatcgcgcgctggcgatcggagagaggggagagcactggtggtttaatcttggcgttcatcggtgcaacggctcaaagatcgtaatcctgagtgtgccacagttactaccacatagtaacgagccacaacgtggcataaccgaggtcaccggagtttccac

SEQ ID NO: 170121 - DNA, 991 bp, Zea Mays
aagatgtcgaagatcggccatggaggccgagccatgttgtttttggaaagtaaactattaagcaagggcagattgaagtgatgaagggcaaatatttcatgatatatctatagtgagggccaggggagaaagcactgttcctcttcccgaagctgatgaagtggtagtcttcaaaagcttcatgaaggctgggcttcgtttcccactgcacaagtgttggttgaagtactgaagacattcaaaatataccttcatcaaattacccccgaagcttttattaaactgggggttttcatatgggctatgaggagccaagggctagagctggatgctaggtgtttctgtaatattcatgaattatgttaccagacaaaggcaaccgggaaggagcaataccataacaacttcggatgctacagcttcgtgccccgctctaaggcaagttacccgtgccaacatttcggaagaagtggttaggctcttggatgaagcaatggttctatgtaaagaatgatctgaatcagagggggatgtgaggggcattattcaacgtcccatatggtcgcgtttcagcattagaaggccatcaattgcaattgggaatgaggtgcaagtgtgcctaatggctttcaacatcgtatgtacttacatcggtaccaggaatttggtacgagaacacatttctttcaaagtatggcctcttgtgaatgagtgggagatgccgaaggaaactgctgctagctccagccaaggtggtttagtttatcttagatacaccttttggtatataagccaatttgacgagccaaatgacgattggctagatgctatagaggtgaccagtgacgagctgttgggagccgactcgaaggcaaaggacgaagtcatgactattgccttcggcgctcgagggaaaagaaggctaaacagagtctttgatgtaattgggtttgtttatcttgattattgttttcctgctcgaaagcaagga

SEQ ID NO: 170122 - DNA, 393 bp, Zea Mays
ggggtagatggatgccgtgaccgagtttgacacgaggaagaagaacatccctggccattgatgcgaagattgagggtcgagattagaacccgcgtaccgtttcgctagagtgtgatcggagccgttggatctccttttgatggcctagatgtggtgactgcgtagcgtttcggataggggtaacgggaaccgtccgattaggatcggatgatggtcatcactctggggttcattaaactggggtcgtgagatctagatccgagggaccacgctgagtaccgattcgcccgtgtctagatctaatcagatccgttgatagttgatccatcggcccagacttcaggataccctttcgcattggctattttgttaaagagccctcctggaatttgg

SEQ ID NO: 170123 - DNA, 853 bp, Zea Mays
gttcctcaaatcgctctgtcaggcacattgaagaagatcgccatggtacagtgcctgcaaaagatcgcagattcactgaactcgccgccggtgacccttgcgcccggattcacgacgacactgtgattcacgcccggtgacgcgcggataacgacttagggtgaaaagatcttcgccgtggctgaggtcggggcactgtggccgccctgttgtcgtaccaacttgcgttgcaacgtggcctcgcggccgtcgcggtgatgatcgtcgttaacccgagcatgccacgctcctaccttgttaccacgtcgcaataggtcgatatatatggtctgtctatcggctgagtcgttgctccagtgaatgccacagtaactcgcgctagtgacctccctctctctccggccgcccacgtgtcttccccaaactggatgccaccgctgttgatctctataaattgatgccccagtgagctccgttaggttattacgcgcccagtccaccagctctcgcctctgattatccaccctagcgtcccaattttgtttcccccttattctgttttccgcgctgccatgaatatctcgctgtggccaaccatctgcaggttagttcaagcttctctacttgatgttctagcctcccttaagtctcatgttgctcgtagacccgtttgattgaactagaccaccataaatcaccaaggacacctcgatttcccttcgagtttcgccgttgtcgtgggcagaaggactctaggccggatttgtgcaatagagggtcggattagagtcgccaggggtagaaataggtgtcgattgagttagggcatcagtcgctgcgtatcccggctagt

SEQ ID NO: 170124 - DNA, 293 bp, Zea Mays
atgtacgtatatatctaccgattgtgagagctttgttgttgtcgcgtgaggtccaaaagcacaacgacagtgtcccattgcgtctccatgcggcagatctggtccgtcatggctaatctttggtttatcaaagatctgtctaatatccgcttggctagaccttgcatggtagttggacattctggtgacgtgctgggtggctagcatcagtttggggcagaaattgttctgggagtctgctcgtgccaattcttaggcctctaaatctaactggtgtttaggcacccatcatg

SEQ ID NO: 170125 - DNA, 303 bp, Zea Mays
caaagaagtagtgctcacaaaaattactgatacgtgaatgagtagtaactccctagctgatgtcaacaaggatttgatccaccgaatgatccatttgaatattggcgtggacttgggttagaggtgcatgtggtatttcttcttcctctttttcatattgttcttatgctaccccttgatccatgccgtcatcttgaggtacctatacctcatcttgagttgggggttgcaccatcatcgaggaagaaggtcaatcttgtacttggtgttcccacgttcacacatcaccaattgtcgtagtcc

SEQ ID NO: 170126 - DNA, 419 bp, Zea Mays
cgaaggagggaggtggtggtttcactagaagattcaccaagaacaagtaggcgtcgcgctctgagggcggtgcatcgggtccggtcaagttgacctccgagggcacaccacggcaaaaggggtggtgctggaagtgtggcatctacggccactgggcggtcgactgcaagcgctcgaagaaggacaaggaacagcaacagtcggaggcgaacgtggctgtgacagttcctaatgatgtttgggtacttgatacaggtgccagcaatcatatgacaggaacttgaacaatgctaacacaactcaatacaagagtttgaggaatggtgaaattcagtgatggatctcatgtgaggattcaaggtatgggatcaataattatgcaagatcgaaatgaaggtcacaaggtactgacagatgtc

SEQ ID NO: 170127 - DNA, 464 bp, Zea Mays
caaatagccttcgttagaaaatatgttcgtaccacaagtaataagaattagacacaaaatgtttaccttgaaattagaatagaataaactgccggtaatatgttgtcgacgatagcgactaatatccgcttcaagcttcgggaagccaatactcttcgataaagtaccgacaaccttcgcaccggtttggtctcgtatacagcctaacccttcatcatcaataccaccaaagagaagcgcccccggccgatatccacaagatagagcatactcttttagttcctctttttcagcttcagtcagctcctggccaattaggtttcggaagtcaaaagtttcttctaccgaggtatcttcggttattcctcctttctcggggttggcagccgtggtctcttcggtggctgcagcagtttcttcagcggccatgtttagcagcattttatctatatcagcggctacgc

SEQ ID NO: 170128 - DNA, 703 bp, Zea Mays
cgtggtgcgcgggtgtgttgagtcacataggcgaaagtggcaaaactgtggcgtatttcaaaattcgttggcaatgtgttatggacaatctaaaactggcatttggagagttgacatccgtaaggatggcaaagagttaattatctagcttggggaacgtggtcatgttccatggcactaggtggcggcataggcgtgttatgctttggtggcggcacgggtaaggtgagcgcggcgtgacaacctctgcggtgacttgcgcgaggatttgcacaatagtttagtttgcacttgctgatgtcgatgacgagagcgcaacatgatggattcacaccgggggacgacggtctagagtctaacaaccagatctgttcaactcagatcggaatcgtttgtcggagatgtgctttcgagtgacgaccgtgaagaggcggtcctagaggagcttgtggctgactcaggtgtggtggcagttgcgtggaggcggcgggaggccacgcatgcacatcgacgactagaatgtcgtgcgagcgcagtgcctgcacgaaggccatgtgtgtgcaacgatcgtgcgaccatgatgtgaaggccgtgcatgatttgtggtgggtgtgcgtgagtggtggaggcggtaggcagtgcgtgtgctgcggtggcgtggcaatggtgcggcgaggccaggaacaacaccaacacagaggtg

SEQ ID NO: 170129 - DNA, 527 bp, Zea Mays
gaagagccagggttttggtgataatcttaatgaaagaatggatgaggcttataggtctgaagtccccagctgcctctgcaccttcttttttggggattagaatgatgttggctgaattgattagttggaggttgaggcatcgattattatagaaagcattcactgcagccatgagatcatgccttataatggtccaacaagatttaaggaagacaccagtgaagtcgtccggccccagagccttatcttctggtaaaagatcaatacttctcttaatttcctcctcagagaacggcgcgtcaaggcttgataggtcaaactgctggtcagagatattgtcctagttaaggtcgacagatctaggggttggccgctttaaagcattatggaagaaattttgtagctcttgtgctttttcattgtgagagaagacccacccattaccggtccgcaaccgttgaatgaaattttttcgcctcctggagccagctttccggtggaaaaatttagtgttggcatctccgaat

SEQ ID NO: 170130 - DNA, 817 bp, Zea Mays
agacagagacatgaagttgataatatacttctcagtttgtccggggaaagaaaatcttgtcaactatgagcatgaaatgtttgttagatcgcaggtgaactcagagaggttatattaggcaattgggtcagttacttactttggcatcatactgttaggccttttcaaactgtgagttgcatctattagttatggatgtgtggctgggtcaggggtgacaattggttggagtcaagttagtcttacggaatacagagtatttcactaggaacccatctgttttggtgttgcatttggtactacatatgccacttgtgactggctattttgttgtggatgggattctaggaattcttatttagttgagccattcctgatttgactttactagccatgtacatagatcataatgctttccttgttggaatctccttatgccaggaaaatgcctcgcaaagttgtatctggacccgactacgatgatgactatgatgagtatgatgatgagtatgatgaaaccagatatggcaataatactcctgttatgacagggaaaggtatccttccgaatcttctagccttattcatatcatctgtaaagagggggaaatggtcattagagctgctttatactctgagccatacaatcggaaaagtgcctgtttttttcacaacaactgttcaattgctcagatcaatgtctgtctagttgattagtgtttattttggtgtttggcattaattcttactacctattttggcaccaactgctgatggtcttaattgattgatgtgggttgcatgtaattgtgccaag

SEQ ID NO: 170131 - DNA, 543 bp, Zea Mays
gagcaagtctgaggcggggcgactgaacaagtcctcaccgagcaagtccccgtcgagcaagtctgtgaggcgagacgaccgaccaagtccccgccaagcgggtccgcaaggaaggaatctaggccaacgctgtcggcccacgacgcccgcaacaagacacaacatcaccaaaccacgtctagaccatacatatagtaccaaaaggtctatggcagacacgatggaacaccccccgcatgcgcccacggatataccctcactgactcgcggggccggtcaactccagtcgtggagaccttggcaccggagtctctacagtggcccatacaccggaaaggatgatacaaaaccccatactgggcgtatacctatgcgtgcttgacagtgacgcaaggggtatgacggaagatgaaacagtactggacacaaccctgaaccatgtcgtaagcccactttttgcgggacacgccaggtaccataacgttgacaccgagcaagctacagggactcgtataccagacggacaagatggaatgccatact

SEQ ID NO: 170132 - DNA, 387 bp, Zea Mays
gctagtgaagaggaagctgaagcaggaaatgtagaagacactcataaaattgaggaacacactggatgtgaatttgagcatggtactactcttgtggttacacaaatcttgagtgttcaaatgaaagaagctgaaattggacagtgacataatctttttcaaacgcgagcaaaagtgcaagacaaagtagtaaaggtgatcattgatggaggaagctgtcataatcttgcaagtcgtgagatggttgaaaagcttggtttgaagttgcagcgacaccctcatccatatcatgtccaatggttgaatgaatcgggagatattaagattggttataaggtgaaagttctgttcaagattggagagtatgttgacacagtggagtgcgat

SEQ ID NO: 170133 - DNA, 352 bp, Zea Mays
ttcattttcttccgtttcacatgtccagaggctaatcaccgcgccactcggagcatgtgtcgtcgcattcggtccattctcttagctctcggcccatccgcactcgccctaacatccttaataaaacaaacgtgagcccgaggagcttccatttttctgtctgaacgttatctactccggaaccatcggagggagggagtatcctcacccgtcgctacctccggttccgaccaaaaccatcgcagcaacccaagccagcagccatgcgagcatggagcctgtcaatcttgagcttcacgttggcttaatgctctgcggcaaggttttggtttttcagttgcctgagctgagc

SEQ ID NO: 170134 - DNA, 343 bp, Zea Mays
acaagttccaagcttggatgatgtctagcgattggaaaaataatgattggagagatgaggaagaccacaaattcacctacgattgtttgatagataggatatggtgggagaaggttgaaatggtgctaaaaactgtgacaccactctattctatgcttcgatttgctgaccaacagaaaaatggaaccatttctggctttcttccaaaaatgctatctgctcaagctgagatctttgctaagttaaagcatgacaaaaatgtcaaaagagatttcatgaagaaagtgaatgaaataattaaaaagagaactcagtatcttcttagtgatactctcatggttgc

SEQ ID NO: 170135 - DNA, 814 bp, Zea Mays
ggaatcccaaaatcgtcatcatcatcatcatcatcagggtctgctgcgccctgagtctcgaactggtgaaaggcggtatcctcgacctgagtgtcaatcactggagcaggtgccggcacaggatcctcgggagctggacggtaggacccaaagaggaggcgagaggcctcaagagtaccctagaactgtggtggccgaatcagctaagcaaagatgtgatagagatagtgagcatacggcagctgtcgacgagcacgcagaccatccagtacggtgtcctcgatctcacaaatgagaaaatccacaacatcaaactctaagtgagaaactagggcaccaaggagccaaagctgaatatgagtggcagcctccctgtaacccatccgtggcagaagcgtccgtctcataagctgatataaaaacttggctgctgtggtgaagtctgccggagaacgtcgtgacccatctgagaagggcggtcggaacagagccgcgacgtgagctgtaccaggagcaacaccgccgtaagggcgacgaggaggatcagaggtgccatagcacaagctatgtagacgagtcgatgactcaggaaatccaaacaactaatgaatctgacttgcatgaatggtaacatcctcaagctcaaatcggaatctcatccagtggtgatcagggtcgatccatacagtggcatagaaaactcggacccattcctcgacatatctgccgctggtagtcaaaagagtgagaagtccaggcagataggagaggtgaacctcagagtcggcaccggctgctagcaggaaggcaggga

SEQ ID NO: 170136 - DNA, 510 bp, Zea Mays
ttgagaagtatgtgtttgatcaggaagttgctaggaaagaacttgcactaatgatatgtgtccatgagtatcctctatctatggttgatcatgttggttttaagaggttttgtggagcactacataccctattcaaagtagtgtccacaaataccattaaaaggatatattggatatgtacgaggtccaaaggcttgtagtagtgatgtattttgacggttacaatcaagaattgtcgtaactactcacatgtggacaacaaaccatcaaaagtaaggatatatgtctatgacagtacatttcattgatgatgaatggaagctgaagtattttcttttgaggtaataatctattgcaatgtcttgtttctttgaagttataagttatatggtgctgcagttttgtagtgctaaaaatatgttggaatgttgttgcttgtaggttcatatatgtgcctgctccacataccggggaaatgataagtgatgtcctttatgaggtactacaaga

SEQ ID NO: 170137 - DNA, 321 bp, Zea Mays
ctttatcataatttcatacaagccccttatacagtctgtctcactaactcttttaccctctgactagatgatgaaccccaatggaaatgaagtaaatgatgccaacgacaatattcctaccttaacaactatgaacgagaaaaacgagtcatagagatatttgatgaatggaatgaagaacaccaaaaggaatagaaaaatgttgggatacatgattagtccacgtcaaccacaagcaaaagccacgaaacacatggatacccaaatagaagaatcaagtcaggcagctatatgagatacagacacccaatcaatcctcac

SEQ ID NO: 170138 - DNA, 521 bp, Zea Mays
agaaaataagctcatttgaggggcttgtgacttgtagagctgctgcaaccttgtgaattgtgattttatattttgattatggtcttatggttatgaagttataagcagtgtctttgaggtggggtgagttatctggaagtgatcattttttggtactgtacatgagaaattgatgagtcatgagagtaccatggaattgtactatatagttgtggattatgccaatatcttcatttccgggtttagaaatttctgcactgagtaccaggaaatgccagtatagtgtgatgtggataccactgaattgctgggtttgaggatttgacatcaacaccttgtcatctcatcaaaatcaattattggaaggcatccatagttgtgtttgcaaagcctctttggtatcagtgatgtgtgtgatctatccaactgggaaatttgatttggcatgactaaactgtctctgtgtaccaatcacttacctgacaagcacaataaagctttgctatacctgatctcagcaa

SEQ ID NO: 170139 - DNA, 649 bp, Zea Mays
tgcggacgaagaatgtcaccccataaggggaggagctaactaggatcctcctcgctcgttcagacaggataagggcaaggatgtttaccttgagcagcagagaggaaagaaaaagaggaagttggacagtgctacttgagcaacagtagcagtagcaggtgatagagcagagtagagaggacatttcagaattgcttctgaccagattgctttctgggtctgtcgcctctcgtctcggactcgctccactcctgctcggtttaacccctcagccccagtcaccactaccactccaccttcctcaactacgtcatctttcgacaatcctgagcctaccaccacaacacctgctacgcttatagcctccaccacacctgcttccaccgctcccactccttctaccactccaccagctccaacaccacatttctgagagtgggacaagaatgaggtgcgaccacttgttgaggaccctcgcctgtttgaccttcaaagggccactgttgccagagttcgtcggtttcatcatgtaccagtggtgtcttggctaccagctcagcaagatcctgccgcagctcctctcttcagtacctagacccaggagtctttctaccaagcttagctaatagcgcggattgctttgagagct

SEQ ID NO: 170140 - DNA, 1014 bp, Zea Mays
tgctcacggctcgatagtccaattggttagctcgggaggctcgaccaggtgatgtggaggcggtatgcgaaaggaatttgagaatggcgcagagaattacctggtccatgttcgcccgtgagcggaagaagtccgggcgagggtgattcggggtctccggtgaggctctgccgggtccgaggacttgaggagcttcatgggcctctagcgaagctaaccgaacagcccggcgcggactggaagtggctggagtgagctggccacggtggccgaggctcgggtggctgggcacgcggtggcgcgtcgtgctcaaggcgaagtccgacgaactctggcttgggcaggaccaagagcgtgctggggagtacggccaaggacttgcggctgttttataagcacgacgcgggcgagggcgcacgacggactagaccgggcactcggacgagcgcgcgcatgggttgggcgaacgccggcgtgccgaccagggtcgaacacatgtgcacgttctttctgcccgagttctagcgcgtgttgtcaatcatttgagcctgctcttgccttggtcagtgcacaaaacctcttctcctccctataagctaccgatcttgtgtggggatcataggatttggcctattggttccaaagatatggagctctcaagtcgggtctgtctgcccgaggcaaatctttggttttgttgtgtctaggttccgaatcccagtgctatcttcagatatgtggtagaggggttagtttagcacatttcgttaatgggagctcagggttttgagatagggattaaggtgaacgcgctcgattttgagttagaggctaaaattcagaaatctgaatttttgatttctctaggaagcctccaattgaatggcttgtttgaggtttttaacaaactattttggccaaacttttataacctttattgtagcttagttagtgtgtttcaacttttataattggcctaagccatgattccatgtttttcatggtctttttacc

SEQ ID NO: 170141 - DNA, 478 bp, Zea Mays
tcgggccgtgacttctacggtgcaatgcaagacgggccatgcataaaatatctgcaggagatccagcccggtccatcagaaggaagtgagcgcggccgacgtagacgccgccgctttcttgctgttccggcccgattgtgcagatgcgaaaggaggttccattcaaccgagggcaggaaaggagcccatccgtggcccgtggtagaatctatccatacaggttctaagtctcacataacctaattaaataaaggcaacgtatcctgtgtaaaaggttctcgtgtgtaaacatgctaaaacgtcttaacaacctttggatccagaatcaaaggctaatcttaatcccacctgataatcttgtgtttttttctaaagaaccccctcctggtaatctggtgcggtggcggttaggtgggattaaaattagcctttgattctggatccaaaggttgttaaggcgttttagcatgtttacaca

SEQ ID NO: 170142 - DNA, 427 bp, Zea Mays
gttgatttttagaaaagcccaattcaccccccctcttgggcatcatgatcctttcagtgattattcacataaaattagtaattttatttttgagcatgtaaatcaggaagaactataagtacaaaacgaagctatagaagttgaggaaggaacacttgtacaagtgaaaattacatagaacccaagaagaatttgataccaaatctagtgctgatagcactagaatcgatgcatgtaccaagtctacgtccccgtgcctcgtcttgatgcgaaaaactctcatgtgcaacccgcctccatatcatctctaggacttacgttagtcacgaatgacgtgtgtgtgcgacttgccttcgttttctatgcacacgacggggacatgatcttctacgacaccatctactatggattctagagtgactgctac

SEQ ID NO: 170143 - DNA, 296 bp, Zea Mays
aaaaaattgctaggccacattggatcccacctctgttgatcttttttctgtggctatacactacgtgaccatccatgtggcaagtctcctgccaataaaaacgagccagtgagccacattgcctataatccgcgacgtactaaaaacccaatatcttttacatcataattccgttcgaatccgtttccatcgcgttaattttataataacgtcgtgtacatgttagtaacattattttggtcgtgatacacattttagttaattagttgattatttatttatccgagttattaaag

SEQ ID NO: 170144 - DNA, 602 bp, Zea Mays
cggcctgcccacggtgaccgtatgggcaacggaaaaacacgggcgttcacgacaacccagggcggtctagttcaatcaaaggagtcgtgaagcttgaggaggacctaaggacactagaacaatcgaccagagcgcttgaacgaacctggggcaagctggccacgacgagggcaaaccgtgcggtgttcttgagtggattgggggaaatgcgaaattgaagctctctggtggaggatttgaggtgcggacgggtgcgctagctgcttgaatacataacgaagtcgatggtgcactcgatttatagactccgggggcggtggctctcaatttgatcacgacgtgctggcagccggagatagggaagaacacggtggttgtaaccgtggcgttcacaggtgcaatggcgcaaggataatactcctaagggtgccacgattactaccgcatggtaacaagatagggcgtggcgcaatcgaggtcaccggcgcttccacggctacaccggtagtccggccacgttgccatggctaaaagcacggtgataatctccaatccgtgatcttatccattcccctccgtgagatctttaccttctcgtagaa

SEQ ID NO: 170145 - DNA, 1367 bp, Zea Mays
tatgtgatcaatctacccaaatactatgttagaatgtgtgaatgctatttttgtttttctgttgtttgaattcaacagttgttacgattgcagaagtaaacacagtgtgctggtttcgaaacttcttcctattttgtgaggcatagagaccgccctaagatgagtgatcgtaagcatgtttatactagatcgagtagacgtgagcatgttgcaccgccttaagtcactgccgactcaagctgattgctccgttagtagggtatagtggtcaccctaagttaagtaagcgtgagcatgtcgcaccgtcttaagccactgccgacttaagccgattgctccgttagtagggtatagtggtcaccctaagttaagtaaacgtgagcatgttgcaccgtcttaagtcactgccgacttaagccgattgctctgttagtagggtatagtggtcaccctaagttaagtaagcatgagcatgttgcaccgtattaagtcactgccgacttaagtcgattgctccgttagtagggtatagtggtcaccctaagttaagtaagcgtgagcatgttgcaccgtcttaagtcattgccgacctaagccgattgctccgttagtagggtatagtggtcaccctaagttaagtaagcgtgagcatgttgcaccgtcttaagttactgccgacttaagccgattgctccgttagtagggtatagtgatcaccctgagtaagcatgcaaattgataataaatagttcgagtgcctttgagaatgaaatctttttattgatgatgtattttccgattacagaatacaatgctgccccgatagcttttgaaatctagctaggggtaaaacttcctgagatgctctatattccatgaatttcctatttccgtgccatccatttgagtaagccaatatgatcctagccgagagtgacttctgctaccatgaacggcccttcccatagtggcgataatttgtgtcgtccttcccccgttagaatttggcgaaggaccaagtctcccactgcgaaggatcgatgtcgtatggccttatcatgatagcgcctcagggtttgctggtacctagctaactgaattactctattcaatcgttcttcctccaatatatcaatatcctccagtctagtagcttctgcctcagctatgttttcaaagatcagccttggtgccccaaacctgagatcagcaggtagtactgcctccaaaccatagaccatgaagaagggagtgtttccatgcaaagctcggctaggttgagttcttaagctccaaaccacatacggtaactctctgatccacttccctgcgaacttttcattcttgtcgaagaccttcttcctaag

SEQ ID NO: 170146 - DNA, 480 bp, Zea Mays
gaggcaaactgatagagatggagagactgatagagtgagagatagatagatagatagggagagagcgaggaccagcttctgtcaacgacgaaaccgtaaggagaggcgaatcgaaggcgatggcgatggaggcagcgtacgtggggtagagaggaggcgacgagaggaccaggcgtaccgcgtatgtgagggagagggatggaggatcagccgaccgccgctagggctctggatgccgccgaccgctcggtagggagggacgagtcgccgtccaccgctcgagagggatcgaagggaggatccgcctctagggttttctgttcgagagcgatcgcgagtgcgcgctagggtttgttgtccgcctctttgatcggcttgttaacaaacggtgcagtgggccatagccgggccgacctgcttaacgtgctcgggctcgggctagcaccgtgggctcgcctggtggcccaagcccggcacgag

SEQ ID NO: 170147 - DNA, 810 bp, Zea Mays
gttagtatgtcattctccctgaggcttaaattcgcccttctttctcttttctgcatattcttgaatttttgtcgaaacttcgcctaccaattctggatgcaaaagtttgccgtcctcagtcaaacctgcccgacctaagatccaacgaatagctcgctcatcaatatcttttaatattgagtcaaaagtgtcattagctatagcttcctcgattatcctgttccactgcacaactttatggtgatatccagttgaccctaggcgatcggggtgttcgttcatcttcgctctctgagaattagtttcgcccagttctttggccttcagttcggtcttctgacgaataaattcctcccactgagcttgagtgattttccccattttcttgggcggaggaaccttattcttcttaacaaaatccctattcatctcggtcttccacccatgaaatatcttggccataacagagagcatcgacttccttactacatcctctgtgccttttgggaccttgaatgactcagacaacttagcccatagcttattgcgggtgtcttcatctaaatccttccatttctgaagtgtgattggcactatatctctaacagtagacccgcagaaatttcgaaactttgtaaccacgtcaagtggttcttcaggaaacccctctgcattgagttttgttacgtacataactgcaccttctttcatctgattgggacctcgtcgccctcatttccgcttatgtgaaacagatgattcaggcatcggagcatcctccgtgtttcttgtagaacatgcatcctcttt

SEQ ID NO: 170148 - DNA, 551 bp, Zea Mays
ctacgatgtcatcgacgtatacttccaccttgtccctaatcaggtccccgaaagtcttactcatcgcccgcacaaatgttggcaaggcgtttttcagaccgtaaggcattacgtcatagcagtaaagcccatccactgttacaaaagcggtatgcttcctatcttccctagacatctggatttgatggaaaccaaaataagcatctaagaaagacaaaaggtcgcacccagaggtagaatccacgatttgatctattcgtggaagtggatacgggtccttgggacaaaccttattaaggctggtgtagtcgatacacatccaaagcttcccattcgccttggggacgatgactaggttggccagccacactgggtgatgaacctcttcgatgaagccgacgtctagaagcttccgcacctcctttcggatgaagtcctgccgctcgacggactgtctgcgaggcttctgactcaccggcctggcgtcagggttgatcttcagatggtgctcgatcacctccctggggatcccaggcatctgcgatggctcc

SEQ ID NO: 170149 - DNA, 295 bp, Zea Mays
tgctcacctggtaataaacatgttgttatctcaggccatttagggttacaagtgcatgtaataaaaagatctggtggcccataggcacaacaaatagcaatgccatcatggtatttttgtatcatatatcgttttgatccaacatggctagatggtaataacacctttttgcctattcgactggcgtcatatattcctttttctactacatcaaaaataccttgtacatattcaactcgtaattttgattgatttctaacaatataatcaagcatgtcttcatccttcattgctc

SEQ ID NO: 170150 - DNA, 591 bp, Zea Mays
cagtgtggactgcaggttgtttatagggttctatggggtcttttcagtaaacttgccacgacgaaaagggtacgggataaccagatccggccgatccagaaccgagggcccatatcaaaagccatcacataattgaaccggtacgcaatattaaccatcagatagagattcgatggccaggaaccaatgtaaccgaacagttattctatgatctattctcgaccgttcgatacacaactagcggctgcgatcacaccgaatgacgggctatgttgtaatcgaatcctaaccgtccacatcagtttgatggcccagattgaatgaggtcgcaatctaatcctgatcgtcgcttacgaatccaacggccctagggctttcttccaccacccgaccgaggccgagcagtggcatcccagcccaagccagggagctcaccggagcaccccaatatagcattcccgggcatgattaaccctatggcaggtcaaaaattaaagcgggcatcaatagcgaagcaaccgggaaggagctcaccgtggatgacgtgcacaggagcatcgtccatgacacagggcggcccgcggcggcgtt

SEQ ID NO: 170151 - DNA, 492 bp, Zea Mays
agttcttgaccgcccaggtgtcgtaggttcaactccatgtcctccgaagaagtcccttccaactctctcatttttaagggtgaagccctatcagtggtcacttcagccatgtccttctcaggaaccacatcagctataattctgtgaatctctgacattgtggttccgagagggcctccgctgttttcagcttcaggcgcagcctcatcagcttcagcatcggtattagcttcgatattagcagaggcaacaatttttttcgtcgagactgggggcggtgttttatggatagccttcattacagccatcattcgacgtttcttctaacccccggcattttccatagttgctcaagcaatcttcttcccttccgagcttttttcaatccccttctcctttgactgcaataggctagtcagatccgactctagggaacttagcatagaaaatgcgaagggtttagtcattacctttagtatttctataacaccg

SEQ ID NO: 170152 - DNA, 786 bp, Zea Mays
tttatacaagcgaactgatatagcgtaaacggaaaccctttttagcgtaaacagagtaaacaaccgtgggccctcgttccagaaatagcggcttaggcccactttccacgtgatcagccatatcttccttagtcagcacgtgtttacactattctattcgtccgtttatacacaatagagaattagcgtaaatacttcagccgacccatgttcccaaaattcaggaattggcccactaccccacttcccactcggtcaaatatttctataccctaacccccgcgtagtcaaccttcctcgccgactcaccgcgattattcaggcgacgccagggcgattccccttgctgccctcccgccagggcgattcgccgtcctccgccgccactcgccctcaaccctaatcggcgcctccgttgtcaatgtcttggagccgcccgccgctgacaatcctccgcgcacgcgtcacattgttcttctacacgctcgacgcccgttgtcctgcttcccaaggtgctcgagttctctgtaatttttatgcatactctgctacttcctaatctccccattcatatgcttcattttcttatgcattgtgtgccgtattccaggtgcccaactccatcaacctctgtcggattttctggcagtcaataacaaagaaatcacaggtgatatatttacgctaatttatttttttgtttactgcataaatgttttttgtttgtccatatatgaatgcttattctagtactatataaatatttatttttgttttgtttctttt

SEQ ID NO: 170153 - DNA, 625 bp, Zea Mays
cgcgtcgtcctcgcccccgacctcggcgtgcgggattcggtaccgaaagaagagacaggaggagaatacaagccctcagcctcggtgttccccattcaccgctcaggcgcagtccatcgctccttcgacgagggctccagcgactacggctccatcgctcctcatggtgatgccgccgagggttgtcctacgaagccgtccgcgatgccgagggttgtcctacgaagcagacacgccctgcggctgcccacacaaagggtgcgtccgccgctgctcatacacgcgatgaatgcacagtccctatgagttcttggatcccgaactgcttcttgattcgtgatcttaggtttggttcttgttcctccaagctactgcgcgtgtgctttcacattcggcacagtgggagccctcatggcagcagacgacgtgtgactccagactcggcgtagacgacccacaaggaggtttgtccccccccccccccccccccccccaaatttttggttcgtttccctcatttttggtactggcatcatgttagttttcactgaccctcatgatttgctgctggcagctgctaatggcggaggctgagcgccgccatggatctgacacggtgtggaat

SEQ ID NO: 170154 - DNA, 1253 bp, Zea Mays
ccggagcggagaaggaccaacagtgggaacagggggtcctgacagaatcgctggcacaactagagcgtgaagcgtaggaggtggagcagactgaaccggaggaactgagacactagactgctgtagcataagagccatgaatgccctgctctcagcccgatcctggagtagctgctgctgaagcgaatcctgcatgtcctgtatgttctgaaacatcaagagcatcctctcggataaccgggtctgctcggctgccaagtgagcctgctgctgagtgatagactggagaatcgaagcaagagcagggtccatagccggaggggcagcaggggcagcactagaactcccagcctcatgatcatgtgagcgtggaggcataggaggcggaggcggaggaggaaccccaaaatcatcatcatcatcatcatcagctgctgtatcctgggtgtcgaactgacgaagagcagcgtcctcggcctgagagtcaaaaacaggagcagaagctggcacaggagcctcaggcgctggacggtaggatccaaaaacgaggcgtgaggcctcaggtgtgccctgaaaccgaggaggctgaatcagctgcgcaaagatgtggcacaagtagtgagcatatggcaactgtcgacgagcacgaatcccatccaaaacggtgtcctcgatctcacaaataaggaaatccacgacgtcaaactcagagtgagagaccagggcaccaaggagccagagctggatatgtgtggtagcctccctgtatcccatcctcggcagaagagtccgtctgataagctcaaataaatacttagctgctgtagtaaaatctgccggtgaacatcgcgactcatcagagaagggcgggcggaacagagccgcgacgtgagctgtacccggagccacaccgccgtgagggtgacgaggagggtcagaggtgccgtagcagaggctgtgaagttgagtcgtcgactcgggaaatccaaagagctggcgaatctgagtggcagtaatggtgacatcctctcgctcaaaacgaaacctcatccagtgatgatccaggtctatccatacagacgcgtaaaagactcggacccactcctcaacatacttgccgctggtagtcaaaagggtcagaaggccaggcagatatgtgaggtgcgcctcagagtcagcaccggcggcgagcagaaaagctggaaggtccaagagccggtgcactcgtagagctatctgagcagacatctgag

SEQ ID NO: 170155 - DNA, 446 bp, Zea Mays
gaggagctgacctgagttgggctgaccacggcggggtgtgtttcacggcggcggagactgaaattgggggaagttcaaaatttgggcttgctggtgattgactgggagcaatactggttcgggtggtgcgtgataatgtggtggagctagccgcgggctcaatttatagaaggagcgagcggtggtgatcaatttggccgagccatgctggcggctggagatgaagaagaacctgggcgcggtgaattcgtgtccaccgtcgtggcaacctccccggcgacgatgggacagctatagggagtcacggcgacgcggtggaaaggctcggacacgcggcacaaggcccgtgcgacggtgatcaccggcattcttatccaattccgccgcggtaaccatggtacggtggccggagttatttaatggtcggagttatccacggcgatgac

SEQ ID NO: 170156 - DNA, 283 bp, Zea Mays
ggacctatgggacctgtttgagggggaagagttgaggttgatgttgttcaattttcgggaggcaggtcttattcggaaggaggagcctatgtgacaatttgttgcccttgctgttctgttgcgatattgagtgaaaacactgccctccccctcttcgcaatagaactgcgatggccatgtttgtggggtaaatgttgtatagtgtatgctattgtgttgtgggatggtgcctttgagcccttcgcttgtttgttcatttgtgattgtgccatgtaatttgttg

SEQ ID NO: 170157 - DNA, 431 bp, Zea Mays
gccggttcgatgaagcgcggtcggtgagtaaggaccttcacccttttcctctttggcgcggcctcacttagagcaactgaagcatcacttttcccagaagttgcgctttttctcttttgccctttcagcggatagcggtaatcagggtacataaacccaatagcatcgaaaactctattcaacctcttcttcttccggcctccgaaggtcgcagacagcgcgttatcttctgccttcgaatatggtcgaagcagttcgtcgcttgtagcttcgatgcacttcagccaatcatcatctggctcaataaacttaccctcgtatctgaaggtgtatttcaacctaaccagtccaccttcgtcagatttactgatagtttcctttggcatttcccattgctctacaagcggccacactctgaaggctatgtgctc

SEQ ID NO: 170158 - DNA, 568 bp, Zea Mays
tcggggcgtgtgcgggcgaacactagtgcgcgttctggcgcctggcacggtgtcgagcacgaggcagcgtagagagaggtcgagttcaagtgcggattggctccaaatctttgagattatggccatgatcccgttgagagatctcttcctctgactttcctttgtcatttatgtgtggaggcttgcaggttttgctgactggatcaagagatagagaggggagaaatctggtttgtctcactaccgcgcacagagagaagatcacgggtttgacatgtccaaagcacacgtcctgatgccatcttctgacatgagatagaggggttagttaggcacaattttgtcaatggggtcattaggatttgagctagggatcaaggtgaacacgctcggtctttggctcaagggctgaaattcagaattctgaatttcagaaatccctattgaaccctcacttgagaagcttgtttggagtttttattaaactaatttggccaagcttccataatctttattgtagcttatttagtatacttcaatgtttataattggcctaggccatgatttt

SEQ ID NO: 170159 - DNA, 375 bp, Zea Mays
ccgagaaatccggcgacgtgcgcacgagtcggtccacgacgagcctggagggggcggaactgacaggtagggtccatggcgcagagagaggagaaaggggcgtgcggggcaacggctcggcgactggcggaccgggcccgcgagatagagagactggtcccactaggcagcgagcgaggaagggagcgcgtgcgcgagggagaactgccgctgacaggcggggtccgcctgtcagacggcgcgggcgcgcggcctggctgggccgactgggctggtttgggctgctttctccttttctttttctctgaattttctaattccttttccatttctttttctatagggtttttcaaatccaaattcaaactaggtttc

SEQ ID NO: 170160 - DNA, 436 bp, Zea Mays
atcataaagagcatagcaaaggatggacttaagtcaagactcgcgaaatggcaaaatggagaaaacaatcactggtaaggtaggtaaggttccaacaaaatggttgaagtaaaagaaattattaccgagggaagttatatggaaacgatgagaacgttaaggatgtgaggaatagaacgatcactcatagatcatgaggaaacaaaggtggtcaagagcatgtaaattgaaatgtcttaaacaaacattggggtacaaaggtaagcatttatataaaaagtaagagtatgcaagattccgaaggtgtgagcatactaagaccaagggagtacgaatagccgaaagatagtgacttaacaacagaataggaaagggtctcaaaagacaggatgatcatggacatataaactgaaatgtttaagtaggcagtagaaat

SEQ ID NO: 170161 - DNA, 545 bp, Zea Mays
gggcaatcccataataaaatccatgcaaatgtcctcccatttccaagatggtatgggaaggggctgtaaggtgtctgccatcttcaaatgactggccttgactctttggcaagtgtcgcattcagatatatacttagcaatctccctcttcattctggtccaccagtacaaggatctaagatcatgatacatcttgttactgtcggggtgcatggaaaatttggaaaggtgagcttcatccaatattttctttctaagctcgggatttttaggaacaaccaatcggtctccaaaccataaaactcccttgctgtcctgacggaagcatttgtatttgtccaccttccattcgatcatttccttaatgacttgaatacccttgtcaccaatctgtgccatgactatttgctcctgcaaggtgggctccactgagatataactcaaggtacttgagggaatgatttctaggttcagcttgcacaactcatcacacagggtggtgatttttgcatccatattcacacagttgcactgggccttccgac

SEQ ID NO: 170162 - DNA, 470 bp, Zea Mays
aaacaatataatttgacatttattttactcatggtaatcgaatgtgattgggcacatttaaaggagcaagagatgaatacatggattaggtacctttgttgtactatggtctgtggtcctcatgattgtggagcccaacttttgagctctgtcacttattgctacaccaccgtcccccttctttgcatttacgttttaagctccatcactaattcctctcgttgggcctctacttctgcatattgcatgctcatgttcagtaatttgtcttgcatgtctttcagttttgattccaattatgctattttgtcataattatttccctcgccatttttgctcctagattgccactatgcagtgggacggtaagagtaaaagtaataatatgatccactgggaagtagcccatagccaagacttgtacttctgaatatttttgcatacttggatcattaacgatgattgagagc

SEQ ID NO: 170163 - DNA, 613 bp, Zea Mays
aaaagatttccccctccaaacaaccttgagtttagcaagtgaaacccttgtaaaaaaacatgcttgtgttggtgttttctaacccttgtgtgtttcccccttgaagttgcgcctacacggcttgtagacacccatagcttgacccctaaatcgactaaaacttccttgtgcacttgttgtgtcaaaaaaaaattgttattgttggtgtctagttgcgcaaaccctatcaaggccatgtttctttccataaatccttgcccctaaaacttcatagcattcctgttgattatccagctgatcttgttgcctacctctcatttcacctcgatctagtaaatctttacctttgagaatcgtgtggtgactttatcatctgaatctctggatccttcattgattctgccccgttatctgggtatctgctataacccgttctcaagtatcggatgttgatcttgcctaaatctcttaattctggtcattctcataaccccttctccaaggatcatgacgcttgttttatcaacttatctctaagcggcatatccatgtggattaatgaatgttgttgttatctttggatctctcatgtctctaaaagcctatcaatctc

SEQ ID NO: 170164 - DNA, 916 bp, Zea Mays
tggtgagatcacggtggtgatgagcttcgtgacgggagatccccggcattggctacattaaatgctatagggtttgtctagtgctcaagtgtgtcgccaagacattagaggtcatggcaaactctctaggcatgaattgggagcaaaggtgtgactagtagggcatgaacaatggcgataggtgcttgtggtagtcgtcgatactttggtgagcaattgtggtctatactatgcgtaattgggcgtgggcatgggtcctggatgttggttaccttcatgcaaacctcctggcgctgaacagtgtgtcaacatgtgcctaggaacctcgatcgacgacggtaggtcatgacaaagtcagaagctccatggcccgggatgtggaagacaatagagttccatctagggatgttgtagacgtccctacctccgatgaaacttgtggtatcgacagtgaggtcaaaggtactctggtgcgggtagaacgcatttcagaagctcgatgatggcgacactagcactggtggtgaagtagaagggttctggtggctgagagctcatgctataaggagataggggcgcagggggtctggttttagaggtcgatgccattgattgcagggagaggaagaaaacgagggtagcacgaccgggggaatgaaggcgaatgtcgtgagctcctcgatgttaatgaacgctttctagtgaggaacaaacaaggataagagatgaatatgcttagcgagatccccaccttcgattgacggcgatggaaagtccggtagggtcacacaggggcatgaatgtcgacgatgtgtccaacgcaaataggagaaatgagcgcaggaggatagggatgacttgcgattcttgtgtgtttaaagagagtgtgtgtgcgtggacgtggctgaccatgagg

SEQ ID NO: 170165 - DNA, 944 bp, Zea Mays
gggatttttcattttcaagctccaaccatatgaatgtgattcttttaaagcttattttcatttatggagtgagggtggacctaattggtttcaggagatcaatgctaataatcgagaggaatcctcttcatggaatttggtctctcatcgaaaaaaaatacctacaacatttgctaatgtggtttggagttatatttttactagggccaatgctaccacccccttaagaatcctgcacaaagacctctttcatctataaagaatatgcatggtcgcaaattatcagcttttcagaggttttcctatacaaagtagcaatcagctatggccatcccaaagtctaaattttttggtagatttaacagagatattgattggattgatcagtttgatcactaatagaccagagcgaagaactcgggtagattaactccatctccagcaccgatcgcgggatcatattattcaaatcataacaatcaatcgagtatgtataatggggctttaattggcacaatatttgggcaaaattttggcccacgttcttcattgacaaaaacttcgaggcaggtttggtggcacaaattgtttgtgggccaacacatagggatcgccttccagctgggtttcgcaatcagggattcatttcgaaacaagtccttgggcatatcctagaattcttttccctgcctttggtttcgatctaactttatgtcactgcttagtgggccatcttcgccaccattgtttgataccttttctgattttgtgaaggtggttctctctagggacgccccttcatctcccacctctacagctccacatcaacatccattgttctcccaaaccctcactggtgcgctcgattcctcaaaactattatcgtctccaccaagcttacatcggtcaaagggatccatcgctaaagctaacactttgtcaat

SEQ ID NO: 170166 - DNA, 437 bp, Zea Mays
atacattctcttgatcatgaaatggcagtaaggatagaattttttcattggttgagtttgtgcctgaaggctgacagtggatctatttggcatatttgtgctgccatggtgctttcatcagtctaatattatttttccctttacttcagggttgttatattcaaaatggagctaacttttcttgaagcatatgcagttatgcacatgtaaaatgagagcagtggatgattaggagataactagggaacctatacttcttgtgtttcctttttccttgcagaagaggtggttctgatctgtgcaatacttacccgaagatgaactacacagactgatttgcacacaatggttcccttttttcttttggggaataaactgtctccatacaacccaaagatgaactactattttttgttttatttttgacttttgaggcc

SEQ ID NO: 170167 - DNA, 275 bp, Zea Mays
gcctcgtgttaatgtttcagaatcaatttattttgagtgttgatctccagttaatatacttataaacaaaagtaaggctgcaagtaggcgagctgttattagaaatctagttaatctaaagaagaaatacatgttatggtgatctgatagtgatccacgtagttcacatgtaccatgccactgggaacatagagtagatgttggccagagcatcgttgatgtataacagggtaactacgcaataaggtcgtctgtaaagtttatgcagccaacag

SEQ ID NO: 170168 - DNA, 830 bp, Zea Mays
cggatgcaaggcgcgagtgtacgaagtggtatcccgtgatctgggtcatgcgatccaaatcggacagtgaagatcgatgccgggagggctgatggctgcgagcggtgccgctcctgcccacggtggtaaggtcgccagtgatggggcgggtgcgggctacgacggttccagggtcgcgggggctggccagaaacgaagagaaagactcggcaaactcactggtggggctttgaccacgagacccgggtcagagaggggagaacggcggaggaaaggctccgggcgagtcggggcaactccggcgaggaatcgtggccgaggagagggcggtctaaggcgtgctagggcctagactaactttagcagggtgaggggaacgtcagggaccgacgcaggggcactggaccagactaattcggccggtgcgggcgcgacggaccgccgcggccgaactccggcgaagccaaacttggccgacgacaaagcataattggggaaactgagcatgggaacgggtgtctcacctcagggcaaagctcggggtcgcttggcacggtttctggctagttaggtgactagcacggcgggtgcgggtctccggcgaggccgagcagcgagggcagagcgcgagagacaatgagcctacgtgaaatgggacggggggagcgagtgctggtgcgggcggtgctcaaaagggagttggggtgcgtgggcgggcgacgtggccggggattccggcatgcgtgtgtgcttctggtccacggtggatcgcggggaagacggaattgacaagggggtcccatggcgcagcgagagagagcgggcgcatg

SEQ ID NO: 170169 - DNA, 640 bp, Zea Mays
cttggaaaaataaccaggagagcatacatgcctttataagtacgaacatgcccctggttgcctacgttatccccagaatattccccccttaggggccattacaagtcattacagtggggttaagtccaacctaaactaacacaccatcaaccctaccctaggatggggcttacacatgggcccaagtcagccagtacgacgccgtgtgggcccatgttgctaatacacacgggtatgaactaaggtcttcactcggggcgctgggtcttcgagtcttgccaaagccgatgcttggagctacggtaaacaaagtctcgagaagcctgcacttagatcgactagtcccttcgtccccaagccttcgccagtagcttcgaccgtggagctgcctttggtgcgggttgatgtagacttcgttctctgttactgacatgacatgtttagcatatgctttaaatggatcgagcgaggggggtgacgatcttcgctccaatagctcctatcaacaacgaacctgtttcgacaagatcgatctgctcgggagtgtgggcatgagatcgtagggcgccatgcccggcctcctcgcaacaatccgtgcatccctcacaaccaacaacccgagttcatccatgccatgctg

SEQ ID NO: 170170 - DNA, 497 bp, Zea Mays
tcgaatctcatcccgcaaaagtgatgtttgatactggtgcaattcattcatttgtcactgcaatatgggtagaaatgcataacatctcagtagaggcaatgatgtcgcccatgaggattaattcggtcggtggcaaagtgcaagcagataaaatatgctcaaatataagggtggaaataagggggatagggttccccagtgacctaatagtaatagacacccctggggtagatgtcatcctagggatgaattggttaatgaaatatgaagctaatgtcagctgtgacaagaggactgtaacattgaagtccccgtccggagaggaggtagtggctgagctaaagatgcctaaatcagcggaggtaatttgtcaccagatttcggttgatagtaaggaggccagcccgctcgaggctatcaaggttgtgtcgaactttccggatgtatttcccgaggagctaacgggcatgccacccgagagaaaagtcgaatttgcc

SEQ ID NO: 170171 - DNA, 914 bp, Zea Mays
ctgagacccacaagcccctgttcgctgcccagcaactgagaggtcccaccagcacctggtgggccaactttacagctgttcaacctgaaggacatcttgtcacgtgggcagagttcaagcaagtgttcagggaacactacattccagatggtgttttacagatgaaacttgaagagtttgtgcgcttaaagcaaggaggagatttggtgatgcaatacctcgccaaattcaaccatctctccaagtgtgctatagagcaagttgacatggacatgaagaagaagaagaagaattgcttcatcataggtctaaatgatcgactacagcgaaagatggccacttgcctgtacctcacttacagcagggccgtgagcacaacactttcggtggaagccaagaattcaaggcagggaaaggcaaagagatatgggcgtgaagggggtgaaggatcctcttaaggattcgagaagcagtcgaggttggtgattcgtccttttaaccctagtcgctcttttcctcgtccacccgcctatcctttcaagcaaccagtttttatctgccacactcctgcccccgctcaaaacaatcagtcgagtgcccctagtactcgtttccccgccttacccagttcatccaatggttgcttcaattgtgggaagtctgggcacttcatcaaggactattcttatccaaagcaaaataaatctaatttccaacagacttctgggagcacacctcaaggcatgggaaatgtgtccagccctcaggcgggcaaaaatacaacgaaaactgggcgagcctactacactcaagtggctaccacccgggaaggagagcctgtgataatgggtacgttttccattgccagtcatcccgccgttatcctttttgattttggtgcatcacacactttc

SEQ ID NO: 170172 - DNA, 680 bp, Zea Mays
cctctttgcaaaccgggtatcacaacagggaaagttgccgaagcttccagggtgcaaaccgaagctgatactaaacagatagaagttgaagatgcaggaattgaggcttgaaccgatactgggccttcagagtccgctgagaaaaagcctgccgaaattgaagaaaatgcaagagaagaaaaggccacagagcaaatttcggctgaaaaggttgtgactcctgctcccgaagctttaaaagagagtattgattacatcattcgccatgctatcggagcaacattgtactctgtaattggagaatctgtcatcaataaagttttcattttcaaaggcattgaaactcttgactatcagctgacttcgattcgattggacttgaagtcaacacgcatactcgacttagggtgaccactataccctactaacggagcaatcgacttaagtcggcgatgacttaagatggtgcaacatgctcacgcttactcgacttagggtgaccactataccctactaacggagcaatcggcttaagtcggcaacgacttaagatggtgcaacatgatcacgcttactcgacttagggtgaccactataccctactaacagagcaatcggcttaaatcagtaacgacttaagatggtgcaacatgctcacgcttactcgacttagagtgacc

SEQ ID NO: 170173 - DNA, 274 bp, Zea Mays
gaaggggtaggagggtggacgaggtgaagaacggttttgattgaaaggtcggatcaccaacctttgtcgcttttcaggcccctggttgggcctatcacctccaaagccctttgacttcccagggcctgcatgcttagcttcaactgccagcgcggtgctgacagccttgctgtaggagagatcaagacaagtggccatctttcgttatagccggtcattgaggcctcacatgaagcagttcttcttttttaggtcagtattgacctgatcaatt

SEQ ID NO: 170174 - DNA, 1022 bp, Zea Mays
gtttacgacgctgcaggtcgtacacagtcgatggaacagtgtgtcgtcgtttggcagtgtcgtctttgagcggctagtagcctgtccacatgctatcttatttcaaactggatttgttttgagaggggatcagtgtagggaagtggcctaccctcctgcaggtgcatagttaggtggcttgcacagttgtcagttgcactgcactgtttcggcatggaataggttttttctttagcttcttcgcatcgctgaaatcattccttctacatttaatttcgtgtgcccctaatagtactagtgtgtaggagtagtataccgtacgtacatgacaacttctagctaggcggctgtctgtatatgtacgctagctcgggccaatcgcctaccgacgactgtacgcagtacagtagtagaaaactagaaatagtggccctgggatggcaaaagcatgaaggtaagcggcagggtagctactactggcctactggcgacgtgctatgcaacgtcattctgcacgcacgcacattcgcttcgccgaaacgccggaagccgttggcggccgttttcgccccgactaccgtgctcttgtctccatgtatacatacatatgcacgtcgcacgtcacaacgtcaggtcgctctctaactttgtgctactctctctctctctctctctctgcatgcgagacaaagactggtcctcatcatcgtgtgagctgacctttgcactgtaacgtcacgtgcctatatatacaaacccggcaaacatggcagtcaaaactccaaacgtctgcaaccaccagaagccacgtttgttacgcacgttgcacggtcagcgcggtactatccccaccaacgcacgatatacccgtgagcatccaccttggatctataccatatgttcggtgcatacggactcggtctggtgcaccagaccgccaaagagcctcggtttgggaatttcacaaacatgtttcggtgtgccagtagaccgatccagtgatgccagagaggtccaagtta

SEQ ID NO: 170175 - DNA, 557 bp, Zea Mays
ctgtctcgagaagccttctggtatttcttcaagacgatcgcgttcgggagcacagcaggtgccgaggagcagcagcaggagctagcatctgtgtgcatggagatcacggaccagttgggcagatcattcctaggtgcaaacataatcggtggcttgctgaggagtaatatctgtgctgggttttggcgaagggtcctcaaaggcatcaaagatcagacgcgtatgcatctccacctgttcggtgagggtccagttgatcgcttgaagaaaggtcagcctatatacctttggagactactcaagagtgacagtgtgctcatagcctacaggaattatgaagcgtgttcagtccagcagcctgatctgcccaagataactgtacaagatgttcatgctggaagcacaacgcctcgagggaagttcgaagtcctggcatggagatcttgcataccaccctactccatctacctgtggagatgtggggtgcaaacaccgtcgtcgtccctgcgtgtatcgtccaggaacaagcaaatcaggcagcgccaggcgcgactcgc

SEQ ID NO: 170176 - DNA, 410 bp, Zea Mays
cgagttgtccggacgagtacgaggtctccttcgctgaattccctcgggatgactgtgtggtcgcgccatgcttttgtttgagcttggtatttgtttagagcctgtagggcgaagacgcggtctccgtcgatgaggtccttcgaagtgggcttgtccacgtcggggacggctgacgggactgtccgtggtgacccatgttttatttcttgcggggtcatggcctccgatccatatagaaggcggaaaggggtgaacctagtcgccctgcactcagtcgtgtttagtgcccaaacagcttcaggtaacaggtcggcccacttgccctttttgtcgtcgaggagcatcttcttgacggttgtgaaaattttgccatttgcgcattccacaactccgttggattgcgggtggta

SEQ ID NO: 170177 - DNA, 329 bp, Zea Mays
ccggagtagaggtccggcatccctgtcgaacactgctcttgacaacctggtatcaacgtcgcgtcgatccttccgatccaccgccgctgcatccccacccacagcgccaccaacaacccctccaccgtcatcaccaaccttcgtcgcgtccccctcggtgcatccggccatggctaacgaagagccaagcttcgctgacgttgtcaggatgttgcagaccctgtccgccgatgtggcgggcctcaaggcgaaggcggcctcgtcgtcggaagccgacagccgtctcgacggccagcaccacaccgatcggccgcccaggttccagaagc

SEQ ID NO: 170178 - DNA, 445 bp, Zea Mays
cttggatatggtgctagaaacgttaaaatccaatgtagcagcatatatttgatggttcattcattaacaggatggaccctaagtcaagttatttgctaataatcagacttactggtaatcctaaaaagcatagaaagaattttcatactttgaatgcagcaaggttgtagattccgatttatgcaatttcaaggatcttgttcaagaaattgttgatcagtacccgcatagatacaatgagataatgcatgttttttactatgatgttgcccaaaaaaaccttcccacaaattaaaacagaccaagaactcctgaaaatgtttagcaaacatgttgacagcaagatagtgctcatgaccattacatacactgagcccaccgatgttgtcgcggtcctagagtggtgctacactgaagaagatatcccacgcataccttctttggc

SEQ ID NO: 170179 - DNA, 835 bp, Zea Mays
gttcgaacctaatgggtcacatattcaaggggttggaacggttgtatagatgattgacttttgtgcaagtggaagattattaactatatagtcaagagtcaatcataattcatgagaatgttaatgggtctttaggataaaagtatgttggcatgtgtctatatatttaaagtcgtgcagacagcgaggaaatcacaatagatgagttatatctaggccttttcttctcgtcgcgtacatggtgctagcacaccagtgtcatggtatttgattgacatatgtgtagataacatatggagctgatgttgttattgctacggtattgatcgacaacaaatatgaggagtatggataaacatgtcgctattgccggtatgcaaggacgtacgactactttcactatattgttatgctctttttttcactgtgatgcgtaacaattcatgattctctactcctgcggcaaggacgtacgatcactttcactgtgttgttaagctcttttttatgtggtgcataacaattcatgactatctacatgtatgttaacttgattgagtatggtagctagtgtgtaatatgctcgctttcttacactttctttgcacttgttgcacggcccctcgccaacttcaactagctcgcttattccttgcgacaaatcacttccaatccaagtaaaccaatcgctcacggatcattagctttcagctagatctactagatgccaacactactgaactcctctatgcactagcactatgattagtgtggtggtgtctggtgtcaaggtgaggagagggagagagctccttttgcaggatgtgccccacct

SEQ ID NO: 170180 - DNA, 461 bp, Zea Mays
cgggatcatatcgcctcactcagatggacgacacggaaattgggaactcatggaacatagaacacctcaggaagttttacccctagctgtatttcaaaagctattgggacgacaatggactctgtaaactgggaaatatatcatcaataaaaagacttcaagagcgctcgaattattcattatcgacctgcattcttacttaactcggggtgaccactataccctactaacggagcaattggcttaagtcggcgatgaattaagacggtgcaacatgctcgcgcttacttaacttggggtgaccactataccctactaacggagcaatcggcttaagtcggtgatgacttaagacggtgcaacatgctcgcacttacttaactcagggtgaccactatgccctgctaacggagcaatcggtttaagtcggcaacgacttaaggcggtgcaacatgctcgcg

SEQ ID NO: 170181 - DNA, 472 bp, Zea Mays
cgcattcttacttaacttagggtgaccactataccctactaacggagcaatcggtttaagtcggcgacgacttaaggcggtgtgacatgctcatgcttacttaactcagggtgaccactataccctgctaacggagcaatctgcttaagtcggcaatgacttaaggcggtgtaacatgctcacgcttacttaactcagggtgaccactataccctgctaacggagcaatcggcttaagtcggcgacgacttaaggctgtgtgacatggtcatgcttacttaactcagggtgaccactataccctactaactgagcaatcggcttaagtcggcaacgacttaaggcggcgtaacatgctcacgctcacataacccacggtgactattataccctactaacagagcagtcgatttaagtcggcaatgacttaaatcgacacaatacactcgcgcctactcgatccaacgcaagc

SEQ ID NO: 170182 - DNA, 508 bp, Zea Mays
cgaaaattgaagttatttttgtttttatcctcgggccttctcattatattgaaatcccccccaataataaaagggtgggactcagcaccaactacactagccatttccgctaagaagacattcttaaggtcatcctgagctgggccatataccgcatacaaggcccatttaaaatcatctgatttatttctaagaagaaatttcgtgtaaaaattcccctcatcgatagctccaatgtcaaaaactgccggatttactcctaaaatcattcctccggatctacctcttggtggcatagtgtgccagagaaaatcaatcccaccacttatatgccgcaaagagaagtccgagaaaaagtccctgcctgtctcaaatatcgctaagaagtcgagacgatgatctttagctaaggtagaaagataattatgtttagccaagtctgcaagacctctgctattccaaaaaatacccttcattttaaactaattttagaaagggtgactggttt

SEQ ID NO: 170183 - DNA, 536 bp, Zea Mays
tagtagtagtagtaggggcagcatcaactcataacgagttgatttgtaagttatgtagctttccttaatgaaaaatgatttcacctcctcctatgttgattgttttgcctcatggtcagttgatgattatcgcgatatttattgtccgtaatgctctctgtctgttatgctagtgaggtaacttggagtttttgaatcattcctccgtttgccttatctgtgaagtcaattcctctggagtagtagctgagtcattcgggcatcatatcgtcgcttttaggggtggtggccgagttattattgttaacatttacgcttcttaagtagcgtccaaatggtgacgaagccacatcagcgttttagaattaacgtttgagtgactgatgaccacgtcggcgcttttagatgtaacagccgagtgacttatgacgacgtcggcgttttagagataactaccgagtgattgaagacgacgttggcgttttagagataactgccgagtgaatgatggtaacgtcggcgttttagaaataaca

SEQ ID NO: 170184 - DNA, 584 bp, Zea Mays
agtagcctcagtgtgccagtcgcttctcaagatggcctcactggcagcaaaatgttctctgatgagttgactcgcgtgcttgactgggattgtactttatctcttatgtcagctaagctctagtgaattcctccggcaccaatgttagcacgatggttcgtccaaccgagcatgtccccgattcacaaaactatatagttgggaacctcataggtagattcatagtagttaacagtttgcttaaacaaactgacgtggttgtttgatctacgcaaaagatggcactggttgttggttttaatagtgaaatgtcatcctaaccatttaactagctatgtccaacatattatgtatttatttctctaaatattgccagctgctctccaatacaaattacatggttgcctcactatccgtttccaaaaaactttttgggggtaaaatcaaactgaaatttggcgatggctcgtccccttgcaatcagtcttctacctttcagtttctcctccttagcgtggctttgcatcaatctatgcagagaattaaagcagatgatgtctcctccgatcttgagaatttttttg

SEQ ID NO: 170185 - DNA, 476 bp, Zea Mays
gaccgaatcaccattggcacccatcgaggcttagtatggtcgaggacccggagtttgtcgatggcggatgtggttgggtccatggcggtgcaatcagggatggatgccccaacaccgatcgcggggcgccgatgggatgggcaagagggtcgcggggctcgagcttttatacaccgggtcctaagtccgaaccgaggaaggatggccggcaagcaggatcttccacaaatgccgcgcggaaggtggtatttctgttacgagctcgcgatagggatggggagaaggaactgacgattgggccccacgagccggaggcacaaggcaggaccaagcgtgggcgcagggtggctggccgggcgggcccgcgtgccatcgacgcgagtgttgttgttgtgcgcgcacgacgagagattgactggcgggccccgggtgacagccagccaaccaggcgcgcggtaatctcgcggttgggccgc

SEQ ID NO: 170186 - DNA, 636 bp, Zea Mays
gagtaaatccgttcagccgcaaagaggaagagagagccacggggagtcaccggagtgatctccagctcaccgtcggcgaggatcctttaccgtgtgtccttacctgcccatcccgagcccaagttgggccggcaacggcacaaatcacggcggaattggtcgtcagcggtgggcttgctggcgatcttatctgtttcagctgtacactgtaccatggtaaacaccccaccagagcacctgacagccagagttgagggtcgattttccccaaaattcctgtggtaacacaagttaatctttgcagcaaacttgtagagcattataccaactacaaacttgctatggcaaccataggtagatttccactggatcatgctcagaatttagcttgaagtcgatgttagtccactgctagtgtgaaaattcagaccataacagcctgacagtccaactttaggctcatttatctcagaattcttcataacaactatgctcactctcttaagcaaagttgttctcctttaattgctctacaaatttggtgtggtgacctagggcaaagatcctagaatttgaaagatacaagactccaaagttgagccactatcactgaaatcagacttaggcatttgagaa

SEQ ID NO: 170187 - DNA, 568 bp, Zea Mays
atacaaaacataatcatgtgaactagggggagcctagggtttgcctcattagttggattaactcgagaacacaaaggctagagtggttcggtctgccggggcgtaacacccaacatccacggtgagttgtattgcttgaggaacgggagtctctgtgtgtccgaaggtctccgaggagtctgtcccttgtaactttatgtgcccttccttctatagcccaagggggcacatacaaggaagttgaaccccgagaggcgagcccaagaatgtagcaataaaaacatactacatggaacaaataatgtcgtcggcgaacagagatcctctcttgggcgccgtgtagatttcttgaccaacctctccttctcatatcttctcttggccgacgtacggatttcttaactagactctccttcacccagcgtatgagtgaaggctctggtatgggttgcaacgtagaccagcacactgacgtgcgtaggtgcgtgcgcagtcgcttgtgttgtcacgtctgaccggtcattgtaacagactcattacccgaccgaacgacccttcatgatggtgt

SEQ ID NO: 170188 - DNA, 524 bp, Zea Mays
gaaggatcaagattctgtacaagaaggaagtgatctgtacaggggcgaagatcgattaaaccggccaaagaagtggcgcgataattgtcgtccactcatttgtcatggtactttccacctgtctactcatcgctgatgttatgtcctgctcacatatgggaaagtacgacaatgaatccatgttttgtcctttttgatatattgatagttatggccgaagaagatgcaatcctaataagcctttatacattagaagttctattgaatgactatattctttgattaaagagtcagtgccttgcatcagactaagtgcttatttcgggaacaaggcaatttgtgaaatatattgtataaaaaacactggtagtacatgtgcttttggttcacttagcttccccgaaggcaggggcatgtgttgagcaccaaatttggctcttgagtatgaccgggtggtttggccatgtgatcggatggtccacgggtgtatcccggatggtccatgattagattaattcaggcga

SEQ ID NO: 170189 - DNA, 878 bp, Zea Mays
ctgagttttaagctgcagaagaaaatgactacatggtatgacctgacatttaacagagcagtcagtgtggcaattgcagtagaagacaaggggcgggtgcaccaaaatgctaaaaggatgtggaaaggatttgggtcttctcaggacctggcaaagcgtcaaaaggtaataatcagaacagccggctctcccaatactccctatcgccaagccgcttatcctgctaaaactcctatctacatccgtcccactaatatgcaacgccaatccctacccacaaatagccaagttccacgcttgcctgctcccactagcactaaatatccttgctacaactgtagaaaagcgagacatttcattaaagattgtccctatccccaccaaaataactccaatttccagagaccagcaggcaacagttctcaaaatcagaacaagagtactcttatcaacaatgcaaaagggaaggacaacaggaaaattggacgagtattctatactcaagttgatgtgacttcagaacgacatcctgagcttatgggtatgttctttgttgcccatcatcctgccaaagtactttttaacactggtgcatcccatacatttctcagtaaatattttgccatgcattatagcatttctattcaagaagcgagatggggtgtggcaatacaatcgcatgggggtcgattgtttacaaaggaaatggctttccaagtgccaatagaattagttgggcatagttaccctactaatatgatagtgttgaaaggtccagatatagatgtgatcttaggtatgaattgtctagtccaacatgaagctaccattgatacgaaaagacggacccttcgattaaataccctattaggagagag

SEQ ID NO: 170190 - DNA, 860 bp, Zea Mays
tcgacgttctaggggactctcagttgtcatcgactaagtcctgaagaactcgagctgtcatgacgcgatgatggaggcttattctgaagaggcccaacgcctggaagacaagttcttcgggctagagctcaaccacattatgtgacattacaacgaggttgtggatgaactaacaaagatagcttcatggcgaaccacggttcccccgaacatcttttctagggatgtccacaaaccttccgttgtaatcaaggaagcgctcgaaccagctaccaacaccaggacgcctctagctgacgagccgaagccttgcagatcgacaaagagtaggatgaggccacgccagcctctgaccggcggacctcgtacctagagtacctcctctatggggagttacctctcggcaatgctgaggccaggcgactggctcggcatgctaagccattcgtgctacttggggaagaaaaggatttgtaccgacatagccccatgcgaatcctctaacggtgcatccccatcagcgaaggttaggaaatgttgggaaatccaatctggggcttgcgggcaccacgtggcaccccgaacccttgttggaaaaaccttcaagcaagggttttactggccaacagcggtagccgatgccactaagattttgtgctcctgcaaggggtgctgattttacactaggcaaacacacctaacagctcaagccctgtaaaccattccaatcacttgggagtccctaactatagcatcatggaccacgacacataattcacaggaaagaagttcctgagtttctgtagagaccaccacatccgtgtggactgatcatctgtggcccatacgaggacaaatga

SEQ ID NO: 170191 - DNA, 653 bp, Zea Mays
gaaacatatgtgtcatccgttttggttcgacacttctcacgttcatcacatatgtgagatttgttggtcgagaaattttttttatttggacagcctctgaataatcgatatatcgtgatatttatgacgagctatgtggctcgaacaaaatttcgatggtataacatatgttattcttcattgcatcatattcgggcgtgcaggtggagaacaacagggttatttttttgacaatggggcataatagaagacccacgggcaaaggcagcaaaagccagccaacaagcgaccagaaataaaggctacactaggcatcctaaacaataacgagcgcactcgatagagaaggaagcaacctaacgcgcaacagaagcaccacgccgtgtccagatatcacttagtacataacagcactcctgaggaggcaaatggaacacacccgacgaatagcaaagaaaatggacagctggctaaagaatagaccaccagccaaggaccacatctagcaggtgatagggggctaactcccagaaattcgatgatccaccggtctccagccgaacgcccgacacaaaacgtcacttgtcatccttctgataagcttgcttccttgttccaccatcctttttccttcttttttctgtcggagggcc

SEQ ID NO: 170192 - DNA, 539 bp, Zea Mays
gccatattaaaagaaaataaattcggaaatggaaaagaaaacaggtttgcgctgaggcccctgggttttatctccctcttctctcacaaaatagtcctcggtctactattggcgtgggtcactgacatcgcacaaaaccccctagacctaaccgaaatctaacccgcgctccctgactgacttaaacggtacccgcggcatagattacggcggcgaggcttaccggcggcagtagagctccggcggggtggtcagtgacgtccgggaggtcacgacggtcacgtcggtgtgcgggtcggcgtcggaggtggtcggagctaccctggccacgagcacgggcggcgggggtcgtcggtggctcctgttccggccaaaccacggcggtatagtttaattaaggtgcacgaggagctccacggggtgatgtagaggccatgcgcgcaacgaatttggaaaaggtgctgaggcttacccggtccacgtgcgccggcgggtttttgaactccggcgagcacgattgcgctattccggtgacgcgg

SEQ ID NO: 170193 - DNA, 433 bp, Zea Mays
aggaaggaaaacaagatatcacaaagaatgccctgatcacgtaaggtgtacatcaaaatccttacctggaagaccctagggacgtccctggaaaggaatttcatggtcgtccgaagcgacctcgtcgccgcctcggtatattcacggaaattattccgagactgctcctccaactcatcgttgagggagaggatgggctccgaggtgtcgcggctccagaacaggagcggctgcccacaccactcattagggttgagctgcgtggggataaggccgctgctccccaagacgggccacggttctgcgcgcccctccaccgaggcgtcgggtccccctgcagtcgatgcatcgggtaccaccgcagtcgacgtaccgggcctctcctcggctaaggtgacaggcctccgctcaccgacctcggcaacgacggccg

SEQ ID NO: 170194 - DNA, 438 bp, Zea Mays
gtggcaacggcccctcctctgttagttgcacctacgtccatgtgtgctctcccttcctctcactaaccgttggtcccacctatcatttcctccctcttttccagctctcgctctctcgcaccgattacacagttccagtaatgcacatcggtgcaacgctagtggattggccatcttgcacgtgacgacaaccaccgttggctcatgctccccacacgctctcctatttaagtcgttcggttctctcccaaaaaccctacccctctcaaccaccaccaagcttttcctccatcaatcgaacctccctccttgtcgctcctagttgctgtcggccactcgtcgagtttcccctcaatgtcttttgctggtccaagcaccctagcccccgtctcctccccactaattgagccttcaccactttccccatccaccggtgag

SEQ ID NO: 170195 - DNA, 862 bp, Zea Mays
atgcgaaaaagtgagcggccgaggccgagctgcatgtcaccgacctccagcacatcgaaggcattctcaatttcacttgattgagtcctcaccgagaggccgagctgtgactaaggcatggtggacctcaagccagaatgtgatgacctctagttcatgaatgcgactggagatgaccatcatccggggagtccgggcgaacttttccctcaactgcgaaaccccaatatgaccgcatacgagatcaatggccacagacagactacagcgctcagcgttaagagctagaaggcgctccttcgcaagcaaaagttattctagcaccatcgccggtgaaaaacaaaaaatcccataaggaaactgttatggcaagaagggttgaaagtcgaggatggaagagcacgaacctcaccttctatcatgatgcaaaacgagggtccttcgacactgcatcatgatgaccgcacctcagtaagacccatctaggccctcaagaagcccttcctcatttcaaccgcaggatgctcagaccccaccatcttaccaagctcaaaccctgcgaccatgactccctcgttagtaatacctggagcgatagcacgagcctcatgcctcctcgaaagcctgggttgccgccaaataactgatgtctgtccatggacatgatcctccgcgtggataataaaacgctcccctgcccactgcgaaacggtcgcacgccctggacgccctgtaaaaaccatcttagtccttaggacatgatcatccccgacaaggtactgcggccctctcatggacgataatcgacgcggggagggtggtgccgccggggagcgattcactgaaagaacatccccttgca

SEQ ID NO: 170196 - DNA, 859 bp, Zea Mays
ttgtcttcttgaatatcccgacagagtccaaggcactatttaacacagtagctgacagttacaaagacaccctcgcacttctatccattctcggttttaagtccatgatggcgatccgcgctgggagctgagcttcggcgagctagaccggccggatgatgccacgacaggagctcccgagcgacagggacacaattgaacctttaccgaacacttcccctccatcaatttcaccaagggggcattgaatcgatcagttcacggtgaccgggcggatgggcaaggggatgaacgtgttccgaccaaacgacgacgtggataaccaaattgaggctggggaaaggttcacggattcgccagaggttaggtacacacttggatttgggtgaaataggaatcaaagagtgggtcgacagaggggtagtcatggcggcgttttacagagcaagggtgcattccggtgatgggcttcggccgaccttcaattcgccgctttcgagagcaataagagatcaaagactaactaaaacagggagcaatttgataaatactaacccgaggagcgctggccacgggtgttgcttcacggcggagcaagaacagaggagagagggatttgtggtttcttcggtgaaattgagccgagtgctcgatcgcgaaggtgcgggatgtgataaagaagtagatcccgggcgcaatttataggccaactgccagaattggatgaggaccgtggactttagattgcgcaggcgagctcaccgcgcggcggaacccggtgatggcacggtggccgccgtttaaccggggcttgccacctcagtaactttctgccacgtcgccgagaaccctttaccgc

SEQ ID NO: 170197 - DNA, 1352 bp, Zea Mays
catgatcggacagcccagatcagatcgggctccatatgaaacggtgaacgctattgaccatgggatataaaatcaagcgctcagattgtccaactgaatcggtcagctaatatctaatctcggccgcacatctagtatcctaggattcagattgcgtcgagcttttcccttaacccgatccattcacccagtatcctacggccagacatctttcttccccaccgcgacgactggacacggcgccgttctgccccacagcgtagcacgccagtgatcaccccgcctataccccgatgcgtgattctcggctttgatagatcctactcgaagcggatgaattggtgaacctgggggtgcaatccataccagatatagtggcggtagtgaagctccccacgacgacgagcggacgaagtggctgcggcggcttcacgacgatgaggaggggcggcgaggaatctggacgaccccgcgacaccgcgcagagccccggccccaaatcgaggccacgcagttcgtatcccttggaacacggttggctcccagagcgcggggcatcaatggcggcttcactcagcacgcgatgaggttttgcacgacgaccactacggtgcttggttatggctcgatgagatgggccctagcgtcacctaaatacaccgcgaagaagtccggatacgagcggaattggtgagcttctcctacaatctcgccatggcggctcgatgagatttggttctccctccctcctcggtacaggcggcgcacagattggggcaacgaggcgattgtgctggcgcgcccgatctatatgattcggagaggggatggataagcacggtggaaggggttgaaacggtttgcccgaggaatccggccctgcaattcggtcaacggagagtggaagcggtggatccaaaaattggggggagaagaagcttctgacgtgcgggtcccacccgcagagacatgagagcacgacgggtcacagcgtacactgaaaagtgggaccgtcccgtcattgagggaaggctggagccgcgcggtggagaagtttttgggccgcgcaggagatttctctgggtgggccgaatttgtggtctcggcccaaacagcgctttcaccttttttttctttttattttctattctcttctctaattttttttcaaatttaaatctcaaatttgaattcctcttaagtgcaaattcaagttcatgttaactatgcaatttattctcaccatcatgtggtaaagttattcacttttaatattattttatattgaataatatttctttctttacatttttatttccaaattccaagatttgaattaggtttcaatcctt

SEQ ID NO: 170198 - DNA, 886 bp, Zea Mays
aaaccatcaatgatagtctaatgcaagcaatggaatgaatacatatttctacaagcattaagaaataaagtcatagctacctgaacccaacaggcaacaacagactatttgataaggaatcttcaatgatcaaacaaaatgtctctgccatagcggtgtgtgcacgaggccaacaacagctggcttgtttaaggaaaagatattgtctacttcattaggtttatggattcagatttgttactgaatgacgatttgcttttcagtagacaacatttaagtgggaaatgtaaatgatgttgttagtatagggagaatgaggtgactgctagttttggcgacgtttctcatcctcaaatggcttattatcacacaagcatgctattcctttccattctcaaattgaaaagggtgggagggacagagaaagaattcctagaataagattctccaatacgcagctggtagtaatccaaagacttttccccatagatgtcgcagacgaatggaacaaaccctaaaaccacgaagctgagcaaaggttgaagaaaataatcgttgacaggctaatgcaagcaatggaaagcatttttattgcagttaactaaataggacaagcattagagtaataaagtataagagtggacggtcttgtacatataaatacaaagaaactactatgtaaggaaataaacataaatctaaaaaaagattgagatacttgccttagagcttttttcggatttctccgcataaataacagaacaataaaatgtacatgtgacagagaggctagggaatattagtttttagtcaattgcagttaactaaataggataaacattagagtaataaaatgtttatgtgatgagagaaaaaggtagaatgc

SEQ ID NO: 170199 - DNA, 579 bp, Zea Mays
aaaaaactaaactcagaatccagagtggcgcatcctctccctcggttgttcgaccacaaatcattggcgacagcgcctcctcctctcccttgactgttcttgctctgctacctgtagaggcacatggcgatagagttgtggcagcagtcgaggcacttgccaacggggaaggtaaaggcagtgccacatggtggcggctagcgagttaaagggctgtaggatggtctactcgatgttctctacgatggtatggaaatatctaggtcagggaggtggagatggtggaaagatatgagaggttgggggttaatctaaaatgccaattgcgcatgcaagagataagggttattttatctagttattagccaagacgtgggggagaaaaatagatctacatgctacgtatgtgacgcacgacacacgaaactcatgctttagaggagtagataaattaacgaaaaagatttttacagagaaatagagaagggggaagtgtcggggtggggggaagaggtggactgctatatgccctaggtatcaagcaagcgggtatcgagtccctaaagcgttcatgtgctc

SEQ ID NO: 170200 - DNA, 613 bp, Zea Mays
ccaacccaggttcggtgttacatgatcacgctagatcagaaaagggtacctcaaaacccttcctacgaagtagtcggtttggcccaccgacactctatgccttcactatactcggaatccaaacatggagctcactttaccctaaaccctaaacaccattgactcagggggggctgttgtccgccctattggccagtcatctcaacaacctttgtctgcttggaaggctgggctattgctcgcctctttggctcctacatcgactcaggggatagactgttgtccgccttgctgactcatcgcctcgacacctcgggggcaggactgttgtccaccttgccgactcatcgctttgccagctcgaagactaggccatcgcctgcatcgctgactcgctgcttcaccggcttgggcgtggcaccgccgtgctccccgctgacttgttgcttcgctggctcaggggctactgccgcctcgtcgagtcactacttcgatagctcaagggctgggtcgttgcctgcctcttcgagtcactgcttcactggctcggggctggtgaaagggaaatagggttaaccttttcctacaattaattttggtggttgaatgtcta

SEQ ID NO: 170201 - DNA, 583 bp, Zea Mays
aatgactacctttggtgaaggcccaagtgcagaggtcttcgcaaagcattactgcttgcattggcaaaagaggtattctagtgttggtattgatcagtttggaagttgcaccttcaccccgaagaccaggaagacaaaagagaaggttgtcgaactagcccgctgcgtaacaaataaagtgggggggatggacggagaattggttttatgtgcgatgccctgaatgcgaagggtggccgcgggagagtgcactaagcccatttcagttagaagctttccttcatttctcgatcgaggagaggaaccactatgaccgggccatcggacgtgtcgttgttacctacagcagccaggatctggtcgaggaatacctgtagtgtgggatctggccgcttacccgaggttggatcgtgggtcctgttgtttactttttttattgttgtgaaccataaaacaaggcaacacaattgttaaacgttaaaagaccttcgtccttcgaagcattattccctctcgggtataatgaatcttagacgaaggttacgaagagcaagtcttcatcatccataaatatgaaaaattt

SEQ ID NO: 170202 - DNA, 772 bp, Zea Mays
gcgaaatgatgattggctgaaatgtattgaggctactagcgacgagttacttggggcatatactagagccaaagatgatgctttatcctcagccttcgggggtcggggcaagaaaagattgaacatggtttttgatgcaattggcttcatataccctgattactgctaccccttgcgaaggcaagaaaaaagagaaaaactgccgcttcggccaccactgctgtgctgaagggcaagaaaataaaagttttgacccaccggccatgatatattgaaacgaccatagtgcctgaatttggtgaagggacctcctccgctgccgaagcgaaacaagctgctcccgtcgcacggagcgctgagggatcgattgtagtgccgaaggtgcctatagtcgggtcagccgaagccaaagatgatgcggccagagagccagagttggaaaaaacagtgatgctaccaaaaattctaagtcctccggcagaggcagatctgccgaaggtgacaagagctccggccacaactcccaagaggagaagaatggctagcaagctagacgccgttgtggaaacaacaagagcactaactcctactcctgtgaagaaggttgccgaagctgctacatcacatacgaaaaccgaagctgggccctcagtgcccactgaaacgaagctcaccacaactgagcagagggtcgaagaagaatctccagatactggcgtagctctagagaaaagtatggccaaagaagccaaatcccctgctcccgaagcac

SEQ ID NO: 170203 - DNA, 300 bp, Zea Mays
ggttgataatccattgtaagcatttgggaagctcattttttatagaggttagatcgaagacagtggaacaggtagggaaatggattggtgtcctaggaaggggatcaaatgcaaagagttggaagataaatgcttcctattcacctttcatgaggcgacaaggaagagaaagactctaaaagatgggccatggatgatttctaaggaagtactagtggtagcagattttgatgggtccaaaaccttggatgaaattgatttctccttcatttcgatctagaccatgtggcgtggcttgtg

SEQ ID NO: 170204 - DNA, 504 bp, Zea Mays
ggggcgagcttcttcagcttcttgtcgtaatccatcttcagagtgcggtaggcatcatgggtgttggtttcctcgccttctgctatctcgaggctctcttgaagggatgtattttcccttgtaagttccctgacttgttgctccatgctttccacccgggagtttaggtgagtacagtgggaggcaaggtcatcatattggttatcgagagtgtggaggtatccagccatgtagacgatggtggggtcatcctcggtagggtctctccctgacagggcctgaagtcttttcctctaggcgcgggtatttttgttgctgggtggaaagtagcgaagggggtttcaaagattactctactgtagttctggcatagttggcggagggcttttcgggcaacattttggcaagtatctggaaagcggtatctggtgaaagtgacttggaaagaaggatagttcggatagttccggctttctcccaggtagactgccatagagcacttct

SEQ ID NO: 170205 - DNA, 898 bp, Zea Mays
cgctgattgttgtcccaagaaaacactaaacaataacttgggttcggatatatataacactgcacaataatttaggttcacgtatgcccgaatatgagaaaaccaacaaaatagacaagattttgctggtgagaaaaaaaaaatataatcaatcacacagctaccaaatatcaaacagataaatataagataaacacgcatacataccacggaccgcacaaccagtgagaaaaccacctatttgctatcagtatatacccaatttgcattctttacgggtgccactcgtttgactgatgggtatttcagctatgtgtagtttggaatagttcgtgttcgggtaccaggtgtcgtgccggaccctagaaaaggctatggtgccatccatccatccatcagcgtctaccgtcgccgttgcttttgagcaacgcactgaatggatcccaaggctcgatagccatgcctactacgagtccgaggtagctaggaatcctaccaggataccgacatcggaacaactcaaaagcgctcctgctttcagagacaggcgtggattctgcagccaactcattgcctacgcaagaattcaacccccaactgtcctagtatgagactcttctccagccacatgttcctttcagttttatattgggcggaatttgatgctgcaaaagaatccacggtactcttgatggacttcacaacacaaaatataacatcctatctccataaaaagggggggaagaaaaacaacataacatgcaagctacttgcatatacaagtaataataaaaacaacataacatgcacgctacttgtgccgttgccatgccatgacatgccatgtagcagcagtcataacatgtagctcggttcagaaccctatatatcatcaggc

SEQ ID NO: 170206 - DNA, 1092 bp, Zea Mays
acctaacagttataaattcttgcccactaacatatccattggtagagaaattattctatacccactttgacatcgtgtaaaattcgtcggatttttggtttcgggtactcattgcctctaggttccaccctatagtacacgttaaagagggtggagggaggtgtgtggggtgttgttggagaaggcctcaatatacgagcatctccgcccgatctctgatagtgcaactcctatacgttattttaggcgagtagcttaaaatcaatttaggacataaaaagtttaaggggttttcactttggatgcaaatactctatccggtctttaaatacttaacttttaaggatttttgactttggatgcaaatacttgatgttaaagtatttgaaactcattttggactagtatatccgtgatctaggtggtccgcatattctctcacgcaagactaattattcatagacgcttggttttctccaccgcatgcttgcatgcacaagcgatcccaagacctgtcgtaatgaagaccagcgttgcaaccatatatgctactatcttcttagacatttacatccctattaaatgagacgtctcttgacaagtctctaagctgttaagtgaaaaaaatctcttccttcacgactttctatacttattgtctattaactgtattatgatcagagtcttaaggttgcatcatacagtctcttagctatctcttgtatttacaaaaccgtttagagtctctaggttgtatatgcccttatatttggtatgaaacctgaatgtatttattaggacatgacagagaaaatttatttaatagcttcttggtatatgagatcatttctaaaacatcaagtatttgaagattggagggagtatcccatggagatgttgtaagcatttccattggtggcagtggcactagtctatatgagaaaaaaatattgcacccgctaaaataccatgttgtgatgttttaaaaattaccacagaatcatgtaatgcgagacacctgaagttaagagcagtcgcaacaattcagtttgaaatctgtgtgatgctgagattcataatgtcattttcagc

SEQ ID NO: 170207 - DNA, 850 bp, Zea Mays
ctcatgtcctgcacggttattggaacgttttctggaccaccatgcatttctgaaacaaaatccataatgcaatgttgtggaatcctgctttcttgcatcgcactaaggaactccatataatcacgatcatgagttttgttgcattgcaattgccctttttctgtatctttcttcaagaattcatgattatgctcatagtttaccagatcaattctgacggaaataacattctctttagcatcatcgtatatttttttaagtttcatcccagccttgcactgtgttcgttttgaacatgtgttgcgtatccttgcatttccagctaccctttcagcattctttccttccattgaacaattcaaccatttacaattctttcgctccctatatttcttcaacgaaaatccaacctcgtatgcatattgactataaaaattatacgcctcgtccacgttactaaatgccataccgactttaggtatcaatcttatatcaatattgtccggctgcgcacagaaatttaacatttacgattcaatagcgactaaatctgacgtaatataggtacaacattacaaaaagtatgtatgaaactaatagtatcataattgagagaacttacatggctttgaagaatatggggtgtgtcctgttcatgcgccccaatatgtctcatagggatgtgcttatctgcgcctaccatgtctatcgattttgtgtgctcatcaatatgtccaggtgccctcaatgccgcggggggagtaacagatacaccctctatgtaaccggtgatcgtagacgctacaggatacatgtccattgaagtagacgtacctgttgatatatgcac

SEQ ID NO: 170208 - DNA, 464 bp, Zea Mays
gttgtacccgtagctgggccaacattcccctctgtcggcccattcctctcctatttccctcttcggcggggcccacttccccttagcccgcatgtcgccctccctcaatccaaaatctatgtgctcgctagctgcttcctaagcacctaagacaatggcgtgtgggtccatgccgtcagatgtctcccccaccaaataccggatctcaacagaaagcagaacagggcggatgcgatccgtagaaatcgtaacaaacctaggcattgaactgacccggattctctatgctcggtgtataaaggcggatacctgacccctgaatcatagccatcgtaagctgcatcaggaagagatagccgaggggatcatcgccgtgggaaggttcgccgttgctggtaactcttgcctgcaccgccattaatggatcaatgggagatcgagcaggatcgccagcacacagggat

SEQ ID NO: 170209 - DNA, 830 bp, Zea Mays
tactgaccgactgcaaagaatgattccgacgagctagttcagaagtgtgaggcgtgccagttcctgtcaaagcaacatcatctaccagcacagctgctgcaaactattcttgtgaccttgatgtttgcatgctgggggttggacatgatcgggcccttcaagaaagctcaaggagtttatactcacatactggttgccatcgacaaatttacgaagcggatagagtacaagcctatcgcttccttgacctcagcaaaggcattggagttcattcagaagataatgttcaggtttggaatacctaacatcatcatcactgacctagggtctaacttttccagctcggagttcttcgatttctgcgagccaaggagcatctagatcaagtacgcatcagtggaacacccaagagataatgggcaggtgaaaagagccaacgggatgatacttgatgcactcagaaagaaggtattcgataaaagcgagaagctcgcagggaagtggatcagggaactaccatatgtggtccggagcctgtgaacccagccaagccaagctctgcatggaaacaccccattcttcatggtgtatgggtcggaggcagtgctacctgccgatctgatctttggggcgcccaggttaacctttgaaagcatagccgaagcagaagcaaccaggctagaggacatcgatgtgctggaggaggaacaactaaatgttgtaattcagtcggctagatactagcagaccttgaggcgctaccacaacaaagttgtgcatcatcgatccttcgcagtgggagacttggtcctctgtcgagtactaatggg

SEQ ID NO: 170210 - DNA, 559 bp, Zea Mays
cgatgccgagatcggggtggtcggcgacgggcgtcgtagaagcggaaggggtcgaggaagatgcgatcccgacaagcgaggacacgggccaccggcaaggtggcacggccgccgtcgaggcgaggcgggcgtgaccgccggcgaggagacgtgggcgcggccgctggcgaggagacttgagagcggtcaccggcgagatgaggcaatgcgggcgactcaggcacggtcgatggtgaggtgaggcaatgcaggcagggccggcggcaaggcgtggcgggcgcagcctccgagcagtagcggcgtcgacagcgggtgagagagagaggtgagagaagagaaacacgtgtggtttaggaaatggaaacgacgctgtcgggcgtggttctttaaatttgttatttttgacagtctatctaccagtcgtcggagataagagttacgtctgatggctagcataaaagccgtcagacataactttatctccgatagtctatctgctaactgtcgaagataaagttatttccgacccgacggctacgcaggaccgtcagatataact

SEQ ID NO: 170211 - DNA, 856 bp, Zea Mays
aggtcctcgggccactattcacttgagtctctaacaatgcagaaaaccccctagggttaacctaaatctaacccgcggtcctaaccttattggaacagtaaccgcggcggagaaatgggcggcgaggcttaccggcggcgatctagctccggtgaggtgtccagggaggccggggaggttacggcggtcacgttgaggtgcgggtcggcgtcggagatggccggagtcggtcggtcctcgtgtgcaggcgggggagcttggaggcggcgagtgttccggtctgctcaaggcgggatagttcaattgcttggctcggggagctttaccaagtgacgcagaggcggtatgcgcgaggaattgagaaatggtgcagcggcttacccagtccacgctatccggtgagcggaagaagtccgacgatggtgattcggtgtttccggtgaggtttcgtttggtctgagggcttggggagcttcatgggtctccggtgaagataactgaaccactggcatgggctagggacggctggggtgagctggccgcgatggccgaagctcgagcggctcagccggcagaggagctctcgattcacggccaatgctccggtgattgagcgcaatgagtgtgcgaagctgaggcaaggttgtgcaggggctactagcctttataggcgcgggcgcgaggagggcgcgtggtggtcttgatcgtgcgcaggggcgagcgagcgcgggggttgggcgaacgctggcgtgccgacctagggtcgaacacgtgtgtgcgtttcttctgcccgagttctggcgcgtgtagtcactcatccaagcctgctcttgtctcagccagtgcacaaaacctc

SEQ ID NO: 170212 - DNA, 931 bp, Zea Mays
attctcgtcatgtgtcccttcaatagtgttagagaaaagatctctatttccgtagggcccactagtcagtagaaggacgagggaaaggtttgacccaaaaggacccgccctcgaataagtccttaggcaccaagcccggggtcggacgagacggtgctaaaaggagggtcggacagatcgggaggaagccactcgagtggattccacgcctaacctaggactaacccgtcgtaagtgaccgaccgcattaactgcacttattagcatcgagccacagagggagagtcgatcaaccttccactcatgacctacaagcccctaggcccgtggcccactcgtgacctatcgtgtctagacctgagtacactgtccacctacaggacccgcaacgtgacggaccacactaagacctaggctacggaggccaggggtcgacgtggcatagagatggtaatgtgatgtcggagctcttcgtcgcccacacagccagtcataaagagtgtgacgagggaagcccagacgaccgaggcgcatgcgaacaaacacgacggtagaacaccctgttttaccacatcgtcgtagctccttgcttgagaagctaccgatagtcgcccccgccttggcctataaaaggggagatccactaactcatgggaggacaaagacacatgcaaacggacggacgaccacaactgaagacccgaaggaccacggtggtcggagccaaggagcgagccaccacgatgcccaaggcttagcagagggcaccaaacccatagtccttatgtccatccacacataagagacttgaaagctcctccctctctcgcccgcttgtaacccctactatgagcattgagcaacaaggtgcctatagagcgagccaccaaagattggatgtagggacattctgttcgaaccagtataaatc

SEQ ID NO: 170213 - DNA, 685 bp, Zea Mays
caaagcgttcccggtgatcctccatgttctagctcaattggttgggtcgagaagcatcacaagcacacagggatgctaaaacaagagcgaggagggcgtgaccggacctgtgaagggctgaccgcggtgagctcacacacgcggtgttcttgaccgatttggaggaaatctcaaattggggcgttctggtggacgatccgaggcatgggctggtgtattgggtgtctgaatacctagcggagccaatggcacgctcaatttataggacccgagggcggtggcgcctgaatttggaatcacgcgctggcgactggagagagggcagagcactagtggcttaatcatggcattcaccggtgcaacggctcaacgattgtaattctaagtgtgccacggttactaccacacagtagcgagccacgacatggcataaccgaggtcaccggaatttccacggcaacaccggcggtccggccacgtcgcacggctacaggcgcggtgataagcttccgccgcgaccaaatccgctcccccgcgagatcattttacctccccgtggatatccactgcgtgccaagcatgaatcacgacgaccggcgcgaatccgagcgcaagatcaccggcagtgagggggctgaacctgagatatttctgcagacactgtaccatcatggctgtttcagtt

SEQ ID NO: 170214 - DNA, 634 bp, Zea Mays
tatctgttactgacttgtgtgccacatatatatatatatttagtcagccttcccagagccccagctttctctcgagcagaacaagtactcctttgcaatcacacccacgctcgttggacagtcacaccggtcaccgtttgccatctgcagtgctggtaagaaccttgtaagagcgtggtaagacgcttcataatttgtattccaccaccaccctgagagatagttgtagggttcacattgtttgttgcctttttgtctctgttttgtgctaacaatgacaggaccaaagaatcaaatggacaaggacaaggggcctaagcttaacgacgatgagtgtgtctctcagatagaattgaaggagatgatgcacgcgatgactgaagcttttaaaaaatatcaggactctgcggcgacatcctatgagcagcttgatcgacgagttgctgaacttgttacatgcatggacatactggaggctcatccccccccaccaactccagccccagctcactctcttgtggacgacgacgacaacgatgacgatgatgtttatgcaccgctgcgacaacgcctcgcacgtaatcgacaaggtatgggaggtaatggtagacgtcgtcatcataatcctaaacga

SEQ ID NO: 170215 - DNA, 593 bp, Zea Mays
gcccgctgccctggggacttcatcgtggcgccgtggaagatctgaagacccacatcctcacccccatatccctgtgtttccgtgagtagcccgccacaatggaactcgccgccatcagcgtctgtgtggatgaattaccgctgtgcatgtccaggttgccaccaccgtcgacccgcgtcatcatcaccgttgtggcttcggacctgggcgctgtgcggaggcacactgatggtgcacatggaattttcgggcgtgattaggggcaaacggtgctgcaattcctcgccgtgtgtacgacgccaccgcgattccgccctcctccgtgggcagcagccaccacacatccaacaccggtgagacaccctatctctgttcacttgagcgtccgcgtcccgcatgtatctcttaggtatgctctggtactcagggtctggggctatcgttctccggtgggcggctccgccgtggtggcgagcgcgccgccgcctggctcggccgggcaaggggggagtgcgatgtagtgacggttgatttggcgatggacggccaggattacagcgtgccttgtctccttcgtcgaacagtcgtgtccg

SEQ ID NO: 170216 - DNA, 964 bp, Zea Mays
cgcttcctccccctcgcgtggatgtcgtttcactgtcgcgctggccccactggccagccacccctccctcgcgctcgcgtctttcgctgatggacctggcccgcaggtcagctatttgggcgccatcgcacgctcgctatcaccagccgcaagacccgctcgcctccatctcggccacctcacgcgcatggcggggcgccgcaacggcaaaaatcgctgaatccggccccggccgttgaagcgccgaccacgtacgcgcccatatagtgccacgacccccaggcacgcctagttctctccttattcttgccctcgcgagtcgcgaccgccactaaccccactgcaaaccaccgccgtgtccgcccgggaagaagccgtcgtcggtgaatctcatcacggcgcgttgtttgtcctcagcgttgggccgggaagattgccttcgtctgggaaagccgtctgtgccctcaattcgagtcgaaccccaccggaacgcgtgtaattgctcgccggacttcggtttccgccgtgcgccgtggggagctgggttcgcctctttgaatcgtggtgagtagcatcctacacaatgccctacggttatcgctttgtactgctgcgatcagagtagagtttaggggcggcaatcgcccatgacgcatgctccggcaacggcgccgtcatccctggtctgtgcgccgccggagtttgagcagtgtctagggcggggtggattgaccgtcggatcagttctgtacggcttagattagaaattgcaataccccttcgtcgcgtttgagctgtatcgttgatcgcggatcgggtggctgtaagcaagtattggtttataatagcactggtcagatcctggacgtggatccccgatccaacggtggtatgggaagcgggagcgggacctcggccgatctaatctgggcgcctcgtttcagatcggacggatgtaatcggc

SEQ ID NO: 170217 - DNA, 406 bp, Zea Mays
tgtttgaagtcatgagtacctcattgtttgtaatgccccaagaagcagaaggaaaaagaagccgattgaatagaatcagaaaaaagcatctaattgatagctcatcatcgttgccaagcactatcttgtcttgaagcttgacaacatcaaatttttctttaccaacattgagatcacgtctcagttttgcagcagcatccacttcaccataccaatcagtaaactccctgcctcctccagcacatggcaaacccaaaatcagatgaaccgtatcttttgttatcttcagttccttgccagcccctgggcgtatggtcatgtcatgtggatccaatttatccatcaaccacctgatgagtgatctgctctctaaggcatcagttcgcaaatcaaatatgctagcaaa

SEQ ID NO: 170218 - DNA, 670 bp, Zea Mays
gattaggtccttggaggttggctcgtcgacgtcaggagtggctgtggggcttgctcgtggagatccgtgctttagctcttgcgacatcattgcttcggatccgtacgtcaagtggaagggtgtgaacccggttgctccagattctattgtgttcagcgcccatagtacttcaggaaattggtccgcccatttgcctttcttgtcgtcgagtagccttttcttaattgcactgaaaatcttgtcgttggtgcattcaactactctgttggattgcaaatggtagacagaggcgaacactgccttcgtgccaatagagttgcagaattcccggaagtcttggttgtcgaactgtttgccgttatcgactgttagctcggatgggactctgaaccgacatacgatgttctgctagaaaaaattttgcgttgtcttggaggttattgtggatacggctctggcctcgatccacttggtgaagtattcaatagtgacgaaggtgaatttgaggttgccttgggctgtgggcagtggtccgacgatgtctagtccccaccgctgaagtggctaggtatgtgcaatgagctttgtgagttgtgaaggggcgcctgttcgaggcgagaatttctggcaagcttcgcacgatcgggttacacagttgaccgtgcatacg

SEQ ID NO: 170219 - DNA, 1028 bp, Zea Mays
acacatttttattttacacattggttatgtacaagtctgagtcgatcatgcactaagaagtctgtagggggtctgcatctacggcccgcaacacttcccggtaaacaacgtttcgagtctgtgatccgcaggaaccatcaggatttccaatcaaaattctaaaaccacttctagatgtaacccttgaaacaacaacgtaaagctggacatgcgtaaacacaggtctgtcaaggtagaggccaaccattgagagggtctgaccctagctcttattaatcgtcatggcatagcatgtccgtattggaaattgtcttctttgcaatgtgaagggccatttgacgtcggtagtgttaagtgcaatcctcggtatgaaaacctcttcgccgactccggagggcgttagtactacgcatttaagaacatgatgcctgatctcagttacaagcatccttgttccgttacaaagccccgcagtctggttcaagttacgtagcagcatgactgtgacgcctctttttagcacgagtttgtggcaagggaaatttgctgcattaatagagtttaggattcagtaggatatagcatgtcaaaatcaggtatgcattcagacgcctttgagatcgtgtcgcaactaaggcattggacaccatgtccagggagcattgagacaatgtagtcatttattttatcagttgtaaggttattaggacataaaatggcgcgtgtagctaagtatgtagggtccatatatctctctaacagatctgggtagacctcggatatgagggccgcagcagcatcaccatccgtgtgtatcaacaaatcttcaggaatcgtaacccatgtaggttcggactcgtctcctcttgtcatggctcgcagagcaccatcactgatatctaagactcatttgctaaattgttccaagtctgcatgttccttcccatgtaaagataggttggagagcctcatatttgtttggagtttcaaaacagttgcatgttgccacaacggtgagctggtaattg

SEQ ID NO: 170220 - DNA, 589 bp, Zea Mays
aaatagggaattcatgaaatatagagcatctcacgaagttttacccttagcaagatttcaaaagctatcggggcagcattgtattctgtaattggaaaatacatcatcaataaaaagatttcattctcaagggcactcgaactatttattatcaatcagcacgcttactcggcgtagggtgaccactataccctactaacggagcaatcggcttaagtcggcagtgacttaagacggtgcaacatgctcacgcttactcgacttagggtgaccactataccctactaacggagcaatcggcttaagtcggcagtgacctaagacggtgcaacatgctcacgcttactcgacttagggtgaccactataccctactaacggagcaatcggcttaagtcggcagtgacttaagacggtgcaacatgctcacgcttactcgacttagggtgaccactataccctaccaacggagcaatcggcttaagtcggcagtgacgtaagacggtgcaacatgctcacgcttactcgacttagggtgaccactataccctgctaacggagcaattagcttaagtcggcaatgacttaag

SEQ ID NO: 170221 - DNA, 433 bp, Zea Mays
gttgatctggtccgctcatcccgaaagggtaacctaggatctaatcaggaccgtccctaaaacaatcaacggcccatgtctgttcttccctacccacgcggccggtaggcgacagaactcgccatcacagcggagctcgccggcgagctccccaatctcggcacaaacgtggccctacacatcgcggaatgggtgctatcccaaatcaagggtatggcggagacaggggaggggtcattaccgtgagcggtgtcgcgacggcggctaaccacgagcgacggcggaacacgttggtacggcaagaaattggcggcgatcttggtggttcgccttctcgtgaaggcttcgggcacccttcctacaacgcgacgaagcttacaggctcgccagcaaggcctcaacggtggcaacggcgagcctcagcggtagcggc

SEQ ID NO: 170222 - DNA, 549 bp, Zea Mays
tggacccaagcataggatgttccacggcgagaaattctccaccaccaggttggccatcgaccccagcgctgcatcgaacacgtcccagggtaaccgacaaagctcccagacccgctgtcgagtctctaccgacggtgtacccgtgatttgttcacggcggatctcatttccccaacggtggcgaaccaacagccctggcagagccgtcaaaccgagttaagttgaatgggggcacgacgctctgcatttatagcacaagggggagggagtccgcgcacgctgaggccgacattcccgacgagtttggcggtgttcagctacgaggcgcgcggtccgttacgaagaagacactgctgacatcccgggtccacgacacaacgaggcttacaagtgggacccgcccatcggtgtgagagacggaagcacactatggcgcgcgaccgaggggctgagcagtggccccactgcccagggagagcgaccaagcacgagctgggattcctgggccgtgcaagggatccaaccaatgggcctcaagtacaactcgac

SEQ ID NO: 170223 - DNA, 440 bp, Zea Mays
tggctggatacctccacactctcgataaccaatatgatgaccttgcctcccactgcactcacctaaactcccgagtggaaagcctggagcaacaagtcagggaacttacaagggaaaaggcgtcccttcaagagagcctcgagatagcggaaggcgaggaaaccaacacccgtgaggcctaccgaactctgaagatggattacgacaaaaagctaaagaagctcacccccgtaagaaaaatctgcaagaagaccagaagccaaggatgccagactgagcagaaggaagaagcccctccagccctacctcctaccaggatagggaactcgtccgacaccgaggaaatatccctagctagccttgatgaccttctcaaggaatttggggacactttagaggagtttggaagtaccctagatagcactcgcgtgtaatgaact

SEQ ID NO: 170224 - DNA, 622 bp, Zea Mays
tggtggtatcttctatctttaatttataactaggtatgtgctcgtgcgttgccacgaggcgggggagcgtgaggagcgcgtctagactacaaatataaattttgtttatttataaacactatggtatatgtggtcttgtgttagccccaaatttctagagcagaggggtgtgggttcaagtgctcattctgcactagtttttgtgggcgctgggcgtggggaaggtgaagacctggtagcaccaggtgcctacgtacattagattcttaatagatagtagatatatgttcttgtgcttttggtaacatgtcgttcttttctctaaaataaatattaatggttttcaacttatcctggcttatttgtatatgttggttagtggtcaactgtactatgctgctacgatcttttaggtaccgatgtgttgttgggttcctatatggcttatgaagttatccagttcaagcatgcttgggtattatcgaagcccatttgtgttaggacttattacgatgatctccagtataggggttcatggcctcaaaacactatcaatctaactttcatggtggaaataattgccaaacttgtctgggcaactagggatcattacttcttagac

SEQ ID NO: 170225 - DNA, 463 bp, Zea Mays
cgaatagaattactgcaagttggttaagaactaaaaaggtatcagtcatgacgagtgctccttctggaaggtcagctaacgtggtgaagtccagcctaccttgccttacttgtactttttgtttcttgcccttatttagacgagaattttgtcccttcctctgttggttccgagcagtcctttgcatagtggccagtgttgccacaagtgaagcatcggttcctattgtgctggcgattcggctgctgaggattctgattgtagttccttggatttggggcttaagggcgattgggtgcttgctgttgaggtggcctgatcacccaacgtccttgttgctgttgagggcctctgctctaattattggagacaatctagaagcactaatgctaagcggagggtcctgccataggtgctttcctcttcttctctgtcctgtgagccaaagtaaaatcttcttgag

SEQ ID NO: 170226 - DNA, 1948 bp, Zea Mays
tgccgcggctagcttgggtcgttgctccaaaccagtggtaagcacgtatattctcttcaaaaccttcccatcttcgcgtaggaccgtccagggagggaatggaatctgaccggtagacgcaatttctcattggaggaattcccgccgccgtgtggatacaccctgtcacgacccggcgacgaacaccggctcggacgagaaggaagaggagaatagaaggaatcagaagataagagttcgaggaagagcaggtatgtattctattattccataattccttctggaatacacaggctggctttatatatcagctgccgaccaacacagtacaggcccaaaagaattcaacaacctggcccactggcccagacttcactgcacaccacaacaacaattatcgctccgtctctacagggcctccggtgatacctgtcaacctccggcgatctgggttgtgacaataccaccctctgaagtaccatctggcccctagatggttgtgctgggaaaacgagcacgaactacagtataatcttcccatgaagacatctctgttggcaccccttgccacttgatcaacacttgggtgacagcagcggccccttttctgaccaacctgcggtctaaaatgctttctggtactggtgatacttcttcagaggatgatggaggtggaatgtcagcaaataccggcacattatttggaacatggggtttaagctgcgagacatggaacactgggtgaatcactgccgacggaggaagttgcagtcggtaagcagctgtgccaatcttctccagaatctgaaaagggccaaaatacttgaaagagagcttagcacaaggcctgtgatggacagacgactgtgcaaacggttggagttttagaaatgccatgtcacccacttggaattgtcttggtgttctattggtgtcagcataatgtttcatcctgttctgagctgaggctaggttagccttgatcacttctaaaaaatcatggcgttgttgcaatgtcagttgaacctcagaaacagtggccattttagaatcaggtagcactccccagttaggctcaaccccatacaaagctttgaatggagagcattttagtgacgaattgtaacatgaattgtaccacaattcagcagagtctagccacttagaccactaagaaggtgtctgatgcactgcacaccttaaaaacatttccaagcattggttaattctctcagtttgtccatctgattgtggatgataagctgagctcaagtgaagcttagttccagcaagtctaaacaactcttgccacaaagtgctagtgaaaattttgtccctgtctgaaacaattgacctaggcagcccatgcagttttacaatatgggtgaaaaacaattgggcaatctgtgatgctgtgaaaggatgcttgacagggatgaagtgggcatatttagtgagcctgtctaccaccaccaaaatggcagtatacccacctgatttcggtaatccctccacaaaatccatagatagatcttgccacgagtgttgaggaatgggcagaggctgtaatagccctgggtacttacaatgttcatgttttgcctattggcaaatttgacattgtttgacaaacagctccacatcagtctttgtcctggccagtagaacaatttcttaagcctttgataagttgcaaacacagcagagtgacctcccatcgctgaagaatggaaagctgctatgagcttagtgtgaaggcctacattttgtccaacaacaagctgttgttgtctatatatcagtccattgttcaaagagaagccctgagcattaggactttggacagcaagttccttcagcaaatcttgtgcatgaggatccatctcataagacttcagaacttcttgaatccaaactggtgtggacacagatatagcagtcaactgaa

SEQ ID NO: 170227 - DNA, 487 bp, Zea Mays
ttggagctccgccgtgctctttgccacggtaagctccgccccgacatccgcaacccaggacaccctccaatttcccctccccctctctatttccctatgcccgcgctcacccgcggccctccgtgccgccgcaggggtccgccaccgtcgacccgggtcgtcgtcgcgccattgccgccaccgaggagtccccggagttcgccttgaggtaaggaacctcccctgccctctcccttcctttctatggctctctgctgcacttaattcctcgccggagtcgattaacgccgccgccgagccgcttcgccgtgaaccgcccccctctggtgccccggtcccgacctagccccgcctgaggattccccgcactttccccaacctcccaggccactccggtcgccctaaggacccgcagagcccccacgccctcgtctccggcgagcttctccgccgcgggtgcgaccgccgccgtctctgctggctggag

SEQ ID NO: 170228 - DNA, 766 bp, Zea Mays
atccgtctgagcgtgaaaagtgacactaagtgagagcttggtacccaatgcactgtgaagactcccagaatttggatacgaatttagagtctcgatcagaaacaatggacttgggcaccacgtgaagcctgattacttccttcatatacaagggaaccagctctaaagatgaattggtggtcttcatgggaataaagtgcgtagacttgatcaagcgatccactaccacccatatagcatccctgcctcgaggagaacgaggtaagcccaccacaaaatccatggtgatatgctcccacttccactccggaatttccaatggcttcagtaaacctacaggcctcttatgctcggccttcacgcgctgacatacttcacaggcggccacatacttagaaacgtcaaccttcatccgcttccaccagaagttttgcttcaaatctctatacattttggtttcgctagggtgaacggtgtaaggcgttttatgagcttctctcaagatatccatcttcacctctgatttctgaggcacacaaagatggcccctgaaacaaaccaaatcattctcattaatggtgaactcctagggtttaccatcgccaaccctctttcgagcttccagcaataaacgatcctgctgctgagccacacgcactctctccatgagggaggattgaataagcattcgagtctcctcactagcggtgccaacataacacaaagcgatccccaaatggtccagatcaaggcaaggccacttttg

SEQ ID NO: 170229 - DNA, 465 bp, Zea Mays
caccttgatccctaactcaaatcctaatgaccccattaacaaaaacgtgcctaactaacccctctgtcgcctgccagaagatggcattgggacgcgtgcctcggacacgtcaaaccagagatcttctccctgtgtgcggcagtgagacaaaccagatttcttccctctctatctcctaatccagtcaaccaaacctgctagcctccacacataaacgacaaagggacctgagaggaagagatctctcaatgggattatggccaaaatctcaaagatttggagccaatccgcgcttgaactcgacctctctctgcgctgcctcgtgctcgacgctgtgccaggcgccagagcgcgcactggcgttcgccgcgcacgccccgagcgcttgtcagagccccgccctcggccgtgctcgcccgcgcctataaagcctccccaggcgcgcctcactcctccccgcgctca

SEQ ID NO: 170230 - DNA, 441 bp, Zea Mays
cagagcggtcgtaggtaatggcatggttggaccagtcaaggaaggtcagggatgcttgccgagcctggagtacctcatgtcgttccgacttccgatgccttcttaacatgtagtagtcagacccatcgaagatcaacaaacacccgatttcatcagggaaagagacccccactttctcctgctcgccatcctgctgggactcgaaccctttctcgggtggtgtccccttgctcatgaacttcctaagcaacccacaatctttgtaggcacgtcggaccgggtagcggtggttcgaacacggggcctcgagcagtttctcgaaatggtcggtggcttcttcagtcggtggtctctttcgtttctggcccatcgtggctaccagcatttcgtcgcgcctccgcttgtccttctttcttttattgggccgacctctagatcccc

SEQ ID NO: 170231 - DNA, 546 bp, Zea Mays
cggcgatctcccctccccggcggcgatcctccggcgaccttgtgcacagccctgtccttctctcggtgagcagccccttttccccctcggttttcctccctccctgttctgttgagcagaggctcttcttcccacctcttgcgcaaatttcaaatccctgtgaattccagtgaaatcatgtggtgaaatgtgttcctctgtatgccttgaacatccttgtaggttctcagctccttagggagggtttcacatcctcaaataaccatttctccaaaaccctaaatcctcgcacaccacatgctcggtgaaatgcctaaaccagccaaaatgctccaattgaacccaaatttttcaggcactttcacaacacctccagtaacatattcgccaaatttcacgcccatccgatattccaggctttaatttcaccaaattccccgtttcgagcgatcgtttccgagccgagtgcccaaatctcattttcttcgcctaaattcaaaccaaacacacacttcactcatattcacctatataaacctattcatg

SEQ ID NO: 170232 - DNA, 496 bp, Zea Mays
tgaagttgtgcagctccaccccatagtagtgcagcagagcccgcataaagcggcttgctggaactccaaaaccctattcatggaacgaggtgaagctcactatgtagcccgcgagcggatctggcacctgttcgtcatgcgacgcgatccactcgggctacgggcaagtggaacaggggcagagcaagctagcttcaaccagtgcctccaaatcctcatcattgacggaggaaatgggccatgggtcgtgaggaggaagaacggtgatcttttccaccatcaaaacagaggaagaggacgagaagatgacgaaaggctcttttgcggaaggagaaaatggtgtatgaaagcaagaaggctggaacgacaaaggtaacggtccaaagtctttgtctcggtcagctttatataggacggacggagccaccaaggtgcgaattgtaaatggtcgaacgacggtcgttttgaatcccaaacacgccgagcgtcgttccgc

SEQ ID NO: 170233 - DNA, 857 bp, Zea Mays
gcgagggacacgaggatgaagttggtgcggatagcgaccagatgaggcgagcaccgggagtccgggatggggcgagaaccaccagcgatcggatggagcgggcaactgcgatggcgctgcctccggcgtgacagagaagatgaagacctagctgcgatggcgacgcgaaagaacgcatgcaacagtcatcgggcacaagtaacaacagagatcgcgacattaagaaacgatgtaagggtataaatatccattataataggtaattagtgcagtggggtattttagttaggaaaggggtttaagtggggtaattagacgagcgcaaagaataccggtgtattttggcgagcggctagggatgaaaccgggacggaaaaatcccgtaccgaccgacgtcgtataccgcgttaaccgatcgtatatcggattttcgggaaaaacaggaaacaggaaaaaatacgggaaatacggacggtaacaggaacggaatcaggaagagttgtttcccgaccggattaacggttcccgtattgtatccggaataatcctgtatgtgttcccgtttacacttggcccaaatgcgtgcttcagcttggcccaaatgcgtgcttggcccaaagccccaaatggccaaatgtaaccctagcttatgtgcgggatgtgcctgtgtgtgctgtgtggcgtggtgcgtgcgtgctaccgctagggatgaaaccgggacggaaaaatctcgtaccgaccggcgtcgtataccgcgttaaccgatcgtatatcggattttcgggaaaaacaggaaacaggaaaaaatacgggaaatacggacggtaacaggaacggaatcaggaagagttgtttcc

SEQ ID NO: 170234 - DNA, 599 bp, Zea Mays
acaacaggagccgatgtaactatcgctaaggcgtagcacccttgtggttgttgtagtcggatagtacaacatcgacctccaccccaaatcgtagttatcaggagacggtgtacctatcgctcaaggcgccacaccatcttggttgtggtagtcgggcagccaacgtcgttctccaacaagtttttcacctccatcatctctcatgaaaagatcgagcacccttctacccgttgggtttatcaagtggtatcaaatttcaggttgctcggtgagagaactcaatcttccttgttatttttacctacagtccacttttgcccaaagatatatttagatcagaaattcacctaaaaacagtttgagcctttgctttactacttagttttagacttgttgaattcacggttgctgcatttgggtcgagttgctggtataaagttttcttactgctagagtttcgagttcgcgccaccttgtttcaatcaccagtttagacctcttgctgcaattcaaccaaaaagaagagaaagcaaaaggcgagtgaataaaaaaagccgcactaatcagcaaaacaaaaaaagacacgtgcaaaaaaaaga

SEQ ID NO: 170235 - DNA, 952 bp, Zea Mays
tgagctctaactaagttagttaatgtcatgttagagacagtaggagtatctaaagaatggtgaggtgaggctattttgacaacatgttatttcctaaaagagttcttataatggaatgaaaaattacacccattctaaaaatgggagaagaaaatatttaatctctcctatttgcacacttgggattgtttggccaaggtgcatgtgctaaatcactagagatagctctcggtctcactttggatgaatcgatatcactaaaaatgagtgggagatattatcttaggctcactaaagtgtgtgtaaaggtgggaagataggatctctatcttaaggccaaacaagctctatttatatggtcctaagaggcaactagccattgatccattcactgtgcagaaatctagatcatcttgtcatttgacgctcactgtcggactattggccgccgatttgatgactctagagctctccatatgtactagtcgtttgaatgttaccatttccacccagtagttatggagatgtttggttcaacaaccgttatatcaataccgaacaggacccaacaccctacagaagtggccaaagagctcgcaatggtgttagactggttcgacggtgctttttggaccaacactcatggtccaacgaccgtatatgagtttctcatgtgcctgatagtaggacttctctagtgaatagtgacgccatcctgtatgatgtgatttaagttgataatgttagaccaaggagacagagtctaacgatctcctagaagcaaccatagagctacaagaagtgtcggactagttcgatgcccatcggactaatgtttagggtccaatgatcctatttctcgctggcctagggttagccagtgtactaacactctgttccgatgttcttagtgttaggatatgattcctatgagaggcgccctctatccctt

SEQ ID NO: 170236 - DNA, 500 bp, Zea Mays
ccatgcaccattatgttgtgttattcccttacgcatcatttccgtttacatttccacctaaagaccttcgtcctccacattaacacgttaaagaagtgttaatctcaggatgaaggtccacattcctaacttgtgttgtcttgatctttgatacgttcaggggatggaaaatcaagtatccaatgttggcgccctcctccggtgattccacgaccacatcaacatacactatgtcgtagaagaaaacaacaacaattagctctatccttgcacccatcaatcctaatcaagggaaggaagcactcatcagagaagcaaggaaaaagaaggccactagtccaccaccccaagaagaggagcttgatgaggagatcagtaaccatgaactaatccatcagcatgttgagaagcgcaaggagaaaatgctttatctttctgagcttcagaggaagatagacaaagcaactgaagagatgtgcaacatcaaagcgcatgaaaac

SEQ ID NO: 170237 - DNA, 525 bp, Zea Mays
acaacagatgcggtggcaaagagcctcggcggagtcgaatttgtgggcgcttcgtcttcggacgcgaacgggattgactgctcacgaactcgacttggtcctgctcgcggccgaccggaaccggctccgattcgcccttccgcctgcagacccgccgccgcgtcgccggatctcggcctacttccacagacgcgtcgatagggagcgaagtggagtgcgaactttcctcggtggcgcgggcgtcatcttccgtgataagcaggagagggggagtgaacagtgaaccccttcatctggcgtgagagagaaggggagcgcgtcggagaggagcccgtagggcgcgccgttgcggggagaagagggaaattgtagcccctaaacggtgaacagtagtaggggagggaaagggtgagcgggggtgccggagcggaggtgtccggtgggtgcaaccaccgaagcgaccattaagacagtgtggaaagtcaaaccggcttggaacagtctgtgtcaaatactaggaatatg

SEQ ID NO: 170238 - DNA, 507 bp, Zea Mays
gaggtatccagccatgtagacgatggtggggtcatcctcggtaggatctcttcctgacagggcctgaagtcttttcctccaggcgggggtatttttgttgttgggtggaaagtagcgaaggggggtttcaaagactactctgttgtagttctggcatagctgtcggagggcttttcgggcaacattttggcaagtatctgggaagcggtgtgcggtgaaagtgacttggaaagaagggtggttcgagtagtttcggctttctcccaggtagactgccatagagcacttctccattccattctcgagatactccttccagacatattctggcttcatgcggatccccatgcgaagcgcacaacttcgcaacagatgtgggaacccctccacttctgagtagtaggatgtcctaatgaccagagagtcttccatctggaataggaaaagaagggtctgttaatatcgggggaaaggagagaagatttttcttggggtaagaggtatttt

SEQ ID NO: 170239 - DNA, 878 bp, Zea Mays
cttgggtgccttggtgctcctcacaagtacaaagtcaagcacaaattcgcagtcgacaggtgaatttttgaggtgggagtcacaacgaaagcatatttagggttacaagtgcaagcaaaaaggcatgacagatatagcaactgaccgctcaattctagactatgaacctattattatgtcgtaactcggattttcaactggatgagtaaaactaccaagaaccgatggatagaaacacagaaacaagggcaagggaaagcaatcagacaagtcttcaaacacaaacatatatatagggagagtaagttaatttttacataaacgaccaattcattatgaactggaccaaaagatagccacgccacccaactactgccactatatcaagctacctaagcttgtggcgatccgccaccattgccaccgtcgtcgccgtcgttgccaccatcaccgctgccgaccttgccattgccaccactgtcgtttccacccttgccactgccacctctgttttctccgcccttgtcgctgtcgccgccaccgctgatgaccttatcgtccttgcccccctccttgccaccatcgtacctgtcctcgtcctcctcctcctccatggactcctcctcatccttggagtcatctgagtcatccaagtcatcgatccctgcttgctcgatgtcctggatgtaggctctctccaccacagagttccccatggactagttcgtacagacggatgacggtgagggggcatcagcgggtaagggggtccttacatccctagaataggatttctcctccaagtactccaagtcgctgaagtcctcctccgacagagtcggaggatgcttcctcttgtcatgcttgcctcccttgcc

SEQ ID NO: 170240 - DNA, 975 bp, Zea Mays
atctaggggtgcctcgacttttttggttatatgcctcttcgtcacctctccgtaaggaggaagagggggaaagcgccatgctactctcggtgggcgacaagcaagacatctctattgagttgttaacgcttaatccgagtgagggtccgagctccattcgataggagtcggctagtggttcgaagacatgccccaaaagtacttgcgggtgattcgcctggtcttgaacccgtttgatgggctcgacgcctccttacaatgggacaccatcacgaatcactcctggggtctcgaatatgtcttagggtatcttgggattatagcccgagccttggccatgtacggacatacccatagtcatccctaactctatgatgtggggcggttgcgatacccttccgaggggccaacctttgaaaccctgatcagtaacgagcgtggggcctatgtgttctggggtggtctccgagcctcgtagagggcttgaccttcgaacccctgagcagtaggtggagtctctcttcttctttcttggaaaggaagtccaaggtggaggcgctctcttctgctatctgcgaagtagtgtaaaaaagaggtagagggaaagagcaggagagagagagacacaccttttgaggttttatgtgaagcgatgctggctggctgacgtcaggaagtgagggcatttaatgcgatgggacgctttggcacgcaggtcgaccgttgcggagctcgtgcgcgtggaattcgaagcgacccagctcactctcgttttcgtatcggggtggcccggcctaagccttggtgactccatctgtccttatacatttgcttgagaggggctgctcggttctttaccttctactatcgccttcctgccctagccgccctcttccttagtcgtgaaaagttcttgagctctcctttcgttttcttccccagtcccgatggccgataaagtgagtgtccttcctc

SEQ ID NO: 170241 - DNA, 424 bp, Zea Mays
actgattgcatgcattcaaggagcagatattagtacaataccgaggaaaccgtcctctcgcgatgccccctacgcccgccgctcctaccattaaggcgtgatgctcatgcccccggccaagatagcctcttcctcctccgtcccgctcgcgtgaatccacgtcgtcctcggtgcccctgcctcgccctccttcctccccaactacaacgcggagctccgtcgggcgtcgaccctgacgcgactctgctgatcgttgtgtcgtccctctgccggctcccacgcgcaccttctcgactgtgcaccaccgctgccaaggtcgccgtccccaagagattgctccctccctgagactgtcccttccacctcgcacctcgcagacgggcggcctcatgctgtgggccggcgcgttcagctgtgacccgag

SEQ ID NO: 170242 - DNA, 537 bp, Zea Mays
tgactggaaagccttgtcgtcatgctctggctttcctacaaacggagagaaatgttgatttggactcatttgtccatgaatattactcagtggagaggttcaagattgcatatagtggtacaattccaacaataaccgacaagtctcaatggcccaaattaaacttgggtttcaagttactgccacccaaattgaaaattgggccaggaagaaaacgaaagaacagatttaaggcaagccatgaaccaggtgcaaggaaactggacaaatgcaaaacatgcggcgaagttggacagcatgatcccaactgtggtgttccaaaaaaaaggcaagtaggaaaatcagttgttcccatttttctaatgtactgcatctgacaatttttttatgcaggaaggcaccttctaaaccaaagaatatggcagctagaccaaatatactacccattgataatatttttccaggaagtattgtccgaagaaggatttctttgttaaagagagaccaagagtatgctgcatgaccatctactgccac

SEQ ID NO: 170243 - DNA, 1289 bp, Zea Mays
gtgcctcgtcatcagctagcccccagacataaagggagtagtagtggcagcaatgacccaattggagacctggaagccaaggtggaacaacttcggtctgagctacgtcatcgaaatagagcatgagagcaggacaaccaacgtatagctgaattgtcagctaacctcagccgcttgcaatatgagatttcagaacgggattcggccattgattggatcgttatctcgcgttcaatcgcttgggaccgcgaagcaaaagctcgagctcgtgtggcagagcttagtgcggccctcgatagcctgcaagtgtattgtaatactttacatgaagaagtacatgtactgtatgctcgactgcacccgaatgtgccttccgacgttgctgcaataggagccggaccatcgggagcagcaaataaaggacctgatggggagttggacctttttaggccccctccttccatgaaccttgctgacgaacggtctcctgcagcaggaaatgaagcgacaaaggatgacgaagactataataatataatttagatgttatacttatgtgaaataagtactgaagtcaagctgtatgctggagtatgtataattattacattttggtaatgtaatatgatggtgtgtgctggcatgttatattttttccaaatgtttctttgcctcagatgccatcacagactcacgcacatgatggtgcggggacttctcacggttgggaagatactcctaaccgccaccagtaccactgactttggccgaggctatcgctaccctggtcaatgccactgcggataatacgcgcttcttgcgtgaaatggcgggcaatcagttacaacagcatggtgggaaagctcctcctcaaggaccacgtgaaactacatacttggaattttctgagactcaacccccgctctttattaaagcagaagaacctctaaaagctgatgagtgggtaagagttatggaacagaagtttgggttgattcgctgcacggagacgcagaagccactgtttgctgcacaacagccgagagggcctgccagtacttggtgggcaaattttgtagcaattcaaccggctggacatcagatcacctgggaggaattcaagctagcgttccgggagcattatgtttcagagggagtgctccatatgaaacaagaagagttcatccgattaaagcaagaaggagataatgtaatgcagtatctcaataagttcaaccatctgtcccagtatgccatcgaccaagtgaatacagatctgaagaaaaaga

SEQ ID NO: 170244 - DNA, 680 bp, Zea Mays
ttgtagtcaaagatttgggttatctccattacttccttggcactgaggtgactgattatcctgatcgtttggttctgtctcaacgcaagtacattcgagatcttttggccaaaaccaacatggcaacgtccaaaggtgtaccaactcctatgctgccaacagataagttatcacttgatggaggcgaccccttatttcctaaagatgcaacgagatataggagtgttgtgggctctctctagtatcttcttttgacatgactggatctctctttttctgttaaccgggtctaccaatatatggccgcaccaacctatgcattgggctgctgtgaagtgtattctacgatatttgcacgccacctatgatcttggtttatgcttcatgaagaccggttcttctcttctcagtgcctttttcggatgctgactgggctggtaatctggatgataggcgtagcaatggaggctatgttgtgtttttggtgggaatctagtgtcttggagctctcgaaaacaatctgcagtctactgttccagtactgaatctgaatacaaggcaatcgctgatgccacagctgaacttatatggatacaagttttattacgagaacttggtatacagcaggattgtccacctacactctggtgtgacaatcttggagccaccgacttatcagc

SEQ ID NO: 170245 - DNA, 775 bp, Zea Mays
caacccgagaccctctatcgtggacggcgacaggccgagctccggtgagctcatactggccggaatacgcagcggctagtgctctagcttggctgacacttaatttaactcctaacaatcgtttcccctcgatcaattgcaaggttcgagctcttaatcatactgcccacggtgaccgcgcgatcaatggacaaatcgagacattcccggtgatcctacgggctctaacttaattggatgggtcgaggagcatcaagggtacatcagagtactaaaatgagggaacagagggtatgaacggacctgtagcgcgctggccacggcgagctcactcagtacggtgttctagactgatttggggaagtctcaaattgggacgcgctggtggacgatctggggcacgggttggtgtattgggtgagtgactacctagcggagccgatggcatgctcaatttataagacccaagggcggtggcccgtgaatttgagatggcgcggtggcggccggagagaggggagagcactggcacaaggaattggtggctttcaccatggtgaggtcaccggtgaccaacggagatgtgtaatacgagttactccgatgtggtagagcacctaggcacgtggcgcgctgtcgataggcggccaactccgacgagcttatctgaactgaccgtgagtcaggcggacacggcggccggggctgaacagtggcctaagttcatcctcaatgcgatatttcctaccccgagcagctatcagtactccgttga

SEQ ID NO: 170246 - DNA, 452 bp, Zea Mays
gcaagggagaaggtcaaggtgattgaggtacctaaagacaaagtgaagaagaggccctgcagaagtcaaggttgatcagctgaagaaggtaatgtgtgaaagcatctatgcccctagttggttttagtgatttgaagcggcgattgaaaaaggaaaaccaaaaggtgaaggacttcatatcctaagtgtcgaaggagttgtgggacacttagtatcgagttaggtgtcttattttttctttggtcgtactataaagaggggttgtggatgtgtagcttgaccaaggcatgtctagtgtagtgtcagtgcatgcacacactcaaaactagtgctaggtatcactcaatagcccacacaagaaaatggaatcaaaatcaatttagaaaaactcaagaaagaaaagagtgttgctgctctgggagcaccgggctgtccgatgtgcaccaaccagc

SEQ ID NO: 170247 - DNA, 356 bp, Zea Mays
aattgcttcatgagaggactcaacgaccggctccaaaggaaaatggccacctgcctagatctttcatacagcagggctgtcagcacgacgctggcagtagaatccaagaatacaggccaaggaaaatccaagggatttggaggtgacaggtccaatcagggacctgagaagcgaacaaggttggtaatccgacctttcaatcagaatcgttcttcgcctcgtccaccctcctatccgtttaaacagcctgttttcattcgtcctaccactacccccacttctacaaatcagtcgagtgcccctggtgctcgtttccccgccctccctagttcctcaactggctgcttcaactgtgg

SEQ ID NO: 170248 - DNA, 507 bp, Zea Mays
caagtttctacaattaatttaatactaaaaattcattttctaattgatttttcttagttttctatttctctggactgggcgccaaatactgtgaagcgcagggtctctgacgcaaatttgtctatgactcagaatttccctaacaaggacggcgggttctaattcgattaaatgcaggggctcttatgcaagattccagggccaaaggggtacggtaaactaccaaccgtcagatctattttcaatgcccaggattagatctccttatcccgcgaatcagtacacgacatcgaccatccgatctgagattaaaggggcagattagattcccttaccccgcgaatcggtgttcttccgcgacccatggatcaaaatccaacggtgcgaatttaaagatttgtggccggttctggtctgcccgatcgcatcctacgactcaccctcaaccccgaagtggtacgcaccgggtttaatcgcagccgcatacaccctatccaacggtgcgtg

SEQ ID NO: 170249 - DNA, 878 bp, Zea Mays
tggtattttaattgtgcacttgatctatgtgtaaaactcactaacaaattcaaattcaagtggtaaatttagaaagggagaaagaaaatgcaaaacataaaataaaaaggagaaaacaactttctgggctgaattacgctggccggcccacttgtgcttcccgtccactcctgcgcgacccaacccagtgcacccacgcaccgacacgctggtcccacgggacagcctcacgccagcgcgcctgtggctttgctgtctccgccaggtggggcccctctgtcaggttcaccttgctccaccagacaatctgagtccgcacgaatctgttgcatgcgtgagggttgctgtcggggttgttgggatactccgcctccttcgatggactcctgggtatatatgctcctgccccggggtcatctcgccctgcaccagtagccacaccaagccatatccgaagccctcatagctaactcatcgtaattgccgtaagaacagagaagaggaaggtatgggagatggaccctggagaaccataccggcggcgcaagaagcaggtcgggtgcggggtagaagcttcccggggctgcggggtcatgcgggtcgactgggatggatgaattcctcgccggtggggacgaagcgctgctgtccgccgtggaaccgcgtgacaccgtggccgggacctcacggtcgtgttgggcgcccacactgggaccctagcgccctggcacttctacctctgcgcctctgtctaccgctcacgcttcatccgatcgccggtcgcgcatggtctggctgcaccagggcggtgcccaggtggccggtgagtgcttcacggtgggacttcaacgtcgaaccgctgcaagctgggaatctcc

SEQ ID NO: 170250 - DNA, 449 bp, Zea Mays
gcaaggagttgttaagcaagtttatctcttatcagttggtgccgaccctggtctataaaggggaagcagtagcatgtaactaggcatcgaaggaaatacaatctccctgtggggcgattacctccggtcaccctggccgacagtgatcttgctcctgcttcttactctcgctcttctccaccatacgcgctcaggtccctgtcccaggctgcactgctcctctatttgcccttacgcactcctagaaagcctaggcgtatcaatttggtaccggagccgatcgacgcctcgacaaaaatgtccggcatcgagaacgatcagggggacaccatggcgatacatgagaagctggatcgcctcctagcacaggtgaccacaatgaacaagaggatggatacccatgaccaatgtctagcgcgggtcgagggtaccatcgcagagcccaccga

SEQ ID NO: 170251 - DNA, 485 bp, Zea Mays
ttacccttccgagtgatgggcccagcctcgagcggaagtagtggagggtaaaaccatgcctagtcccggagttcgagcctgtcctggacaggataagggaactggcggttggtggcctgacctcaatgcacgtactcggggatttcctgaagcgccgagtcatgccgctgcaggggaggccgcgtctgtgttgttggtttactggccccagcgacattggtaggatccagcgcgggcctaggactgatctgacctgggaggagttggaaattttggtgagggggatcactggtgaggcctttatccccgaatccttgatgcctccccagggcatttcgccgctctgcgacaatccagggttgcggtcagcggtgctggcccgactgccgacccttgatgagagtggtgtggcggtccgccagaccggtggtcgggatccccaccggggaatccacattcctggtgcaccggtcggtggcccccag

SEQ ID NO: 170252 - DNA, 526 bp, Zea Mays
atgctgctgttggtagctgctccctgctctccacatgaattcagcagcacctgcacctataaagagagccggccggcctgcttcagccttgcttggcctcttgcttgcattgcatgtaagcatttctaaggccggccttgcgagagttgggcagctcgatcgcccatcgctagctacgagcagatcagcaggaatgcacgcatcactcggcatgtcaagctcaagcagcagcagcagcaggggttggtcgtcgtactcccccctgctcttcgccaccctgcttacactactactctgctcccagctcgccattgccaaggagcagtaccatgagttcgtggtaggcatgtcaagtcaaggacgtcgacgaccgatgcatttccacgtatgtataagtataactaggaagaatccatggccatgcactgcaggtgaaggaggcgactgtgacgcggctgtgcgggacgcagcagcagcggatcatgacggtgaacgggcagttccccggtccgacggtggaggtggc

SEQ ID NO: 170253 - DNA, 780 bp, Zea Mays
ggtgcggtaagcttcacgggtattggtttcttcgccttcagctattgagaggctctcttgaagggacgccttttcccctgaaagttccctgactttttgctccaggctttccacccgggaggttagggaggtgcagtggagggtgaggtcatcatattggttatcgagggtgtgaaggtatccagccatgtagacgatggtgggatcatcctcaataggatctcctcctgacagggcctgaagtcttttcctccaggtgggggtattcttgttgctgggtggaaagtagcgaaggggggtttcaaagatcactttgttgtagttctggcacagttgacggagggttgttcgggcaacattttggcaagtatctgggaaccggtatccggtaaaagtgacttggaaggaaggatggtttggatagtttcggctctctcccaggtagactgccatagagcatttctccattccgccctcgatatactccatccagatgtattccgtcttcttgcggattcccatgcgaagcgcacaacttcgcaagagatgtgggaacccttccacctctgagcagtagaatgtcctaatggccagagagtcttccatctggaataggaaaagaagggtcttgttaaaatcgggggagaggagagaaaacttttcttggggtaagaggtattttctttttagggccagttttagggtcagggctgcgacctacggccagtcctatggctctgataccacctgaagcgtcccgatcctttgggactcaaatgt

SEQ ID NO: 170254 - DNA, 581 bp, Zea Mays
ctttgtttgttgcaatcagcggctagctgttttgcttgctgaatggctgactgaatgtgcgtgctacagtgaggtaggtggatgttctggacttctggtaggtgcatattatttctggtgaatgttttgctagttgtttacatttgtgaatggtaaatgtattttgggctgctttgcttgttgcaatcagcggctagctatttttgttcgaggtgcattttaaattgtaggtgagaatgtgagttgtgagatcaatgacttggatgtttgctagcgttgccaggctacctgggatgctgccggtcagaaggttccgagcagccaggaagtaaacaagcgaggagaggtctgggaactgggatcgggccgtcgaggctgttcgtggaatttgggacaggcatgatcatgggaggatctgtctaagtgtctactgtctagtgaaaaccgctaaaacatttaactgcagatatatcccgatatatccttttgtagccgctggagaaggccagggataaatgggttagcccgctattttaaacacgggtcccaagtgattctttcagttgctcccagaaacgtgc

SEQ ID NO: 170255 - DNA, 681 bp, Zea Mays
gctggtaagtttttaggatttatcatccatgaacatggcatagagatagaccctgaccgaattaagtctattcggaatgtgggacctccgacctgtaaggtcgaagtgcagatgtttctcgacaaggtgaattatttacggtgctttatttctaacctagcagggaagattgatgccttcacccctatccttcggcttaagaatgatgccgaattcgcttgggggcagagtagcaggaagcatttgatctcattaaaaaatacttgtcttcggctcccgtattaaaagcaccacgagcaggagtaccatttcgattatacattgcagctgaagataaggttattggggctgttctgacataagaaactgaaggaaaggagcatgtggtgacatatctaagtcggaggttggtggatgctgaaacgaggtacgcttttattgagaagttatgcttatgcttgttttatgcatgcaccaagtgtagatgttatttactgtctagtcattgcactatttctggtcaagccgatgtaattaaatacatgttgcataacccaattatgagtggtagaattggtaagtgggcttatgcactcatagaatatgacttggcctatgaaccattgaaatctatgagaggccaggtcgtagcggattttattgtagaacatcggattaatg

SEQ ID NO: 170256 - DNA, 594 bp, Zea Mays
caaatgcttcttgttgttctgcccgccaagtgaattcggcatcattcttaagccgaaggataggggtgaaggcatcaatcttcccggctaggttagaaataaacctccgcaaataatttatcttgccgagaaacttctgcacttcgaccttacaggttggaggtcccacattccgaatggatttgattcggtcagagtctatctctataccatgttcatgaatgatgaaccctaaaaacttaccagccgacactccaaaatcacatttacgtgggttcattttcagaccataccgacacattttatcaaaggctttgcgtaaatcagctatatgagagctaaactcagccaatttgactacaatatcatcaatgtagacttccacagtgtttcctaacagctcgtgaaagatcaaattcatagcactttgataagtagcaccatcattctttagaccaaatgtcataacaacccactcaaataaaccaatgaagtctggacatataaaggccattttagacgcatcttcttcggccatgaaaatctgattatatccgacattaccatcaaggaagctaataattctatttcctg

SEQ ID NO: 170257 - DNA, 597 bp, Zea Mays
tagtcatctcgactaattctatgttgtgctcctatatgcccccttgtcaaaatttattttattctagcatggtctatacttctctcattctattagatctgatctcacccttgtgcttgcgacatctttgtagatgacccctgaccatagccttttgtattttggtattctttcctatttcgtcattaaattgctaccattttgcaatctttattcccctggtattgacatgctcgtatccctggattctttaatactcttgtttcaatacctacctctaataaaaactctgctgcctacttaaacatttcagttatatgtccatgaccttcctgtcttttgagaccctttcctattctattgttaagtcgctatatttttggcaatttgtactctcttagtcttggtatgctcgtaccattggaatcttgcgtactcttatttttatatatgctcacctttatatcgcaatgtctatttagagcatttcagcttacatgcccttgaccacccttgtttcttaatgatccattagtggtcattttactttgcacatccttggtaatctcgttgtttcattgcaacttccctcagtaa

SEQ ID NO: 170258 - DNA, 536 bp, Zea Mays
aggggtctcaccggcagtggtgctgcgtggagggtcagaccgcggtgagaagcgatctgcggcggtgcttgaatcgacggcgacaaattcaggtgacgtcggtggctaatcctccgccaaacgatcgcggttgccttcctcacggccgagagagtcttccgggttccacaccccgcgtctagccgtcggcagtcccggattcgcctgcggcggttcattctctcaccgatgatggagcgagggaaacggggagcatgcgaggagggtacggagccaacgggtccacggccactacggctttataacccgcagggtcagtcaaccgagctggcggaactggcggcggcagcaccggcgatctcgcggcggtcgttgcggtccgttagcgcacgagggggaaagaacggtgtccgcgcgcttgagcggatgtcaaggcggtcccacacaccagtggaagggagagaggtgcgcacgccaacggaaaggctgacacacgggggccgcgactcagtgaaacgtgcgcgcccaccacgact

SEQ ID NO: 170259 - DNA, 1197 bp, Zea Mays
tcggcccagcctcggctttcctcccccagccagcccacccgagccagcctatctcccacaaagcgctgctccacgggactcgttgacctgggactccatcgcgcacatgtgcggtctttactccacagccgtgtgggacctcggagtcagattcgtcccctccgtcaacctcctaaccgaacgtgtgtaacttgtcgcgtttgtcaaaacgactaatcggggcaacctcgaactcctgcccggtgaataaataccatgccacgggctcctcctcgaccaactcatgcaccagcaccaccattgtaggttcattgcaaccgaaatgcgctgatcccgggcagatccactcctctcgatccgacgagctcgcgcccaacctcctttggcctgaggtttaaaactgctccctcccctcgtccatccttccgatgcacgtcaaagccgctgattaagcccaccgtcgaaccatcgatggggtgcaggggagggcagtgtctgccattggcgacttctgtctaaaccactatgtagggctctaggattgatcatggtgaagcgccatatgtcgaggatcacgtgtgtcacggtggcaagcaggatgggtggtcggagctagagcaattgctcgatggagcaattggcgccgtcgtggatcgcaccgcaccgtggctgagggccaccccaacttcacccactggtaagccacatcgatccagactgcttggattcctgccttgcgttgcaccgacctcgagaggaaatggggtagtggagcgcggtggcgggatcacaccgttgaatccgtcgcggtggagctacgggcgccacccagcgttgtcctttgagaaagaagatgtcctacgtcctagggtcgttgatgaacgaatcaatggagtcgattagatcaggtttaataaaagtgtgggcagttgaaacccagatgagcgcatgatatcacatctatcatacccttggatctggtgattgagattgcatgccgattcggactctattgtcagcccttggatcgcgatctggtgaaccagagcgcttcacggacatagcagcacggtagtcttccatatgagcacctcggcttttacaaaatcaacccgcagtccttacacatatacgaattatcgcaaaacattcctgaattttagaattcagaccctagacttcctaggaatagcaccg

SEQ ID NO: 170260 - DNA, 506 bp, Zea Mays
agaatactatgcagtggacggcgggttataatctataatttcagaggggctcataaggaaatatgccaaggccgaaggggtatggagctctgctggccgctggattagacaccgagcgcccagattaattcgagctggttatgtacactaatgcgccagcaaccgttggattccagatccgcggtccacaactcctagcgcgaaggggtattccacgttttaatcctacccgcccgcgcccgatccgacggtcgcgaaagcttcgtcttctacacctggcagaggacggagacgcaggcccctacggcggcgcccatggccggcgagtcccaaatcgaagtccccaagagctatttcttatgcggtttagggcatcacgaggagcagagggaggcaaagcttggggtgggattataccggggtagtaggtcgcgaaggcacccgcccacggcaggatgcagtccagagctgtccgccgagctccggtgagcaattggccacgccgt

SEQ ID NO: 170261 - DNA, 751 bp, Zea Mays
cgacggagacaatgcgtgatgcctccctccaaagccgtccacctccccctcccgcatcgcatagcacacacacaccccctgcaattagataacgcagtggctcagatggcactgtagggattggaggcaaggatggaggtgttggcgggggtggtgaggatgaaggcgactatgatgaggcggaacccgggcaacatgatggaggcgagctggtgccggtgacgaggatcccacggccatggacgtcgccaggacgtagctgatgccggaggaggaggcacttcggctctgcacaggctgcgtccacttctagacttccttgcctcgcttgtcacctgcaggaaggtatgccagcgtcatccccaccccacccctccattgtcccttcgttatgaatatgcatcccctcacctccacaatgccgcagcgatgcccaccttgaaagaatttgggggatgaggagcccacgtcgcaacgttctagatagcgaacgaacgagggcaaaagagaggcacatacatgttctgcaaggtctgggctacaccacgtcttcacctgcggtcacgcctcgtgcctaagactggttaggattcttgacactggggcagtgggtcatctctagcgcctagcgggttagtacttgatccttgacgagttctttgcttgggttctgaccatcgatccagaagccttctggaccgaatctcctctggttcttaagttgcagttaacaggatttgagaagttactt

SEQ ID NO: 170262 - DNA, 517 bp, Zea Mays
attatagaggtgagaatgtgcaagtctgactatgcgagacgttcgattgacgaaaatgggagtatgtatgtcagagcgcgtatgtcatccaccatgacatattggtggactgtggctcaaccacttcgtagctattaagtcaataaaggacactggataaaccgctgcaggacatgactgagtgtaacaacgggctctaaggtggcctaggtgtgcctacagtaccctgacagaggatgaaggcatcaaccatggcgtccttcgactgatgggaacccaagaggacaatgaactagacgacaatgcctgacctttattcgcttgacacttaggctcttgtaacagggttggtctctgacattggcctataaacgaagggaaaggcacacgattccgtggacgagcaatcacacatacacatcactagcacaagtcaaagaacaaagcacttataaccgcacacatattcacacactagagacttgggagctcaatccctctctcgcgcgtttgtaac

SEQ ID NO: 170263 - DNA, 825 bp, Zea Mays
caactttgctgcagagcttggtatgggttatcatcaaaaatcaagagaaattgtgacctgaacttgctctgtcagtcaagttctttttgaattcagagcactgtttgccatcatctgaaaatatcgcgcgaggataaggtcttggacctcgccggcgataaggacgccacggcggtcgggatgggctggcggccgcggtaaatacccctggcaacgtggcagcgaatcaccgaggtgtcatgctccagtaaaacggcgaccaccgcgctgtcaccggaatccgccgcacggcatgctcgccagcgcaaccgggaaatccacgatcctcatccatcgccggtcagccgtctataaatagagcgcgggcacggcttcgtcaccacattccgcacgccagcagctaagcacttgactcgagctcaccaaaaatacccgcgcagccccaattccctctcttcttcgttcttgctccgccgtgaagagcttcttcgtagccagcgctcctctggtcagtaatgatcaaattgctctttgttttagttagtatgtgatctattgctgcccctggatgcaacaatttggagtttgaccgaagccccttaccggaacgcacctaggtgccgtcaaacaccgccgtgacccccccactgtcgacccgttcttcgggccttgttctacccaaatcaaagaatgtccgtagacccaagtgcacccataaacctttccccagcctcaattcggtcatcctcgccgtcgtttgctcggaatgcgttcatcctcttacccatccgctcggtcaccgtggaccgattgattcgtagtccc

SEQ ID NO: 170264 - DNA, 402 bp, Zea Mays
gaggcaatgtgttgtgcaagcaattctgtaacacaatttgatcaaacggctgaggattcttgctatgacgttcctgctcttcaaaatttaacagagcctaaaaaaccaaaaatagagtgtgtaagtatattctgtgtatagttacaataactgtgaagaagaacctaccccaacattgacatcaagtactaatctgttagatgtcatagttcgacgatgatttttggaatcatcatgaacacactcaatgaaacactgcatgaagacattctcaagacatttgccctctgcgaaggattcataaatatcgatatagtttgcactatattcaccgtaatctatgacaaccctgtatgatgaacatagttatatattcatattgcataaatgaaccaaacttat

SEQ ID NO: 170265 - DNA, 654 bp, Zea Mays
ccgaacatcataaaagaatatttggtaaactcaaattattaacatgtaggaaaagtaacagcaagcagaacctttgtaattgaccagacctgtgttgtgaccaaagtaaggaccaacatcgcaacaggtccagcagctgccgcactgctcctggtccttcacggcggtgatggctccgtggtctctccagtctgcaatgcagaataaattaacgccgttcacggcgatgatggcgttcacggtggaggcgactagctgcggcggcaactcgtcgctggatctccaaacacaacaacaataacaataacaataacagaatatgggcacaagagagcttgcaactttaattagatgagttaaaacaagttatgttaaagctgaatccccaaacacaacaacaataacaataacaaaggtgcataatcaaaacagaaataaagaaaagctagcgcacaacctcagtatcatgcttctgtgaccacttaatatagcaacaaacttgaaagctaggtagaaaataagaagaaaatacaagacaacagaacctaaaaaggtaaaattccacttgaatgattcctagaagtataaggttgagatgagtattcttgaagatctattattgaagtcccagcaactcatgaaataaacattttc

SEQ ID NO: 170266 - DNA, 383 bp, Zea Mays
aggaggtctagcctgccctgcagctgcggatgactcgtctacacaataaaccaaacaccggccgcactctggtcaaaaaggaggtatttctagccttccctgcagctgcaatcctagactcgtgtacgcaataaaccgaacaccggccgcattctggtcaacgcacgttgagagcacggttgtacacgggtagacaaccaatcacgtagttagagattgttctgcagcctggaagaaaagaaatagaaagctttgagcagttgagccatttactacttgctagttgctacgccaggacaattatttacaatacaaaatatgatttatacaacacaagactctaatgagaggttttccagcaccatttacaagaagcccaaaac

SEQ ID NO: 170267 - DNA, 632 bp, Zea Mays
gtactgcgcaccaaaattagggaagtgcaggggctaacttataaaatttctccagacacagagaccccacgtagtggacagcgggttgattagctatttctcggagggctctttagcaaaatagtcgccgcgaaggggtatcggattatttcatccacccgatccggaatcgagggctcagattaaatcgcggatggtatgggatcacgccagattcgatccaggccattccccgcacgatttacggtcagcgtttaataaagcacggtcacatcacggccgttgaatccaatctcgacgccacagatccactggaacaaactggtaccccagtctaatcctagacgtacaaaacccatccaacgcaccaccaaccgtcttcttccttccccacaacgaccaactcctagtggcggcgccggccattctactgttgtgagcgtgccgacggacaacggatcagagatttggtgagccaccccgaacgcggtgatgagcaaaaggtagtggagtttacggcgaacaaaatgggggcaattttaccggtggttgtgtcgtgcagtcagctatccacgacgaggtatggtctgcggtggtcgtagtacgtcggtgagcaattccctccccaccgc

SEQ ID NO: 170268 - DNA, 448 bp, Zea Mays
aacagcaaacataaatgaatcctccaaattctccaccgactgggactgatccagtggttgccgctcagatgcagacactacaacaaatggcaaacacaatgaacgaaatgcaaaatcagatgaggcaagaacgccagaagatgcatctggaacgattggagatgcgtcaagagatgagacaagaactgttggaaagacaacaataaccaccactacctccaccaccaccagcagctccacccagaaataagcaccgggagattatgagtcacaaaccatcgactttctctaactccgtggacccactacaagctgatgactggttaaagtctttggacaagatgctcaacatagctcagtgctctgacagagggaaggtgttatatgcatcgagtcgccttaccggccccactgtggattggtgggatgcatactgcgttgtccacgc

SEQ ID NO: 170269 - DNA, 406 bp, Zea Mays
tgttggagatgctcttataaaactgaaatcacacttcacaaaaaatgggcatattctgcagaaagctcagctagcctagtaaaaatcagataaacaagtcattcactaacagaggatcccaaaatttccttgtgtgtgtttatgcgtgaagatgcacggcagacctagaggctgcaattcctgcctgcgggcaagattcatgagcagccatgatgaactgtggtgaagcaaataaggcaccttcaggctaaagtttctcttggcatgtcatggtggtggcgaaggctgaagggccaacctctacagccacacgttcccagtcttttttagcaggcccaaagtagctgagcatcatatgagagatgagatgggatgcatgcccccagaaaacaagaattggacccta

SEQ ID NO: 170270 - DNA, 510 bp, Zea Mays
cgcaaggttgttgtgtcgatggatctttgtcaaggtccatgtctaaaggtgagtatcgtactctcccatccctaacttttgatccttttagtcccagtaattcgttgatgggttttcctgtttttaccagtgatggtgctggaggagcttgcgcgtgcggaggagcgtctctaggtccttagttgtgagcgctccaatctgtccacgaccatcgaccctgtatgcgaccaccttggggttttgcaggtaagtgtccgcccgtactcctcgaatggcacttgtctctggctacattcacgaactagaggccactgggtttcggcttggggtcctctatgcctcagtcgttgctcatcctctcgatgaggactcggtcaagcggggttgagcctgcctcggatgcaccatcagttggtcacatggcgagctcttaagacctgaaggcattggcgggacccattgcatggcgctctccctgtggtcgctcattttatgagttccctagagaag

SEQ ID NO: 170271 - DNA, 512 bp, Zea Mays
atgaaattaggcgatgaatggaaaactgcttttaaaaccaagttcggcttgtatgagtggttagtgatgccttttggattaactaatgcccctagtacttttatgcgtttgatgaacgaggttttgcgcccatttattggaaaatttgtggtggtttattttgatgatatctttatctacaacacttgtttatctgaacatcttgacccatctacgtgctgttttttatgctctacgcgccgcacacttatttgctaaccttgagaaatgcaccttttgcaccgaacgagtatcgtttcttggctatgttgtcactccacatggtattgaggttgatgaggccaagatgcatgctattcagagttggccaacgccatcgacggtgacacaagtgtggagttttcttggacttgcaggattttatcgtcgtttcgtgaaggatttcagcaccattgctgccccattacatgagttgaccaagaagggtatttcatttatttgggggcagtcac

SEQ ID NO: 170272 - DNA, 365 bp, Zea Mays
atttattcctgcagaaattgaatatccgttgcatcctgtatgatgtcattgtgtcaacttggataatgagcgatcgacagcgtgatgctgtttctaggttgggatttcaaagtatatttgatttgcgtaccgatgcgttagagagcaggtctctcataaggtggttgatggataagctggatctagacgacatgataatacgcccaggagctggtaaagaactcaagatcacaaaagagacggttcgtcttatattgggattgccaagtgctggaggtggtagggagttcactgattggtatggtgaaattgacgctgcttcaaaattgagacgaaatctcaacatttgtaaagaagagtttgat

SEQ ID NO: 170273 - DNA, 614 bp, Zea Mays
cctgcacatatggtcgagggtcaactcttttcacatagtggctcttcccatgtgcttatacacactaaataaacacgatcaactgaaatcttgcaggttaaaagccaaaccagtgccaaggtttctagttacctccgagcttcaacaatcgaacattagtgtgaaatgatgttaagaatttgaagtttggatttagactttaaccattgaagttcatgaataaataatctatattaacaatcaacgctcaactttgccactatgcaaatgacaaggtagtaaatctgtaaagcagataaaggaagttgatggctccttggagatttggataaaatggtaagaacacaattgtcaagtattacgtctgatggacaaaaggtagataaactaataacattttatagtcaaacaaaaaaagaggcccgtgcttgagaagaatgaacagagtgcattatgaagcgtctagagcttgagtgtgcttctatataggaaaacgctatcagagaacaaaaaacatggagacatctatctaagtactgctacctatctttgctctgtactaaccagaaattgaaaccgtcggaggtatagtggatggccctggggcgtgtggc

SEQ ID NO: 170274 - DNA, 334 bp, Zea Mays
ctatcgttttctcgaacgcagagagagctgtgccatttcattaatatagaagaaaaaagtttgttagttcacaggccctaagcccattaatattaacaatacatcatatgcaccacaggcatagcataaacgacccacttaggtactacccaaagaaaactatgtacaattgataggatctaggatcctaccatgactgcgtaggttgtacgggtagaattttgatggttgggtttgtacccctggtggagcataggagccatggtcgtgcacaggaagtaggcgagcaagagagatatgggagatggtctttgaggccagacaagataattgc

SEQ ID NO: 170275 - DNA, 773 bp, Zea Mays
ctgctatgtgtggattatcgcgctttgaatcaagtgacaatcaagaataaatatccactcccccgtattgaggttctctttgaacagttgaggggtgcccaggtgttctccaaaattgatttgaactctggttatcatcaattgaggattcgtgaggaggatattgagaagaccgctttttgcactaggtatgggcattatgagttcatagtcatgtcttttggcttaactaatgcccctgctgcttttatggaagcaatgaataggatgttgcatgagttcttggatgactttgtggtcgtgttcctggatgacattctgatttattcaaagaccgaggctgagcatgagtagcatctccgtctcgttctgggtgccctaagggagaatcagttctatggcaagttgaagaagtgtgccttttggctgtccgaagtgaatttcctgggcatgtgattaatcagcggggcattgcggttgatcccaagaatgttgcggctatggtggagtggaagagaccctctagtgtctctgaaatccgaagtttcttggagctcgctggatattatcggcgcttcgtaccaaatttttctagcattgctaagcctttgactagactcttggagaagggtgttctcttcgtctggtccggcgattgcgaggtcagttatcagacattgaagagcaagttggtggacgcccctatcctagctttgcctaagaacggtaagcgtttcacagtttatacggatgcttcacgaattggtcttggc

SEQ ID NO: 170276 - DNA, 486 bp, Zea Mays
gcattcacaaataaatgctacggaagacttgtaaatcttgtggtgcaagtagtgttatgtttatggaacaatcaagaccaagaatgggtatatttctaatttttattaagcatggtggcaatatataagagtcgagcaacaacaatgaaattggcatgagaacaacaaaaactaacaacaaaaggtgggcatggcctatagagaaacatgggaatggaacctggaagcaaatcccggaccttagcctatggttgcgaaccactagcttccattccagtatgagcagaaagaagcaggagggacaaaatagctaggatgtgaacatgacgaggaagaaggatctgtgtacaccaatgttgttgcgagctatgtactagagcatcagtgaggcggccgagcaaggtgatgagcatggacggtgaagcttcatagtcttctttgagtgagcggacacaacgaagcggcgaggagcgctgcttcatgcca

SEQ ID NO: 170277 - DNA, 321 bp, Zea Mays
caagccctaaggggggagggtcgtaacacccttggtgttacccaaagccctggccaaagaagcacattaagtcctactcaaactttatgctaaaatggagagtgaaggcaccaaaatttttagaatcatggctaagataagcattaaccataacaaggaagaaaaccctatgctccatacaatgttcacccacaaacaagattctaaaaccctaattccttcttaagcccttaaaccctaaccatgggattaaaggggaaagagtgggaaaatgatcaaaacataaaaaggaacctttactaaagatgaagagtattagta

SEQ ID NO: 170278 - DNA, 879 bp, Zea Mays
taaccaagtgagaactaacaagtagacttactaatttttatccgtgtcatttcgagcactagaagtaccatactcaattaacaacgcattctctacgataatcaatatcgaagcgtttttcacccaatagtttgcattttaacttagacatcacatgagcactaatacttttcatccgtgaccatacccatacgcatttagactacaacaagcaaatcatcgtgactacgagcttaactaaagtcatctaacaagttgattagccagagcaacaacctaggccgttatacaacatactcgtcggctagcccattattttcgaaatccgagacacaacatgtatataacaatcacttaacgtaatcgactcctgcttaacacgagttggctaatgacgtgactatttcccaattaccaacatacaccacctttcgccatttttagataacctacgcgacacacagctattgtaatacatctcaagttcattcaaccccatcagtagagcactagcacattccagaaaaaaattcctgagactacgacgacaaggcattaatcttatcctgcacataaaagcatcacaagtgtgtttacggaacctatcggttaacttgatcgacacactacccatgttctttgcctttcaaaatttatcgcacaacaggaatcatccccatttgccaatgacaccaataatacctactgacctattattcaccacacgaacccagttacacgccgcacactagtttccaacatgattctcacataactcgtaattcaactactcactaacaacaaatcacgcacgacaactaccacatcaaccgatttatttatttggaacaccgcctgcctagcgtaccactagtaccc

SEQ ID NO: 170279 - DNA, 1160 bp, Zea Mays
gagtgaaactagtcgcccgacactcggtcgtgtttagcgcccagactgcttcaggtaggtgatcggcccatttgcccttgctatcgtcgagtagtcttttcttgatagcagtgaaaatcttgccgtttgcgcgctcgacgacgccgttagattgcgggtgatatactgaggcgaaggcgagcttggtgccgatagagaagcagaaatccctgaggtcttggctgtcaaactgtttgccattgtcgaccgtgagctcggacgggactccgaatcggcaaacaatgttttgctagaagaatttctgggcagtcttcgacgttattgtagatactgcccttgcctcgatccacttggtaaagtactcgacggcaacgaaggtgaaattgaggttcccttgagccgtgggtagtggcccgacaatgtccagcccctagcgttgaagtggccatgtgtgggcaatcagcttcgtgaattgcgaagggttgcccgagcgaggagaaaacttctggcaggcttcgcacgacctcgtgactcgattcgcggcgcagattatagcgggccaatagaacccttgacggatcacattggcagcgagggccctaggccccgagtgagagccacaagtttcgctgtggacttagcacatgatctggatgccttcagtttcggtgatgcatttaagcatgagttggctgaccccttcttgtataactggccctcaatgattgcgaagtcccggcttcggtgcttgaggcgcttggcctcgttgacgtcgcttggatgataatatccttgtaggaacagggttattggggctcgccaatcttcggtcatgatgaggttgactatgcgatggccctcggcgtcgttggttatttgtaggccctctggattgcggacggctggcgtgccgatgacatggtagaacacgtcggagggcaaggcttcgcctctggcagctgctttggccaatgcgtcggcctcctcgttccttgctcggtccacatgctgtaaggtaaagcccttaaattgtttctcaagactgcgaactgccgtgagatactgcatgagtgcggggtcttttgctgaatattctttctcaacctgatcggcaaccactttagaatctgtcttgattatgtaggtggtgaccccaagcg

SEQ ID NO: 170280 - DNA, 741 bp, Zea Mays
gcttcttcgcaatccgtgctctccaactgaatccgcggattggcgggcgcgatctggccgtgagaataaaatcaagggtcgcttacctctcgccctctattgggagcgcctggagcaccgcggaatcgccggcgtgggtgatctgaagctgccatcgataaacggccggtgtgactccaatttgggccgagcaaacctcggtcgcgctgcgagggtgtgcggggaggctacgcgtggagctggttcattcgtcgcggggagaattgggcgcaattccgtgtcaacctcctccgccgccgcgtggtactgacccagccagctacgtgccgtcaccttgattcgaagtaaggaattcctccacaagtacaccttcattatttgcgcataggacatcatattgagttagactttctccttggggaagccggtgcgctgtatccggccatggcgctcctccacggcgcgcgtcgtcgtgtttggtagtagcgggggggaagaagagaaggtgttgaccgttgatcagccaacggacgcgcgagatccggagccacgtcctccttcgcgcgtgaggtcggtgtgccgtccgattgaaatcgtagggtccgagttgaggtctgcgtaattaaatcatggctgtggatctcagatccgacggtcagggggagcgtgggtgagtagctcccctggatctaatatggctcgttcgtttcggatcgaacggtcagaatctcctgataccct

SEQ ID NO: 170281 - DNA, 737 bp, Zea Mays
attggtgcaaaaatgagaaaattaacataagtagtcaaataaaccttttatattttcccaattcttgtacattctattcctcccaatatttgggtattacaaatcctacccccttaaaaataatctcaaccttgagattaagatgaactagggaagaggtgggaacttctattcatagctcatcttctctctccctagtagcttcatcttcaccatgatgactccattgcactttgcacatttttatcactttatttcttgtaacacgagtcaaagtgtcaaggattttgataggatggtcagtgtaggttggatctccttgcacactaagtccttccattggtagctgttcttctaggacacggagacatttcttgagttgagatacgtggaatacatcatgtacattagacagatgatttggtagctcaagttgataggccatctccccaactcacttaaggattttgaagggtccaatatagcgaggggataacttgcctttaactttaaatctcctcattccacgaattggtgacacctttaagtatacatgatcaccctcttcgaattccagcggtcttcttctgttatcagcatagctcttctgccgagtctatgctatcctcaagttctcctggatcatacagaattgttcttctgcctcttgaataatttcaggcctgaagaactgtctttcaccagtctgatctcgatacagaggggttctacacttt

SEQ ID NO: 170282 - DNA, 989 bp, Zea Mays
aaaaggtcatactctttttcagctcagacatatctatgacttttagttaaaataaagtgcagtatttgttcttgagtgccgtcacaaacgtatcaacattatactatgataatttttgatcgagtgatgctaattgcaatataatgacctgtggtgttgacatatcactagcgtgcagccgcctatacatcaaatgcgatgatatcacagaatagaataaagtgcatgcatgccaaactctgctggccgcccaaagttacagaacaaaagcttcgacaaataatcgccatcggagaatagacttttgcccttgtcatgtgatgagaatgaggtgcgaaaaggatagccagtgagcatgacagttaaagtctgttttctaagccacggtaggattagtgtgtgcacattttttttgtgggggaaatgcaaaatacacgggcggccgctgcatgctgtattctaatggccagtaatcgcatccaaatcggcagcttcggcctttggatagactcgtcactcgtaggcatcagataattgtttttactcgcggcgtcgtcgatggtgtgtcgttcgtgatagcgtctggattatatgtgtggttaattatcttgcaactagtttacgtgggcctgcaagtcatcaccactgttgtcattttatttgacttttcgagattacaatgaatagttatgcatttcaaaaggaaaggtacagtagttcatttaatttgatacaataactgagatcgaaagatgtcagagcaattttatgcagtttactacgccggttcgtggtctctaaacttgtttggacgtgtcatccatgtccccaaattcttaaaacaaacttttagagaccctaaacctgtacagatccccaaactctcgtaaccaattttttaggttctaaacgtgttcctgggcatacaggtccaaacggatccaaacccgtgccatgagtctacatggcgctactgatgtagataacgg

SEQ ID NO: 170283 - DNA, 1013 bp, Zea Mays
cgagacgctgcccgggatacctctaatcccacatctggatgtcagagcagatgtccatcatatcaccatcagttggctcggacagcagatcttcatgaacaacatcctcaagagcttgatcaaaatttgctagggataattcttgcagaccaacaagagcagacagagcaggagaaggaatatcgctactcccccactgactctgtaacaccgactgttcttctgaactaatgggacttcttcttcttcctcgtcctcatcaacaatacgaacaataaacggcacagggtcacacatattgggtttagctctggcagggtcacacccattgggatcagctttggcagggtcacacccattgggatcagctctagcagggtcacacccattgggttcagcatcagcagggccacacccattgggatcagctctagtaaagagttccaccgatacttcttcagcagcaggagcagaagggccagcatcctggtccaaacacgacactcgccgaagccgtctctttttctattttcccctcggcaggtgcagttggatgactggcctggcggagacgtttcgggcgagtaccatcagacctttgagtattcacggttttttcaggctctgggatagttgcaacaaccattgtttcagcagggaccgagtcagaagaatccccagccagcatgtccaacatagcacttatctctacatcacctggactcataggcatctcaaagtgaacttgcctctcatcattgggaagatcaccaagtgaagcaactagaacctcaacttcttcgagagagggtcgcactctaagacccaaaccactatcaccagcaggaggattgaacacaaaatcaaaaaaggacttagaaggtagcagattccaagcagaatatgcaacaggagcaccaatatttgatactttgcctctaaggatcatttccagtcggctcaccaaatccacagcaggaatactcttgttggtaacccgggttgagtcggtg

SEQ ID NO: 170284 - DNA, 390 bp, Zea Mays
ctaagacatgagggcatttcgagggaagccgttgaacactctctatggatcaaccccggctccaaccccatgaagcaacaactaagccattttgacgaagagaaacgggagccaccaaggaagagatcagcaaacttctcgcgactgggttcatcagggagatacaccacccaaagtggttgggcaacccggtgcttttacggaagaggagcgataaatggaggatgggtgttgattacactggccttaacaaggcttgcccgaaggatctgcttcctctcccgagcattgatcaagtggtcgacttcaccttcggctacaaggtgttgagcttcctcgacgcctactcaggctaccactagattatgatgaaggaatccgaccaacccg

SEQ ID NO: 170285 - DNA, 469 bp, Zea Mays
tgtgaggtttttgtcttcggttgcaacggtagctttggcatgagtcagtttagcagttttgtccgtcaaagctggggcggggtttgctcaatcgcttgcagtatattcatcatgcgttgtttcttctggcccccgtctctcccatcagcagccgaagaggtttcctttttctgtaagaggctcgtgagttccaatcccagaggacttagcggtgtgaatgggaaggactagatcattaccttcaatatttctgagaccccaacagcagaagacgaagggcttgtagtttgtttcgacacatcttgcgtcttcatcttctcaaaggatttttcggcaagcttccatttttaggagccgataccttcggctccggcactgtttttatcttcttcaaagtctcttggtcttccttgacaaaccggatagcttggctactcagaatactgacaaccctttttcttttggctcc

SEQ ID NO: 170286 - DNA, 921 bp, Zea Mays
caacaaagagtgatgccacagagttagtccagagatgtgaagcttgccaattcttgtcaaagcagcaacatttaccggcacagcaactgcagaccatacctgtaacatggcagtttgcgtgctgggggttggacatgattggacccttcaagaaagctcagggaggctatacccacgtgctggttgccattggcaagttcaccaaatgaatagagtagaaacctattgcttctttaacctcagccaaggcagtggagttcatacaagacataatattcaggtttgggataccgaatagcatcataaccgacctgggatctaacttcactagctctgaattctttgatttctgcgaacaacggagtatctagatcaagtacgcatcagtagcacacccaagagccaatggtcaggtggaaagggccaatggaatgatactggaagcgctcaggaagaaggtgttcgacaaaaatgaaaagtttgcaggaaagtggatcagagaattgccctatgtggtttggagcttgagaactcaacctagtcgagctctgcatggaaataccccattcttcatggtctatggttcagaggcagtgttacccgccgacctcaaattcggggcaccgaggctggtcttcgaaagcatagctgaagtagaagctaccaggctagaggatattgatgtgctggagaaagagcgattgaacacagtaattcaatcagccagataccagcagaccttgaggcgctatcatgataaagccatacgacaccgatcctttgtagtgggagacttggtccttcaccgaataccgaattctaacgggggaaggacggcacaagttgtcaccactatgggaagggccattcattgtatcagaggtcactcggccgggatcataccggcttactcaaatggat

SEQ ID NO: 170287 - DNA, 729 bp, Zea Mays
cggcagggaggaactcctgcgaagaccgagcagtggtaaggaggaagagcatagcgccgacgtcaaggtgaaaggctattgccgcgagtgagaaataagcactggttttatgtcaggatacatataaaagacaagaaactaaagtcacctcaagacgtccggtgaaagagttgttaaatataagaagacagaaaccctacatgaggccacaattgcttatccttccaaactgcaattacttgtccaggagcgcacataaagcctacatgagggtgcagttagtgtactaacatgaaaatactgatgtcatgaaggtgaggacggggattagggcggtcatacctggtggagtggagtctggttttattaaaaacctttaagtcatatacaaggttcgaatgtggttctgagtaacagatatcaattattactgtaagaaatgtttgaactttgaaggtcatatcaaataatctccactcaggcactaacctattcacatgaccttgccaagattgggatcagagctacctcaatatcagctaaactggaattttcatccaaggttgctttgaagaagtaaactgtgataaaaatctacaaaggatattttatttaagaacaaaaagggagaaagtaaatgaaaaaaataaattactctaacggttacctgacgaacaggaacatctcgcaaaaggttccaatctcatccaatccacatgggatatgaat

SEQ ID NO: 170288 - DNA, 569 bp, Zea Mays
tgaacgctaccgtgctaggtcaatgggaacaactttgcctgtccaccttacacatcctacaaaactgatttgccctcaactagcccctccgccacacaactcgccacctcgattggagttcaaggtcgtcctctcgtgagcagtggcactagtactgggagagaggagggggagatgggaaaaataacagtgcaaaggggaagaataggacctcatgcaacgtttattagttgttgtaggaggaagaagtggggagggggagagagcgtgatctgggtctaagcactcgggcgacaacatctggatcggagtcgacggttacgagaggaagaagtggtgaggggaggccggtggttggcgaggcgtgtgcgcgcgaatggggaccgtgtcgtgcggaggatgcagaatgtggtggttgttgtttcaaaagccgcaatgcgtagaggggagacaggggcatagagggatggtcaacacaattgacttaataggtagtagagatttggtgtagatggggagcagaactcaagctggactaaaaacattctacccaaacacgtcatctcttg

SEQ ID NO: 170289 - DNA, 431 bp, Zea Mays
gcctctaaggcgacttcctgacccggagcttaggctgctgccatgcaaccagaatgcggaggagaagaccctacatgaacgtccatggaagtgtgagagggagaacccactcggacaccctcgggggctgggtcacatcttgggctacccatctgagccggatcatctccggcaacaccctcgggggctgggtaagcgccagcaccatccttgagggccgagttctctacaacagccacctctaaggctgaaggaccctcagtcacttccgtgggagcagtgcaatccagaccagcctcctgaccctcaaaaccacgctctaaggtcgatgaggcgcgggacgctgcccgggatgaccccaacccggcatcggacacatcagcacaaacatccatcgcaccaccatctgccggctctgacaacaaatcttc

SEQ ID NO: 170290 - DNA, 546 bp, Zea Mays
gcttcggccaaaaccagctttgtccagcctttattattcaccggaaacacactttattgtatcaaaatataggtgttttgaggactttggtaaggcaggcccccaacagtagccccttgcggaatgagttcgttgcttcaaaacgagcttagatcacaaaaatcataaatgggaggccttgtatcgaaggtacgaaaaacaccttctcgaagctcgttatgaatatcctgactggtagggcccagatctcagtgagtacaatggttaagttcaaaaaatctatgggtataaaagggagcgacacacaacggtgttagtacgacatttgttgcttttgcgcgtgctgttgctcgagcctgctctgccgtagctgattaattggaagaatatgggggtgtagattgcttcgctgttgtgtcgtcaatgggggttggggcatactgattgctctgctaagggtggggtgccaaggttcattcgatttggtttttgttagtcatccccttagggaggagtactgtgtttgtacgactggcaaaacctaac

SEQ ID NO: 170291 - DNA, 383 bp, Zea Mays
attttgtgtgaatgcaggtagtagctcagtatttacaagctgatatatcgagctgctactgctagctgcatctgcatatcaacctagctgctggcgaggatccaaaagaagggcttgcttttttgttaatgcctgggcaggctcgatcgcgaagggcagagaccggcaaaagggaataaagaatgcaaagcaaaggaagagaaagaaagcaaaggagctagggggggcaattgggatacttggtgagttgtactaattccctgcaaatgcatggcctcttttcctcaaaagcctggggttcagtatatgcatgcatgcatgcctgtccttgagatggatataatcccaatccctaggtttattccgtccagactttatgccct

SEQ ID NO: 170292 - DNA, 907 bp, Zea Mays
gtgctacgacactcttgggggccattcaccgagttggagtaggcaggtgctgtcggtattagttgtgggcaattgttcttgaactgactggggtcaccatagtgccaacgagcattggctagaggtcgactgcttgcaacgtacttagtgcggaaggaactctgacttggctggttgaaatgcggtggggcagatcctgctagcttgttgaaatttgaccctttgggaaggaacccaaaagattggattttttggtgactgtctatctgctaagattggagaatttgaaactttctcttgaggtgacctctttcttcttctcgggctctctccatttggatagccttatttgagaggtgcgagaagctgagaaaatcttggctagcaagaatagtcttgagctccagccttaacccctttaggaaacgggccaacttcttgacacatgtactaacatcatctggtgcatagcgagcaagctctctgaacttgtggatgtattcactaatagattgtcctccttgagtcaagtcatgaaattcctcttccttaagctgaacgattcccgtgggcacatgatgctcacggaaagcatcctcaaattctgcccttgtggcacttcccacagcaacactgaaggtgtcccaccagtatagggccatcctaaagagttggtgggtagccaggtgaacatgcggatcttcagggcttccaatagcttctagcttcctctttagtgtgtgcagccaatcatcaacatcgagtgggttgctggatccaacgaacgtgagaggttgagccttagaaattctcccacctgtcctgcggtcttcctccattcgggcgctgattctccaggcttttggtgaggacttcaatgagtcgggtctggttggctagaacttgg

SEQ ID NO: 170293 - DNA, 873 bp, Zea Mays
gaggccacgcagcggcgcacgagctccggcgacaaattcctggagtccccaacctcatctctgcgcggtgatgctgcgagctcattcctagaggtttggcgaagcttctacgccccgtgcggtcgccagattgttaacgtaggccgagctccattgcggcggacggattccgtcggtgtttggggatgccacgagttgggtaggtagccaggagggccggaagtgcccccgagagtccgttttatagtatttcaccaagtgaaacggaggaggagcaggtcatgcgccagacgaagaggaatcccgggcgggggcgaggattccgcggattcggttggtaacagtccgcgacgacttcggcggtaggtgcggcttccatggagttcggcgtggcgcctggtcaaagcaatgtcacgcgggcaggagcctgagcgcccgagcgactgggtaaacggatagcggtgcgaggattcgttgctggcatctagccgcaggtcagcgccgcaagcagctccgaaactcacggcgaagctccaccatacgtgcttgacggttgaagacgagtactgggtactcgggcccacacgtcagtctaccagggagctggcacacgcggagacggccaaagaagcggctgaggtggagaggaggtaaggcggctagggttttggcgtgcaagagctagtgggctgaattgaggagccagacccatttaggtttcttcctcttttcttttttttcttttatgttttccatttcaaagttcaaatggatttaaattgttggtttgaatctcagactttcaaatatcaaatagagttctaatgcttcttttacttggtatgatattatttatttgttattattatttat

SEQ ID NO: 170294 - DNA, 761 bp, Zea Mays
atgtctttgaaaatgaaaactttattgactatgaagtcctccaattatatagtaccctgctagggataaaatcttctaagatgctctatgttccatgaattccccacttctgtgccatccatttgagtaagccagtatgatcctggccgggtgacctctgatacaatgaatggcccttcccatagtggtgacagcttgtgtcgtccttcccccgttagaatttggcgaaggaccaagtctcccactgcaaaagatcagtgtcgcacgactttatcatgatagcgcctcaaggtctactggtatctggctgactgaattactgtgttcaatcgctcttcctccagcacatcaatatcctctagcatggtagcttctgcttcagctatgctttcgaagaccagcctcggtgccccgaacctgatgtcgacgggtagcactgcctccgaaccatagaccatgaagaatggggtatttccatgtagagctcgactaggttgagttctcaagctccagaccacatacggtagctctctgatccactttcctgcaaacttttcatttttgtcgaacactttcttcctgagtgcttccagtatcattccattggccctttccacctgaccattagctcttgggtgcactactgatgcatacttggtctagatactccgttgttcacagaaatcaaagaattcagagctagtgaagttagatcccaggttggttatgatgctatttggtaccccaaatatgaatattat

SEQ ID NO: 170295 - DNA, 633 bp, Zea Mays
gagcatctccaagagagcccaaaaaccatcatcctaatccttattttaggataaaaagaaaaaacacgatcccaacagtaccctttcaagcagccctaaaccaacgcaggcgaataaatctgtgcacaccgcgcaaaaattcgccgccgcccaagctccccatccagccccgtacctcgttcccgcgtccgtttcagcatttggcgccatcccgcgttgaagctacgcagacgtgatttcgcgggctcaccaagccatcgactgtgtttgtttctgttggcgaccgccacttcgaaatccaccgatggatccagaaattgtcgattctttgatgccaccgtcagctgcgccgtcgtcgtccaatctaactccaacgtcccacgattttgaggtatccaaatctgtgtagcagtagagaatttttttcttgcggcacctagggctgatataggcgttatggagattcacctactccttgatttgttagacactgaatggtgaaaactgaatttgtggtcaatgctgaagttcattatttctgttaatttgagagctacgttctggtgaaagctgaagtccacgttacagtaaatatccctttagttcattgatgttcagtcagtgatgttttca

SEQ ID NO: 170296 - DNA, 934 bp, Zea Mays
tttctgtgccactcaccctagttactttcaacatccgagaagatgcttcctaaatgtaaggcaaggtcatgacctcccctagctcagcgcacgtctctgctagctcctcatcaaattttcccaaggccttcgccacctcagatgtcttcgccaaacccttcattttagcctcaacccttttcttttttttctcactgccagagccacagccttaccctttgaacaccctttgtccatgctgccacgtttcaccacaccctttctcttacgatcatcaacatccctagcatcatcagagccctcctcaggatatgagccataacagagactgtctagctcgaacacatgatttaaccttacattcgaaccttgcatgtaccaacacctcggcatctctgtctttgtcaaatacttcccaacaattttcactgcctctgcctccacctccctgacaaaagccacagtttctcaaccacgcaactcaatggtgaaggcgggctcaacaccattttattctttaaaaaaggcatcgggcgtagcttcacctcacccacctcccaaccgtgcacaagcgaccacactccgcaggtaatgaactcttccaccaagtcacgtctgctgctcgctttggaggcacgacgaagagctgcatccccttttctcaaattaaactgctggaaggcgatgtagcaatgcaaaacagaatggacggaggcagccctagaacaccctcagtgaccttcaatgtcacataaaaccaaaagtcccactagttccccacttattccgcaacctcacccgaagtcttcccagtactcgatgtgaacatgcacaaaccaaattgcacaatcttgccactagcaaccttcttctgctaatggaggcaatagttcttaacgaagacctcaatcgaaggctcatcaccatatgttgc

SEQ ID NO: 170297 - DNA, 512 bp, Zea Mays
gcagaagtcttcgggagttgatcagcctcgtgaccaggacgcgaggaggggcaacactggaggtccagcccacaagaggggcaagtctcagcatcagcgccaccatccctatcgtggcaaatcctctgactcgggtactttgggaggaagtactcagaggtttcgggctattcctaagccaaggctggggctggtgtgtttccattgtggtgatgcgcatcgccgtgcagagtgtcagtggaacagcaggtgttcaatctacagtcaagaccacaaggatgtggtgtgtaggaggaatcccaatgggaagctcagatgggagccagtgacttcctcctcttctcagggcactatcaacatgatgtcaagcgctgagcaacaattttcagttccacttcctccgcagcagttttatgtgcctgggacttctcagttcgtgctggtgcagggttttcctcagtatctggctgcgcctactcctacaccgactacccctatgccatctcagtttg

SEQ ID NO: 170298 - DNA, 672 bp, Zea Mays
aattcaggtgttaccttctttttcctattttctttttggtcctttattcatttcttcccaaattcatttcttcccaagtaatagggctacaggaattgttattgatatatcctggtggaacatatgttttgattgacgaatttattggatatgcattcacttagtttgtttttgcattcgacatttagttcaaatgatagaaaaagaaataaataaagaaaaaagaaagagataggaaaaggaaaaggaaaagcccacctggtcgtcgcgcatggcggcatgcacagatgcgcgcgcgcctcgtgcccactcgccctggccctgtccgactgcctgttgcctgcatgcacccatgtgcagttataggaaggaggtgaagaatgaagaaatcgcatgcatgtgcctcgtacgatctccacgccgtgtgtttgtttttcaattggaaaactgtcgtatgtgggtccgctcgcatgcaaattctcccacgtcgtcctattcattttctccttaactgcttcctcccattttctctggttccccatcgcccatcttcccacgacccttcaaaaccgaatcactctgctgcgctcgccatggacggctcaccgtccgcgccatcgtcttctcgtcaccaaggtgagcctcctcttcctcttctttcccacggtgacc

SEQ ID NO: 170299 - DNA, 507 bp, Zea Mays
cgaaggtgcagtcgcggatgacctcgccgagagcgtctgttagccccttcatcttgcagcagtagtcgtcgatcgagaggttgccctacacaaagacacgagattcggcgtcaaggagaagagcgcgagcttcgtggttggtgtggaattacgcctcgacagtgattcgggtgtggcgtgggggtgtggacagactccatcagctcaggggagagtgtgcctagcaggctagcacccatgacaggacaacgacatccacgcgtcgctatgatggcatgatggggaaggcgacgtcagagaggacgtggttggtgagggtgtgttgctcgagggtgagggggacagagtcgcgttaacggttgtagtatgaggacagggggtccataactatggatgagggcacatatgtttggacgcaagggtgagggggacgaagtcacgctaatggttgtgatgggaggacagggggtccagaattgtggatgagggcacatatgttttggatgc

SEQ ID NO: 170300 - DNA, 451 bp, Zea Mays
tttgctcgaccgaaggggtacggggcgatcacagctgttggatcagaattcagccgaccagattagactggcagcacgcataaaccagcacagggccccagccgtccgatcttagatctatggtgcagatttgctgactccgaaacgtttcctacttctaatctgagccatcgatcattcgatcgacgggccgcgatcaactccccaaacccaggttgtcccgacggcgacgccacacaggggcgcggcggcgccttcgccggtcatccggaacccctggttctagagccctaaacacgattatgttgggtgctacacattagtaagggacgagcgaacatggtgtggtggttgctcaccggaatcgagaaccgaacgaagccacccgcgacgcacggcggggatgcagcaacggcgagaaatccagggcgcttgggcggtcaaccaagcg

SEQ ID NO: 170301 - DNA, 536 bp, Zea Mays
aacagagacaaacccgcgccgataggaaggaaaccccagcggccgcgacgtctttccttgcgtccgaggcgactcgccaggcgatttccgccgctccaatccagcgccgctccaatccagctgagctccttcaatctccgagcattggagcccgatttaagagccaatgctttctcgagaagttccaggtaatccaacttgaaaatacatcgaggtttccgtcgatttttgaagcattgtttcgattgaagtgggtttgattgtaacccttatttttcagctaaatgtgtgatttgtatccgattatacatttctctaatcggatcattgcatcgctcattgcatctctcttttgttcaggagccccgatcttagagcatctgcatttcttctagatccactgtatcgctcggcattcatagacctagacaaaggctgtggatcaggtatttattcgtgagtttgcagagagtacctttacacaatattagtaacacgtatatgcttattggatttgatatatatgcatatcgtca

SEQ ID NO: 170302 - DNA, 306 bp, Zea Mays
ttcatccacacttcagaatagaatttcccactaagggcagtagcttcggctgaaggctctttgatgtcagttgctgaaactaagaagtctggctaaattacaaccttcgcatgttcacagccagctttttcaagcaaagatacaactccccaagcaccgacacaagcacagaaatccccctactagtgagaactttgtcaaatgcttcgatttggccctcaatccatttgatcatgccctcggggtcaccacgaatgaaattccgctcagccgagaacgcgccaacactagtaaaagcatttttta

SEQ ID NO: 170303 - DNA, 520 bp, Zea Mays
cttgggcttctaaaaaacaaaaggtagtttctttatcctcatgtgaagctgagtatattgttgctgctacagctgcttgtcagggtgtgtggttgagcaggttgctcagtgatctgttgaatgagaagataagaaggttcaaggactcagtaaaaatcctgtgcatcatgatcgcagcaaacacatagatacaaggtaccattatattcgtgaatgtgtcagcaatggggtggtggatgtaaaccatgtgagcactgatagacagatagctgatgctctgaccaagccactcggcagaatgaagttctcagaactaagaaggcaattgggagttatcagaattcaagaatgacaagattaagggggtgatttgttgcatttttcaccagtttgtaatcctatcatagctaggtgcattagttagtctgcatatttcgttttcgcgtagaatccaggtgctctctggagactgcccagaccacgccgtgaccgcgtccaggcgtatctcccgccacgacac

SEQ ID NO: 170304 - DNA, 936 bp, Zea Mays
caaggaagtgattcttcgcttagaaactgctcaggaagtgtgcactctctctctcttgtcaaactgaacctcctcagaagattgaaagctaaatccttgggtctagcactcattgagaaatcacgaatcagataaaggtcccgcttgactgccatccgccttgaggatgccaactcaagatttttccatctccgggcatgctctagggcaaggaagaacttcattcaagccttgcaaactgagattggcttggtcgtcacataggaagaaaaggagaaggtcatcactgaccacttcaagcaacatttgggcacaacggcccctagagcaaggacgttcgactagaatttgctaggctaccaccacattgatctttcctccctggaagcacctttctcccacgaagaaatcaaagagactatcctctcaatgcctcgcgacaaggcgctaggcccggacgggttcataggtaccttctatagggcgtgctgggacatcattaaggacgatttaacagtagcgtttaatcagctccacaacttaaatgggcaaggcttcaaactactgaatgcaggcaatattgttctcatcccaaaaaaacggatgctttgcgggtgagcggcttccgccccatcagcctcatacatagtgttgccaaaattttctcaaaattattggccaataggcttgcgccccacctagatggtcttgtcttaaagtgtcaaagtgccttcatttagaagagatgcatccaggataacttcctatatgtgcaaaatattgtcaggcaatttcaaaagaccaaaacaccggcgttattcctatagctggacttccagaaagcgtttgacacgataaattggagctaccttttagaatatctacaagctcgcggatttggacaccgttggcgtgaatggattaccatccttttta

SEQ ID NO: 170305 - DNA, 446 bp, Zea Mays
cggctccctccacatcgagcgcgcccttggcgaacgtgccggcggcgaggtccgtggccgactgcatccttgtcgcctggtgccaccgcgatctccaccccaccgctagaactcaacggcgacccgcagttcctgctgctctggccgtccgaatcgtgacgcgagccctgggaacccgtcgtggagtgcacaaggcagggcttatccaggtgagcgcatattttaataccaaatacccgctactccgcaaacaacatgtaacgtgtcgcgtcatctcatcccatcccatcgaccttacgagagcctatcccaactccaccaaaccaccacctctcttcttgttgttgtgagcgagaaggctccgacgatcgtggcatccgcagaaacctaggctttgttgcatctcctctcctcggtctccccatctctacggtatgcattctctc

SEQ ID NO: 170306 - DNA, 734 bp, Zea Mays
aacttgcatgtgacaaagaagaggacacgaccaagggaaaagtacgtaaagtacaatgctcagattgagatggaaaaaaggatattttaaaggctggtataagataaacatcaaggtaagatatagaggtaataagggtaaaggtggtaatgatgaaaagcataaccatggatagagttaaggcaagacttacaaagtggagaaaacaagcaagggtaagataggtaaggttccaacaaaatggttgaagtaaagaaaattaattaccaagtggagtgacaaggagacaacgagattaccaaggatatgcaaaataaaacgaccgctcatggatcattaaaaacaagggtggtcaagggcacgttgactgaaatgtcttaaacagatattgagatataaaggtaagcacatataaaaataagagtatgcaagattccaatggtatgagcgtaccaagaccaagagaatagaaaaagccaaaggatgacaacttcataatggaatagggaggggcctcagaagacaagaggttcatggacatataatctgaaatgtttaagtaggcagtagaaatttagaggcgagtatttaaaacgagagtattaaagaattcagggatacgagcatgccaatactaaaggaatagagattgtcaaatggtagcaatttaatgacaaacgagaaaagaatcccaaaagacaagaaggttatggtcaggaggcatctacaaagat

SEQ ID NO: 170307 - DNA, 537 bp, Zea Mays
ataaaaagtactcggcaaagaagacgttggtgatgtacagttcaccgagttttttttgccgtcgagtgttttacaggacactcggcaaagcagctgattccggtagtgtacccattcaaacaaaacacatgtcaatactcaccaataaaaaccgttacaacttgatgcccctaatgcaatgttacgaacaatatctagtaatcgaacaagtcaatggtcacggggacactagttttgtttacctgctatagcgcagccccttatatccacaaaaaattcaatgggttgttcacattccatggctataaaaaccactagttgctcataaggggagtgagacagaaaaaccaagagacgtttggtcatcacttgaagttctgagcactagctggaggcatggctttgcagtgccttgtagactggaagggacagccagttaacccaaaaaggcatggtggggtcaaagccaccatgttcatctactgtaagtatgaaaccgtgcatatgcatcttccttttggttttgcacaggactac

SEQ ID NO: 170308 - DNA, 3839 bp, Zea Mays
ccgccacaacggtgtgtcgccgcgtaccgccccaccagagtcgccttcgctattcaggacccccacatgagctttgtcgttaggtgggatgtaccacgctctccctctcacttcctttatcctagtgacactcacccatcctcctccttaaataccgagttcaccattgcccgccatcgccgttcgacgccatcaacgcctccctatcgtcaagctcgcctccctaacctgtgcctttaggtgaggaactcccccgactaggtcttgccctctctctctctctctctatctgatcagacgacaatcgctcgccgtagttggcgaggccgccaacgcccctacacactaatgcaccgccttttccaagccatcatcgaactttcccaacccccaagctaggttcgtggtgtcacgtcattgtcacgggctcataccttcggcccgagcctcacccaatcgcaagtatgctcgcacgtcgactatcctccgacacagagtcgaagtggggccgtcacaaccctcccctcttgattgtcgcagcccctcaacggatccccatagcttgcccacgatctgacggcctagagcaccaaatgtcgcttcacctcccaccgtctagtcttaactaatggtgccgaatccagcgctcaaagagctccacgtcactgcctcatcactaacgacaacacttttgctaaagaagccctagagttctgccaaatcaactcgcaatccaagattgtaaaatctagatccccttctctttgcactaaagctcctgaaacccttgtattcttcacaatcaagtccctgaggtcgcctttaagcaccaaatacagtagtctgatagcggagatttgaacaaagaatgttggtggagaggtacacaatctattgttgtgacccacgcgagaacgagaacaagggcagcagataatgtgcctaaacggtgacattgcccttggcggagatcagtctctccccaggggcacacgatgtggaagcagcggcaactagggttaggaactaaacctagactcgtgatactatgtataagaatagaattggtgaaatattcattgtatcgcattaggccttccgggctagttataactcatatgggtagacaatgtggtattattatttactataacacaaacctttttttggttatgctctaaaaaatcacaatttatttctttcaaaactcaagaaccaaacaccccttcaaacattaagtataataccacctaacaactgcctcatgcagaggccacattagcacaacttgacaattgcacatccctgatgtgcaaacccaaaacaagtcataacccaccttctattatatgccatgtaacaagtttcagtgtggcaattagagatggtccaaattgtgaaagacgtggttttttgcttcgctgctaaagcataaaaattattcagtaaatttgtttcacaactgtatatgttgagacacctaagtaacttaacacacaagcaaatacaacgcagtcaactttagatttacatcaattattcatttataaaacagaactataagccacgtgtaagatgtatgaagcacaaacatacaatgaatagcataccagccctagtaaattgccaacaatgattgaaccaattggatcatacatagcatttcctgtcatttgaacagctaccaaagatgttgcagcaatagcaaggcctgtaacagccgcaccatcctgcagaccaatatcggatgtgaaaaattgagaataaaatcaatacagaaaagtactaggtgttgaaaagtaaatgaacaagaaatcaattaagaaaaccatgagataataattttcattaaagtcgaccattacaaatggcagaaatgaaaatgagtatgatgctgtgattgaactacataaaaagcagttaggtagtcatattactgacttcagtcataacagcaacagaagttggatcatgaccacgccagatatagtcccaaatacccattccctctgcttctgcacctttcctaacagcgtttatagcaacaagcagtgaagcacctaacagacaacaggatttctcaagtaaattatagctaaaatagacaccctaagaaaaagaggggtgagtgaggtagcagcaagggagcaacaccttcaattaggaaggacccaccaatcactaatgcagcccagtgaatattctctggaggctgtcaaacaaaagtatgggtatgggcattatcatacttggatggcgactgaagacatttcataataaaatgcaattttgtgcataaagttctcatgactcaaatgacactttggtgacatacttgacaattccataaattttgaactccatgcactatggtagcacctgaacccaagcaaaatattccaactgcagatatgagagaccatacaaatctttccttcgaataaccatagctgcaaaaaagaaagccaggattaacatctgttgattcaaaacataaggcatcattgcagcttatgatgtatcatatttaatcccatcactggttgtctaatgtctattagaaaattggagtgataattaataacaagctttcctaatcttgaatccatcatatttaacatcaaaggaaaggagtggttctcatttatgaaagagggaataaatttatttaaccaaatacagtacagtaaagaactaagaacgctccaattattttctgacaaagcatatataccagaagaacttattatacatacgggtgtagagcatctggagcacgtcttgagctgctcaaaccataagcaagaagagcctgaaagttgatgaacaattagccctaagattctttgttcttggtaatgaaacagagaggaaaggtatatacatcaactggcatacgaaaaaaacttacctggttagcaaagtctgcaatggaatgcactagctcagctagcataacatgacttgaagttgaaatccacactccaaactttagagagaagacgagaaagttgcaccatagtgccatgttaaccgctcgatggctgaggtcacattccattatcaattacattaaacgaaatgtacatcaaaatataacttcatgagcaatccaaacaagtagcaatggcactattctgttgataactggagcaactagtataggttatcctttgtaattgtatttctttacaacaatgacaaaaaaataaaaggatagtgcgcaatgagtatttatcgtgtagcatcatgattcagactcatagttcaacctgaagcatattcgaagtggggttttttccttgtcacatcagctcatccaataaaggggtaggtcaatcaccctatcctccaaagctaaattctctcatgcctcacgtagtcatgtttgggagaaggccgaaacagacctcggtcataatctaaatcggctacaacaaaccacacactaacccctgtttgcgaacacagagtccgaagaccccaagtatgacccgaaggggggcttcatcgtggtcgtgcccccctccggtatgggacgatgcccccgctgcctccccactcgttgaagaccaaggcagtttcgaagaccgaccccaacaaacccgatcgaaggtgaaagactcgccaaaggttaggactaccggagggatttcccttatcaagaactgagccctttgaaaggctcggctatctacggcggacgccttttccagcgtgggtcgtgaaggctcaaatgaaggctccatcacgggcatggtccacgacttcctatggcgagcgaggccaaagggtgaaccaaagtggtgccagtggagaccttggagcgaaggtctttg

SEQ ID NO: 170309 - DNA, 528 bp, Zea Mays
gcgcgcctagatacagatggttgatgcaagaagacacaagcttttattctgattcaggcaagagatggccctacttctagcagagggggatgagacttatattacttgcacctaagtgcttgtagttggggatacaagccggttgggagagggagatgatcccaagtccctgatgattgaggtgagtgtcaatattgttgtggagggtgaaaacctatgaggtgttctcctttttcgtaggaagctttggacttctccttttatagcctcaaggagggatcccaggggcaccacagtttgtcgtgtatggagaggaggcaagtccgagcccctgtagccggtatggctgagggtatggccttcgtactggcttgttgacttgaactaggaggaggacgtctggtccctatatttgcatctttaccgagtagagagtcgaggccaggatctggggctcggacacatacccgagcctatctattggaggtgctgtccgaatcgtagttgttgaaacagtggtaattatgg

SEQ ID NO: 170310 - DNA, 806 bp, Zea Mays
gatggtggtggtggtaaaggttggatttcttggtgttgctggtacattttatggttttgttggtggggatggtgatgttcattgtggaattggtgctggtgatattgttagggatggtaggtgtgggcgacaactctttggttgtccgtcggtttatttctagccatcctatctttggtggccttggtttcagggcaatccctggtgggatgtgtcgagtcttcgccatggaaaagacaatagaacattcactgttgcgagactcggcctctgcctctacctctggtgttttcgcctcttcctattgcgcgtggtactcgtggtgatgatcgatgtctccagtctgctgctgattagcgatggtttgcacttgggactggttacggtttggtcggcctgagtccaactgtgcaggcctgacccatgtcctactggactgcggagtgtccttaggtttgcgatgtggttcgacttttctctggtggagctctttgaactgggcatacttttcgaataactaatataaatcttgcaagtttttgggtgggtatcttatgcagtgactgtataatacgctggcgcgaagaccactgattgctagtggatggctatgtggtcatcgacaaagggtagttgtgactttagaagaaggaactttttgtaatactcccgaagggtttatttttcatgttgcctatagagtgataattctgccagggcgtctgtgtctggcctgtgcccttggaaatttagtaagaatttgtcgcaaagggttttccatgagtcaattggtaatggcagcaatc

SEQ ID NO: 170311 - DNA, 372 bp, Zea Mays
tctaaaaacgctggcgccaccagacttcactcggccactatttccaaagcggccgacgtggcccgttataactcggttgttacctctaaaacgccgacctcgccagcagtcactcggctattattcctaaagcggtgacgtggctccaaaggattcagctgttacctctaaaacgccgacatcaccagtaaccccccggtcgttatttctaaaacaccgacgtggcccgctatcactcggctatgactctaaaagcgccgacatcaccaataataactcggctgtcatccttaaagcaacaacatgactccaaaggactcggccgctaccaccaaagcgtttgacatcgcgaagaagacagttagaagcgtg

SEQ ID NO: 170312 - DNA, 1433 bp, Zea Mays
ttttagcatattggatttgtaacaaaaggcgacttcaatcgaataggagtagcaatccctttatctactaaaaaagaaatcaatgaagatcaagaggttcccgacatacgctttgccctcgtaagaccccaccaaaacagaagacaagttttttcaacctaaagtaccaatggcccagattatattttcaattgaagtaccacgaacaagtcaccaaggagactaggctatcgtgcctcgcaggaagcaagtaaagggctctacacctaccaaagaccatgccaatcaacacgaaggaaaccatcgccacaaagacccatgaactccaaaaaggccactgaggccaagatccggagggcaaaaggttcaaagtggaaattacatgtcacgtgaagatcttgtccatccaaggaagttattacaaaacggaacaaacaagagaggcgacctaagtgccagtgggcgggtcaccagcaggcgacactagactctagaggcccatcagtagggtcttcatatccgcatgttcagtgagcactctggcatggggtagacttgatcttcaattgcgtccaactcttcctcgcttcgactgacagcaaaaccttcagagatcatggtagtgccgatctcatcaaagtgagaggccatctgccctagagccaggccgctaccatggaacgtagacctggccgacgaccaggcagaacccctaaagtttggcgctacgcttagagagcacaatggctgccttgtccgacgtggtaatggcgccatcgcaagcaagcaaaatctctcgcacccgggcctcaaacgttgccttcatatcctcggttgttctcttggcgtcatcagcttgagaaagcatcttccagagctctaaggaggaagaaaggataaagcaaccaaagacaaagaggtacaaaagtgtcgaaggggacctacccccagtggcattgtgctctcacgaaagctccatatttgtcctctttaggtggccgttggcctcaccaagttatgaatcggcctcgctgactcagagacttgcctcacaaagggccatctggagttggtctcctcttcctagaggcgattggctttaatctggacaccctcgccctcagaatgaagtggggcctcctcgctctcaagagactcggccctagagcagagctcggccatcgtgctgcatggccacagaatgggcagcccccacatggagctactccacctcccactagatggagaacaatttctccgccctggcccttgatcgcgcgaagatacgctgcgaaaggataacccgatgatcaccttaggcgaggataaaaggcaagaaacaaggagtaatcgataagcggtgtctacctacccaaaggggatgaaatcctatgtcatcgacgcccgagcaatcgataccacgtcccgaaagc

SEQ ID NO: 170313 - DNA, 716 bp, Zea Mays
gcagaatccgagcgcgtgagggttggacaagaccgtgaatgggtacatgcaggatggatggcgccgtgatgcgcgttatgggtcaaacggtggtcagaacggcaagggcgtaaaaaatggtagtggccgcgattgtagggattagattctacatgcagacgtgggttaaggtaatcgtggtcgcaaaattcatggatctttaatggagcaggaaggcataagggataaagaaaaatatgacataagatgttaacagaaagggcataatacatacacgttgtaaatgttgcatatatggtatataaaatttggtataaaacatggaggcaatatacataaatagtggtggagggatatttggatgctgggttacttgatccattatcggtaacagttcgaaaaaagaggaaataccctgaaaaagggggagtcggttacatgtttagtatagcatccatcattgtatgcatatgaaaaaacatagggcttcagcctgcatcaatcgttgggggtggtgaaggctgactccggaccatcatcgacgatggcaggagatggcgttgtaattcgtcgagacaccgaggcagcctctgctggtaacttgatggatacaccacctctggttctgatggggcctggaagcgatgggataagcaatggggatgaaggagaagatcagattcgatctccgctgtccaatattagctcccgggaaa

SEQ ID NO: 170314 - DNA, 423 bp, Zea Mays
cggacatgaaaactgtggttttgacacagtgagtccatcaatttctgaaaatggtcaccatcgctcttggtcggtggcctggacagttaatctgtggtggcgacttcttcttcaccgtgccgggtgtgaaggttccttcggtgcctgttcgggtgttttccgacgctctctcctctcgccgctgggtttgccggtgtcacggggccctttcccttatgatagatagcccctaccgtgtcttccccgtcagtgaacttggacgttatgttgagcaaatttgcggttgtccttggccttcctcatctgagctcgtggacgagtgcctcgttagtggtgtcgtaggtgaaggcactcactatattggcgttgatggcatcaaggagtttgtttctcttttgagaaaacttccgaatgtaatctcgg

SEQ ID NO: 170315 - DNA, 533 bp, Zea Mays
ctctacccgaaatgaagtcaaaagtgagtaggttgagactgctattaccgacattcgcgcaggggtgagctttgtccatgagaaggggcggatgcacggcgacgctagatctccagcgaggaattgaagacgtcccgaggtacatcccattatggcgcggccacagaaacgttccccgctccatggtgaagctccctggctggtccccgatgattcgacgtaagcttgaccgcgaattagccatggcggccgctgcgggtcctttccctaactctacacggtgacttggtgctcgatgtcacgcggcgaagggaaagagggggatgggatttggcgctgctttttatgctctccacgaaggtcggttgagacgcctgccctagattccacgtcaacggcgtgcgtccgccatgcacggtgaagtcgttagggaagggagcgaactgacggcatggccccaccggtcggtgactaaggtctggcgcgccgaaggagagactggctagtgggaccgaacactcagtgaggcgtga

SEQ ID NO: 170316 - DNA, 796 bp, Zea Mays
gatctccaggatatcgatggtgttatcctagatttccacctgctattctagagtcatgatgcactggttcatctgttccacttgtaggtctttttccaccaatttcgacgacaaatcgactacgaagtcctcccggttgtcgagggtgatctttgtagcctgagcgagcccagtgaggtgtgcatggcatcactctgcaaggtctgtaggcggtacagtgcgctcatgcactggacggttatcctcccaacctggttgggatgcatggcccacacgttcttcacatgactcactctgttgcaccacattgggtcatccctcttctcggcgaggaagagtccaagtgggtgcatcatcatctctaggggatgatatctgtagaaggttgtcatggcttttaacactgtggcctcagtggtgtcgtccgccctgaacccgacagtctcggaatcaagggaacaccacataggctacagagggtgagactccagggtcagccaaaccctacaacgtggcacccgatgctcctcgtatacctgcaccgtatatagagggggtgtagggtatccggtggagcagagcacctcccataagatagatggaaagcccttgtgggaaaggtagtcaaaactgaagcgagtgtctcctccattggtgagggtgggtgaagtcaattgtgaaagagggttagatgtaagtgctaaggtagcggtaaggagataagtgtgcttaagttttaaggtggatcaacttaggtttatctattccaactcatttcttgctaccctttttttaa

SEQ ID NO: 170317 - DNA, 278 bp, Zea Mays
caaaagtcacctaagggtgcagccggaataataggtgcgcaaaatcgaagtcttttccaaaagactctccgtgcagaagtcgcctacgagcgcggccggatcaacgaaggcgtgcagccttatcatacaaattatggttacatacacacagcgagggcatcatacattacattggcttaaccttcgggatgatacccatctccctgtagttgaacaacattatccttaattcctcaccctcaaaaatatttcgtagctccccctcacctacactcacc

SEQ ID NO: 170318 - DNA, 1012 bp, Zea Mays
gtcaactttgcgtagatgaccctggtaaagaatctctagccactattcattatctctctgacattctcacttaggccccttcacttctgtttcttcgcagacctaggtccccgacggcgaacgacggtgagcacaccctccgggacacgctacgactgatgccctaactcggtcaatacttatttccacccctggcgactctaatccgaccatcaattgcaccattccggccagagtctttctgcccacgacgatggcaaaacccgaggggaaatcgaggtgttcctggcgatctagcgtggtctagatcaattggttgggccgagaagcatccttagcatgcaagggtgctgaaacgagggtaaggaggatgtgaacggacctggagacggtggtccacgacgcggtggttcacgtcggcgcggagaaccgaattgggggaagtttgaaattcgcgagctacggtggctaatcagaggcgatgactggttttctagatgcataacatcctaacagagctagccgaatgctcaatttatagtggttatcagcggtggcacccaattttgagaagatgcgctcgcggccgaggagggatggagttcactagcgcaagctgtcgtggctttcactgaggtaatgacttcggcgatagactggctatctactgcggtctgttgcgacgtggtgaaacggctgacagtgtggcatgaccgtgaggaacgacggcacgacggcgatggtcgcgcggccacgtcgcggcgcaagtggacacggtgacagagcgaccacaatgtcccatcttcatctcttgccaaagatctttcaccccgcgaatttatccgcgcgccaccgagaacgaatcgcagcgtcggcgcgaatccaagcgcgggagtcaccggcggcgaggttcagtgcaccagcgatcttttgtaggtactgtaccatagcgatctccatcagagcatctgacagagcaatttgagggatgattttctccaatttttatgta

SEQ ID NO: 170319 - DNA, 490 bp, Zea Mays
gcttctgccggtgttcaaaggcctgtttggtcgccttagcgtgtagatctcagcaaaaatcccgtgtaaggtatcttctctgcaccatatcctatcttttccatgtgagttccaaacaaagatatgatcggggttgagagatattgtggtgtgaagttggctctgtccgagctgtctagcccgagacaaaaactatgtcaagtcgtgccaaacgacttagggtgggattgaaatttttctagggtgttctaggggtctttaggcgccattttgttaattgggccctatggttttgaggtttggaaaaatgtgaacatgtttgatctttgaaagagggctggttttgaaagtgagaaaaatctgatttttcttttatgccctttactttggtgaccttttttggggtttttctgaaacctttgtggggtcactctcttactattttttgtagggtattaagtgtactacaacttttataattagcccaagt

SEQ ID NO: 170320 - DNA, 401 bp, Zea Mays
gctaagaatcttctccgctaggatggcgtgaaggataactttgagcttttccaggagacttgtcgacagttggaagacatgtttttaaagaaaagctaaagaagctcaaagtcgcaacaaatgttgaaggcagatgcgggggacagatatcccccgggtccactagaaggctagaagacctcgcgaaaggctttgggctcgatatttcgcaaggccatcccttcgtgggcctggggaggaacgtctggcgaagtggatcgacgcaagatcggatcaactcaagcctagacgacccaacggatttgagcgacatccacagcagtaacccgactttcccgcgctgcgtcctcaagcgtcggaactgaatggcgataagtcggcagaattataggaagataggt

SEQ ID NO: 170321 - DNA, 450 bp, Zea Mays
cttcctcgggaaacacagactgctcgttgtctacgtaaagtaatcattcacactatgcacttgggaaataacaaacaaaagcaatataccaaacatatgcagcagagagatcacaagttcataatagaaaagggattggtactctggtattccctaggtctagggtagaggactatacaaagtggttcattatccactaatcaggtttaagtcagtggtggggttaaatcattacataattttaagttcctaaacttaggtgcttaagtccataaacttaggtgctccaacttttattaaagtctactatcttcaatttatctcaaatagggttccaataaccttaatcttatcctaatgatcaactattagttgggacataaaaacagcagggaaacattggttaaataggtagacaaaaatactatgagcattttgcaatttgaagca

SEQ ID NO: 170322 - DNA, 441 bp, Zea Mays
ataaaagtgcacgggctcttttgaaaaacagtcgtagcgaaggggtacgaggagaccagagtcgttggattataatccgagggtccggattagatcttcatcacttatgaagcggtatgacacgctaaccgtaggatcaaagatcgaccgtccagatttttaaacactaagccccattcacatccgtccgatctgagatccacgtataggatgtgatttccccgaagcagtctcagggatctaatcccgaccgatcagaccgagatcgatggctcggatacactccggacgaccaggtacgctcaccaaatcccggtcgctagcttctcatccatcgcccaaccaacgccccgcgcgtttcttctccctttcagccaggaacggtggcggcgccagataccgagcggtggcgaacccgccggagctcggctccgagccaac

SEQ ID NO: 170323 - DNA, 453 bp, Zea Mays
tgcatcagagacagagctctttctgggacagaggcaccctgtgatctcagctgaccagccatctcgtcaaccaaagcctggtattgaaaacaaatgagtgtaaagacaatatttcgcccggagtatagccagatcaggaaaagccaaattacctgaagattggagaagaatgaaggaagccccaaatcatgagaagccagttggtgactcgatgagggaatatcagccgaggcaatctgaagagcatcattgggaatcaactcaacatcaccagcaggaatcaaaactctagcgtcaggtgtgccggtctctaagacgacttcctgatttgaatcacatgctgccgccatgcaatcagaatgtggaggagaagacccgacatggacatccatggaggtatgagaaggggagcccgctcggacaccctcgggggctgggtcacagcctgcatta

SEQ ID NO: 170324 - DNA, 915 bp, Zea Mays
ccatagagaccgatgttggcgacaagaatgaggttgatgttgatgacacccggggcgaggtgtagcttgttttaatccatttttttgtaaagaattatcatgggtgttagtgttgggtgactatggtataaaaacaatgcttttgtgttgattcctctggtaaaggaggaaacttttgaggacatcttatgcattactcccttagcatgtcaaagtatttctgcattggattcctcgattgatgatgatgacttagatatttttctggagttggatgtttaatcctcctcaaaggacatagattttttttgttgtgatggatattgcagcattagacgactctggagtagttggaggtccctccgagggtgtaggtagcagagctacccatggcggccaagggctcccttgggctggtgcacaaaactggtggtagttcaccaattgtgggtggtggggccggtctgacgacccgcagacgaggcgacacgcaacgttgagggctcttggagttgattgatcccatttctggctggacattgcccatggacgcgagcgaccttggtgaggtggacatcaaaacttgtcaagatgtcttgacgggggcccttagaggtgaatgtgccttggattgggttgataagtctgtgtttgagttttttgacaaaggcagggagcttgagatcatgtttcataactatagagaggctggacttattcggaaggaggagccccctagcccctgactactatttgtaacaggtatgtaatatcgactttgacgatgttgcagcctttgctattgtatcatattgttctgagtttgctccatgaatagcgtgtacctggcagttgtgccctatcggaaatttaagagcggaatgttgccctctcatcctttgtcgatggggcaca

SEQ ID NO: 170325 - DNA, 549 bp, Zea Mays
actttgtaaagatcccaccctgccactctacaatttatcaccagcacatctgcatggggcacactgcagaggtcgacgtcccttgcattgaaggtaagcggcacatgggaccattttgtttgaacgatgggcccggtgcgggctacatggtttacccttcggtaatggtatttcttttgtcgttttgtttcgaacttagagctagaccctctggatatcatgtggattactcccctgaagggttgatcagcgaagtcttcttgctttggtagtggtaggggttggtttggatgctgaggtggtggaggcgacaacactaggatttcttggtgttgcaggcactgttgttgaggaaataggttgtggttttgctgctgggggtaatagtggtgttcgttttgaaattgatgttggttgtattgatggggttggtaagtgtgagcggtgactctttggttgtcagttggtagggtcctgaccattcggtcctttgttgctttagtctctgggaagtacctggttgggtgtgatgagtcttcgtcgtggaag

SEQ ID NO: 170326 - DNA, 1087 bp, Zea Mays
aaacggttggcctggattagatgcgaacgattcaaattagatcagcgcggctgcgaatcggtatgccaccatggcccctggatccagatccgacgatcgtagtttaatgaaatctagatcagatctccatcgcccgattcccccgcaacgacccagattcgctcacgtgaaagggtatcccactgtctaatctcagccgttcagagatccatcaacggccgaagtgattctcccccaaccgaaacagacgacggcggcgccgccatgacctcacggcggagagtccaccggagaatcccgcaagcggtgtggatgcacagattcccatgccctctagcgtacgggttaccccatgccatagccaatgcggtggggaccctcacaccaccagcaacccgtcgactgcacccacccacggcacgcggcagatttctagccctgggcgaacaattaacggagcacaggagttcgattcggagctaagacgagcgcaaaagaaagagtacacctagagaggttaatggaggtactcaccagccgacttgaggtatcggggatggccgaccacgaggtagcgacggtgaggaccccgcggcggtggaattcttccgccaggcggctcccggtgagggatttggggacggcgcgggcgagcacaggtgcgagggggtcacggggattcctatttaaccctcgaagtccaagccggggaggagagggaggtcttcaccccattccgcggcgctcggcggcaatcccgcgcggttcggttgcgccggggaagatagagctgcgttcggttgaggtgggagactgacaaggcggccccacgcggcagtgagtgtgtgcgcgcaaacgataggattgaacagagactgacccgccagccccacgtagcagctacacacggagcgcgtgatgcggtgtgagtatggctagcgggccctgggtgcagagagcgcgagcgcgcggtggaggagccgtctgggccgcgcgggcgtgattcggggttgggccgaattggcacctagtggcccaattagggttatactctttttcctttttatatttcctattttcttttctt

SEQ ID NO: 170327 - DNA, 533 bp, Zea Mays
ctcaaagctcatggataggcgtcagcagcaaacttactagaaacagctgctacaaacccttgctagtccaccatgccatgttgtaatttgtagcacttccaccattgagtggcacatagttctaagttcatagcagccactgacacccataatgactctgctgccttatacataacaaaatactcctcgcactggtcgatccaaaccactggatctccggtagaaatttttgaaaaggtagcttaggtaatacctgtcattgtcgattctccgtctacatctccatattaggttcctgatcaatcaattcagtcctcctccctctatgcgacctccaacatcaggtggcactccttgcatgttcacatcagagttcctaattagtcgatttagtccacctccctctgtgtgatctctagcattagagggtactcattgcatttctctctcatcccttccaccacttgcaccaccagacgtttatccgaattccttccccaactcttccaacctcatttgggccacaaccttcc

SEQ ID NO: 170328 - DNA, 952 bp, Zea Mays
accgtccgatcttcaatctgcggctgtgactagattttgtataatccgaacgggtatgcaatatggacgatctgatcccgatcagacagttgcggcatgttgcgcgaaagggtatctcccggatgtaatcagagccgcacgattccgatctaatggctacgacttaatgggacgcgatctgctttgagccataggatgccaatccaacgataccaatccaaacaccccaagtggtaagctaatcctggccacccattaatggatccgctgccccacgttgttcttcttcgacccgatcatcagagcggcggtgcgcgcacaacagacagtggagccgccccggcaaacaccgacccaggcgagcccgtgcacggaaacgagcacaaagagttgctacacaatgcgacatcatagagaaaacagatccagggattcctaccgggtcttgatgcagcggtggatctggccacagtgcaaggtggattcatgacgctccttaactccgatgagcaattctaattgcccctggccgtgatctcccccgaatacgcgacacgcggcactcacggttgtcgatgaagcccccaatccaaacaccaggaacgaaacgatgtcgaagatgaagcaccccaacggcggcaattcttcctccctcggcctctctgtaccccagatggatcgtgattctctctctcctcacgctgatgtcttcatggctcccataccaggtgcccgtacaaggtggatgagggcacgaccggttttatataaggctggagcagggcggtgtcgaagattgaatcacaatcgattccaagcgcagtttgcggaacagaatccccaagcggactccaatgttcggcaaaacccacgtgatggcaacgggttgagagaagcaggtgcccagtgtgacaggcggccgaggaaggcagagttccatgcagaggttgtt

SEQ ID NO: 170329 - DNA, 394 bp, Zea Mays
tttctgcaaaactgccccaatacccgatccacttgcgtcagtttccactacgaattgttgtgaaaaatctggtatggagagaaccggtgcttgcaccaatgctgccttcagagcctcaaaggctttctgagcttcatcattccacacaaaaatttggtccttcttgagcaggttagtaagaggtttgctgattatgccgtagtgagcgacaaatcgacgatagtacccggccatgccgagaaaactcctcacctccttgacgttgttgggaatgtgccagtctcgaataacctgcaccttttctgggtcggtggcaatgccttttgcactgatgaggtgtcccaagaactcaagggtggtctgtgcaaaccgacacttcgatagtttcagtttc

SEQ ID NO: 170330 - DNA, 354 bp, Zea Mays
tatggggtagacattggatttttgcacattatttttgagaccagaggcactgccaaatagctgcaagatatcaagagtgatggagatttcatccaccgtagggtgtaagaagagggctacatcatctgcgtaaatggagactctgtgtagctgtcttcttgctgctagctgctgcaataaacctgcctcttctgcctttataaataggtgtccaaggacatccatgaccaatatgaatagcatcggtgaaaggggatccccttgtctaagccctcttctatgctgaatttgttgtccaggaaacccattgagcatgacttgtgtggtggatgaagcaaggagaccacaaaccat

SEQ ID NO: 170331 - DNA, 423 bp, Zea Mays
gggaagtataagtgctttcgccaaggtaagaatggggtattgtggtttgaagacagattggtggttcctaaaaacaaagacctcaagaagaaaattttggataaggctcatctctctaaattctccatgcatccgggaagcaccaagatgtaccatgatctgaagcccctatattggtggacaaggatgaagagggaaatagcccaatacatattggaatgtgacacatgctagaggataaaggcaagccacttaaaatcagccggtgccttcagcccctatcaataccttcatggaaatgggatgacatcagcatggatttcattgtgggtctgcccaacacctctcggcatcatgattcgatttgggtcattgtggaccgattgacgaaagtggcacattttcttccgatgcacgccaccg

SEQ ID NO: 170332 - DNA, 348 bp, Zea Mays
gacgaggaacgtggtgaaggcactggcgtggggagttgctgcgagatggctgcacactaagggattgaggatttgaaggagcgaagattgccaatgtcatgtgtcgcatgcgcgcgcgctggttgcatgagccacgcaccactcgggggaggggaagaacatgggggcgtgcgggagcctgggcggctgggcccgctgagcggcagctgaaaccgtccctacgcttggacagctccgagcgcacatggctcgcgtgagcgcaggcctgaccatcgagcaggccaaccgcaacctccttttcttctttttatttattttttatatctatttcctgctattaaatttatt

SEQ ID NO: 170333 - DNA, 674 bp, Zea Mays
gggagggcagcgttttcactcagtatcacaacacgagagtgagcccagcaaaaatgttacattagctccgcctttggaataagacccgcctctaggaaattaaacaacatcatccttaactcttcgccctcaaatagattccgcaagtccccctccccaatacacgtcccggacatcgaggacagtagatcgcgttgactaccacgatctagtcaaagatgggaccgctccatacccatccaccgacgtctcccacttcgtgacatcccgctaatgctctgtttcgacaccacttttcgcctgcgcgggtcttcggctatcaccctggccggggtggcagacacttcgcgcgcatcaggttgcggcggagactccgatgcggccaaatccaacgcagcaaagtagtctaaatcctcctcagaggactcctcaatccacgaaaaagggctcccaaaattatcctcgtccgaagaccacgactcagtttcagaaccctcagacacatttccattaaaagacgttgcattcgcaaccgtcaaaatattagtatcaacatcatcgggggttgcttgcgcaggcccggccgtcgaaacctacgcaacaaccgacctttagtatcacaaagagaaacccaaaacccaacaaccctaacatgtcccttccacctgcgccgg

SEQ ID NO: 170334 - DNA, 481 bp, Zea Mays
cccgtattcccgcagtagcgacactcatctttggtgatcgaatgcccaccgtgaccgaatcttccttcgccatgacgacctccattcctgccgcgcccgtgcccatgcctgcgcctgcggctacgaccgtgtgcttggtcattgcctgacgccaaggcacctccggttgaactggatccgccatttcccacgatcttgaggcaagaagtgatcctagagatcagtttgtcctcggtcagatttagtcggggcagcacgacaccgtgttcacgcaccagtctctcctcgaccgccttcaaatgcccaacatgttcgtcgactgagatttctctcaaatcgagcaacgtctcaattgacaccgcaatctggtcgaaacgagacgtatgagagggcctgcaggaacttgcaaacaacctcctcctcggtgtactcgttgtcgagcaccaccagctctcctgtgatctggccaatgcgcgcgctg

SEQ ID NO: 170335 - DNA, 479 bp, Zea Mays
gcagtgaagcaagtcatgcatgcccggtgattgccggagagctgctacggtgaaagccactaaccccaagtgccagtaacattcttcctctccgaccgccagcgcatcgtcgtgaaaatggacgccaccgctcaatcctgctataaattgccgaccccgcctgctccgctaggtagttgtgcaaccagtgaagcaacccgtgcctcgaatcatcccctagaactccccaatttgggatttcccccaaatcactcaagaacaccgagcggtttgacctcgccctggccagcgcatctcaggttcgttcatgtcctctgagtcctcgtttcagtatccttggatgctcctgatactctctgacccatccaattgagctagagtccctaggattgccgggaacgtgttcggttacccgtgcccgtggtgtctgctgtcaccgtgaacagagcgtgttagggtcccgttaatgaaattagttg

SEQ ID NO: 170336 - DNA, 549 bp, Zea Mays
gaccaaataacacacaacaggtgccattcttaggtgggtttaggacctatcctcttcctattaggatttgtaattgtgaattggttaataacactgcacactgcacatgtttgccatgcatgacgctgatatatgtttttccattagctttttgaaaatgagtgacgatcgaaaaagggttatgtatgatggattcaatagggacactctggggcactctaatgcatggattaaggttgctgataaattcgtggtgcgtgcatttgctggggagcctcgtgtggtgaaatgttcgtgtactaggtgtcgaaacatgacctgattagacaagtttgacctctccattcatttttgcaaatatggctttaagccacactatctgctatagcgcgagcatggagaggtggatgcccttccggagacgaacacagacgaggacatagaccgaatggaggacatgctagatgacatccgacatgagtatccaacactagagaccgactgaccccgccggaggaagtgcagtagttttacaagttgttagaagcc

SEQ ID NO: 170337 - DNA, 277 bp, Zea Mays
tagccttggcatgttcacagccagctttttctagtagtgatacagcccaccgagcccctacgcacgcatagaaatctcctctgccagttaggactccgtcaaatgcattgactttaccctcaatccacttgattacaccctcgggtcaccacgaatgaaattttgctcagccgagaatacaccaacactaacaaaagcatttttcaacttgtttgagcattgcatagcaacattatagcactcctccttcgcctgacgaagctcctcaacattcttc

SEQ ID NO: 170338 - DNA, 522 bp, Zea Mays
cggaaaggttgatcggcgaagtcttcttgtttgggtactggtgggggtggtggtggattttggtgatgtggtggtggaggaagggcttggatctcttggtgttgctggtacatatggttttgttggtgggtgtgaaattgttcattgtgcaattgtcgctggtggtattgttgggggtggtaggtgtgtgcaacgactcgttggttgtcagctggttgatttctggccatcctgtctttggtggctttggtttcagggcagtccctggtgggctgcacggaatcttcaccgtgaaaaggcagtagaaccttcgcggttgtgggactcgacctttacctctgcctttggggttgctgccacaaccctgttgtgtggggtactcttggcgacgagcagtgtctccagcctgctactgattggcaatggtgttcacttggggctggttacggtttggctggccggagtcggactgcgccggtctaacccatgtcctactggactgcggggtgtccttgggttttg

SEQ ID NO: 170339 - DNA, 633 bp, Zea Mays
cttggggcctacacaagggccgaagatgatgcaatggcattatccttcgaaggccgaggcaagaaaagattgaatagagtttttgatgtcataggtttcgtataccctgattattgctatccctcgtgaaagcagggaaagaaaaggaaaattgccgcttcggccatctctgctttgccgaagggcaaaaggattaaggtcttaactcaccggctgagaaacattgagacggccatagtgccgaagcttggtgaagggacatccttcgctgctgccgaagcagagcaacctgctcccaccatccctggggaaacctaactaagttgccgaagattcctgaagccggtctagccgaaacaacagaacatgatgccgaagccaaagataaggcggtcaaagagctagagccaaagctgccaaaaatcttgagcccgccagcagaggcggaattgccgaatgttgcaaaggctcccacaacaactcccaagaggagaagaatggctagcgtactagacgctgtcatggagacaacaagggcgctgactcctgcccctgtgaaaaaggttgccgaaactgctatgactcgtgttgaaaccaaagttgtaccctcagtgcccacagggacagagccag

SEQ ID NO: 170340 - DNA, 492 bp, Zea Mays
cacccattcaaattgattcagccggtggtaaagttcgagccgatagtgtttgcttgaatgtaagtgtggaaataagggggatagagtttcccgctaacctcatagtaatgggtactcagggaatagatgtcatcctagggatgaattggctagataagtactaagaaattatcagttgtgacaagaggacaattaagttggtgtccccactaggagaagaagtggtggccgagttagtctcacctaagccaaggaaaggaggttgtcatcagatggatattgatagcaaggagccagattcactcgagactatcaaggttgtgtcagagtttccggatgtgttcccaaaagatttaccaggtatgccacctaagcggaaagttgagtttgccatagagtttcttcctggcaccgcccccatttctaaaagagcttacagggtatctagactcgagttggttgagctcaagaagcaaatagatgagctgtcag

SEQ ID NO: 170341 - DNA, 653 bp, Zea Mays
gctaacattttatatttgtagaatgttctggactcggtgtcagctcagctgaaggcatgtggtgctcccattcctgatcagattttatcttggttgcaatggaaccctcttcttcttcagaaacaaatagatgacttgaaagcttcgaatgtcggttagtaggttgataactcttttggtgtttgttgcttctttgcttacaccatggatcattttcacttgctttcccagcactgatacgatggtattctgatgctgaagagaggtgcacacagagtaaagatgatctagatcaggtttccacattccttgatggtgcgtgagccatgaattcttcctttaatgcccaacttgattcagaaaaaagagcccacggggtaacctctttgagtgctcatagtatcttatgccgtgttttggcttggatatttagtactcttcttgtctgttggaggagatgcagaaacttcttgattccctggatagtgtagataaattgtaccacgatgccagcgtctctctcaccactttggagaggagtcaccattttactatgtcagagctcaatttccatagagacgagttgaagacttcccagaatgaggtgtcacggcttaacaggttgttagcttcaagatattccgttatcagag

SEQ ID NO: 170342 - DNA, 452 bp, Zea Mays
gtgcctgtcacctttaaatgactggccttgaccctttggcaagtgtcgcattcagatatatacttagcaatttccctcttcattctggtccaccagtacaaggatctgagatcatgatacatcttgttactgccggggtgcatggaaaattttgaaaggtgagcttcatccaatattttatttctaagcttggggttcttgggaacaaccaattggtctccaaaccatagaattcctttgttgtcctgacggaagcacttgtatttgtccaccctttgtttgatcatttccttaatgacttgaacacccttgttaccaatctgtgccatgactattttctcatgtaaggtgggctccactgaaatataacttaaagcaccggaggaaacaacttctatgttcagcttgcacaactcatcacacagggtggttatttttgcatccatattcac

SEQ ID NO: 170343 - DNA, 809 bp, Zea Mays
tataaagagtcttttagagttgctctcctccaatgcattttttcgataaagagcatttcattaaaactcgacaggtagcatgatacaaacttacgagttttaaacgcccagtctatgcatgactagggtgcacacgtcccaaaaaaagttaaaggagaagaacattccaaaagaaacatgagtagactatgaagagctcatccggagactatgttgccatctatgtcaggtaaaaatatccctcgctgcttgctccaaccgtgtacacacctctataaacaactctttgttctccatacgctgtaatgatagccacaaacgaaacaaaaaagtacaccgataaattacatgcaaaagagaagaaattttaccactaaaaaccaaatcatttctacatagccaaagcgaccatatcaagaatcaagtcaaccgctcccccctaatgaggatcctatacttattatatatccctcggagccgggttgccaaacatatagaacgagcaagttggaatccatttgcatgattgaccatatagaacgagcaaaactgacatatagattgtctttttatcctctacatactcttaaatgctagaactccctaccgggtgcctatatatacatgaacgagctcttgcttgaatcttgcgacggtagctcatcagcagaacatggacgacgatcgacgaaaggtagaccctaccctgcctgtcgtccttgcctgctgtgcctatatatatgaactaactagctcttgcttccaccatcggcagctgcttgatctctcgcctctcgctctcgtccaac

SEQ ID NO: 170344 - DNA, 755 bp, Zea Mays
gtttaggtggatctgtcatggttcttatgtggtgtaatgtcctattgataagcgagaaacggaggagaggaacaaacattatgtgttttcatttggctataaaaggaaggacatgcgatgcaaaaagaataggctaagacatatgccgagactcttaaattttcaaagcaatacaactcatagttttcatgtaaatttccttcgtctcccttcgctagaaaacgatcctaaaggtgccgaagctttgttgtctttccttcagctcccagttatcttcaagtttgtagatcgtctgaagcttcaactgcactccatccaaatttgtttactacaactcatatataatctaacgagcttaaacttttactacaaccagtggcggagcgcaaacagataataaggtatggcagtggagacgctcaggcaatggagctgttcagactcgcgtcgtcgagtggtgctgtggagttgcgcgtgggctgaggcagccaggcagggcactcacaccgtcgggcggggctgcagagctgcgcatgacgcggaggtagaagcgtcgtcaggtggggccgcggagctgagcacataggcggagccgggctcggtgaggtagggtgcgagcgttccggccccatgagcacgaggacccatggcgaacaggacaaggaggcatggagggaggcggcgagcgcgaagacgatgaccgtgcggagcagcttgaacgcggagccgccgacataaacgcgcttcttcatcga

SEQ ID NO: 170345 - DNA, 382 bp, Zea Mays
gaattcttgcaccagatccctagtaccaatgtgctctgcaacaactcgaaattcgcccagtgcaacttggcatggactcttcggtttcatgtcgcaccggggcctagtctctccgaagattaattctaatgggctttgaaccagcttctcctttttctcatcaactttgacataaaaccattcaatcttccagccagctagccatttggtacgatagctgataactggagacttcgcatctttgcgataagcaaaattgtagcagccgaaattctcgtgcagcccatcttctctagcttttatctgataatgaagctcatgtgcccggcagaagccttcggcaagcggttctgcccctggcttcggagagcccagatgtaga

SEQ ID NO: 170346 - DNA, 643 bp, Zea Mays
atgcactcggctttgttccttaaaacccgggtgttacatccggtcggtaacttgtcacgtaaaaaatgaagaaaaacacttctgaagatgctctgtcagaacaaatgaagaagatcctgatggtacagtagtgaaaagatcttcagattcagtgtatctcaccgccggtgaccttacgccgcgattgacgccagtcgtcgcgattcgtgcgccctggtttgcagataacggctgacggtgaaagatctcaacgcagggaagggttgaagccttatcaccggactattcaccgtgccacttgccgcgcgattgactgaggtgtcctcgtcggagttcgccgcccttcgtagccgcgccacgtacttagaagagttaccacgttgtctatccatcgcctgagacattgccctggtgaacgccacggtagttcgcgccggtgacacaccccctctcttcggccaccagtctccccttcaaaattcggaaccaccgctctcggacactataaattgagtgcgctgctagctccgctaggttgttacgaagccagagcacccacccctgccctcgattagccaccatagccagaatttcgtttttccccaaatctgttgtccgcaccaccgtgagacgtcgcgctgtg

SEQ ID NO: 170347 - DNA, 687 bp, Zea Mays
taaggttgaagatccactcccaatctcagtgagcatggcagcggagaagaaggccatcatcttttttgaaaattgcataggtagcgaggaccatggtttatcaggttcagttttaccgagccatagccatctcaatctcaaagcccatcccaaatctttgagacttgaaataccaaggccgccaagctcaagaggtctacaaactctgccccaagccactaaacaatgccctcctcttgcatctttgcttccacgccaaagaaagccttttctgatcttgtcaatagccttgagagctcctgggggtaattctactgccatggcaaaatagatgatcatgtctgtcatcacatactgcacctgtactcttctcccagccctagacattagatcggctttccagccagataattggtcagccactctgtcaataatgggttgcacctaggttctggagagtttttttaatgacagaggaagtccgagatatttacagggaaaggatgagaactcacatggaagctgtctatgtagtgttatcaattcctcctcaccacatcatataggataaacactactcttctgaatattagttttcagacctgatgcttctccaaatagcttcaaaatattgatcatagtatggatttcactctccctaggttgcagaaaaagtaccacgtcatc

SEQ ID NO: 170348 - DNA, 651 bp, Zea Mays
cggttctccaacaacagcagggatgacgaggccttgtcgacggcgtgtggtgctgcgaactctgggagccagatctgggagcggttgagagtttgcggtgggtggccacggcgctgtcgaactgagcagcaagcaacgagcaagggagcacgcgacgtggggaatctagtggtggtcttctccgacggcgagggggtgcggaagccgggtcggctgcggcgcgagctcgctggacggacggaggaaggtgaacggcggcagcgtgcgtacagactacataggagcggcatgccacaggtgagtgcgagagaacgagcagccggggtggggaaagaggtgagcccggccatggcttttatagccaaggaggagggagcgaaggggcgtcggattgaagagcatcaagaccattaatggtgctttaactgtgtgggggaagaaacggtcgcgagtaacggcatggcgtgatggagaggcgaatggtcatgggggcacagctgtagttctctactgcagcagctgggcaggcgcggacaggggaggcgatgagaccgagtggtgcacgagcgacgacggcgcaacgttactggcgagcagacacacggatgaacacgagctggagaagcatcacgtgaggaagaagaaagaaat

SEQ ID NO: 170349 - DNA, 562 bp, Zea Mays
ctagggcgcaacatcttcgcctcacgtcgtgggtccacaagccgtagcagcgccttctgctttttttgtgtggactcctggtggtccttatccacaacagctattacaacaacgccaatgtatcttccgtaaggaaaaaaatttaaaattctgagccaaacaagacataaaataatcttcatcggaagccatgggaatgggatcttttttatgccactcaccccggtcaccctcatcattcacaaaaatgttttccagaggtcgggcgaagtcatgacctcccccggcttggcacatgtctccgctaattcctcaacaaatttgtctgaggtccctgcagcccctgatgctttcgtcgcatccttcgccataacttcaacctttttcttttttcacgctgctgtaaccacaaccttccctttagagcagccttcgtccacccgtgttgccactctcttttttctttgatcatccccagcttcagtagagtcctcctcagggtacgggttgtaccgaagaccattcaactcaaatacaaggataaacctgacgttcgaaatgc

SEQ ID NO: 170350 - DNA, 388 bp, Zea Mays
ggtagcttataatcatgttttagctattagtaagaaagttggggtaagaaagatcaagataagtacaagaaaggaagattttgggaagggaagactccatcatgcatagagggtctcgattcatctgatgatccagcttggtctttgaagacttgaattggtgcttatccttctttgacgtggttggtcttctttggcctttatttcttggagttgtcatccgagttaaggacatatggctaaggatatatagttaggaataccggggtacacgaggtaggtaggttcgaacagagtttactttgcttttgggatatctggattaggcaacctatgatgtaggttaggttgttgtttacggtcgagttagtccaaggtattaatttag

SEQ ID NO: 170351 - DNA, 569 bp, Zea Mays
gcccctcttgtccgaaatatccttctccattctgagatatccattctcgccccaagtcgtgccccatgaattcttcatcagccagtacttagtaccatcactggtctttccataaccaatggctgcaatcccatgatctaagtcagtaccgcatgagccagtcatcacaccactagagtagaattggaacgtcatgtctccaccatccactgccaccgacacaggctggtttgccacggccttcatcaaggcagcctcatcatttgctggcacatcctcgtagccctttatggttgcggcactatttgatccactcttacacttgccatctgcagcagtgtaaggatagctggactccgtggttaggccaccgttattgatgatgaacttgaaagcatcgtccatcaaaccaccctcacaaccttgatcctcgccatggacatcgcaatccactaactcttgttctgcaagagagacgagcttaccggtgctgattttcacgatgccttcggtggcagccacggctgagaacgcccagcagcaacctgcaattgattattatgtctcga

SEQ ID NO: 170352 - DNA, 477 bp, Zea Mays
tataaacagtagagttatattcgttaggaatattttagacacttaaaattttgaagataaaaaacatgagtttaaatttgaagtaggattgaaaggagagtacaaaagataaaagaaaaaaagggtagcactgttgcttgggccattttccctggccggcccaaattccctctcacccgcgtggcccaggaagccataacactcctgcagcctcttacgcgtgggccccatgtcgtcagcctctcatccagtgcaccacggaatcaagcggtgctcttactagctgacgcgcaggtctcgctgaccgactttcccgggtcacctcctacctcacgctcggactcactgctggcaacgagaaccgaggaaaccgcgcacgttgttggcctgaggtcgatctggccaactcgacttcgtccctgggctataaaagcaggacccttgggtccttctcgcccaacaaatcaagaactgtac

SEQ ID NO: 170353 - DNA, 731 bp, Zea Mays
tattcatcggagaaaggatacctagctcagatggaagtgaatcactggtgttcaccatgagggactggacgacaactataggtggacctccgccgtgggcgcatgtggtgtgccggtgaatcggcggtggtcctctagagcggcagattggcggctgggcgagggcgaccaccatatgacggcttggcggtagatcgactatgctcctccaacttggccatgggcactgggcagtgagcctctgttgtgggtgcctgtgcggtggcttgttgccgtgtaaccacgaccatcaccatggatggtggttcctatgacgctaggattggggaagatactggggaagcaggaggctcagggctggcggctgcgagtctgcgaggggaacaggagtaggtgattcaggttaggtcatcgctatagtcagggaggaagatcgagcctgtgttctattattataaatgttcctatactagcaacacatattgttgtagcgtcctaattaatcaatacattcccatagcaacacatattaagtgttgtcgcatcctatttaaacaatggatggtgcttgcaacatatattaaatgttgccaccaccctaataacttaacaaatgatgcttgcaacgcatatgaagcgttgcccgctaatttcttacaacacataaaaccatgtgttgtggatgcgttgctataggggagtttgtgttgtagtggtcgagcatctcgcgt

SEQ ID NO: 170354 - DNA, 559 bp, Zea Mays
tgcttggcgctgcggccatttcttcctctatagacacatctttaataacatctgatatgagtctatcaatatgtggcattgttgtttcggcctcatcagtgtttttgacttcggcagcagcagcagcttcgacagcagcatcaactttggcacccgcagtagttactattttagttgctgaggttgaaggtggtgtttgcttgacggcttgcatcatgttaactatttgtcgtttcttttgctcttcaacatgttgttctttcttctgaaaaaattgtgtcagttctgatcacagaggacttagcagcttgaagtgcggggaatcagtcattacctttaaaatttctgctacttcggtaacagagggcgttgaaggagcttcttctcctctctcatccaccttcggctcagcagagggcgttatgtcaagctttcgctttttagaaattgcctctttcgtctcaggagctgattttgctttcttcaaaattttctcatcttcctttactagccgagcagcttgcctactcaggatgctgacaatccttttccttttcac

SEQ ID NO: 170355 - DNA, 430 bp, Zea Mays
gcactacgtgccgggacgacggtcgtagcgcggcacgccttcatgccgggctggcaaacgacactattaaatgggtcgtgcctcatgccagcccattagacatggtccatttggccatctatatccctcccgcgtactcctcggacccttgatgacctaaaaacagatcgagcgtcggctccttgctcatctgtagccgccgtgcgcccgtgtggatcctgtccccgcacatcttgtttgtccctgcgagtgtcgccacccagcctacccctgcgcattcgcatccatccctacaagtgtcgcccttgcgcattcgcgtccatccttgcgagcgtcgccaccgcccagcccctgcttcttccaccctcgcgctgcagcccctactaatccgcgccgcccctgtcgccctgctcatccgtggctgccgccc

SEQ ID NO: 170356 - DNA, 510 bp, Zea Mays
tgcgcttgcacgcacttggggcttctggcccctagcaaaaaaagccttcgaccgactccaaggtgtcgcacgaagtctcgagggatgttgtcaggtacccaggaacggggtacccaaggtgaggactataaacctctctctggcccatttatcgaccaagttcccgcatagcaagtctacgaggcgaagcgaacgaccaagtccgcaccgagcaaaactaggaggcagggcgaatgaccaaaccacattgaaaggatccacaaggagggaacctaggccgacgttgcaggcccacgacagctgtgacgagacgcaacatcaccaaatcacgtccgagccgtacatacagtaccaaaaggtctctggaaaacacgatgggacacaccccacatgtgccaacgaatacaccatcactgactcgtggggtcagtcaaccccagtcgtagggaccttagcgctggagtctctacaatgactagcatgcccgaaagaacgcaacaaatacaccat

SEQ ID NO: 170357 - DNA, 565 bp, Zea Mays
gcgcggatcatcgtcggagaagagtttgggtagcgccatcttgcttgatcatctgctgctggaggacatcggccatcgataggaacaggctgcgggtagtgtctggaaaatggtttcccatctgccaagagcccaagacacggttgggcaactctctaggtggggtgggggttctcctgcattaacaatgtcaaacgcagcagccatgtgcaccaaacaacacactacgtgccatggatcctcctcctcccttgctatatattccattccatggctggggcggctgctagcctgctactcgatcgttcccacgtcactccacctccgcctcttctcttcatattatttttttctctcccctcttcacatcaccgtcgtcatcgtcacgcgcacgccgccccactaccgtcctcaccgccgagcaggaaccacgcattttcgttctctctccacgcgcgagacagacgacatcacattattcacgtccatggcacccacgccgccgaccagcacgaggcctcgccgccaccacacgatcctccgcccgccgctggcactcgcgctc

SEQ ID NO: 170358 - DNA, 405 bp, Zea Mays
catgggagtccttccacatcttcttgcatctttacctactaggtcgattgagacctatattcagcatcagcaagatcatttggcagcactcaaagaccaccttactgtggctcaaaacaatatgaagtactatgccgacagacatcattctcctcaagattttcatgtgggtgagcaggttttactgaagctccaaacttattctcaaaccttgattgtcaatcgaccctaccccaagctagcattttagtattatggaccttactctattatggagaagattggctaggatgcttacaagctccagttaccaccatgggctcttgtgcatccgtttttcatgtctcacaggttaaaccctttaccccaaatcgctctcccatttattccaatgagtcttagttc

SEQ ID NO: 170359 - DNA, 833 bp, Zea Mays
cgacgagcatatgccggccagataccgcaacggctggggctccagtgcgacagacacccgattggacctttcccgcacttttcccctcaatcaattttaccaacgaggctttgaatcaaccggttcacggcgacaatgcggatgatcggatggataaacgcgtttcgaacaaccgacgacatggatgaccaaattgaagcttggggaagcttcacgggttcaccagaggttatgtacacactagaatttggactgggcaagagtagaaaagtgggtcgacagagagggtgtcgcggcggcgttctacggagcagaggagtgttccggtgatgggactctggcaaacttcaattggtcggctccgagagcaataggaagctataaacaagctagaacaggaagcaatcggggagttactgacctgaggagtgctggccacggaggagttcttcacgacagcgcgaagaacagggcagaatggttttgtggactgtgtgagttcttctggtgaaattgagtcgattgctcaagtgcttgtatgcgctatgtggtgaagaagtaggattcgagctcaatttataggccgatggctggagttggatgagaatcgcggagctgtaaccgcgctggcgagctcacccgcgcgggcagagccacgacgattatccggtgaccgccgattaaccgggcaatgccaccgcaacattttaacaccacgtcgcggatgatctttatcgtggctgcagacccatccccaaccgctgtggcattcttatcgccagtgagatctttctgaagttccatgaacagtgcgccagtttcagttaaaattc

SEQ ID NO: 170360 - DNA, 876 bp, Zea Mays
tggtggagtggtaggctgtggagcgtcgaatcgatttgttggacttaagtcttcaggtcttggaacacagtacacatgtacaaggcaaaacgagaatatggatgtaagactgagttcaacggttcactctatatttctcctcctatatcccactcacgcaccacgtcagcaacttctcacccctaaatctccaccttctacagcagttccctctaaactcttcccttataccccataccaaacataaaatatcatttttcatacctattcattatgcatccattaccattttttctcaaacaaaaaaccattgttgcgcactccaaccaagggaaggggctactgtcgcagacgccacgattgttggagtattatacccttcacttgtactgttgccggtaggggatttcaaaggggagccgttgaacgttgtggggggctactatcgccgtcatagagaggagagagggcctctggcggtaaccgtagaagacaatctaatgtcaattcaaagtttgaggggcccacaagcgacatacattgattccgcgagtattatgacttagacgaacactcgtacgaccgtgtatgctatattacatagagtaacatgatatacaactgtatgtacatatagagggtgggggtcgtggaatagggggactagggcggccgcccaactcgcccctctctagcgatgtcattggtcacttaggatagttcaactagtccagagacctaccggtttgacaaagagttgatgtagattggattcacaacaacgttaggtggagcagtgttgataacatgttgagtaacgacgttgtcacagatcctaggtctggatcctaatctgtctcgtcacccatagaggca

SEQ ID NO: 170361 - DNA, 559 bp, Zea Mays
agaccatgtcgcagtgaagcacgtcatgcatgctcggtaatcgccggagagctgccacggtgaaagccactaaccccgagcgccagtaaacttcttcctctccggccgccagcgcatcgtcgtgaaattggacgccaccgctcaagcctgctataaattgccgaccccacctgctccgctaggtagttgtgcaactagtgaagcaacccgtgcctcgaatcatcccctagaactccccaatttgggatttcccccaaatcactcaagaacaccgagcggtttgacctcgccatggccagcgcatatcagatccgttcatgtcctctgagtcctcgtttcagtatccttggatgctcctgatactctctaacccatccaattgagctagagtccctaggatcaccaggaacgtgttcggttacacgtggtgtccgctgtcaccgtgaacagagcgtgttagtgtcccgttaataaaattagttgaggggaaacactcattagggcttgaattaggtttaaaccgaagaagagcatcggtcgttgcgtgaatcgaccggtg

SEQ ID NO: 170362 - DNA, 501 bp, Zea Mays
atcgagctcgcgggtctgtgcttcccgtcgccgccgtcggtagcctaggttctcgggtccccgtggtcgattaagcccatgtctgagtccgacgttgttcggggttcgtgatggtgccatcgccgtcgtttgcgtcaagccaccttggccgattgggcgctagttcgccggagcaccgcgtggcggtgttgtaggcgagtctttgtaaagaaccgaagctgaggggtttatgtgcgtttatcagtgagagtggccaacagtggatagggcctttgcttgaatgttgttggcggcagggttcctgacacaaaagcgcgcacacagagcatgggctgcccgtgatgggccagcttgccttgttacgcatgctgtctgggctaatttgggggccaggactattcagcctttttgccttttcttttaccgaaaaagttgtaaattaattcagaaatcaaagaaaaatggtaaaatcgtagaaccacctttagtaggtgtctaaaa

SEQ ID NO: 170363 - DNA, 383 bp, Zea Mays
aaccattcttccatccaggccccaggccatcttttttggaatgtaggaactggatggcttgcattagatcgagcaatgaatccgtaacaaccgaagttgttgtgatactgctccttgcctgtagccttcgtctcgtacaaaagttcgtgcatgctgcaaaaacaccttgcgcttggttccaatccttggcttctcacagcccaaataaacaaacccatcctgattatagcttcaggggtaagttgatgaagaaagatctgaaacgtcttcagtacttcaaccaagaatctgctcaacgagaaccgaagccctgctttcaaaaagcttcgataaataaccacctcatttacttcatgagtaggagcagcgctgtctcctccaac

SEQ ID NO: 170364 - DNA, 630 bp, Zea Mays
ggtctcgttaccgcaccacctaccctgaaaatgctcaagtcgcttggcaacaattcactgcagctttcagagggagctatattctgcctagtctaatggcaatgaaggtgtcagaattcatgatattaacttaggtcacccagtcagtgatagagtatctgcatgcttttaacaacttgtcttgctacacgcatgactatgttgacatggaagccaaaaagattgctagtttcaagagggctttgagcccaaagttgatgaagagtatgggaatttcttctcatacctctttcaatgatttcgtcagtgattgcttgactcaagagaacaacaacaacctctacactatatcaaaggggcgtaagagaaccttggagcctggaatgtcacagcccagaaccacagtgatggcccaaccaaatttcaggccaccgttaccgggtgtaagatttcgccctcctcctcaaaagaagacccaacaacagggattgaagggttataaagcttttaaagtgtctctaccacgaacaaagactggacagggaagctcaactggaagtactacccaagtcaaaggaccatgctacaactatggacaaatgggacacttcactaagtcctgccctcgtc

SEQ ID NO: 170365 - DNA, 535 bp, Zea Mays
ccccaagctgtcaaaccatagttgcatagaacgaccatcaccaatcagtggtttagtcgttctcttatacatgtctatcttagacatatttaagagcaaaagataaagatcacaaagtagcacattgaaaccgcacttgctatagtttaacgaacaagatagacaaaaaaaaaaaaaaaaaaaaaaacagcgaaaccaccttcctcatcgtgagccactttttctcctgccttgttatcatcttgcgtcgccgtttttgaacaaaagaaggcacagtacatcaggagcgcagggtctctcgatagtcaccgatccagcaagcctccgccttccaagccaataagccatcttcttccatctgtgaagaaatccaaagatcttgtgattgtgagccaccattttcggtgatttgataggcgcgttagagaaaaacccagccatcatctgggttttccaccacgcctaggtcagtcaccctgcaagcacaaaaaaacagccactcggtcttttttttatccacgctcctctaaagact

SEQ ID NO: 170366 - DNA, 729 bp, Zea Mays
cccatccagttgctactgccaagcggggcctgcctatcatccctcccctccaaccgtccggctgcccgacgtgactccacgctcgcccacgtcgccgaaaaaaccggcatcaccccccacttccctggtcagagggtttagggtttagggcgtcacccctttttctccatccttgcgcactcccttgcctcactcaactccccctcgctctctctcaccccgttgtgcccgtgcactgccaccggtggtccaacccgagatcaccgtcgtgctacctcgccgtgctacctcgtcgcagaggcccacatccgcgttgtgcctcgccgtgctacctcgcgctcggagctccaccgccgaccgcgcctcgccattcaccacccgttgacaggatttgatctccgtcgagccaagccccgtcctcgctgacgaccttgcgggtgagcatccactcccccatctccttccctagcaccatcttcccctcctttgttctccccagccataaccgccgggtcgagcggccaaacctccatgccccacgccgtgcttgtggccacaccatcgagctcgtgggcatgcgcccggagcaccgctgcacgtgctcggctaggggaataggaacccagacaatcagggctcacctgtcagcccccaactctgctccttgattttccccttcactaggtcatcgaagagaggaccccacccgctaggatgcgcccgcgcccc

SEQ ID NO: 170367 - DNA, 338 bp, Zea Mays
cagttgcttcccagtatccgaaagaatgcacttcatgaggactcctgttgtgccccttttgtatagtgcctccccaatgagggtgtaatgagctaactgccttgtgatgcgttctacggcagctttgtcgtccggttcctcttcattctttatgtatttgatgatgggctccctccagtcattagagtctgactctggctggctcagaacattgcactcctctgcccgatctaaggaaatactcgggcgtggtacttcttggacgaaaactccaggtgggacctgggtccgactggatcctagtttcgacaacgcgtctgctgccgcgttgcgatctc

SEQ ID NO: 170368 - DNA, 1693 bp, Zea Mays
gcaactccgagtgaagctcctgactacccaagaagatgagagccttgtgatcagtctggatttcaaactcgcgccgttgcagataatgacgccaaacgatccacagccataatcagggcaatgaactccttctcatagatcgacagcttctgattggtaattcccaacgccttactcaagaaagctataggctgcccctgctgcatcaacaccgctcctaccccatcatcacaggcgtcagtttcaacagcaaatggtatgttaaaatcaggtaatgccaataccggagtggaaaccatggcctgcttcagacgctgaaaagccatttcagcttctggtgtccacttgaaagcccctttctgcagtaacttcgttagtggccgagcaattatcccgtacccttgcacaaagcgtctgtagtaccctgtcaaccctagaaagcctctcaaatccgtgacattctgtgggtgcgggcacttcagcatagcttcggttttttgagggtcagtagccaccccctcaccagatataatatggcccaaataaatcagctcctttttaccaaatacacatttcttctctttgagatagaacttgtggtcccttaaagcaacaaagaccaacctcagatgctccaaatgagagtgccaagtggaactataaatcaatatatcatcaataaagaccataacaaatttccaaaggaaaggagctagcaccaaattcatcgcacactgaaatgtagccggagcgttagtaagtctgaaaggcatgactcgaaactagtagtggccctggtgagtcttaaacgcagtcttaaactcttcggaggcacccatgcgcacctgatgataccccgaagtcatgtccagactggtaaagaattgagtgccagcaagctcatccaaaatctcctcgaccaccggcatcggaaaccgattcttgatggtcatatcatttagcttacggtaatccacacagaaccgccacgtaccgtccttattttgcactaaaaggaccggagaagcaaatggactcacactgggggtgatcagtcctgacttcaataacgcagcaacttgcttctcaatcttcgttttatgatgaggagaatatttgtagggtcgagcattgactaggatagatccagggagcaaaggaatatgatggtcaaatggtcgagatggaggcaattcagttggtgtaacaaaaatgtcacggaattcccccaacagcacctgcaattctggatggatcccagtgctgttctcctcacgcacctcctccaacaatgcaaacacccagatatcattccctcgcagccatttctccacctgtagatcttcctccaccacctgctgatgtattgtattgcccaccaactgaacttccacacctttgtccacaaagctaataaccttatcatcccaatcacaatgcataggactgtgtcgacgcaaccaatcatagcccaaaatagcattataggcgccgagccccaacaccctcatatcactctgatatgtatgcccattagcccaccattccaatgattgtaccatcgtgtcactatacataatctccccatttgccaccctcactttagctgaagaacaaggatgcactggcagccccattctatcgaccaactgcttgctaatgaaatttgtggagctccccaaatcaatcaaca

SEQ ID NO: 170369 - DNA, 690 bp, Zea Mays
aaagtttgaaatatgaaattagggctaaatctgtgattaaataaaagtacagggggctattcaaaagaaaccaggggcctgcacgctaaaacagaggacggtgggttgatttcctaaaaccagggggctcttaagcaaaactcacacgcgaaggggtatggggtaaccttggccatcagatcagagatcagtggcctagattagatctcgcaagcgcgggcgcgcggacgcggctgacaagcgaggccagggcgtcagagggttagggcggactgactagctgggcacagaggcagagacgcgggggagggggaagagagagaggcagttggatccagatcggagggctgggattagatccgctcgagttaaatcaaaactatccgatctcggacgaacggccgggatctaatggtcaggggtggacttgggcgcggtggcgccgctcggtcccgcggcgagagttcttcggagacgagaaggctggccacggtggggcactagaggctcggggactagcctgggcgcgatcagggctgtctggcaggttcgtccatggccctcacgctggcacaggggcaccagagagcgcagaccacgacaaggcgggctaacggcaacgctagattgctccggtgagaaatcgcgcgagcaacagagcggtgatgaccaaattaagggtacgggagg

SEQ ID NO: 170370 - DNA, 884 bp, Zea Mays
attgaactgggtttttgatgcaattggcttcatatatcctgattactactaccccttgagaagtcaagaaaaaagaggaaaattgccgcttcagccaccactgttgtgccgaagggcaagaaaataaatgttttgacccaccggcctcgatatattgaaacgaccgtagtgtctgaatttggtgaagagacctcctccacttccgaagcaaaacaagctgctcccgccgctcggagcgctgaaggatctattgtagtgccgaaggtgcctatagtcgggccagccgaagccaaggatgatgcggccaaagagccagaattggaagaaacagtggtgatgccaaaaattatgagcccaccggtagaggcagaattgtcgaaggtgacaaaggctcctgccacaactcccaagagaaggagaatggccggcgtgctagacgctgtcatagaaaccacaaaaacattaactcctgctcccacgaagaaagttgtcgaagctactacggccgaggctgaagccgaagcggtgccttcagagtctgttgagatgaagcccgctacagttgaggaaggggctgaacaagaaatagccgaagaagttaaatgtcctggtcccgaagctctatccaagaatcttgattttattatttgtcatgcttcaggaaagaggttatctgaaggagagattgcagaggccaatcattatgcccaaaagctgaaatacccaaaaggagccttggtattcaatggtacagacgaagatgatttcttatactatctcccggataacaaagagatatctgtctgccgggagatggctaaaagtatgggatttccgaagctcgaggtaggcctttctgccatgtcgaaggatgatcttgcgga

SEQ ID NO: 170371 - DNA, 662 bp, Zea Mays
ttcatcaccaaatggcaagggtacgctccactgctagggttacacgtgacggagaagaagccgaaactgctgaaaccgctccgatttccgaagtgatgaaacagtcggggctgatagtgccggaggatgtttttgacgaaggtgcatctaccgctgaagctgagcaggttggtgaggttggtgctgaggaagatgaatctgaagatgattatagtgtcgtgccatctaaacccagtcacctggagtttgggaggtcctccgttaccgaagatcatatgcctaagttggtgaagttaggctatttcagtgaggccaaaaaggagctaattcgttttggcggagaggaaattactccgaagccggaaaaggatgaggtggtagtctttaaaagcttctttaaggcaggattaagatttcctttgaatgagatgattgctgatgttttgaagaagtttgggatttatcttcatcaactaactcctaacgccatcgttaggcttagcgtctacatccgggccctccgaagccagggggtagaaccgtttgccgaaggcttctgccgagtacataagcttcattatcaaacaaaagctagaggagataggttgcacgaaaacttcggctgctacaattttgcttatcgcaaagatgcgaagtttcca

SEQ ID NO: 170372 - DNA, 435 bp, Zea Mays
ctgcctcacccgaataacaaatcttccctctattcacgtaatcccattaggtgtgcttctcaacggccgaatcggacccaatcctaacagactcgcggagttgttggggattttggcatctgcggcatataaaagtaaacctcggctccctccaatggccaagctcccccgtcgcgtccctgcttccaccctctgctctaccgtgcccggacctttttcccatcggcactcggcgcccagtgcccttcatgatcgtgttatcctcggctgttgttggggaaccatggaacgatcttgctcgtcagaaattgaatccctgcgccacgaagttcttgagaatacgaccaactaaactgctgggaatcaccggcgagcgtggatttgggagagaacaagaaatcgtcgtcgggatcttgatatcgtcgcttgtcgccg

SEQ ID NO: 170373 - DNA, 321 bp, Zea Mays
taccctaatacgtttgtcacccaaaggttctcatcacttccgttttgttttttgaagctctttctttcattttcttcttcaagaatgtaaagctgacagcagaactttagatgcagctaggaactcgtctccgtctgaaagtttttactactagtttcagaaactttcaggacacttgtcaacgtatgtcaatctagcaaggactctgttgccccaataaataaaccacaaatccacaatcacaaaagcatctatgattttgtccttgtggcatttgcaaaataaaagacgcgacatcctcttgcattgctaactatccac

SEQ ID NO: 170374 - DNA, 910 bp, Zea Mays
taacgcggtgctcaccacgtgagtcgtgcaggagatgtataacaacagatcttctaccggctgattccgcgtggctcggcgtggtggcttgagtactggtggcatagtcaggaactttttcagtgcttctagagcttcctatgcttctgtggtccactgaaacttgtccacattcttgagcaatttgtagaatggtatgcctttctcgcccagccttgatatgaacctgcttaaggctgccatgcatccagtaagcctctgtactttcttctgtgatcgcggcgcttccattcacatgatggcctcaattttttctgggttggcttcgattcctcggtggctgataatgaacccgagtaacttccctgctggtactccgaaaacacatttctctagattgagcttccaccggtatcgccttaggctgttgaagactagctgcaaatcttcgatgaagttttctgttttgattaccacgtcatcgacataggcttctacccgcttgccccagtgatcggctaagcatgtttgaatagctctctggtaagtcgctctcatgttcttgaggccgaacgacatggaggtatagcagaaagctccaaacggggtaatgaatgcagttttttcctcatcttcttttgctaagctgatctgatggtatccagaatagcagtctaggaaggacaacatagaacatccagcggtcgaatcaaccacctgatctattctagggagttcgaagggatccttcggacagtgtttgttgagatctgtatagtcgatgcacatgcgccaatccactttattcttttttagtacaagaacaggatttgctagccactcaggatgcaatacttctgtaattaaccatgctgccactaagcgagctaactcggcgtgaataacttct

SEQ ID NO: 170375 - DNA, 416 bp, Zea Mays
acgggagcaggacagccggcgtatagcagaattgtcagctgacgtcagccgcttgcaatatgagattttagaacaggattcggccattgattggaccatcaactcgcgttcgatcgcttgggaccacgaagcaaaagctcgagctcgtgtggcagagcttaatgtgaccctcgacagcctacaagtgtactgtaatactttacatgaagaagtacatgtattgtatgctcaactgcacccaaacatgccttctgacgttgctgcaatgggagccggaccatagggagtagcaaataaaggacctgatggggagttggacctttttaggccccctccttccatgaaccttgctgacgaacggtctcctgcagcaggaaatggagcaacaaaggatgaagaagactagaatagtatag

SEQ ID NO: 170376 - DNA, 615 bp, Zea Mays
ggctagacaaagaaatttgatgcgggacagtggaccaagatcaaagttcttcaaaccatttcgatctccttgccctataacaacaactagaaaccatttttaatgtcttggaccttcgtccggagaccttttctccgatagttagaatgattttagtgatacattgctggcattggttttatcgataggatgtcgatttatggcggttaatatatgtgagcagtggaggtacatcgttagtccaatgtgcaacccatgctatgccgaactattcaattcaaccaccgatgttcgcttcaaacgtgttttagacgttttgaaacatttcatctttgtggcggattggtagacagatttggcatgatgattgcactatgacttttggtgtttgacgtgactccgttcatctagatcttgtctttatcaaggaaaactaatgccagaaaagaagctaaaagaatgtagatatcatatcacattttttgtttcatgttatccacatattttgggacactccgttacacgtgtggctatagatctgtagtcgtacccaattgccattgccatacaacttgcgtcgtgcgccacacgacaaaagcgctcgtcatcgtggtc

SEQ ID NO: 170377 - DNA, 1150 bp, Zea Mays
ggcttttgaaggataagttcaaggtaaacatttaggtagaagacataaatatcgcaagggtcagaggtgataacaaacaagggtataagagaaaagatgaaggcatagaagagctagcgatacaagtacaacaaagaatggaattacgtcaaggcttgcacacggtaaggaagaggatattgccaagggtaggataagtaagacactgctctcagattgagacaaaaaaagagattcaagtaagcatcaaggcaagatttatatattacaagggtaaggcagataacaaaccaaaagtacaacgaaggatcgagttaagacaaggcttgcaagtagcaaagaagaggatacagctaagggtcagataggtaaattaccactctcaaattgaggtggaaaagagtaggatttaaagggtaggttcaaaataagcaccaaggtaaagatatagatattacaagggttaaaggcgataataggcaagggtgtaagagataagaggttaaggtgcacaagaacaaagggtatgagtacaataaagaatagagctaaggtaagactggcacgtgacaaaaatgaggttatgaccaagggtgggataagtagaaccgcactctcgaattgagaggggagaagggaggttttaagtggcagacatatgacaagcatcaaggtaggatcacaagggtaaaggcgatagcaaacaaaacacattaaacaatgaagttgaaagtttgcaagcaacaaagaataggatacatcgaagaaaaatgggtaagatacaactttcaaattgagacggacgagagaagattttagaggaggtataaaataagcgacagggtgagatgtagagatgacaaaggtaaagatgatatcaatgaaagcatgacaaaggatagaattagggtaagactcgcagaatggcgaattagaagaaacaatcaagggtaagataggtagggtttcaacagaagagttgaagtaaaaattcattattgaaggaaattacaaggaattaacgagatctccaaggatgtgcgaaataaaatgaatgctcatggatcatcgagaaacaagggtgctcaagggtatgtaaaatgaaatatcttaaacagaccttgggatataaaggtaagcataaaaatat

SEQ ID NO: 170378 - DNA, 699 bp, Zea Mays
gtcgccagatgggcccgctgaggccgatttggaccaaagcacaacctcggggatgaagcctagccggacctccatcccctcatcatcatcgtcgtcgtcctcctcctcctccgtgctagtagaggcatccagcggtagcccctcctttgcctacgtcctgcgacgcttttccaatgcatcgtggggtagcattttcttgcgagcccgcttcttgtctacatctttcttcttctcctcggccgccaacagacgtgcctccctgtcggccgcgtcttccagaaccgggggtcgggcggttcaatagcctcgcaacccctgcgaaagggatgagagggtaagacagcaaggagaggaccaggaacagaggaataaactgaaaactcatcagggacacgtagccttgatcggggcgcatcgagacgacgatggtgtagtccgccttcctcaccgcccccattcacccgctggaggagctcgtcggtggaaagggtagacgaggccatccgagaactctccacataagcctcgggcatcatctcgtccaggcagagccggtgcttagtcagtggtagcaccctcctccaatggaaggcggcggtgactccgaccacggtaagtccgcgatcccgaagcctccgcagggcatccagcaacgactgcagctgggcctagagctccggcggagcgccccacctcaat

SEQ ID NO: 170379 - DNA, 1088 bp, Zea Mays
agtaacttgtcgtaaccagttcggaaccacaactgatgtcgaaacagtgttgagctgtgtattagtagcatcttgggccatattcggacgccgagatagggcgtctgcaactcgattttcacaacctaacctgtactgaatacgaaactgcaatcccaacaattttgtcaaggccttctgctgccactgtgttgacagtctctgatcgtcgagatgggtcaagctttggtgatcagtctaaataataaactctccatgttgcaagtatggtctccattgctccacagcaaatagtatggccatgcattccttttcatatgtagacaatcccaagtttttttgacccaaagatctactgatataggcaatgggatgtcctccttgctgcagaactgctcccactccacccccactagcatcagtttcaatgataaatggcttagtaaagtctagaatagctaaaatcggagcttgtgctaaggctatcttcagtgccttgaaagactggtctgccagctcggtccagacaaatagggtgtccttccttagcagcgttgtgaggggcttgctgattataccaaagtgtgccacaaagtttctataataaccggccatgcctagaaaactcctcacctccttcacacatgtaggtgtaggccaattctggattacttccacttttttgggatctgtagttactccagcagcacttacaatatgtcccaaaaattccagttgcgtttgagcaaacaagcatttggattgtttcagatataactgttgttgactgagcaactcaaatacttgccttagatgcttaacatggtcatctaggttggcactatacaccaaaacatcgtctaggaataccacaacacacttccgaagtagtggtgccaacagtttgttcatgaagttctgaaaagttgcatgtgctccagtcaaagcaaatggcattacgcgatactcgaagtgaccatggtgcgtttgaaacgttgtcttgtactcatcgccttccttcagacgtatctgatgataccccgagcgatggtcaagttttgagaaaatagctgcacccccaagctcgt

SEQ ID NO: 170380 - DNA, 299 bp, Zea Mays
aaaaagactagagctcaggcactgaacttccatgccaagaaaatgatgaagaccgaggtctttcatagagaactcctgctagagagcactgatgaagcgtctcaataaaggttgtcaggactatgtcagcaatatagagcagaagatacaccatatctgcaccatgatgatagacaaatagagagttgtctgtcttagcgccaatcaaacccaactgcaaaaggtgggaagcaaatttgttgtaccaggcatgtggggcctgctttaagccatacaaagaccggttgagccgacagaca

SEQ ID NO: 170381 - DNA, 724 bp, Zea Mays
aatctgggttcaaggattgcctcattacactgtcagactaagttcagtcttcagacagcctgacagcccgactttgggtttaattatctccaatttctttatgtaaccatggcttagtacctataacaaagttgttcccttattatagctttacaaaattgatgtggtgacctagggcaaaatcctttttatttggaagttacatggccccaaagatgagttcattacactgaaattcagatttaatcaaaagagtttaagtgtggctcttttgcaattaagtccaaatctcaagttttggattgcaaaccctcatgattgggaaccatatgacttaagatactttaacatcatggtttttgcactttagtccaaaagtgcactaattttgcacttagccccctagggtttaggtttagggttttccagggttccaattaggatttttgatatctcaggggtgtgaatgtaatgtaggtccattcttaagaatattttatggctatttcacttaactttagggttttctctatttggctcttgtttacccttcagaaccctatttaaggttaagcaccctacactagggtcttatttgcaaaatgccatatcaatacaacttgtttgaaatttttgcctagtgaatgcactctaggtgtgtcaaacatatgcaatgccaatgcttatgatgttatgctcaagttttagtaacagtaacaccagg

SEQ ID NO: 170382 - DNA, 584 bp, Zea Mays
gcgtgccacaaacagtgctcctctgtcagatacaatagtcttcggaattccatgcaaacgcactatttgatcaacatagatttctgcatatttctctgtcttgtgggtggtatgcactggcaagaaatgagctgtcttggtcaatctatccacgatgacccaaatagaatcatggtgtcgggaggtattgggcaatcccacgataaaatccatgcaaatatcctcccatttccaagatggtatgggaaggggatgtaaggtgcctgctaccttcaaatgactggccttgactctctggcaagtgccgcattcagatatatacttagcaatttccatcttcattctggtccaccagtacaaggatctgagatcatgatacatcttgttactgtcggggtgcatggagaatttggaaaggtgagcttcatccaatatcttctttctgggtttgggatttttaggaacaaccaatcggtctccaaaccattaaattcccttgttgtcctaatggaagcatttgtacttgtccgccttccgtttgatcatttccttaatgacctgaacacccttgtcaccaatctgtg

SEQ ID NO: 170383 - DNA, 712 bp, Zea Mays
gttttctaaaccaacctagcttcgcaaagaaaactgttcatgaagccatttttcatgagaaaatagcatcaatagtaaagatgagctgtgccaaatgggatctaataagcaacaaagaaaccatgattcatgccaacaaaaataaactgaaacaaacaaaactgaggtccattaacgtacgatccattgcatatgtcttgattagctacctttctcctctgcatatggtggtatatagatacaacgtacaaattaaagaagatcataattaattaacactcgtagagaattgaagctgatgaggtactgctgctacctagaccgacaagagtctattattaagttaggggaggtaatagatagctgaattgagcactgatctcccattgtcgcatcatctgggcacaccgtggccatacccgctggtgctcatgcatgtcacatatagcctctatgcagccgctgagctcctcgagcgtatatcctgctgccgccaccggcgtctccgtctagcagttcaggaccatcctcgccagcaagatcgccgacgcggccacgacagatggcaggaacgccacacaccggtagtcctgcagcgccatattggccaggtggtgcgccagggacctgaccgtcgctgtgccctcctcctggctgtgcctcatgaagtgatccacgaacgtgtaggccgtgggtgcgctcaggcagaagc

SEQ ID NO: 170384 - DNA, 273 bp, Zea Mays
atatacatgtgtaagataagacagtgtcttctcggcacatatatattagaaatccctatagataaatatgtgcagggtgctgagctgaatcggtgaagactaatcgggggagagaaattaaaccgggactcgaacaacaccaatccaaccaccaatttgacccgttaagacgcagggttggtagctgatccgtactacgcattctctacacgtcaattgagagtgtgtatggtagggatctagagtcttataaaaatgtctcagatctaaatt

SEQ ID NO: 170385 - DNA, 948 bp, Zea Mays
cttttgagtcacctttcttgctcctttctggcttgggtgctttaggtggtggttcttttagtagcctttagacaaactattggatgtgtcgatattcctatgtggtgtggtttcactataaatattagatgcactgtccatccatgatagatttgtatttattattgtattcctcccgattaggtggtttggtatctcgacgctaccgagttccatgcttgatcgttttgactcgatgatcgaagtgtcgtttctaacccttatcttgctcgggcttctgtttgtgtttctgcatttttgtagaaggggtgggagtcgtcacttcctcgcttaagtagtatttgttggtggcctagaagagggccgatagaaccatgggtgccttttggaatgacttttggattagttccttatttgtgaggcctttttggaatacataaatcactgtttcatccgggatgtgtgatacttctgccttgatgttatgccacttcttgatgtaactatggaggctttcatcttatttttgaaaaatatgcacgaggtcatatcgtgacttttcttgctcataggccatgttgaagttggcaatgaacacatattggagatccttcgaggaatcgatacagttggtcaagagattggtcaatcatttttgggtgctggcgttgaggcacatcgataagtaatttgccatgactgtttatcccccatgtggctatgattgatagttagtagacacctaaccaattagaagggttggtgtgtccatcataagcgttagcgcggactcactccgaatggtgagctatggggggctcgagggtggatctgaggcgagttggttatactggttcaggtcagagccctaatcctgtgcagtgctgacaatagtattgcttggaatgtgttatagcttgtgctggtgtgaagttgtagagatatggg

SEQ ID NO: 170386 - DNA, 416 bp, Zea Mays
tggtcttatgacttgatatcccgctcacaatcatcggatcgcgatcctacgctcccagaaacggccacgcctacactcaatctcgagcgctcatcaacagatctacgaccccgattttaagtagccgaggccctattggatccgcccgatctggaatagacggcccagatcccacaacgaagcggtacgcgacagattcccccacaaccgtggatatgccaatcaacggtgcacaatggttaccccccagatctaatcctaggcgctcctttccgatccaacggccaggaggccttctcctatctctgcaccgagtcacggcggcgcgtacagaccgcacggcggcgcacgccggtggcatcaaatctccccacccgaagcacccacaacagggattggaccggtgataatcaaag

SEQ ID NO: 170387 - DNA, 589 bp, Zea Mays
aagagtcaaacaaaattgtttacgaaggttgcacataatatgacttcagggccttgaacgacccaccacaatccacacgagtacaagctttatcgtatctggcgccaacgtgtgtgcgaccatcagggctatcgcatcatagcaagccttcgtaataagcgcgacaggcgcaattgtggcttaatagtcatggtataagataagtccacgcaacatgcgcaacagacacaattgtggctcgataataatgactgacgaacaatgcctacagggcatgcaaaaaatacgcgactcgatgatggcatccgactcaacaggagtggtccgattaagcgagagtgcgatatagcaatcaaatgacacagccaggttcgtacgacacaaataatgtgttgtgttgccagggcgcagccaatgctcagccaataccataactcaatcgattaataatgtatcctgatcggcgcatctgagtacccactatacaattaaatcgctcgtgtgtgagtccgaaagcttaacacaacacaaatatttagatggatttgagtatacacaatatatactccacatgcatttttaataattt

SEQ ID NO: 170388 - DNA, 328 bp, Zea Mays
gtcgaccctagtggaagacttgaccctggtcttcgacaagctgcgggcaacccgcacgaaactgaacccggacaaatgcgtttttggcatttccgccgggaagttgctgggattcctggtttcgtaccgaggcattgaagcgaacccggagaagatcagagcgatcgaggcgatgaggcccccggcccgagtcaaggacgtccagaagcttacgggatcattatccacccttagccgcttcatttcgaggttggctgagagagcgttgcccttctttaagctgttgcggaagtccgggcctttctcttggaccgaagaggcggaacaa

SEQ ID NO: 170389 - DNA, 798 bp, Zea Mays
ctcacacttctggactaactcggcagcatcgctctttgcagttggacaatagaaaccagatctgaaagccttcctgaccagagtccttgatgcagcatgtacccacactgcccggcatggatttcatccaacaattgtttcccagtagccgagtgaatgcatttcaagaggactcctcctgcacgtcttctgtacagtaaaccccctataatggtgtagtgggccgactgtctcgcgatgtgttttgctgcagccttgtcatccagctcttcttcattttttatgtacctgatgataggctctctccagtcgttggtatctgcctctggctgactcaaggtgttgcactcctccgcctgatccgtgaggatgctcggctgtgaaatttcttggatgaaaatcccaggtggagcatgggcccgactggatccatctttgacaacgcatccgttgctgcgttgcggtctctttccacgtgatggaactccaatccctcgaatttgtcttccagttttcgcacggctgcacagtacttgcccattgaatcagtcgagcagtcctagtccttgtttatctgacttatgaccaccagcgagtcaccatataccatcagtttcttgatgccgagtgatacgacaatgcttagtccgtgaattagtgcttcatactctgccacattatttgatgctagaaacagcagctggagcgcatacttgagttgttcacctccaggagcagtaaaaagaatccctgcacccgctccttgcagcttcagcgagccatcaaagtacattcttc

SEQ ID NO: 170390 - DNA, 382 bp, Zea Mays
ttgggcctgaacttatacaagaggcagaagaacaagttcgaatgataagagaaaatttgagaattgcacaatccaggcaaaagagctatgctgataataggagaagactactggagtttaaggagggtgatcacgtgtatctgaaggtgtcacccttcggggtatgaggagatttaaagttaaaggaaagttgtcccctcgcttcattagacctttcttgatcgtaaagcgagtgggagaagttgcatatcaactggagttacccgatcatctgtcagatgtacatgatgtatttcatgtgtctcagctaaagaagtgcctcagggtacctgaggagcaactgccaatggaagaccttagtgttcaagatgacctgacttat

SEQ ID NO: 170391 - DNA, 409 bp, Zea Mays
gtcccaacaggtggccccaacaatatagtattgaataatgtacaacatggagtattaaatgttgcggcagatggagatcttctcccttggccttcgcacggatcttcttactaggatgtgcctttgtcccgtctaccggtgcaagttggctatgagtggaatcagttatgctgacgtgcacaggagccaattatggtgacatgtgcaaaagttatcatgatagacccgacctgtcacctctgattagtgatgcaaagggcacttcgcccaagccagcggctgttcatgatgggtgccacacatacgcgtggagctgagacacaactacctgcctcggtaacacgcagcttattgtgcagcacatgtgcgcggcattgagacacaactgcccacctcgataacggacagc

SEQ ID NO: 170392 - DNA, 541 bp, Zea Mays
cgtttatgaggtcgctccacaagtttatcagaaggtgtataagaaactcatatgcactaggagagtggctcaggcccttgataacagctcttgggtgagggatatcaaacctcccctatctttggttgggttataacaataccttctactgtgggatatggttaatgaggtggttctaaaggatgaggaggatattcactcttggaggcatgaacttcaagtatctatttggctaaatcttgttataagaccctctttagaggttctattgcttttgaaccttggaagagatcgtggaagtcttaggcacaccctcaaatgcaagttattcttatggctagcgattcgggacagagtttggactactgatagattgcaaaagagggggcttcctcacactgatgtttgccatttatgtgaccaagcctaggaaagagtgcaacaaatcttaacctcctgcattttcactcgacaattttggttcagtattctctccccctgtggtttggggcattttgctccctcctcttctgcctcttcc

SEQ ID NO: 170393 - DNA, 423 bp, Zea Mays
gtatttgttagaggacatcagttcagcattcgaatgatataattactctcttattgtttcggaatttatcagttcgtgaatttgcagtaatgaaatgacgcgcgatgattatgaaatttgtttgcggggtatagaagtcatccctgtatgagtaatcataattacgtcagatcgccttaagtcgctgctgacttaagtcgactattttcgttaatagggggtagtggtcaccctgaattgcataggcatgagcatgttgcaccggcttaagtcgctgctgactttagccgattgctccattagtagggcatagtcgtcaccccgaattgagtaagcgtgagcatgttgcctcgccttaagtcgttgccgacttaagtcgattgctccgatagtagggcatagtgatcaccccgagttaagtaa

SEQ ID NO: 170394 - DNA, 671 bp, Zea Mays
gtgggctagcgcggctagacccaggcgaacacggcggcgggacaaatttagctggtggcgcactgggagggactgaccacgaggaggtggcgggcttcgcggcgacgtgatcgcctgtgaggccactaggcgtgacgggggaggcgaagtggtgcctcgggatcgtggagaggtggtaaagttcgtgagctaacttaattggaccttaggctactagagaggggagggggaactcaccggagcggagggagagcgcggcggcgccggctcgattgagctcgggggaggggtgagggatggccgaggccggtgcgaggagatgaggggctcggggcgacccttttataggcgtccgggaggaaagggtggaggccgtcgggcaccggcgaggcacgctgaggcggcgataatggcagtacagtggtggcgacgggacggctcggtgcaggcggtggcgagtggtcacccggtcacagtgcgtggggatgcaaggcgccaagtcttacttgtgagcgagtaatggtgaggagacggggcggatggtggccggcgacgatcgcgtcgatggccgatctcgggtgagggagaagggactgatgagcggggcccgtctgccagtggaagagcgggcgcgaggaagagggggcgggcgtggctgactggtggggccg

SEQ ID NO: 170395 - DNA, 469 bp, Zea Mays
tacatgttattttgacttaatagttaaagacaaacctgtttgggtcgggttttgaggagcacaaaaaatcacggagcgaccaagcacagtccaattctgttaaacgtggcagagagtggtcatgtgtagtgtgcaagctatgtgtttcctcaccatatgcaacctgaaacacaatgcaggtagagagtatagtaatttatgaatgagttatgagaagcaagcatgcaataaatgtataactggagtacttacatgaccactaggtgtctgatcaaaaagggggtccgtgtaagttggagtgtcatgagatgcatcaatgtcacctccctgacccaaaaaacaatgatactatgtttaaagcctcattcatgtgtcaattaaatttaatcgataattgagattacaatggagaaaacaaagatgaaacatatacatgtttttgcggtgtggcgtcaaacatcggcaagtg

SEQ ID NO: 170396 - DNA, 318 bp, Zea Mays
tacgggtaagctagatagggatgcaagtagcagattatgctagattcttgcatagggaaaattatgtagtattgtgggggtaacaagtaggttccttttttgaaggtacacgtgagcatgcctatactatgccagatgcttgatcagttcaaaaacatttgtgtgggggagctgtctttattcttgtttatttatcagttcaaacagattgtcatgaacatgcttgattgccttcgtttaacagagaaaccaatagtatataaaatcatgggcagaggtcctcgaaccatggtgtactatagtggccctttgtactct

SEQ ID NO: 170397 - DNA, 444 bp, Zea Mays
gcccccctcggaggacttcggtgactccaagtactcggaggagacctcctccggggctgatcgttcgcctgctccggtttctcccccagcgtcatccgaggacttggatgactccatggggctgtccaccgcggctcgggcgtactggtgctctatcgagcgcgtcgggctcggtgggtcggatgagtcgggggtctcctcagacgaggcggactcctccgaggagtggagcggcggcgatggtgatgacgagggcgacaacagcagcagcggcgacgacgtcggtagtgacggcagcaagggcaatgacagcgagggcgacagtgaaggcagcaatggcgacagcgatggcagcagcgacgacgtcgagggcggcagcagcaagggcgacggtgacaacggcagtggcaacgacaacggtgacggcggaaggggcaacggcgg

SEQ ID NO: 170398 - DNA, 730 bp, Zea Mays
caatatgatgtggcgcaagtttgagttcaaattcgaaattcaaaatgaacttgtaaatgaagaaaagaaattatagcataaaacagaaaataatagaaggctttatgggccaactccacccaattcggcccagttttccccatgctcagcccctctgctcacctcagatcaacgacgtgtatcaccagatcgcaacaaactgcactggagatcccgaaatcggctgcgtcgatctcgctcgcccaatcacccgccgccgtgaaccgcggactcggccccgcgcgatcgtggagctctgggctatataagtgccgggcgccacaaacaccagcttgtgcagggaggcaaacgaagtgggagagaatgtcgtggtgaccgccgtcggtgagtgccatccgtgcggccggtctgtggtcgacgtagagttaggggtcatcgccggatcgaggtgatgctagatgcagagttgcgggatccagagatcaatcgcgtcgtccctaacccccgtcggtgtcggggatccaccgcggtgccgcatgaactcgtgggcaggaccactgctaccaccctgtacggtatgggctccatcgttagctttgttgatctccccgcaacgttttggtccgttcttcgatgagctttggtcaccggatgtcgggcggtgtcgcctcggtgcgctccaaggagcggattccggccacgccgccactcaacttggtctggcagcgag

SEQ ID NO: 170399 - DNA, 515 bp, Zea Mays
ctgagcttgaggaaaaatatcttcgaagtcaagccgacttagcccggcgagactctgatcttgaggagaagtattctcgaggtcaagccgacctggcctgagtttctgcttctctggatgatgcgcactctttgaactcttctctcaatgctcagcttaacccagaaaggacagcatatgaggtaaactcccttagttgattttgccatgcttattgttgactgggtgctgaatgttgattcttgtttgtaggaggaaagatgagctcttgtggcttctcgtgataatctggacaagttataccgtgacgctagcacttccttgactattttggaaagaagccaccgcttcactatgtcggacctggatcatcatcgacacgagctacaagtatcttaggatgaagttcagcgacttagacaacagttatcggccaaggatttgatcattaaagatcttcatgcttcgaagaaactcgttgcacaggagctagagactgctcggctggctatcaa

SEQ ID NO: 170400 - DNA, 467 bp, Zea Mays
ttatgccttatggtctgaaaaacgccttgccgacatttgtgtaggcgatgagtaagactttcggggacctaattagggacaaagtggaagtctacgtcgatgacatcgtggtcaagactaagagagggtcgaccctagtggaagacttaaccctggtcttggacaagctacgggcaacccgcacaaagctgaacccagacaaatgcgtctttggtgtctccactgggaagttgttggggttcctggtgtcgtaccggggcattgaagcaaacccggagaagatcaaagcgattgaggcaatgaggcctccggcccgtatcaaggacgtccagaagcttacggggtcattagccgcccttagccgcttcatttcaaagctggctgagagggtgctgcctttcttcaagctgttgcggaagttcgggtcgttctcttggaacgaagatgcggaacaagccttccaggag

SEQ ID NO: 170401 - DNA, 587 bp, Zea Mays
cgaaaacgagaaatatgacgatcgagatgttaaacgacgcaaaaacggtgtttgaacgagaaatagtgccataggaggtttggaattcgaattgaggcactaaatgacatggaatggagccgatacttcacgaataggtttatatgggtgaatatgagtgaagtgtgtgcttggtttgaatttaggcgaagaaaatgaaatttgggcactcggctcggaaacgatcgctcgaaatggggaatttggtgaaattaaagcctggaatatcggatgggcgtgaaatttggcgaatatgttactggaggtgttgtgaaggtgcctgaaaaatttgggttcagtcggagcatttttggctggtttgggcatttcaccgaacacgtgacgtgtggagttctagggttttggagaaatggctattagaggttgtgaaaccctccctaaggagctagaaacctgcaggagtactcaaggaacataaagggactcaatcatgcacttggattcacaagatttgatagaaattggaattgggcacaaaggggtggagaggggagcttactgcagagacagacagagaggaaagagag

SEQ ID NO: 170402 - DNA, 660 bp, Zea Mays
gaattccttaagttgcaagtaatggcgccaatggtcgacagcaatcaaaatggccaaaaattccttttcataagtcgacaaccattgtgatctgggtcccaacgccttgctaagatacgcaattgggtgaccggactgcaacaacaccgctccgaccccatgattgctggcatctgtttctaaacagaagggtaatgaaaagtttggtaatgccaaaacaggagcagacactaaagcttgtttcaaggctgcaaaggaagcttcgtgtgcgggagtccatacaaatatagcgcccttttttagtagacccgtcagaggtcgagccaaaagaccaaaatgacgaacaaagcgacggtagtaccctgccaaacccaaaaaactttgtaattccttcacagtcctgggagaagaccactgagaaacaacctgaatcttgcttgggtctgtagctactccggccgctgaaatgacatgaccgagataggataactgaggcttggcaaatgaacatttagtcaacttaatttgccattgatactgtatgagtagttcgaagactgctcgaacatgctgaatatggtcttcaaagctcgaactgtagattaaaatatcatcaaagaaaactagcacgcaacgacggagtaatggtgctaatgttgc

SEQ ID NO: 170403 - DNA, 639 bp, Zea Mays
agggtcgagctctctggtgacgttcttgctgttgcgctcggaggacttggaatttcctcttgatgtgccctttttcttcctcttttgccctttccacttggatagctttgttggagaggtgagagaagctgtggaagtcttggctggcgaggatggtcttaagctcgggtcttaaccctttcagaaaacgggccatttttctagcctcggtgctgacatcctcgggcgtgtagcgggccagctctgtgaacttgtgcacatactcactgactgtccttccaccttgagttaactcccggaattcatcctccttgagttgaactatcccctggggtacgtggtgttcacggaaagctacttcgaattctgcccaggtagcatctctgacggcttcactgaaagtgtcccaccatgctaaagccattcttgaaagctgatgagctgccagttgaacacgctgattcttgggacaagcgatggcttccaacttcctcttgatcgtgcaaagccagtcatctgcatcgaggggattgctggaccccgcgaacgtgggaggcttgagtctcaaaaattcccccatcctgtcatgtggccttccaccgcctgggcgctggttttccagacttcgagtgaggactt

SEQ ID NO: 170404 - DNA, 695 bp, Zea Mays
ccccctaagtaatttcaccaatggtgcactaacatgccctgcccacggtgacaacgggcactataggcaaccaagcgcgttcccattgatctatggggtcctagtccaattggccgggtcggggagcatcaggaggatccacggatgttgaaacaagacagcagggaacatgaacagacctgggattcctgaccacggtgaaggttctaccacggcggcggaaaccaaattgggggaagaaggaaattctctggctatggtggctaattgaaggcggtaatgggtgctctggcttcatgatagtatggcgcaacagaacaggccatcaatttataggagcgcaaggtggtggtgttcaatttcgcgaagacacactggcggccggagagggacaaggctactgacacagttgattcgtggagtataccgtggcagactcactggcgatgatcggatggctaacgtgagtcacggtggtgcggttaaaggctggaggcgtggcgcaaccgcggtgagtattatggattccggtgacggccgtaaggccatgtcgctggcacggggaaccgagggacagcgtggccacagtaacttgaacccatccgcgacgagatcttttcgtcgacgatctcaatccacagaccaaatgcacgaatcgcggcgagcagcactaatcccagcaaagggacaccggc

SEQ ID NO: 170405 - DNA, 940 bp, Zea Mays
cggtggcggagtgcacccactctgattctaagatgaggaggggcatagggatttgcttgattacctggaagaacacgagaacacaagaggtaaagtgattcggggtgccggagtgtaataccctacatccactgtgagttttattgcttgggagtttttgagggagtctatctgaatttgttatggaactcatctcagaccttgttcgagttgtccactaccgtgtgtgccttcccttttatagcccaagggaggcacatacatggtgaatgagccctgacaagtggtcacagtaatctattagctagatatggagtaagtagagcgtcggtcgtgtagatatcttgtttttgctatgtccttccctcatctaatcggagcaaagcgcaggagtaggttgtggcgtatgctgacgcgctaccactcataggggtgctcaagcgatggtgtcctgtctcctgttgcctcagtaacgcatgagctacagtgggagtcatgatgacagcaccccacacgacgcagggagccaaaggtcttgcctcagtaatgcgtgagttactatgcggtctgtgtactgtgggcacaccacctgccactagggcggcaggtttgtgtcttatccgcagttaatgcaaaggtgtttcggtcttagaggccgacgtcaggcttttctcgatggcttacatcacgcgtcgtagaacacatggcagcagcgggcctcaccctgtgggggggtattaactgggatcacccttcctcgagatagctccggaccgcccttggctggggggtccggatggtgcttggtgtggtcacgtctcctccggtgttggccaacacgtggtagcatcggacccccttaggtccgagtggccgttctcgagggtctggcccccgggggcacgtttcgagaggccatgtattcaaggtacgtggcgaa

SEQ ID NO: 170406 - DNA, 328 bp, Zea Mays
gtgtggacgacgggttgttttccattaaagccagaggttcttttgcaatttggcgccgcccaaggggtacacacgattcccgaccatccgatcccacacagatggcctagattaaatcaatctcacatgaaccggtacgctattatggccatcagattggcgatccatggccctcattaaaataccctatcatcccatccagtccatccatagataatccaacggcacagattcgatcactaaagggtatgcacgctatctaatctggatcgcttgttctgaaatcaatggccatcaccccatctcctacctcccgactggaatcagg

SEQ ID NO: 170407 - DNA, 825 bp, Zea Mays
ctccggtgccgccgccaaatccaccagccgccgcttggcttccagcctcaaaccaccgcataggtcgatagatcaggccacaagctaccgcccgcaccccgtctcgcccctcgccccatgtcccagtcatgctccctagctccccacctcgctggcaaagctgtcagccatggcacattacggcctcaaatccgcggtcgcggggccgcccaaggctggctccctcgccaagcaagttcgattcagaatccctgccacatccctcagccactcacgcagcaccgtcgtgcgcccatggagatcgtctgtcactgcaaatcagcattcaagtctcctgtacgaggcgccgctggatgccagcctaggtaaacctactgaagacgaggtcgatggatggacaacggtctgttacaggcgtcaccggagggtcaacacacctgcgcattcaagcctcccaacaacccggcacactgcgctgcgctccccggccagggaggaattgatggcaagcttgagaggtaaatgcatgcgctgcttgtccagaggccactttgctgcagattgcggggatcccctgaaatgcctcaagtgtcgagattcaggtcatatggctcggcagtgccctcagaggagcagtagcagcagcacaccaaccactccacccccacatctcgacggcccctgcttcccatctcttgtgcagaccgtcatggtgaggcccggctacccggactcccgtccgaaggagacgttcactgtggcggcctcctcccaggagatggaccgggagcttgacagtctgagcacccatgccgtggtggcctg

SEQ ID NO: 170408 - DNA, 336 bp, Zea Mays
gatggttccatggatggcgcccgtgcctgatgcgtactatgcctggtgtcgatattgggcttctgaaggcttccaaaaaccgtcagcgcatcacaggcaatgtcgaggaaccaatcctaaccacaagtttggcggtgacgacatgctacgaaaagctaaaagaatggtaagtttgatctagctatgtcgatcaacaaatagtacgattgcttatgaatgttttttgtttatacaagaagctacaagtggccaaaagcttagtgacattgaggtctaccaggagggccacaaaggaccagaccctaacaaccctgaccagctctgcagccagacaac

SEQ ID NO: 170409 - DNA, 432 bp, Zea Mays
atgtgtcggtatggtctgaaaacgaacccacgtaaatgtgcttttggagtgtcggctggtaagtttttaggattcatcattcatgaacatggtatagagatataccctgatcgaatcaaatccattcggaatgtgggacctccaacctgtaaggtcgaagtacagaagtttctcggcaagataaattatttgtggaggtttatttgtaacctagccgggaagattgatgccttcacccctatccttcgacttaagaatgatgttgaattcacttgggggacagaacaataggaagcgtttgatctcatcagaaagtatttgtctttggctcccgtattaaaagcaccacaagtgggagtaccgttcagattgtatattgcagctgaagataaggttattggggctgttctgacgcaagtgactgaaggaaac

SEQ ID NO: 170410 - DNA, 307 bp, Zea Mays
cctggaggtataatgttattggggccgccaatcttcggccattatgaggttgacgattcggtggccctcggcatctggacttatttgcaagccttcagggttacggacagttggtgtgccgatgacgtggtagaacacgtcaaagggcagggcctcgcccttggctgctgccttggccaacgcatcggcctcttcgttcttcttgtgctcgacatgttgcaaggtgaaacccttgaattgtttttcgaggccgcggatggcggtgaggtattgcatgagcacaggctcctttgctgagtactccttt

SEQ ID NO: 170411 - DNA, 299 bp, Zea Mays
gccacattgtccttgccttttttgtaaacaattttgaaatgaagccccatcaacttagccatagccttcctctgcatatcagattgcaaaagttgatcatccagaaaactcaaagcctgatgatcagtattaatcacaaattcagccctctgcaaatattgcctccacctgtccactgcaatgattagagccaaaaactctttttcataaatggagagcatcttattcttagcacccaatgctttacttagatatgccactggtctatcacattgcatcaaaacagcacatatcccatc

SEQ ID NO: 170412 - DNA, 312 bp, Zea Mays
gcagcccagccggctgggaggttagctagggcaccacggtgccaaagaaaagaacgagacacacagagggagatgagagacagaggctgagcggcggcgacggttgaagggaggccgagtttggcgctgcccattcgtcctagatgctcgcgctactccatccgagatgctcgcaaatcagttggtcttctcttcccttctcgtctctttaaaagcatgggtgctaatcccctggaggaacacgactactcttctctgcttgctgtttcagtcacctgatccaattagtctctagcgattcttgttttcatc

SEQ ID NO: 170413 - DNA, 658 bp, Zea Mays
ggtcaccctaagtcaagtaagcgtgagcatgtcgcaccgacttaagtcgtcgccgacttaagccgattgctccgttagcagggtatagtggtcaccctatgtcaagtaagcgtgagcatgtcgcaccgacttaagtcatcgccgacttaagccgattgctctgttagcagggtatagtgttcaccctaagtcaagtaagcatgaccatgtcgcacagacttaagtcgtcgctgacttaagccgattgctccgttagcagggtatagtggtcaccctaagtcaagtaagcgtgctgatttcaagccaatcccaatcgaagctagttgtaagtcaagagtctgaatacctttggaaaacaaaaacattattgatgataaagtcctcagatttacagagtacaatgttccttcaataattttgaggccttgctaaggatagaattttctgaggtgttctatgttccatgagttccccacttctatgtcgtccatctgagtaagccgatatgatcccggccgtgtgacctctgatacgatgaatggtccttcccatagtggtgatagcttgtgccgcccttcccctgttagaattcggcgaaggaccaggtctcccactgcaaaggatcggtgccgcacagctttatcatggtagcgcctca

SEQ ID NO: 170414 - DNA, 611 bp, Zea Mays
aaacttgcgaagaaaaggttccaaaattgtgttcatgaggcactgaaaagttgccggtgcattggttaatccaaagggcatcaatcaaaactaaaaatggtcgtggtgggttttaaaagctgttttgtgttcatcagtcgaatgcattcgaacctggtgatatccagacctcatatccagtttagtaaaatattgggtacccgctaattcatccaatatctcatcgataaccggcatgggaaagcggttcttcactgtgatggcattcagcttcctgtaatccacacagaaacgccaggatccatctttttttggactaggagcactagggaggcgaaaggactagagctatgaacaattaatccagcctgcaacaactctttgacttgtttctctatttcatccttgtggagtggggaataccgatagggtctggaattcacaggagcggcattgggtaataaagggatgtggtggtcatgtattctagatggtggtaggactttgggatcttcaaagacatcctgaaactcgagcagaacttgttgtacagctgctggaatagagggatcatgtgtatctggcaacacctccaccactgccatagcccc

SEQ ID NO: 170415 - DNA, 511 bp, Zea Mays
ctccttccgtggtctgacaccgtcatacgcgtaatcgaggtgatgatctctcctttgtgttcgcctggcttctcgggtcgcgtagcacttgtcacgtcgggatttgtgtagagatggggggttaggtgttgcgggcggggcaagtccaccgtcacggtgctcggccggctttggctgagtgtcgcgaggaggaagacagggtagcggccgtagatctgggtatgggcgatggagatctagcgctgtgtcgatgggaagcgtggtccgttgatttttctgttgacggctaagattagaccgcaggaataccgattcgcggtgatgatctggtacgtccgattccgatcgagcgagcgagactcagtttaggttttttaaatctgtgccgttgatatccgatcgtgcagtgatcgtcgcataccagttcacgggggctacgatttaatccgggtgctcagcttttaatccaacggccgagaatcacccataccctttcgctagtccattttgc

SEQ ID NO: 170416 - DNA, 550 bp, Zea Mays
taaattccctaagcctggtagaaaaagaaaaagagaaaaaatgaatagtaacgggctgaaaccagcccgatacggcgatacggcccacgcccaagcgaaacgcgccgcgcgcatgcccgcggtgtcctctttgcacagaggcccctggccatttgaaaaacccataaagaatcctttccactattcacatgtgtctctgacaattccaccgaggcccctccctttctgtttcttcgcaaggtgagatccccgaccatggacggtggagcagtggctccggcgagcttatactggctggaaaacgcaacgactaggcccctccgttgcttaacacctaattccaccctcgacgacactaatccctcaaccaattgcgaagttctagctcaaaatctctctgtccacggtgatggcgcaaattgaggacaacccgaggtgtcctgacgatctaacatggtctagttcaattggctagactgataagcattcatagcacacaaggatgttgaaacgagggcaaggagggtatgaacggacctgtagacgtctg

SEQ ID NO: 170417 - DNA, 644 bp, Zea Mays
gaagcatgttgaatgatataatcaggatattcggaaggtgcttcgggagcaagggattcggtttctttggccacatttctctcaaaagctatatcagtatttggaggtacttttttggccccttgctcggctgtggcaagcttcgtctcaataggcactgtgggttcggcctcggttccagcctcaattgttgcagttttaccttttatctgcctagtatcagcttcagcctgcgcctcggcactttcggcaaccttctttatggaagaggggcgtttggagtctgttgttttcaaaatgtctaatacatttaccatccttttccttctaggggttatcgcagaactttttctatattcagcactgttgcttctgctgaaggacttagaaccttgggcatctttgttacttcttcagtttttgatctttcagccttatcttcgtcaaccttcgattcaataagcttagtcgaaggcgccttcagcattacagccgtctcttcaatcttctgcgtgggaggagcaggttctttcgcttcagtaactgaagaagtttccccgccaaactcaggcactatggccggttcaatgtagcgcggtcggtgggtaaggaccttcaactttttcctcttcggcgcaggctcg

SEQ ID NO: 170418 - DNA, 583 bp, Zea Mays
ccacgagggcagaaaagaaagggtgcaacctctggaaaggttgtcgcttcggctgctccaagcgagcctacgccgaagaggaaaaaattgaaggtccttactcaccgaccgcgctacattgaaccggccatagtgcatgaatttggcggtgagacttcttcagctattgaagccaaaggacctgctcttacacaaaggattgaggagccggctgcaataccgaagactgacaaaattgaagaatcgagaatcgaagggacgaaaacattagaagttctaagcccttcggcaggagtggaggtgtcgaagacacaaaaaggtctagcagcgaccccaagagaaaaaggatggctagtgtactagatgtgctggagacaataaaagcttcaagctctactccagggaaaattgctaaggcttcgaaagcgcagattgaaaccgagacaaagctgaccgaagccaaagctacaatgagccaggctgacgccgaagctgggccttcagagcccgccaaggagaaatcctcagaaattggagaaaaggcagcggaggaagaagctatagaacagattttgcctgaaaa

SEQ ID NO: 170419 - DNA, 525 bp, Zea Mays
ggagctatgacgcgtcactcacggtgtgccctccctatggtgaaccgccttgttccctgctatgcgttgagcaagttgggtgaccatttgtggtattgatgccagattgcgtgtctccggtgtgccatcaccgctgctgcacggggcgccgccgccaggcatcgtcgggggtaggaagaactgctctggccgttgatgttgaatgggcggctgggattaggccggggaaagggttctgtcggatctgattgccaccgttgatgtgtggatcgatggttggggattgaatccggcttgattgaatctgggtcaaggatctcgagatcaacggtgctcggtgcatcgcagctcacataaggcaagttatgatctgggccatcggtttgtgatcgtgcggctcaggtttgatcataccccttcgtcgttgacattatacttaagagaccccggaaaacatgctattcaacccgccatccatatgtgggaatctcgagtcttggggatttttgcagatctgcccccgag

SEQ ID NO: 170420 - DNA, 651 bp, Zea Mays
accgtcgacacgcgcatccccagctccaaatctgttggctcctcctcccacagcgtggggagcttcggttccaccagcccctcacgaagagtcccaaaggagaaggtattgttgcattccaaccagagtaagagagtaagaggtaacttgatatcgctgatccactgaccattaataagggattgggccaccattctagaggaggtcaacttcttgtccacctttgagaatactattggaactaaatccttgatggaattcccgctcaaccacctatctatccaaaagagagtatcattaccgtttcccacatgggcgattactgaaatggcaaccaacgccttgacttgtggctgcacagggatatcaagaccaatccaggacctgttagggtcggatttctgtagccacaaccacctggcttgcagcctccaacttttgtaaagcagatttgggagaccaagaccacctagatgcagcggcctagtaaccttctcccaagccacaaggcagctaccaccatttatctcctttctactcttccagaggaaagcccgtctaattttatcaatagctttgatcacccacttgggaacgctcatagcaatgaggagatagactggaatggctgagaggacgaaacgaaccaag

SEQ ID NO: 170421 - DNA, 330 bp, Zea Mays
ggcttgcccatcaggggaagtgaggcactcggaagacttgcccttctgccactgctcccattgcttagttgttccctagacagagtaatagagagactctcttcagtggtagctatgttggccctggaaccaccacgacctctaccacgacctccgcgacctcttccatagctcccacgaccacgagtaccccctcgtcctccacgagatcctcccctgccaccatttcctctagggttgggacaattgtaactcagatgtcccctttccccacaattatagcattctctatcctcaattgcaacgtatgctggcttcacatgattacca

SEQ ID NO: 170422 - DNA, 362 bp, Zea Mays
gggtcacggccagaatttataccagaggataagggcaaggtccgagcggaaaaggaggcggtgaccggtaagctcggcccgggatctacgcatcgagatgaacagacaccaagtctgttacggcgacgttgaagatgaccctgacaggcggccccatacggcagtgacacaattgtgtgggcgaaggggatgcaggcgctgggttggggttttgggccgagagcgcggctgggctaagtggcgagttgggccaaaactgaggaatccagcccaacacaagtttttctcttttctttttattttctatttcaattcccattcatttcaactattttaaatttaaaggagttactaattcaaat

SEQ ID NO: 170423 - DNA, 1221 bp, Zea Mays
gctgcccaaagcggaggggaaccaaatatgctgatccaggatctctgggactagttgaatgccttgcaatacatcccaacacataaagaattcagaaaaagcctgttgggatgtggccccccagacatcattgacccactgattgttgacaagagcatcccgcaccttccttctcttgataatgcatttagggactaaggaaaacaggttggcggccaaataagctagagatttcccctccaatcatctatcatcccaaaagagagtgtcggccccattgccattaccaaccacaacacacggaaacatcaaacatagcagcaacacaactacgcaagggtgaaacttgaatgtcaaggcctacccacagacgatttggtagggttttcttcagccacaaccacctcatatgcaaagaccatcccaacatctccaaattatgaatccccagacccccaagctcacgtggcctgcaaacgcgctgccagcccactagacaatgcctgcctttcacgtctttccttcccttccacaagaaaccccacatgttgtctatagctttaatcacccatttcggacactggagagaaatgagatgatatatcaggatagcaatgaggattgaggacagcctgaatcaaggtagcctgacctgccggatgtataagcgctgccttccacccgggaagccgattcgtgatcttgtcaatcaaaggaaagaaatcagacttgttaagcttcctaatccacaacggtaaaccaagatagttgagggggaactgcaccacattgcaaggcaataatctgctgcaccacagccaaatcctgctcctcacatctgataggagtgaaagaactcttcccaatatccatgaccagcctggacgcctccccaaagatccttaggatttctttgatcaacattaagtcagcattcctgggctaaatgaataaaaccacctcatcggcgtatagagacaacctctgcccatttcctctctccatcaaccactgaagtaacccctgctctgaagctctagaaaccatagagtttaaaacgtccatcaccaaaatgaataacatgggagacaacgagcccccttgtcggagtccacgctgatgggatatgagatctcccggctccccgttcacaagcactctagtcaaggaaaagcgcggtaatttcgaaagaagattacaccagatcggtccaaaacccaa

SEQ ID NO: 170424 - DNA, 795 bp, Zea Mays
ccgctgatcgccgcgcagttggccgacggaactcaagcacagcgccgctgcaagtaaatccccggttagtcgacgattcgtcctcggtttggtgttcggtgggtccctctggctaaggagaaagtggtcgaggacgggccaccaggaatccatcgccagcgccgccggaatttctcgccgcactccagtttccgccatgcgccgcgggcagggtttctcaaccgattaattgaggtactaccgccgctctcgtgttcgcttatgcattaaatatgaatagatgtagcgaattagaacttgcatcaccaaaagcgcgttgaatcgctcgccggcgttggcagcgcctggctgagctgcgccgccgtgttgcggtagggtgggaggacgatgagtccgcggccgtcggatccatagcgacggcttagattagaatcaaggcaacggttcgtgtaagggtgatctgagccgttgatgtcaaaatggacgagtgaggctaggactcggttatgaggagcgcgggcggtagatctccgatccaacggtgggaatcgcttaccggttcgttttatgattagatccgatctggaccgttgagatgggatcggaccgcccatatcgcatacccgttcggattatagaaaatctaatcacagccgtagattgatgatcggacgactctgatcctagcatacccctttcgtctgcacctgttcttgtaaaagagccctcgggtttccgtaaaatagaacccgccgtcctgtgggtattattcactgagtctggtttaaattaccc

SEQ ID NO: 170425 - DNA, 530 bp, Zea Mays
cacgaatttgcatgtgcatgtgcatgcattcaaagccatgcatgcacgtatattaattaaatttgtaaggattgcatgcattttccactgcccgcgtacgtgggcgccgccggccatgcacgcaccaaagcatcgcagttgcagtagtgcaatgaaatgaaacgacgacgtgcatgggtaggggtggtcgttttaaggcagcaaccaccatccacgacgtacgcgggagcaggataacttcgcttctcctttcttcttctttctcccggcccgtcagccggcggccatgcacaggataacttctcactcacttgcaggcttgcagctagcattcctcctccttctttctcccgtcaggcagccagccagccagcatatggaagatcgatgcatgacgagcagtgcgtaggactagctagctactagccaaattataacaataccatggacgacagcagtcttctctactgtgacgaagaccctctcgtcgtctctactacgccgcctccgcagctggcgtcaaatagcta

SEQ ID NO: 170426 - DNA, 526 bp, Zea Mays
ttcacgcgtcagtcgtgccgatgtaggggaagggccaatccaatgatgttaccccacgtcagcatgacaacatgcatcatcaaaccacatctaggcttcgggtacgatgacaaaaggtccccatcaagcgccaacgacacatcatcatgcactatctcaagcaagcactcgccaacgtgtgggaccagtcaacccctgtttttggggcatcgacgtcggggtgacgtaggtttgtgacccacatacctaaaaggatgcggcagatacaccatacggggtgacacaggtttgtgacaagaagcagagccacgccacgcacgaccgaaccatgggactaacccatgagacccaccacacactgttacggatatgttggcaatgcactagctacaggagatcgtaggacgagcgggtaagacggtacgccataccaagggtacaactatgcacgatcctacggagggactacacgacgaccgtgagtagttgatctccctctcgccctctctctttggtagaaaaccaa

SEQ ID NO: 170427 - DNA, 876 bp, Zea Mays
caaagatattctatttttgttgtggttgatagattttcaaaaatggctcattttattccacgcaacaagagcgacgatgcttcacatgttgctaatttgtttttcagagaaaatcttgaggctacatggaatgcccaaggccatcatatctaaccgtgacgtcaattttgtgggctatttttagaaaacaatgtgggcaaagcttgggactaaacttttgttctcaaccacatgccacccttaaactgatggacaaactaaagtagtgaatcgtacgttgtcaatgctactgcgaacaatggtaaaaagaacttaaaggattgggaggaatgtttgccacacgtggagtttgcttataatagggcagcacattcttcaactaatttatgccactttgaaattgtatatgggttcaaacctattgctccgatagatttgttgccccttctattgcaggaaagaaccaatatggaaggttccaaacgtgctgcatatataaaaaatatacatgagaagactaaggaagcaattgagctcaaagtagtgcgcaaggctgcaagcataaaaaatcataggaagaaagtgttatttgaaccaggggacatggtttggattcacttgcgcaaggagcattttccttatcagcgcaaatctaaattgatgccatgaggggatggttcatttcctgttcttgccaagatcaatgataatacatacaagatagatcttccaccaagatatgacgtgagcaacaccttcaatgttgctgaccattttaccatttacaagtgtagacacttcagagtcgaggatgactccttttcaagggaaggaggatgatatgacaacgccattaagcaacatgttacaaccccc

SEQ ID NO: 170428 - DNA, 485 bp, Zea Mays
tccaccactctgcgacgggtgccctattatttggagctgtgatctaaggggcccggacacacgggttggcttcccggtctaaatcctatatgttctattgcgtgaatcaaaggataaaagataccagttagtgggtcatatgggtgtactactaaagcttcctagccaaggctgtgtgcaggtccaggtcccagtcgagactacctcctgggggccaggtcaccaattctttcttaagtatactagcatccagcctcgacacgtcgagcctacatcccaggggggccaagtaccagggagaagttggtaacgacacacacaacaaagacaaatagcatgcagataagttctgtcactcttagattaatacttcccaaaggtatcttacaaaaacaaaagttattacatccgccttcaagcggatccctagcctcatttctacaggtatgaactactcggcatcagcagggtcgcgctggaagcgc

SEQ ID NO: 170429 - DNA, 718 bp, Zea Mays
gtactccttgatttatgcccatcctcgacgcatctgatgtgttgggatcatcaacccccggctccctcaatgcaatgctgctggtggagtaattgcccctcctgtagtttctgtttgcccgtgtccatctgcatccgagccaaactggtttcctcctggttgatcttcctgcaccattgatacgatctccaagcatggatttgatcgatgaacacttgccagcgttgtgtactctctgatgggctctttaccccatggcgccgccattatccagctccggttacttccttttgccagttgcaccctaacgcacgattcttgctgtctaacttttctgaaaacgttgggttcttacctttttcccatgcacatatccatcatcgtgggcgcgctattcacggtgagttcgcgtgtgtatctgctacattataggatcgtgggcacgttgatcatgggcgtaacagcgatttatgcaagttcgacttaggtcgtatgctatcgtaaacactgtttcgagcaaattccctgatatgctaatgacacgtcattggtccacgttcagaatgatagcccacgatctgttacgtcatatttatccaacatttatacatgcataaaagcatcccactgttcgggtcgtctggcacacacacagggctacatttcgagctacctcctggaggtaccactgcctaattaagcactggacgatgcaagt

SEQ ID NO: 170430 - DNA, 947 bp, Zea Mays
ttaattcctagtataatcttaccaaaaatataaacttacaattttgataaacaagttttgaaaaaggacttaaattaaaaagtcgggttacctgagcttgtggaggtacgcttgctatttgctactcatagtccacccccatcgactttacaaattacacttggtcattgcgatttccagtttcctacacagcagtcccggactcccggttcccccactcgcgcaagtcgcaagctctcctctgcggctctgcctgtctttcgtttgctttgccattgcctgactagtgcttactgcctagccgcctagggacgcgatggtgttcaaggggcgcttcttctcgtcgcgacacaagtcatcggaatcctcgtcaagcccagacggcagcaacagcccgcgcacgcctacctcggcgccggcctcggtatccgcggcgtcgccggcgtcgtcatcgtcttctaaatccgacaagaagaagactaaattggagactcccaaaaagcgcgacaagctctttggttccgcggctaccgcccccaagagcgccgcgtcgtcggccccgtcaagcctggcgggtgacgggaggaaggggcccgtgctgcatcatagggacgcgggcggcggaggcgggggtggcgcatcggcggccgcgctgtcgccgatcctggcgtcctcactggggctcaaccggatcaagacgagatcccggccgctgccgcaggagggccaacgcatggctgccgcgctcgccagcagcaacctctcgcacgggcagggccaagcggaaccgtcggctggctcagccggagacggcgggagaaagggcgtcagctcctcggcggacacgagtagtagcagccgcgggatagtgaaaacgaccgagctggcgatgcgaagtgcacctgggacgaacttcggagcaggagggaagaacgctgtaaaaggta

SEQ ID NO: 170431 - DNA, 785 bp, Zea Mays
ctagacagtaaaataagcatgagataaattatcctacccataatctagagtcggtgttgcactgttttccttgaagtcttggagacattatctttatggggactgttatgacatctctaatgatcataagagcctcaagtatattttcactcaaaaagagttgaatttaaggcagtgtagatggcttgagctgataaaggattatgacctcacaattcactatcatcctagaaggcaaatgtggtagcagatgctcttggcaggactggtgtttgtaaagtggcgatgcccttgattctagacttggatcttctaggtctttccttgtgctatgcaggcactgcgagagaggagactcagatgctcattcactctcaccttcttgagagggtgcgtgaggcacaacagtaggatcacttgattcgggaggctcgtaagaggattggatttgatagaccgctgagagggtacaagagattcgtcaaaatatgttggctactcagagccgctagaagagctatgatgatgtaagaagacaagatgtagaatttgtagtgggcgatcgagttcttcgtagagtatcatcaaccaaaggtgttctctagtttggtgctacaggaaaacttagtcctaggtacattggaccttttgttaccatagcccgagttggcagcttggcttacagcttgcagctgtcgaaattcatgaaaggagtgcataatgtcttccacgtctctatgttgaggaagtttttgcgagacgtagatcatcggattgaactagag

SEQ ID NO: 170432 - DNA, 371 bp, Zea Mays
cacacggttgaagagctgggcaaggcagggaatcgagtgcctggggcacccggctgatttgggggagtgggggtattgttggggcgaataatgattggctgcttaaaagggaatgcaagtggacgagaaaaagtgcgattttggctagaaggccggatgacaaaccgttgcctcttcgcctggccctgagtaggcctctcaccactgaatcccttgttctttctagaacttgcgtattttgcttccacagataaggttgtactgacagcctttccatacgtgagatctatacatgtggccatctttcgctgcaaccggtcatttagacccctcatgaagcagttctttttctttaaatcagtattcacctg

SEQ ID NO: 170433 - DNA, 1141 bp, Zea Mays
tgaaggttcatcattaaccacatatcctcgaatgcaagaaaggccttttggtccgaaccaataaaagcatggtctggtatatgcacactaatggcgtcaatgccaactgatgatgcacgcatgtaccagtcatgcaaccttttaataccagcagggaccttcctcagtttctcaagagttagtagaggtctgcccgacacatattatttaggcacatttttataatttgccttagttgggatctttatctttgcggccattgccttagccttttctacagactccttgtgcttggccaaatcaacaatacgtgatgtgaggtcccgtgcaatccctttcaaaaatcgagttgtgccagcagtagtagctttactcttctttttctagaatgtgaacaccaattttggtacagggaatttagatttctttgattgtcgtgaatcccttgatggctatggagaaggtggtggtgtcctaaatgttgatgcttgtggtagagacggtggattagaaagaggatgaggagcagcatgggaagattgtggaggtggtcatggatgtacaggtactaaattttgaggaggcagagatggttggggatgagacgacgacggcgttggtggatcaatcaattcaacatcccttcgaggccaaaggatgaaatttttgatggcttgtccaagtctctcgattcctttgggcccaaggatgtctagcatgtcgtcctcagatccttggacgactatcgtcacttctaccctacaagaatcatctggtatgtcgcttccatgaaacttgcgtcctgggatcgcaacgcctgttcctactttcttcgtgcgattattgttaataccatatcttataactagtgtgcatgtcactggccttgttatgtcatcaactggataacagaccttattgtccgttgacgcgacagagcttgggacggttgtacaatcggtggaagccgacggttgagttgctggaattatttacaactgtggagtggtcatctgttgaatagacatcgcactcgccagctgctgcatcaattctgatagaggatttgatagcatttgagacatcaggtctttgaactctttctttgcctcctacttaaaataatctgacaactcttctt

SEQ ID NO: 170434 - DNA, 615 bp, Zea Mays
atcattttctgaattattttatccctttaatccaacacctgggttgcgggtactaattcctgaaagcttggggtgcgttctgtaaactccaggactgatctgaaggggtttttgaacttgtatggaccgagggttgttttctataaaggacaggggcactattgcaaaattcctcgacgaaggggtatcgtgcgcacaaagccaccagattaggtttggacacccctagatcagttctgaaccaatcaaccgcgccaaccacacgattagagatcaacgtcccgtgagacccccacgctcgagccgttggatcaacacttaatggccatgatccactttaggcaaagggtacgctacttcagatccgtcccgttcgtccaagatccagcggcggatacctccatgcaatccccggtgactaagaacagtggtgccaaagcccatggtgacgcccgtgcgccccatggcggaggtttcccaacgtgaacccagccctacccgcccgacacccatacgcgaatccacccggtgctaaacgaagcagagaaaatgatgaatcgatttaggcactccttacctaggttggtgacggtggcggtgctgcacacacgatcc

SEQ ID NO: 170435 - DNA, 823 bp, Zea Mays
agctgaaagagatggatcccataccttcattatatactctgctacgaggcttgtctgcttaccctcaagagccaacgcctgaaaatttgagaacaatatttatgacacaataattaaatatttatataatcattctgcctaaatgtagtctaccttcatgaacacatctaggtcctcgtcaggttttatccccgcattcttttctctcctcaacagttcaacaagcatgtctgcaggttgattgatgtcaaagaccaaacaatcaaggaacagcaaaactttactaattcggtgcggtgacctaccatactttattccaacaccctgacagcgcccggcaaactccagcgtttctctgaccgtcatttctgaagcatgccagtcttgctgactgacataagcagatgttcgctgaggcacgaattcgttcaaatggtggccattgtaagtaatgttcccagacatctacaacaaatttgggtgcttcctgtcagtaacaagttgggggactcaagtcaaaggctaattttgctgatgacagtccattgtcaggtaatagaacatgccagtccggcattccggccttgtgatggacaaagaatggattgaattaacccagatacaaagagtcgcccatcatttttttatgaacacgcattcaaagaatgaaaagtgactgatgtgatgttacaaacctttagtccaggaccgagccgtccagcaagagcaagaagcaaggtggtcttcccggaacttggagggcccaaaagcagtgtcattctgcagcacgaaccaatgcatgtgcaagcttaatttggtgtcc

SEQ ID NO: 170436 - DNA, 693 bp, Zea Mays
aataatttgtgatctcttgtagtctttctttgcgtcccatttgttcctacaatgtgtatggccgttgggtccttcaaacctcggttggtcataagctctctcatgatccgaggggcactatacgtgtgactttttcccattcaacatacccatgcgaggcgagccccgagcaaataatcgatgctgagatccatctggggggtcatcccatccttttgctttactctcctctgcctatcccttccacaacaatgaggggaggtgagcccaaccgcacattcctcattggtctagcaatggtgctcggtgagctgcaaacgggtaatccgagtgaggccctaggtcctttcacaggatccaaatgcagggtccgctaggggatcgtcctcatactcttaggcaccgactcatatagttgcagactccgttcgactggactcaatgactcattgcctctcttcacgataaaccatgagtcagacaataccaagactcgaacacaagctggtgacacccttcgcgcttcacgcatcaaggtcctagcctctagtgtccacatcacttgcttgcccctcgctctagatttcgttgagatggttgcgagcccttgcgaactggcctttcggagcctagaatttgcggcaattctgtcacggggtttttttgatccccttgtaaaggaactagaagtag

SEQ ID NO: 170437 - DNA, 528 bp, Zea Mays
tgcacatcatatgaactttctatgaattaaacacattctagcattttttcacattaaaaatcattttctaatcacttttactgaattttataaatctctggactaggcatcaaattctgtaaaagacaggggcaacgacgcaaaagtttctaagacacagagaacctaggctatggactacgggttcattacccaggactgtagggtttcatatgcaaattgcacaccgcgaaggggtatgatcgcagcacggtcgtccgattagagtctaacgacccagattagaactaatcccctcccgaaacggcactgaatcacagtcgtcggatcctgaatctgcgcccagacactatccatgtttctatacaactctggcccttggatcactaacctgcggcacagattcaatacacaaagcggtacccatggatcaattctggatcgccccattctaatctccatcgtccgttaatgatcgaacgacaggaagccccttcttctaccccacgtctgaggccgagcaggggc

SEQ ID NO: 170438 - DNA, 1314 bp, Zea Mays
tagggctcatgcacaccatttgtcgtttggagcaagtagttgacttcagatcaacaaggacaatgaccatcaggtctagtgctcacaagaacattcattggttgcattgtgctttcaagcacataggagaatttacacatatataatggtggtaaagtgcacggcatcaggccaatgctgccaagcagagatttttatatgcagagatatatagtccagctcgtttttatcattgcccaagggttacccaattactcacaccattctgaaattgggtatcgatttatgcaatatttttaggtattataattttgagagagaacttataacaacagtcaaatatttgttgtgtaggctgccaacagggcaaacttttctcctcatattacacaccaatttgttctataaagcattatttcgatctcttcattgttcagcaaaaaagagaaactttggaatagaacatacaaggccaagaattcgttttatctgggaaaaaccacctgattgctaagctttcgattaagcaaatggtgataactgcttggcaagaccgaaaaaataccaatatccgtttgggactagtcttcaacaacagataatactgatctcatatgaagtagtcatcaagacaatggagaatacatctggtctccataagatcttcatatttctatcacaaattaccatcaccaatagcttagtggtcaagaattatggatcttccggcgccaaggaccaatgacatattaatgcccaatttcacttcaagctttgtggtaatatgggatttcatggctattttctactcttcttactcctggtagatcggagatatattacggtaagcatttcaaagggtggaattcaatgtagttctgctacataaactccaggtatatgcccaattaggactgacctttccatttagcttaaagctataccataccaatcaaaggaccatgccaagtcaatttagtgactataagtatttataattctgagagatgtatgcaacacaagcatagaggttctagacaggacgagtaaagtggttcgacgggaacacacaatggtttttttcacaccaacatagtgaaatttttctcagaataacctctcggtatactcacaacttcgtgttgctggcgattacatgtccttttatctcatagtttgcttcatgccatttgcgacaaagagagcaatgtgcttacatctggttgagcaatgtatggctaagatttatagtcttaaatcatttggtaaggtcttttgcttactaatagaatcccaatttgtgatgttttctgt

SEQ ID NO: 170439 - DNA, 719 bp, Zea Mays
gtgctattgggatcaatcgaagggacaaccggtatagcaacaccttgtttcctcttcctggacgacatcgcgatcccacaagcagagtagctcaagaacagcgtgagaaagtgtgggagtttgagaagctagaatgcggcggaggaaaaataaaagctagggttcgtgcaccaagaaaacgttgacaaagatataagttagcgcattaagtcgggcacagcgtgacaggctggtatctcggacaggtttcgacgtaacaaaacaaaatgggtcggatagtgcccctggttgggtattcttgagtactctcaaaatctaaagtcatcagtcaagttctctggatcaattttccaagcaaaggcacgaagcatgcaacaacagaaaagcaaagaacatgtttcattcattaaccggttggaaaccattagaaaaggaaaaaaataccgactcattatgagccaacctttgatttccttgatctcctcctcctcctcctactaaactattactaaactaccactacactatactactatttcagccggtagcaccttgccaccaccatcaccgtcgtcgcccccgctgtcgctgcctttgccaccgtcgtcgccaccttcgctgtcgtcgttgccgcccttgcctccctcctcggagtctagagtcctcctcctcctcctccaaggagcccccctctaagtcagctgacccaccgagccccg

SEQ ID NO: 170440 - DNA, 856 bp, Zea Mays
ctgaattatggccaccagtgaacttggaagaacttggagatcgaattgtaaggaattgagtgagtaactgagtaagatctttataacaaatttgtagttggttctttggacgacaatattgatgcagacaagtgaccgagttgttacataaaaaaagagaacaaagctctccaaatcgtgttgtcgggacgtctgatgaagatcgccatggtatagtgaccataaagatctccagtgtcgtgcgctcgacgccggtgatccgccaccacaattcgcaatcgcttgggagatttatgccatgggaagtgtagataatgtcgaggcgaggtgaaaatatccagtgcggggtgaatccggtcgctggccggaccggccgtcgtgtcccgccgtggtcaatcacgctggcatcaccggagtgtccggccaggctacgtgcctcaaagccttaccacgtcgcaatagactgctttaggtagcttgttcatcacctaagacactgccctagtaaaagcaacgacagcacttgcgctagtgacttcccctctctccggccgccaccacccttccttcaaattggacgccaccgccatagaactatataaattgcggcccccgtgtgtttcgctaggtatttacgcatccaacacaccagcccttgcctcggatcacccaccagagcccctcaatttctcatttcccccaaatcagtcagaacaccgccgtgagagagctcgtcattggccagacgtctacgggtttgttcatactcttccgtgtgatgttctagcctccctcatgcctcctgtagctcaccgacccattggattgaactagaccgcactggattgccctgaac

SEQ ID NO: 170441 - DNA, 335 bp, Zea Mays
gtggggttctggccacgaaaccagggccagagatgggagaacgacggagggagagctccgagcatgttgggggtaacttcggcgaggaatcctggccgcgaggaaaggcaatcgagtgtgatagggctcagtttagtcccggtaggggtaggggagtgttatgggccaacatcggggcatggggcgaggttgagttggccaggcaccgcgcggggcacggcgagcaggcgaggccaaattggctacggtcaggcacgaataagaaaaataaagcatgggaacatatgtctcacctcgggacggagctcggggtggcttggcgtgacttctgacgg

SEQ ID NO: 170442 - DNA, 643 bp, Zea Mays
tacgttcttgctgctatcgcgggcatatctttcgaagcgttaggaatcgccggctcagcatccgtaggtctcgcctcggcgatctacgttgcgtgtgcgaggatcgttgcgtttcgtgaatgctcattttatctagtacgtgttccaaatggcgatgctcattgacgatagcttggatgcttgcaagtatcctgaatacttggatgagatctgtgtgaacccatttgacccatgacctgataatctaaactgcagtagtaaaaaattctagctcgagggctggattttactataggtgactgggtgttgggctatctcaacaggccacacaaaaggccatggaaatgcaaaaatttctctcgcacggcactgtagcgctatgcatgtgtctctaacaggccacacattcacaagaggcaaaatgcacatgaggagagaggttatacaaatttgcacaccctgtcttcttcaatgcataagcataactgtgcatgtgagggaggcaatgaggaataagaatctatactactcctattaagtacctaaagaaggcgtccacatgcccccgcccccgcccccgcgtgccctcgcccgacccctcacagcgcccctcgcctgcgcacggtcgcacgttacccgctgc

SEQ ID NO: 170443 - DNA, 332 bp, Zea Mays
gggaggatggattgcacgagaacttcggctgttataattttacgtaccgcaaggacatgaagacactggtggttagctaccgcactaagtggccgaccggttggaaaactgaatggttttatgttaaaattgatgagaaaaaggagaagctagttcagagcccgctggaactaaccttcgggttgactaggtctcagtgcaacatgacactgggggcaccatgcccagatgctgtgggcgaatttagaattgtatctgaacatattggtactagagatttagtttaggaatacttagccaacagagtattcccaatgctatgggaatggggt

SEQ ID NO: 170444 - DNA, 1270 bp, Zea Mays
tgggttagggaatcaagtcatagtgttctcgttgatcgagaagtttttagtggctcccattcaccccctctggtcgcctcaccgatccttcaactggtattggagctagttacggattttccttccctaatcattttgaaatccacgtaggtgacatggaacgtggtgttggcaagccctttgatgggaccaactacccatactagaagatttgcatgtctatgtttcttcaaaatattggatattgagtttgggagatatgcctctatgctacgttcaatgctacaagtgaactaatcactccaattcaagtggagttccatgattcgaacaataaagctcacaattctttgttctcatgcctcttgttgggtgagtttgagcgagttcgacatttggctacggctcatgagatctggtctaccctcgagaaattctctgaggacaatgatcttgtgaaaaccagactctttgagatgtaccagcgagagtacaagaactttgttcaggtgatgggagagaccatagacactatgttttcttggttctagtctatcgtgaacaagatgcgtgccaacaaggcatagttaccctatgatgatcatgagagagcgctcaaactacttcatgctctggatcagagcatttgggaggtaaaggtctcgacgatcaacaagtcgcccaactacgagaccctcaccacagatgagttgtttagaaagatcaaatctatcgagattgaccactaggctcgagccaagattgaaaaccctggtgcacccaccatggccctagaatctggaggtggtccctcctctaacccctcacctgctatgtttgctttctcctctttattgtctatcacagaggaataggtggagagccttagggatgaggagctgctattggtgaccatttggttcatgcagttccactgcagcgatgtggcaggtcgaaggatggatgcttcaactttggcaaccccgaccactttgtcaccagttgccccaagaagggccacaggaggctgacccatgtgaccaccactctgatcgccgcaaggggaagcgggagtacacctccggcaagcacaagtctaagggaggattcgacaagcaggcactcgagaagaagtacctccagaaggctaagatcaaggagcacacctttcttgcctcccttagcgacctcaaccacgactccgatgatgcagcatcttcctcgagcgacgaggagactgataggaaagtcgaggacaagctgaacggac

SEQ ID NO: 170445 - DNA, 657 bp, Zea Mays
ccggccacagtaggcacgggtacagccgaggagccttcaccggcatccaagggcggcaccggattgacctccacagcctcgggcggcgcaccggccagacctccaaggtccccaacatcctcggcacgcgccatctgcagcgacagcacattcactcagcaaaaccatacatacccacacacataaccacacaaaaaaataacctttacctgctctctcgcccggtcagatcgttccctgaccgcctcccgaccgtgcgaaccccacatcctatcgaagagtgcccccgctgactgcttcaccacagggtcttcggccttgaagatttcacgttcaaagttctcgtctgattggttgaagacctcgtagtgcctgcagccctcgcgggacaatgcattcatggccccctcgcaggtgacgagggaggcgaaggacatgaaaccttccataatggtcgggagcaccagcagctcctcctgcaaccattcgaggaagcgaaggcctgcttctcggtcgggtacctcaaagtcagtagtccgcgcacccaactcgcggtacgcttccatgaactgtgtgtgcgtccgctcaactttcgagcgcgtcgaggcctcggccttgtccacggggttgcacaaggcgttgaaccttgcctccagc

SEQ ID NO: 170446 - DNA, 569 bp, Zea Mays
ttcttggccttctcatgcaccaaagttgtgctgactgcactgtgggatgctacgacgtataagagtacagcggaggggcttcgggcttgttaaggttatttatgatagataagttttgagagaatcaaagggcgctgcctgctcggggcccagacgaagttttttgctcccctcatgttctttaggaaaggtaggcttcgctctatagatcgcgagatgaatttgtttaatgctgccagccttcctgtgagcctttggatgtcttttgctgattgcggaggctgcatatcctttattgcttagactttggtggggttggccacgatacctctgtgggatacaaggtagcccaagattatgccctagcggacaccaaaggcacacttttctagatttaggtgaagccttgcttcacacattcttgcaaacgttttgacgaggtcaccaatgtggtcttccttgtttttgcttgcgacgacaatgtcatcgacgtaagtgaagacgttgcggcccagttgctcttcgagcaatgacttagttaggagtgaaaaggcagagccgacattctt

SEQ ID NO: 170447 - DNA, 438 bp, Zea Mays
ctgaaaagagatgtagctgcacacgtggctgttcatgatgtatgtcaaagggtcaaagttgaacatcagagaccagctggactactgcacccgttaaaagtgctcgaatggaagtgggaagaaattggtatggatttcattaccgggttgcctcgcaccccgaagggttatgattccatatgggtgatcgtggatagactgaccaaaggggctcacttcattccggtcaagacaacttacaagggttctaagttggcagagttatatatggctcgaattatgtgcctacatggagtaccaaagaagattgtttctgattgaggatctcaattatgagaatatggatacgaagttgaacttcagtttggcctatcatccccaaacggatggccagactgagagaactaacctagtactagaggatatgttgagagcttg

SEQ ID NO: 170448 - DNA, 697 bp, Zea Mays
gctggactcccttgctgcgctggtgcttatgtggccgagctcggcgccatgattcatggcgccaagctcccatcaacggttgtggtcctgacatgaagcctgtggaatctatccatgcatccatcacaaaagactggaacaaacaccgccctctctgctgcactgatcgtcctgcaccttctaccactgatgctctcgtcccgacctcgcttttccctacacacaaccctagtcaaatttcccacatgtgacctaattaaccaaacccaccaagcacatcatgcaagctcatttctcactgcaaccacacactagtcgatcgacctcactcatcgaagctaataatgcatgtctgcacccccacaccttttttgtgttgatttcattcatgactcaacgaaatttaacaatgataaaatcaaggaagcttagcgcattgtcatactccggtagcctggttcatatgaactagcactgctacatccagagagaaggtggtacatgacacttgctggtttttgcagaaaagttactccgacacatatagcgatccaatttgcacatgcttggacatttttacacacgtgctcattgtacgtgttggcaatgcaggtgaggaaataatggcgaggtgcacccgcgcatacatgcagcatgggattcaatttggctacgaccggatataggaggttggcac

SEQ ID NO: 170449 - DNA, 453 bp, Zea Mays
gccgcttgtggaaagctgggaaatgtcaaaggaaaccatcaatgattctagccaaggtgatttggtccggctgaagtacaccttcaggtttggagataagtttgatgaaccaaatgatgattggctgaagtgcattgaaactattagcgatgagttacttggggcgtactccaaaactgaggacaatgccttgtccgcagccttcggtggtcggagaaagaaaagattaaacagggtttttgacgccatcggcttcgtatactctgactaccgctacccgttgaagggacaggggaaaaagaggaaaactgctgcttcggacaccccagataagcctgtgccgaagggcaaaaagttgaaggttcttacccaccggccgcgttacattgaaccggccgtggttcctgagtttggcgcagggacatcttctgctaccgaaagaaaagaaactgc

SEQ ID NO: 170450 - DNA, 1022 bp, Zea Mays
gaagaatgtgttctcatccattagtttcttttcctttttacaaataatgtatttatctacctctgtggctctaagcttctattgtaatcatagaaactgaatgacttgcacctggtttgggaccacacttgatgacaaatgaggaatagatgactatggacttggtctaagggaaaagtccacattctctagggcatcccggagctgggtcgccacttagcctggtcctgtatacaccttccaccgccccagaatagctgacttagtaccttccggaataggtacctggaagtctggacttcgtctagattcaaggcccaacacgaaagtcttggataagcaaggttcaactgcgtgattcagaggattgaatatattaaagtaaagaccctaagggaacactcccagacatcgatcttggaacatgttcaagattggcccttggttcgatgatagcctcagacaatcttggactatgggctacgtgaggacaaggctcgttgttcagcgctgcggcgaggcttgacaataggctgtgatgacctcatggcgaggcagtcacaactgtggcacggtgcaagcgtgcaatgaccaatgacgagaaccaagtcgggccctggcgacagcagtcacagctagtcccctcggtggctcgacaaggaggtagcaggccgatctagcaaggatggcatcctacgacgactagatccccattgtcttgacgaggaggtggcagatcgatccagcgaggaggcatactgcgatgacagaattaggcgacgtggctcaaggattagatgaagaggcggctagtgatggccgtggtagttggttccagcgaggagaaaacccctggcgtgacatcgtgatgaccattgtaagaacatttatgctatatctaacactacttatgctcaaacttgaagattttacgatcatgaataccatgccccagagatattcaggtctctcatgtggacttggtatttagtatttacgatgaccgcatgaggtcacacata

SEQ ID NO: 170451 - DNA, 936 bp, Zea Mays
gcagggagagacaccggtgctctaagccgagggctgggcagggggcgccgaggctgggcaggctgggagccacgcgcgcaggacctgtcgaccgcgccgtgcagagaagacgaggggggaggggctcctcacctcgacggggaatagcagctacaacccatggatgaaccttcaactcgccatggatcatcggcgactcgtcggagtagtggctggtcggggcacctcagtggggctgcgtgcaggggcttcgaacgaccacacagagcgcacacgcccggaggccgctcggccgggggaacagagggaggacgcacgagacgggagagaggagaggactcacctggaaccgccatttgcagatgcgcgatttgaatctggggagggatacgaggagttatgcgacggtggggtgagtatatagaaaagaactcatcattaattaattgtgtcgcgatcgagtgagagaggcggttgcgagcgcgacaaattacgcgagacagggtaagacggagactgagtcggacgagtggtagacagagttagataaaattagaggaagacggtcagagctggcccgcgggtccaagacgatgagatagacgtcggaggggtagacagggatagacgaggatagccgtcgcgagcagcatgtcgttcgcgagaagaagcagttcggtgatttcgcgaaaaaagcacgagatctggaacaggctcgacgagaggtagaagaaatatatatgtattatcgaaattccagagttttatagtttttcacaaatgctaaatttttaggtatttaaataatattagaaaaaaaactgaaattcatatttaatatccaaagaaacgttccaaagattccaaccactcttggaaacgtcctcgagatattcttttaacatgttttcgataacattttgcactcataaacac

SEQ ID NO: 170452 - DNA, 436 bp, Zea Mays
tcctaacagggcctgaagtcttttcctccaggcaggggtatttttgttgctaggtgggaagtaacgaaggggggtttcaaagacctccctgctgtagttttggcatagctgtcggagggcttttcgggcaatattttggcaagtgtctgggaagcggtgtctggtgaaggtgacttggaaaggagggtggttcggttagtttcggttttctcccaggtagactgccatagagcacttctcagttccattctcgtggtattctttccagatgtactccgatttcttgcgaatctccatgcgaagcgcgcaactccacaagagatgagggaatccttccacctctgagcagtaggatgtcctaatgaccaaggagccttccatctggtagaggaaaagaagggtctgttaatatcgggggaaaggagagaagattttt

SEQ ID NO: 170453 - DNA, 1244 bp, Zea Mays
gatttttatttatctggatctggtgttaacaaaataagattttagagaagaatcatgctctaatcatttgttagaccaattgagcaactctagagtctgtaaatctttagtccattatctcacaacccattccattctactggtgattctgaacatctggtgtgaagctagagaaaattgccattccattctactggtgattctgaacatctgaattgactatctgtttggttccctgtatagccatgctttgctgctttttagccatgctgctttttagccctctcttctttactctttgctttgctgctacatactcttgctggtcacaagcagtacctaggatcaatgatgttgagctgagttctatggttacttttgaatatattcatacttgtttattagtttctgagctgtcgatcaatggtatatgatgcttcaatgcctctgggtggcgcatctcttgtatgtcgcagccgtggctcgtgtaagaatctgttttacatatttgcaactagcacatcactgtttagcgtgcttgatcatatattttctgagctatagatcaatgttctatgatgctagtatgcctctgagctatagatcaatgttctatgaatttcctttttagcaactagcacaacacatgtgagccaacttagacctctaatcttcttttctattttattactctagcaatggatcctgctattgcacgccgtcggctaattgcaaaggcagtggtccttgtagcagttatgtcagcctggttggatgcatggttgaggcaccgactgcatgctaggaggtctatcacttatggcccaatgcaccaaagagaccaagagaggcaaaacaacctgagatttatttatgaatccactgatgttgagtgtgtcgacttactcaggatgagaagagccccttttatgcagttgtgtgacctttttcgcactaggcagctattgagagatagcattcatagctcagtagaggagcaggttgccatgtttttacatgtggtaggtcataaccaaaggtttagagttatacacatgacctttcgaagatctattgagaccatcagtagatacttcagggaagtattgtatgctgttggtgaactgagaaatgaaacgatcttaccaccttcaactgctacaccaaccaaaattagagatagccacagatggtacccctatttcaaggtcagccctccaaacacacaactactgatcccttcc

SEQ ID NO: 170454 - DNA, 512 bp, Zea Mays
gtgcaggactgcgggttgatttggatattgcacagggtctcttatgcactttcactcggccgaaagggtatcaagcgacagcagccatccgatcaagcgtcagcgaccatgattagatctccgtatttacccaacccgcgcgcatgatggccacaggatcaaaactctacgcaccagattcaattatcctggaatcacctgcccatggtccgatctaaatcggacgactctcagcttccaacgtgaatcggtgtaacacgtcttaatccgagccgttcaactacgaaccagcgtccgagattcgtttgccccagccaaccgaactccggcggcggagctgcccacccgcggccgcgcaacccgccggaatcccacaccccaacatccggtgacgaatccccagcctggattagcgcaaaatgaaataggggtgattgggagctacacggatggcttcgcaggactcggttcgtagtggagggccccggccgcggaaagacgattccatggcg

SEQ ID NO: 170455 - DNA, 625 bp, Zea Mays
gggtgggagaatggggagggagaggtggcgacagttagggttgtagtggtcgaatcttacacaccctattttttagatatttattccacgctaaactcacgcataaatatagaagagatagttatagttagataaactactggcccgacgatccatatgtgtcttctatttgtgattttttctctcgacaagcaaccagaaacctaaatcgactgcgttgcgaagcttttttctgatttcttcgacgagtgccttggcttgtgtccttagagcatctccatcagctcacctataatccatccttaataagatgatattaatgatcaccagtaatggtgttttggaatattagagaagatttagtagattaacaataataaacttcgtcagtacatgggatcgacatgttatgtcataatttatttattttctcttttttgtttctctcgattcatatgccccgtagagtacccattcacatcgtaacctcctcgcccacgcgtgacctttcgtggtgcaactcctttcgaatgtgccattatcaaggggtgccctagctctcacatttgttagtgcatcccttttccctactagcgcctgcatctatcttcctcctcgactcccc

SEQ ID NO: 170456 - DNA, 741 bp, Zea Mays
tcgcatcgaaggtaatcgcttctggattctactgcatgtggatttctacaacactgttattcttcccaaaaaatcaacccatcttgcatcaacgtcatataaattggagtggttatgaaaatattggtgatagggaaatgtccttggccttgagggcttatgagaataagaatatgaaagacatcatggctttcatttttattggaatgatgaggtcattgcacagttttactccactctctggataaaaagggctgatgaagaaagtccctacaactacccctacatgaatttctttcttgaagggagttggtacaatgtcagccacagaaggtttgcccacatcctagaattctccgacaacgacattgctgaggacagggtaaagattcatgattatcgccctcctaccagagatgaagttgtgacaccccaggtgtctatttcgtgttaatctcgaatgctcagtgaaaatttctatctctttatcacatttatctccattcatcaagttatttgtgaaggtttcaccaatttttgaatttcttcgatctcaagaacaaccaaatttggagcctgttaaaactttttgtttcttgacgcaaacgcaaattcaaaagtcaatctcgtctcgcgactcccgtccagactcatttattcggactctcgatagttgctatgttatccaatcggtgtccgaatccgctttctcgatagtcggtctatgtacaaatacgtagt

SEQ ID NO: 170457 - DNA, 3067 bp, Zea Mays
aggttattatcctcaagcaaatggtctagcagaagcatttaacaaaacacttggaaaaatactaaagaagacagtcaccaagaatcgaagagattggcatgatcgtctatttgaagctttatgggcatatcgagtctctgtgcgtacaccaacacaagccaccccatactctcttgtttatgggagtgaagcagtcctaccccttgaagtgcaactaccctcactacgaattgccattcatgaagggattagtaatgatgaacaaatcaaactcagattccaagagcttgatgccctagaagaaggacgccttcaagctgttcaaaatcttgagctatatcgccaaaacatggtaagagcttatgataagcttgttaaacacagagtattcagaaaaggtgaacttgtgcttgttcttcgacgtccaattatcattacccataagaagaaaggaaagtttgagccaaaatgggaaggaccatttgttattgaacaagtttatgatggtggtgcatatcaactggtggatcatcaaggttgtcgtcccatgcctccggttaatgggagatacctcaagaaatactttgcataaccaagtatcgatgtaattttctatccttttttatttttattttatttttattattattatttaaaaaaagtttttttatggactcatagtcctacatcaaaggctttcctccaactttcatcaggtatgccagcaactggttgtcattataggatgtgaccctggacagggaatgtcccaaccaattaaactttgctctgaagtgacctcaacataagtacttggtctgcaccaataagtgacaaaaggaactagccagactcagattcagattgactctggaagtggtgagtttatcatgccatctacattcatccaactaggggaatgctaggcctcaagggaaactatagagaaaagagcatgaaagggctaccaagcttgacaaaagtctagttttgtgtgaagccacatgccacccaacgaggtatcaacaagggccaataaaaaaatgtagccagcgaggattttagtcatcaaaggtggatgctacccttcaaattcacaaaaaagtgacctgcaaacaacactaaaaaaatgggcgccaaagaagcggtctctctgaaaaaaaatcaatcatgtgttgtgcaaattcaagtaaagcagtttgaaggcggagggtagctatccaccatcctcggcaaaagtgatggcaaaacaattgcctcggccatattcccaaaccttacccccaaaatattagccatatcccacattccccattgaaaagacgtgaatggcatgggacacatgactgaagggaggtctgatgatggtccgcctagcttcaagaggtcatgaggaagtgctaacctttgatacgcagacaatacgaggaagctgaagtacaagtgaaaatcgtgttgaagattcgagaagtgatgctaaacataccctttagtggcaccgttgctggctatcatataacttggtgacctaaaggaaagccaacaattttttttaaaaaaaactttgttcctttcattctttaaaattatcgcataaagtcctcagtctagaagtgacgttcttgttgtctacttgacaaatgtgtcttactagagatatttacccctttgtggtaagatttttactcaaatgaacgattatttgcatgttcatggtatttcggacacaggcacatacaagttattatttaagaagcagtgaagcagaccagtgtggtgactgtggatctgtggacaaagtcaagatatatggttggcaccatggctgctatatggtcgcatttatcctgactaggaactaggttcattggctggcactaaatttcttagtcgcaatgaaaccgtatgttctagcatgacaaaacagatggccggcaccatggtggtcgcgtccgtcggtgataacaaatttcgttggttaatgctgatatatttagcctcaatgaaattgagttatatagacctactcaaagttgatagcatggatatacgctacaccttgtacgatctctaattattctataattatttaacgaagttgtggcatggtcttacgccaacaaattggaaaagtgcagagttgtggcatggttttacatagcggcagtctgtgctttactttggctgatcaaacacattagccacatgcaacgtatcatgtgaatcatgggaacactacagaaatgaaccgtttgattattattactactcctgggaattgtaaatacatcacatatagaattctagggaagaaaatacaatagataaggtaccagagtactcctatttattgattaactagtattgaatactaaactatggctgatggccagtacattatttaaacaatgagagagagagagactaaatatattcatgcatatggtctgaaggtgcaggacgcaaaaaagtcaagaagggagtggacatagttggtaagtccttcctcgtcctgatcagtgaagccggcaatagttttttctgcatcctgaagttggctctgacttttaacagaggaggcctccaattctgattggaaagacacgatttttgccagtcgctcattgtgccgggtcaaaagagttgcagtttcttcttttataagtgtctctaaaagcaaaccatcctcagtctctttgagctgggaagacagtttctttatttgggcttgtaattcctcagcacgagatacatgttgttgccgccttagttcatgcaaattaatttgcgcctcaaggcttttggtaatactaatcatggaagaacaagcagtagcaacagaggcttgagaagcttttatgtcatcaatcttttgacgtacttgcttcctcttgtcaatgatgctggtagtggagtgctctggattttcagagagagtctcatgtagagcattgaacccatctattaatctttgtatttttggcggagctgggttaaaccactccttccaccatttcatagtatcggctatctccgagatcacaatgtctttgttgaaggggcgttc

SEQ ID NO: 170458 - DNA, 498 bp, Zea Mays
tgccattggaaaatcagagaaaaagtggcttaaacttgctctatcaggcaactgaatggggggatcaccatggtacagtagcttgagtggatcaggacgccagcgcggcttgctcgccgccgatgaccctcccccgcgcaaggattcgcgccgccgcgttaagattaacgttcgctgacaatcggataacgctgcgtggttaaaagatcgtcgtcgccgtcgagctggaagccaccccggtcagccgcggtaccccttccctttgctcaccgccgtagaaaaagccgctcgccatcgtcgtgcaatctctgtgcccgccgtgtgtccgagcctttccacggcaccaccgtgattccctactgccgtcccatcatcgtcgatgaggttgccacgcctctggacacgtattcaccgcgcccagggttcttccctacctccggccgccgcgcgtcttgctcaaaattcgcggccaccgccctctagcactataaattgacc

SEQ ID NO: 170459 - DNA, 1019 bp, Zea Mays
gctttagcatggtggtggacagcgctcggcgcgatgtaaaggaacttctaggcgaagctccagcgatggcgtggttgcagcacggcactgacaagctggaacagcgccacaaaaaagcttcggtgaacggacacaactagtagcagtgcaagacgagtggcagggcgacgatgggaacaggcactcggcacaacagtagggagtagaggccaaattgcaaatacttcatcttcctcctaacttctctgctctctggttgtgggagcaggcaccatagcgggtaaagtgggcgcgcgtcacatggcgcagagccgtagaagcagggggggtcaaaggaggagatgcaggggaagccgttgccggcggtgaggaaggctcggcggcgccgaattggctcgacagcgatggttggcaagcaacggtgcatggcttatgcgggcagtaggaatggggcatgggaagaggaatggcgagcatgcaggggctcatcacgctttatagccacgggctagcagatgagagggtgccgaaaggagaaacgacgctgcacaaatgctcggcatctattggtgatggtagctggcgagtggacaagaaactgacgtggttaatggagaggaattagtcacgagaaactgtcacgacaagtaacaggcgtgggacggctaggcaccgagtgcggtgcggcagtccactgcctgggatgcgagcaggcgggggagacaaagcaacagtggcaggcgacgagaaggtagattgcagcgacggcgctgcctagacccgttcgaatggacgaacagagaagaaggctggagcagcagtgggatccacttgccattgaaagaaaagaaaagagagggagacccacaagtaagtgatagagtggaggaaacgtgagatgcctcctgctggtcgctggttgagtgggctgagcttgagaggggctggctagactaggaagctcgtgcgttccttttgcatttttgtttttttaatcgacgaatttagagtgttacact

SEQ ID NO: 170460 - DNA, 740 bp, Zea Mays
gccttttccaattcgttgtaggccacatgaggaacaaagcgaaccatcttgttaaagcccacttcatattatgtaatcgactttttctcctgcttgtacgattgcaagtctatcttcatcttctctaggaaagtgattgggtaaaatctcctttcaaattgcctaataaaaatgtcccaggtcaggtatcccggtgaagacgagtgagctgcctgcacgcctctccaccaaatttgagcctcctccttcaacatctgcgtgccaaagcgaacatgatccctaaacactatctcaaagacatccatcttatcttccacataaatcagccaatctgccgcctcaactggagtaccactaccatcaaaagtgtccaacttcaagcccatccactagatccgagaaagaccactgacgggaagaggcacctcagccccaccacctggagcagcacccgcaaggacaacacccctgggaacacctccaataccagcaccctgagcatccgtggccggagcagaaccagcaggagcaactagaatggcttgcctcagaatggccaactcctgctgcatggcctgcatcgcggctaacattgacgccggactcatagaatccccactatgatcatgcgggctgacacgaggccttcgaggcggcatagttgcagccacaggggtaaataaaaaaatagcacaacatcaactttaagtaaatcaaacgagcactgacaattcatgtta

SEQ ID NO: 170461 - DNA, 785 bp, Zea Mays
gctggcggctggcctcgtccgccatttctggaatcgtggacgcgtgactggaattggatccagctagcctctcgtggatttggtgggtgtgctgcgtgtgcgagagtgggatgcttggtgatgcgatagtactagctcgttgcgtgatccatggccaggatgccaaattcgaaactctgtttttttggcctttccggaaaatttttagatttcagtggcacggccggagaatccgggcgtgattcttgccttgctctgctccgtttgtgtaatctgttatttgcttctcctcgccccaattcttcccgtccctctacggtggatgtttcgaccagaatagaagtcgcttctgtcgggaggcttacaaaaagagcgtcttgacttcagtcagcctcttgcaaattgcaatcgcagctactctgcgaggttttgccacgcttttgagattgtgctctgcttgtaagttgtctctttttttgagttttggtggtgtggccttcagcacgtgtttgccaattttgctctcatcttgatctgttcaaacgctcggcacgttccggaaactcactatgccaagtttgctgtcctatgctccattgggtgcgtccagaggtgttcctcttgtttgtttcgtcaagaccagagattgtcggtgttgttttttcgtctgttacgtgctctcctctttttaactcttttggattcatttgtcttagatgaaattcatcttgatccagtcatatttttgcattttttgctctatacaatagctttgatctctctcg

SEQ ID NO: 170462 - DNA, 565 bp, Zea Mays
gttctcgaagataaatctgaggtcaggttgctatcagctcaggatccggccttcggacataccgaagactgcattcatcaccaagtatggactttatgagttcactatcatgtcattcggtctaaaaaatgtgccagcattcttcatgtacttgatgaatagtgtgttcatggactacctcgataagtttgtagtagtgttcattgatgatatcctcatatattcctagaatgagcaagagcatgaagagcatttgaggaaagtattgcagaggctacgggattgtcagctgtaggccaagcttagcatgttcgagttctggatcagcgaagtcctgttcttgggtcataatataaatcgagatggattagatgtgggtccgaagaaggtagcagttattctggattggaaagcaccgaatgatgtctggggaatcaagagtttcattggaatggccggctactattggcatttcattgaaagtttctcaaagattgctaggccaatgatggcactgttagcgaagaaagttgggttcaagtggaccctagcgtgccaagagtcc

SEQ ID NO: 170463 - DNA, 507 bp, Zea Mays
gttagcttcaatgccccagtatgaaaccaggaaccccagcaacttccctgcggagacaccgaagatgcatttctctgggtttagcttggtgcgggttgcccgcagcttgccgaaaaccagggtcaggtcttccactatagccgacccttccctagtcttgaccacgatgtcatcgacgtaaatttccaccttatcccagatcaggtcccggaaggtcttgctcatcgcccgaacaaaagttggcaaggcattcctcagactgtagggcattacaacataacagtatagtccatctactgtcacaaaagcggtatgcctcctatcctccttagccatccggatttggtggaaaccagagtaagcgtccaagaaggacaagaggtcgcaccccgaagtagagtccacaatctgatctatacgcgacagtggatacgggtccttggggcatgccttattcaggctggtgtagtcgatgcacatccgaagcttcccgttggccttcggcac

SEQ ID NO: 170464 - DNA, 577 bp, Zea Mays
ctagtacaaaataaaattttaattagtcattatatgacgacatttgaagcaagagatttataagtgaaatgtacctatcatatgtagacttgggagactgaatgtcggtctgtgaaggttcatttgtacccgcatatttgcgactcctctgtttcctatttctttttttggtaccgttgagtgggcacttataacttgtttgtctgtgaccaagttctccacattttttgcatcgtatagggcctcttttcatttgcctaccaccttctttattacttgtcttaggtttactcccaccttcgagacaacctttcattcgtaatttcctttgcctaccaacacctcgttttgctaaaggtccttttacatcagggtccatatcaacatgaggccactgtgaacgatcccttataggatagatgactctacagtatgcttctctaaacttttgtactgaataaaaatcatgcacatagttttcgatcctttcacttctaaaactagtgatgacaactatggcatggtcacaaggcttcccagtgtgctgccactccagacatgagcactcttgtgctcc

SEQ ID NO: 170465 - DNA, 830 bp, Zea Mays
attagagtggtgaaggatggagaacagactttgacttagggacaagagaagctagaggacgatagacggtgggtggcttacacctagggtcattggccagtgcaagtgtgcatggagtagaccatgttgacccggtcaagatgatggttgacgaagtcaaatggagattgcgaacacaagattgacttgtcccttgtggtttggattgatgatgagtgattgttaacatgggtaatgctttggtatgtgttagtggactaacaagagtacgagcttgtgttatgcaaccatgtcactcggcttatggtgtgcaggtgtacagtctagggacggtgctcaacaacgaaggtgaacatgctggttcatgtcgatgggctgggagcggcgaaggacaagtgctaggtcttgatcgagggactagagaaggtgactagctgtggtggctgacacttgggacatgcaccggtacgaggacgtggaggaggagatcatgttgccaaaaccgacacgagacaataggacacgtgtctaggacatggggggcgtgtatggagcacgctactcacggcaactttggtggttgagcctcaaaaacacccagcgctatagttcgctggtttcgccaagtttgggcctcaaaactcgatggtgtagttccagcaggaattagaggcggcacgtggcatcatcgtgaagggtgcattgaggcgaagcaactttgtggaaagcatgtggtcctcaaatgcatattccaggagttggaccattttacccccggttaagtggatgagctctatgtttctaggggtagtttagactagtgaaataac

SEQ ID NO: 170466 - DNA, 968 bp, Zea Mays
aaataagattggccaatgtctgtcccttaactgccttcgcaggcttgtaccggatgtcgaattctgacagtgtgaacatccacttcccaagtcggcctttcaacacaggacccaacaacatatgcttgatgacatctgacttgcagatgacattcatttctacgaacaacaaaatgtgacgaagtttggtgcaggtgaagaataggcagagacataacttctcaatgttagggtatctggtctctgcatctaacattcttctactgaggtagaaaacaactctctcctggccatcatggacttgtaccaacacgaaggagatggaggtgtcgcctaccacgacaggtatacatagaacagttcgtccgcctgtggtggaaccaacattggagatttttataggtattccttaatttctttgaatgccctctattgatctggtctccaacagaacttgttatcacttttgatcctcactaagttcatgcacggctcaatccgcccctgataggttggaaataaacctcctaacaaaatcgaccttgctgattagccactagagctccttcatggtaggcggtgtcattgtcttgactgcttcttgactcttcaggtcgatctctattcctcgctcatgaaccaggaatctaaggatttgactggccattaccccaaaggtgcacttttttgggttcattttgagctcaaacttcctaattcattgtaggacctaacgcaaatcttctatgtgcctcccagtggatacagatttgaacacgacatcatcaatgtagatctccatcggctttccaatcaggtcgtggaagatgtaattcatggcgcgttggtatttagcgctagcattgttcaacccaaaggtcatgatcaaatactcgaacatacccactgagccaggtaccctggatgcggtcttgtgcacgtcttttggggccatgaaaatctagttg

SEQ ID NO: 170467 - DNA, 294 bp, Zea Mays
atttatcgtcaagacgaagtcgtctcccagcacgtacagactgaccacacaatctggcgaagacctggaacattcctggaatatagataatcttcgcaaattttttgtttgaatcctcagggccatcacgcccttgtaattcaccaaacattattattccggcccgcactcttttcctcccaggggtgtgaggtttttaatgaggcggcaccatgtaatatacaagcaaaaatcccccgcaaaaaactaagccaatgtcgaaaaagaccgcatcgacggccttcggcattcgac

SEQ ID NO: 170468 - DNA, 316 bp, Zea Mays
gttgcaacggcaataattatgaaaacaaggcacgtaactatcgctaccctgtagcgccttcgtcgccacccgcttcttctaggcgcaaatgctctgcaccaccacgatacgcaagcgagaacgaagcagaaagtggtcattttttgcatccagatagacatggcacccaattctctttaaaacttttgctaagacttaacaatacattttattctgggggctaaattattatcctactaacttgaccataaattagcaacaattattattatttatatgaaattagcaccatacttataatctactccaatcattc

SEQ ID NO: 170469 - DNA, 1082 bp, Zea Mays
gtccagagccggacggcctggggtcatcaggaatgggtccctgacccggatagggaggaggaggagcagatgtgtagaaggagtcgtcaaactccttgacctcatcctcaggagtaacgaatggcacaccatactcctgttggtgccactcgttaaggttctcggggtaggtaggggttggaggcggaggagagcgtggacgcaagggatgacccatggaggctgtgtaacctcaaaagtcctcatgcagcgcctcagtccggcgcctatgcacgaactcctcgattgcccagctgcggcacatggcgaagacgccggcgatgcccttggccaaacacacaaacatgccctgaccctaaccgcgtccccggccctgacctctacctctctcgctacggtccatcggacacgaagcagcgacagcgcgagaagaggtctcgtgatgaggaggctgaggaggtggctcgtcagaagaagcagggcctcctgaccctgcgagagcccgcttggaacgtgcagctgggttgttggagccaacccagtacggcatgtagcgggagtgtttgataggcttatcgaagcgagtctgggtgactacttcgatcatcttcatgataaagggtgcatgaagacaccccttgagtggagaccaggaagcacgaagaatctcctccctgatcatgtcaaatacattgatgcgggcgagactgttgggagtaaggagaagaaggagaatccgactctccctaaggacgttcatttgattcccgcccttaggtagaatggtcatcctagacaatgagttaagatacctatagtacctatgcatattcaatgtcacccaaaattccctttcctttgaaatgtgaacaaattcttgttcctcccgcctaggcagcctaatgtcatggacttttagattgttgccttgaatgtcattatcagagaagcccaagatatgggcaaaacgacgatagctaactttatgctagattccctggataaagaagtacatactaggtaatcatacccatcagcttcgtcatccactgtcttcacccagagagtggcataaaactgag

SEQ ID NO: 170470 - DNA, 654 bp, Zea Mays
cgcgtccgtgctgtcagtctgcgtcgcagtctgcgccgtcagtttcgtagtctgcgctgtcagtctgccagaaattccgcgcagtcaatgcctttttctgcgcgcttttactgtgcagtctgaccagaaaccggttgaaccggttttataaccggttgaaccggttttctgtcttttgatcggtcgacgcctcccctatttctctccccctcctctcttctcttcttctcagtttcactttccagccgtcgccgcccactctttttcctctctctctccttcacaccttctccactccaaaacccacttgtgccttctcatctttggaagatttgttggagatccgttcatcctggcgttttccatcatctcccttgatcttgttgggatttcgtgattcaaactccggatcgtggtattgccctatttcatttctttttactcgatcccactcgttcttgattatctagtgtatcattctttgggtacattttagtttaagtgcttgcaacacttagattatcttcatttgtcacggacattgttagagtttagcggtttgatattgttcattgtagttgaaccgctcatatgaacggttgaagtgcatgctcaatatcatacacgtttctactcaaacgtgtttgatccttg

SEQ ID NO: 170471 - DNA, 539 bp, Zea Mays
gtgacatgttgacttggtggtgggtggcatgtcagtgaggtggtagagtgccatcggctatagtgggtggaggcggctattatgcaaagcagggacgaggaggctttatttgggatggattagcagagggtgacatacaagcacagaaaagttttgtcatcaatcagtttgttagacccccaacttgtgagcttcatctacctctatagtatttccaaattgtgtatgtcttgtgcaagttgaaagcatctagccctttaagagttttggtgattattgtggagtggtccatgagagtctattttggagaccatcttgcaagtggggaaggcttgatgttatccatggagttccctaactgggaacttggcactcacgtaaacatgcttacgaggggctcgattgaggactatgggaagcttgtgtgcttctcaatacctcggtaaaaaataacacaatcattgatgtgagtttgtatctctatcatcttttagcttacacacttacattgtgtaccttggttatgtgctttaccttcc

SEQ ID NO: 170472 - DNA, 1207 bp, Zea Mays
gtaaaactttctgagatgttctatgttccatgagttcccaatttccgtgccgtccatctgagtgagacgatatgatccaggccgagtgacttctgctactatgaatggtccttcccatagtggcgacagtttatgtcgtccctcccccgttagaattcggcagaggacgaggtctcccactgcaaaggatcgatgtcgtatggccctgtcatgatagcgcctcagagtttgctgataccgggtcgactgaatcaccgtattcaattgttcttcttctagtacatcgacatcttccagcctagtagcctcagcttctgctatgttttcaaagattaaccttggtgccccaaacttgagatcagcaggtagcactgcttccgaaccatagaccataaagaaaggtgtgtttacatgcaaagctcgactaggttgagttctcaggctccaaacaacatatggcagctctctgatccactttcatgcaaacttttcattcttgtcgaagactttctttctgagtgcttccaatatcatcccgttggctctttctacatgcccattggctcttgggtgtgccaccgaggcatatttgatctgaatgctcttttgctcgcagaaatcgaagaactctgagcttgtgaaattggatcccaggtcggttatgatgttattcggtattccaaacctgaatattatgtcttgtatgaattccactaccttagctaaagttagagaagcaatgggtttgaactctatccatttagtgaatttatcgatagcaaccagtacatgagtgtatcctccttgagccttcttgaaaggtccaatcatatccaatccccagcatgcaaacggccaagttacgggtatggtttgcagttgttgcgctggtagatgttgctgttttgataagtactggcaggcttagcacctctggactaactcggctgcatcactctttgttgttggccagtagaaacccgacatgaagaccttcccaaccagggtcctggatgctgcgtgtatcccgcattgcctagcatgaacctcttctagcagttgctttccggtggctgagagaatgcaattcatgaggactcctgatgcgccccttctatacagtgtttccccaatgagagtataatgagctgattgccttgcaattctttctgctgcatttttgtcgtctggttcctcctcatttttt

SEQ ID NO: 170473 - DNA, 467 bp, Zea Mays
ggacgaaatcggccttaggccttctccatgtcttcccaccatttggcggcttcatctcttggtttggtctatcacataacgctgccagatccactcttgcctttacgttatcctttaactgatcaggaatgtccataattgttgcccatagtgcctcggcaacattcttttcagtgtgcatcacgtcaatgttgtgtggaaggagcaggtcatcataataggggagccgagtcaagccagacttatgtgtccacatatgctgctcaccatatcccacaaaatcaccttctgtattggccacgagcccatctatcagttgacaaatttcggcaccagtcatcgttgcaggtgggcggtctgtcactacgacacctttcgtaaagttcttgatgtctaggcggaatggatggtcaggagggagaaattgtcgatgtttatcaaaggatgaatatttgccaccctttttc

SEQ ID NO: 170474 - DNA, 380 bp, Zea Mays
aaaacaataaagttagcaaagggcaggttgcacggagtttttcattgatgagctaaaggaagccttgatttaggctgtttaaatatatactagctccgttcttgaatatttatcgtaagctagtttatttttgaactaagccatgacaaaataaaaaatgaagggaatatgttttagcatatactacacgcgcctgctactatagtgtagtgtgcgccggtgtagccagcaatgcaaggtgtgcacttacgcctacagctttgtttgggtactatagtgttcaccccaatccatatgtattgggggtggattgggggcgggggtataaattaaattaattcacatctcgattcatcttaatacacgtggatactagagcg

SEQ ID NO: 170475 - DNA, 692 bp, Zea Mays
gttcccggcggctgggggtctcctagtctcaattgaaggctcggcaagcatcacagagtcatcagggtacttaaacgagggagagtgagggctgaacggacctagaaagggttggccgcggtgagcagttccttgcggtggcggaaatttgatttggggagaactccaaattcgcggattccagtgaatgaccgtggctaattcgtggtggctgggcagcttactagcctacagagttcggggaggggtcaatttataggagggtaaggcggtggccgtgaattttggacgagacatacggcggtcggaagtgaggaagaacggcggtgcgatgaacacgtgtttatcgccgtggcagtaactccggtggtctacggggagttcagaggaggtcacggcaatgcgatggcacggttgggacacgcggtggccaacggcgagggcacggcggcggtgagcactttacccgcgggcggtgagccaggggagatgaactacggctagccggagtggcttccaagtcacaggcggtgacgatcttttaacctcgcgacgttatccacttacccgagcgcgaatcatgacgccggcgacgtgaatcacggcggaggggttaccagcatcgagctgtccaagctggcgacctgatccactcgggttactgtaccatcagaagttcagtttcagtttct

SEQ ID NO: 170476 - DNA, 635 bp, Zea Mays
gtctcagtactagaacagagcggtttcattctactatactctggaaccaaacatgcaaacattaccttagtggtatgcagagtagtccccctcgtttttttagaagaagatgcttcagtgcgagatgggccgctagtcgctggcccatcgaatccactcagccactttcacctaaacttttaccctgccttcactcgattactaatctcagatctccttcgaaattgaagatgactaggaataaaataaattcattttcacccccaatcagagttattaaaacctgatgccttttgggcgctcctccgtgttcggcgggttgccgtcgtttcacggtgcgacgcgtgccaaaaacgttgtgggcttgttcagccaaaacatggccttccttgctcagccatgtcccactcgcagcgaccggggcggctccgttagtgcgcgccattggggacactctccacccacgacctccgttacacccggttggagcaggctggcgtagcagatccgccgtcgcgtctctggcacggtgttctctgtcctcgcttgcggacacgatgcttcgtccacccacgccatactctaaatcatcttcgccgatgtgtcgcgcttcaccacatagatccacaatgtag

SEQ ID NO: 170477 - DNA, 588 bp, Zea Mays
cccttcgttaggatggaggcatacacagcctatcaggcttcgcctttgaggtttccctagccaaagtcccttggacggccaacgccccgcctacacatcacaacaattttgttgctaaaaaaacacacgtgccggtgatctagcccttggtggcgaccttagcaccaagtcaatgctagagatatcgtaatccacagttgaaagtggcgaaggattgaccgccgccaaggtcggggccgccatccttgcttcctttctcgacttcgccgtggccaccactttagcgacacgagctttcctcttcttggattggcccgtcacgtctacaacattgtaaactaggacgaacgccttcccttacagatccattgctactgcaatgacatctcgaatgttatgcgagtatggatatataactaaatcccttgctactctggctagcggaacgtccttgcactcgcacgttggaggcatatcccttacaatccatcgtttcgcactcctcgagccaaccttcataggacgacagagtgcccatcaacgtctaggagcggacatgaacccatgtcggcgtcttcttcgctttcc

SEQ ID NO: 170478 - DNA, 763 bp, Zea Mays
gggatctgctgattaggttatatccatttatcccaatccccccgagcattgtcgtcttgctgggctggcaaatctcctcccaaagaatcaacctgccaaacgaaccaatagctgcttgcaagtactttgaggaacggtaatccagaggaaaacctagaagcatgagccaacattcacgattgaaaaaagagcccgatgattccagacgtcattatgacgaagagcagtgaaagtagcatccaaatattgttgagggccaagcaaaccagattatcacgctccaaaacactataaaactgcaccaacacctgccccaagtgagagcgctgaatatctctcaccccaacccttcgatgctccactaaatattccctaatcacatctctgaccgcagggaaaaggacctcatgcgcaggtaaaggatggatattaataatcgcccaatcctcatgcattggagggagtctccgcgagactgacctggccatgatttcgcgatgctggaccgccatggcgctgaagcctggcgggaggaaaggctccaggtcgacacgccggtacgccattgcatgattttccgaagatcgccgacgaacaagaggcaaaggagcggtttggggttttggtgaagtgacacccagcgagagctccaaggatgctataggcgtctgttcgtattttttttaataaaaccaccctggcgaactcttcgaagcaaccaaacttgggaggagacccaactgtcagagaccctggggtaggg

SEQ ID NO: 170479 - DNA, 556 bp, Zea Mays
cagttggtaaaatatagcccgacttttgatcaattattgtctaaatatgtgaaaaagaaggctggctccagcgaccggccaccaaagcgacctcgcttacccacccaggtgcgacagcaggttaggccgattggaccaccacaccaatcggaaaggacgggaggtcataatgttcaactaagacctaacgtacctacatggacacctccaccaccatatccacctatgccatatccatacacatacatacctccaccatatgtcccaaatcaaatgtggagcatgccaccatatccatttgggatgccacagtaccccgcttggggggcacctcaaacatctgtattcaataggttgacatctccagtacaagatcgattgggagcccctcaatctggtccacgagcacatgcccaacaagattgtcgaacaactcggccccaaaggctgactaatccggcaggggggcatacagctacaacctccaacagtacgaaaaaaggagacagcattaaaataggaacgacagatgtcgtcgtacaacaaaataacgaag

SEQ ID NO: 170480 - DNA, 990 bp, Zea Mays
caaatttccaaagctctactgaaaaagaaaaaggaaaaaggttgaacaggactgggccagttctagcccagtcggcccaacccaaagggaaaggcgtgcccgcgcccgcgcactggcaactttgcacaggggcccttgcgtttctgtctaacagcgaacgagttctttcactgttaaacagagccactgacaacttgcaaaagagacccccattttctgtttcttcgcagtgggaggtccccgacggcgttcatgcacgaccgagctccggcgagcgtctgtaccggccgaatggggctatgactggcgctcccgagcggcggacatcaaatcggacctaccccgagtatttcccccaacctaattgcacgaatggcaacctattaagctctgtccgcgtgaaccgaatgggtggcggacagatgagtgcgttcctggtgatctagagctattccgtacaaattggcggttcgacaagcatcacagagcgacaagagtgctcaaacaaaggagagtgagggatgaactgacctagaaagggctggccgcggtgaggtgagttttgcggtggcggaaacctgtttgggggaaacaagaaattctcgagctctggcgaacgatcgtggctgattagtggtggctggttagctgatgaccctgcggagctggtcacgggcttaatttataggcggcttcgtcgatggccggtgaatcgggcgagacgcgcggcagtcggaggtagaagaagacactggcgcaagcgctaggtggcttctaccgtggcggtagttccggtggtcgacgggaagctagagggagtcacggtgatgtggtggcgcggttaggacacgcggcgcagggccagaacacggcggttcaccggcgaggttatctgcccagccgcaaagtagaaaagaaagccacggtgagtcaccggagtgacctccagctcaccgccgacaaggatctttcaccgcacgtccttatcca

SEQ ID NO: 170481 - DNA, 461 bp, Zea Mays
atccttcccagttaatatatctctgatgcaggattggctgatgcttcttgggaagaatcacagaattataaaaatcgacatgttggagggtccagaaccgattaccatcgatcctagcatcacaaatacgtaatgtaggattttggaagcagatgtcctggagaagggcagaccctccgctggcagtgaaatctatgactggctcatttgtagatcgacgggcctccgccctgtgaagaaccaacccccggataatgggtgcgttggcagaagggagatcaacttcatcatctttgcctccgtcatcatcgctagttggctcccatgcttgtggatttgccgcaggtcgagaccaaccggagggattccgggccgttcgaccacgagcaccatgagaccctgaggcctcaccaccttgcatcacattgccggatcctcgcctgcgcttggatctggaccgc

SEQ ID NO: 170482 - DNA, 1366 bp, Zea Mays
gtctttttcgacgtgtcttaatttttgcgggggatttttgtgggtatattgcatggctccgcctcattaaaaacctcaccccccgggaggaaaagagtacgggccagaatgataatgtttggttaattacaagggcatgatggccctgaggagtcaaacaaaaaatttgcagagattatctatgttccaggaatgctccaggtcttcaccagattgcgttgttagcttgtacgtgccgggagacgacttcgtcttgacgatgaatggtccttcccacttcggctccagcttacctcgtgactcggtccgggttgttcggacgagtacgaggtccccttcgttgaattccctcgggacgaatgcgtggtcgcgccaggtcttcgtttgggcttgatatttattgagggcctgcagggcgaagacacggtttgcatcgatgagatctttggaggttagttcgtctacatcgggtgaggccgaagcgcttgtccttggggacccatgcttgatttcttgcggggtcatggcctccgaaccgtatagcaggcgaaagggagtaaatccggtcgcccgacattcggtcgtgttcagcacccagactgcttcaggtagcaggtcggcccatttacccttcttgtcgtcgaggagcattttcttgatcgccgtgaagatcttgccgttggcgcgctccacgacgccgttggattgtgggtgatatactgaggcgaaagcaagcttggtgccaatggagaagcagaagtccctgaagtcttggctatcaaattgcttgccattgtcaactgtgagctcggacgggactctgaatcggcaaacaatgttttgccagaagaatttctgggcagtcttcgatgttatcgttgatactgctcttgcctcgatccacttagtgaaatactcgacggcgacgaaggtgaacttgaggttcccttgggccgtgggtagtggcccgacaatgtccaggccccagcgctgaaggggccacgtgtgggcgattagctttgtgaactacgaagggcttcccgagcgtggagaaaacttttggcaggcttcgcatgaccttgtgacccgattcgcggcgcagatcatagcaggccagtagaagccttgacaaatcaccttggtggctagggccctaggccccgcgtgagagccgcaagttccactgtggacttcgcgcaagatctggacgccttcggtctcggtgacgcaattaagcatgggttgaccgacccccttcttgtagagctgtccctcaatgagagcaaagtcccagcttcggtgtttgaggcacttggcctcgctgatatcgcttgggtggtaatatccctgcagaaacatggttatt

SEQ ID NO: 170483 - DNA, 431 bp, Zea Mays
tgaggtgacaggctcagcagtcgttgccctccgcccctccgtgtccgtctcctacctctcttacctttgagactattgcgcttaccaaacccctgtctcaggaaagcaacgccttgtggagtatggaccgggagctttgagggagtgacgccgttcgtggctcagattactcagcgagggcctacaggcactgttgttaatcaggacatggacatgccctcattttggagttggtagccttggtgatcttacacgtgtacaagctaaggatagtcttgctaatgcttgtaaacaaattgtggtgtgagaactttttggagaaaaaggtgaaaaaagctagccttttgttttctgtttttggttgttgtgtatatattcaatcatatctgctactattgtatttggaactctatcaattaataattagcgga

SEQ ID NO: 170484 - DNA, 965 bp, Zea Mays
aaacagtagaggatatattcacaattgaagggtatttaaatatttgaaaatctgaaatttaaagtataaatttaaagacagtttgaatctttaaattgggaatttgaaaggaaaataggaaaaaagagaaaaccataccacttgggccgcaaccatctagtcggcccattcggctcgtcgtctgctggcccacttctcccaatcgcccctttccctgatagttgggccccacttcgcagtatcacgggcgcgtgcggacttatcccttgtgccaatgtcgtctggggaccgatcgtcagtccttcgtccctctcattcaagtgcgcgtgtgctccgtgcttcccacccactgaccatgggcccttgctgtcagctttatctccctcacaacggaccgcagaaaccgcgcgagttcaacgacactgcccggagcttgcgtgaaccggccgccacctcgcggcaataaaccccggccgcacctcctcgttgatccatccaagcggtccaggaaagtgtgctgccactccgcgttcaccaaaacatacatggaggagagagaccccgtcatcggcatgcacgcttgcgccgccacctgcgcctctactctctgctctggtccggggggtcggcattgccatccgcgcgcgttggtgaccttctcggacgttgggatcgtttggtgccccgttgatttctcgccggagcaaagaccgaccgctcagccgcaagcttgttggggagaagtctccctgttgcgcgccctcaaataggtatgtcccacatgtttgccatatgcttctctccttattgtcgcgtctgcgtgctatcttgtgctctggaccacggacccgccataccccggcgtggcgccgccgcggtaactgaacttgctggcgctgccgaccgtccgatttatggcatgcggtcgtgattagatgaatgctaccctttggccaggattgacc

SEQ ID NO: 170485 - DNA, 674 bp, Zea Mays
tatctttgtaattttgtatctctattgcagccaaggtgcctcaggaagctttggttcaaactctcataggtaaaataattcaatttgaacagtaacatgatatttttgactattcagtactctttttctcagatacacttctgatatgtaggtatggacatggctcaaatcaacctgaccaacttgccattgagtatcccttgttgtccttagctgaatccacaccaccacctacaacctccaaaccaacagcaaagaaggtgaaaacaaaagagaaggcacaagagaaggagaaggcgaaggcaaaaggaaataaaaagagacaaattccactactacctgatagtccagcaatgtctactagaagcaagacacctcaaaggcaaagccctgcctcatacaccagggcaaaaagaaaactcccggacttgaatctgtagtggatgcattttgttaagtctgcacttttgtgttgtattgttttgtgtggcctacaactgaatgcacttttgtgtggcctacaactagatgcacttttgtgtgttttgctaagtctgcacttagacaggctgcagttatgtgttggtgttatggacacgagtctctatggacaatatgggttgctgttagagatctcttgttgttatgtgttgtatgaactgcactagtttggt

SEQ ID NO: 170486 - DNA, 519 bp, Zea Mays
tgcagcagattttcgagatcagcttttgaaattaaccatcctagcacgtccatgacaagtatgaacaacataggtgagagggggtctccctgtcttaagccctttttgagctgaattttttcgccagcaacaccattaagcagtacttgtgtggacgaagtagatagcagtccacacagaacattcatccaaatctgcccaaaccccagtttttgaagaacttcaaggaggaaaggccaagaaactgagtcaaaagctttagtaatgtcgagcttcaaaaggattcttgcttgtctttgctgatggagaagtctggcagtttgttgcacaatcataaaattgtcttggatgaatcgacctttgatgaaagcattctgcctttgggagaccatagattgcagcttattccccagtctgttagctaggattttagtgactagcttggccatgctatgcactaaactaataggccgaaagtccttgacttggtcagcaccctccttttttggaataagggtg

SEQ ID NO: 170487 - DNA, 922 bp, Zea Mays
ggtagcaagcaacacatacgcgggcaggaggcatgcgaagggttgttattattcttgtgacgatgaacagacggacagacagatagatagataagcagcagatccgatccgccggagaagaagagagggatactgtagtagtaccaaccaaaatacagggggctcgggataaatagtgcgtgctgctgggtttctttcttcagctttgcggaaaagagggagagggaggagtaggagatcctgtgggtgctggtaaactggtagtattctgtatttctcgcgggtgacctagaagaagaaatctaaccagctgcactgcaacagcaagcacgagagagagagaggaggaggaggtgcgagtgtgaaaaggtggatagcaaagggtgttgctgaaattgtgcaagaacagtgggcaggcaagcaaatggcaaagtctgccttgcttgcccatgtccgtagttgcttttgggcttaaaccatgggcagcacctttgtcctttgcttgcagtaatgctagtgctggagtacactgatagttaattcattggttggttaacgcttgctttgcggtcaacaactgtacaatcaggtcttatgtgtaagcgtgcaagcgagattttttatctgttagattatgatacaatcatgtatcacatttaatacttaaaccatctcaccatcagatcatttagattcatagaaaacaccttttaaattatgattatgtctatagttagatcatcatctaatgaactaagagtctcgcttgtatacatagtagttgtttctgctttgcgaggggattagcttggggggaggttgagggttgggaccagtagagcagatcagcaatggacggcatggcgcggctcacatcacctttcttgaccattttctggcctctttgccacgtcatatgtcc

SEQ ID NO: 170488 - DNA, 896 bp, Zea Mays
caggttcatctgactgaaatcgccatggtacagtaactgtaaaggatcagaccgccagcgcggcagtccctcaccgccgacggctctctccgccgtgattcgtgtcgccggcgttgagattagtgcctgggtgttggatagcgctgcggggtaaaagaatcttcgccgccggtgagctggactccaccccggccagccgcgatacccctccccttgctcaccgcccgtggataaagctgctcaccgtcgttaagccttcgccgttgcccgccgcgtggctccgcctttacaccacgtcgccgtgactctctcggactgtcccatcgttgccggtgaggttgccacgacattagccacggattcacgtaagccagtgccttcttctacctccgaccgccgcgcgtccttctccaaattcctggccaccgtcgatgccctctataaattgatggcgcgggcagctacgctacctcatcgtgaaaccagagcccccactcccaccctcaatcgtcctccaaagctcaccaatttcaaacttcccccaaatcagccgaagaacaccgtgaaactaagttcaccgtggtcagccctccacaggtcagcccctgtcccctgcttcctcgtttgagtactctcatggctctgtgatgcttaccgaaccctcaatttgcatggagtagccttagatcgccgggaacaccttcatctgtccgccatgctctcggtcaccgtggccagagctcattagttggtcattcgtgcaattaagttaggggaaacgttctccaggtagtgaatttggtttaggccgaggctgagcacccgtcttggcctccttcggccggtctacatgctcgccggagcgcggccgtgctccacgccgtcgtggacttccc

SEQ ID NO: 170489 - DNA, 485 bp, Zea Mays
gtcgtacatgatcccgacaaatctccgtccggccatcccaaatcctgtgctggcgagctgtggtccatggccgtggggcacgccactcttggcaggcacaggcacagccatcgccatgcctccgagctgggcggctggctacctcagttttctactgccactgaagcagcagttgtgcagggtgcatgcatatgtatgtgggtggcgttacctctcctagtgctcaactcccctaggcataccccttcttcagagtgcttctaattattagaaacagtactcctcgctgtagtagactagtagcacaatcagttgtgtggttaagtcaaagatgaccgaggtctgtgctatgttgttcactggtgcatcagcctaatctcattttgtgcagctcaagtatggtatggtggtttttgctcttgattctggattttgcttttgggtgagaggatagatattattcagaaactcatccaatgaaactg

SEQ ID NO: 170490 - DNA, 528 bp, Zea Mays
gtgggacccgcttcaggcccgcttcagactcgaacagtcaacagaggcatagttggttgtcggtgttgtcgcagcgctctggtcagcccatggctcccgagcaatggtgtggggccttcggctcacaaccgtgtggcaaggcggagctagtttcgagtttccatgtagacctcccattcattcggggattctgcctcggaaatccctctctagaatattgcagcggttgtaatgttctgacatgtacgagggagtcgtggcagtctgacctagccataggtcggacggtgcggggcacagactgctttgtcatgcatttgccaaatgcccagtcacgacatccctattcaccgtcgatgtagtactcgcttccccgtagagggacctcgggcgctccgagcaggatctcgttcttatggcgatccatagcatggtgggtcgaggtgagctatggctgactccacggcgcgcgttgcagtgttagcgaggctcccctcgaggttcccttagagcaaggaggggcacccg

SEQ ID NO: 170491 - DNA, 367 bp, Zea Mays
tggaccattctgagtttttagttgagttggagagatggcctatcaactcgagctacctaatagtctatcagatgtgcataatgtgttccatgtatctcaacttaagaaatgtctctgtatacctgaggaacaattaccaatggatgagctcggtgttgagggtgatttgacctacatggagtatctcgtcgagattcttgatgttttgactcgagttacaagaaataaggtaataaagatgtgaaaggtgcaatggagccatcatgaagaagatgaagctacgtgggaaagagaagaagagcttcgtatagattttccccatcttttccctagatcttcctaaatctcgaggacgagattattttta

SEQ ID NO: 170492 - DNA, 372 bp, Zea Mays
tgcatgtatgctgtgtcatcaagaaaaccatgaaggaaagcattgctgatgtcaatttgcctggtgtgccatccacgagagactgcaagggaaagaacgagacgaacagtagccggtttaacaaccggactaaaagtctcatggtaatcgatgccatactgctgtgtgaatccccgagcaacgagccgagcttttaatttgtcaatggagccatcaggatgttgtttgacacgaaaaacccacttacaactgataatattttgaccagggggtttaggaaccagagtccaagtgttattctgccgaagggctagaaattcatcctgcatagcctgacaccatttgtcatctgccagggctgttttatatgac

SEQ ID NO: 170493 - DNA, 717 bp, Zea Mays
atcgggagcatgggcgtcatatacgccgtgtggtccttcatgtcctggatcggcagcgtcctggtcatccgtttccacgcgcagggcggtcacgtcttcgtcgcctccatctgcatcgtcttggccggaatgtaattaagcgattccttaatccttatgcatgcgttgcggtgcggctagcctgcctgatacgtacctggcactgctctgctctgaggtttccaggtccatcatggtggctctgccaaacctgcgttacttcgtcgacgcggcgacggcggcggcacggatgcgcgaaatgatcgacaagctgcagcctctcgagacggagggcaagaagggcaccgccatggagaacatcaggggccagatcacgttcaaggacgtgcatttctcgtacccgtcaaggcctgacacgcgggtgctccacgccgtgaatctcaccatctccgagggcgccaccgtcggcctcgtcggcggcagcgggtccgggaagtccaccatcctctcgttgctgcagaggttctacagccaggactcgggggagatactactggacggcatcgacatcggcacgctcaacgtcgagtggctcaggagccagatcggcctggtgagccaggagccggtgctgttcgccacgaccatcagggagaacatcctgttcggcaacgaggcggcctcgctgaagcaagtcgtcgtggcggcgaagatggc

SEQ ID NO: 170494 - DNA, 763 bp, Zea Mays
cagttgaaagctagtcaccacatggcatgactgaactttagccagaaccccttgcagcatcatctgtcgattgccatattcaattttcatccacttgtttgtccagtgcatagacataggtatgtgatcctcgagccagtccatgcctagtatcatgtctttacccccaagtggtaggatcttgaagttagtcgaaaaagtgaaacccacacacaaccacttgcactcaggtactctatatttgctccacatggtacccccatctgctactcgaccctgaacaggcttgggcaaaagttgaactcctggcatcactcccataagatgatggctccccaaaaaactagccgagctgcctcaatccaccagaacaagcactcgctggcaatgaactaaaccctagagtctgatggttttggttccttcactaccactaacagcagcaacagatattacccgaatgctttcttgaacctgagactcattggtgttgcagtttcttcagttgcaccctctccatctatggtgaaaggatcatgatgcccaagaggggcggtgaattgggcttttctaaaattccaacaaaagttaaaccctaagcacgaggccaactttacccaactactagcaataaatgaatactactagaaaaacaacaaccctaagtcattactacaagtacttgctatgtaattgcacaaagtgaaatgctcaaagtaaatgcggaatgtaaagcaagggtaataagactcctccaattttt

SEQ ID NO: 170495 - DNA, 415 bp, Zea Mays
catgagtggtggtagtgatagcggggcccatgcagcttgtgagtggcttgccgaagcgactgatgttgtgggttgttggttgcccacatactcggggatgtatggggaataacacgaagtatgcaggacttacttcggctgattctgtcgtgcttcggctttagctatttccttcgtgacttggaatgtccttgttgtgtgccccttatcttccccatagaataggcaaaacaaccttcttggttgggagctaaatcttccaccgaagcttcttcctcctctgcctcttggagatggtggcctgaaggagctttgttgtgtacctgatgattgggatttgtgctgattcgcttgagaatgatttccctatcatcgcttgagctgggattatggatcatcctgacatgcctagggt

SEQ ID NO: 170496 - DNA, 339 bp, Zea Mays
ctcgtttctaaattgatggagaagggaattgagttgtccatgtttatggcggcgacgacggtcatgaggatgcatgccatgtatttgtggaattgcggcagccttcgatgagtcttggagagctacttctgaggtcatgatctgaaaaaggttctcaaagcatggacatctcttagctttgtcggatgattctaatttacatatgtttccatttcaatattaatcttattctgttaacaacatattttcttaagtaacatcatgtttaacttcacaaatatgcttagtattttttcacatacatatatttttcaatcagtagttatgccaaatttgcaa

SEQ ID NO: 170497 - DNA, 705 bp, Zea Mays
cttttagtaaactttaccaattggagatccaaacacgaatgctaaaatgtgctagaagaaggtactaaaaataaactgctaaattttagcacccattagcacaaagagtgctaaagtttagcgtgtggaatccaaatgggtcctaagtttctttcatttgtagtcttcttcctatccctgattacttacaccaggcaatgatcaaagtaggaaaagaagcataaagtttgcccttttgatattgcctgaaatcttagcctttagttctttacgtcgcctttaatttagctttgctacttacctttctcatgtttataagctgcaaataggtttctctagcatgcatgcacatatgcacgggcatatctcttctctactgttataaagcacaattttaccgttccacaccatcgtcgcgtgtcacttaagcctgtttaaacgttgggtcggttgggttcgggtcaagtcaagctcaggtctgtgggtcgtttggcataacccacgcctgacccatgcatggtacagtatcgggtcaggtcgggttggctcgtgtctccttgttggacggattgggtcggggttttttcgggttgagtcaagtttttttggctttggatcagattttttcgggttggtcggattttggataaaaaatgatggctcatacccgacttgtggatcgctgcgggtcaaaaactatggctc

SEQ ID NO: 170498 - DNA, 929 bp, Zea Mays
atgcagaccctagctgcatgttgcacaagggtcaagtcataccaaagttcagctttaacggactcattaccatgctcataagcttctccctctttttgtcatcctctttcatgtaaaaccattcattagtccacctagttggccacttggtacgatacccaataaccggggccttcgtatccttccgatatgcaaaattatagtagccaaagttcttgtgaaggccatctgctctagccttcgtctggtagtgtagctcgtgcacccggcagaaagcttcagcattagcatccatcccttggcttcggagagcccatatgtagacactaagtctaacaaatgcattaagggtcagttgatgaaggtatatttcaaagttctttagaacctaccctatcatgtcatttaggggggaccgaagtcctgctctaaagaagctcttgaaaacgataacttcgtcttctttcagctccgggataatttcctccctagcaaaccggacaagcttgcttttagcttctccaaaataaccaagtttcctcatcatagccatgtcatcttttgttacagtagacttcccaaactcaatgtgactaggctttgttcaactcagaatgatgttgtcttcttcgctttcattttcactttcaccctcaaccacagtttgtccaacttcggcattggaagcaccttcgtcagcaacttcccctggcacaactagacctgatcgcttcattacttctgtatgggcgctgtttcggcagcttcggcctcgtccccctcacgagacaccctagcagtggatcaaactctggccatttgtgtttacacttttttaagatgaagctaatctccagtgacgaagtgtttgctcgaaaatgcaatccagggagcttcggttatggttaaaaaatttaacagcacaacag

SEQ ID NO: 170499 - DNA, 836 bp, Zea Mays
ggccgatttagcccggtctagttcaccggagtagttccctgtgtcacccctgcctctgctgaagttagccaaggccttagcgcgccctaagtccccccccccccccgtggccggaatcgctcaccggagtttctccgacccgcccgagactctctcaccgtcgttctcccttctctgccgtggattcatggcctcttccacgccattgagttcgtcgtggcgtcctcttcctttctgcccaactccggcgaccccagagccaccctagctcgcgccagcctcagctccagcgacatcagcgctgtggagaggagcgacgccgcccgcagccatccgtttaccctcggtctgatttccctccgtctgattcagatcgaacggctcggaccgcgggataccgcttcacgcacgcgcgcctaacacgccctggcccgcctgtcagtgccattcgcacctgctcggacccacctcggacccgctcggacccgtttggacccccttcgggccccctccgtccgatcttgatcgaacggctcggacctcctcgaacccttgtagctggttgtttccccctctagcgctgggcccgctcagttagcgctctctctccccctctgtcactaacattccctggcccgcctatcagcactcgcccgcccacatgcgtgcgccatcggtcgcagatctaatctcgaccgtcgatttctgatctgacggttagattcacccgataccccttcgtgtggctgttttgcttaagagaccctcggtttattggaaatcaacccaccgtcctctgttttagcgcataggtccctggtttgttttaattagac

SEQ ID NO: 170500 - DNA, 684 bp, Zea Mays
atggaagggccttgggccaactagtagttaggtcagcctatacatgtgcccctgtataatgttacttatatcgagagccccattgactcaaggtcttatatagagtggtcatgtcatggtgggccctaaagctagtctcctgagatgggattcttgagcgtgttttggttgcagtcgagggtatgcactttttcgggtgctaatagaagtagttgatcctatactacgtaaggcccactatacgacaaacatgtacatctctcccctcttgagctataaataaaggggtagagacagattcgattggattcggtgcaatctgatttgatccatggagatgagattgatcaattcgacccgattcacaaatcaaaagaaccaaatgaacagcaaggctgaggtgaactagaaaatagttactttaaaactctcatcataaccaaatggtaagaaagggctagtcagtcatctagctcagttaatatatgagtgtgtaatcgtcttcatcacctttgtattcatcaatctgtcagatacaaagatgttgtaggatattatgtattcatggcccaaacttctataagtcgctcatgtactggtagatagagtgtctcctatctatgcctctcgctctatctctaatcacacgaatttatccgatactaggatgttgttacacattgc

SEQ ID NO: 170501 - DNA, 794 bp, Zea Mays
ttgcaggatcacgcaattatgaatgatagtggtgacaatgaacaaaatgatcatgccagaaaggtaataatggtataatactgtatgttggactgcataatattatatgctgagaaatatttacttttgaattgcagaaactggattttgcagtcgatgggataagcttggcaagaccaaataactcaaaacccaaaggaagaacaataaaggggagtgaacaaaatattattaaattgggagcaaaaggtacaaataaaatgaccaggaaatgttagaagtgtggaattgctgatggtcacaacagtaggacatgtttgtcaatggaggaaaatagactaaggttggcaagccttgctggacgtaagagaggacgacctcctggatctatgaacaagggtggcagtaaagctcctgattggaatgagacaacaacatcaaaaaagcacgcaattgatttcgatagtagtgagtcagacagtgattagtctgttgtatgagatacgattaatttgttttttacaataaaccttgcatgattgacaaatgatttatatagaggtggctattgaaatctaataaatataacgtatattgcttaataatgttgcataattggaagtagaaaacatcgtagataacttgtatgatgatcgtataatttgtaaactatatgaccagtaattagtctgttgatatcgacagcagtgagttaggcagcgagtagtctgttgtatgtgatacgaataatctaagctatacggttgttgaaatctaataaatatagcgtatat

SEQ ID NO: 170502 - DNA, 811 bp, Zea Mays
tgaagactgccctccagtcatcaccggtgctggctctcccgaatttttctcaaccgttttgtattgaaactgatgccagcggggccggtgtgggtgcagtcctcatgcaaaacagccaccccatcgcctatgtcagcaaggctttgggtcctaaaaccaggggattatccacctacgagaaggaatacctcgccattctcttagcagtccaacagtggcgccagttcctgcagtttggagaatttattgtgaaaactgatcaacgcagccttgcccacctctctaatcaacgtctgcacactccgtggaagcaaagagtgttcactaagttgttgggattacagtacaaaatcatgtacaaacagggatctgagaacaaagctgccgatgctctatcccggcgcccccattttcctaattctgaattgttggccatttctatgcccactcctacatggctttccaacattcaggacagctataaagaggaccccaaggctcaagaattgttggtgcaactcgccagcaacccgacagcagtacctgagtacaccctacagcacggtatcctccgccacaagggtaaaatccttgttggttctcacttgcccacccagcagtccattatcggcgccttccataccagcgccgtgggtggtcacagcggtatcccagtcaccacgcgccgcatcaaacaactcttctgttggcggggactcaacaagtctgttactgacttcgtcagttcatgttccatttgtcttcaggcgaaaccagaccgtgcacggtacccagggctcttgcaaccatt

SEQ ID NO: 170503 - DNA, 538 bp, Zea Mays
gtgactaggtctggttgccgctcacccgcatcacctcccatagcaggaaacgtaataatcccatccaagaacaaaaagaagtcacgcagaagacaaatataggatcatctgggtgctcaccttccctttagaggagagagaagagtaggaaagggaagggcggtgcattggtgtgcgtcctccacccttgcccctggacgctggagataagggggccgccatcgtagaggacagggcggagaggtcgtgttgtcgtgtcgtcgaagaagataggccatgacgcgcggtggtgcggccgcagcgcaagatacgggcgtggagcaggggtggccgacaggcgggagctcaaagagacaacgacgtggtacatagagtcacgagttgcagcagcgaaatggagattcagacgaaagcgccacagagtgacgacttcgtcgtcccttttgcggccttgttggccaagcggattgcccaaacgcaacgacccttttccggcaacagggcgcttctagagtcctggacggacgttttttccatg

SEQ ID NO: 170504 - DNA, 723 bp, Zea Mays
atgaagctatgcgatgcgctagagtcaaataaaattattgctggttgattgaaaactgagaaagtaccagtcatgtcgggtgctccctcgggtagatcttttagggtggtgaagttcaaccttccctgcttgacttgcaccttctacttcttgcccttgcctggagctacaattggcccttgtcttggttgattgcatgagcaatccttggtgtagtgtattgtgttactgcaagcgtcacatttgtttctggttccgtgacagaacaactttggctgttgttgaggctgattgttccttagagcaggtgttggaaagcgaattggtgcttgctgctgctggggcggcctgatcacccatcttctcgactgctgctgaaatcctctactctgattgctcaaaacaatccggaattgttgggattgcgatgaagatccagtcattggtgccttcctcttcttttcggcccgatgagccatgatgcaatcctcttgagagatggtcaggttgactagctcattataactgtttgcccggacagtgttgagacgttttcggagcttcatgctaagccctctccggaatctatcccttttctcctcataaatgtcggtgtggtacctggcatactgacacaggtcgttgaaagtttgtgcatactgcaacaccgtgcaggttccttgggtcaaggccaggaactcgttcaacttgggggccatgatg

SEQ ID NO: 170505 - DNA, 382 bp, Zea Mays
tcctcctcttcctcagggtcgttgttgcagtagttgatagcttcggtaactctgccacaactggagggctcagcagctttggctgttcttctgttgttttccttgtttccgactcttctaccgcattagcactagctttggctggcatggcaggaactattttcgtagctttggctggcatggcagggacaacttcggcactctcaataaacttcacctcctctatcgtgggcactatagatgtctgttctaaagattgtagcttcggcctacgggtcagaaccttggctctctttggcttcggtgcactagaagaggtcgaagtggcaatttttcttttccctccttgctttcgagcaggaaaacaataattaggataaac

SEQ ID NO: 170506 - DNA, 356 bp, Zea Mays
ctaggggccaagatatcacacggacgattgtggtttgatgttgaggagagctcgttgtagccgttgttcaggccaggaatgactacgattagaccaaacataccctttcgcttctttaatctggggtcgtccgatcgagttttgataggcgggattcaatcccttgcataccggtttgggttgcatgtgggcacccttggattgggatctcacggctaggactggcctcagtttattcagctgcgcaaaatttctaaaagagcccctcgagtctagagtaatcaacccgtggtccggccctggtcaaagactaatgcagcggggtccaaaacattataaaaatagccctgagcttt

SEQ ID NO: 170507 - DNA, 371 bp, Zea Mays
tcagattgctttgcttggaattacactgagatgcctggattaagccgagagatcgtggagcatcggctgcctattaaatcaggtttcagacctttcaagcagagagctagaacatttcgtccagatcttctcccacgcatcaaggacgaaatccaccggctgctagaagctgattttatcagaccttgcagatacgcaaagtgggtctccaatattgtgccagtggagaagaaggagtcaggtaagcttagagtatgcattgattttcgcaatttaaatagagcgactcataaagatgaatatcccatgcccatagccgacgcattaatcaataatgcatcaggaaatagaattattagcttccttgatgg

SEQ ID NO: 170508 - DNA, 309 bp, Zea Mays
tgctcttcctctggtgagcagccctagctcctccccttccctttcctctgtctctcaaatttagtggagctcctgccctttcaagcccaccccttgttgctcaatccaaattctttatattcctatgaatccaagtggtgggatgtgttcttttgtgtctcttgaacatctctgcaggttcctagctccttcgggagggtttccccacctccaatagccatttcattcaaaacctaaatccccgcacatcacatgttcgatgaaatgcaccaaccactcaaaattgctccgattgaacccaaacttttc

SEQ ID NO: 170509 - DNA, 779 bp, Zea Mays
ttccccaaccaaacgtcggacattccgagcggattccctacatccgtaaccaatgttggtgtttcgggctacgtccaccaccctcgtagcctttccctggtgcatataagcaagcccctgcactctcccattgggcataggcgagcagaagcactggatttcgcagtgagtactctcgccgggcaaacagagagaaagaagccgccgccatgggtccgtgtccctgttgccgttcgaagcatgacctcgaccttgggtgcttcaacccgcccctaggaatgtgtctgtggcctgtccagacggggaaatgcaccgggctcactggaatctcttgctggagtaaaaccaccccgcaatgccgcgcgcgggcgtggtcgggggacagcgcggctcaaccactagtatgattatccccatcgggttcaccgcatactccactaccttttgcacatcatcgcgttcggggtgggcatctaatggccgatctgtcgctcgccggcgtgctcacatccataggatgcccggcgccgccgtcgtgttcatggtcgaggtgagagataagagcgttggccatcggatttaaaccagtggctaggattataagtagcataccccttcgtggatgaaatctgagcaacaggttttggatctgatggctgggtcaagacaaaggcgtggttgttgatcagtatataccgacggtcgtgatttgaactgtagcataccccttcacgggttgaaacgggcccttgatctctgatccatcagttcgaggcaac

SEQ ID NO: 170510 - DNA, 484 bp, Zea Mays
tgctacgtagtttatttagttgtttcttctttccattatataattgttttgccattgtcctctttgaacaactcaaatggccgcggaaatgcggattgagcagcaagaaaatctattcatttcacacgtctccatctcgttgagcatttaattatttttgggcaggaaagaacacataccagagatgaggttgttggtttaatttgattctaagtcctaatgaagaagattgtgagctccggcccggcggtgccgccctcggggttgtgcatgtagtacgtctcggagtccttggaaccgacgaggcggtcgaaatgcgcgcgcatgtaggtgagctcgccgtcggacgggtgggacatatcggacggcagcacgccggcgcccatggacgtggagtggagcatccgcatcacgcagtcgtcccgctctgtcgcctcccgccgcgacgcgtgcccgacgctctcgccgttcacctcggccgtcc

SEQ ID NO: 170511 - DNA, 521 bp, Zea Mays
aggggtatcagtcaacacaagttacacaagttagtttagttaacacatgggtatcagttaacacaagttacacaagttagtttagttaacacacgggtatcagttaacacaagttacacaagcatcagtaaagcaaggtaacactctattctgttacttggacagtgacacaagtgtgttgtgtcaagtgaactaagaagtgacaacacacaccaagcaagcaaggtaacactctattctattaagcatcggttaccaaaattacagacatgttacaaatcagtcaagcactcaagcaccactactgcacagatcacacaccaagcagattagattacctctgcgccgcacacgaagaactcgcaccgttagcagtagatccggagcaccggttccaaaagacttgcaaaggaaaaggatgaagggaataagcagatcaggtcacggggaagacatccagaataagttagggtttccattgaacaccagttcatcactctaccgagcagatcaggtcactt

SEQ ID NO: 170512 - DNA, 607 bp, Zea Mays
taatcttggttttatgtccgaattggggtaactagtcgtagaaggtgaatatccaaaggtaggatagaattttgacacgattatatatatgggtgagatagactacatgatgtaggtcaaaatctggtttgatgtcaggtggtggttgatagattatgcaatccattaagactctattggttgggtaagttatgtaacttgttatataggtcaagttgttgtgtatggccaagttgatataagtctccaaattaggcttaagtgatttaggagtatgccttatcctttctaccagcattaagtaactcacactagattagaccatattaaattagatatgatctagattagactagtttaagttagatagatttatcagtgtaggatatatcttgttaggatatgttagaatcttttgagataggatggggtatatggtgtaggtaggtcagaagctctattaggttaacacagagggattatgcaactatcggatgggtaaggtagttgcatatgatcagatagttgtatatggtcaagttaatctagggcaccaatttagcttaaatcatttttataggagtgaggtctaatccatttcactagt

SEQ ID NO: 170513 - DNA, 448 bp, Zea Mays
tcggcggttatggggaaaggggcgaggaggcgcagccgtgcgtctggcgccgacgggggtggacgcgggagcaagcgcccgtggcgggccgaggaggaggaacaggaggaagaggaaatggaaccgctggtgggggaggactattgcttcggctgcaaggacggcgatgacctccgcgtctgcgatttcaggtttgccccctacccctccgacgggccccagtacttccctcgtctcatctcatgatcccgcatgagcagcatgctttgggttttgggaatctacaagtccggaggatgcctgtgtgatggtgagtgctgtggcattgctagagcaggtttagggaccgtgtggaatgcagcaattttattggaactggaagcggttcaatttcacatggcgaaaaaccctcgcaacaggaagaaaaatcccgcattccaaacaggta

SEQ ID NO: 170514 - DNA, 401 bp, Zea Mays
cagctcccttcccacgcaacagcctccacgcgggcgcgtgcgtgtacctgtgctagcgtgtgggccctaccggcagactcataaccgcccacactacaaccctttgtcactaccgtgtgggccccgcttgtcatttgtcttcctccttcgtactaaaacacgagcagaaagtcgtggaggtcagccgttggagctttcggccaagcgaaagcaaatcctggcaacaacctccgcatggaactccgccttccccggccgccagcttctctcaacccgtcaccgtcgcgtgggaccagacgcacggaatctctgtcatcgttgtaacgggctcgcgagatccgcgagcttggggattctattccgcaaactgcgctaggaatcgattatcgtcaccgccctgc

SEQ ID NO: 170515 - DNA, 528 bp, Zea Mays
ttcgaggcacgggttgcttcactgcttgcacaattacttagcggagcaggcggtgtcggcaatttataggctcccacagtggtggtcggtgaattggagggagacgcgcgacggccgtagaaagagaaggttactggcgctctggattagtggctttcaccgtggcagctccaccggcgacgagccagggccacggggtggtttattgtgactcaccgcgacgtggtaaagcgttgaggcacgtatcctggccggataatggcgaacgccggtgatgccaacatgactgaccacggcgggacacgacgacggtgagaacagtggccggagtttatctccaacgcgatatttcttaccgaggagcgcttatcggagttcggtcgggcgtgaatcatgacgccggcgcggatttgagcgcaagatcaccggcggcaaggggggtgaatctggtgatctatttcagttactgtaccatcagatccctcttcagtcagtctgacagtcaatgtttagggcgaatttcctccc

SEQ ID NO: 170516 - DNA, 512 bp, Zea Mays
cctcagcaacttcaacctgtgcgtatctggagagttgaatgaacttgtcgcggtactcgctgactgacatgcttccctgcttcagcgataggaattccttcttcttaatcttcatcagtccagctggtatatgatggttcctgaactgcgtagaaaactctgcccatgtgatagtgttagcagcatcgtgggcagcagtgtatgaatcccaccaatcagcagcaggacctgtcagacgaccagaagcatatagaaccttctcctggtcagagcattgtgcaataatcaacatcttttccacagatttcatccaatcatcagcgtctagtggatcaggagagctagcaaatgttggtggcttatggctcataaactcccggtgcttatctcagggtggaactggtggtggagatggaggcaatggtgcttgctgatgttgttgttgttgttgcagttgctgttgcgcccttctctcctggcgtatctcctctcgctcctagcgcatctcctgg

SEQ ID NO: 170517 - DNA, 660 bp, Zea Mays
ctcagtcacacgtgtgtgccgtgcactagagagcgggtcccacgtatcagtctcagtcgcgccacgattcacaatttctctgccgctgactaatgggcccccttcgaccagtccgccccaactcgtcgcgaccgcggcgtggcccgactccatcaccggagaactcggtgcatgccaacaacctcgccccgactgtaccccccctcaaccggtataaagtcctgggcgtatccgctcttgtttgaccgcgcacacgcgagagccatcgagcctagccactggattgcggcgtgcggagaagggggagaatcgggcgccgccatagccgccggcggaatcacttctccattgccgcttaacactggagacccgatcccgattgttcgggtgtgggtacaggaccttctagaggaagaatccaggcgtgtgagtcctcagggcgacatgaattgctcgccgtcgtgaagccgcatcgtcgcgtggccagaagaatctgcaccccaacccaaggtatggcgggtaccattcagtccaccatgttctagtcattgtattgcgcggatagacattgggcttggcggcctacagcgcagaactgggtgtgcgccggcgaagtcgccgcctcgatcgcgtcggcgtagcgcgctggtcgcaggggag

SEQ ID NO: 170518 - DNA, 973 bp, Zea Mays
gctaaataagtaggccatataggccaacactatgatagaagggatgccctaggagcacccctatgattgatgagaggacgttcattcaaacatgcatgcattgttttaaatcagcacacaaaaaaaggaaaaagtgacttattaaaggttgaagggaatatattgactcatgacccctaaaaacattagttaagaatgggtaacaggaaggtgggttaaaatagattaatccaaattaatcatcctcctttaacttaagaacgcatatctccttactgctaccgtagcacttacacttacccctctttcatagatagcttcacctacccccaccaatggaagagacacccgcatcagctttgactacgtttcccgagagggctttccctctatcttgtgggaggtactctacgccattgggtaccccacaccccctctatacacggtggagctgtatgaggagcactgggtgccacgctatcgggtttggctaaccctggagtctcaccctctgcagcctgggtggagttcacttgattccgaaactgtcggattcagggcggacgacaccattgaggtcgtggcactaaaggctttgatgactttttgcggataccacccgctggagatgatgatgcacccacttggactcttcctcgctgagaagagggatgttccgatgtggtgcaattgagtgagccacgtcaaggacgtgtgggccatgcatcctgatgaggttgtgagaataaccgtccagtgcatgagtgcgctgtactgcctgtaggccctgcaaagtgatgtcatgacgcacctcacagggctcgctcaaactccaaagaccacactcgacgatagggaggacttcgtggtcgatctgtcttcagagttggtggagaaggatctacaggttgaacagatgagcaaccacatccaagagctggagcagcaggtggaaatcctggacaacaccatt

SEQ ID NO: 170519 - DNA, 519 bp, Zea Mays
gccattggtctgtctggacaaagaacaaccgatcgagtgtccccatctcatctccatgacacaccactgctcagctggtggcatggcccaatggaatgctggtacgtacgatgcaatgatacatggtatggttaaggtcccaactcctacccaatcctcctggttaatactgagaaacaaaggaagcaatgattgatccaggcaggcagaggcagaggcaagcaggcaaatgggcctcctggctgttggtggtggtgctgaggcagtcgtcaggaaatccggatgatcattggtggcgacagcaacgatcgattggactgggcagtaggtgattaggccgtgacagcgtccacgtacagtacagctcgttcatggctgggcgtttcgtttggcctggtggcactgggagccaaccatctataccaacctgaccacgctgtcgtattcattccccgtgtctatctaatcttgcccacatcacatattcttcccttcccctgtatcccaatcccaacaacc

SEQ ID NO: 170520 - DNA, 314 bp, Zea Mays
gcaagatggtgcctctggatcactttgagctagtctctgtccctgagtccaaggaggtcgatatttgggccattgtgccagggtctcctagtgccaagggatctggtgtggttctgtctttgggcgaagacggggttacgacgccagaggtgatgaagttggctactgttccagaggccgacgtgagagtatctgtgtctcacaggagcaaaaggagggcgacgaatagtgttggtgactcgattgagagagcttccaggcttaaggctgctaggaacctcgacaaaccttttgctaaaggtgcggttaattta

SEQ ID NO: 170521 - DNA, 829 bp, Zea Mays
ctgagttgagctagccgcgacgagggcattcttgcggtggtagaacaggtttggggaaagtaagaaattcgtggtctctggtgagcaatttgaagcaatagctggtgcgttggcttcgagattatatggcgcaacagccctggccatcaatttatagggggcttaggcggtggcgtgcaatttggccgagcaatgctggcgggcggagatagagaagaaccttggcgcagtggattcgtgtctactgtcgtggcgacttcaccggcgaccaacggggagctagagtgagtcacggtgatgcggtagaccggtagagacacgcggtggacggcggtgagggcttaatagtggtgagaaccttatccgaaggatcagtgctcaagggagaggcacggcggttagccggagtggcgtccagcgcacggggtgatgatcttttaccccgcgatgctatccatcaactcccggcacgaatccagtcgccggtgacacgaatcgcggcgaaggatcagtcgtcggcggtgagggctccgtgcgctggcgtcctgatcctcacaaagcactgtaccatggcgattttcagtcagatgaacctgacagccaatctttgagctaaattttctctcaaactaatatagcaactaatctgggactctgcagcaaagttgttcctctataatagctctacaactttgttatagcaaccctaggtagattctcactggatcatagtcgaaatggctctcaaacttggatctaggtcactgtcagtctgaaattcagactttatcagcctgacagtcgaactttgggcttaattatccccaat

SEQ ID NO: 170522 - DNA, 647 bp, Zea Mays
ttcctatttttctcccagattccccgcgatgcgggtggtctgggaggggtctgcgccgacctggatggtcttcgcgagcccgccgtctgctccggacggttgtaccttcggcgccttggagggcgctctggcactggaggctgaggggcctctccctccgtcgtcggggcgagcgatctcggccgccagagcgtgtagcttctcgacggctgctagtgcggcggtgcggtcgccccacacggtgaggatcccagcaggggacgacatcttgaggaccaaatacccgtaatggcaatggccatgaaccggtatagggccgacctcccaatgatggcgttaaaagggaggttgacctccacgacgtcgaactggacgttttccgtgcggaagttttcctctgtcccaaatgtaaccgggagcgttatactcccgagaggatacacgggttgcgggcctaccccgaagaatgggcaagagggccccaaccacgaccccgggacctgcagctgtctgaatgccgcatggatgatgacattgaggccagcccctccgtcgatcaacacgtgatgtagccgcatgttggcgacaacaggggtggtgatgagcggcagtacgccggcccccgccatgttgtcggggcagtcgga

SEQ ID NO: 170523 - DNA, 351 bp, Zea Mays
aaagtgctgagaatgcaacaagattttgaagaggagaaaaacgaagctaccatcaaagatctagaaaacaaaatcgaaaattacgaagctgctctgaagaaaaaggacttcgttattcaagaccttgaaatcaaagttaaagatcacgaagctgccttggaaaagaaagacttcgtcattcattctatggaaggttcactggctgaagcccaagccaaaaatgacaaattaaacaatgaattacttataaaatcagaaaaaactgagcaggaaaagaagaatctcgaaacaagtctcaagaccgaaatcgagaagaattcaaatttgcaaaaatcattgaaggagcttcag

SEQ ID NO: 170524 - DNA, 284 bp, Zea Mays
gggagctgttttattcttgtttatttatcagttcaaacagattgtcatgaacatgcttgattgccttcgtttgacagagaaacctatagtatataaaatcatgggcagaggtccccaaaccatggtgtactatagtgggcctttgtactttgtatctaatcatctaaccttagatgcaggcattagtttatgtgttgataccgtcatacgccgttgtttcataacaacgcccatcagacagatagagagtgacgacgacactagctcacatatgaagtgctaag

SEQ ID NO: 170525 - DNA, 441 bp, Zea Mays
tagatacgaacatatcatgatgaaccagaaatgtatgatcgttagctgtgggattttttattcggttacagattcccctgttgactggaatgcttgcattgtttgcgctttatgtcgtctttagctgggtggaggataggtcgggctagatgttgatggttcgacatggataggactgtaaccggtacctgtttttgtgaggttggtcatgatttcagaaaatggagcgacaaaaatgcagtaggtggctatgttattggtttctagtttctggcgagattcatgattcatctacttgggagaaatgtggagatccggattgtatatcagtatgtttactgttctgtcatccaagaacgctatgggtgacttatgtctaacgcctcattagccccacataatgtgatatctggtttttgtatcttctgaaccttttgtatc

SEQ ID NO: 170526 - DNA, 501 bp, Zea Mays
aacttcctggtcgaaggggtgtcggccgcgatcagccgttggattaaaaccaacggtcacgattagatctgtcagcgcctatacatgtacgcaacctagacccttggatccgagatccggccacgcccgagccatccctcagccctcggatcaccgatcggacggaatgcgtgtttcaacccaaacgttttccccacaatcaaatccccatcatccaaactcggatgaacaactctggagatagtcatcttcctccccaacgaccgagctcctcgcacaaaacagccacgacagcgactcaccggcgaccagttaaagtggtgccccggccatcctcggtttatccaaatactctaaaccgacgttgggagaaaccataccgacgttggtggcgcaccgagctctgcccacggagagggggaattccgccacgattcggagctccggcgagaaattggatagtggcccgcccacgatccatcacggcaggtttcaatcccg

SEQ ID NO: 170527 - DNA, 532 bp, Zea Mays
ctatggctcaagcaggggtgggaaagcggcgacaagaaaagcattcacatgacaagttataagtaattgttcgaagcataggtaaacaagtaagtaagatacctttgagctctttcagccgtacggcttccctagcttctttatctgccttggcttctctatgaacccgcaaagcaagcactatgtgtgaatatgcaatacaaagagccaaagctacaaacttaaagatcaaaaggaacctttctcgcattatctctagcagcttcatccgccatcttcctgacactagcaagccaaatatcagcataaaacttttgtcccgattaaacatattcgtctgaaggatctttaatatcgtccacagaaaccgtgaagtctggccgaataacagacttcacatgattgtaaccagccttttcaagcagtgaaactgctcctcgtgtacccacagaaccacagaagtcccgtcggccaacactttgtttaaggcttcaacttcaccttcaatccattacagcttcggcgacatcac

SEQ ID NO: 170528 - DNA, 389 bp, Zea Mays
ttctggtccaccagtacaaagatctgagatcatgatacatcttgttactgccggggtgcatggagaatttggaaaggtgagcttcatccaatatcttctttctgagttcggggttcttgggaacaaccaatcggtctccaaaccaaaggattcctttgctgtcctgacggaagcatttgtatttgtccacccttgtcaccaatctgtgccctgactatttgctcatgcagggtgggctccactgaaatataacttaaagcaccgaaggaaacgacttctatgtttagcttgcacaactcatcacatagggtggtgattcttgcatccatattcatacaattgcactgggctttcctgcttaaggcatctgccacaacattggctttgcc

SEQ ID NO: 170529 - DNA, 905 bp, Zea Mays
cttactagtatataaatgccaagtaggcaagtacataacagaactacagacttactattgacctaaagcagtagagcctcatccagttgaaaagcagcatcactagcagcccctccacctgactcagattcttcttcctcatccacttcttcttgagtttgtactagttgttcagctggatgatcactaccatcttcatcatcatgataactaccatcttcttctccaacatcttgagtattccttggacgcttcctagttcgaacatatgtccttggatgaggctgagaagagaggtccccctaaccagaccaccagcagccctaggtacatttcggccccggagaccctctgttgcacccaatgcttcatcagcagcagcccaaagattaccactatcagattcctcgtcaacccattcattttcccattgaaactcttcaagcaccagtgggttgcttttcttgcctttggaaccgagctctcttatttttgcgaaccgattttccattttccggttgtagctcacatacaccaacttatttaatctttggtgctctaatctgtttctttttttgtatggacctgcacatgcgcatacatgaaatcagcaaccattagaaacaatactactcatatagggcctattttattgctgcaactccaaaagcataaataatacttacttgggcaaagtcactccaatttcgttcacatccagatgctgaacaacataggctaacaatcctctttgctaagcattgtagttcatatgctaggccaccataagctccccaccaaaggactaaaaaggcagctttgttagttcattagcaaacaccaaataactaaatatagtgtgactgaaatacaaaaaaaacttactaggattttttctctctcta

SEQ ID NO: 170530 - DNA, 589 bp, Zea Mays
cgctggagagctcagctggagtagagaggcttgcgcgcagcatggagagggagacaaggtgcgagcacaggggagccagagatcgagagcggaggtgcggctggcacggctagagacgaccgacgaggaggattgacggcgactgttacacgtccagctccggcgaaccgtacagcatcaacagatacaaatcctgaagcggaggcccaacttccacgccgtagcacgcggcccatgaagcccaacccaagatatgccggcggactgaagtagagtatatgtaatctgttagctgggagagagatttttatgcattttgtaaaacctgaactgagaagtaaactccagcttcgctgtcctatccttctctgttctccactttcccttcctccttcccccagagctaacaattggtatcaaagacctcatcgatccctccccgatggcgtcaaccacaccctccccgatcgatcccaacctcatagcagcgatcggcgcggagttcgacaagcggatctcatcgctggacaccaaatgggagcaacgcttctctgcgctggagaagtccgtcgcgggctgcaacgctggg

SEQ ID NO: 170531 - DNA, 494 bp, Zea Mays
tggaatggctcatcctagtcggctttccatggccgcccggggcagtgccgcccatgtccgtggtgggggctcatagaagacgaggggcgtgggcgccctaggtgtcctatggtgatggggatggctcaaggaggtcaggggaagtgcgaggaacgtgaaggtgaggataacatcggggtaggggcaccagagggtggcggcccacattgaggcggctcggcggcggcggtgccactcaacttcggtgaggaattgcgcgcaacagagagcaatgaagggaaaaggagagggcagggtggttttttacctcaaggggaacctcagggacctctggatggcagcaggggcccggcgacggcaccgccgctgcatggaggagggcgagtgagcgcatgtatgggatatcagaggggaagaggacgaattggggtgcgttccgagctacggatatcaaggcgaaacttaccgtggcaaagggcatggtggggcctcaa

SEQ ID NO: 170532 - DNA, 525 bp, Zea Mays
aaagtgtccaaaatcttgatgggatactccgcataagtcaggtcatcttgaacactaaggtcctccattggtagttgctcctcaggtaccctgaggcacttctttagctgagacacatgaaatacatcatgtacatctgataggtgatcgggtaactccagttgatatgcaacctcacccactcgctttaagatcaagaaaggtccaatgaagcgaggggacaactttcctttaactttaaatctcctcataccccggagtggtgacaccttcaaatagacatgatcaccctccttaaactccagtagtcttctcctattatcagcatagctcttttgcctggattgtgcaattctcaaattttctcttatcattcgaacttgttcttctgcctcttgaataagtccaggcccgaagaattgcctttctccagtctgatcccaatacagtggagtcctgcactttctaccatataaagcctcaaacggtgacatcttcagactggcctggtagctattattataa

SEQ ID NO: 170533 - DNA, 423 bp, Zea Mays
gcatcgtctcgacagtcaacgcagcaactcttgcaatattgcttacccggaaatcaacttctcctcttttcacgcttctacttcttatcattccctgcatcgaattgcaaatatgggcaaccgattcggtatcaaatacccaagaattaatataagaatcagcgagaaaaatttctgcaatgtgaacaacaagtgtacctgctacggctgtacccttaccgccgcgatccttaatagaggccaagtactgcttgcaattcctcttccagtggccaagttctttgcaataaaagcactctgcatcagcatctggtccaaccttgggcttttggtttggcttggatattgtatcctttgccttgaccttcttcttttgtgatttacccttctacttaaagttgggtttgttttggaccgcaatca

SEQ ID NO: 170534 - DNA, 464 bp, Zea Mays
gcagcttctgtgatgcaaacgagggcagggagagagtgggagagaggaggaagagggagaggggttgtttctctcttcctagatcatgggtgcgtgggagaggggagtggaggcggtttgggcgctcatggcgggaggggcggctaggccgcgcgtagggctgggcgctaggccaagccggggctgcttctcctctaattgatcttgcttgctttctaattaaaatcacacctcgaatggaaatcctaaattaaatgaatgcactcctaggcatgacataagaaaaaaataaatatgatcatgatgcaacaacaatatcacctgagggttttgcttacacgtgtcacgaacaccaatttctacattactttgaaaataggtggaaggagcagaacaggaagagaaaaagagagtaacacctgaatttggtaaatattggagaagaaatttaatacccccaaatt

SEQ ID NO: 170535 - DNA, 609 bp, Zea Mays
ctttttcctattttatgctagttgattagctagtgaggcatagaaatcgccctaagatgagttattgtaagcatgttatactaggtcgggtaggcgtgagcatgttgcgccatcttaagtcattgccgacttaagctgattgctccgttggtagggtatagtggtcaccctaagttgagtaagcgtgagcatgttgcaccgtcttaagtcactgtcgacttaagccgattgctccgttagtagggtatagtggtcaccctaagttaagtaagcatgagcatgttgcaccgttttaagccactgccgacttaagccgattgctccgttagtagggtatagtggtcaccctaagttgagtaagcgtgagcatgttgcaccgtcttaagtcactgccgacttaagccgattgctctgttagtagggtatagtggtcaccctaagttaagtaagcgtgagcatgttgcaccgtcttaagccactaccgacttaagtcgattgctccgttagtagggtatagtggtcaccctaagttgagtaagcgtgagcatgttgcaccgtcttaagtcactgccgacttaagccgattgctccgttagtagggtatagtgg

SEQ ID NO: 170536 - DNA, 453 bp, Zea Mays
taactttactcggtcgtcagtcaagccagcaccaatgccgttgccattaccacctgctatcaaccacaaagtcgctggcaacattgaagaccgtcgagggcatgcacatggtatcagtaaaagtgatgagggcaaactgacggccctcagggcatatcgcagagcaaaagggttgtgcttcaaatgcggagagagatggggtcatacccacagatgttccacaagtgttccgctacatctggtcgaggagatgtgggaactagcaatcgaaggtgaggaagtgatggaagaaaccgaaggtaacaccgtagaaccaacaagtgagaatgttttggccatatctttggatgcagtaagcggtggtgaaggtaacaaaacaatccgtttatgggcatcgatccattgtcagcaagtgctcgtgcttgtggattcaggcagctctgcaagcttcct

SEQ ID NO: 170537 - DNA, 977 bp, Zea Mays
ctttttcttcggcattccccaaccaccagaggtcgaaaatgtcatgttttccaagtattcttgcaccaagtctctagtgctgatgtgcttagccacgaccctaaactccacttcggccatttggcaaggagacccgagctgcatgttgcacaagggtcaggtcatactgaagttcagtctcaaaggactcattaccatgctcatgagcttctcccttttcttctcatcggccttcacataaaaccactcgtttgtccactcggtcggccatttagtgcggtagccaatcacgggggccttggtatcctcttggtatgcaaagttatagcacccgaagttcttgtgcagaccatcggctcttgccttcgtccgataatgaagcccgtgcactcgacagaacccttcggcattggtactctttccttggcttcgaagagcccaaatatacacactgagcctaataatggcattgggggtcagctggtgtaggtagatttcgaacttcttcaaaacctcactgatcatctcataaagagggaaccaaagtccaaccctgaagaagcttttgaagactacaacttcatcctctttcagctcgggaatcgtctcctctccagcaaaacgaaccagttcatcatcattttcctcaaagtatcctagtttcttcattaaaactagatccttttcctttactgtggattttccgaactcgacatggctgggtttgctcgggcttaggatactgtcatcatcctcactttcattttcacttttagattcggcaacggtctgttgagcttcggcatcagcaacaccttcgccaatagtttcttcctgcacaactaacccagaacacttcatcacttctgagatgggagctgtctcagtggttccaacctcatctccctcgcttgtcaccctagcagtcgatcttactctggccatttcgatgttcagactctagcagacgaagttgc

SEQ ID NO: 170538 - DNA, 858 bp, Zea Mays
cccgggctcactactacgagggccccactgggcagcctctcacccacgcttgttcctccacctttctctggccaacgggccccacttgtcggcagctccctctccgcacctcacgcggatcccccgcatgactgacctcgtcgcgccgcccatttcggtcgggccgttgcaactccgcctcggagtatttagtcctgagtcgtccacgccgtgcgccctaacctaatcccgcatccacgtcgtaggattccgtcgcgcaactagtttccgccgccgccgcatccattagcgaactcgtccacaccgccaccggagatctccgcccacggtggtgaattatccttggcgcttcgacctagggcttcgccacgactcgttagagcattcatgaagtcgtcagactcggggagttgattttgcgcaaataattgctcgtcagacgttctgcttccgccgcagactctccacggcgtggtcaggccccattcacgtaccctttcccctgtaagtacgtccttagcgtttgactgtcctctgctatgtgtagaacgctttggggttgagtttcgatgtgcaggggcgagtattgcgggcaccggtgatggctccgccgtgcaccgtgggcggcgccaccgtctcgggtcggggttggggagaatcgtgagcgccgtcagatcccgactgaacggcgtagattagatgcggtgaaaacgattcggtctgggctaatgatagtcgtagatctttgatcatagaatggggagctcgggtcgatgctggattcgtttgggccatcggatcaggatctgagcacttgggaccgcacattaattcctcgcggtgctggtttaatcaggg

SEQ ID NO: 170539 - DNA, 682 bp, Zea Mays
tcctcaacctccaattaatgggctaggcattacgtactcgttggttatggttgcagaaaactgatcctgatcggccctaggaagggctactggttcatgtgcctcgtatggcacatgctctttttgctatggttgtggttacaaaggtggtgaatggggagaatactaaattctgggatgatgggtggattaatggttctacagttgctgagctagcccctaatctcattcagtttatccctaaaagggctagggggcagcgcactgtttcgcaagctctaaataatagaagatggatttcttatatccagggagctctcacagtgcaggtgttagtggagtatctacggatttggggtttggtggacgagattattttgcagccctcactgcctgatcagcacatttggaagctttccaattctgggcagtactcagccaagtctgcttataattccttctctattggatctattaagttcccaccttggaaatggatttggaagtcttgggcccccttatgtgcaagttcttatggttggcaatcaagaacaggtgctgggctacggagagattacttaaacatgggctaccacaccagtgtttgccccctgtgtgatcaagagcaagagaccattcagcatattatgttgaactgtattttctccagggaaacttggac

SEQ ID NO: 170540 - DNA, 693 bp, Zea Mays
agaagacggaggaggggacggaggcgatggccggaggtgaccgcggtgaagggacggcgggaggacgacgaaacggctgacaagcggggccatcctgccagtgggggcgagcgtgcgagagagagggcggctgacgggtggggacggttcgccagagggagggagggagagcgtagggcgggctggcgcgtgcatggaagcaggccggaaatgggccgaaagaggagggaagtgcgggcgcgagggggaggaggccgcgggtttgggctgggaaacggcccagcagggggggggagaagggttttcctctttttctttttattttctaaatcctatttccctttttgcatctttttcttttgaacaaattattttgtgggtaatctaggtgctggaaaatagaatctaagtgatgtgcttgtgatcaaacaaggtgtatgcataagatgaaagaaaatctaagggggttcttggaattaaaggatgaaatggagggaaagggggtagattagggtttcaaccctaggttaggattttgggatgttacaaacctaccccacttaaaggaatctcgccctcgagatttagacggggcttgagaaaaggtaagggtattccttcctcagagagtcctcactttcccaggtggcttcctcttctccatctctgctccactgaaccttacagagtttc

SEQ ID NO: 170541 - DNA, 603 bp, Zea Mays
cgttgacttggagtcgtcttctgtgcgatgacaatttgacgattgaccagcgtgcactgtctaccttccttttttttcttcctcgagaggctttattgtttcactagaatcgtatcgatgcgttggtacgaaaacaagatagtgcctgggccactgttgagatcaacggtgacatttaggccaataatatgccaacgcagtataagcccaaatttttttgtattttagccttttttttttaacaatttcacgtttagatgtttagattttttggacggcttaatgtcgttattggaccctctactcggcgccgcagcttgtggcgtcaaggtacatgcggcgctggcgtggtatggctgacttggctgccttcaatcaacatgtctttctcactcagttgcacgcagacaaccagcaagattctccaacatctgtttctcggctctagccgcctccatttccattaccctcttctcctttgccaccttcaatcgtctccgctcaacacgcatcgggctatcacaaccccgtgattctatgaacctacgcgtctcctatctgtgatctttaatgtaggaatcgacgatctgagatccacaccgc

SEQ ID NO: 170542 - DNA, 394 bp, Zea Mays
cggtggcagagtgaggagctggacctgtgtgaattttgctcggaatgtgcaagagaatgttgctattggattctgccgtgaacttgctcggatgtgccaggcctcgggaatggcaagtatccatccatccccctaaataaatcaattttgctgctactggtttacataagtagtaacagctagcaattttggttttacacataggacttcgcgctggagcctatccttccgcctatatacgcgcatcctgataaagtggagagagctctgaaagccaggttccatgacgcgatgaacttgctcggaccacagcgcagagaacaactcgacttgctgctcattggaatactccctgataacaacggttctctttatggtatacatacatacatac

SEQ ID NO: 170543 - DNA, 512 bp, Zea Mays
ctctgcaacaaagaagcagtcgggaggacagccaagtgggcatctgagcttggagctcacgacatagagttctgacctcgcactgcaatcaagacccaatccctagtagatttcatatcagaatgaactgagcaccaagttctggagaacttcgagtcaaccgaagtttggaagatgtacttcgatggctcactgaaactgcaggggcaggggcaggaatccttttcattgcccctagatgggacaacctcaagtatgcacttcagctcctattcccagcctccaacaatgcaacagagtatgaggccttaatacatggactcaacatcgctgtgtcactgggcatcaagaaactgatggtatacggtgactctgtagtggtcatcagtcaggtcaacaaagactgggattgctccatagattcaatggacaattattatgacacagtgagaatgcttgaagacaaattcgaaggcttagaattccaccacatatagatggatcgcaatgca

SEQ ID NO: 170544 - DNA, 906 bp, Zea Mays
aaaagagtggttcaaagtggtgctgctgtgtttctgaattttcagattggaaacagtaactgaatttcagtgttgatagcagttttggagctggtttgtggctgttctgtaatgttttgtgctggggtgtttatagagaagttgaagcctatgcgatagtgaacaaatctactaaagtgtctttgacttgatcccacataaaaagtggagtaaaacttgctcaaggttggactgtcttgtgactgaaactgaaattttgttcagttcactaaaactgaaattcagtaaaaaggtactgattttggggctcaattgtgcctaatccatgaggttttgggctgtagaatatatagaggaattaaagaccatatgatggcgaataagtctccttaagtgacttttgtttgatcctacacaaaagttggacagaaagcttgctcaaggttggactgacaggttttatttcagacttagtctatggctgattgagacctgaatttcagataaaagtgtcaagtttggagctccttggtggtcaatccctttgtttttaggctataatttctatagcaaacttggagaccaatgttgggggagtaatccctagtgagggacatacccttgaaactgcttagaaatgagagaaaacactgcacaaagttgtgctgtcagataaaagagtattgactgttgtgcagtagcctaagtctgaaatatgtgtgtctggttaaactttggagctttgtggtgcttgatctatatggttttggactgaagttattgtgaaaagtttgaataccatatgttagtgaataagtttctttaagtgtgttaggcgtgaccctacacaaaaagtggtgtaaatactgcccaaagtgggactgtcagtcacacaaactgaatttc

SEQ ID NO: 170545 - DNA, 352 bp, Zea Mays
aacacatcttgtttgttcgtgcaatctttatgccacctcatgtgcatagcggtcttcctcgagagaaacaaacgtttcactctaggagtgagaggcatgtaccgaagctgtttatgtgcaacctttgtcaccaccttatcccctttttcatttacaagctccacatacctcgacttcccacattttaagcatttttgctctctgccatgttccttccaaaaaagcatgcagttgtcttagcaacatcaatcttctcatactccataccaagaccttcaagcaatttcttggattggtacatgtctttgggcatcttgtgaccagtaggaagaacctccctaatcaaatccat

SEQ ID NO: 170546 - DNA, 903 bp, Zea Mays
ctaggaaggggaggcgcccctcgcgcggcgaggacaaatgaggtgaagggcgactggggcatgcgatgtggaggacgattgggcagaggtgtggagggatggacgtgacgaagctcgacgcgcacaacctatgaaattttcgggtccgagctgtggggcacgtgtccatgcgcgacgggctgaagacacgcccaacgcggagagcgcctgaattgggttgaggttttaactatctagactagattgcagcgcaggctaacacaaaaatagactattttctaaattcaaataaggtctgtttagaagcaacctagtttttaagaatccagtttttatcttcggtttctagaatctagtttatgaaaaaaattctataatagtatttagaaccatctctgttttttttgaaagggagaggcaaaagacttgccgctccaatatattagaaggagtagaactaacaggaaattacaagaaatcgaaacgacttacaagactacaagcaaactcctgaaccaacctactgagcagacctattagtccgccggaccatggaaacaaccaactaaccctttgaccactaacgcgacctgctccgctgatctaaactgattatgaaagattctattgttcctctctaaccaaatgctccaccaaaaataaatcataaggccatcaaaagatcttctcgaatgcttgttgcacctacttctcaaattcctccaccaatcgtacaaggattcagagccaaagatccccctaaaggacaaaagattcgcccaagacaatattctgtcccacacctccctgctgaaggggcagtccctgcataaatgaaccgtcgtttcaaaggtcgaattacatagactacaagaaggattgaaaggccatccccttttctga

SEQ ID NO: 170547 - DNA, 512 bp, Zea Mays
aaaaaagtctgggtacacaagaaatcctgcacgtgacctactactccatagatttatctcccacttaatttgcttcctttctatatccatggctgttggactcgaggttgatcatgagcttcaactcatatgatcagatttagtgggacctactgctatgattaatttgcttcttggtccacctaaatctagaatttaatgaagctatacaaaagagaagggctatgggatatagatagtggattttcacaggaacatatagaagcataaagaaaccctatccatacgacaacaatgcttgtatgtagacttgcaggagtaaaactatccaaaactgaacagaggcaactgtcgaaagggattctcacaaagaaaaggcatgggttgctgtgagtaaaactacattattccaaggacactgttccatgtaggagtaggattcgtcgctagtgtttgttccgcattgggcttgggtaatacccatcggacatcacttccttccagcttcagag

SEQ ID NO: 170548 - DNA, 996 bp, Zea Mays
cccctcttgtaaatatgaagctttcatttgaatcatcttttacagtctattacagattcatagacaccatttccccctaaatcattacctcatagtactccttatatcagcgagatcaattactaccttagggttgatttggtgaccaggtaatttgaggggatccaggtgactagggaattgaaggggatctatccttccacgacagcgacctattcttgggtcagcgggcccgcgcttaagaatttcccgtccctctggcggtcctcgtcgtatcgagcggttggcttaaaaaggtcggtcgcaaagatccccagtgggacggtcgtttgccccgatgccattttcattagggtgtttgtcatttcgttcaagaccatcgaattgctcctccatccaccttacctcctgacagtacgccgccatcttgcggtcgcggcattacaactacttcatctcatgtcctatgatgagatgagagtctcctcggatatctagacgccgaacacccaactgcacgacaatgtgtagcccatttacgagggcttcatactcggccacattgttacaagcttgaaaattgagttgcacaacatatcacagttgttcccccgatgatgacgtgaaaacgaggtcaccgtgggctccctcctttctaagtgactcatcaaaatgcatgatccaacatttctcagtagttggcaccggctccaattgggtctcggtccactccacgacgaaatcaagaaggactagtgatttgatcgttgctcatggggtgtaggagggtatttggcgattctcctagaaatgttcggattgtgggtcacctcacctagggggaactacgtcaccatggtgataggatgtgattttaaatagtgtctaagcttctatttagtaattaagacggtgtacaggagcttttgtacctgggggtagcgagttttcaagccggtgaggacttcgcttatgaagtagacggggtgctaaagc

SEQ ID NO: 170549 - DNA, 650 bp, Zea Mays
cttggccgaaccacgggataaaatcgcgtgtctcttgtgttgatctctttgtgattgtcttggccacaagaactcgcttcgcaactacttagtctcactaacatttgtataaccaagatttgtggctattagttgttgaattttacaggatcacttattcaccccctctaggtgctctcacatcatgataccaaatatactaccagagatagggagagaggaggacgcagatcatggcattgatatgaatgtatgcacatgtgtgatgtagagaggaccgggccacttgagcacaatagcatgtatcctctatgtgatggatgattaggtgcaagtaaagatggagcttacatactcagatgacgtctaagctcaacaacaagaacaatgctagttgtcgattgcagtgtatcgatgaagagccacatcggcctctagccttggggttgacaagagaagcagtaggagcctcatagtatagagagggaaaagccatttatatgttactatacacctccttttatagtacgagaaagaagaaagttacaccaatatatggacatgggccctacatgaagatacatgactacttctttgttgtcatttttgttgtaacgtacacagagtatgattttggcgtgctgttgtgg

SEQ ID NO: 170550 - DNA, 608 bp, Zea Mays
cgccggacttccctacagccgcaaagccgctgcgcgtcggggaccgactacaactcgcgctcgaggccggtaattactcatctctgccgtttgtatcgacccgcactacgcataccatgtctcggttaggcttgtggggcagtgggcggcccacgggggctcgccggagttactccgccgtggggaagaattcgtcaccgtcgctcagccaggtagggggaggaagacatgatgcgcgccgttggatgtgtgttgaacggctcggattagagtctcataccgattcagccgcgtctaaccacaaccgtagatcgtgaatctgatgggcgcaggacgatctcaattagagagaagaagtgaccgttgatatctgatctgagggtcagcgttgcttaccgcttcatttaaacctagatctaatctgggccgcaagctggtgatccgacggtctagatcgccagataccccttcggccctggaaccttgcataagagcccctgcgtttagtcgaattagaaccctccgtccagtggggagttttctgagtctagagtattcttgcgccaagccccctactgtctctggtaatcttgcgcccagtccagagc

SEQ ID NO: 170551 - DNA, 566 bp, Zea Mays
ttggaaaattgtgtgatgcggaacagatgcatacgacatgtatagtttgtaacacgactgcacgacgaaaaaagactcaaactgatgacagttaaaaactctaaaagcagcaccaacatagttcggacatagcagcatcgttgtcggacgagcaccatctaactggacttaacattcatctcgaaagcacggcgcagccaagcgttccttccttctttggtctttagggttgcaaatacatctctataccgtttctccatcaacaagtgagtggcaaagaaatgtaagtcgctgccttcctctgatccatcttcaattacttgttgcaactaagcagcaacctctacacgtactgggtcggtctcaaaaaatgttatggacttgttagtgttcatggaacgcgactcaaaagcctccacaaggcatttcatgtattcatccttcgtatcttttttcttcttaggtttaggagaatcatgcagcaccttacgcttccctgtcgcatttgagcaggggtctggtgtgttgttttcacccccacctaaattggcttgcacgtggtcatc

SEQ ID NO: 170552 - DNA, 556 bp, Zea Mays
atcaaaagtctagagctactataggagtacaactttgcttaagggattaagcattgttgttatacaaaaagtggagataattggccctaaagtctggctgtcagatatacagagactgaatattgactatcagtgagttttgaggaactttaggcttgattcatgctcaaaggagtaagcaactgagcaagatctctatagcagaattgtagtttgtatgtagggatacaagtttgttatagatgtattggcatgttcttgcacaaaaatccaagttctaggcgttgcaactctggctgtcaagcgctctgaattgggtttccaatggtacagtacactgaaatatcccaatccactgaacctcgccgccgacgagccgtgcactcggattcttgcccgccgcggtgattcgtgctcggcgcagttggataacggcaagggggtaagaaatatcaccccatggatgaacttgagccactattcactccggccgccgtgtccgcttagctcacggccgcttcggaaccgtcctctccggagttagccaccttgtgac

SEQ ID NO: 170553 - DNA, 644 bp, Zea Mays
cctacatcaagttctgacatcaaagtaatggccatggtaatatcatcagggacagcaacatcggacttctttacaagcagtcgagctacacataccaccttatccattactgtgtcataagcagccttcagtaccttgcggctgcattctaagaccccaatgttatgcttcagaaactccaactctttagattgtgtctttgatgaggcacacaaactcttgagggcagaacttttggaggccagtgatttctcgagcttcttcaccacatgcatcttgagattcctccagctcattccttttcttttgaagattatccatggtaagcttatgacttatctcaagagtggtgagggaatctacaacactcttgtgcagcccatccaggttgttgcgagagatggttagggacgagatctgttcctttacctgatcgatctctgcccttagtttttgtactttgtcctaccgattggaatattctatgtggtgggtcgacgacatggagtaggctacataaagttcttagtgggttacctcatcgtcaaggaatgctatatcaaacttccactgtaatgatctattagcctcccaagcatcgtcaaggaatgctataacctggcggagctcggactagctttgag

SEQ ID NO: 170554 - DNA, 298 bp, Zea Mays
caacccatacttggtaataaatgttgtcttcggaatgtctgaaggtcgaatcctgagctggtgataacctgacctcagatctatctttgaaaacacgttggctcctctcaactggtcgaacagatcttctattatgggcaaggggtacttgttcttgattgagacctcattcagagctcgataatcgatacacatcctcctagtgccatctttcttctccacaaacaggacaggggggcccaaggcgaggtgcttggcctgatataacctttctctgacagctcatcaatctgcttct

SEQ ID NO: 170555 - DNA, 626 bp, Zea Mays
tacatttaacgataacatagagtccaattcccatacatattaaattagtatacacattagattagttgcaacgcaccgcggaatttgctagtattaactgattaaccaaaacgtccgaggaagctgccatggtttattttcataatatcgagaacctaaatcagtcagaatcgggaatcaatagatcaaaaaccaaggatgtggacacgaagagaaaagttcaccttcctgttgcataaatcagctagcacggcaggcaccatcaacatggaagttggggatatgaatggatgatcaattgtggcgcctatggaggtacatgttttctatttccccagccacaaggagttaactaattaaaggcccaattgtctagtatcctaaagctgcgcatataccacatttttgccataccaaccctaaggctaaaaaattcttcaccagcactctgaatacccccaaagaccaatgtatcctaaactgagatttggcgtggtttgaagtaactcatctaatttgactaccttcaagcgtgccaacatgtgtccactaagcaagcattccataaggctgcgttcatttatattggattgagactagaaactattctggctaaccaatgttaa

SEQ ID NO: 170556 - DNA, 495 bp, Zea Mays
atccaagacagcgtctagcacattggccatccttctcctcttgggagttgcagcaggagctttctgcacttctggcaattttgcctctgctggaggacttaaaatttctagcattttcactatttttccacctgtggctcttctgccttattatccttagcttcggctggcccgactgtaggcacctttggcactacaatggcctcttcggcgctctgcacattcggagcagtttgttttacttcggcagtagaagttcccttgccaaattcaggcaccacggtcggttcaatgtatcgtggccggtgggtcaggaccttcatcttcttgcccttcggcacaacagtaatggccgaagcaatagtttttcttttctttccttgcctttgcagcgggtagtgataatcagggtatacaaagccaatggcatcaaatactctgtttaatcttttcttccctcggcccccgaaggctgtggacaagacatcatcttca

SEQ ID NO: 170557 - DNA, 836 bp, Zea Mays
ctctgctgccgccgcacgtgcagcatctgccgcctccgctgcttctacttccgctctcgctgctgccagttccgccgccaccagccgtgctgcctcgcagctgtcgctgcagccgctgctgctgctcgctcgcgttcttgtgccgcggcgacctcggcctcctgctggcgccgcgcactcgaagtgaccgagcgtagggacatggtgggctagtgaggggtcgctgcgtgtggaagaggctgtctcagacgaaaggctgctcgtctgagcaggagaggaaggaacagttagagctcttgctgtcgactgagtgtggggagaggcgcgggaaggagatgagcaagagatgtttactctgcaggatagtttggttctgataccaattgtagggtactgaagagggataaagccggagagtttggttctgacgccacggggcaattttcgtttatttctcacacactactcaagtgctatacccttagaagggttggagacacatatttatagcactaggggctgcactacactgcactacgcactacactacacactgcagcacacagatgttgtcctttagatactaaagtgcagtcaaaagactgctgtgctgctactgctgtcctgcgcagttaaaagactgctgtgctgtaactgctgctgtcctgcagcagtcaaaaggttgttgctgctgctgcgcagtcaaaggactgctgtgctgcaactgctgctatcctgcagcagtcaaaaggttgctgctgttgctgtcctgcagcagtcaagactgcaactgctgctgaccacatgacttattctatcagttattagttgtcctg

SEQ ID NO: 170558 - DNA, 873 bp, Zea Mays
gggcactaaatcgatcagttcacggtgaccgggcggatgggcaaggggatgaatgtgttctgaccaaacaacggcgtggataaccaaattgaggctggggaaaggttcacggattcgctagaggttaggtacacacttggatttgggcgaaataggaatcaaagagtgggtcgacagaggggtagtcatggcggcgttttacagagcaagggtgcgttccggtgatgggcttcggccgaccttcaattcgccgctttcgagagcaataagagatcaaagactaactaaaacagggaacaatttgataaatactaacccgaggagcgctggccacgggtgttgcttcacggcggagcaagaacagaggagagagggatttgtggtttcttcggtgaaattgagccgagtgctcgatcgcggaggtgcgggatgtgataaagaagtagaacccgggcgcaatttataggccaacgactggaattggatgaggaccgcggactttagattgcgcaggcgagctcaccgcgtggcggaacccggtgatggcacggtggccgccgtttaaccggggcttgccacctcagtaactttctgccacgtcgccgagaaccctttaccgcggccaccgacgacccatccgagccgcggtggcatccttatcgccggcgagggctgatccttatctcccccctctgatgtactataccatggcaatccaccatcagatggcctgaccgagtgacttgaagccagattttctctcaattccatgtggtaccaagcccaaacacctataacaaagttattcctctttaataactctacaactttgttttagcaaccctaggtagattctcactggatcttagtcga

SEQ ID NO: 170559 - DNA, 644 bp, Zea Mays
ccgtcttaagtcgtcaccgacttaacccgattgctctgttagtagggtatagtggtcaccctaagtcggataagcgcgagcatgttgcaccgtcttaagtcgtcgtcgacttaacccgattgctccgttagtagggtatagtggtcaccctaagtcaagtaaacgcgagcttgttgcactgtcttaagtcatcaccgacttaaatcgattgctccgttagtagggtatagtggtcaccctaagtcaagtaagcgtgaacatgttgcactgtcttaagtcatcgtcgacttaagtcgattgctccgttagtagggtatagtggtcaccctaagttgagtaagcgtgttgattccaagtccaatcgaatcgaagtcaagtgatagttaacagtttgaatgcccttgaaaatgaaacctttattgacgatgtattatcccattatagagtacaatgttgctccgatagctttcgaggttttgctaagggtaaaactttctaagatgctctatgttccatgaattccctactgccgtaccatccatttgagtaagctggtatgatcctggccgagtgacctccgatacaatgaatggcccttcccatagtggtgacaactagtgtcgtccttcccttgttagaatttg

SEQ ID NO: 170560 - DNA, 437 bp, Zea Mays
gaaaaattttcaactttaaaaaacaagaaattcaatcatcagatggctagagtgcgttccacagctagggttacgcgcgacggagaggaagccgaaggtgctgaaactgccccaatctccgaagtgatgaagcgctcagggctggtagcatcggaggatgcacctgccgttgaaacagaacaggctgatgttgaggagtctgagtctgaagatgattacagtgcagtgccaagtaaacccagccacctggatttcgggaaatccaccatctccgaagatgatttgcctaagctgttgaaattgggctatttcagtgaagcgaagaaagagctggttcgttttggtggggaagagactacttcgaagccaggaaaggatgaagtggtagtcttcaaaagtttctttaaggctggcttaagatttcctttgaacaagat

SEQ ID NO: 170561 - DNA, 316 bp, Zea Mays
ggaacaacaacctattgaacagtatcaggaaaaaggatctgatgcttagatcatcgtcagaccctttcctcagacgatcttgaagagctgcaaccccaaaatcttctttcgataaaccaagttcagcccttaaattgttggcagcaacagcttcatcgattcccaatgccgttcctccaccagcatttggtaaccccaaaataaggtgcaccgtatcctttgtaattttgagctccttccctgggccagctcgaattgtcatgtcattatggtcaagcttttccatcagccaagctaaatgtgatctactaccgag

SEQ ID NO: 170562 - DNA, 448 bp, Zea Mays
gtttggaatgtgaggggtctgaatgaccctcatcgtagggattctcttcgatcattaataaactgtatgatgcctactattgtgtgtattcaagaaaccaagctgaattctatttctcactgggatgttgcttcctgtcttggttcagagtttggggattttgtttacttgccttctagtggtactagaggaggtatcttgatagcctggcgtagagggctcattactgctatagactccaaaattcttaatcattcagtgtcagtctgttttatgaaagaaaacaacactgcttggtggttttcgggtgtctacggaccccatagagatgaggagaaattggcttttctagaagaactctctatggtcagaaccagttgtcctggcccctgggtgattgcaggggacttcaatatgatccgatgtgctgaagacaagagtaattcaa

SEQ ID NO: 170563 - DNA, 1008 bp, Zea Mays
atgcacctgccaacttcaatccctttcaaagattattatgcatacatgagcacacccatgtcctttactggatctgcgcctgcagtaaggtgtgctttgcattgaatctttgtagcccttctattcttcatcctccccacagtggtggcatttggataggcagtgcaagtgggatcaggatatgtgatgctgagacagttaaagttatgatgaagaatcaacagaattgcagtatgattgggaaactggtttcagaagttggactatgggttagcatctcaataacttagttttaaatggtctacgttgacatgtctttgtctaaaatttcattggtacttgcattatcaacctaccaagaaataaagtttgttctgttttttctgctcctttgatctctttgctaaaattcatgcggtgatttgtgttccaggccaatcaagaggttgaacagagttgtgcatgtgagcatgcattcattatattcccacagttgatattctttgtggtactacatctatggcagatttagtcgctgctgccatacaccagatgcctagatcttctttaggcccttcgtcggcgaggagtatcacaaggtacgccaatcgcttggtcttatcttcttgctctgcgaaaacaagcacacaaacccaatttactatgttatactccttggcttccgacgaggtggccgaggcgagaggctatcggtggcgctggtagtccgcaaggaaccggatttggatgcgctctccctcatcacttggtaagagacccaggtaaggaacatataagtggttgttctgatttctgatattagccaatttccctcctccaatctgttacagatttattttcccttctagggatcagcagatcccacacctattacatgatctgtccttctagaatagaatctactctctaacttctgaaccggtactgccttcttcaatatcagccaccggccggtccacctcttcaataatcgtccttcatcgccct

SEQ ID NO: 170564 - DNA, 359 bp, Zea Mays
atcagccactgtccttcgcttcaccagccttttaggaaccaaactaaaaacatgaggggccaagtctgcaatcctctgacccaagatccatctgtcatgccaaaaaagagtggactgcccatcacccactatggaggccattgccaaggagcacaagctatccaaaaaccggtttgattggaacgtcaaatcagtccacggtttggaagaatccgttttttggagccaaatccatcttacacgtagggccctatttaagcattgaagatcagagataccaagtccccccaactctttggggcgtgttaccttgccccaggccaccatacaatggccaccattagcctctttacgccctc

SEQ ID NO: 170565 - DNA, 1007 bp, Zea Mays
cttaagtgattaaaccttggtgtcatataaaatttggagataaatagacctaaagtctggctatcaatcaactcagagtctgaacttttactgacagtgacttgggatgaactttgggagctcttttaaagataatccagtgagtgtttgagtatggttactatagtaagattgtagctggattattgggttagaactttgttacaagtggattaacaagttctcacataaaaattggagatctaggagcttccgtttgctctgtcaggcgctttgaatagggattccaatggtacagtaactaaagaagatcccaggtgcagtgcaccttgccaccggtgacccccgcgcctgtattcacgccactgagttgattcgtgctcacttgtgcccggataacgcttcagggtgaaaagatcttcgccgcgaatgagactcggggctagccgccgtacccccttgccttacggtcggtccagataagttcgccggagttggtcgcctgccgatcgggcgccacgtgccttgaagcttcaccacgtcgcagtaagccgctctagatagttggttcgtcgctggtaagcctgccacggtgaaagccacacatctcttgcgctagtgctcctccccctctccggccgccagcgcgccattccaaattcaagatccaccaccctcgggtcctataaattgagcataccgttagctctattgggttatcatgaagccagagcacccactcctgcctccgattagccaccattgctctttaattcctcattctccccaaatcggttttccgcaccatgaacacctcgttgtggccagacgtctacaggttagctcgtgttcttctatgggatgttctaggctccctcatgttccctgttgctcacaacacaatccaattgaattagaccgccttgaatcacccaaaacacgttaagttatctccagtttccatcgccactgtggacagaacgattgtgagctagaatcttgcaatt

SEQ ID NO: 170566 - DNA, 500 bp, Zea Mays
ggacaccacatactacatcggctcaaccttcaggatgatgcccgcctccctataattgaacaacattattttcaatttcacaccctcaaaaaggttccacagatcccctcaccaatgctcatcccaatcggcgaagacaatagttctcgtttaccaatacggtctactcgaagacggtcccgctccatccccatccgacggtgcctaccactccgcgaaacctcgcccacgctatgcttcgacaccacccttcgtcgtcggcacttggtcctcgcactaggaagatcagccacctcgccaacctccacccgcgacgaggactccgccgcggccacatctaacgcagcaaaataatccaagtcttcatccgaagactcttcggtccaggaaaacggactcccagactcaccatcagacaaaaaacacccagatccaaaaccagataaattgtcattggcaggcactacggttgcggctgccacaaaattagtatcgtcagc

SEQ ID NO: 170567 - DNA, 878 bp, Zea Mays
caacgcatcagtgggaaccaattcagtgtcatcagcagaagccagaactctgtcatcaggtgcgctggcctctaaagcaacatcttgacccaaggtttgggctatcgccatgcaactagaatgtggaggagaagaccctatgtgaacatccatggaagtgtgggagggagaacccacttggacaccctcgggggctgggtcacagcttgcgctacccattcgagccgaatcatctccggcaacaccctcgggggctgggtaagcgccagcaccatcctggagggtcgagttctctgcaacagccacctctaaggctgaaggaccctcggtcacttccgtgggagcagtgcaatccagaccagcctcctgaccctcaagaccacgctctaaggtcgatgaggtgcgggacgctgcccgggataaccccaacccggcatcgggcacatcagcacaaacatccatcgcgccaccatctgccggctctgacaacagatcttctggaaccatgtcttcaagagtttgatcaaagttcgccagagataattcttgcagaccaatgagggcagacaaggcaggagaaagaacaccactactttccccactagctatgtaacgccggctattcttccgaatcagagggatttcatcctcttcttcatcatcttcatcaacaacacggacagtacacccattggggtcaacttcagcaggatcacacccattggggtcagcagcagtcgggtcacacccattggggtcagcttcagcaaattcaggcactggcacttcctcagcaacaggaacagaaggaccggcatcctgatccaagctagacactcgacgaagacgtttcttcttcttctgcccctcagcaagag

SEQ ID NO: 170568 - DNA, 613 bp, Zea Mays
ccatgatgatgaagctgggctactttagagaagctgaaaggaaacttgttcgttttgccggagaagaaaccaccccagtggttttcaaaagctttttcagagcaggattacggtttcctctaaacgagatgataggagaagttttgaaaaaaattgaaatttatcttcatcagctgacccctaacgctatcgttaggctcaacatcttcatctgggccctccgaagccaagaaatggacccagatgccaaagcattttgccgagtgcatgagttacactaccaaacgaaggccagggcagacggtttacataaaaattttggttgctacaattttgcgtatcccaaggatacgaagtctccagttctgagctatcgcaccaaatggccaaccggctggaaaggtgaatggttctatatcaaggctgatgagaagaaaagggggaaactgatgatgatggttatgtgcccgctatctctaaacttcggaatgacccggcccctatgcaacatgcagctagggtcaccatgcaaactggccacagtggaattcagggtggtggctgaacaaatcagcaccagagacctagtgcaagaatacctggccaataggac

SEQ ID NO: 170569 - DNA, 390 bp, Zea Mays
cgagagacggtccgagagatgtccgaccgggcaatggatcaggtaagggctcattttgtgtggttatatgtgtgggtatgtgtggttttgctgaatgagtgtgctattgctgcagatggcgcgtgacgaggaggttgaagaccttggtgacctagatagcacactgcccgaggcctcgctgctggaggcctcgggggtggatctggcgccaccgtttgatgcgggcaagggcccctcatcgacccccgtgccgactggagatggcgaagaccccgtgccagcccccgcgccgacgggcgaggacgcctcggaggcgatgatcgaaccagctgtggaagaccccacggccgtggccgggccttcgctggtggctgaataggtgttgcggag

SEQ ID NO: 170570 - DNA, 333 bp, Zea Mays
ctccggtttccaaggatttctccttggcgggctctgaaggcccagcttcggcctcggtctggctctttgcagcttcgtcttcggatggttttgcctcaatttgcgttttcggagcttcggcaggtttcttcggagtggtacttgaagactttatcgtctctagaacatctagtacattgaccatcctttttctcttcggagtcgccgtgaggtctttttgtgccttcggcactgtcattcctgccgaagggcttgtaacttctactatatttgttttcgcggcctctatttctttaatattatcagcctttggcatcatagccggctcttcat

SEQ ID NO: 170571 - DNA, 717 bp, Zea Mays
gatttcgagacttcttcatgggacatagaggctgcccctagatgagtaaccgtatgcgcgccgagtgtgctgcgccagtttaagttagtattaactcaaaccgatcgctctttttagtggccacctcgagttaagcaagtgcgagcatgtggcaccgtcttaagtcatcgccgacttaagccgattgctccgttagtggggcatagtggtcaccccgagttaagtaagcgcgagcatgttgcaccgtcttaagtcgttgccgacttaagccgattgctccgttagcagggcatagtggtcaccccgagttaagtaagcgcgagcatgttgcaccgtcttaagtcgttgccgacttaagccgattgcttcgttagcagggcatagtggtcaccccgagttaagtaagcgcgagcatgttgcaccgtcttaagtcgttgccgacttaagctgattgctccgttagcagggcatagtggtcaccccgagttaagtaagcgcgagcatgttgcaccgtcttaagtcgttgccgacttaagccgattgctccattagcagggcatagtggtcaccccgagttaagtaagaatgcaggtcgaccatgaacaatttgagtattgttgaggtctttttattgatgatatatttcccagtttacagagtacattgtcgtcctgatagcttttgaaatacagctaggggtaaaacttcctgaggtgt

SEQ ID NO: 170572 - DNA, 565 bp, Zea Mays
caatgtcattatcaggagcttgctccagtatgccaggaattttctgttagaattcggctcttttagcctatttatggctggcccaattcatttttaggaagctaatatgttgtgcagagatggcataggggtttagaaagctaatcagtgcgcgtagatatggcttaactcctcgcgagggcactgggtgtgccgttcttaacggtgtgttgtattttataatctcgggtgaataagaagaagatcgagatcagattgttgctgtaaatgtgcaagggtgaagttcagattgttgtcgggtcctcttgcttagatgttctatatcctatattcctattccttctgatggtgacgcttttcttcttccaaccagctgtatgtgagttatgcaacatggtgctttgtgagcacgcatgtggctttatagttctttctgctgaatgcttggatgtatcctatattccttctgatggtgatgcttttcttctctcaacaccctgtacgtgtgtcagccttttttactttacatatgcaacgtgatgtttgtgaacatgcatgcatgcac

SEQ ID NO: 170573 - DNA, 1103 bp, Zea Mays
gcatgatccccatagcaagattgcagttggttaattgggctataactttgatgcagtgggatgatggggttgtcacatgaaatgaggagaaaagtggctctaattttgctctgacagactaactgcatggtaatcaccatggtacagtgaatgggggggattaggtttagagaaccttgccgcggacaagccgcgcgcagattcgtgcctttgccaccgtgattcgcgttcggatcgactggataacgctcggggttgagtaagtatcatcgccattaaactactccggccaccgtaccgagcttgccacggtcgcttcggatgagctcgccggtgacagccgcttcacggccttgcgccacgtacctgggcacattcaccgcatcgccgtgactcacttcggccgtctgatcatcgctagtgagggctgccacggtagatgccacgaataccttgcgccagtgacctcccactcatccggaccgcccgcgcgtcatcgtccgattcaatggccaccactcttgcctactataaattgaggccaccatgagctccgtagggtagtcaagcaccaagccacccaaactgtgccctccatcgatcatcagagagcttcaattttggatttcccccaagaacactcaagaacaccgtgacaaagacctcgtcgtggtcagcccgattcaggtccaatctcgccctcggtttccttgtttcaacacccttgcttgctcttgatgctcaccgacccatccaattgagctagaacctcataaatcaccgggaacgcgttggattgcccgtggtgcttgcggtcaccgtgggcagggcgctgtagggcttcaatccagaaattagttgaggaaaacatttattaaggttcgaattaggttgcagtcatcagggagcaccggtcttggcgtaacccggccagtagtggctcaccggagctcggctccccgccagtcaccatcgtggattgagtgttgtgaagagatagaacttgaggggtgtttgtgtgaggtgtcagtgactgagttaatagtgccgtgaccccactttaggttatttaagaagccagggttgttcttgcaaaagtcgac

SEQ ID NO: 170574 - DNA, 491 bp, Zea Mays
taggaggtttggaattcgaattgaggcacgaaatgacatggaattgagccgatacttcacgaataggtttatataggtgaatatgagtgaagtgtgtgtttggtttgaatttaggcgaagaaaatgagatttgggcactcggctcggaaacgatcgctcgaaatggggaattgagtgaaattgaagcctggaatatcggattggcgtgaaatttggcaaatatgttactggaggtgttgtgaaggtgcctgaaaaatttgggttcaattggagcatttttggctggtttgggcatttcaccgaacacgtgtgcgaggatttagggttttagggaaatgactatttgaggtgtgaaaaccctcccgaaggagctaggaacctgcaggaatgttcaaggcacacataccacaacttggtttcacaagaattcacagagattttgaattggtacacaggggtggtgcactgcctcactgtcagagaaatagaga

SEQ ID NO: 170575 - DNA, 611 bp, Zea Mays
gtgagtatgtgcacaaattcacagaattggctcgctatgcgcctgacgatgttagcacagaagccaagaagatggctcatttcttgaaagggataagactagaactcaagactatccttgccagccaagatttcctcagcttctcgcacctctcaaacaaggccatacaagtggaaagagctagggaagaagaaaagggtcacctcaagaggaagttccaggtcctccaagctcagcagcaggacaggcaccagagaattcgatcctttgggtttccacccaagggaccaagcttcaacaagccaactggacccactccgtcacgtttcagttagcagggtcaaagctcctttcaggccccctccgttccaagcaaccatccgccagctaatgcctgttggcactacggagaccccagtcactacaagaataattgcccccagttgaaggcactcgtgcctacttactccaactcagtaaatggccccaagaatgccccagcaaccgcctctaaggcaccctcctccaacagctagcaaagcaagagccagtatcatggcagggcacgagtaaaccacgtcgacgttcaagaggctcagcaagccccggga

SEQ ID NO: 170576 - DNA, 596 bp, Zea Mays
ctcgggtatcagtcgcccgaaggggacctgaaggatatcttcgccggaggctcctactctggtgaagacaactagacggaccccagagggaccccgtgttccccggtctacggagctgaagcacgcctttcctccggaggcccttccggaccccacgggtccgagctacagacaggtgtatgcagaagtaatcacagccagagacgagggctcccgggtcaaatacagatgggaaccctgggtcggggcttagccccacggcagataccataccaagaggggctccgcaactctcccccagctgggaaggacccttcaaggtaacgggagtacaccgacccagggtgaaccatctagctacgactggaggagtaccttatcctgatgccaaatatctctgtaagttctatccatagagcaagactaaggggtcgagtctatatccttcttttcggtaactagataacgcatacgtgtacgacaacccggtgggtctgcccccatgaacccggactattggtctgcacacatgcacgacaagttatgaagaagaaactacccccctcagtcgtgctcttgtgatagttccatcttgc

SEQ ID NO: 170577 - DNA, 513 bp, Zea Mays
gacaaaacaaatgtcgggacattttgtcgaacaacctaggtgcacggctgacaacagatctactttgatgtcctagacgagcaaaaaaaatattgttggcacatttcatcgaacaacctgagtgtgcggagtgcttaccatttacacagcaggcatacgagacaagatggtgaacgtaagttttgagagtcgcaaaccaacgtgtggcgggcgagcacatgtgaactagaaacgaaagcagtggccacgtctgcacgacaacgacgtcagcggagccacgacatcagcggagccacgatagagtagaagaacgagcgaacaaattacatgcgaggcgaggcaacgggaacgaacctggcgcgatcggagatgctgttgatgaccgcgggatgggttgcgtcttggccgggacaaaacccttgtcgccctatccagattcctcgttggtgagtggagctgagtctcgagtccgacgtcgcttccagaaagaccgagagaggaggctcgctgctg

SEQ ID NO: 170578 - DNA, 768 bp, Zea Mays
tgaagacatagttacggaaccggcgcgcgagccgcagttcgagggagaggaacatgaggtacctcgatcggtcaggtccgcgcgcggcgaggtggtggtggtcaggtggagacggaggcggcgtcggcggcggagactccaagtgaagcggacaacggatgagccgccgtatatatggggcacaaaaggccgcgatatcgatggttgtcgcgatcgagtctagccaagccaatggctccagttgcgggaatctttgacttggtagatactgtattctgagctgttgattcagcggagagaaaacgggagcgagatcctggttctgagttttttcagggaagccgtgggataggccggcgcacgaatcctaagtcccgcgtctctccttcgttccgctcctctccctcctcgtcccgcgtcttcgtgagtctagtttggctaacagttatgcttgttactaatgcgacctttgtgacgcgtagttcctagtttgcctaacagttctatttgttactagtgcgacctttgtgacgcgtagtttcgacgttccgtcccagacgacgggatccttcaaaattacacaattttccttggccaagatgactcttggctaaaaagggatcccctgccttgttttgtggtggcccccaccatctaggcaccattttcccctgcactttcacataagtagactgggagggtgctcggggttggttttgcttaccgtatttccgtgtttgtgagctagccctctcgaccgctttgtct

SEQ ID NO: 170579 - DNA, 459 bp, Zea Mays
gagaagggtaaaggcaataagaaacaaaagcacaacaaaggatgaggttacaaactcgcgagccaaagaagaggatacgaccaagagagggaaggtatgagacggaagaggggcgattttaaagggcaggtatgagacaaacatcaatgtaggatatagaggtgttaagggtgcatatgataataattaaaagcatgacaaaggatatagttaaggcaagactcacgaaacgacaaggtggggaaaacaatcaagggtaagataggtaaggttccaacagaagggttgaagtaacagaaattattaccgagggaagttatgaggaaacagtgagatcatcaaggatgtgtgaaatagaatggtcgctcagggaccatcaagaagcaagggtgatcaagggcatattaaccgaaaggttttgaacaatcattgggatatgaaggtaagcatatataaaaa

SEQ ID NO: 170580 - DNA, 760 bp, Zea Mays
attcacgtatgcctctacgacccttctaatgaggtcgctgaagcatttgatcatgcatcgctgatatgtcgccccacattctttagatccaacgacattgttacataacagtatgaactgaaggggtggtgaaggaggtggcaggttggttggattccttcatcgcaatctggtgatatctcgattaagcatcgaggaagctcaacaccatgcaatcagaggtggagtcggccacctggtcaatgcgtaggagggaaaacagatccttcgggcatgccttgttgaggacagtgtaatagacacacatcctccatttcccgctcttctttcggaccagcaccaggttgactaaccactacggacggtgtatatccctgatgaacctggtcgcgagaagttttccgatctcctcctcgatggctctccatttctcttcgttaaaacggagtagtcgctattttatgggtttggagctggggattgatccatagagagtgaccgacgacttccctcaggatgcccacatgtcagaagctttccacgcaaagatgtccttctcgtggaggaagtcgacaagcatgctttcctatttggtagagagcatggatccgatgcgtatcgtctacttgttggcatgctcggggtctaagggcacttccttcatgttgtctgccggtttgaaggtcgtgcccgtcctccttgcatcggacgcctactcgttgatggttcagagcacctcctatagctcctgagcagcggt

SEQ ID NO: 170581 - DNA, 649 bp, Zea Mays
gctcactcctctagcttctctatttgctttgtaacacataatctcgcactaagtactatctctcactaagagaagtttagaggcactatcaacttgctaggaatgagttacaacaatgctaggtacttggacatctccttacaaccatggaagggggctatagccccaaactagccgttgtccaaattatgtactttctggtctcatcaaaccaaccattattacaagttcggtacacggcgaacatctgattgtgcctgccatgtcagtgaccgttctgtaaagttgttagattgttagcacttattggatcgtccggtgctccaccggacctcgccacgtcagcagaccgttgtgctaaaccatgcaactattggacattattgttggtccggtgcacaccaaaatctggcccggtgcaccatctgcttgagtcgtaaaaacaacctttctacgtacttggtctggtgtgccaaagccatatgtgcataaaaacaacttctctacaactttggtccggtgcacacttagcagtcagaccttgtcctattttggcacaacttccttaggttcacttggctcttctctttggtacttctatgacttagaaatatgttacttgagtccatccaaatattttaagccatcc

SEQ ID NO: 170582 - DNA, 608 bp, Zea Mays
cggggatgggcaggcgggggagggcggtgaggagaagtgggacacctccgagtgctccggcagcgggtggaggaggtgcgtcggcagcagcggctccgtgtccatgacgcacgggctcccctcgcaagcagagagacgggccggggtttggactccaccgattccttgttcgtggggacgctgcgctgtgggaggggttgaggaggaggaaggcgtctcaggagatgttggaagtctgcggccgctgatgccgtcttcttctggtgtgctctcctgcttgacgacggcgaatcccgtttttcttgcgttttattgttattttttcctaaaaaagagggaaatcattaattattgggaggagaggagatgagatcagacgagcccaaacaaatcctctatctccactctaaacattgcagataagacgagcccaagcagcgattgtatcctcgtctgggtgacgcaagacgtcacaagcgccgaacctttcatctcaaagatgagcatgtgctattctccttccttcgaagttctaagctgaagagaaaggagtgaacgcgccacatgtcgtgctctatgagagaacgtacctgaacctggcctctcgt

SEQ ID NO: 170583 - DNA, 761 bp, Zea Mays
gagcattcttaggatttgttccataaggcaaataattgaaaaattggggttcgcttgcagtaacactcaaactgttgccctaagtgactctatcagcgccgagtgaaggccatacccttggctgccaccaatacacatgtaaggatctcggatagggtgaatcactttgaaaaccaccataatgggaccaccgattctaggaccccgagtcataggaacccgccgtagccctgactaagtgaggggcacaacactaaatgacattataaagaagtatccaaatgggataactcctcaactattaaaaggcatggtggccttccgtgttgcctaagcattatgaggccagacacctctagtgtcatggacctccaagggtgaaatattctgtcaatgagacaccttgtgtcatggggcactaattagacaatatgtacttatggcacgctatgccctagggcacccacaagactaagtgtttggggtgtctcatgacccttgtcgcttgaaagcataagtcctcaagccactcacatcctgaggaacttatgatcctaggtccttgggggtccctcgtatctctatgcactcataagtgtaagtccttagtgggctctagtttcctatggcacttataagtataggtcccttggacccatcatatgtcgaggcacttgtaaatataggctctcaggaccctcatgcctcaagacaataagaagtttgcaaacacgcatagcagtatgtcccccaaacattac

SEQ ID NO: 170584 - DNA, 767 bp, Zea Mays
cgatgagcacgacaggggcaacttaccggtggtttgagcactgtgtagtcctatctatgacaaagtacggtgtcgcagtgcttcctccacttcagcaagaaatcagcagtagttcagttgatggattcacccgcggcggtcaaggataggtgcaggatgactcagtgactcgctaagaccacccggaacccagaatcggcgacgcgggcgagaggaccgcttgatggtgatcttatccgcctacgacgacggtggcggccagtcccgatcctcgatgcgcccggcaatggtgacctcggcttggtgtacaaggatgtggcctggtcatgcttaaatacccggaagtccctgctaaacccgcatcaatcgagggtggttgcaacgcctggaggattccctagcgaggcgatgtgttcgtgtcggagctggttggtgcagggtgagggatgtgctaacgacccgggccagcacggaagtgagaggagcgcgtgtgatgcaggggccaccagccagcaggtaacacgcaccgccgcggtcgtgacgagcagaatgggatgggccgaatgagagaaaggggagaaagaggtaggttggctgaaaacgaaatccttggcccgccagggttttcatcctatttttcttttctttgttttattttctattttatcttctaattcatatttaaattccactttttgcttcaatgctcaaactcggaatacacaaccatataaggcccaacatgaaactcaaaatgttattctcct

SEQ ID NO: 170585 - DNA, 798 bp, Zea Mays
gcgagctcgcatctcctcttttaacgcattccatgtttgtggtgcagcacatgtgttaacaagttcattccaccaaatgatagcaaaatctctaaattcactagtggcttgtctaatcctatgctgctcaggaacaagatgggaattaaatttttgttctaccgtcatctcccagtctaagtaagcttcagcatcataagaacccatgaacggtggaatagagaacttaatcttagcaaatggatcatgatctggttcaggattatgatgatgacgtctaccattacctcccataccttgtccattatgtgcgaggcgttgtcgcagcggtgcataaacatcgtcgtcatcgtcgtcgtcgtccacaggagagtgagctggggctagagttggtggtgggggatgagcctccagtacatccatgcgtgtaccaagtttagcaactcatcgatcaagccgctcataggatgttgccgcagagtcctggtattttttaaaagcttcggtcatcacgcgcatcatctccttcaattccagctgagagacacactcatcgtcgttaagcttaagccccttgtccttgtccatttgattctttggtcctgtcattgttagcacaaaacagagacaaaaaggcaacaaacaatgtgaaccctacaactatctgtcatggtggtggtggtggtgaaatacaaattatgaagcgtcttaccccgctcttacaacgttcttaccagcactgcaggtggcaaacggtgaccggtgtgactgtccaacgagcgtgggtgtgattgcaaa

SEQ ID NO: 170586 - DNA, 676 bp, Zea Mays
ataaaataaaaataagaatgaatacctttcacactgatattttcaaattgtacctttaactgaaaacaagttcaccaccaatttgaattttaaattgagaataaaaaaatgagaagaaaaggaaatggagaataaaagaaaagaaaaagacccacgaattgggctgaaatcaacaaattcggcccaactccgcccgcacacaccctgcagctctcgctgacgcacgggcccggtcgtcagccttcctccaagcgccgattcgttcgttgactggtgggccgccactgtcagccatcttcttcctgaaaacaccgtaccagaacccgcttgccaagcgcgcggaatccgcgtgggattcgccctcatcgctgctgcatctggtgtcagcaggcgtactacctcgagtcactgtcgggtgagccccactcgtcaggttcacctttccccaatgccgccgtcgcaacggaatgccgacccatcgccctggattctagcaccccacctgcgtcgtgctttccgtggccgttgcagccattgaccgaaatccccacctcggcctcgtccctaggcactataagaatccccgcacctcgggaacctgaagccatgcccccttgaatagctcgccctgatgcaatgaaggaatggcgccgccgtgggccaacttcgatccacc

SEQ ID NO: 170587 - DNA, 296 bp, Zea Mays
agtcagtctcctgaccctcaagaccgcgttctaaggtcgatgaggcacgggatgacctcaacccagcatcgagcacatcagcacaaacctccatcacaccatcatctgctggctctgataacagatcctctggaaccatatcctcaagagtctgatcaaaattcgccagggacaatccttgcagaccaacgagagcagacagagcaggagaaggaactccactactttcaccactggcgacatactaccgactgttcttccgagtcaaagggacctcatcttcttcctcacagtcg

SEQ ID NO: 170588 - DNA, 711 bp, Zea Mays
cataggaataggctgtaggtcctagcaagtggaataataataaattgacacactgcacatgtaggatgggttttctgctttactattgatatgttatgttattatctatgctagtttgacattatctgaagaggtgctatgccaatcttatttacttattattctcacccctgtggctgcagctatgccgcctcgtagggctcggagcagtccgcaagttcctagtggggactcgatgagtccggcggcaatgttagccgcgatgcaggccatgtagcaggagttggccattttgaggcaagctattcctgttgcccctacgggtgctgctcagggtgctggtggtggaggagtgcccgggggcgctgtccctgcgggtgctgctccaggtggcggggccgaggtgcctcttccagtcagtggtctttctttgatgcagtggatgggcatgaagttggatacttttgatggcagtggtattctgatcgaggcggtggattggctaacttacgtggaggataagatgaatgtcttcgagattgtgtatggtgatcgtgttcgctttggcacaaagctgctgatgggagaatctcagatttggtggaggggcgtgcaggcagctcactcctcttcaccaggagtcctgtcctgggatgtttttatcaggtagtttgagaggaggttctacccggtcaccttcctggagaaaat

SEQ ID NO: 170589 - DNA, 356 bp, Zea Mays
tagtaatcttttcctttgtgaatcatgttgtggccttgtcatccaaatctctagatcatccaatgattctgccccgtcatctggttatctgctataacccgttctcaagtatcggatgtcgatctcatgctcttcctccaagcctcgtgacaccattttatcaattttatctctaaacggcatatccatgtggattaatggatgttgctgttatcttgggatctctcatgtctctaaaagcttatcaatctcgatctcatggctgattcctcctcgtattaaatatcgtatcgatctttggctgaaaatccccatgatgatcaagaaatagttctctgagtcgaagaaaattctca

SEQ ID NO: 170590 - DNA, 920 bp, Zea Mays
tgtgcctccacagttactctttcagatctacaccttttaaaagcagcttctgtagctctaatgaaataatttgtaattgtgtactgcttgcgcccaccagattctgttgaggaagttaattggcctttcttttttggcttgtttgtattgctggaacccctcttatttgcctttttgggagtatttggttcaattctcataggagacaaatttaccagttttgcagagtattccattagcttctgtgaaaataaaggagattcttgctgactacttacatcagtagacgacccatgattagaagaatgttttttctctgtgttggtacaagaaacatttgcttcttcaaagaaatatctttctcgctcaaaaaaattcgatgctgctttaacaatgtcacctttagaactcatcagcaggtctgtgatctgttcctggctcacccacgagggtaggaaatctgacagttctttaagtgtttcctgcatagtattctccctcagtttatcggtttatcctgttgttcagaagcagaagagattgctggtaacaaagcagcatcctccccatcaagctggctcgagcaattaacaaccacgtctttgcagctacgaaccccaacagtgtcaaaatcttcatcttcctactgtccacatggattgaacacccacagcgctgtgcgacctcaagcaaaatcttctccttgccgacggcataggtggcgatcagacataacacacgctgtcttgatactgaactctcctctttcacacgtttgattgcattcactatgtaatccacagaatcctcttgcgaagggaatgtaaacttggggttgcagtatgtggtgtccagaaacaccgcatcagcacggacgaactccagcaagttaggatcacgcgtcatagactctgtgtaac

SEQ ID NO: 170591 - DNA, 287 bp, Zea Mays
tcggcagcctactggctccagggaggtcgcggtcgtggtcatggccgtggtcgcaagagtggacgcaacgtccgaggccattcaccaggtggctcccagtggccatccttctacaacccgtggactggcaccatccagatgtggcccgggctgtccgcgggcacctcggccccttgccccgccacccctcagcaggttttctttgccgctccacctccggcggcgccctcggcacctccccagcctcagcaggggctccttcccctcccagggcctccggccccacc

SEQ ID NO: 170592 - DNA, 958 bp, Zea Mays
gatcaaatagtgaacctaatactgatattttcagaaacaccgttgatggtttttattcttggcatgaactgtattctggtgcagtaccgtagagaagtttgcaagattttggaggctgcctgtgattatttcctcaaatctgaggcaaatagccatgacagtgacgagattgtgatggtgtcttcaccatgaaagcctacagatgaaaaagatgtacatagtgccatgcacatatgcaagtgcagtggaaacaagtttgcaagattttgcagggtgattgtggtcacatccaaaagctggggaacagacaaccagcaatgatattgtggcaatattcaagaaaagtgcagtggaaaaccacctgtggaatcgcatccacatgaagaagaggcttcagattatggagacattcctgctaagtagtgaatcagtatgatgtgtcatccagtacataaaccatgtgattatagtagttacccagattcccagaacaagataggttatgttgatgttacatacaatgctcaaagcaaaaggaggaactccaaaattctgcgaggaccagtgcaatttgacctgctgacatagtagtgcaagttaactaaattaccttaaccagtccttataacataatgttcacataaaggagtacacgggacagaaatctctcccctcgttcattgacaccaatcagttcctggtaacttgtctgtcagtttcttgtgacttcaaactcctgtatgcaacatatattgttggtaataatttggcatttgccctgctatgatggatttctaaccttgatgaggtggatgcttatcaaatcaaacaggaaaacagaagaaatggtttctgatactttgttgggatgcaatgtgcatgcgatttttaatcataattaatcatttgatgcttaaatcagctgggaactgcataacgcaatgtaacagtcacagat

SEQ ID NO: 170593 - DNA, 573 bp, Zea Mays
ctgcggccgagggcgcgcgcgagcgggcaagcactgactaagtagttgttgggcaagctttgagattggattcgaccatgatccagtaattgtttgactatggctgcaatagcaagattgtagctggatcatagggctatagctttgataaagatggactaagtagttactacatgaaattcaaagatccaggcccctgaaatccctctattagacaccctgatggtgatcgccatggtacagtactgaaaaagatctccaggttcatcgctcctcgtcgccggtgatctagcgcccggattcgcgccggccactgttattggtgcccagcgcaagtggataactgagaggagtaaagatcttagcgctcggattgggtcgggctcgctcaccattgtgtccgccgtacccacttgaactacggctggctggggttatcctcaccggcattagccgcttaacgatcatgcgccacgcgtcttggaagcttagcacatcacaatgaacctgtgtagcaagcctgttcatcgcccgagaacttgccacggtgaaagccacgaatttgtttgcgcc

SEQ ID NO: 170594 - DNA, 388 bp, Zea Mays
ctttcgtggtagtttattacacggctccgcctcgttaaaaacctcaccctccaggaggaaaagagtgcgggcctgattgacattgtttgcaagaattacaaaggcgctcaggccttgagactagacaaagaatttgcgtaaattatccatgttccatgagtgctctaagtcttcgccggatggtgaggtgagcctgtaggcattcagggatgttttggtcttgacgatgtagggcccctcccacttgggttcaagcttgccccgagactctattctgatggttctggtgagtactaggtctccttctttgaactctcttgggatgacagtgttgtcgcgccatgccttagtctacgcttggtaattgctcagtgcctataaatgtcac

SEQ ID NO: 170595 - DNA, 589 bp, Zea Mays
cgttgctcgaccaaattggccaccaccgcttaagtatcctataaattgaagcctcagcccgttccgctaggtaatcgtgcgtctagagaacccgctcgtagctccgatcattccccatagctccccaatttccaatttcccccaaatcgactctccgccgccgtaaaccacccatcaccgcaaccagccctttccaggttagttcatctctctctcccttgtttaagcaccctggttactctgtgatgcttgccgagccttcaatttaaactaggagaccaccagtcgccgggaacacgatgatctagccgccatgctctcggtcaccgtggccagagctccttagttggtcttggatgcaattaggttgggggaaatgattaaggtagccccaatttcatgtctgttgcttggagaacctagccgttgccccaatcggctggtctgctagctcgccggagttcgtccctgtgcagttcgccgccagggacttcggacggagaaaggatagaagtgcggggttgtttttgtagatgtcagagagacattgaacagtggccaggaattcttagtagatatccaaaacgtt

SEQ ID NO: 170596 - DNA, 660 bp, Zea Mays
tatgttttcagtccatagtgtctcagaattaatcatatttgtatgctgcatccttgagtaattcatatttgttaactatcatgaactctaatcatcttttgcagactgcatataatctcatccagcatgaagtactgtcctgtgtttttcctgctgtggtgaagaacaccatgcacagcagtcttatgaactatctatgacatatcaatccttaccttactcttcaaggattcattgatgctcgttctgacataagttgtcttctgagaactgtggagatatgtgaagacctaaaggtagtacagtagacaacccttatgtagcgagttggctactgaacaacctattacaattcttttttgcaagttgaattctctctgcgttttcatctaatttaacaagtcctaactgagtaagctgatttttattgcatgcgtgtgaatattgtcatagaaacttagaacttatatttgtcacatggaccgtttaagttggttatgctaatggcaattgttgactgctaaactactttgttaacactacaggaaaaaatgttaatcgaaagttaagccaaacgggggtgggtgggtgggatgttctaaggcatggtttgcacatggagaagcaaaacatgaactaaaactataaactaactaaagt

SEQ ID NO: 170597 - DNA, 480 bp, Zea Mays
accaagcttaccttcgcctcagtatatcacccgcagtccaacagagttgtggaacgcaccaatggaaaaattttcacagctgtcaagaagatgctcctcgacgaaaaaagggcaggtgggccaatttgttacctgaagcggtctgggcgctaaacacgactgaatgcagggcgactgggttcacccctttccgccttctatatggatcggaggccatgaccccacaagaaataaagcatgggtccccgcgaacagtttcgtcagctgtccccgacgtggacgaacccacttcgaaggatcttatcgatggagaccgcgtcttcgctctacaggctctaaataaataccaagcccagacaaaagcatggcgcgaccacgcagttatcccgagggaattcagcgaaggggacctcgtactcgtccaaacagctcggacatagtccagaggcaagctggagcccaagtgggagggccctttca

SEQ ID NO: 170598 - DNA, 491 bp, Zea Mays
tgcgcggatggcggcgcgcacccaaggcgacggaagcccaccggcgaacgcgtccaacggtgagtccccgaccgattcatgcacccaaatcagttttcatggacactcgactaccacgagtcacgtggatcactcccaatcatgaaccgttgcgcccaggtccctgcccgcggcaaagcatcgaatcacagcggcatcactacggcggcgagaaatcagcccacccaaggctctgattcggtcgggtgagaaggagcaaattattccatgcgacattgcgaagctactcggttcgatttctgaccccgaacggcatctaccatggatttcgcccacggcggcaaggctcgccagacgccccaaatctcactgaatcaatgctatgcatagagaagcatcggacgaactcggtgggggtgtttcttacgggaaatcgacgcgcagatcaccacggcgatgggagcggcggcccggtagcagcacagagtcca

SEQ ID NO: 170599 - DNA, 1231 bp, Zea Mays
ttacttcagtaatgtttttatgtgttccatcgattatatgaaagtagatacaataacattctaggtcttaggacagataaccctctggtctgcacgtttgttcaacagatacagtagcagacatttttatcattgtcagatcaatgtatttttctgttgcatttattggttctgaaaattgtataattgctcgacctatttttgtcgtggaaggaaaacaatctaaactaaaatgagacagtcaaatgctcgaataaatggacttgcatcttagcttgacactatgttgtacactgtagtatctgttcataacatctggttacaagacctgaaagcagacgttacctgtagttagttttttttgttttgatttaatggagttgtgtttatattgactgtgatgggttttatgttttctactgtttgtacaatggacatcagttcacttgttttagtcgctttcacataggcttttcaaataccttgatactgtattcacataactctctaactcattgcttacctccattgagttttggcgcatgttgtctggtctactacattttcagatgtcaatgactttgtggaagtacatttccattaacatcctattcaccacacatctttgtacttcttctataaatttctacttgacaacattcttctattgtagaaaaaacatagcaaaaatacctcaaaaacgaataccgaaacttcacatcatgtatgatctataaccttaatagaacaaccttatattcaatcatacttaactatcaacacaactcatgacagggtacaaacgcgttcaacaacgaactcacctacggcatggtgccacagtctgtgaaccgcgcggtgctggaggcctctcaccggtgggatgcaagtgctgggagggaggacgtggagacgctggtgcaatgccagcggatgattgcgtgcggggagtggccgccgctggtcgtggcctatgaccacgtggaagggttcaccatggaggccggtgggatgcaggtgcttgttgatcaggttggttctacaattctatttatcaaatctatggttttgcaattctattatttatgatcctacgatttgcaatcctaccatttcagttcggatgccatttaggatcattgttctaaaaacttatatgccaactacgttcatgacaattcatcaaagcattaacatgtatatagagcctatgaactgtgctatctctcat

SEQ ID NO: 170600 - DNA, 897 bp, Zea Mays
atgctcatcaggaaagaacaaattgagtaggtagtgggctttgaacaagaaatgcattaagtggatggagtttaccatggtgctttgaactccgactggtcatggggacagaatcatagccgatttgggaatggatgcggcctatgtagagtcgacgttatctagtatttgccataagaattattcgttgaagaccttgtccggatgaaagaacgggggcagcaagcggctgctgccccgccatgaatgacaacacgagcccttggaagatgtgtagggaacaatttgaggttaggttaagacatagatctaggttttggagaggtcaacacggggcctagaaattgaagaggtagatgtagagagcttacatggagtctgaatccacattgacttgcccgctcgccgctggcgatgatgcggaggatgggcgacgaagaggaaggtgagcccgggggcgctaggcggcgagcggaaaggcacaaagcaaggctgagcagtgtagtggagtcgtggtcgggttcggagcaagcgttggtttctaggcgagcggagttcgtcctcgcgtgtagtggagatcgtgggagtctggagacaggggacgcgccgtgtctgggcgagcgatgtagtagagatgagttgtagaaccacggaaatggtaaagggagattgagagtgttacttctaacaaagaaacaaaggtggtgatttggtttgaaggggtgagttaagtgagtggtctggggttcaatcccttggtcggatatctttttttattgcgcgtgggcatggttggatggcagaacaggactgccacggttggatggcactggtggcagaacatgtcagaggcagactacctttacagccttaataagtagtatagattataatcag

SEQ ID NO: 170601 - DNA, 775 bp, Zea Mays
cttgtcatgattctttctccatgtcctagagttatatagcctctagatcgagcacctcactctaactccatcttcgccctatcgaccttcacatatatgtgagatgcgttcatggggatgaggctttacatggtgttgtgttaatacttgtttgtcttttgggtaagggatactacttgtagttccactcacgcccaaagccccaaatgcctaacaacttgctcgacctcggcgataagtgggggcactcgagacaaggatgtacatcattatcactcttgaagcccacatggagatgctaatgagggtgccaataagcaagaagattcgataagaggagatgtcaaagatggacgctgaaggatcaaatcaggcaactagaggggtgaatgagaactaataaaaatctttgatcaaaggtaatcttggcctaatcatccaagacaccaaaatagttaatagagatacttaagagtcaattggtcgctagatattcttggtgttgaccaataaacacaacgaagcactcaaaacgactaggaatgagtatgcggggaaacactccaaaatcgagaaattgagcttattactttagtgaaaataaataagatgctcaaacaagaacacctcaaccaaccagtgattggatgttttggaaaagtttttgaagcatgcacaaactcaaaaaactaatactcgaaagtccaagtggacaaaatagtgacatgctgtaacatcccaaaattccaacccaaggtttggaaccctaatctcc

SEQ ID NO: 170602 - DNA, 393 bp, Zea Mays
cagtgttctagcgccggtaagaagtccatgtaccgctcgttcgtccctttctttgcctttgacacatgaagaatcgggatggggtcatggtacaccgggaattcctcgccacggtgtgcttccgccgctctgggtgcacgccgccgtgtcgggtgtcgcagggaggaagacaccgatagcaccgtagattaggaagctagcggctaggattgtctggcgtactcgtataacaggaaatcaatcctgtccgttgatcaaacgacctaggcgtgggatgtgattccgggctggcgagctctcgtccattagtttttgatcggacgaccaccagtgcgcgcttgtcttgtagttgaggatgtaatctggatcgttaaattataatcgggtgacccg

SEQ ID NO: 170603 - DNA, 324 bp, Zea Mays
ggggatcgtgagtatcagacattggtatctgtttatatctcaccagtatctcaatttcatccaaagcatgaaccaccctattattccatacaataagagctgggatgtttatggattgtcccagccttccgatgcgatcaacctagattccattccaacaacgtgtgttgatggttgcattcagacgagaaatcgcatgaaatgcctacataattcaaactctccagtagggacaaattgatgtcgcaaacaaacagtcgcgacccagcgaaatcaaacgcattcacgtaaatcgaatcgcttccgcactatcacgacgcagca

SEQ ID NO: 170604 - DNA, 506 bp, Zea Mays
cgcctcccctctcccgcctcgtagcaacgcacggacacatacctagtatgcacaataattactggaattatcaatatttcttgacatccataatacggcggacatgattcatcaactcatttaagtacttgagcaacagattgataactgaattaaaataccaacatccagcggtgacatattgcagttgcagtactaaaaggaaccttgacaagatgcggctcagactcgaattcactagaaattgttagttatgctcttccgggattcttgcgaactgttacagttatcccgggatttcatagcaatagaccaaagaggcatcatctgaccgttcgtttatacgtggatgacatcgatcgacaaggcaaccgagccacaaaactacataacccacatccttctactccagaaattcggggctaaccactagaacacatatattttagtgtttagaaataaacaataattatatttgcagcctaggcgccgctccccacgcctcc

SEQ ID NO: 170605 - DNA, 345 bp, Zea Mays
gcagaggtggcgaccacgatcgacgctgggaaagcagaggcgactgtgtggcgatgaggacgtcgaggatggggcagacgcgcgatgaggacgaggagcgactgtcgcggcggcggaggcgggcgggtgcatcacgagcaagtgacaagcgagggcacactgtaccgattcgctatctgggccgcaccaaacatcgctggaatatgggccacatgaagattttagcccaggacaccagcattgtttgtggtgctttctttactattgtggttagtgccataccggctagtgaaacaggcagagaacggcttataagcgttggtgcagccccaaatgttaacttgc

SEQ ID NO: 170606 - DNA, 546 bp, Zea Mays
gccgaagcattctgccgagtgcatgagttgcactaccagacgaaggccagggcagacggtctgcatgaaaattttggctgctacaatttcgcgtatcgcaaggatatgaaagctccagttcttagctaccgcaccaaatggccaaccggctggaaaggtgaatggttttatatcaaggccgatgagaagaagagggggaaactgatgacgatggtcatgtgcccgctggatttaagcttcagaatgaccagacctctatgcaacatgcagctaggctcagcatgccagctggccgcagtagaattcagggtggtggctgaacaaatcagcaccagggacttggtgcaagaatacctggccaacaggacatctccaacgtcaagtgattagggcatgccaaagctaaagggaacaaagaagaaatatgaacttgttcgattaccttatcgttttaagtttgagaaacagtttaaggagccttgccaagaatggctagaaatgattgaaactatgtgcaatgaaattttggggaactataccaaaaag

SEQ ID NO: 170607 - DNA, 351 bp, Zea Mays
taggttcgtaattttagatccagcgtttagatctgcagagcagttttggttgggagattctccatgcatctgggctgtctgccatagtttaggtgacaagctacgttcgttgcactatattgagaattgtgtccttgttgactattcttgagctacagttgttgggattgttgatttggggagaaaattatgtaatgatattgcttagccatatgctgatttggcttagggtggaaaaggatgcttgccgacttgccgtatcacagggcttttacagaaacaaaatcatcgttgatcttgcacttttcatgtattcctggatcggtcggcctattgattggtcgattttgg

SEQ ID NO: 170608 - DNA, 612 bp, Zea Mays
ttcttatttatctttccacatatacctaattttgaattattgatccagagaatactgggtaagtggccgtatcaagtgtcatagaagttactaaaccaaatactgagcatactgacacaaccaacttcatgatttggcatgctcctgtggaagtgttcaagggctctatcgcatggttgagattggagaattggatttttgggactccaaacatcatgttgcgcacttttgtcattcctaatgttgatttcccaaaattaggactcagaatatgtcaccgttggtttcgatgacatttcaaatatttttgtccttctgtttctacgtacccatatggaaaagacagaatagcgtagaagggcagaaatgtccaaaatggcattgaaacctgagtcctattttggcaaaatcaatgttacgaatgacaaaagtgtgaagcatattgtttggagtgcaaaaaaaaaaaatccaattttctcgagtgtttaggagctaggagtgggcagtaaaactaaacagcaaacctaactcgactgttcgatccaatcttagtgatgcgaccaaaaacataatcaactgcaagcctctttatggagttggattggaacgact

SEQ ID NO: 170609 - DNA, 468 bp, Zea Mays
atgcggattgctcacaagttcttgggttgccgatttgatcataggactatatcttttggtggtagtttgctgcgtgcgtacgttcatcacctgattcattaggcgagcataggccaatattattgtctatgagagatcgagacctctcacttacatgagcacaggccaattttaacgcatttgttgccattctgttctgcaatttctaggtggttgaaaaaaactagcacctgcgattgacctgatcacttgctgacgagtcctcgcctcctttcaccgtcagattcgtaattggtctactggttggtccttgcctgctaagtcattccttgcttttcaccatctcatgaagctatttcaactagctaccaccacctcaaacattataccgtgcctacgtttctaccttgctaggagtagcttcttctcccaagaactttgcagagcctaagcttgctatgatttcca

SEQ ID NO: 170610 - DNA, 762 bp, Zea Mays
cggcgaggggttttcgaccatgtacaggagggacagtgggtttggcgtcgagcagagaacgacgcggtcgtcgatagacgtcgaggtacaaactccggcgaggctccacggactccgggacagacgacgaacgacgaacagcgcgtaggcacggtgagacaggtggagcttcggcgagcgacgacaactacgtggtgacgatgttgcgcgcaggtgggctagtggccgaggtgctaatgcatggcgaatggcgagggagagagaaccgagaggagggagagagcttggggtagggagagtgaagggctcggctggggttttatagagagggagggagaggagaggacgccagggtcttcaagctaccattagtggcgtgcataaatggagggaagagtggggagggagtaatggatgcagtaacctccattcacacagagaaacggacggtaatgaaggtccattaacgaggttagaagaacggacggggcacgggtggcgcggtcggtttccaggcatcgcgcgctgggcgcagcttctcggttggcgtgcacggctcggtcggcgtcggcttcaaagcatggtcgtcgcgcggcttggggtcggctctgctggcgctcgactcgcacaaggtcacggccggacagtcggtgtcgcgtggcacttcggctggcgcgcacggctggcgagcgtgtaggcgcagtcggcgtcgaggcgggatcctgggcgccggtcgggtgagcagtggagagaagagagaag

SEQ ID NO: 170611 - DNA, 713 bp, Zea Mays
aggagcgctaagcggtggtgtccaattttgaaaggggagaccggcgtccgagaggagaggtgagtcaccggcgtaaactattgtggcgcttcccggggtaatgcctccggtgacgaactgacctcctacggatatctactgcgatgtggtacatcttctaagcacgtggcgcagttacaagccagcaaactccgactaggacaccactgtccactgcacggcaagtgtcacggtgaacagtccggcgataagcctctctcccttccccgagttgcgatctttccttgcccacggttatccgcaagtcacgacgcatgaatcacgatgattgacgttaatcgcggcggagggtcaccggtggtgagatgcgttgtatctgagatatttcagctactgtaccatgggaaactctatttaaggcgcctgatagagcacaatcaaggcagtttttctccaaattttatgtgacaaccttataatccatctacatcaaagttatagatctataatccatcttcacttttgttatagcatccctagtcaaattccctctggatcatagtcaaatcccagttcaaagatggctcagtcacactgtcattttgaatttcagacttaaggcagtcttacagcccatctttgggcctaattatctcaaaacatttcatggcaccaaggcataatccctatagcaacgttgttctccttttata

SEQ ID NO: 170612 - DNA, 935 bp, Zea Mays
tcgccgaggagacagggatcgtttccgtcgcccaggcaaccccactggagcccaccaacaaccggttcctttctgcccattggccctccgtttcgtcgccactccctggtgatctccgcgactgtgacccgccgctgcagatctcgccgaggagacagggatcgtttccgccgcccgggcaaccccactcgagcccaccaacaaccggttcctttccgcccattggccctccgtttcgtcgccgctccctggtgatctctacgaccgtgacccgccgccgcagatctcgccaaggagacatggatcgtttctgtcgcctgggcaaccccactagagcccgcaaacaaccggttccttttcgtccattggccctctgtttcgtcgccgctccctggtgatctccgcgaccgtgacccgccgacgcagatctcgtcgaggagacagggatcgtttctgtcgcccgagcaaccccactagagcccgcaaacaaccagttccttttcgtccattggccctctgtttcgtcgccgctccctggtgatctccgcgaccgtgacccgccgacgcaaatctcgtcgaggagatagggatcgtttctatcgctcgggcaaccccactagagcccacaaacaaccggttccttttctcccattggctctccattttgtcgctgctccctggtgatctccacgaccgcgacccgccgccgcagatctcgccgagaagacagggatcgtttccgtcgcctgggaaaccggacataaaaaatgaggcctccgctccttgtcgagttgccgaggcgctactctaacagggttcaacatccttggttccccacagaaggacctcgcggttggcatctaaggagcgtagggacaggctccaccaccagccctacccacgacatctggtcgacgactgggcgtccatcggcg

SEQ ID NO: 170613 - DNA, 971 bp, Zea Mays
gaaagcaataaaaattaccttatcatcggccacccttacactatacgtatctataagttttttatgctactcttagaacctctttaaggcccagctgatgacttagaatggtggtgtcacaagagcaagcccatgtgtgatggagcaaaggaagggcagaccgggccgagaagagtgacccaccatagtagagcaaatctatagcatgatttgactattgttggggtactgccttcaggcatatttatcattccatttagcacagggacatgctgctagaaaccaacccatcctagcttgtgcaaagatgcaatgactttgttatacaagagatcaaaagggttgcattttaatctaagagttggacccccaaaaggtatggtaaaacaattaaggaaattgtttcataagtagagagtacttgaaccatgattggctatttatgagtatgccacctcctgcttgttgagctagtgtgctagcaccttgggggccaaagaaggagttacatgaggataggcttcataggataggtaaaaaatcattcatgcataaagtcatgaagaaggccataaagttctaccatgtcggggggccttacttacacaattcttagctatattcctacgactttttgcctaaaccattttagggccttagctaatggctcgggagggtggtgagacatctggtagatgttgatcaaggatggattaggacaaaaagaatgacccaccatggcagagcgtattcgtgccatgccttcactattcctagggtgttgcctctaggcatctttgatgaactacttagcattggggtcaactgacatataccactatattctaggtttcctaggcgcacactgactctatttaagtgggagctaggaaggaactatgtacaagtgtaaaaatagggcctttgaaggggtatgactagaaaggctagaaaggtgtgttagtgattac

SEQ ID NO: 170614 - DNA, 755 bp, Zea Mays
caagtgcttcggcacgtaagatcaactttgtttaaaagaagctgaaccctaaaatggccagagtaagatccactgctagggtgtcccgtgagggagatgagactgaagtatccgagacagctcccatatcagaagtgatgaggcggtcaggtctggttgtgcaagagggagctactgccgaaggtacctccaatgctgaagctgaacaagtttgtggccgaaattgggagtgataatgaatgtgaagaggatgatagtattctgtccccaaccaaacctagtcatattgaatttggaaaaaccatagtaaaagcagaggatctggttgtgatgaagaagctaggttattttggagaaaatgaagatggactgattcgctttgctggagaagaagtgattctagagccgaaggaagatgaggttgttgtgttcaagagcttcttcaaggtggggcttcggttccccctctacaatatgataggggaagttttaaagaaatttgagatatatctccatcagttgtccccgaacgctatcgtcgggcttagcgtttacatctgggctctccgaagccagggaaagagtgctaacgctgaagggttttgctgggttcatgaaattcattatcagacaaaggccagggttgatggtctgcataaaaatttcggatgctacaatttttcataccgaaaggatacgaagacccccgtgatcggctatcgaaccaagtggcccactggctggacaagtgaatg

SEQ ID NO: 170615 - DNA, 925 bp, Zea Mays
tcagggaacatcaacatcttgatccactgaagtacttccttcctctgggccctacttaggacgaaatcgtccttaggccttctccatgtctttccaccacttggcggcttcatctcttggtttggtctatcacataacgctgccagatccactcttgcctttacgttatcctttgacttatcagaaatgtctataattgttgcccatagtgcctcagcaacattcttttcagtgtgcatcacgtcaatgttgtgtggaaggagcaggtcatcataataggggagccgagtcaagccagacttatgtgtccacatatgctgctcaccatatcccacaaaaccaccttctgtattggccacgagcccatctatctgttgatgaatttcggcaccagtcatcattgcaggtgggcggtctgtcactacgacaccttttgtaaagttattgatgtctaggcggaatggatggtcaggagggagaaattgttgatgtttatcgaaggacgaatatttgccacctttttcaaccaaatgaacctaagagcttccttgcaaactgggcatgagaacttaccgtgaacacaccaggcgcaaaatagcccatacgtcggtaagtcatgcatggagtactggtaccaaacatgcattctgaagtttgtcttcgtagctcggtcatacgtccataccccttcctcccaggtacgtaccaattcatcgatcaaaggctccatgtacatgctcattttattccccgggtgtccgggaattatcaatgacacgggtatattctaccttttaaagcacacactagggggagattgattgggtaataaacacgagccaacatgtgtacgtgacagcgctcattccatagggattgaacctatctgtggccagcgcaacacgtacattatgagcctcttcgg

SEQ ID NO: 170616 - DNA, 1265 bp, Zea Mays
agcatggcagcgcccgcccatctctcttccagtgctcctgcatctctagcaggtggcattcgcactagcctccttcccatgcaacatacccctcccatgccgttggttaggctagacccccacacgcacctctcttgccatatcaagtctgaggctagtgaactaggccacctatcctcaatgaccggagaaccatgcttccatgtgacactttcacccacgctagtgcaccacccatccttggctcattcatccctgtagtcggtgccactcccgcacgtccccttgcccacccctctatcatagccccatccaatgcgggcatgagattcgcaccgcccgtgctccccaccgtcgtcaacaccgcacgtgcctgcatgcccttgcccctctctatgcccgttctttcctgtattgtcggcaccacaacccctcccttgccattgccacatcgatgccacactacatcgtgacgcctctactcgctactcttggacccacgtcgacccctacctctatcacggttttcgtgcctcccaacaacatgttcttgaacttcatgatggtcagcttctctgggtgcattcgttgtcttcgatatggtcataaaccctattctccgtgactatgttgagctccacccttatgtatgccacgacgctactaggtcgcttgtattctccagtgccgtgattgccttcatgccgatcgagaccttgtcgtttccccctagcatgctcgccccttctagccccaactccatcccggtggctatataggggtgcctcacttggctctcttctcgcaccccttttctttgcttccctctccttgaaccgactaggttactgactctggtgcctcgttccacaccacctccaagccgtagctttccttcctccatcactatcgataatgggtcgactcttcctatcaccttagtaggtgacatggttctttctggtcctttgtacctcaataacatccttgtttccccccatcacatcatctagaatcacatctcagtctgtcacttcaccattgacaatcgttgttctatggagttcaatcgctgggggctcaccatatgggatcttacgactcgtgctgtggtttatcgatatgataggtccagtcccttatattccattcgcttcctcgccccaccatcctccaccaatgttaccagaccctatgctctcacctccactacctatgccaccaccttgcactatcgtctcggccaccccggccacgacattctc

SEQ ID NO: 170617 - DNA, 612 bp, Zea Mays
ctatggtaggacagaggcgtaacacattcggtagccacaatgacttccttccccttaaagccaaaatccccctgcgcaggcctagtcaccagaacctatacatgaagcaaattcagtgtcagtacgcgtcacaacaagttcaccgcctcctacacacaatgttcgacgtattacacctactcatcatcagcacgatgtgaagccctcgcggcgctgggttcaccagtgtcggcctgaacgagcaaagactgctccttcgcccctttttctagggcgttgttagagtggccatcgagctccctagtccagcgaggtcttcaacctcctcgttcctccacgcctgccataggaaacaaaacatcagagtacgaacacaaaatcctccgcacttaaaaaaatcacttgctccagcgcgctcggtcgaccctctccctgacgatagagtggacatgctgcccccacatccgatcatacaatgcaccaacagaccatttcaataatgtgtcttcaacttcaacccccaccgatagaagtcctcgttgctttgatcaaagtctcaaagtgacaacaagcttcgtgagaaagggcgttggcagcaccctcgcatgtaac

SEQ ID NO: 170618 - DNA, 624 bp, Zea Mays
caagtctgctttacagcgtacggggagaattaccatgcgcttttcaccatacttaccactgtttcaacaactacgactcggacaacacctccatcaggtaggctcgggtacgcatccgagaccccgatccaggcctcggctctctgcttggtcaagatgcgaaatacatgggtcggacgtcctcccgtagtccaagtcaaccgccagtacaaaggccattctgtcggcgatgccggctaaagggcttgggttcgtctccccacctcagtacgataagcctaggcgctccagggtccctccttaaggctataaaaggagtctggggcttcaaacggcaggaggagaacacttcatgggttttcacttgcacaccgatattagcactcgtctcaattgtcactagggacttgggatccactccctctcccgatcagcttgtaccccctactacaaacacttaggtgcaagctaatataagtctcatccccctctgctgaaagtatggccttcttttgcccgaaccagaataaaacttgtgtcttcttgcatcactcatctggatgagggcacgcaacactaattcactagttggatagtaccatcgggtcaaaacaccgacactcc

SEQ ID NO: 170619 - DNA, 691 bp, Zea Mays
aaagaaaaagaattagaataagaaaagaaaaaggaaatccctctcccctccctcggctgggccgaattccagcccagctcgcgcgcgcccgctccccccccccctctcttccggcccaggcggcccaaaccgcgcgccgctcccgcccactgacctccgggccccacccgtcagcgcctcactgctctctctctctcactggcagcccgtccccacccgtcagctccttgtccctcgcccatccctcactggcgcgatcgccgccgagcgccccctcgcctcgccattaatgctcgccagcctccgcgacaaccccgccactgtgcttgagccgacctctcaccccctcggcctgcccgagccgtcccaatcggcgttagcgccattcccgcccccatggcgagctcgccggtgctcgccgtctcccccatccctctccctcccccgagcgcctataaaaggacccgcccgagccccgtcttcgccacacaactccagccatcaccactgccctcctccccgagccgttcaagcgagcgccgccgtgctccctgctttgctccggtgagctcccctccccctctctagcttttctctgttcaattaagctatggccgaagctccgccacacgctcgcgatcactaggcaccactttgcctcccctgtcgtggccggaaacctcaccggcgg

SEQ ID NO: 170620 - DNA, 1008 bp, Zea Mays
agggaagttgatcatttcatcaagtttttcttgagaaggaaactgcataagataaccagcgtgacacttggtcgctttccaagtcttgccccaggggaagtgaaacccaaagtccttctcaagatcttccgcagaaatcaaaccttccataacagtgattaatcctatgaaactccttttcggttttctggacagaggtttcgcaaaatgggaagagtaaaaccctaaaccatcagccgccatacccacaataggcatacaaggtttgttttgcttcggcaacacacatcgggccgtcatgtgggtttctttgtgacaaatatcacaccacagagaccggaagcaatcccgagcatgatgaccatcgactccacatttttgacagaaagggcgacgcgcaacttcaagctcttttttcatagtaacgggaggggttttgaggatacctgtgtgacctccctcaccagcagacgaagcgccaatgtcttctttggtctcagcttttccaataatcggcttcaacctccaacttggattacggatcttgttccacgactgtgaaccttgaggattatctttctgattccatcgatcccagttagggtttcttcccttcggatccatcttatgcgacgacaccacgcgcgacagcgccggccactcctcgtccaccggcgggggacgaaacggagattcaatccacccaccgcgaaagctagcacgaaacgacgacggaagcgaccaaagacgcgagagcgaagaagcaaggtgcgggaaggagtgcgaaccgataaaatccgaaggaaaccctaaaacagaataagaggccctcacctcgccacgggaaggggaccggggagagaactgggccgcagcacgcgacgcttggtttccgtcggcgagagtaccacacggaggaatggaggtgcgcgaagaaaacggcccaggaaggccctggtccacgcagctacaggaagaagacgatcgccattttttctttttccgtgg

SEQ ID NO: 170621 - DNA, 622 bp, Zea Mays
ccaaccgttcatcccgatctaacggctgaaacgacatcaacccgggatcaatcgtgttcgttggatgataatccagtggtacagacctcgtcttccttctcccaccgcagcagggcggcggcgcgcaggcccccacagcggagcatccgccggtggcagccatcttggcatgccaacgccccaatcccaaaacttgatcgaccaacgcgtagagggaacaaaacgtactacttgggagggcttaccagagacagaaacgacgccagggaagctgcccacggcatgcgcgacagcatggcggagctcccttccacttgagaatgccgcagatcccgctaggcaatgacacgggtcagccacgacgatgtgcggcctcgagtaattaggatagaaagtcttggtttaatgagctctaggggagctgatatttatatagccgaagtcccaacagacgtggaatttatggagacatcaaacggacattcggatatcaactgatcggataagctctcatctcccatgcaaacagatgacgatattcatgcgcgtgtacaggtgtttggctgagatccgatccggtgctaaaagctaggcgattctgtggcatgtattggaaagccat

SEQ ID NO: 170622 - DNA, 827 bp, Zea Mays
agtagacatcgtgacggaggagcagagagccgggctagtagatagtgcgaggcacgagggttgagcagcaccggtgtagtacagacgacaaagcagacggagctccggcaacggcaacaacacaacgtggtggcgcgagcacaacggtgcgcagcagcagggaggctcagtaatggagcagggggtcagcgaggcgtgaactccggcgagcacagtcgcggcagctgcgagccggtaagcacatgtgatgttgtgatttgtgagcgagagagcgatcaggggcaaggagagaaggactgggcgcaaccttttatagccaaaagggaggaggaatttgcaaccgcgaccattgaaagccagccttgaattacagaggtaaaacgactgccaataaaatccattaacggtgtcggatggtgaaaggaggagaggagggggtgctgcgctctatatagtggaggaaaggagggaatcagtgtcgattaagaccctataaagagaaattgatgcactgctattaatccgtgagtaattaacagccagaatcaacatcaatggccgctgcgggggaaggtaactgctgacggggatgccgcgaggagggagaaggggaaaaatcacaggaggagaaacgtcgccgcaatggtgctccactacgcaggcgaggagacggaacggctggcaaacgggtacggtcgcgaacagcgaacaacaaacatttggcgaggaatggagaagacggatagtgttgatggctggggctgcttgtcataggaagaaaggacggaggtgagaggagcccgggtgaggttcacgtgacggtgttg

SEQ ID NO: 170623 - DNA, 1055 bp, Zea Mays
gtttgtttggggggactcgtgctttaactcttgcggtgtcattgttttggatccatacatcaggcggaagggtgtgaatccagttgctcggcattctgtcgtattcagcgcccatatgacttcgggtaattggtctacccatttgccctttttgtcgtcaaggagccttttcttgatggcgctgaaaatcttaccgttggcatgttcgacgacgtcgttggattgtgggtggtagacagaggcgaagactgacttggtgccgatggaactgcagaattcccggaagtcctggttgtcgaactgtttgccgttgtcgactgttagctcggacgggactccgaatcggcagacaatgttttgctagaagaatttttgggcggtctttgctgttatcgtggagactgctctggcctcgatccacttggtaaaatattcgacaacgacgaaggtgaactttaggtttccttgagccgtaggcagtggcccgacgatgtccagcccccaacgctgaagtggccaggtgtgggcgatgagcttggtgaattgcgaaggggcgcctgagcgaggagagaatttttggcatgcttcgcatgacctggtgactcggttggccgtgcatattatcgcaggccagtaaaatccctgacgaatcaccttagctgcgagggccctaggccctgagtgtgacccgcaggttccgccgtggactttgcgaacgatctctaggcctttggtttcggttatgcatttcagcatagactggctgatgccctttttgtaaagctagccctcgactattgcgaaatccctgctcccgtgtttcagtcgtttggcctcgttgcgatcggttggatggtaatagccctagaggtatagtgttattggggcccgccagtctttggccattatgaggttgactattcggtggcccttggtgtcttgagttatttgcaagccttcggggttacggacggctggtgtgatgatgacgtggtagaacacgtcagagggcagggcctcgcccttggctgctgccttggccaacgcatcggcct

SEQ ID NO: 170624 - DNA, 784 bp, Zea Mays
gttttaggctaagatggtgtgcttattaggcgcaagagttatactagtttggacagaatatccctacttctagtctttggtctctcgtgctaccagcacccgattgctcataataggggttacaagcgggcgagagagggaatgatctcaagtctctatatattgtttgtctaaaggctaccccaatctcactagcggttctatgtcttctcgtttttttctccctaggggcttccttctttgaggccgaccctcccaattttatagatcaaggggaggtggttacaaatagattctcctggaagggagcgtaacgttagggtaaaaggaacgattcacccctagttaaaccttgatgcgtgtcgatatcttttccctcgtgggtctactgtcgcatttctgagattggggggaacgtgtgatccatgctagcgacgtatgtctaagaatcgtcattgctcgtttttcattacgtcaaaatcgctcaaaggggatgtgaccgtctgtgacatttggtaaaaacatgtcactaatttttcatagtgacatcttttaaaaaaaacacatcactaacgactatgcacatgtgacatctattgtaaaaacgcatcactagcaaaatgtagtaataactcagtgacgtcttttattttatgtgcctctactgtgatatgtttagtgacatgtatataaacacgtcactggctttagacgtcaaatttgtttactgacgtgttttgtaacatgtatttaaatacacgtcactaatacatatacatcagtg

SEQ ID NO: 170625 - DNA, 712 bp, Zea Mays
aacagcttgaagatttttggttgtttctggaaactggagataaacgtctgcaagatcctgcagccaggtgggttgagtaacagaaactgcgatgagctgatccatggttctcctcgacaaggcattggccaccctgttgttttgtccttgtttgtagcatattttatatctcagtcccaaaagtttggtgagagccttttgtcgccattgagtggtcaggcgttgatcatcaaggtgtaccagactgcgctgatcagtgcgtatgatgaattcgccccccccccccaacagatacgagcgccaatggtccactgccataagaatggctaaacattcattttcatatgttgacaatccaaggtgccgtggacccaaggttttactgataaaagctattggatggcctgtttggtgtaaaactgcccctatacctttgtccgaagcatcagttttgatttcaaaaggttgactgaaattaggcagagctagcactggcgcagaagtaagagctgtttttagggccataaaggcttgttgttgggtctccagccatacaaaagattgtcatttctttagcaaatttgtcaaaggttgactgatgatgccaaaaattttgacgaattttctgtaatacccagcaagcccgaggaaactgcgaatatctttcacatccttgggtgtaggccatgtcttgatcactgctaccttgtcc

SEQ ID NO: 170626 - DNA, 586 bp, Zea Mays
gtcggccaccaccgtgccccgcctgtgcccacacatataaaggccacccaagccctagtcgagccctccgttctgccctccatcggttgcccaactcccccgtgccagcactccatttcggtgagcttcacgcgtgatgtcatcgtcttcgggagccagctaccatggccagccatttccagtagcctctagcctagcttaagcccactgtgagcttctctgataccccgtgaagctccccaaagcttgagccatatccttaccacgcaggagcaaggtaagcctgcccaccagagttcttggctccgttggtgaacgcggcccaagcaaactggcgtaccaccgtccaactccttgcaccagcagctctaccgtgcttcgatgaaattccatgacctttcaatttaatctctactccaatttgttagccaggcccctcaccgttgatgagccccgcgcgtctacgtgcatggccagaatgatcccgaccatcaccgacgatgagcagcaccttgacgtattcgtcgtgacctcctcaaccccgttgaccagttcaccagaactctaccatcgccgaatagtcacg

SEQ ID NO: 170627 - DNA, 358 bp, Zea Mays
cgaaggattgatgtcgcatggtcttatcgtgatagcgcctcagggtttattggtaccgtgctgattgaattaccgcgttcaaccgttcttcttcgagtacatcaacatcctccagcctagtatcctcggcttctgctatgttttcgaagatcaatcttggcgccccaaatttgagatcagcgggtagtactgcgtctgaaccatagaccatgaagaaaggagtatttccatgcagagctcgactgggttgagttcttaggctccaaacgacatagggcaactcccttatccactttcctgtgaacttttcatttttatcgaagacttttttcctgagtgcctccaatatcatcccgtt

SEQ ID NO: 170628 - DNA, 778 bp, Zea Mays
ctttttcccgaagcatgtcgtacaatataatcaggtactttggaagatgcttcgggagttgaagagatagttttttcaggaagaatttgttttgcagcctcttttttcgtttcttcttctccggtttccaaggatttctccttggcaggctttgaaggcccagattcagtctcgacctggctctttgcagcttcggcttcagtcagttttgtttcagcttgtgttttcggagcttcggcagcttttcctggagtagagcttgaactctttatcgtttccagtacatctaatacattgaccatccttttcctttttgggatcgctataagatcttttttgtgccttcaacactgttacttctatcgaagggctcagaactgatattgtgtctttgactccaggctcttcaattttgttaaccttcggctttacagccggttcttcaatcttctgtgtaaaagtaagttctttggcttcagtagccgaagaggtctcaccgccaaattcgggcacttcggccggttcaatatatcgcggccagtgagtaaggaccttcacctttttcctcttcggcacgagctcgcttgaagcagctggagcaacatctttcccggaagtggcactcttcctcttctgcccccgtgacaggtagcgataatcagggtacataaacccaatagtgtcgaagactctattcagcctcttcttctcccaacctccgaaggccgcagatagtgcattatcttctgcctttgaatatggcccaagcagttcatcg

SEQ ID NO: 170629 - DNA, 623 bp, Zea Mays
tcttcatccccttccaccagtatctggccttgaggtccaggtacatcttggtggtccctgggtggatagagtaagctgagttgtgggcttcatcgagcagggtttctcgtgcctctcccactggcacacacaggcggttcctgaaccagaggactccttgcttgtctgtcctaaggtccggaagttgctccttgcgagctctttccataagcctggttgtctctgcgtcccggcgttgagccttgcatatgagatcttctagatttggcttgacttccaggctaccgttgtctcccagacatgcattcagctgagctgattctttcttccaatcttccagaaagtttgttcctttaaccccgaaaggctttcggctgagggcgtctgctaccacgttggccttcccggggtggtagtggatttcaaggtcataatccttgatcaattcaagccaccttctttgacggaggttgaggtccggttgcgtgaagatgtactttagactcttgtgatcagtgaagatgtggcatttgttcccgatcagataatgcctccatatttttagggcgtgcactatggctgccaattctagatcgtgggtagggtagttctgctcgtgcggc

SEQ ID NO: 170630 - DNA, 603 bp, Zea Mays
gagatttttaattaaggtaggaacatgaagaaccctcttcaggacgaagttagaagaaggtaaacatatatgcatattgttgtataaacgcactggcacttgagtaccactgccaacagtaacataaacaaggtaggagagaggaataagagatggagaggtggtaccattgtcggatgacatatgtgatttggcgttggagtcaataatccagtcgtctgtagatggatgcaacatattattcaaggccacaatgagacctgcctgatccgactatgactgagaagagagagtaggcagagacgacagttgcaatgaaacaaaggtggtggtgtacgtcgattgatatgctggaagagccgagccaagtaacccaacagcagccggtagaaccacgccacatggggttgaagcaaaatcaaggaacatttggggtagactgacacacggtgttgttggagccaccgtacccgtgactagaatttccaccaccacaattatttcagccatagacacaaccatgatgacaaccacacccactataaccgcgtatgtcgtagctaccctcagaagcaccagtgccactggtgctaggatagccac

SEQ ID NO: 170631 - DNA, 312 bp, Zea Mays
gggaaaacatcctcatcaaagacaacatgacaagagatgatgatgtagtggtaagaagaccgaggcaccggtaccccttgtgatcatggaagtacccgaggaaaagacatcgaaaagagcgaggggaaagtttatgaggcgcggtggcattagtgttgggatagtaggcacactcgaaatcccgaaggtgctcataggagggggtggtgcggaagagagtgaagaacgagtgggatgggaaactgccttagagggaaggcagttgagaagataggtggctgtgtttagggcctcagcctagtagcgggcggg

SEQ ID NO: 170632 - DNA, 456 bp, Zea Mays
cccgtacaactagttacccttgtcttgacataaaatatctggtcaagccctgccaaagaaagttttagtacatgaccaactattagcttattcattctgtctactaaatgattcccttgcaaagctatcttaccatatgcttctaacttagatggtcaataccaggcggggtggtggaattgatttacctcctaatcgacacactcggtggatatatcaacaaccccaaccacagtcagcagagatgaatcctcctaatcctccatcaggcggagtcgatccactaattgcagctcaaatgaggatgatgcagcaaatggctgacactatggcagatatgcgcacccaaatgcagcaagaacgccaagaaatgcaccaggaaagagaggatgcacgacgggaaatgcgccaagagcgggaagagatacgccaggagagaagggtacaacaacagca

SEQ ID NO: 170633 - DNA, 449 bp, Zea Mays
ggcggacgagagagaaccggccagcccctgagtccgcgcccgaggaatccggtcgatcccaacaacaacacggtagatgatttctgcggcagtgggttgaagatgagcctagcgaacggggcccacatggaagggaattgacttatacgcagcagggcgactcgcgtggagacggttagctcagctcgatttgcgggcggaggtcgttggggagatctggcatcaccggcagaggacccaattcgtgcggcatggtgaggtgaggaggatgaagcacgagttggcgctaaggctgacaaattggacccacggggcagtgtgagacgcgagggtgtaaacgggccggccagcgcgaagggaataaaaagaagatgggccgagcggtgtggattcagcccaggcgcgaatttcctattttcttctctttttttatttatattccctaattt

SEQ ID NO: 170634 - DNA, 780 bp, Zea Mays
cactttcagcagaccgctagcttctattctatcttcatttctatttcttctacatgatatgatatctcttgcaccgttgcacgtcccacctaagttaccttattatacacttgcagtagtaaagccacgagcacgccggtgcagccgaatcttaagaacctctaaagcacaagatttgggcactaatagtttattccccccaccccactccacacaccgtcattacattggcactcctccttgttgccaacttttccactttattacccctctctctcacacacacacggagagaaagggagatgcatgattagcaggaagaggattaaaggtacctacaggctaaagcaagcgtgtggttggccacttttaactaatggacggattgattattcctagtacgtctgttgttgttgagactgtataggagtagtcgagctgaagctaccagctgtaggctgtagctatagggaaacacaacagattagaggcacgcacgcaggcgtcaatccgtgggccaggcatgcacacagctccacccttttggtttggtttggttcgctaatgctgactgctgcatattgctttaattagcttgcttaatctgctgcgcaaagggaaaaaaggcatgtcatcgtcgttagtatatgtatagctttgttaaagcccgcatgcagctaagctagtagcgttgtgattgcatgcacccgccccgcgcgcagactcttctaatccgtctcatgacagtgcacgttaaaacactgttttgtaatatagagt

SEQ ID NO: 170635 - DNA, 711 bp, Zea Mays
tcttggaactgatgcgacgacgaggctaaaactgtgtgcaggtgatagtccatccatcaatgtaacactcatttgcttctttttagagctgggcatccttgtgatgtttcctttttggaaaacctagtaattcatcatctgatagtgcattaggtattcgaaaatctgctattagttgttcttggggagaccattgactttttatgccagaaaacaaaatcatgttcttctgttttgtagtttcactttcgtttgtaccgatctggcgataaggaattccatagtactcgcaacaacaacatgttccaagatcatttttctgttggtgtgcatccttttgtgtctgttcatcagttgtttcatttctagtgatgtttcgacttgccaggacttgctggtttgaggaggtgagttgagatactttctgtattatcagagcttgtgcatgtaacagcttttctaagtcaaccatcgagggtgaggttgtggttgatgtcatatggttatcggtagtctgctcatgtgctataatttttgctaaatcaacttgttggagtctagctaccacttgagacattgcttgcagaaactgagcatgcgccttcttgaactgttccatctgatccttagctggaggagttgccaacacaatgtattctttgcacttagtgacatcacttgtagttgacattccaaggtctgacatctgta

SEQ ID NO: 170636 - DNA, 1022 bp, Zea Mays
aaattagttggcccttggagttcgatgtctgtcctcaatggctcacccaagccagcggtgaagaggttggtctgttgacactgtgaaagattgtcacaacggcaaagcagtaaggaaaattgatgtgtataatcatccactgttccagtgcgatagagatccttgaggtcagcgaggccattcatgcgcagtgggggccgaacctaagattgatcaattcggagaaacggccccaggtaatgtcgccgtagtcgcgctcgatggtgtagtaccattcagcggcaactcagtcgaggtgcagggacgccagccagactcgttcctcgtgcagtgtcctcatgccgcgaaagtagatatcacattttgtcagccacgccagggggtccgattcgccgtcataggacggaaaattgggcctgggtcgatgtgatctgtcctcccgacggaaggggccatccccgtcgtcgccgccgccgcgcaacccctccttgaagcggccgccgggattttggaacccctgaagattcttcctccgtgggtggaatttccacgtgggcaaggcgacgatcatgagattcgaggtgtgtgttgatggtggtgatttgggctagcatttgggttttgtgatcaaggatttggcgtagggagtcagcaagtccacgcccattaggattctgtccagtgccggactcgaaagtcatggcgctggctgtctctgataccaaatgatgcagactccctactttcgatggaggctcaacaggaggttgtggacaagaacgcaggaaataggagtgggaagggtgaggaggattcctggtggcgttccggacgctggagagttcttctagtgcgccccaggcaacctcctaggactaggagattttcttcttttgataatccctagtacaaactacccctggtctcttatagactgagcccaggttaatataaaaacaaatcatatcagtctcaacttgctagaaaacagactgactaaatatagaaacttatctgttgtc

SEQ ID NO: 170637 - DNA, 637 bp, Zea Mays
gaggatttctccttggcgggcacggaaggcccagcttcggcgtcagcctggctcagtatagcttcggcttcggtcagctttgtctcggtttcaatctgtgttttcgaagccttggcaatttttcctggagtagagcttgaagcttttatcgtctccagtacatctaatacactagccatcctttttctcttgggggttgctgctagacctttttgtgtcttcggcacctccactcctgccgaagggcttagaacttctaatgtttttgtcccttcggttttcggttcttcaattttgtcagtcttcagcattgcagccggctcttcaatcctctgcataagagcaggtcctttggcttcagtagctgaagaagtctcaccgccaaattcaggcactgtggctggttcaatgtagcgcggtcggtgagtaaggaccttcaactttttcctcttcggtgcgggctcgcttaaagcagccgaagcagcagccttcccagaagtggcaccctttcttttctgcccccgcgatgggtagcgatagtcagggtacacaaatccaatagcatcaaaaactctatttagccttttcttttttcggctcccgaaggccgcagatagtgcattatcttcagacttgg

SEQ ID NO: 170638 - DNA, 438 bp, Zea Mays
cagtgcgggctgcgacccagcccccgagggtgtccaagtgggctccccttctcatacctccatggatgtccactttgggtcttctcctccacattctgatggtatggcagcagcacgtgcttcaaatcaggaagtcgccttagagaccggtgcacctgatgctagagttctgattcctgctggtgatgttgagttgatccctgatgatgctcttcagattgcctcggttgatattccttcatcgagtcaccaactggcttctcatgatttggggcttccttcattcttctccaatcttcaggtaatttggcttttcccgatctggctatactctaggcgaaatactatctttgcactcatttgttttcaatatcaggctttggttgacgagatggctggtcagctgagatcacagggtgcctctgtcccagaaagagc

SEQ ID NO: 170639 - DNA, 605 bp, Zea Mays
gctgagccggcccaactgcgcatgttggcgccgacatgtggggtccattggccagccactcagcgcatggtcgcgcgccgcagttgcgtcgtcagcgcgggacccacggttcagcagtcggtctcgagcgctgcaacaccatggctccattcaacaagtgagtccccacagtcagcttcactctgcgtatcactgccatatggggccaggttgccaagtcttcccatccttcgcatggtgaagtctgttgttgtctgagctcaatttgtggccgtcaccacagatcccggtggccattggagcaacccccctctcatccggtctctggggaaataaatactcacctgctatcctcccctctcatctcactgctatcaacaagagcgcagtagctaggggagagaagcaacacctcaccgtgttaccacccatgccgatttgggtccatcccgtcgctttgtcctcggcgtagaatctagaagattggcctaggaactgggaacgttctgttgtgtgtttacagggttgggatcagtgggtggtagcggaatttgttgccagagttgagtctctaccgccgggacatcctgtgtcgtgggcagggg

SEQ ID NO: 170640 - DNA, 926 bp, Zea Mays
cacgattgttattaccttgctgacggtgtggcataccttctgtgttttgatgaagacggcgacgtaggcacaaatctctggtggtcgcttcatcataattaccttctgcatcaaacactgcatcatcgggaagatgtggacgaggaggtggtggcggtgattgttgttgtgtctccaacatagcaagtctgtcgacaatctcggacaatcgtcgatccagcctctcgtaagtcttgccaaggtccatgtgaatgaaggtctcatgcactgacttatggaccgtctcctccatttgctccttcaggagcttgttgtttgcctcaagatcttggcggctaacacattcatcgaagtctgtatggatccttgcttcttcttcatcgcctgccatcaaaacacaaaaacaggaaacaaatggtgaaggttatccctaataatttcactacatgctcctctcagatggaacacatgaacacactctaatgtatcttaccaaggtcttacaagtgtctgatgaaatacaaagcaaaggatggtacaatcggaggctggttcgtgatacttaccaagagggagtgaaaccacgattgcaaggtcaaagctgtattgatcagaagaaagtatgtggagcttaggaggccaaaaataaatatcaaggattagcaaaaatcaagtgcagattagcgaagttcaataagtgtccaaattgctagctaagacgtgtcctatcgaagcacaacaaggtaaaggtaataaggaacggtggacaaaaacttaaagaaccagcagaatggcagttctgtaaatagagcagatttttcagcactagtagaaatcaaaggcgtgtttccaaaggagtaccagcaaaagagttcgaaatattctgaattttttaccactgatccaaaatcacaaaggatggaagc

SEQ ID NO: 170641 - DNA, 383 bp, Zea Mays
cagggccattgctactgcaagtcgcccctaagcctggtactaagagttgtaggaggcaagaattcacagttatctttgtctacatgctattctttgaacacaatatttacgagcttgataggcctgttttggaatacaaattatgtgtccgataggtaaataatttatgcaatgattcttagacctttggctcttactgcttcaaggattaatgtgtgactatttagccttcaatccaagcggtatgccactaatctcaaaaattgcttctacgcaatatttacttgacaatttatagatttgttgtttcttagagatattttttcatgtaataggttataaggttgttcatgacatatagaggtttgttggtcataatttat

SEQ ID NO: 170642 - DNA, 553 bp, Zea Mays
acaaatacatcgacacccgtagacgagctcactcctccactgtcttagatattggcacttgcctcaataatctctagggacttggggattttcaacccctactacaggcaccacggtgcgagtaatataagcctcatcctctctgctggaagtaaggccttgagtagcccgaatcaggataatcacttgtgtctcctcgcacaccatctagagtcggccaagcgacgcatttattggttggttaaggacccacggtccaaacaccgacagtttaaatctggaccgtagattcagggatcagtagctccagttacatacccattcggccttctaatcagcgccctagatctaagatccagcggctgagagcaatccataccctttcagtcggggctcttttattaaatagaccccgggaaataggggattcaacccacattccattcatattgtaaaactaatacatatcagcccatttatttataaattacaccccgatcttccaataaattgtagctgcggtctaatgaaaccaggaaaatgtatatagaaa

SEQ ID NO: 170643 - DNA, 401 bp, Zea Mays
attcgcattatcgatatagttccactgaattctggtaaaaaatattttcacagaatcagagtcggcgaagttcagagtacgtgagctcatggttcaaagagagagacagagagaaagtactgtcagtaatccgagacagcatcgaactccattcacttattatagtatataagttttgatcgactgactttaagcttggtgaaactagtagtttggtggcttaattaacacaacgtgtctagtttctttgtgtctggactggacgggaacgggcggcaaatgcatgtggctctcaacgtgcatgcagtcacatgcatgccagcatcgcacgcatctacggctattatatacggattactactgtattactaaccatgcatgtacagctccccccaaaaaaa

SEQ ID NO: 170644 - DNA, 896 bp, Zea Mays
ggaactggctcgccttctccatctcattgtaagccacatgaggaacaaagcgaaccatcttgttaaagcccaattcatactcggcgacggacttcttctcttgcttggaagactgcaaatcaatcttcattttctctaggaaggtgaccgggtagaacctcctctcaaactgcttgatgaaaacatcccaggacaggactcctagtgaagaggagtgagctgcttgcacgcctctccaccaaatttgagcctctcccttcagcagctgagtgccaaagcaaacacgatcaccatacacaatctcaaagacgtccatcttatcctccacataagtcggccaattcgccgcctcgaccggagtaccactgccatcaaaagtgtccagcttcatgcccatccactgcatgagagaaagaccactgaggggaaggggcaccccagccccgccacccggagcagcacccgcagggacagcgcccccgggcactcctccacctccagcaccctgagcagcacccgcaggggcaacagtaatagcttgcctcagaatggccaactcttgctgcatggcctgcattccggctaacattgccgccggactcatagaatccccactaggaacttgcgggctgccacgagccctacgaggcggcataactacagccacaggagtaagtaaataagtaaataaggttggcataacacctcatcaaataatgtcaaactagcactgacaatatcataatatatcaatagtaaagaaggaaacccatcctatatgtgcagtgtgtcaatttatcattatttcacttgctaggacctacagcctattcctctgataccaactgtaacaccccattgctcccacacaatgaatgttaccaaagacccttccc

SEQ ID NO: 170645 - DNA, 329 bp, Zea Mays
gttgagcctaacaatggcgttaggggttagttgatgaaggtaaatcccgaatttttccaagacttctgcaatcattctatgcagaggaaatctcaaccctgctttgaagaagctcttaaaaactacaacttcatcatcttctggttttgggatagtctcttctctgccaaagcaaatcaaccccttctcggcttctctgaagtagcctagcttcgtcatcatagtcatatcagcttcagacacagtcgatttcccaaaatccagatggctgggcttcgatggcataatgatgttataatcaatctctccttcattagcatcaccctctt

SEQ ID NO: 170646 - DNA, 462 bp, Zea Mays
ccaccgtggatgatcccaccattgtctacatggccggatacctccacaccctcgatactcactacgatgatctctcctcccactgcacccacctaaactcccgggtggaaagcctagagcagcaagtcaaagagcttaagaaggagaaagcatctctccaagagtgtctcgacatagcggaaggcgaggaggccaacacccgtgaagcctatcgaaccttaaagatggactatgacaagaagcttaagaagctcgcccccacaaagaaaatccggaagaaaaccacgagccaaggatgccagacggaaaagaggaagaaagctcccccagcaccagctcccgccaggatagagaatttatccgatatcgaggatatgtccctcgctagccttgatgatcttctcaaggaatttggggacactctagaaaaggaattcggtagtacctcagggaacgctcgtg

SEQ ID NO: 170647 - DNA, 343 bp, Zea Mays
gggcaattgggcggctctggtggacaattggaggcaagtgctggtgcgttggacacgtaattacctagcagagttccctgaggcttcaatttatagcactcaatggtggtggcgctcaatttggaggaggagcgccggcaaccggggagaggggaggttactggcgcagggaattcgtggctttcaccgtagcaagtactcaggcgatggacaggcttgcaacaccggttaattgcgacgtgctagacctccaagacgcatggcgcacgatcattaagcggctaacgccggtgaggatgatcccggccagccgcggtccaagggggtacgacgggcataatgg

SEQ ID NO: 170648 - DNA, 498 bp, Zea Mays
ttcagtctcagcttggtgctttgtagcttcggcaccaaaggcttcaatttgcacttcgggagtttcggcaattttcttcggagtagtgcttgaagactttattgtctccaatacatccagtacattaaccatcctttttcttttgggggtcattgctggacctttttggctttttggtacttcaacttttgctgaaggacttaaaatttcagatgtccttgtttctttagcctttggttcttctattttctccatctccggcattatgaccggctcttcaacattcggtaggggagtcggctccttggcttcggtggccgaagaggtttcaccgacaaactcgggcactgtggccagttcaatatagcgtggccggtgcgtaagaaccttcatctttttcctcttcagcgatggctcattaagagcagctgaagcagcttccttcacagaagccgtatctttccttttttgaccccgtgttgggtaacggtagtcagg

SEQ ID NO: 170649 - DNA, 513 bp, Zea Mays
tttcatgtgaagcactccttctggaatatagtgttcatggaatgctaatttaaattcatcccaagtgacctgatgtccggctggttgaattgccacaaaatttccccatcaggtactagcagggcctcttagttgttgggcagcgaacaatggcttctgtgtttctgtgcaacggattattctgaacttctgctccattacccttatccactcatcagcttcaagagggtcttcagctttaacaaagagtgggggacgcgtttcagagaagtccaaatatgatgtttcacgcggtccctgtggaggagccattccgccttgctgctagaattggttacccgccatctcgcataaaagcgggtattattggcactcgcgttgaccaaggcagcgatagcctcagccagcgttggtggtacaagtggtggattaggagtatcttcccgaccacgggaagtacccgcaccgtcatgcgcacgagtccttgatggcatctgaggcaaagaaacattt

SEQ ID NO: 170650 - DNA, 450 bp, Zea Mays
cggtgttggacacccttgaattggttagaacccggagaacggtggtatttcaggcctgatttagtgaaggaaacagaggcaaaggttcaacgaataaggcaccacttgaaagaagctcaggctcggtagaaaaattatgcggataaacgacgccgacctttgttctttcaagtcaaggatcatgtatacctgaaagtatcaccaatgaagggtgttaatcgattcagggtaaaaggaaagttggcaccccgatacattggcctatttcctattcttgaacaatgcggaccagtggcataccgacttcaactgccagaaacattgtctgtagtacatatgtgttccatgtatctcaattaaagaagtgtcttcgagttcctgattgaaccatcgatgtagtggatgttgctttggaaccagatttaacttatttagaacatcccattcgag

SEQ ID NO: 170651 - DNA, 518 bp, Zea Mays
gcggtgggcaagatccttcctccctgcgctaatggcagcaagacacaatcgcccaatggatggcaccggaggggtcacgactgggtgccatatggcaggggcccgctacttatgcgccacggagccggacccgaacggccgaacgtagatccgggaggcgatacacgcggaatgatcagttcagaggagttcatcgtggatctcgtgaaggctgttatcgcgaccgcgcgaagggatgacaggtgggccctaagcgagattctcgcgcggtgagcggaggagccgagcggtagggcccgcatgtcagcgcctggaatccagggttttgcgcgcgctagagtggacgtggggttgggccgcgtggagagggaaatagtggagtgggccgagctaaggggatttggcccaacgagataaggctttctcttttttttctcctatttttctgatttctatttccaaattcaaaccagactcaaatttaaattccgaatagaacaccaacataattgaaaaac

SEQ ID NO: 170652 - DNA, 627 bp, Zea Mays
gctggagatagcctaaaactacacaagaaattctccagtgacaaatcctagtacagaatgtaatcacacaaatgggaaagttggaataagatgccttttgtgcccctcaaagttcaaacataatgaggtgataaaatctgggagaatgactgagaactagaatagggccaagatgctttactttgagcctcagccaaagaacaggacaaagaataattgtcataagccaatgttctcttggggcattgggccacgtggcaaaactaacagccttttgcaaaaggggtaaaagagattcatttaatgattgctccgatgattgcagttcaccacgagtcaacatcacaacttgatgataagaggaatacagcatggagatcagaaattcgaaacaaacagaaagcctatacaggaaatggatattggcagaaagaaaattctggacgggtcattgccatagccacagatgaataaacagcaaacattgtctacatgcaagctattcagtcagtgccttccccgaatggtgcttaaatattcaaaaatatcccaaggcatggtcccactgttcattccggtactgttgtctctattatccatttcaaaagtgagtattctcaaggcaat

SEQ ID NO: 170653 - DNA, 597 bp, Zea Mays
gcgtggcgtgggaggaggggcatgatggagatgggtggtgcggcacgacaagagaaggacgccgcagcaccagcatggcacgaggagaggagagggaggccatacatacacatacggatgcaggggagagaagagactgttgtagagggatgtggcgcggctcagacgcatgaaacgtcccgtcatgggagtaggcctctttttttttttttgctccccaccaatagtagtatagttatgaaacgtcgatattaaatagcttctcggctgtattatggacacaaaaaccatgcatcttgatttattgttacaggcggttcaatgcactaaagacaagagtcccatgatcgactccctctctactcaacatatgtttttttgcgacgtgctacatagaaaaataaagagttggaggcagtaaagctgtccaaataaaatactagcatctaaaatgactttgctttgccaatttccagctacctctccagaaggacttctatttcaatatagagggagtatatgttctatttctattggttaggtgagtctaaatgtcaaatcaacaattaagtttcaaacatcaacctacgcataatt

SEQ ID NO: 170654 - DNA, 716 bp, Zea Mays
cctgggcacccctcaactgttcaaagagaacatcaatacgaggtagcggatatttattcttgattgtcacttgatttaaagcacgataatccacacataacctcttgcttttatccttcttgtcaacaaacaataccgggaaagcccatggtgacctgctaggcctagtgaaacccttagccagcagatcatccaattgtcgcttcaattcaacctgctcctttggagccatccgacacggggccttatgaataggctgcgtacccgtaatcagctcgatttcaaaagccacatcgtgctccggtggaatgcctggtagctccgctggaaacacgttggcataatcacacaccacacggatgtcctgcacctgcaaggcagcctcactctccaccaccatggagaaaaagattctcgacttccttgaccgacgatccggaagtaattgggacaacaaggagagagtgaactttggagagcttcccaagaataccacctccctacccgacggcgtctgcaataaaactgtcttccaaaaacaggatataactgcgcgatactaagttaaccaatccatacccaagctaacatcaaatgaccccatggaaatcaccacgagattagctgaaaagacctcatcagcaagaatgatggaacaacccgggcagactcaacatctactaatggagccattaccagaactaaccacaattggg

SEQ ID NO: 170655 - DNA, 1130 bp, Zea Mays
gaattagtaagacatgagtgtcggagttcatatattagtgttgcgctgcgatgattgaagtgcctcgagtgcacgccacaatatggttgcatgtgagacagggttgggtgcctgatgcgtttagtaaaaacccatcggtgtcactgatgttaagttgaggtttatttgcgcgtggaaagtaataatatgtctaatacttagagctcttagtcgttagtagaaattgtttgggcttatgtagagaggtgatgacatgccgtaagtagtcatcacttcctctataattataagtcgagtctatacgcgttaggcgttccttaaattgtgatttgcaaataagtgtattttgtgtagtgtggatcgattgtgaatgcatgtgtcgcaagaaaagaattagtgcgcatataggcgatgaatgggtgtgatgagatgatgacatgctttcatagtcatcatgtcatctgttggtgacctaactgaaggtcgtagagaaaggtcgattgcctgtgtgttattattgtcaccttgtggttctgtatgaattgcaatgtgaagtagtaggctccgtatgtgatgctagatgtctaggtagacgttcgagaattgtggtgctcggaccgtcgtgatgaaggttaagtcggttgatgccgcttaagtagttaaaatgattaatagaataagcatggggttaaaactagaaactagtgttctcgcacccgtttgggatgttgtagcccaatttcgcctggttatggtcgcgggtaaaaatttgtagtgctcatgtggtgtctaagttaaaatgcgaactagtgggtgaaaagcgattcgatataagtatatgccggatttgatgattgtggtgaatgcgtttgttaactgaatgtggtaattttagtgcactaaatgatttggataaaatttgtaagtctacttgtagtcctcgtttaattaattcaactctatcaattgtcaaagcgttagaacaattcgagcatctagaacgccgcaattcttgaattatatagaagctaaaatgtattgattgctgttttgggctgcacgcactgttttcggtgtgctgtatgtttgatgaactaaattgtgttttctgtagatatgtgctatagaaa

SEQ ID NO: 170656 - DNA, 363 bp, Zea Mays
ggcggccgcggcctccgcccacctacctcccaattagtaccgcccccctggctgctgctaccagcagcaggaggaggaagagggggcaggcagtggaaaggggacggagagcgaccgagcagagagtgggaacttggaagggttggtgaggaggggaagcgacggtgtttatgcgaagggggccgccgtcccgatcagcgaagcttttgggcgatgagcgagtagtttaatgcggaatcggcatcgggcgtcgcggtgggggctggactggacttctctgcccgctgccaggaggaagaagaaaccgaggagtgagacgtgctgcgggtgcggggcgggaggccggaggcgtctgcgtctgcg

SEQ ID NO: 170657 - DNA, 347 bp, Zea Mays
caattgagacacgtggaacacattatgcacagcagacaaggtttcgggtaactggagtcggtatgccactggtccacattgttcaagaaaaggggaaggaccaatgtaccggggtgcaagcttcccttttaccccgaaatgtgatatacccttcatcggtgagactttgaggtagacataatccccaactagaaagtacaagggttttcgtcgtttgtctgcataactcttcttacgagcttgagcttctttcaaattatgaattatttgttgaactttctcttctgtctcttttaccatatcaggcctgaagaaacttctttcacctggttcagaccagtttaacg

SEQ ID NO: 170658 - DNA, 1401 bp, Zea Mays
aattacctggaggttggagaagaacgagggaactcccaagtcgtgggaaatcaactgacgactcgttgaagggtcaccaatcggaacaacccgcaatgcatcagtagggaccaggtcagtatcatcagcagaaggcaaaactctgtcatcaggagcgctggcctctaaggcgacttcttgacccgaagcgtgagttgctgccatacaaccagaatgcggaggagaagaccctacgtgaacgtccatggaagtgtgagagggagaactgactcggataccctcgggggctgggtcatagctcgcgctacccatccgagccgggtcatccacggcaacaccctcgggggctgggtaaacgctagtgccatccttgagggccaagctctccgtaacagccacctctaaggctgaaggaccttcacccacttccatgggagcagaacaatccagactagcctcctgacccttaagaccgcgctctaaggtcgatgaggcacgggacgctgctcgagataactccagcccggcgtcaggcacatcagcacaaatatccatcatttcaccatctgtcggctccgacaacagatcttctaggaccatatcttcaagagtctgatcaaagttggccagagacaattcttgcagaccaacgagagcagacagggctggagaaggaacaccactactttccccgctggcaatgtagcgtcggctgttcttccgagttagagggatttcatcctcctcttcctcatcctcatcaacatcgcggatagtacacccattggggtcagctctggccagatcacacccattgggttcaatatcatctaggtcacacccattgggttccatagcagtcgggtcacacccattggggtcagcttcagcaaatgcaggcatcggcacttcctcatcagcaggaacagaaggaccagcatcctgatccaagctagacactcgacgaacacgtctcttcttctttttcttcccctcagcaggagaagtaggctgattggctcggcgagaacgcttcgggcgaacactgtcagacttctgaatatccaaagcttcgctagcctctgggatgggcgctaccaccagtgtttcagcaggggctgcatcagaagaatcttcagctaacatatccagcatggcacttatctctgcatcactcggattcaaaggcacctcaaaatgaacctgcctctcgtcgtcaggaatttcttcaagtgaggcaaccaaagcactaacttcttcgggagagggtcgcactctaaggcccaaaccgctatcaccagcaggaggatttgacacaaaactggtaaaggccttggaaggaggcagattctaggccgaatatgcgacaggagcgccgatgttcgacaccttacctctgag

SEQ ID NO: 170659 - DNA, 850 bp, Zea Mays
cacactgtagctagacggaacacacttaacaagacatatgtgccccctgcctactgttttgttgagccacccaatgcccactgctcttagtcaaaaaatttggcgctcactgtgctcgatttgaagaccaacctgcaatggctcccaaaaaagtaaccatcagggccaactcctccccacatgaggccacaaaggtagcccttgttgccaagaaggcaaagtcaacttcactgacgacccctacctctcgcagctaagaacaccaactggtctgagccacaaaacaacaaactccctcggactgaagacttgcctaccccgaagggcagcattcgcaactgcagctccgagagcacacccgaagacccccctaacccaaagagtcagttctaccaggccaaagtgtgtttagacttgataggcagcatgatacccccgccccacccaggttcgcgcctattgggcaccccggaccacaagaggaagacaacatcctacaagaagacgaggacctgggaattaccgcataagaccaaccgctattgcgcagccttcgcatgaaaaacatccacctccaaaaaacagagggaagtccttgtagccaagaggcagagaaccaccatgcaggccaaaactagacaactgatcatggaagaagagaaaaaaatcaagggcactacaatagaaaattgtagagttgtagcctaaagaccccccgttagcagctagctaaagcaacttatcatcacaatgtcgatcacttttacaggctagcccaaatgccagcttctttccatggactcaactttcttgatgagtgatgtcccctctctgcacagctctaggccac

SEQ ID NO: 170660 - DNA, 527 bp, Zea Mays
gtttggggtgttttcaaatacccacttacaacttttattatgccaaactcccccctccaaattaggtggtctaaatctatagcagacacgcggctccatctttggctcatctaaaactcattaagcttggctcctagcggcgctggcacccacgcccctcgacgccgccaccgtgcaacatcactggcgctcttgctaatggccctcgaggcgggttaacgacgatcccagcacgtaggcggtctgcctgggcgcgagcccccaacgccgcgacccatcagcgaggatgattcctagagcaggcgaagctcccccgcgcggaggcgtgatcccggcgcgaaggtttggtccctgtgctagcggatggctgcgagggcgagggcgtgagctccctgcaatggagccgcgatgcatcagcgagggcacgaggtccctggagccacgacccatcggctcgaactggctccctggagtcatattcctcaccttgaccctgtgtcgatgcattttcttctactttatcctct

SEQ ID NO: 170661 - DNA, 433 bp, Zea Mays
ctttcaaagaggctcaacacctcttcttgtggggggtcccaagcaaaagacacacctttctttgtgagtttgtgcaaaggggcagcgatggagctaaaatcacgcacaaaacgacggtaaaatcctgcaagtccaagaaaactccgaatttgggtgaccgtcgttggtgtaggccaatcctgaatggcttcaaccttgcttctatccacctcaatgccctgcggagtaaccacataaccaagaaacgagacacgttgcgtgcaaaatgtgcacttttccatgttaccaaacaagcgagcagcacacaaagcatcaaaaacagcacgcaaatgttctaaatgctcctctatagacttgttgtaaataaggatatcatcgaaataaacaacaacaaacaaacctatgaaggcccgtagaacttcgttcattaaac

SEQ ID NO: 170662 - DNA, 1464 bp, Zea Mays
acgccaacagcaattgtaaacaagatcgttgagaagatttcttgagcaaaacgtgttgatctacctgtagatttggggtcaacctaatgatgcaacaaaatctatcaaaacatggtttaagaattatgatcacaggataaaatttggcccctggcctattaacacgagcatgaataataatcagtagcattcctcaaagatctggtagacttaccattacaacatgtaaaggttgcttttctgatatcccagggttcatgaaaggtttgtcctcattcccagatacacgttgtttcaactcttgcaactactgacataaatgcatattacagaccgtgaagtggttacaacatgccaagttaccaacatggtaactaatacagagtagaagttaacacagaatggcagaaagcattgtggaaggaaatgcatatagttggaagttataagctttgtgcttttgcaggatcacagcaatgtttgtctatatgaagagccaaacaggctttacttgaaaacaagtgcttcaacaaatggaataattgcttgaacatccctacaaacatggaaatacattgaagaatacaatgctgggcaagaatcgtatgtcattgtgtgacatgtagatggatttggaaaattgaatgtcagttaagttacaaaacatggtccaggtctttttcctgaagctacattgacagaataatatagcgcatgaaacttcatcatatatattttaaagagttgctaaataatcttaccagggctggcaggcttgcagacctcccagattgttcatctggaaggtaatctgctatagtgttagtgagaataagtgcccgcaggtactctgcagcccccctgctatccacagcatggcttcgctcctcaaaccttttaatgacatcttcagggctgcatatttttggtgcacaccaaaacaggaaattcaaacaggtgaaaccattcttcagtttctaattcgaagatttgatgcaatggtcagtacaaagtccaaacaacaaaaccaacaaaagaagcaactttcttcattgtcatatttatttcaaattgcatcaaaagatggcacggaaaaaggactcccatgcttatgtcaacaatacgaccactactaatgatgatgcagtactaggacaccaaccataagacaaattggacgaatttatgaacgttcaagaacatccaaatttgtgctttctcctaccaatgatccaacagtatatgaatcatcaagcactcaccatattgcttattttcaactttgtgaggcaaatcagcatagagggtatacggtatacctagggcgcagaatccactcaatatcgcgaaacttgggaattcatacccacaaatttctcaagaaaccttgccacaattgttccttaggtaagtcaaaccgtataaacaaccacggcaaatccactcagccggaaccacattcgc

SEQ ID NO: 170663 - DNA, 1069 bp, Zea Mays
ccgttctcgtcccaccggagggtggagagctgctcttgctctacatagcgaccaccgcctaggtggtcaatttggtactcgtcatcaaaagacagggaaggatgcgcacgcccgctccagtgccccatctacttcataaacaaggtcttgacccgcgcaaaggtccgataccctcaaaggtctgataccctcagatgcaaaagcttttgtaagccatcctcatcaataagtggaagctaaaacactacttttaatcgcacctcatcaccatcgtaacaacgtttcccctaggggaggtgatccataacccagaggctgctgagagaatcgctaaatgggccctcgagctaatggggtagaggatttcatatgctctgtgaacgacgttcaagtcgcaagtcctcgccgacttcgtcgtggaatggatcgagacctagatggaggcgacgtcggtgaacgacagatcatgggtcatgtactttgatggctcgctaatgaaagtgggggacgatgtcggtctagtctttgtctctccctcaggagaacaattgcagtacaccgtccgactccatttccaagcctccaacaacatggcggaatacgaagcccacgtaaatggcctacacatcaccatagatctaggcattcagtgccttgatatccggggagactcctagctggtcatgggacaagtgattaagaactcggaatgtcatgaccccaagatggggcatactgccgagaggtgtgatggctcgaagacaaattgaatggcctcgaactaaaccacgttctccggaaggataacaaagcggcggatgccctcacaaagatggattccggacgagcgactattgcaccaggggttttcgttaccgacctctctgagtcgactgctcgttacgatcagacctgccttgaggatgagtagtcttcaggcattgacccatcgatccacgagctcgtttccatcgtcaagggcagggacgaccagatagaccccacaggttacaggaggacaccatactgtgattacctgaccaacgagacaccccagaggacgagacaa

SEQ ID NO: 170664 - DNA, 638 bp, Zea Mays
tgactttctttttctaactgcctggaaagagagagctcgccaacgcgtccgtcttaggtctgtaccctaaaaattgatcagaaatttgtcgcgaggggtcttccatgagtcaattgatagaggtggcagccttgagtaccacgtgagggttgggccttcgaggacgatgatgaatgatctagccatggttcggtcatctcctcctaaagatacaacgactacttggtagctcatgatatacttatttaggtctgtgttaccattgcacttgggataagtccttgctctattgttgattggccatggtgtggcttggagttgcgcaaagaggggattgtgctgatcaaggtaattgagcccctagaatgagacttgcatcggtggtggcctttggaaatggaagtagttttgattataggatgcgttaagcggctgctgatggggggcttcgttcggcatttttgcgatttcctacacaagtgtcctcgccctttcttcctcttccatgattagctgtctgatccagattttcatgttggttcgccgcgttttggctacaaagacttccttctgcttttgatatggttgttttatgcgaaggctgtgaagttttagttgaccctttgacgagattttca

SEQ ID NO: 170665 - DNA, 430 bp, Zea Mays
cagtatcttgaaaggcagcgtcagtcttgtgaatatactcatcgaggccatcaaactcctcatcttgctgatcatcatcacctttatctttcgatacttcttgcttataatccatccaaacaccatctttgcacactttatcgactttaaaataaatttcatacaacccttctcccaccacaatatctgacgattctggaatactgtcaacgttaattactcccactagaatcctgacaacacccatctttctagtgtatcgcaaatcgaccttttgagtagcacctaaaatagaaccaaccgcccaaagtggaagaaaagatctgatctcatagggtacaccatatacattaacccacactttctgcaggtactggacaggctcaattttttgatccaactcttgaataaccataatcccttcgcctcc

SEQ ID NO: 170666 - DNA, 515 bp, Zea Mays
ggtgaatcaaggcccacgaagtacttgaccgagttgttaggcccatgcaatgcgtgtacacacgtgacacgtcatatgctagttggaattaccgcaggcaaaatgcctgcattttccggtaccaccaccctgcgttcacaattttgcatattcatacgacacgaatgtattgcgctagcacataaccagagtgggcaggccaactgaggactccgtggccttgacagtttcacttcagctccgaaagaaacccccgactgctagtatcgctagttcatggacctcacgggtgttgaccatccatgcacgtacctgtttcagcaggacgataccatggaacagattcgtggacgaaaaagaactctgtgaaaacattgtggcacggtaggcatgtgaaatggaacgtaaggctgaggcatttctggaacgagtacaggtggagctggactaaaaggactgaaaccgatcggatgactgttgaaatgggcgttgctggcttactgatgtcctcaccc

SEQ ID NO: 170667 - DNA, 306 bp, Zea Mays
tctcacgactcacgtgttcctttgcgtgacctcatgtgaactgggcatgttaatttcttacatatgctcattctccagttcaactctggacgctggatgatagatgcttgttaatgaataatgcaatatttatttggtgctgtttaattaaaatcctgatgtattaattatgctgctgtccttctagtcattgcaaaataaagctgcgaaacaaaacgttgatttattgaacaaagttgaaagtcttataattgagtttaaacatgtaagagacgactatgacagtttactgtcttatattgcaac

SEQ ID NO: 170668 - DNA, 983 bp, Zea Mays
ccatgtccctggaaacagcgcgacctaaggatgaacacgagtgttcctaatgatctagcgcgatttagcttaattgaatgggtcgaggagcattaggagaatctaaggacactgaaacagaagagcagagagcatgaacggacctggaatgagctagccacggtgaggtcactatgcgcagtgtttcggaccgatttgggggaaatcccaaattggggctctttggtgagtaattggaggcacgagcgggtggattggatgcttgaatacctaatagagccgagggtgtgctcaatttatagggcccttgagcggtggcccatgaatttgagctcgcgcggtggcggtcggagagaaagaggtgcactggcgcaagcaattggtggcatttaccgtggcaagctcaccggcgatcagcggatgggctaaggtgactcactacggcgtggttaaagcaccgaggcacgtggcgcaaggttgtggggtggctaactccggtgagcctatccaaagcgaccgtgactcaagcgggtacggcggccggagttgaatagtggtcggagtccatccacggggtgatatttgttacccccttgccgttatccaactgggccgagcacgaatcaccgcggcgggtgcgaatccgggcgctcgatcgccggcggtgagttatctaagctggcgttctgatctggccactataccattgaaaacccgattcagggcgcctgacaagccgaattgtaatgcctagatctcgaatttttatgcaacaacttgccaatacatctgtagcaaacttgtagcccttcataccatctaaaattctgctatagcaactaccctcgatcgagcaatagatcttactctaatttgacccaaaagtttggccaatgtcactggtgacctaaattcagtcagtagagtgactgacagcacaactttgagcttatttttctccaaactttgtatgtgatcaaagc

SEQ ID NO: 170669 - DNA, 594 bp, Zea Mays
aatgagtaaggcattaaattcacgaccgctcctccatctaccaacattttagcaatcgatattccatcgatatgactgcacacgaagagcggttttaaatggttgaccgattcttttgacttagtaaaggcagcctctttaggaccaaaatcaaattaagcaacgacaggttcatcgtcaccgataatagtacaatcggttgagaacataataacatttacatccatacctaggtgttctggcatggctccatagtcaaccaagtcctctcccagcaggtcatcctcctccataggtactggcgcgtcatcagaggtgttctggtgcagagcggccgatccagactcgagggtcggacggttcgtgacattaacgaacgacccgtcttttatagtcggattgtccaccgtacctgcagagagttgtgcagttgctatcttgttttctgttttgtggccgtttgatttgcttcgacgacctttggcctctaccttttttgtggtgctgggtactgtggatgtgtttcgttaaatatttttctacttctttttccttgctctcctttgctctcaagcgctgcaattttcgcttttg

SEQ ID NO: 170670 - DNA, 280 bp, Zea Mays
cggtgaacggtaagggtgctgaatcccgagaggggcaggagaaccaccatccagatagtggcgtgcttcgcactcagcacgcaattccgcaacctccgcccgaaccttgcccaactcgtcaagggcgtggtccaactctgtgttgagcacgacagccaagttgaccatgctgttcagcctgggattgccgtcactaactggcgaggcaatcacacctccagcactgcctgtcgaacggcgagggtagtacttcaggttgaggccatcagctaccccgctg

SEQ ID NO: 170671 - DNA, 1350 bp, Zea Mays
aataaaaatcattttccacaatttattatctaattttactactcactggactgggcgcattattatcagaaactccaggggctagagcgcaaaaacgatcgaagactcagtggtgcacctaagtggaccgcgggtttattctgaataaatctaggggctcctacataaaaagggtcggccgaaggggtatgggtttctcagggccgttagatctatttcggatggctttgattagatccaaaccaatcaacacacccgagccatcgatcccgggatcaacagccagaatcaatcccgcgaagtggttatgtgccttttaatcctggctatctacgcggagatcaacggctatgatctactgggttgaaggggtattccctcacttaatctggttcgttcatcgaccaaccaacggtcacctgcaatccttcctgagctgacacacggcgacggagcagagctccccttgcggcggcgccatgggtgaccaccgcgcagaagacgcgcccgagtacggatctcgaatcctatcgcttgaaaacaaggttcggtttgcagaggaacagacgagagggatctcaccggtggcagaaggttctcactaggatttgtaacacggagcaccacggcctcgacggtgtccgccaggacggcggcgagaaattcgaccggtgcccccaagtttcccccccactgccaaccacgcgcacaatccatgcgacatggccaaccatcacgcactcgttgaaggtccgcacaggggtgctcttcatctctctccaccttggcgcccggattcttgaattggtatcgccagcgccggatgcagctgggaattgtgggtgagcggcgactttcaggtctgccgccgagctcggctggatggaggagggtgaggccccaggttttatcctcccccatcgccagagatctcggtcgatttagttgcaacaactcgatccgagccccacggacccgagcgcttgaggttctgttccgatccccacggcgagcgaaggacggggatgaccaaggggacccgtgggtcagcggacgagtgagagccaatggcgctgtgagttaggccgacatcgggcccacagatcagtgattgagaggagcaagcacgcgtgcacctgcgtttccaggcagccacgggggagagggcagtggccatccgttgggaggaaaaaaaaaaggtgtgttgggctgggtgaggaagttttggcccatccgaggtaatgtaattctttctcttttcttttttttttcctttcacttttattttctattttatttcaaattcaaatctaatttgagcttcacatattttattgcacacaataaaat

SEQ ID NO: 170672 - DNA, 475 bp, Zea Mays
caaccgaagttgttgtgatactgctccttgccggtagccttcgtctcgtacaaaagttcatgcatgctgcaaaaacaccttgcgcttggtttcaatccttggcttctcacagcccaaataaacaaacccatcctgattatagcttcaggggtaagttgatgaagaaagatctgaaacgtcttcagtacttcaaccaagaatctgctcaacgggaaccgaagccctgctttcaaaaagcttcggtaaataaccacctcatttacttcaggagtaggatcagcgctgtctcctcctaccatcacaatagtcatgtcgtggaagtatcttcctctcatagcatcaacatgactttgtttgatagtcgattttccaaagatggtatggcttggtcgccacggccgatcttcagaatcttcgtctccactttctgcatcatactcatcactatcgtccgagtcttcagacagatccgcta

SEQ ID NO: 170673 - DNA, 408 bp, Zea Mays
ggcccgttatcactcggctgttacttctaaaacgccaacgtcgccagcagtcgctcggctgttattcctaaagcagtgacgtggctcgaaaggatttggctgttacctctaaaacaccgacatcaccagtaaccgctcgattgttacttctaaaacaccgacgtggcccgctatcactcggttgttattcctaaagcggtaacgtgaccccaaaggactcggccgctaccactaaagcgctgacatcgcgaagaaggcagtctgaaatgcaactcgacggttctaagttgctactcaagcgttacatccaaaaacaacatccgcgataagcataaatacggtcgacgattgacagagaggcaaaatggtgcacacagaatggggcgaaatccttcctcattatcaaag

SEQ ID NO: 170674 - DNA, 520 bp, Zea Mays
gatttggtcattacctttagaatttcttctacgtcagcagcagcaggtgttgaaggagtctctccctctatctcagttgtttttggcttcagagccgcaaccttcctctttttcagaacaaccaccttcggctcagggctggattttctctttgttatagtttcttcatcttctttcaccatcctagcagcttgcctgctcagaacactaacaatcctctttctcttttggcctttggcacccttgttcattcgctcatagtcaggatattcaaaattcaatgcatccatcaccctattcaaccttcgcttcggtcgggtgctgaaggccgcagtcatcagctgatcttcctttttagtgtaattacccaaaatttcgttgcacatggtttctatcatttctaaccattcttggcatggccctttaaattgtttctcaaatttcaactgataaggcagtcgcacaagttcattcttctcctttgtaccctttagcttcggcatgttccattcactcagcg

SEQ ID NO: 170675 - DNA, 542 bp, Zea Mays
ggcaaatcggtgcgcgccggcggcagcttcgtcgtgctgcgggcggcgccgccgcgtacggtagcgatttggggtagacggccgcagaccgttggatctagcgtgtgcggctctgattagataggagataccctttcgcgttgagttgatttggtccgttcatttggatcggacgggtggaaacaaatctagagtaataaaatcctccccgtcacttttgcatccaacagtctctggtggatctcacgcacataaaatcctaaccgcccaaatctaatccagcggtccaccgagcgtaccgcttcggcgcactccagatctgatctgagctctcggatggtgattcaacggccgagaatcgcccgtagcccttcagcctagtcaatcttgctaaagaaaccctagggtttgcaagaatcaacccgccgtccacctctgtagtgccagagtcatatgaaatgttaccccgagacccctggactttccaggaattgaggcccagtccagtacagagttaaattgattaaatgaattggaaattg

SEQ ID NO: 170676 - DNA, 474 bp, Zea Mays
cgtgctcagtgaagtgcagataactatgtatggtgaaaaatctggcgctggggatgagcttgggacacagttctgccctggccgccgtacccacttgcttcacggccggtccagataacctcgccgaagttggccgcctgccgctcgggtgccacgtgcctaagcgcaataccacgtcgcagtgactcgccttagcatgtccggtcatcgccggtggtcttgccacggtgaagtgccacggtaaccctgcaccagtaactctccccctccccggtcgccagcgcgccattccaaaatcaagagccaccacccttgggcactataaattaagcatgccatcagctctgttgggtcatcacgaagccagagcacccgctcctgcctccgattagccactagagagctccaatttctttctctccccaaatcagttttccgcacgccgtgaaccaccgcgtcgtggccagccttctg

SEQ ID NO: 170677 - DNA, 494 bp, Zea Mays
gcgccccctcagcttcgctgcaaccggcggtccaacatgggggcccaggcccacatgtcatgcaaccggcgcgccggttaccgggtgtgaaaaaatcgcgccgccgctcgtgccaaggacacgtcttctcggggccgtcgcggaagactgaaaagataagttttcagaaccagtgcagcgactcgaggcatccaacgcatggcccaacagtgacattatgtacgaaggtcgcgagccagtcagccgtgggaataggcgtagcagtcagcatgacccttaacgggccggcagtaattgcgccaacaggcgcgcaggagcagcaggccaaccgctaatcagactctggccccacctgcaggctcgcatcctcccctgaggcgggcccggggggccactgtcggtaccctgaatcaggggtaccctcttctacagtatgaagacgctgcacccgtacgacacctctaggccacacggagaatggcacccaaccccac

SEQ ID NO: 170678 - DNA, 524 bp, Zea Mays
gcagctagctcgctcgatcacacgtacgtcggatccatatgcatggtgggggtggccggggaacggccggcgggaaccccatggatcgatgcggatcatatctgacgcccgtgagcagtggcgcatatatcccgtttcggccaccggcgcagaccgtgtcggggccccttccgtcctcttccccagtgcggccgtaccgtccgtacgccggcggggtccttccgccttgtctggacgcgcggggcccggccggctgtgtgccgcgtacggcgtctctgcgccggcccgaccaccgcgagtgctcggatctgatgacgaccgaccacgacgcggacgccaaagctagatcagctggtggccaccgatcgatcgatggcagtggacccgtcgtccatcgtcggcccatcgatcgccggaggaaacaaatcagtggatccagcactcaccgtgttcatgccttgggacgacgacgacgacgacacacccactttccctgttactactttagttcgcttgctttaatt

SEQ ID NO: 170679 - DNA, 2145 bp, Zea Mays
gttagcccgatgagcaactgaagactggacgtatggctgtaatttgagaaacacccaatcaccaactgtaaattctctctcagaacgctatttgtctgcttgacgtttcatcctcattttagccctctccaaatgttgtttgaccaaatcagaaataagctggcggtcctgcaactaggcagacaactcagtagaagagataacagcgttatcagagatgccaaactatctaggacgacaaccatacaatacttcaaatggggcgcgacctttatctgaatgcggcgaagaattgtaccaaaattgtgcaacagacagccaatgactccattgactaggacaggcatggacaaagcaacgaaggaatgtttcgaggcactgattgacacgctctgtctgcccatcagattgcggatgatatgcggaactcatctgtaactgctcatcagccaagcgaaacagttccttccacaaattactgaggaacaccttgtcgcgatccgatacaatggaatggggcaacccatgatgcttgtacacttgatcgtgaaaaagacgtgccacggacaaagctgtatacggatgcttgagcggcaagaagttggcatatttggtgaaggtgtccacaataaccaggatgcaagtgtaagattgagaacgaggtaaggcttcgatgaaatccatagaaataatttgccaaagcgaagatggaacgggcaatggttgaaggagaccgggtaaacgagtgcgatctgctttggcttgttgacaaattatgcaatgagcaacaaatgtatacactaaacttttcatccccttccaagcaaaaatttgtttcatccttgcatatgtgaccggaaatccggaatgaccacccacagcagaagcatggaatgcagagatcaatttgtgttgtagaatatcagactgaccgatccaaattctgttcttataacgtaacaaaccatctttccaagaaaaatgaggtacaaccgaggtatctacgcctagctttgcgatgatagccaaagtctgtgaatcctggttatatgagtcagccacttccgtaatccatttaggagtacatgatgaaattgctaaacatgatgaagacagacttgggtgacgagacaaggcgtctgcagcgccattgtccactccttttttatatatgatgcagtactgcaaacccaacagacgtgtgaacatcttcttttgccaaggagtgtgcaaacgttgctcatccaattgtgccaaactacggtgtccgtatgtatgtgaaattctttgagttgcaactagtggcgccaatgatctactgcaatcaaaagagccaagaactccttttcataggtagaaagtctctgcgatctgggtcccaatgccttgctaagatatgcaataggatgtccagcttgcatcaaaactgcccccacacccaactgactggcatcagtttccaacgagaaaggcaatgaaaaattcggaagtgccaacacaggcgctgaaatcaaagcctccttgagagccacaaatgatgcttcatgagatggtgtccagataaacaaatttcctttcttaagtaaggtcgtcaaaggcttggctaacagtccaaaatgccgaacgaatcgtctgtaataaccagccaggcctaaaaaacttcgcagttccttcacattcttaggagtaacccactgagccacaacttcaattttcgcaggatctatagccacaccagccgcaaaaataacatgacccagatatgtcaactgtgattgagcaaacgaacacttcgaccacttaacttgccatttgtcccgaaccaatagctccaagacttggcgcacatgctgcaaatgctcctcaaagctggcactgtaaatcaagatgtcgtcgaagaaaaccagcacacaacgacgaagcaacggtgacaaagtagtattcattgcccgttgaaaggtagccggagcaccagtcaacccgaaagccatcacacgaaattcataatgacccgaatgagtttggaatgctgttttgtgagcatccgcaggaaggagacgtatctgatggtatcctgctgtcaaatccaaactggtgaaccacgatgcctgtcccaattcatccaaaagctcttcaataactggt

SEQ ID NO: 170680 - DNA, 674 bp, Zea Mays
cttttcctaggatgggaagtacgagtagagtccataccctgcaggggtatctccactctctccggtgcattttctgtaggaatatgcgacttcgactcttctcttatatcagtaaaggcatctggcagattatttgctaagttttgtaggtgtattattcgttgaacttcaagttcggtttctatagtgcgtggatcaagcgattggatgctactagcactccattctatttctcgacattctttgttattaaggtacaatcctccccctaatgccgggaaatgctcttcatcgaagatgtatcagcgtaccgaaccgtgaatagatcccaagttctaggctctaaatatttgattatggacagagattcataaccaacatagatccccaacttccggtgaggtcccatagatgtacgctggggtggtgatattggcacgtatacagcacaaccgaatttttgcagatgggaaaccactggttgttgaccacgcgttaactggtggggagaagcggagtggtaagcagatggtctatattggattaaggccgcagcgtgcaaaactgcgtgtccccgacagctggttgggagtttgctatcttgtagaagtggcctggctatgaaatttattcttttaattagggactcagcaagtccattctgtgtatggaca

SEQ ID NO: 170681 - DNA, 1126 bp, Zea Mays
gtttgcttcaatgccccggtgtgaaaccaggaaccccagcaacttccctgcagagacaccaaagacgcacttgtccgggtttagctttgtgcgagttgcacgtagcctgtcgaagaccagggtcaagtcttccactaaggtcgaccctctcttagtcttgaccacaatgtcatcaacgtacacctccaccctgtccctaatcaggtccccaaaagtcttactcatcgcccgtacaaatgttggcaaggcgtttttcagaccgtaaggcattacaacataacagtaaagcccatccactgttacaaaagcagtatgtttcctatcctgtctagacatctggatctggtggaaaccagagtaagcatctagaaaagacaggaggtcgcaccggaggtggaatccacgatttgatctattcgtggaagtggatatgggtccttgggacaggccttattgaggctggtgtagtcgatggacatccgaagctttccgtttgccttggggacgatgactggattggccagccacactgggtgatggacctcttcgatgaagccagcgtccagcggtttccggacctccttacggatgaagtcctgccgctcaacggactatctccgaggcttctaactcactggcctggcattagggttgatcttcagatggtgctcgatcacctccttggggatcccaggcatctgcgatggttcccatgcgaacacgtcggcattcgcctggaggaaggcgatgagcgcgagttcctatttttcctccaggtcacccgcgatgcgagtggtctggggggaatccgcgctgagctggatggtcttggtggggacgccgtctgcccccgatggctgcaccttaggcaccttggcaggcgtcttggtacaggaagtcgaggggtcccttcccccgtcatccgggcgagcagcttctgccgccagggcgtgcaacttctcaacggcggcgagcgtagtagggcggttgcctcgcatggtaaggaccccaacaggggacgacatcttgaggaccaaatacccataatgggcaatggccatgaaccggtacagggccggcctgctaatgatggcattaaaagggaggttaacctttgcaacgtcga

SEQ ID NO: 170682 - DNA, 427 bp, Zea Mays
aggttcctttgctactactcgggcatcatgtgattcttttttatttgtatttattgcttcatcggctatctcgcggccacccttcatccaaacatcggaataaaatttaccatccgttacagtagctttggctgaaggttcatttgtatcgtctatggaaaggtaacttctgcctgggctgcagctttaacatgttcacaaccagctttctccaaaactgctgcaaccccttgggcactagcgaaggcgcagaaatccccacggtcgttaagtatttcgtcaaaagctttagcttctttgccgatccattcaatgactcctttgggttgcctcgaataaatttttgctccgatgagtatgcacccacctttgcaaaactatccttcattttctttgcgcaatccagggatttttcataacatctctc

SEQ ID NO: 170683 - DNA, 717 bp, Zea Mays
atcgccaggggtttaaatcggtacgcaatcatgttcctccgatccgagatcgacgctcgagatccgaccatgtcagtgttgcatccgagccctcggatgggcgacacacggaccggattttataagaccacgctacgatcctaatcgttgatccagggatccacggtccaggccgatccaagccgaaagggtacgcatggcctgatccgagccatccgcggctgaatcaacggcgactgtgttttccagtccccccctacactgggcacggcggcgccgccctgcctacggcgatttctcgccggagaagcgccgccagcgtgcacgatgacccattcgacccctaaaagtgcgcaaaacggaattcatacactcgtgaacacgatgggaggaagcgtaccggtaatcgcacgagaagggacactgcccacgacgcgcggcggcttcccaaattccggtaagaaatcgcggtgacgccaagggtcttccccgtcaacgacgctacgacgagcacccatacgcgcaggcgattctcccaagccctcttccttggcccgaaagtcgacgtgctcgcatatccattggtggggtatctctctctcccaatcgcgagctcactgatggcgctggttcgacatggagagagggcgaggatgcgcgtcggtacttatacacagcggggagggtccgagtggtcgcaacaaccccgagattctt

SEQ ID NO: 170684 - DNA, 628 bp, Zea Mays
gagattatgtgtacctcaaggtgtcaccacttcgtggaatgaggagattcaaagtcatgggcaaattgtcccatcgctttattggaccattcatgatctttacgcaagttggggagatggcataccaactcgaactacctaatagtctatcggatgtgcacaatgtatttcacgtgtctcaacttaagaagtgtctccgtgtccctgaggaacagttaccaatggaagagctcagtgtttagggtgatttgacttacacggagtatcctgtcaagattcttgacactttgactcgagttacaagaaataaggagataaagatgtgcaaagtgcaatggagtcaccatggagaagataaacaacatgggaaagagaagaagagcttcagatagattttccccatcttttccctagtccttcctaaatctcgaggacgagattattgttaagtggggtaggatttgtaatactcaaaagtgcaatgatgagaatagagataatctcaataatttgtggcctctactattcattacatgtgatcaagcctagttaaaagtggataattaaaacaaagaacacataaataacctgtgcatcatgctggagtttatttgattgtgcatttgtg

SEQ ID NO: 170685 - DNA, 574 bp, Zea Mays
cagggccctcgctgccaaagtaatccgtcaaggattttactggcccgcgataatctgtgtagcgaatcgagtcacgaggtcctgcgaagcatgccagaagttttccccccgctcgggcaacccctcgcagttcaccaagctgatcgctcacacctggccacttcaacgctgggggctggattttgtcggaccactacccacggctcaagggaaccttagattcaccttcgtcgccgtcgagtacttcaccaagtggatcgaggccaggacagtatccacaataacgtcgaagaccgcccaaaagttcttctggcaaaacattgtttgccgattcggagtcccgtctgagctcatagtcgacaacggcaaacagtttgacagccaggacttcagggatttctgcctctccatcggcaccaagcctgccttcacctcgatataccacccgcaatccaacgacgtcgtcgagcgcgccaatggcaagattttcaccgctatcaagaaaagacttctcgacgacaagaagggtaaatgggccgaccaactacctgaagtagtctgggccctaaacacg

SEQ ID NO: 170686 - DNA, 1021 bp, Zea Mays
gttgtacgagaattcggcgtacggcaaactagactcccaatctctgtcgaaggctaacacgcaggctctgagtaaatcttcaaggaccttgttgactctttcggtctgaccatctgactggggatgataagtagtgctgaaatctagcttggtgcccaatgcttgctgaaggcccttccaaaattttgaagtgaaatgcgttcctctatctgatactatcttccgtggaatgccatgtagcctgactatctctttaaggtataatcgggcaagggctgctcctccaaaagtggtcttcactggaatgaagtgggccaccttggtgagacgatcgattattacccatatggaatcatttcctctttgtgacctgggcagtccggttacgaaatccatgcctatttcttcccacttccattcgggtattgggaggggttgaagtaggcctgcaggcttctgatgttcagcctttgttcgctgacaggtgtcacatcgggccacatactgtgctatttcccttttcatccctttccaccaatatctggtcttgaggtctaggtacatcttagtggtccctgggtggatagagtaagctgagttgtgggcttcatcgagcagggtttctcgtgcttctcccactggcacgcacaagcggtccttgaaccagagggctccttgcttatctgtcctgaggtccggaagttgctcctttcgtgctctttccatgagcttggtggtttctgcgtccaggcgttgagccttgcatatgagatcttctagatttggcttgacttccaggccaccgttgtctcccagacatgcatttagctgagctgtctcttccttccaatcttccagaaagtttgttcccttaaccccgaaaggtttccggctgagggcgtctgctactacgttggccttcccggggtggtagtggatttcgaggtcgtaatccttgatcaactcgagccaccttctttgacggaggttgaggtccggctgcgtgaagatgtactttaga

SEQ ID NO: 170687 - DNA, 1206 bp, Zea Mays
gtgcgggatatcgtgcccggacacactgcactctacaaaaacatcagatctattgtgtgcccgtcgtggtggggcgcatggggacgcgtggccacactagatggtttggaagcgagagggccgagtgggcggtttggtcgtgttgggtctgggcgtttgacgaggttcacaaaaagttttcttttgaagatcgcaggatgaacactagaggccctataatgaagttttattcatttctttgtttttcaatctttagaatccgaaattataaaataataagagcatactgtttgtcggcggcgagacaacatcactatggacgaatgaaaacgcttgtggacgtggaggtagctagcagaacaaattatcattgagaatttagattagaccaaggcgcttgacgccagtcagccgtcccattgtccgtagcttatcacggcggtgcaccactttgctttaaagccgcgcagaagcgaaatttggccaaagaggccactttgctttgccgaatccgtataaatgatccgcgcgacatgcacaggcaacacagaatcgaacatcgaaaccacagaaccggaaccgaaaaaccggaacaaaaaaaccggaaccgattaaacctgactaattttcggttatcaatctgcagaagccgaactaattttagttttcggttttttattcggtttaaaccggaaaacggaaacatgtgggccatcatttgaagtaggactttttagcccatcacgctctctcagtccatcatgagctgctcgtggcctcaggccctcagctagtcagcctcacggccctccagcctcggcttcaccttgtgcagcacttgcagcgatttgcagagatccggttgctgtcgtctcgtgcagctaattgccactgcagtaaagagtagacacgccaagtaatatgcttcttgctctgttgcggctgcacgctattacgagtgatgacgcactccacattgccgtcgagcaagtactgctgccgcctgtatacccttacctagcaagttcctctgtttagacaatgtgggaatcggtttttttcggtaaaccgaaaaccgaactatatggttaaccaaaggatcggttttcacttttctaaataaaatttaggttaccgttttccagaaaccgaaccgaaaaacgtcggttatctgattactcagtcctaggcacggggcaatcccct

SEQ ID NO: 170688 - DNA, 441 bp, Zea Mays
tgactgcaccagcatggggaaacccataacgttctggagctgcaatagtgccacggtcacgaagatgataaccctgattaaaaacaacatgagagtcatcattgttagtacaagtatcaacaacaggatcatcgtcaggactggccgtgggagtagagcgaggacgacgaatgtaagtctgagtgacatgtggtttggaagagtaagactgagatggtggggaagtggaaggtgatgtgatgggaataagaaaatctggggtagaaacagtaggtggtgatactgatgaagtttcagaaattggaggaaagctcatgaaggaggtagactttgtggaataaaaagaagaattagtggaagagttgtaaaagaagggtcgattttcattaaagctcacatctcgagaaatacgcatgtgacgagaagatgaatcataacgcc

SEQ ID NO: 170689 - DNA, 399 bp, Zea Mays
agctataaccgtggcaagcctggagttactgcccttgagccgttctaccggcgggcgccacgacgaactcgtccagtggaatatcccaccgccgtcgtgatcgtcttcgacccaaattggcgaagaacgtagccggttcctttaaattgagcactaccctcgctccgcctctctattacatgctcatcccaccctctgttagactctttcgtgcaccgtagcctccagtcatcggatttccccaaattgggtcactcacgccaccgtgaggcacccagccgtgattagctgttcccaggtccattcattcccctctgtgtcatattttagcatccttgaatgttaacatagctcgttggctcaaccaattgaacactaccgcaatcaggcatcgagaac

SEQ ID NO: 170690 - DNA, 1548 bp, Zea Mays
gtccgaccgggcgatggagcaggtatggagtatatgtgtatatttgtgattgtatatatgggtgtatgtgtatatttgtgtggtttttgttgaatgagtatgtcgtttctgtagatggcgcatgatgaggaggtcgaaaacctcggggacctggatagcgcactgcccgaggcgtcgggtgcgaaggaggggagtgggggggagctggcgccgatatccaatgttggcgagggccccttggtgacccccgcaccgacctgtgctggcgaggaccccgtgccaaccgctgcaccgactggtggggacactttggtggtggtaggcgaaccagctgccgaagaccctgcgacgtcggccggcccttcacaggtggcgggataggggctagggctatcgggtgtaagattttgtttttgtgatactgaaacttggttgttgcgcaggttccgatgtatgggcctgcgtaagcaaccgctgctgacgatactaattttgtggcagccgcaaccgtagtgcctgccaatgacaatttatctgcttctggatctaggtgtttttcgtctgatggtgagtttgggagtccgttttcctggaccgaagagtcttcggatgaagacttggattattttgttgcgttagatgtggccgcggcggagtcctcgccgcgggtggaggttggcgaggtggctgatcttcctagtgcgaggaccaagtgccgacgacgaagggtggtgtcgaagcatagcgtgggcgaggtttcgcggagtggtaggtgccgtcggatggggatggagcgggaccgtcttcgagtagattgtattggtaaacgagaactattgtctttgccgattgggacgagcattggtgagggggatctgcggaacctttttgagggtgaggaattgaaaataatgttgttcaattatagggaggcaggcatcatcccgaaggttgagccgatgtagtatgtggtgccctcgctgagtctatgtaactgtaacttgtattgtaatgtggcctgttggccgttttcgcatacttgtgctaatctggctgcacccttaggcgacttttgcgtggagtgtcgattggcgtacttatcgcgcttatccggttgcatcctcgggcgacttttgcgcggagtgtctttttagtaaaagactttgattgacgcacttattgtgcttgtccggctgcacccttaggcgacttttgcatggagtgtctttttaataaaagacttcgattgacgcacttgttgtgctattccggctacacccttgggcgacttttgcatggagtgtctttttaataaaagactttgactgacgcatgcacttgttgtgctattccggctgcacccttgggcgacttttgcatggagtgtctttttaataaaagacttcgactgacgcacttgttgtgctattccgactgcacccttgggtgacttttgcgcggagtgtcacacgcgagggtagtctacgctacctgtcacggtgacttcgaattggttgaatgccaaagaccgtcgaagcggtctttttc

SEQ ID NO: 170691 - DNA, 612 bp, Zea Mays
cggctccggtgatggtgaaagcccagctgcaataaaaaatatgttgataaacttcgaagctagaaatgaacaacgaagcgacatttcaaataaaagtacctataatcatagcacgttcagcagcttcttcagcttgtttagcctcctcttgggcgtcgtgagattctttctcattctttttaatggcttcgtcagccatcttacgaccgcccttcatccagacatcagaataaaacctctcgcctagcaaagaagcttcgaccgaggggaacttcgtgtcgttagctaagaaagtatattctggttgggctacggccttaacgtattcacaaccgaccttttctaaaattgccgcaacccctcgtgcaccagcgaatgcgcagaaatccccgtgatcgccgagtatttcatcaaaagcttcgacttcaccaatccactggataaccccttcgggatcaccgcgaataaatttttgttccgaagagtaggctcccacttttgcaaaactatctttcagtttcttcgcgcattccatggatgtttcgtagcatctctctttggaatcccgaagctcttcaacattcttctgcaccctggatctttccatttcgc

SEQ ID NO: 170692 - DNA, 640 bp, Zea Mays
agatgtcacatcgggccacatactgagctatttctttcttcatccctttccaccagtatctggttttgaggtccaggtacatcttggtagttcctgggtggatggagtaggccgagtcgtgagcttccttgagtaggacttctcgggcctccccttttggtacacacagacggtgcttgaaccaaaggactccttggtcatctgccctgaggtccgggagttgttccttgtgggatttctccacaagttttgctgtctctgagtctagacgttgagctttgcatatgaggtcttccagcactggtttgacttcgagactatcgttgtttcccaaacatgcatttagttgcgctgattctttcttccaatcttctaaaaagttggttccttttattccgaatggttttcgactgagggcgtcggctaccacgttgtccttcccggggtgatagtgaatttctaggtcgtaatccttgatcagctctaaccatcttcgctgatggaggttgagatctggttgagtgattatatacttcagactcttgtgatcggtgaaaatgtggcatttgtttccgattaggtaatgcctccatatcttcaaggcatgcactatggctgccaattccaaatcatgggtggg

SEQ ID NO: 170693 - DNA, 2132 bp, Zea Mays
cgtggatcgcctgacttagcgtttttactgcaccggcttgcagtacagctacatccaccgttccttgcatccaacgctcctgcttgcctaaccaaattttatggacttcaatgggctgaaataatggaaaacaggaacacagcccagaatatgtcaatgcacgcagaattagttttggagggaaaccggacactgctactctgttttgccgccataactaataaataagctatttgtctcttgcctttctctttctcggacgttccttcttctcatatctggccaaagaaaacaaagcatcaaattagaagacacaaccacgaaaagagtcaatgagttgaaggttgttctatccgagccatcaagttctgcccacaagatggacaaggcaaatggagagcagaatggttccaaaacgtaagtgatgatacctccagaatttttttcacgtcaatctgagtccacatagttaaaagtaaactagctacaaatttcaaaggttaaagtagtagtgttgtcgccaaacatttctttccacttattaaatgtctctccatatcatttcagagaaaatggcgtgcttaatttggaaccgtgtgttgggatgaaatttagagatgaggttcaggcttggaaattatgggtagagtatggaggctatatgggattctcagtcagaaaaaggtacaacaataaaaggaaggttgatggcaaaattacatcatgtcgttatgtttgttccaatgaaggtcatcgagcacgagacaaaagagatcatctagtaaaatgtcctagagctgaaactagaactgattgtgaagtccgcatgtgtcttaaaatggagggagagggttatgtagtatatgagctatttctggagcataaccatcaccttcacttggcagagacctcacatttaatggtatcgcaaaggaaaatctcagaagtacaagcttttgaaattgagaccgccgatgattctggaattgggccaagagccgcacacgagttagctagtcgtcaagttggtggatcatttaatctgagctatacacgtcttgatcataaaaactatttgcggaccaaacgtgagcgtgagatggcatatggagaagctgggagtatgttaaagtattttcaagataaaattaccgagaaccattcatttcaatacactttgctaatggattgtgaagaaaaaattacaaatgtgttttgggctgatgctaaaatgttggttgattatgcacattttggtgatgttgtcacttttgacactacttttggaactaacaaggagtcaaggtcttttggtgttttcgttggattcaatcattttagagaaacagtgatttttggtgctgttcttttatattctgagacatatgagtccttcaagtggctatttgagacctttgtacaagcacacaatggaaagaaacctaggacaatctttactgatcaggattttgcaatgggaaaagctgtggaggaagtctttacagaagcatggcatggattgtgcacatttcatatcatgcagaacgctatcaaacatttgtctaatgaacagaaatgtgatgactcaaatattttggctagctttagtgcttgcatgtttgaatatgaggataaggaacaatttgaagcagaatttttcatcttgagaaacaaggtgcaaaagaaaacttggttggatagtatctacaggttgaaagaaaaatgggccatcagttttatgaatggtgttttcactctaggaatgagaagcacacaattaagtgagagcctaaataatgacttgaaaaatcatttgaaggcaaatttggatatccttcggtttctaaggcattttgaaagggtagtgcaaggcaaaagagacaaggaactacttgcagaatttgattctaggagaaaacaacccagaattaaagtaatgacacccatgttgttgcaagtaagcaagttgtacacacccattatttttgaagctttccagagtgaatatgagaggtccatagcatcacgcattgaagtgttaggaaataatgaataccttgttgccattgcaagtcttgatcaagaattaatatttgaggatgagcatagagttactggaaatcccatggagg

SEQ ID NO: 170694 - DNA, 489 bp, Zea Mays
cagtgccaacaagcattagttggaggttagttgcttgcaatagatggggcatggagggaactttgacccggctggctgaaacgtgacggagcggaccctgctggcttgttgaagctcgaccctttgggaggaaacccgaaagatcaaactctctggtgcctgtcctgttgctgagctcgaaggacttgaaacttcctcttgaggtgaccttttcttcttctctagccctttccacttgtatggccttgtttgagaggtgcgagaagctgagaaaatcttggctggcaaggatagtcttgagttctggtcttagccccttcaagaaacgggccatcttcttggcttctgtgctgacatcatcaggcgtatagcgagccaattctgtgaacttgtggacgtattcactaacatatctccctccttgggttaattcccgaaattcttcttctttgagttggtcgatccctaggggcacatgatgctctcgga

SEQ ID NO: 170695 - DNA, 428 bp, Zea Mays
catgagtgtgtggccttcatgtcacctctcggtgaactaatgtgtaacatcttcttaagggggtacttaggtatgttgtgcttttccacaaatgactcagttataaatgaatgtgatgctccagagtcaaataaaactgatgcaggtatggagttaacaaggaacataccatacactatgtcagcatcctcaggtactgattctacggtgacatgatggacccttcctctactctggttctgcggagtcttgttctgagcagatccacgagcgggggtgttctggtcatttctctggttattgcttttatgaggtgtctactggttgcgccttgggcagttgttagcatagtggcccagctcaccgcacttgaaacaaccattgggttggactggtgcgttgttgcttctggcttgtgtgtttacggc

SEQ ID NO: 170696 - DNA, 470 bp, Zea Mays
tgatgacaggttgattctataattactcggggtctatttagcaaagctgccgcccgaaggggtacgggctgtcctcggtcgttcggtttaatacaaatgatcgagattagatcaaattctttatgaacagatgtcaaatgaaaaccacacaattccatatctacggtctatacttttatgaaaacgcgatctaatcctcaccgctcatccatgatccaacgaccatgatcaaggttggtccaaacagtgcacttgggttgcataggatcgtttgatccgatcgctcggtccatgattcccttgctctccccctacactggccgagaacccaggcggtgccgccacatgcccacgacggtcgcacgacagcgcagactcgacaagcttctctacgagccaaactcaacatcggtcagtgctaaacaaaaccgagtgaaccgtgaattcgtaaaggtcctgttaccgggaac

SEQ ID NO: 170697 - DNA, 441 bp, Zea Mays
ggtggtccgaggggacatgaccacatgggtatggatatatggcgccacctgggacgaaatcttgaggaataccgtggagttgtcgctcttcattgattgattgaatatgttgcgtcgtcgtgggagagggagggcattcagtttgtggcaagaattggatgccaacatgtctgttggcctagcgtctgcggcactgcttgcgttgttcgatccttgctaggctttgcacaactctcttctgttgcatttgcttggtgtagcctccacgcagttctggcgcaacacagcaccgcttgcctgcttcccttgggatatgccatcgtcaggaaaattgcggtgtctatgaggatcccattgccctgcacatttcatcactgtttggcactttggagttccatagttcatgtttagcagtggcaggatctaggcataagcttttct

SEQ ID NO: 170698 - DNA, 587 bp, Zea Mays
ggtgaagtcaagctccaagggctgggcaagtgacgatcacaagcacatgtgggtgctaaaacacgaacaacaagggcgaggacggacctggaatcagctagccgtgagtaggcggttcacggcggcgcagtcggccgaactgggggaagaaggaaattctctagttatggtggctaattgagggtgagaacgggtgcttcggcttcgtgataacatggtgcaactgacccggccttcaatttatagaaatactaagcggtggtgtccaattttgaaaggagagaccggcggccgagaagagagatgagtcatcggcgtgaactgtcgtggcgcttcctggggtaattactccggcgaggaactgacctcctacggatatctacggcgacgtggtacatcttctaagcacgtggcgtggttataatcgtcggcgaactccgacgaggacactgtcgtccactgcgcggcaggtgtcgtggtgaatagtccggcgataagcttctctcctttccccgagttgagatctttctctgcccttgattatccgtgagtcccagcgcacgaatcgcaatgatcggcgttaaccg

SEQ ID NO: 170699 - DNA, 407 bp, Zea Mays
atttgcataccgcagattattccccaatcgcccaacgtgcgcatatagctggttcccgcgtgtatttttgcctcttggtgtaggaagaccgaaagcgacgacagtggcggcacgagaagcttgagaggtgctggaggcaataacgacgacgacaacttggcgtgtgagatgtagctcgcatgctctgctgctctcataggcttgctgttcggcttgtggtggaggaggtggcagcagcgacaacattgttgtttggctacaaaccaaacacacaccttagtctatcaaacttgtctaattttaggcgtgacaaatcgtggtgagtgtggttgcaataactagatttttatgttgatttctgataatgctaataagaagaaagcaaactgtttctgattactggataa

SEQ ID NO: 170700 - DNA, 572 bp, Zea Mays
actcaccgagcactactcccggagcttgctgagcctcttgagcatcgacgtggtttactcgtgccctgccatgatactgggtcttgttctgctggctgatggaggagggtgccttggaggcgggcgctggggcactcttggggccattcactgagttggagtaagtaggtcctgatgccttcaactgagggcagttattcttgaagtgactggggttccatagtgccaacaggcattagctggtggtttgttgcttgcaactgagggggcctgaaaggagctctgactctgctgactgaaacgtgacggagtgggtccagctggcttattgaagcttggtcccttgggtggaaacccaaaggatcgtctctggtgccggtcttgctgctgagctcggaggacttggaatttcctcttgaggtgacctttttcttcttcccttgccctttccacttgtatggctttgtttgagaggtgcgagaaactaaggaaatcttggctagcgaggatggtcttgagttctagtcttaaccctttcaaaaagcgggccatcttcttggcttctgtgctga

SEQ ID NO: 170701 - DNA, 476 bp, Zea Mays
atttctcgtgacacgagtcagtgtatcaagaatcttgatgggatactcagcataagtcagatcatcttgaacactaaggtcctccattggtagctgctcttcaggtaccctgagacatttcttcagctgagatacatgaaggacatcatgaacatccgcgagatgatccagtaactccaattgatatgccacctctcccactcgctttaagatcaagaagggtccaataaagcaagaggacaactttcctttgactttaaatcttctcatacccctgagtggtgacaccttcaaatagacatagtcaccctccttaaactctagcagccttctccgggtatcagcatagcttttctgtcttgactgcgcagttctcaaattctcccttatttgatggacttgttcttctgcttcttgtataatctcaggcccaaacaactgcctttcaccagtttgatcccaatacagtggagtcc

SEQ ID NO: 170702 - DNA, 651 bp, Zea Mays
ttgcgcacattgaatgagttgaaaccttgttacaataaatggttgaattttcagaatattttcgtttgagttgcttcatctattctggatgtgtttgttttgtcactaggaaaagcattggtataatactctagcaaaaacaaggaagattcagttaggctgcatattgtgatatcgatattaactttatgttgtacatagtattagttatttagttctaatctattgcttgccttaaacactagtgacagctgtcagttctttttaaagcttccatttgatggcctaataattgatcagccaactaaatgactttctatcgacagcttgatggtcactgcttgctgactggtgagcagcaatagggcttgtctagaaagtgaggtacagacataaggcaaccttgcattcctgatcaggtaatatatcagtcttttgcttccactagtgcagaggcggatccatagggggggcaaagtaggccatggccccccctcaattttgtacacccttttatgtatatgattatttagtattaagtgtagaaaaaaaatcaaagttttagatagtatagagtcttgttctaaatctctaaaactaatagctagttgctaaaattagtcgagaggtttagaatggatcaactaattg

SEQ ID NO: 170703 - DNA, 706 bp, Zea Mays
ggtgcgcgacacagaccgttggatcaaaaggctacggtcacgatttaaaacactagcgatggaatctcatacgcccggtcccaatccaacggcttagcctcgatggagcgaaagggtaaactaagatctaatcctagccacctatcttgaaatcaacggccacagacccgtcttctctcccacggccgagtcacagcggcgccgcccagaccatgcgacggcgccatcgccggtgcacgcgatacatcaccccggcgcgctattcttcaatccaatgtgattattacgaagtggaagcgatggcgaacacaatggaagtggtcttaccggcgctggtgcggtggtgaggccggtcggcggacccaggcggaggggtgattactggcgcacgattctagcagcacagggcgcaattccggacaggcgaagctcaatagtattccctgtggcatggcgagcttcaccggcccgattccgactactcgacatcgccggaggcttcgaatccaccacggcggcacctgctctactacttcgcctcgccgtgatgcgattgatgagctggggcgagcactggggttatatagtgtggggcacgtgggcaggcagagtccacacggtggaggactttatccccggaatcaggtgacaacaacccacccgaatccaaggggaagactccgagtcggcatcttcgtagtttctg

SEQ ID NO: 170704 - DNA, 683 bp, Zea Mays
ttcggtgtctccagaaagcttagcccaagatatattggaccgttcactatcttggcccgagtgggcagcttggcttatcgcatgcaattgccggattccatggcaggggtacacccagtttttcatgtctctatgctaaggaagttcttacgggatccgaaccatcagattgagatggaaccaattgcggtgcagcaggatctgaccttggagtttcatccggtgcgtatcttggaatcctcggagcgtgttttgaggaagagatcaattaagtatgccaaggtcttatggactaatcagtctggcgcgaggctacgtgggaacttgaggagctgatgcggcagaaatatcttgaactttttgttgtgggtaagtgttgttgattcattatttttttccttttgtcgttccgatagaagcgttagaattcaaggtcaaattctttttaaggggggtagagtgtgatacccagtttgtaaagaggagaagtggaggttattctttttgttctttttcctcattcgggtgatgcgctttgggaatttggaatttgtggaaaacattcacctgtaagatagtagaatttctttggttagttgtttgcgacggggtcaggagctgtcacgtggccgagttgggccttgaaccttgatccggcccattagtctcccctaaccctagct

SEQ ID NO: 170705 - DNA, 836 bp, Zea Mays
gtcgacgcaagcctccattgcaccatcatccactggctccgataacaagtcttctgggaccatatcttcgagagtctgatcaaagttggctagggacagttcttgcagaccaatgagggcagacagagaaggagagggaactccactactttcaccgctggcgatgaaccgccgactgtttttccgagtcaaaggagcttcaatctcttcctcctcatcatccacattggcaacacaaacagcacacccattggggtcaacaacagatggagcacccccattggggtcagcaacagatggagcacccacattgggatcagcagcagattggggacacccattggggtcagcatcaataagtccagtcgcaggcatttcttcagtagcaggaaccgaggtactagcgtcctgatcaaagctggatactcaccggaggcgtcttcttttcttcttctgctcgtcagcagaaggatcaggctgattggctcggcaaggacgcctcgggcgagtactaacaggtttctgagcatccaaagtcgactcaacctctgggaggggcaccactgccaacgccccagcaggagcagcatcagaagaatcttcaactagcaaatcaagcatagcgcttatatctgcatcactaggattcagaggcacctcaaaatgaacctgccgttcgtcatcaggaatctccccaagcgaagcaaccaaagcactgacttcttcagcagagggtcgcactctaaggcccaaactgccatcagtaatgggtggattcgacacgaaaagggtgaaggctttgggaggaggcaagttccaggccgagtacgccactg

SEQ ID NO: 170706 - DNA, 574 bp, Zea Mays
aacgcaatcaccagaagaacttgtacacaactatttttgttttcaaaaaatatccgcgattcctaatgccagtgagtattttctaaagtactcgttttttttttgcattattcactaatactgagaggttggcagaggcagttctgcatgggatcacgatcatgaaaggcttgcaatctcaatagatcggtcatgctggcagtagatgtcctggtattagaaccgaccgaggcaatgttgagttcacatggatcagtggatcacaaatgttgaagccttgaaggaaactacactggattgaggatgcataaggaagcagggtgtggtcaaggattcacagaaccaggttatgaacattttgaaaactggatcactacagtttaccactgtaagctgatatggctggtaaccagcttggttactggtattgttttagcctactctggttagctattttttttatttgttcttttagaaattttctaagaagggtgcatggaactccaaggatgcattagaactaagaatacatcaacattaatgaggtcactgcataccgcccagtaaccactat

SEQ ID NO: 170707 - DNA, 812 bp, Zea Mays
tgttgggtaagtcggcttcgatgcttgcatgcaacgtgagtggagggagccacgaagatcggcttcggcgacttgcatgtagcatgagtggataagggggcacgtcgttagttggctaagataagcattaccgtcttgcgttgcagccagtgatgtgtggctaaacaactgagagagagagaggacgaggagacgctctggatcgagtttagtttgtattgcttgtttggtactctaatgccagaacattagtgccgtttcatctcgacatcatctgactttgtcgagtgtgaacaaaacacttgaaaacaatgtatacgtggtatggttttgtatataagagccgtgggctgaggttgcctgctctgcatgcggattacgatgtctaattatatatacccgccttcatctcctactgatgtatcgtcggagagaggatggcatgtattggcgtagcacactcccttacctagtcagaccaagactaatcaaagctccagctagctatggacaaatggacaaataaatttctcgcccgggaagccaggagtaggaggacctaggggctagggctggctgctgccgatgctcccatatcagacaagttgacgtcgtgcacgttctcacagccgtcggctacgccaataccaacatctacgtacgtagtctacagtcgtgcccgtgcattatataggatgacagtacggcttgcatgtagcgtgagtgggagggcagctgcatgcatgcctacatgcatgcctgcataaagggaggtgagggcactttgtggtctacattagcttcttaatagt

SEQ ID NO: 170708 - DNA, 801 bp, Zea Mays
cgagttcaaaagtcttaccaaagtcaggaagttggagtagtggcgtgtgagtaagcttctattttaaaagtgcaaaagaatcctcttgtgactgcccccaattaaatgaaacacccttctttgtcaactcatgtaatggggcagcgatggtgctaaaatccttcacgaaacgacgataaaatcctgcaagtccaagaaaactccgcacttgtgtcagtgtcaatggcgttggccaactctgaatagcctgcaccttggcctcatcaacctcaataccctgtggagtgacaacatagccaagaaacgatactcgttcggtgcaaaaggtgcatttctcaaggttagcaaataagcgcgcggcgcgcagagcatcaaaaacagcatgtagatggtcaagatgttcagataaacaagtgctgtagatcaagatatcatcaaaataaaccaccacaaattttccaataaatgggcacaaaacctcgttcatcaaacgcataaaagtactaggggcattagttaatccaaaaggcatcactaaccactcatacaagccgaacttggttttaaaagcagttttccatccatcacctaatttcattctaatttggtggtacccactacgcaaatcaatcttagaaaatattttagaaccactaaactcatcaagcatatcatctaatcgaggaatagagtgatggtaccggatagtgatgttgttaatggctctacaatctacacacatgcgccacctgccatatttctttggaaccaaaatgacaggaacagaacaaggactaaggc

SEQ ID NO: 170709 - DNA, 497 bp, Zea Mays
gaggcggtaggcgtggttttatccgaagccatctgccagggggagagaattactactatgcatatgccaatttttttcttcaatcatgttattttattcatcacacaagttcattacaagcatatagttaccacaagtcacactacacgcgagtgctttctaaggtgcttccgaactccctttctaaagtgtccccaaattccttgagaaggtcgtcaaggctagctagggacatatcctcgacgtcggacaggttctctatcctggagggaggcagtgctggtggggcttcctttttccgctcagtctggcatgcttggctcttggtcctcttccggatcttcttagtgggggcgagcttctttaacttcttgtcgtaatccatcttcagggttcggtaggcttcacgagtgttggcctcttcaccttctgctatttcgagactttcttggagagacgccttctccttcttaagttccttgacctgttgctctaag

SEQ ID NO: 170710 - DNA, 596 bp, Zea Mays
catcatttgattcaagtctgctactccttctaataccttcaacatgatcaagttccatattcatagcttgtttttcaccataatttttctagttccttcagtttgcgcaccaactaggattttgctaattttatcttggtgggagggcagaacaacatcatcatcttttgcaaactcctccaaatcctgagaactcaagaggtcatctccactctcattaaactcctcatcctcatttataaggttatcatcataacctttatcctcatccacaggtttcacatcttccataccctccgccacttcagaacaacgtccagagtttttaccttgagacataatgtcaccattgttttcaagcctcagctcttccttatctgttttgtccccaacatttctagcctttttgtcagttttttcaaaagtaggatcatcaaatccttatctgtcaaccgaagctcttttacctagatttatggaatcatcattccatccttcatccgtgatattatcaattttgaaatagatatcataaaggaagggtttaacaccaacctctataattggaggaatcatagccacacttttaacatgca

SEQ ID NO: 170711 - DNA, 425 bp, Zea Mays
gggaggaagacaggtctgtggccgtcgatctctcaacggggtctacaattagatcctagatagcttttcattccatcgtatctgggtcattggatcggcgacaacggttcagattagagctaggataactcttcagcgattccaaatcactgccgttggttgcgcatctggcgatcgcggatgtagtggcgacgtggatggatatgaaccactgatctctgagcatgtggcctacgatgtgtaatggttcataaaatgtgggatttaatcctggccatctgctttagatcgtatgtctcatctctaccggtaccccttcggccgatggactttgtaaaagaaacctagggaattagttaaacaacccgcagttcccagctgtgggaagaatactacaaccgggtccagaactttttagagtagcc

SEQ ID NO: 170712 - DNA, 499 bp, Zea Mays
tagtaaggtcctccattggtagctgctcctcaggtaccctgtgacatttcttcaactgtgatacatgaaaaacatcatgtacatccgccagatgataaggtaattcgagttgattggccacctctccaactcgcctaaaaactctgaatggtctaataacgcgaggggacaatttgcccttgactttaaatatcctcattccacgaagtggtgacatcttgaggtacacatgatcaccttcctcaaactccagtggtcttattctattatcagcgtagctcttttgcctggtctgagctaccctcaagttctccgtgattacacagacttgttcttctgcctcttgaataagttcaggttcaaagaactgacttcctccagtctggtcctaatatagaggagtcctacacttcttgccatatagagcctcgaatggtgacattttcagcctggcctggtaactattattatatgagaactcagcataaggtagactctt

SEQ ID NO: 170713 - DNA, 626 bp, Zea Mays
acgtcggcaccatgtcggctaagcggggaggtggcggttgcttcttggttccagtccctcgggcactcgctctcttgcccgacaatgactgggcgcccaccaccctacgccatgtctccaactcgttgccaagccttcgtgaggtacgaccacccaccacgagatacgtgcactctccctccctctctttcagtgatgaccgggtgcccgtcgccctacgccaggtctctggcccgtcgccaggccttcacagaagaaagaatggcattctttaccagatggccggatagacataggtagtaatcattttggcatctcgaaagataactcgatctttcatggacgacaagatctagttaccatcatcatcgtcgatcgagttcctgctggacagtgacacggtaaatgattgagttggtctgtgtagatcgatcagtgcagatgactgtagatcttcagattatagagggggaaacaaatttttttcctataattttgcagtagtatcctaatcgaataaactatatcaagttgtcaattatgcatgcatgacgacggcaacactagtgcagaattgtaggtatccaggacacccaaccggcttggaacaagtagatcgaccactt

SEQ ID NO: 170714 - DNA, 594 bp, Zea Mays
tgacggctggcccaattagaaatggtcgaagcctgctcgcccaacgccagcggcggtagatggcccacagaaacacccgacacaggctccacccgatgagaaataggcttaggatgtccaaccgtattcccaggcgaaataagcggcataggaaaatttctttccttggaaagagaaaaggaatttgattttgaaccacaccgaacgtgcgaaaaagtcggcatgtcatccttcctccacgccggcgagcaaccaaggcgggcatcaaccttatttgccgacagcgtcacatggccgagagtaacggcaggtggcgagcaagacgtcggtaatggggcttcgcaaggattcaacacaccaacgggtttacgagaacgtacctgaggcctgggcaccgaatccaggagaaccttccgctcagccgccgcgggatcgaccactcgtgctgcataacgtccagcaatccgatgatagaaatcttcacaccttcttgaccactgctgccttgtcgcttgaatctcctcctggcgtataaccgaacgtctacaccgcgcaagccgataagcctccgtccaccggaaacggggacgagac

SEQ ID NO: 170715 - DNA, 434 bp, Zea Mays
cgttcacggaccatccttctatttcaatgttcgttcatacagatcgcatcaattcaatactttataatttcgcattagaaaaggaaaggaacacccacgttccaaaatcgtatcagtaactttggtctttcagaacgagtttggaaaaactcaaatctctacaatattaaagcgtcaatttcaatgatcgtctcgcatcatcattttacaaagaaccatttgtatttcttcaaaatcaacccacgctaccagattatatctcatctctatcctatttattcgcacaacaacattctcgtagctgtcgctctagcaacaaactccgtccatttcgcaacaacctccacctgcttcttacgtcgttgcaccgccaccagcgaggaggattagggcgctcatctccagataaggatgctcactagatgataaaagtt

SEQ ID NO: 170716 - DNA, 308 bp, Zea Mays
gggcacaacaccaattgtccaatgctaatgaggatagaaacaaaatggcttgggatgacatctatggtgatgatgattttgatcaggtaataggaggatcaggatcaggtaatattgatccctcttctgctacctttgcaactgcagcctctgtctcagagttatcttcatatcttgacagtgatactgtctcacagttcaatgaagacttcaacatattgagttggtggcatgaacataaacttacctacttcacttttatatgaacaagaatcttatgatgtgtatgcgctcactcttattattat

SEQ ID NO: 170717 - DNA, 591 bp, Zea Mays
ttgttctctagggacttgtattctgcggggaggagatcgaccgatgggctttgggtagcgtggttcctctagtgttgtccgtagggttgttcgtggtcgtactccatcatggcgtactgtcttgtccactcgtcgtatgtgtcctttttgcttgtcttccgctgatattctcgtggtactacacgggggtcttgcaaatcagtcatatgagttggtgggtgtcgtgcgatattgcctatcgtcacgagcctacgtcacttattggcgtgcgtaagcatacatttggtatggtgtatctattgcacactacccgatattctggtcactgtagaagctctgatgctgagatacttcatgaatagggttggtcggcccctcgaggatgtgggagttcgtctggagccgtacttagagtggtgttgtcatgtcaatagtggccactcggtgtgccctcatcttgccattcgagtgactggccatagcctagggtgtcatgtcttgtcttagtcgacatagattttgcgacgtttgacttaggtttccaccttgcatctctttctcggcagggacttggttggccgccagcttcgt

SEQ ID NO: 170718 - DNA, 1055 bp, Zea Mays
gtgttttatttgtgcatctaaaagtaaaaagtttggaattcaaacttgagtttgatttgaattttaaatagaaattaggaaaaataaataaatgaaagaaaaagagaaggcctcaccctgtgctacctgggcctcttcttccctcgcgacccatctccctggattccgtgcggcccactccctgttcacttcgcatcccttgcggcccacctctccttgcgctcgcacctgctgactacaggggcccactaatcagcctccgccgcctcgcgctcactgccgctcatgtgtggcttcccggtgggcccgccctgtcatcacccttttccttgctttgtgctcctctcaacggattttgtcgttatcacgtggtggccagcacaccgcaacagagtccgaacttgccgacgggatcgggactctgaaatccgcattcctctagctataaagcatggcccgcgatccctcctcctcaccccatccgagacggaagcaccgtcgccgagcgccaccattgccgcgggagaagaagagtgggcaattcacgtgcaccgctgctcgggatgatatgggtagtcggggaggctcgccggggtatggggaaaccaatgccccctaatttggcgatgtgatgctcagggtggacgaaatcgcacaccaagcttccgccgccgccgcggatccgccgtactctggggctagagtttataggtgcacaatccacgataagatgcccttgaccgtgttcgtttcttcctcctcattatttttgtcggtgtacgttcgccattttgcgctggtgctcggggctaggtgggtcgtccatggtgaccactgcgggtgggacgctgggtgccgccgcatccgacctcgcgaagaagaaggcgtactggtcgtggattcaataatagatggcgcggattaaatctcgcataccctttcggctagaacaggtctgggtcgtagatcatcgatcagagggcctgtactcgatctgtagcgtggacaatttcgggccattgatctttgatcctagggcagtgaacgcatatcgg

SEQ ID NO: 170719 - DNA, 433 bp, Zea Mays
attccacatcctaattaggttttccttaagagtatctttcctatacttggaatcagagggcagggggagttgggggatggttacgtaccaacttccttaggtagacaatcggggtagtatttgcgtaggtagtcctcagtctcccacatagcctcttcttccgtatggttgctccattgaatcttatacatcctggtcgtctttgcacgagtggacctttccttgtagtctagaatcttggaggggtgttcttggcttggttatgacttccgttggtaaccgaatgcacttcttcaattgggacacatggaacacattttgtatggtagacattttttgtggtaacttcagcttgtatgcactggaccacatgcctctatgatcttataaggtccaatgtagcgcgagctagcttgcctttgatcccaaatct

SEQ ID NO: 170720 - DNA, 480 bp, Zea Mays
ataatttaataacttcatcgcagtaggtatgatcaaactaaataattagtcagtgtacaaaggtgccacaaagtttgaatttaaattgaagtttgaatttggaaagaaggaaaagataaaagaaaaggaaaataaaaagggaaaagaataaaacctaactaggccgactgtccccaatccagcccacttctgctttcctcagcgcgtgacagcccaacctgaaattggcgccgacatctgggccccgcccgtcagccagtgacgcgctccgctcagtgctgctgcctggcatgcggagcccaccgctcggccatagacgaaaattgcgtgcgtaccctaaagcctccctgacacgctggccccactcgttcggccgactccacccgcgcgctgacgaacccggaccacttgtcagacggctctgtggctcttccttgtgagctcaatgtctcccggcaacagaatcgcggcagcctctcc

SEQ ID NO: 170721 - DNA, 373 bp, Zea Mays
tcggccacttgagcctggagcctagcccaccctctctccctccctcatttgcgcacctgcagacctcccttccacctccccccacgctacgcgcatgccaaagcgccaccgccattaaccgccgtcatcccgagcccgtttctccgtcgacgttggagccccgccgtgccctctgccacggtgagcttcgcctcgacgtccgcaacccgggacatgccccaatttcccctctccctccctaatttcctctgcccgcgctcacccgccgtcctctacgcagtcgccgtggtccaccaccgtcgacccggaccaccgccgcgccttcaccgccaccgaggagtccccggggttcgccttgaggtaaggaacctcc

SEQ ID NO: 170722 - DNA, 562 bp, Zea Mays
accaaatatatactaatgcactatatgttctagagtacaaatcaagcatgaagataactataggctgatggctgcatgtagggatgcaaattggtctaaacaacatgatcccaagtgacctaagccatcccacatgtagctcatgtcctaagctgcccagaaattccattatgtttctagtcgtccacctcctagtcggacgactaatcgtcatcagtcaatgattaatcggatggccagaaactaatcaacttattgagttgtagctcccctgcgaacaacccctggtctaactggttaggtgatgtagtagcaaactctcaggttctgagttcaatttctagtggaagcgaattttcatacctgggttaaaaaatcccctcgctgtttctcacccgctcttgggctacagaaattatgtgccccaccctccggcctgggggctattgcagagtgggcagagtcggtcagttagtgatgggaggctagggtttgggggctttctcgaccagaacttgcggtttcatgacttcttatatgaatgttgttggggtggcttaat

SEQ ID NO: 170723 - DNA, 499 bp, Zea Mays
gttcctgttgcccacaataatagatgaaggatgagacgagagaggtgggtgggaataagaaagtataccagcgtctggtgtggtgtggtaggaggcaccagaatcaacaactcagttggtgacaataggagtcagggtcatcgtgctgaacgagctagcaagtaactgttgatcccacccaccaggccacaaattctaggatagaacaaagtggggtgataggagtagtaacgttggttgaggtgccggtggcgcagagggaagtgggccgaaaggataccccgggttgggcatcgtcaggtgtgccagctaggtggaggcagaagcggggaaggtccacctagggacaggccatgccacatggagatgcgaccggttcacgggttgtagagagtgggccaatgggcgtccctttgtccaccccatccccacgactacccttcctccaatgacgaccacccccaaccctgcacccctttcgaccacgggtggagggagg

SEQ ID NO: 170724 - DNA, 808 bp, Zea Mays
cttgggcctaaaccacgcttccggcccatcctgtctttctgcgcggcccagggctgatgttggcgccgacgtgtggtcccgcttcgtcagtcgcacgcgctgccctcttctgtacgctgacgggtggaaccatctggtcggcgtctccctgcgcacgatgtgcatggcgatgacatatggggcccagttgtcaggtatccccttcacccgggtttgtcggcactgcaacagattcctccgtcccggtcgcgaccgatatggccttgcgcctcgaccataagacccacggaacccacgccctatcattcccagggctcgcgaagccgagtcaagaacctccgccgccgcatacttactccccgcgcgtcgtccgtccttctcgcgaagccaaccaccgagctcacctccgccaccgctgtcgaactcgcgaaccgtgggcgctgtgaattccggggagcaccctggtgctgcgccgtgaccctagaagcttcggtcgccgttaattttccccgacggtgtcctgcgcaagctcaattggtcgccggaatccctccaccgccgtgtctccgccgtgtgccgtggctgctctctcccgtaacccgtctctggtgagtaggccctgcacgatattcactttggccttgtggtagtatagcacctattggatttgggttttgggcactggaacgaggaatccaccgactccggcgagggcgccaccacggtctatgccgcaccaccgcgactggatggctgggtggggaagataagcgatggtcgttgattcgtgaatgtgcggcccatatta

SEQ ID NO: 170725 - DNA, 493 bp, Zea Mays
tgaagttggtctgctgaaagaaaggggtctgactgctgaagctgtggttgctgattttgttttcaagaatgttcagccgttgaaggacagagcatatccggcttatctgtatagaggcctagctgacctgactcaggttaccaacaggagaattccctctgtagacttggtgaaccgacttgagatgatccttagaggcaaggtatcaaatattggcgccccaatggcatattcagcatggaacctgccttctcccaagaccttcactctttttgtgtcgaatccacccgtcactgatggcggtttgggccttggagtgcgaccctctgtcgacgaggttaacactttggttgcttcgctcggggaaattcctgacgatgaacggcaagtccactttgaggtgcctttggatcctagtgacgcagaaataagtgctatgcttgatttgctggctgaggactctcctgatgctgctcctgccgggacattggtg

SEQ ID NO: 170726 - DNA, 695 bp, Zea Mays
cttttactcaccatgtttgtgattcctcctccccctccctgcctttcagctgtttacatgatagatagaggttctgccaaattgtggcctgtgacactccaaacaattcatgcaaacaaaagcagggatttgccggtctaccattacatcctgaaaccatcaagctgtgacatccagctgcaggcggttttcttgaaaccataggtatgaaatgaaaccatgggcatgcaatacttcaaacatgtgggtggccttccttctagtgattggcttcccttttctcctcactactgtcgtcggccagctctccactacagctcccccgaactcgtgggaacttaccaatctagaagccatacctatggacggagcggtcgctagcatgcgacctgtccttgaaaacagcgcaaacctgtacaggaccttgttcggcttctacaccacggatgggcattcgtttgttctctctgtggtgtttctgggacccaaggctccagtcatctggtctgccaaccccgacagtcctgtgagcagcagcgccgtcctgaatttcaccagagaaggagacctgctcctgcatgaagctggtggcggcacagtaatctggagcacaggtaccagcggcatgtcagttgcagttgcaggcatgaagctggatgacctaggaaaccttgtgctcttcgaccggaagaact

SEQ ID NO: 170727 - DNA, 3445 bp, Zea Mays
cagccgcaagaacaaaaataagcggggacagggggtcgccctgcctgacgccgcgtcgacagtgaaattttttcccagggactccattcaaaagaacttcagaagatccggagccaagaatcatagagatccagtggatccatttattaccgaaccccttgtgtctcaagatctctaggatagcagcatgctccagtttatcaaatgccttctcaaagtcaagctttagaatgaccatttcttttctggatttgtgacacagtgaaatatattcaaaagcccaagctaagcaatcttggatcgatctatccttgataaaaccatattgattccgatgaacgagctttgtgatcaccagctgcaggcgattggctaagatttttgttaaaactttgatgctcgtgttaaggagggagatgggtctgtagtcaccaacagaatcaggagagccatttttgggaatgagtgtcacatatgatctgttgatgctatgcatgcagagagatccttcaaaaaatttgttgaataggtcatagaaatcaggggcaattatcggccagcattttttaacaaagtctgtgttaaagccatccggacctggcgatttatttgaaggcagacgtgcaatgatttgatcaatctccaggctagagaaaggttgttcaagctcagatagattaccaattggctgaatcaaagcagataagttgaagaccatagtagtttgttgagaggtccccaaacggttcttgaaagcattaaaaagcacaacttctttttcattgtgagagagagctaaatttccattatcatctttaagagaggagataaggttatgtctgtgcttgacagtggcattggcgtgaaagaatttagtaccggcatctccaagggtggcccatttgatttgacctctttgcttccaataaatctgttgcttagctaaaagatcttgtaaatgaaggagcaggatttctttgaagttccattcctgaatggttaaatctctgctctcctcaatgaagtctagcagttgcaccactaacttaaccttatcaatcaattttgttaagttggggagagacttacaccagccatggatatgcttgcgtgcccttttaaactttgccatgagccttttagcagggtctggttgaaagataggctgattccaagagtcttgaaagatagagtggaaatcatcaagctgaagccaatagttttcaaatctaaagatgggtggcttgggcacattgatttggacattgaccatccaagggatatgatccgaggttcctctaggaagcgagagtgcagaggtagctggaaaggtgaccgaccaagcttgtgagacaaagcaccaatcaagtttttcaagaagcgggtgacgttgcatatttgaccaagtgtatacttgtcctttgagtggaatttcctgtagccccagttgactgattgccagattaaaactcatcattctgaggtgatccccacccggtttgttgcggttgtcaggggatctgatcatattaaagtcaccgaggaagatccataatttgttatcctcaatctcaatgctggaaaaccaagaaagaaactcatctctcctgtgaggagtacaaggggcataaatgttggtgagccaccaggtctgattggtaagctttgtgtggaatcgaattgtgtgaccgaaagaattttgatcaataatctccccatcaaaaagagatcctttccaaattgttatgaagcccccagaagcgccaatagaagtaccgaattcaaatttatcaaaggatctgctgcagaagcgacgaatgtaggagtcatcaaaggactcttttttgtctcttggatacatatgatatcacatttagagtccgagatgttatttcgtaaggaattccatttagtctctgagctaattcctctaatgttatgggacaaaatttttagagagcggtgtaagttctgagggccggaagacatggaaaactatcagtcttacaattaagaaataccggtatgagtagcatacaccagtaggtccttgtaccagtataaatccataaatagaagaattggaagggccacataaccaacgtgtcaagagggaatagggcctccaatggccccgaccggcaaagtgcaaagatagtccacataacaaataaccggaccaccagccatcaaaattaaccatctcacgcagcacagagttattgactccaacatatttaattgtatcaaacaggaaagagacctcgattccatcatagtatgtttcagaaaaaagcaaaaagcgccacatgcgcgccagcaccaaccgttaaccaacaaaatagttgccaaccagagaaaagaaagtaccaaacgagccaaaagggggaggccaaagccttacagccccgccgaggtattgtcttcatcatcaatgtcatcattgaagtgagggtcccccacctgttcatcagagaagtcggattcctcatcgttgctgtcgggggaagcagccggcctctgaatggcaataccagtgaccttggatctattcaagtcttccggatttagcttggaaggggacattttacagaattcagcacccaattttttgatgacgtcaagatgcatagagggggggcactttgagtgcagcatgagcaatttttcttgccaatcccagtgcaatttttgaagcccttggcctttgccctaagcctggcactccttctgactgtcgtgtcgactgagataggctgcctttttctgggagttgcctctgactggtgagggggttgaggcttagcaggggaatcctgactgggtggagggggaattctgaatgaaatgatgtccatgttgggtgcgacgaatgccgagatagctccggacaaaaggaatttcctggcccaatcaaacgaatctggcctcattaaaaggcccatgaagaaagcagcccaaatctttggaatagaaactgagtccccattgtcagggaacaaaccagcccaagaggaggaacgctttctggccaagaaatcttcaagcgcagggccagggacggtttgatccaagtgtaacattaggcccacattgatgttgtcttcaatttgcatgtcatcctgtccctcgacattgtttccctccaaattaatgttggcatgagggaaagcaggcagggcgagaaccgcttcagccggcgttggggcttcctcctgatggagctggactccctgagggataatgatgtcgttaaaatagcccaccgaatcgtcagaaggaagatcctcaaggcctgaaagctggtagctgaactgctcttcttcattgttcgcagcgttaacattatttggtacagcctttggcacagggggttgagcctgctcaacaggccaagggtcccagccatcatcagcattggcagcaacattttcctcagcattga

SEQ ID NO: 170728 - DNA, 1449 bp, Zea Mays
gtttggtgcatcgaatctccaaatttgatggtcatgctattagcctatgtttctacatacgacagcttcatcagtggtccagattattcctcctttcccatctaataaatttgacaactgacaagagcagcatctgagttggagggatagaaaaatctcagcatctgcgccattttctactacttatccttggggttgaactgtctaacggttctaccattgtgctatctcctttgtttgtcttctccacaaccatatatacaccaacttgccaaggaaggcttcatggccatggcttacctccccgttttcgtcttcctgttcatggttgtcttatgccaatccgatgacaggctaacacctgcaaagccactcttgcccaacgaggtgctcatctcaggcggtggtgtctttgctcttggcttcttctccctgaagaactcttcaaggtcttatgtcggcatatggtacaacaacattcccgagcgcacatacgtgtggattgccaaccgcgacaacccaattaccaccaatgtgcctgggaagctagtttttaccaacagttctgaccttgtcttgttagactccacaggccgcaccatctggacgacgacaaacaactataccgcaggaggaggcggtgaaactgcttccatcctgctcgactcggggaacttggttatccggttgccaaatggcaccgacatatgggagagcttcagttacccgactgacacaattgtccccaatgtaaatttttcactgaacgtagcttccagcgctacgctccttgttgcctggaagggacctgatgacccatccagtagtgatttctccatgggtggcgaccctagctcaggtctccagattatcgtttggaatgggacacagccatactggagaagagccgcatggggtggtgaactggtgcacggcatattccaaaacaacacaagcttcatgatgtaccagacagttgtcgatacaggagacgggtattacatgcaattgactgtgcctgatggctcacctagcatacgcttaactttggattacacaggcatgtccactttccgaagatggaacaacaacacgtcttcgtggaaaatctttagccaattcccctatccatcatgtgacaggtatgcctcttgtggcccatttggctactgcgatgacacagtacctgttcctgcatgcaagtgccttgatggttttgagcccaatggtcttgattcttccaaaggatgtcggagaaaggatgagctgaaatgtggtgacggagatagtttcttcaccttgcccagcatgaagactcctgacaagttcttatacatcaagaacagaagccttgaccaatgcgctgcagagtgcagggacaactgctcatgcacagcgtatgcttatgctaacctgcaaaatgttgacaccacgattgacacgacaagg

SEQ ID NO: 170729 - DNA, 788 bp, Zea Mays
ccctaggtcaccacatcaactatgtagatctatcttaggtgaacaactttgcttaagagtgtgagcatagttgctgtgaaaaatctagagataatcatgctcaaactttggctgtcaggctgattaggtctgaattttcagactaacagtgaactaccaccaacttcaagcccaatttcagacatgattcaatgactttttgtgacaacaccttatagcaaagttgtagttggtatagtgctctacaagtttgctacagagctttggatgagttgccaagtaaaatttagagaaaatcgagcctcaaatctctctgtcagttcatctgaaaggaactcgccatggtacagtagccgatcggatcagaacaccagctcagctccccgccgacgaccttcgccgcgattcgtgctgccgccgtccggattcgcgctcgcgacttgtggataacctctcggggtaaaagatcttcgccgccgtcaagctggtagccaccccggtcagccgcggtactcctcccctggctcaccgctcgcgggtaaagttgctcaccgtcgtcgtgccattgccgttgtccaccgcgtgtcctaaccgcgccaccgcatcgctgtgactccctctaaactccccgtcgaccaccggagttactgccacgacgatgaacacgtgttcactgcaccagcgttcttcctcacttccgaccgccgcacatcaacgccaaaattcacggtcaccgccgaagagccctataaattgagcccggactccgctgcttcatcacatcccgc

SEQ ID NO: 170730 - DNA, 462 bp, Zea Mays
atgtatggatggcacttcagtttcttataacaattcttgcaatccgctcggcctccctagatccctgcaagaccaacaaatccgcgctggatcccagaaatccagaaatccgcactggactcggcctccctggatcccagaaatccgcgcctccattttctggccgcgcccggtgccgcctgccaagcccacccacacggccacacccaagcacctacaggccgccagccacaccaacgccctgctggccgctgcgcaccaccgcgtcctcaaaagtcagcgtgcgccttctataggacaacgagaggagacgaggaataggatcgcgccggtctcccacagtgaaggacgtgatccccacgacttcattaaggcctactccccgccacaagcgctcaggcaaggtatccctctcattccccatggagatattggtgtgctgtgtagacatcattatgtgct

SEQ ID NO: 170731 - DNA, 636 bp, Zea Mays
ttttttcaaagtaggattgaggtttcctctacatgaaatgattggggatgttttgaaggatttcgaaatttatcttcatcagctgactcctaacgccatcgttaggctcagtgtatttatctgggctctttgaagccaaggagtggagccgcttgccgaagccttctgccgggtgcacgagcttcactatcagacgaaggctagggaagatgggctacacaagaacttcggctgttacaactttgcttaccgcaaagatatgaagactccggtggttagctaccgcaccaaatggctaactggttggaaaactgagtggttttatgttaaggttgatgagaaaaaggagaagctagttcagagcccactgtacctaaccttcgggttaactaggccccagtgctgcatgacgccagggtcatcatgcctagatgccgtgggcgaatttagagttgtgtctgagcatatcggtactagggatttggttcaggaatacttagccaatataatatttccgacgttaaaggaatagagtatgtcgaagcttaaaagggagaagaaaaagaatgaacttgttcgactgccctatcattttaagttcaagaaacacttcaaagaaccctgccaagaatggtt

SEQ ID NO: 170732 - DNA, 1121 bp, Zea Mays
gctatccaaagagtctttagacggcgtagagccgaagagaggtgaagattgagattggagaactacaactagatctacgctacatctagacctaatgcataaaaataagtaatgtaaatagattggttcgatcagattgtgtatttgcaatcggtcgtacccttcatatttataagggaggaggtctggaccttcttataagcgaattccaacaagatagcacaagaagtatggaagatcttgcaacaaattaggactctcgctcgaactaacctagatggtcaaggataaatccgtactgtctaggagtcggaccatccaagcttacacgcgaattgttcggcagtaccggtgctaccaaatttggtgttcaacatatgcctcctgcctttgagtggaggccatgaactaaaagcacctatactaccagcgtgtttcgagaaacaatggatttcataattcacattgttcctgaaataagaactctagctcgaggttagccactggtctttcaaccaaacagtatagtcatttaatagaactctaatgcataaagattgtttaggattacatattcttcatccataactatatgatcaatatgtcaaaaggaacaaaactatgatgccctcgacccaaataagcaaacatacttgttggaatactatacatgtgatacagattcatcgtcgtaatatcccacacatgaggaggacaaaacatcagtgatgggtatacatgtgaaaagcaccaggacatccctggagatagataagtagacaacatttgtcgcaccacttcttaggtcggtttagtcagtctttgcccatacatagatcacttatttcttgtagatggctttgattgttttgatgtacgattgtgcagaacgaccttcttatttatatattttgagagaagttgatcaaacataggactagatttagcaaacttactaaaagccttagtatagatttagcaaacttaccaaaatccttagtatgatcttgctttctggtcccgttcagctttgttacatgggtcgttgatctgttcttgacattattagactgtctgattctacgggtcggactttctaaagcaccagaatttttcatgat

SEQ ID NO: 170733 - DNA, 481 bp, Zea Mays
gcttgcacgggcgcatgggtcggcaagcgcgagaccgtggcagccgagatctgtgggcgtgacacggagaagcaggtggtctccgccatcgccgtccgccgcggaggaactccactggcttaacatcgaagccgtaggcccgtagcctcgggagagagacgcccagaggaaggaaagaagaagcgatttctggaaacatcgcgtcatctgtggaggatagaaacgacatcgcgtctgcttgtccttcgattgtgaatctaacggctgaaaaaataaatgtcgacgtggatagccctagaagccgtgttttgtaccgcgtttcatatataagaaatttcttttcttttctggaagaggatgataagtgcccgcgagctcttccatccagctcctcacccagaatccgcatcatgcatggctggattatcagatcagatcgacttcctaatcgggcgagatcctcatcatcggcaacactctg

SEQ ID NO: 170734 - DNA, 569 bp, Zea Mays
ggataagcgcttcagtagtacccgacgtcgacgagccaacttccaaagacctcattgacggagaccgtgtcttcgccctgcaggccctcgacaaatatcaagcccaaacgaaggcctggtgcgaccacgcagtcgtcccaagagaattcaacgaaggagacctcgtacttgtccacacaacccggacagagtcacggggtaagctggaaccgaagtgggaagaaccatttatcgtcaagacaaagtcgtctcccagcgcgtacagattaacaacacaatctggcaaagacctggaacattcctggaacatagacaatcttcgcaaattttttgtttgactcctcagggccaactcgcccttgtaattccccaaacagttttatttttggcccgcactcttttcctccagggggtgaggtttttaatgaggtggagccatgtaatatacagggaaaaaaattcccctgcaaaaaattaaagcaacgtcgaaaaagaccgcatcgacggtcttcggcattcgaccacaacgaagtcaccgtgaggggcagcgctagctaccctcgcgtgcg

SEQ ID NO: 170735 - DNA, 745 bp, Zea Mays
gcagaacaacacacaatcatgagttttgcaattaaaggatacacctagttgcaatcaacaagcaacaaacgttgcaactggagcacaaacacaccatgcaatggtaattagtgagtaaaaacagagattcaagtttgcaattagaggatacacctagttgcaatcaacaagcaacaaacgttgcaactggagcacaaacacaccatgcaatggtaatcaatgagtaaaaacagagactcaagtttgcaattagaggatacacctagttgcaatcaacaagcaacaaacgttgcaaatggagcacaaacaaaccacgcagttgcaatcattaattgcaaccaatattgaacaaacgacggtggagcaacaatttttgattgtttttttcttaccggatggaatagctgggctgcatcaggagtgaccagcgatccaggtggaattgaaggcggtggcgtcagcaacgtcttgtgatgcaagggatcacctgatccgccacgtacacccgctcccgttgtcgcaatcagagacggcaatatcggatcagcacctccagccacaacaatcgccaaggaattaggggaggagcatcgaggcgattcaaggtgcggcagcgatggtggggccatggatctagggttagaggatcggaggaagtaggagacggcggcggcacggtgacagggaggcgctcggcggctgcgggggatagggtggcgcggggtcagggaggcgcgcagcgcgg

SEQ ID NO: 170736 - DNA, 272 bp, Zea Mays
gctctagttgcctaaggcaggctaattagtggttgacttgacctgtcacaaggttgcttgtctgggatttttcttattttcatcttcctgcttctgttactgtaaaagattagtccacctatgttgtcttaacatagcaggtctcacaccctgttaaaggacaaggaatgtgataggcccaagccacgttaaacctagccattctaataaagatgaaacccgaaagaaaaggtcacaaggaacatataagatgatatcacatggtatatgct

SEQ ID NO: 170737 - DNA, 477 bp, Zea Mays
ccatcgtcggaggctttgccacggtgaaagccacgattacccgcgccagtgcatttcccttctctccggccgccagcgcgccttctcaaaattagacgtcaccgccgtaggactctataaattgatgccctagtgagttccgctatgtaattacgcatccaatgcaccagcccttgcctctgatcatccaccagagcctcctaatttcgtatttcccccaaatctgttttctgcaccaccgtgaacacttcgccgtggccagccctctgcaagtcagttcaagcttctttgattagtgttctagcctccctcaagcctcctgttgctcgtagacccattcgattaagctagaccacaccaaatcgtcatgaacacctcggattgtctctaattttcgccgtcgtcgtgggcagagagatttcgactcggattcgtgcaattagttgagggattagggtcgcctagggtaggatttgg

SEQ ID NO: 170738 - DNA, 323 bp, Zea Mays
cttcactagggcggtgtgggcgcaactttctcattggcttgacctcgcgttgctgccagggatggcacaatcttcatcaatatacacttggtggaacaagtgcagagccaaagtcgataaatgctcaaggagagagtttgatggtttgatcatccttttctggtgggagatttggaaagagcggaaccacagaaccttccaaagtctagagaagtcagagtgtgtgattgcagggttcatcaaggatgtttttgggcagcaacgattgctaattcttttgactttggttgctagtgtctctgcatagcgttctttatcctttt

SEQ ID NO: 170739 - DNA, 287 bp, Zea Mays
ctgatcatcacaactgagagggatagcacaactttttcgcaaattcacaactaagcccgaggcctctccaaatcaatccaggatcattttgacacaaataagatcgtcaactgcaggcttgacaaaaagaaccacatcatctgcgtaaatcgagagactagatttcacgtttctgatggccaggtcatgcagcaatccactttcctcagcatgcttgaataagctactaagcacatccatcacgattatgaaaagcataggagataaggggtcgccttggcgcagcc

SEQ ID NO: 170740 - DNA, 796 bp, Zea Mays
aatctatttactaatcattttctctggttttattacgctcgggactgggcctcaattaccagatagattaggggtctcggagtaagtcgtcccagacacagagaacggctcccgaggatggcgggttgattccccggaaacaggaggtctcctttgcaaaagatacccacgaaggggtaagttctaatctggaccactcagatctgatccgagggccacaaatagatttaatctctactgaacgggtacgcgcccagagccgttggattcgtcttttatggtgacgattttattatcctagatctaaccctagccgttcaaatccgatcgacggaccagatcgaatcccccaattgcccagccagaaccaatccgcggcgcacgatttggatccaacggctggaggtcatcacctacctcccgacggagccgcgccgagacgccaccgcggtgaggtctcacgccggcggagcgattctccgaattacgtgcacgacaccacaattaaattggtacatgcgtattgggtatgaaggcgggtctgggcgaggtgcacataccggtgattgtctgcgctagcgagccggccacggggaggtgatgatcccgcccagatttgcactccgtcgtggaattccccccggttcagggtcgcccagctcgtcccgcgggcacggaaggattccccgggcgttgacgcacccacacgaccgcgtgcagggaacggaacgccgccgtggagggctttcacccgcggcgcggcacggcaatacacccggcggtgcttctctctaag

SEQ ID NO: 170741 - DNA, 599 bp, Zea Mays
ggacacgtcttagccagcaattgtgacttgtgctttggacacttattgaacttcgctaatctgcactcgatttttgctaatcctttatattaatttttggcctcccaagccccacatactttcttctgatcaatacagctatgaccttgtaatcgcggtttcactacctcttggtaagtatcactaaccagcctctgattgtaccatcctttgcttgtattttgtcagacacttgtaaaagcttggtaagatacattagagcgtgttcctgtgttccacctgagaggagcgtgtagtgaaattattagggataaccgtgacagtttgttttccgtttttgtgtttcgatggcaggcaacgaagaagaagcaaggatccctatagacttcgatgaatgtgttagccgccaagatcttgaggcaaacaacaagctcctgaaggagcaaatgcaggagacagtccacaagtcagtgcatgctgccttcattgacatgaaccttggcaagacctacgtgaggctagatcgacgattgtcccagatcatcgacagacttgctgtgttggagacgcaacaacaagcaccaccaccaccacctcct

SEQ ID NO: 170742 - DNA, 826 bp, Zea Mays
acgagtttaaaaagctagtaacgttatcttgaagctaccattggcatttcgaggtcacagacagagcaaagcctccttcgcagtccagctgatgctgcgctgatttcttctcctttttttttccccctgcattgcattgcttcctcgtttggttgcgcttcgttcggtcagccaaatgcaaggcatgccggtacggtggctgccagctttccgctagctcaggtttgctctgctctggacacatgtgtgtagttcgtattccatgtatttctattcaggttcaggttgaggttgaggttgagagaccctgacgtgttgtgttgcttctggaccaggatgcgtggtggttgccacccctatccatctccatctgcaacgacgcggtttctgtcgccgccgccgccgccgtctggacccgctggcatggcatggcatgtgagcaagggatcgagtcgaaaggagggcggcgcagggaggagtgggatgatggctcacgcaaccaaaaatgcatggcatggcatggcatggcagattgttagatgctgcctcctaagtgcttgacccgtaatcattcggtttggttggagacgtggaaggagaggccaggcatggtttcggcttggcgtggctcgtcaactccgcattcacggggccgttgggggtggtggatagcttaaaattgtggctcagcgagaaaagaaaaaaattcggtgatcagtaaaatagaggggattcaattctctggatattcaaaattgaatagaaaggcagcccggtttcacagtgcgttggagtacatgtgacgcgaacgtttcgaagagcgcgt

SEQ ID NO: 170743 - DNA, 514 bp, Zea Mays
ctggtgcttgtggtactgctgggcctgctccagcctatcacatgtttccactagaaactcatccttatcccaaatctagttatccactgccgggaccttaacctcatttggttcataagaacacagtgtgggagggtccctaccatagaccactttgaaaggggatgtacctagagacacatgaaaggaggtattgtaatagaacttagcccaaggaagctaagccagccactgatgaggacgatcccatgtaagacggcgcagatacatacaaataatcttgttggcagcttctgattgcctatcggactgagggtgaaaagcagaactgcggtgtagcttgacgtcagacaggtggaacaactcatgccagaatgcactagtaaaaactgggtccctgtcactgagggtaagggtttgggaaatgagagagggaaggctagaaggaagttacctcccatctgttccgatgggcctcttggtctagatttttttgaggaagtggcttataatt

SEQ ID NO: 170744 - DNA, 298 bp, Zea Mays
gttcggtacgtcagtagtagccatgccctctgtcgtccagatcgccttagaagttagaacgctgccgggtctgggtgtgaaacgaaccagagtttagagcagcgcgtcagtccaagctctctctgctcacttcgacggagatgtgtcatgacagcttgaaagcaccgctccgatggcgcaactgcacctcgcgctttgttttcgagtgtctgtcgccggcgggaaaatcagtagtagagcggagccacatacgcactgcgcagaatcaatagaggcatagagccacagcgacggggct

SEQ ID NO: 170745 - DNA, 633 bp, Zea Mays
taatacggccggggttcaaactttgggtggtccagccatggcgcttccatggcgggttggccgccaccgtcatggcctgggtgctgctgcggtctggtgttgagaaggggggaagaagggccgctggctgttagattggagattgacggctaggttcggatctggggaaaatagctatgagtcgttgatcctggcgcctacggtggagattagatcaagaccgtgatgaatccgagccatcgagatgagatcgaaggagtgataatagatcgggctataataaaatctagatcgttgcttttagatccagtggaatagattgggtaccgtttcagtttgagatgagtctaatctaggtcgtctgatgtagatcggacggttgatgccacccgataccccttcggccatgaccttttgttaaagagcccctgctctttttcgtatttaacccgccatccactccagctattcatcgagtcttagaatacttgcgtcgtagcccctgtacttaccagtaattgaggcatagttcagacagtgagaaaaacttataaaataatttagaaaagggatttttaatgtgaaaacaattcctagaacttgtatagttcctagaaaattcatagggagccc

SEQ ID NO: 170746 - DNA, 571 bp, Zea Mays
gttcttactagcctaataaaaaatgggtgtaccttgttgaatattgatctcttcgatgggcaggtgtgccgagaaaggggtgggtcaagggacgtctctagttgagagatagggctcgttggttcgacaagctcgttgacctccaaggacgggtcacatcatcacgacgaacgagatcggacatgccgagctagctagcgtcatgaggatgacgagcgaggcgggggcaccgggaaggggtggggttgtgcagtgtcgcgacataaggaatgagacatcgaagcggactggatcaggcggtgtcgataagaatgggactgggccatagtcaaaatgtttctgggtcgattggattgaggagcggggtcatgggtcgttggtcgacattttaaaaagggaagtatacatctatgggacgggaatattatgaatttgatatgttgagtctaatgggccgatgatctcaggttgattctatgggtcaagggtcgtgttctaacatttcaataacaacctaacaccagtctaatatcatctcattctaccattgaaactttaggctatccctatc

SEQ ID NO: 170747 - DNA, 1489 bp, Zea Mays
cctcaggggacgtctcggttttattatcggtggctctgttgtcaccttttgggagttccgtcctttattcctctgagtgcgtttgttaggggagtaatcagggtgtccctaattaccgccccgacagtagcccccgagccttccaaggaagtacttctggtacttgtttggaggctctgccgctggcccgcaggcgtgctgcttttctgagagataggacgtgtctgttttccgaggggtgcgcacgagcacactcgtcgggtgtagccctgaggcctcgaaggagtggttgactccttcgggggctttaattctttgatcggactcgtttgattttttagtcagactggatggacctttttgcgagggcagccttcgagcctttgcacagagcaataggtcgatcgagggatgtctcgacttttggttcatacgccccttcgtcgcctctctgcgaggaggaagggggaatgcgtcacgctgccgtcgatgggcgacgagtgtgtcgtttccattgagctgctaacgggaaatccgagcgggggtccgagctcctttcgattggagtcagcttgaggtccggagacacgccccaaaggctcctgcaggtaatttgcctggtcccagacccgttcgatggggtccgagggctcgatacctccctatgatgggacaccgtcatgaatcgctaccgtgggttctcggatatgccttaagatacctcgggtcgcaacccgagccgaggccatgtacgggcgtacctatagtcatccctgactctgcgctctagggcggttttgaagcccttttgaggggccaaccttcgaacccctgatcggtattgggctcggggccctgaagtcctgtggtggttcgtcttagtcctgtcgagggccgagccttcgaacctctgaacaatatatcttttgccttttttcctcccgaagcgacacaccgaggtagaatacgactctctccgatttgctgctccttttccgaaggggtcgctcgaggcagatgacacttctttctagttcggttgccgagggaagtaggaggcgatatagtcgaggggagagggcgtaccttttgaggcggagtgcagaacgacgttcggcgtgttttttcctcgaaggggacacagtcatttaatgtgacaagatgttttgcctgccaaccgaccgtccgcggcacgcgtgctcgctggattcgaaatggccatcgtctagccgctttttgaatcgcaccttggtggctctgtccatcctataaagctgaccgagagggagggctttggaccgttaccttttcagtctcaatcttttgccttcaaacgtcgttttcaccttctgcccagagagctcttcgtcttcttctcacccttccgtttgtttcaatggcggaaaagatcatcgtccttcctccccgtgacccgtggcctatttctttcgtcaccgacgcggatctagaagcgttggttgacgctggc

SEQ ID NO: 170748 - DNA, 692 bp, Zea Mays
cccggcggtgggcaagaaaccaacggatgcaccccagcccccgcgagtggtaaacggctgcgtcgccggcaatccgccatactcccagcgccacatcggtgaggcatcacccgcattaggccagctcacggagccacacgctcaccacatgaactggcgaggcccgtgatgttgcgtcttcagatctccggcggtaagggcactaatggtgattctaggagtggaccgatgatgcccaccattatagtcgcgagggagggtggataagagggcggcggaatcggatctcgcccaggtttctcgcggcgaccggtatacgtattcttatacggctgcgatgtgactgggagggtccagttgccagtaactgtgggagctccacggatgacttcatccctgacgccccaacaacatcagcacgacggaaataataaaaaaaataccgagccgcacgggctggctccgcgtgagtgaggtgggccgcgcgatgagttttggcccacacaggtgaagctttccccttttttcttatttatttttgtcttctttcaattaaaattcaaatctgctttggttttaaacctaaattaaaatgcaaaattcaaagagccagtatgaagtgcaacaattttatatgaattactttatttacctacttaggctaatatttccaatatgcatcacacgaaaat

SEQ ID NO: 170749 - DNA, 940 bp, Zea Mays
gtgaaaaacaatattaatataaatttattgcaactagaatgaattaactcggagttaaaatggatttgttatgcattttctaaggttttagtattattttagcaataaaaatcaatctccgacttagttctattaatttaccaaggttcaggggctaactcgtgaaaaacagggcctaagtgtagttatcttcatacatgtggggatggcgggtttaatatgcaaaagaataggggctcttttgcaaaagagtcgactgaagaggtgtcgtggcatgtgagcaaaccgaccagatttcaatggccccaatcgaccctcacaacataaagtaccaggacacgatcagtgccgctgatcaagcgatcaacgaccggtacgaatcggtgcgcagatcaaatcctgaccgtccaccagatcggacagcacaacgttcctcacagttcctcatagatctatcggtcaatctacaccgacgcgaacgggtacgacatcggccaatctacaccgttcctcacagatctatcggtctctgattcaacacaagccatcttctcccaccagccacccagcacggcggcacagtcacctacggcggcgcgccacgcccatagcatagtggcgcaatgacagggataccaaacgctcaattcacgagcttctacgcgacgttcaagtgaatgtgatgcaattggagaggctctcaccttgaaatgatgttgcgccatgctcggttgtcgacgtatggcagatcggcggtggtgtatccatcacggcaaggaattgtcgtgccctccaatctaatctcatacgaggatgcgatgtgtgtcctgcccaagtgcagctgaaaccccaaaccccacgcttgtgttggtcaccccgcaatgataggtcactccgcatgactccggtggatgccctccccccttccacggcgatggcg

SEQ ID NO: 170750 - DNA, 499 bp, Zea Mays
tgtgtacactgattctggttcactagtatccacagccccatcagtcactagactgcgaatgatgtcgacatgtgtctcgatgactcgaactgagctctcaaccatgtcaagtggctctttttccatttctgaaacagaaaatgaccaagtctcacaatcaaaattgagatcgcaacaaaggcagggatcagagggaaaacaaggatgtggcttatagggcaaaaagaggggtccaaataacactgtcatggctatgaacaagtcaaagaagggagataagaacaagtcttataacatagggttgggaagcacaaggaattcatgtgtgccaacaatgcacttcattactccacataacttcggttctaggcactctaccacagggattttgtcttcattgctatccatagggtactagtatggacatgaaggcacaacaagaatatatagcttcgtataatgcacacagatgcaggtggtgtcgtaggtaagaagcatt

SEQ ID NO: 170751 - DNA, 310 bp, Zea Mays
tttctagagcagaggagcagccctgaattcatatctctaagcgaggcaaattcagaactatctaagaagaacaagtaccaccaccacttaggcacaggtggttacaagtgtcaagtttctaaatggagacaagaagacgtcgagaagaaggtcgtagggttgccgacactttctgagcaacttggtgaaaggacggctaattggatctgtgctagaaaacccagagaaaatgaggtaggtgtatcttttgatgattcaaatgtcgaagaagctgtgaaaaacatatatgcaatggcagctaagcagagcc

SEQ ID NO: 170752 - DNA, 771 bp, Zea Mays
gttcactcggcatgaacgctttgggcgggcaccttcaggtttccgaatcttcgcttcttcaccaaattcttgcccagtcatgatggccataggctcggtgcgggtagagtcagacgattctctagccagcaggctaagtacgacatccaattcagcatcatcggtgctggctggcatctcgaagtgagtttgcctctcatccttaggaagactccgaagtggagcgatcaatgcctcaatgtcctcaggagagggtcgcactctatgacccaggctaccatcatgagcgggagggttggaaacaaactcagagaatggcctgtttggcggcaggttccatgcagaataggccataggagcactagcatttgagactctgactctcaagatcatgttcagtcggctcagcagatcttcattgggaatcctcctgttcgtgacccgagtggaatcattgacgccactatataagtaagcaggatagattctgtccttcaggggttgaatgtttttgaaaacgaaatcagcaaccacaacttcagtagtcagacccccatccttcagcaagcagatctcagcaagcaatgctttggcttctgttatctccgaaaaggtaggagattctacccagctaggtgtgcggacatctggttgcctcctcggccgaggggggagggacttgcagtggttttccatgatgaaccactcaatgtgccatcctttgatactgtccttgagaggaataccgagatactccactttccttcccta

SEQ ID NO: 170753 - DNA, 318 bp, Zea Mays
ccatcgcgagaaaggaagtcagaactgaaacgagagtctcctccactggcggggtgggtgaattcatctgcggaagggaatcaaagataaagattatggtggaaggaaaagaaaaagagagcccggatgattttaaagaaaaggggttagctcaaattttaattcctctttgtgttttataatgcatgcatgctgtaaggaacgttgcctctcaaaagaaaatagggtgcctttttagggcatccttaaaaatataagtattggcccatagggcctaattaattagccacctatttctccctctatgcctaaggcctt

SEQ ID NO: 170754 - DNA, 1046 bp, Zea Mays
tgccaacagctgttgctgacccagcggcggcgataccgtcgggtgcaccgtcgttggtatgcgtgggcggcgcgtccaactctgtcccgccgccaactccggaggctccagaggttatccttgggcgaccgctccgatctggcaccgaacctgaagcaacgttaactccccttccccaggtgctatcccgcgctcaccaggctctccaggaaaccgaggtggctatctggcgggagtgggaggcgctcaagaccgagcatcaacgccttggcgactggtgcacccaactggagaagcgcactaaggcggtgtcctgccaattcgcctcagagcaggccgagtttgagcaggagcgcgaggacttcaaggaggacatccggaaggtgtctgaccgagaggaagaggtgacccagaaggagaaaagtttggccaggaaggaggtacgcttagaccaaaaggaggaggccgtcacagcgctccataataagctgaaagcttataatacggtgctggagaaacagtgggacaagcaggctgcggttgaggcaaagctgcagaagctacagcaggaacttgtcgatagggccagcgacattgctcgcgccgaggaaagcctcaaggcgaaggaagctttcctagcgaaacgggcaactgatctcacctggcaggaggaggacctcgccttcagggaggagatgtgggcaaggcggaactggctgctagatgagcttgagctcgaagcagaggataaaaggaagtgtttggaggggaaagtgtgggctctggaggagcaggtccgctagttccaagtagcgcaagttgctcaggcgacacaaacggcctcgggcccccaggcagtggaggtgatgaggaagacactcgacgacctccgggctgagcaacgcaccggggcccagcgcatcgccgcctgggctagtgaggcaagtacggcgttagtgtcgttgggggtgagccccatcccggcgctggagcggccggcgtccatctccgacgcgctcccggtactggatcccgctgttgtccgc

SEQ ID NO: 170755 - DNA, 784 bp, Zea Mays
ccgcgccggcgtgatgctgcgaggagctagcggcggccgccgccgccgctgcaggccagtactcctccgacagctgcgtcgcgctgtggcctgcatggaaggtcacagaggttggttactctgctcatctgtgttttagccatgctctgttttttttctttccctggaacaaagaagcagagatatgcactttgcgtatccgcaatcgcaatacgacatcttgctctttgaaagcaacctgattagtgtgaagtttatttatttagctgtagacatattcgattgtgtgaaaataggcatccataaagccattattaagttggtcccgtttgtttgagcttctacatggcttgtcggcgtgaaagaccaaatggttgttgttttctttttcctgatcacataatagacagcgagctggatgaggcaagtttcttttggctaaacagtcagccatccagtatctgcaactagccaagcaaaaaagacacacttaggtcaacctgctgaacctgacagtcagacaacaagggagcctgtccgaagtcctggaagattttcaaatacagctaagcttgcccttcttcatgaatatcgtaatcctgttaaactagacaattaggacgactatgaatgatttagttttcaaagcaatgcaaccaaacttgcagacaagtcgaagtgccctccaaaaagagcttggccagctctcctttagagctaaacagagatcgagccacttttttgagtcatggtgccaaagtctattgtaattgctgtccttttt

SEQ ID NO: 170756 - DNA, 602 bp, Zea Mays
gtgtgggggagagaaaaatcctgggcaccgggtagctctgcgctaggagaattgggggaggatcgcggcgtactcgtaatcgcgtctgtggcatcagccgtgggagtaattccccctgcgctagcagaatacctcaccggaatctaaattccgcggtgaagttgggagctcgacgctagggatttgtgccacgccaaaacaaggtatgtgctcaccttctgttctgccatcgccgtagctcggtattgcgattggtgtgttgatgttcggcggggcggggaccaaccgacccagccacctgaacagctcgcaccataggaaccgaggccatgcgcatactctagcagcagggtctccaagacaggctcggcagcttcaccttgacttcgggagggcgtccggggactcgctaggcgcgtatggtgcacggggcggctggcgatgtctcgccggtgttggggaaccctgccatgtcgtgacagaggctacaattgcccgatggctggtaaggcatccctggtgaactcatcctttcctctgcttcgcgtagcatgtttcaggagtatgaattggggcctgatggaccggcgggctattctctg

SEQ ID NO: 170757 - DNA, 470 bp, Zea Mays
gcgttacgcgacctccattagtgacagtcgctcgctcttcgcctcttcccctcctgtcgtttgtttctctgttttcttgccctataaatcgtaatccgcgcccgcttagcacgaccctggcctcccttcccctccccagtgctccgtgctgctgcctgcgcaaacacctcgtcggcgacatcctcacatcgccccagagcttctcctatgcctgaccgaatcctcgctgagattcgccctgctcactccctcgctctctcgcaccctctgctacctgttctcgtgctcgcgccgtgtgttgtggctgtgccgctcaccgttgctctgcgccccgcgccggagctctgctcctcgccgttggagtcttctacgccctatgccgcgacgtcgacgccctactcgcgccaacctctgcgcacccaccctacatgttgatctcgccactccatgtgttctacgtcgccagagtt

SEQ ID NO: 170758 - DNA, 648 bp, Zea Mays
gccttgacctgtgtggtcggcaatgaggaatggggttaagaaagacccgaccctttgtgggcaccgcaacgaggagtagggaaccttggtggtgtgacccaacctcggtaaaaattgtgtgtcttatgtgcttttgtgggcgtgattttgtctctcatcatctcagatctttgatctatctagttggttttaattcaactcttccgctgcgtttattgttggtagctctaagtggtttcatttaagtttgtagttgaacaggtgaattgcggttgaaccggcctccccaaccgaactgtcctttctcacaaaagttcaaagtttgtgttgagaattgcaggtgtagcctattcaccccctctaggctacttttagtagtttaggaagtagtaaaacccctctatagagtggtagggctgttgttacaactatctcttttggctctctttggctacttgttttggccttctagatactcctagttttactcctctaggttgcaatagtttagacgaaatctgaaggtgattttgtttctgtagtatgtgtttgtgaactccataaagttggccgtaaccacccgcgggccagcgttgattgaatcatcctcagtttgtatgtgttgtagttttttattcgtttttgtct

SEQ ID NO: 170759 - DNA, 478 bp, Zea Mays
cgccactgcatcggttgagaggtgcttttcagcgatgaaaattgtgaagacaatgttaagaaatcgtattggagatggatttatgaatgattgtatcatatgcttcgtggaaccaggatttctagccacaattccaactgatgatgtgatagttcgctttcataagatggaggaccgtacccgtagaggaaaaatatagaaggtatgtaaatactattgcaaaagcttatttgtcacaatatgttgcttttcttttttaaactatcgatgttatgcatgacattatatttttcaacatgtaagttattatcgaccccagtaacaaattatcctggcttcgcccctgaataggatggttggttgttgtggtccccgattggcaacccttgacgtggagtgttgccctcgcgctcttatcgataaggagaccgaagcgaaggtgcgcttggtgctagctactgtattgagcaagttttgc

SEQ ID NO: 170760 - DNA, 718 bp, Zea Mays
gtggagaggaggtccaggcgaaccttacgggagggttccacattggtgacgaatgcggtgacagtccgtccacagcgcctcgcggcaccgcgacggtgagcaggagaactggacgaacagggggcggaatcgagcatggatgggttctacacgtggagcgggttgaggcgaactcggagtaggtttgcttaccggtgaaaaatggctggcgcctgttgactatggtgtgggtacacccggcggcggacgaagcggacctcggtgagcaatccgccatggacccaagcatccatgcccccaaaatccaccagtaagcacgaaccgtgacttcacaagcttgcaacctgacggtggccgacactctctctacgacggagctctcctgggcggcgtgaaaacctcagatcctggtggctgggttgaggagcggatgaggcggtcaagtaccaacgatttatacacccagatgcgctacgatcggggaaatcggttaaaacgacagcgcgatatcagagccaaggcggaatcggaaatccccaaccaaatcgcacgcgcacacggcttccgcggatcttgttgctagcagtgagtccgatttgaggaggaagacggctgacgatgtggacccaccggtcagtggctcgggtaggagacacgcacacgcgttgtgaagaatgagcggctgacgcgcggagaaaattggaagatgggccgcgcg

SEQ ID NO: 170761 - DNA, 942 bp, Zea Mays
aaagcttcaaaaggtgccatctttagactggactgatagctgttattataggaaaactccgccaaagaaagacacttgtcccaatcttttccatggtgtagtgcacatgcccgcaacatgtcttccaaaatctggtttacccgttctgtctagccatctgtttgggggtggtatgctgagcttcgtatgacatgggtcccaagtgattcttgcagctgctcccaaaagcgtgccacaaacagtgctcctctgtcagacacaatggtcttcggaataccatgcaatcgcactatttgatcaacataaatttctgcatacttctctgtcttgtgggtggtatgcactggtaagaaatgagcagtcttggtcaatctgtccacaataacccaaatggaatcatggtgcctggaggtattgggcaatcccactataaagtccatgcaaatgtcttcccatttccacgatggtatgggaaggggttgcaaagggcccgctgccttcaaatgactggctttgattctctggtaggtatcgcactcggatatgtacttggcaatttccctcttcatcctggtccaccagtataaggatctgagatcatggtacatcttgttgctacctgggtgcatggagaattttgaaagatgagcttcatccagtaccttctttctgagctcagggtccttgggaacaaccaatcgatctccaaaccataaagttcacttgctgtcctcacgaaagcacttgtatttttctgccttttgcttgatcatttccttgatcacctgaacacccttatcttcaatctatgccctgactatttgctcttgtaatgtgtgttccaccgaaatgtagcctaagtcacctgaagaaacaacttccaggctcagcttgcacaactcatcgcacagggtggtgactcttgtatccatgcgcatacaa

SEQ ID NO: 170762 - DNA, 294 bp, Zea Mays
gtcgcgtttgctgttttttatacgcctgtttcctgctggttttgctcgcgtgtattttctaatttgtttggaaaaacaaaaacacagggtgtctcctcatgtgatgtctcgtatggttgtgttgttgcagggcttgctgattctgtacaatggcatcatgtgcgaaggttgactttctttggtttactctctccatcttaagcttaaccggccggctcgttttttatccctagttccaggtcatttgagctccggagttctttgtgctgtgtgtcctgcttgctttttctcact

SEQ ID NO: 170763 - DNA, 569 bp, Zea Mays
aggaggatgaattccaggagctaactcagggcgagagaacagtcagtgagtatgtgcacaagttcacagagttggcccgttacgcgcctgacgacgtcagcaccgagtccaagaagatggcccgttttctgaaaggactaagactcgagcttaagaccatcctcgccagccaagacttcctcaacttttctcacctctccaacaaagctatccaagtggaaagggcaaaagaggaagaaaaagggcacctcaagaggaaattccaagttctccgagctcaacagcaagaacgtcaccagagggctcgaccatttgggcttccacccaggggaccaagcttcaataaaccatccggacccactccatcgcgctacagtcagcagagtcagagctcccttcaggcaccctccgttgcaagcaaccaaccgccagcaaatgcctgttggcactgcagagaccccagtcacttcaagaataactgccctcagttgaaggcacccggaccgacctactccaactcggtgaatggccccaagattccctcggcacctacctccaaggcacctcct

SEQ ID NO: 170764 - DNA, 536 bp, Zea Mays
gctagttgcgccaccgaagactccaagctgcccacccgatcttcagcggaagccatggaagaggactcgcctgaatacgataccaattgatatgggtgttctcggttataggaacgagttctcggtcgcagcccagattgagtaggctggggcggcaccgagagagctcgccggtgacctatggtaatggttggcggaaccaccggccgtttatcgtcggcaacgcctgttgctggatttgtgggagcaagacgtcccttttctctctgccgcccctctctctcctttattccaaatccttgttcctaaacatagaaactagggagcagtataatgctcaataaggtaactaatactaccattacaaaattgagagatacttgctactaaataagccgcaactgattactttccataacctactgtttcctaaagtacaccctgttcggttgggccatatcattttcacatgtcattcaccatggtcaatcctctagcttctctagttcttcaatccaagactcaacgaatgtcct

SEQ ID NO: 170765 - DNA, 722 bp, Zea Mays
tcatcagtttccccctcttcttctcatcagccttaatataaaaccattcacctttccagccatttggccattttgtgcggtaactgagaactggagccttcgtatccttgtgatacgcaaaattgtagcaaccaaaattttcatgaagactgtctgccctggccttcgtctggtagtgcaactcgtgcactcggcagaaagcttcggcatctgggctcatcccttggcttcggagggcccagatgaagacgttaagcctaacaatggcgttaggggtcagctgatgaagatatatttcgaaatttttcaagacttcccctatcatctcgttcagagaaaatagcagtcctgctctaaagaagctcttgaaaaccactacttcagcactattcggtgttggggtggtctcttctccggcaaatcggacaagtttgctttcagcttccccaaagtagcccagcttcatcatcatgggcatgtcagcttcggacaaagtagatttctcaaaatctagatggctgggttttgttgggatcaaaatacagtaatcttcctcatcttcatcaatattttcttcttcagctacggtttgctcaacttcggcaacaggagtaccttcatcagtagttccctctatcacaactagacctgattgttttatgacttcagaaattggtgctgtctcagtgacctcagtttcttctccctcacgagacaccctt

SEQ ID NO: 170766 - DNA, 360 bp, Zea Mays
tggtggcaccctcggcgcaggcttacctcccacagctaaggaacagaggcgacatttcaatcggcacatagtcaccgcctagactagaacgcagcggtagaataggaggaatccggccgccaagccatgagtaaagtgtccatcgttgtcctctgtgaaacttttgctgtcaggatcagcccagtagatcgtaccagaagcgttagaggtaaggaccagtgtcgtcaaggagcccatcacatgagcagcgggttcatacaagcaaggcacgggcgcatcgaaactgatcatggtgccagtaaaagggttgaggacgcgagcggcatatggggcggttctctccgcgaggacaactaagcc

SEQ ID NO: 170767 - DNA, 762 bp, Zea Mays
tgttgatttgcctttgggatgttcagaacgttgaagaagcgctgcggtggagatgagtgtgatttgttcgtcaccaactgttttgttatctgacaaggaattggcgctccgggagtgcatacgggcatacggcgcagcaccgtaggtccgtagcagctgctgctagctagtgcagctgtgcagacgcctctgccgtgatcaccgacggagcggcttgtcgagttttccatgcatctatatgttgcctgcgcttgaaggttttgaataaaaccatctactatgagaattttgccctgcatcggagtccacacaaaatacaaagaaccgatattttttggtccagctttagtctttctgaagataagataggaatgcagtcgaacataatttttcccccataccagctggcagttgacagggatgcacgcacagctggcaatgcagtcgaacattttttcccaaacctgtgcgccgaagaggttggagtgcaaaccaatttctccagcactttctgtcaatcgaatgtcatatggcttgatccacaggcggagagaccgcagaaacacacatacgcagcaattatcacctgtggctccaaaacgaggcgattaaccacgcattcacacctcttgcacgcgacggacggacgatgcgcgtactgaaaaatgtcatcgacaacatgaaaccaaccggacactacaccaacatttttggttcctgcgtgtttcgggaacacactctttccaacaataccacgtcacc

SEQ ID NO: 170768 - DNA, 644 bp, Zea Mays
ataaactgtctctaaatgttatcagtggaatagaaagtgatggatgtatgagggtgcaaggttttatgcataaccagatgttggtggttctgatagactctggcagttctctgagttctgtcagtcaaaacttagtggataaaatgggcttgcctgtgcaaaattgtgcagcaatggagatgaaggtggctaatggagaaaagatgaggagtgacaagaaggtggttgatctggagtggtggtctaggggtcatacctacactactactctgagggtattggagttggatgtgtatgacctgattttgggttttgattggttgaaaaagcatagccctatgcaatgtgattggctgcagaatgtgctcacatttgtggacaagggagtgattgttcagctaagaggagatgtgggtcagcagaaggaggttccacaaatttccattctacaagtgaataaatggttggaaggcaatgaggtttgggctttggttatgctggagcaagtggtggataagaaagaagcagtagtccctgagcagttacaaaggttgcagctggagtttgaggatatttttgttgtccctactggtttgcctccttccagagattatgatcatcatatttctttggtaccaggacat

SEQ ID NO: 170769 - DNA, 688 bp, Zea Mays
tcaacatctccaacataacccccgcataatcaccctcacatagttaaagttaatgtgataatgaaaaaggtaacacataagtttcaaggttaacacatgccccaatgtaagcagcagactccaagttgtagctgcctgccctccaggtttcctcttattgatgcgcactgcaataaaaatatgcatttgtccatacccgcaatgctatgatcttgacaaaacacctcaaagagcgtttcaaatataatgtttcaattggagctacacacaagagcgtttcaaataacctcgcttggtctgtatctacatgcattttattaaagtttcttgtattggttcgctttaactgctatctgttttagttttttcaattgctgcagtacgtgaaattgcaaacatgtgggatgtgtttgactgctacgaatacgacattgctaatagtggcaagaatccagcaaagcgtctagctcactaaaacaaaacctttagcaccatttaggtttgttttttctttatatttgtgaggaaaatctcaatttaaatattttgagcatgttccatattttttagaatctcagtcttacatgttgttgctgcttcacaaattgactacctttttgtccatttatagtggttgaacaatttagccttatgtattagagtttctattacaacattcttaccagag

SEQ ID NO: 170770 - DNA, 651 bp, Zea Mays
gagccaatacaccttatgcgtttattgaatttcacatcacgcatagtgtacggtggtgctcattacttcgaatagatgttttcgagtggacaagtaggtttggaatgcaagatgtgtgatgaagttagtttgttttaggatatttgttgaaatgctccattcatgtgatagacatgtgtggttaattcaaatcgagtcgaggtgtgtgacgatgatattcatgaattaagtagatgtcctgaaattgtgtagtgaaacttaggttaagttgcaagcgatgtgagaatgttttggtaaagatgtatgtgaattgtgaacgagtcattcaatgtattaggcatgtcgtgtcgtggtggtataaaaaaatgggttagaaatcgatcggctaaatgccaaattcggttagagttgtttgtttcttaggagtgtgtggtgaagtgatggcatgactacgtagtcgtcacgtcatctattgtgtgactatacttaagtgtgtcttcatataagttagtgtaagtcaagtctgtaaaacacggcaattcttgaattatatagaagctgaaatttattgattgctgttttggactgcacgtactgttttcatcgtgctgtatgtttaatgaactaaattgtgttttctgtagatatgtg

SEQ ID NO: 170771 - DNA, 866 bp, Zea Mays
caatggaatgatactagaagcactcaggaagaaggtgttcgacaaaaatgaaaagtttgcaggaaagtggattagagagttgccctatgtggtttggagcttgagaactcaacctagtcgagctttacatggaaataccccattcttcatggtctacggttcggaggcagtgttacccgccgacctcaagttcaaggcaccaaggctggtcttcaaaagcatagctgaagcagaagcaaccaggctagaggatatgatgtgctggaggaagagtgattgaatacagtaattcagtcagccagataccaacagaccttgaggcactatcatgataaagtcatatgacactgatcctttgtagtgggagacttggtccttcgccgaattctaacgggggaaggacggcacaagttgtcaccactatgggaagggccattcattgtatcggaggtctctcggccgagatcatatcggcttactcaaatggatggcacagatgtgggaaattcatggaatatagagcatctcaaaaaaatttacccttaccaaggtctcaaaagctattggagcaacattgtactctgtaattggaggatccgtcgtcaataaagtcttcattttcaaagacattcaaactattaactatcaactgactttgattcgattggactcggaatcaacgcgcttactcgacttagggtgaccactataccctactaacggagcaatcggtttaagtcggcgatgacttaaaacggtgcaacatgctcgcgattactcgacttagggtgaccactataccctactaacgaagcaatcggcttaagtcggcgacgacttaaaacggtgcaacatgctcgcgctta

SEQ ID NO: 170772 - DNA, 1177 bp, Zea Mays
gctgttgttggggtggcctgatctcccatctgcctgattgctgctgaaatcccctgctctggttgctttaaacaatctggaacctttggggttgcatcgaagatctagtcattggtgcatttttctccttttcggctcggtgagccagaatacaatccctcttgagagatggctaggttgaccaactcattgtagctatttgctcgaatagtgttgagacgttcccaaagtcgtgttgagccctctctagaatctatcccttttcttttcatctgagttggcgtggtatccggcgtactagcataggtcgttgaaagcttaggcatactgcagcaccgagcgggttcattgagtcaatgcgaggagctcgttcagcttgcggtccatgaagtctgctaggatatgatgtcccctgatggctgccttgaattcatcccaagtcaatacatggtgagcgagaagcatggcgaggaagtggtcccaccatgtctttgcgggtccatggagttgttgggcggcgaaacgagtcttggcggcgtgagggcaagctcccgtgagaaggggaaacctggactccactaccctaagccatacatcggtatccagtggatcctcagcccttggtgaacagcgacggctgagtgctcaggaacccttcataagtggaagctgcttgcgaacgctgttgttgcccaccactgaaatactgaggctggagccgatgctgcaccaactatcgcagaattttgttctgctaagccattagtccctacatcgttggagcctgcgacggtggtggggaacttgctcattttgcccgcggcgcgctcttggtaccatttgtaaaataggaatttctttccactattatactcaaaacccacgttttacagagtaacttaatcattgtaaggtaaatggcaacgtaaattttgattttgagcttgagacttaatattgcaccaggcaatcttgaaccaatttgaaacataacctctaactttttcattaagcataatggtttttcaggttacaacatatcaggagactcaactctctagcctagtacatcatgtcatgccaaaagcttggctacacagagtacatcttcctatcatgtttcttcctaacccatcttaccctgagtagcagaggcagcgctggcctctagattgag

SEQ ID NO: 170773 - DNA, 1097 bp, Zea Mays
tatcttatttgttgctacaggcactaatatattgagcttcacggttcttttgactttccagtgaaattgataatttgttagttgaaatgcccttgactccttgcaaatgccctttacatcctactggcatgccagagttactggttaactgttcgagtgtaaaagcgcaggatggatcataagtataacttttgttgaagaaacgacatctaagaccaaagggaaaaactgaccataaacccacacacatctagatgtcactcttctaaaggatgcaaacccaccttaactgctctatacgcacgtggcacccaagtatcgaaacaaagtaacaaactgtgtgaaccaaagatgcagtatgcatagcctgtccctcacaaatccaggtatctggaacccatcccaacacagacacacgcaccaaagagtaagaatccaccaaccacacatggattctataccggatgaccgacggtaacacagttgttgcaaagaacaaacaccctaacgcagcaagcaccaacggagccgaccctaatgcagatgcagacgacatgagggggtctagcagagcaaacgtggacttacggagtcacagacaatgtctacggggtggcgggcagcaggagcagaccacacgctcccatgacgacggtgggtgcccaaaccaaagtggcgaacaacgacaaagacgggctggagaagctatcggttctaggacctaataaggcgaacatgaattgaggagagagggaagaaaatattaaaagggaggaaagtactcaccgtcgtgcagcacagagcgcggtgttgtttcagccatgcctgtcactggtgaggcatgggagcgagggagatgactactggtatggcgacgacagctacacggacacctgctcttcctttacaggttgcacgtggacctgcacggcgtcacagaccacataaacagcgtcatccgacgtcgaggcgatgacgaccgcgcatgggagctcgcgtcaatcaacggaacgcaagctggcgtacaccgtggacgtggccgatgtggggcccgcccggcacccggaggcggtcgcatctgcggaacggacccccgc

SEQ ID NO: 170774 - DNA, 573 bp, Zea Mays
cgggcttgaatattccgtgcgttgcgaattttgcaaatccagcatgcgcttcatcaggtcaatcatatatattggcttagcttgttgttcatcgagagagagagagagatggagagagaaaaacaggtgttgtttttttttataagagggatatatactctcgtttctattacttgcataacagaaatacaaagtgttttacggaacggcttttccccagcgacataaccgcatggtggccaagttcagaacccattataagacgatgacacgtctagaagccaggattattccacatcatcagattcatcatcagtgtccggcgatctgccttccgcttacacagcccggacaagcagtttagcaccctctctgaagaatatcctgcgaattcttgtttgctgagccctgcccctgcccaacacgaaaacaggtgttaattgttctatggtcaaaccatagttaattacacgttaggtacgtgcattcgaccgtttcttttaactcgcgaaaataaagcgccacacactactaggcacgcgtgtatgtatgaacatatgaccatatggtaca

SEQ ID NO: 170775 - DNA, 740 bp, Zea Mays
gtttagttttgagaagctaaagtaaagcacttatgaaatgggttcaggaacaagcattgttgattcctactttggcaccaaatatgaacttagatattgggtattaaactgatgtttaacttcggctcagaaagactggtacaactctggcagccgacacaaccaactacagcagcatcatcaggagtctcagatatctggtaaacacctggcccgatcttgcttactctggtatatgtgagtcattttatggaggcacccagagaagaacacttagttgcagtgaaacacatcttgcggcatgtggctggaactgtgaactggacgtcaggtatggcgcagggagaggaaaacagaggccggagcttattggatacattgacagcgatatagctggagatgttgaagaccacaagagcaccagcagcatggtttactagtcaaccaagctaagggtagtggctctgtcttcatgtgtagcagagtacattgctgcttccatggcagcaactcaaggtgtttggctagcaaggctgatggaggagctgcttgggaaagagggtgttccacctctgctgttggtagataataaaactacgatctgatcaagaatccagttttacatgacaggagtaagcacattgagattagattccattacatccaggagtgtgcagaccatggtttgatcagagtcgactacatccgaacagaggagcagcttggggatattttcacca

SEQ ID NO: 170776 - DNA, 1417 bp, Zea Mays
tagatatcatttatgttgagtgctctagttgaataaggacctgggaattttcccccttattccagcttgattttttgtacgttttctgtgaaatttttacatttcaaatggtcactaagaaactgtgcaacgtgatcagtttcaacagtttaaaaagtcaaaaaggttttatttttccaacaatgtttttagggcagccgcaatgatatagatagcactctatagcaatatctatgttatctacatatcacattatagcgaatctttacaatgatctatctatatagatatctataattgtttttagtatttacatacactctttaaaccacctcggttttgagtatatgctcactccaggttcatagataacaacacactctctctttatttaatttcttgccatataggatagatgctggcatggactccttatagagagcagacttggtaccattgcggttgcccttaattctatctctactctctaaaaaggaagtaggtcgtgcatcttccctccttgggcccacctatagtgatacgcacaagcatcgctctgcattagttcgctctctcgcctcctctttgttgagtcctcccttcctacttgtagtgacaccagcactgctctacctttcatccgctcgctctcttgccatctctccacatctggctgacggtggcttgccgctccaccccaaatttgaccacacccttaccatcataccgcatttggcctcacctccctgtttccccttctttcctgcccctgtttccacctccttttgccacaccctcacctcctctttgcattcgcccacattcagtttgcggtggctcgtcgctccactcccgatctagctcctcctagtttcctttttcctttggatgcacttttgcctcctcttcacatccgtccaacagtggctcatcgttcacccttgatcgagctatgccactgccaccatgcccatgattcttccctgtcccatccaccatgtcacatccggccttgccacctcatcgtttccccttctcctttctcgtccctgcacccattcaccatgaagcctctctcaccgctccaaacaccctcccctaccccacgactattgtacctgccctaaccataatttaagatggcaaccgccttgaccacacaaaagacccatgaactagtgcataagctccactgccctcatgccttcaaaagtagcagcatcgccctcggttcctaactcgcatagagaagatgccatcgctgcacgtcaggtgctaaggtcttaattgatgacaagcaaccaacatgtatgccaacccttcccttcctagaaaagtcaacaaagatttcaatgctttgtagaaaaaacaattcatcttttgtatgtgttagaaaaaacaattcatattcattcat

SEQ ID NO: 170777 - DNA, 339 bp, Zea Mays
cacgccgacacgcgggcccggggtggcagccgcacaagacctgcgcagcccagcaatgccttgcgccgacatccaggggccacctatcggtctccactggattacacgctctccccgttctgtcgctgattggcaggtccaggtggttagctctttccctgctggcgtaacaaaccccgcggtcagagtctcctcccagcttccgatcgcggcggactccaacaaaatcaaccgatctacgcgcgcacgattctagagatcaagtcaaattcggattgcactggcaccataaaacccagaccctcacgcctcccttcacccacatcaacttgagacgcc

SEQ ID NO: 170778 - DNA, 737 bp, Zea Mays
gtgagcgtatcgtattctctttggagatgttgttgttggagagccttcacgggatctaagtgttgctttgttaggggttggttctgaagtctaagttgtgtggcgtcggttattgtcactgtgacatgataactattggtatgtcttttttttatttttcgtggctgtgtacaccctatttgtgtagaggccgtaagacttcttagtgtaattgtatcactcgatgtaattggctaagattaataaagcttccttttaaagaacaaatgggtaagacttcttagtgtaattgtatcactcgatgtaattggctaagattaataaagcttccttttaaagaacaaatgggtgaaaggaactgtccctcatacacatacggaaaattaaaaaaaaaaactaaaacacaacgctcgcgcgaacttggcggcgaacgagattcagttaattcctaattgaagtcctttcgagtaataggctgcttcgcaccagctttatctatcaagtttcaagtagtgatgtgcctgtctactgcgagttgcgaggtagtctgctcgcgtgtgacttaaggaaagagaccgtcctggtcctgcgccgccgcggctttaaaacaatctcacctcggtgctccctgtccgaatcgacaccactcgcacaagcgtgcccacaagagtgtctgtgcatcgcagaaagagagagaagaaaaaaaggggcagcatgaactcgccacctccgctggc

SEQ ID NO: 170779 - DNA, 716 bp, Zea Mays
aatatcacctaggaaaagcaaatgtagtggcagatgctttgagccgtaaaggtcaagtgaacaacatcactactcatttgatgtcacaggaattgtgctgggaaatggaacaactcaatcttggtatgctcaataatatggaagcaacagttatggaagttgaatctactttggaacaagagattcgtaaaggactggaatctgatgagaaaatcaaggaaaataaaactatgattagtttgggtaaagccccagatttcacggaatatgaacaaggcacagtatggtttaaaaaagagaatctgtgtaccagaaatcgagcacctacgccaacttattctaagagaagctcatgattcgacttattctattcaccctggaagcactaagatgtactaggacctaaaggaaaagtattggtggtacggtttgaaaagagatgtggctactcatgttgcactatgtgatgtgtgtcaacgagttaaagccgaacaccaaagaccagcaggattgctacaacctctcaaagtaccggaatgcaaatgggaagaaatcggtatggatttcataggtggactaccccgtactcggaatggctatgattcaatatgggttatagtggacatgttgactaaagtggcacactttatacctgtgaagacaacttactcaagagcccagttagcagagttatatatgtcaaggattgtttgtct

SEQ ID NO: 170780 - DNA, 968 bp, Zea Mays
agcatttgaggcggcatagaaggtctgaccctgggttcgggtgaccaaaggggtttctaaagatgcagtgggaatgccatgcttttccacaaaactagtggcgatgaaagaatgggatgctccagaatcaaaaagtacagcagcgggggtaaattcgactaggaactcaccgagcactactccaggggcttgttgagcttcttgagcatcgacgtgattcactcgagccctatcgtgaaactgggtcttgcttagctggctgttggaggagggtgccttggaggcgggtgctgaaacattcttggggccattcaccgaattggagtaagtaggtacggatgtcttcaactgaggacaattattcttgtagtgactggggtctccacagtgccaacaagcattggctggaggttggctacttgcaacagatggggtgtggatagaactttgaccaggctggcgaaacgtgacggagcggacccttttggcttgctgaagctcggtcctttgggaggaaacccaaaagatcaaactctctggtgcctgtcctgctgcttagctccgagaacttgaaacttcctcttgaggcgacccttttcttcttctcgagctctttccacccggatggccttgtttgagaggtgcaagaaactgaggaaatcttggttggcgaggatggtattgagttctagtctcaggcccttcaagaaataggccatcttcttggcttccgtgctaacatcattaggcgcattgcgagccagctctgtgaatttgtggacgtattcactaacagatctccctccttgagttaactcccgaaattcttcttctttgagctagacgatccctaagggtacatgatgctctcggaaggcggcttcaaatcctgcccaggtagcatctctgacggcagcgctgaaagtatcccaccaggatagggccatcccggagagttgatgagcagc

SEQ ID NO: 170781 - DNA, 393 bp, Zea Mays
gcctcatattgcttttgcagcaaatttgttagcaagatacaactctgctcctaccaaacgctattgggttggagttaagaatattttttgatatctaaatggcacaaaggatcttggactctttacaaaaggaatgataatcatagtttaattgggtatactgatgttggtaatttatctgatcctcacaatggcaaatcacaaacatgattcatctttttacaaggtggaactgctatttcgtgtaagtcttctaaactgactttggtgaccacatccactaaccattctgaaataattgcattatttgaagcatcgcgtgagtgtgtatggcttcgtagaatggtaaaccatatactcataatatgtggtattgcttcaattgaatcaccg

SEQ ID NO: 170782 - DNA, 423 bp, Zea Mays
tgaaaattttccctcaatggtgatccagacgtaatctaccataataatgtcatatttcaattagctcagctttagcagtcccatcgggtctgcatagattggatgggtcccgaatttctcctagcagttttttcttgtgttttatgagttgcctattttctgtatatggaatcaccagcaagtatgaccagtacttctgaaacaacaaaggatacacatccattttgtcttgaacgtccagcctgaactgaaatcgtggaggctgagtgaaggatgctttaaagaatttcaaggttacaatgcttagttaaattgccctactgcatccaaactagatttgtttgacatgagaatttttctcaacatgatgattgcgcttgtacattaaatgtttcaattggagtactcaaatctcttttcctg

SEQ ID NO: 170783 - DNA, 1172 bp, Zea Mays
ggagagtggaatatagatctggtgaggccccttaatgattctgattgttgcttatgggaagagcttcatactgagcttagggagcataatacctctcatgggagtgacttagtgttttgggctctcgacaactctagcagattcactacaaaatccctttacagatttaggaccgatggtggtgtcaaatctcctgtttacaaaaaaatttggtattgcaaggtgccgttgaagatcaagatttttttatggcaaatttacaatgggaaaatccaagcggccgcagtgctagaaaaaaaagggtggaagggtagtacgctgtgctctctgtgtggggacaaagagacagttgatcacatctttattcactgtgtcctctcgaaacttgtgtggggaagattgaaaaattttgctggttgggatcttgtgcccagatctgttgctagtatgtttagtaattggggagtgggaacatcccaggctgcctgcacttttcatctttttattgttgccgggctggtttggtccctttggtgcaacagaaataagatggcgattacgaaaaaatttcctaacagttcgacaacgatcatatatgagatcatgtctttcttgcagagctggagcgtgctactcaagacaaaggatcaagcgatgttggaagatattctggactcaatgaagaattggttacgggaacagcactcggttgaggaaaattgcagcgacattggagtgatttgaagtggaaaataccctttcttttctgtttggtctgaatactgttaaattacatcgaaaaaactgctttgatcctggaagccgtggatgcaaaattttgtcccagtcgtggaagctgtcgctgtaatggatgccgtatgaggttttttcttttagtgattggcctgtttttagatctgttaggttagttttatcagtgatgctttacgtgaagctttatggtgtgtactagctgcgatctggcggctgatttcagaactttgttagttgaactttgtcaggtcatagatattaagctggtgatttgaagtctcagttcttagtggagggtctgttttttttttgatggtcatgggtgtcatgtgtggagcttccctggttaactggttatcccagttcaacgctgtggggtgtgctctatgtagctacct

SEQ ID NO: 170784 - DNA, 676 bp, Zea Mays
ttcgaaaatagggctgaaaaagaaaaaaatcggtcatacggagggaaggggggcaggcggcggcatgcgctgcgcacacccttagagcttgtgaatcatcctcatagcaatcccatgacatctggacaagacatctgcggctaagtttgaattcccagccttgtaattgtaaacaacccccaaactgtaggagtactggatagatacaagtattaaaataaaaataacataacagttcgaaacacgaataaaaggtgaacagaccgaaaaggaatcaattttttttctatttcagaaaaatactttcacttcctgcctgaaaaaaaaaggaatggcaacaaaagaactcacgatgcaatgcaattaaacagccagatattcccttgcatcccgatgctccgtgctattagaacgatgatttccattgcaaaagggatatttacacaatgatttatccgcgcaataattcgaaaaaaggtgtgaggtgtaacagctagcttacaagtatttgggctcaacatcttctcacaaagttgcatctggataacaaatgttttagcgattcttcccccctggaaaatacaaagctcatggtcataaaattacagacgcaaggttttgtgttttaacaactcttttgtgttcaacaaaccatgtataaggagccaacaaaaac

SEQ ID NO: 170785 - DNA, 451 bp, Zea Mays
ctgcgacggagggccaataaagttggtcgaggacgagctagatctgcgacggagcacccgatgtacacctcgccctcccctccttgcggccgctgcttccccgtccctgcgagtctgtgaccttggccagcttccacgacccctcctacttgctcgagagctttagccccggcgccatggatgagagctttgccagcaccaacagaaagctttagccccagcgcgcggagtagacgaaggtgtcgtttagcggatgcccgagatccgctagctttagcgtgtatgaggacgtgctctaaatttaccgaactttttagcgtgtgttgctggactcatagaggaggtaattgtccgctaaatttaacttacagaatcatttatcggtcgttgttggagacagcctcaatagaccagtactcaatcgtatggaagtagaaactggcaaattgca

SEQ ID NO: 170786 - DNA, 985 bp, Zea Mays
cctcaagctaacaacaatactcctatatctagttgcgtccaaactgtgtttaggtttacctggtgtcagtttcagatgttgctccattagagtgtcaactggattacaacatgtcataccacaggcttcaattattttctctgcataggcactctggccaatggttacttcacctggattttgttttacttcaatgctgagatagtaactcagtagacccaggtcactcatactaaaggtagccatcatctgctgtttgaaaacagctatgcactctctgtcagggccacatataataaggtcatccacatacagcccaactagtagcaaactcatttccacccctcttctgtaaactgcatgctctttaaggctcctttgaagcccagttgaccatttcaagatcaagtctggcattccaagctctaggagcctacttcagtccatatagagccttttttagtcttagaacctttctttttgaatttgaatcagaaaaacctggtggttggtttacatatacttcttccttgagatccccattcagaaaggctgactttacatccatgtggtgtacttcacattcaccttgagctgcaagagtcaatagaatccttactgtttctagccttgccacaggtgcaaaaacttcctcataatccactccatgaatctgagaataaccctttgcaactaatctggccttacgttttaccacttcaccggctgggttccttttcaccttgaagacccacttcagcccaatagccttgtggtcttttggaagatcagcaatttcccaggtattgttcttcactattgacatcatctcctcttccatggcttgcctccagcaagcttgttcaagagcctaatcaacactagcgggctcatctgcagccagcatacaaaccccactatattcaaaatccagatcttggtatgttgagtcatacagatcgttcaagcttatgtacctgtagac

SEQ ID NO: 170787 - DNA, 718 bp, Zea Mays
ccgccactgtgtccgagtcgtcccctcacccccccgcctgcccgagccatctcaatcggcattagcgccattcccgccatcatggcgagctcgccagtgctcgccgtctcctccatccctcttcctccctcgggcgcctataaaaggacccgcccgagccccgccttcaccacaccagctccggccatctccactgctttcccccgagccaatcgagctagcgccgccgtgcctccctcgtcgctccggtgagctcctctccccctttctggtgatcctttgtacaattaagctagcgcttgagctctgccacacgatcacggtcacgaggcacacctccccgccccctattgcgcccaattgccgcaccggcgaccacgccgccgcggacactcgccaccgcgccgcggaccggccgccataggcccccgccggtccaattaaccccacccccgtgatcccctgcacccgcccgtgcttcgccaccgcttccccgtcgaagaaccggaccaacggcggagaaccgccgcgggattcgccgtcggccggactccggtcgaacccccctccctccgttaccgtcaatgccgtcagccccctccctctctctggcgtgcgggcccacgccacggcgccgtccccgccgtcgccccgcacagctgggccgcaagcgctcccgcgcgcgcgctcgcgctcgggtgggccgaaaatccccccg

SEQ ID NO: 170788 - DNA, 538 bp, Zea Mays
gattggtttcatataccctgattattgctatccctcgcaaaagcagagaaagaagaggaaaaccgccgcttcggccatctctattgtgctgaagggcaaaaagattaaggtcttgacgcactgaccgagatacattgagacgaccacattgccgaagctgggtgaagggacatcttccattgctgaagcagaacaacctgctcctgccgctcccagggaagacctatttgaattgccgaaggttcctgcaatcgggccagtcgaaacgttgaaacttggtgtcaaggccaaagaagaggcgaccaaagagccaaagctaggggaaaaggtagggctgccaaagatcttgagccccccggcggagtcaggattgccgaagataacaagagctcctgcaataactcccaagaggaggagaatggctagagtgctagacgctgtcatggagacaacaaggacattaactcctgcccctgcaaagaaaattgccgaagctgctataagtcgcgctgaaactgaagctaggccctcagcgcct

SEQ ID NO: 170789 - DNA, 738 bp, Zea Mays
aaccgcaccattacgaacactgcacaaccttcagtttttacagaaaagagacatacacaacttgcataaacttcagtcctcagtccaacacactacaattgaaaacagaactcagagtgtccacagttatgtctgttgctaactcattcaagatcacccatctagtcgtcatcgctattatcatcaacaacatttgggatatttctctcgtcattatcactcgcatatagccatcctgtttcatcttcttcgtcctcaaaataatcttcttcatccctttgtctatgtagatcttcaactacacttgcatctataatatcaacattttgtacccaacagtatcattgtttatatccactttagtatgctgaatattagaagcaacacattcatcgtcttggtaagctgtgaacaactctcgtaccatatcaggcaatctatcttctaggttttcagactcattcaaactaatatcctcattcatacaatattgttcttctagatggtcagcttgttgatttattacagtatcaaattgtgcctccccatgatgtatccacgtagtgtacgtgcttgccatgccatgaatatgtaaatgatcctctatctttgactttggtctggcaatccgattcaaacactttcgacaaggacatagtacctcatcaatatctgcaaaatgctctgaaattaacttcatgaaacttttcactcctgcgatatgctgcttgctgaaac

SEQ ID NO: 170790 - DNA, 491 bp, Zea Mays
ccgagccaccgcgaggagagtgtctcccttcaggggctgataacgggtcggacacatgtcctatatgttcgttccccgagcaactatagtgttccctcgaaaattggtgccacgaccatcctcctcctggggtggagtggggcacccttccaccccctttataaacctcagacggtcgttcccctgttgatcgtccttgacgcgtctttcgaacccgtctccaatcaggccaacggtcggactttgagttagatgtcgcactccatcgatcacaagccgaggtatgcttctcttctcaggcttgctgacgtcctctctttgcctaggtttgctctatcctttccccgcaacattgcagtcgcagtcagcccggagactgcatctcgaccaagctccacatctcttccttctccacctcatgtgctcagggggctacgctgcctttcgcgcggcataggaggccgccgaggttgaagtcgagctgatacggg

SEQ ID NO: 170791 - DNA, 698 bp, Zea Mays
caacaccgcaagagatctcctttttgttgagaatcgggaccgcattagcaccagagagagggagcttaacaatatctgcgtaatatatactcttcttgccccgaatagtcaaccaggaagcattctcttcaccaataaatttcttgtactcatgaatccaattagggccaccatgattccaaagattgaaaaaggctctgaattccacacgatcaatacactttgaattgtagatatgaaaatccacagccttagaggaaaacgaaaaacagaaaacccgatcagaaagctgatgaacctcaaagcctgtcgtaaatcctcccagggcagcttggagaaggtagccaacaaaatctgagttcagcttgaaaatgcatctaccaaatgaaatcaccaaccagaaagtcgagggaaggctcggacgagctggataaaccgaagaggccagacagagcctgagagaatcctcgaagacgatccccggccgaaaatccaattttgctaggtccatttaggtggaattgagaagaccagagggcagggaagcaggaggaaggagatcacctgaacctagaaaccgccgaggggaaaaggggaggaagtcaccgccaccaccaccaaacagctccaccgacgacaagccacaaccagatcactggtcgggatccgccgtcgcgacgcctccacgaggcaacgac

SEQ ID NO: 170792 - DNA, 588 bp, Zea Mays
cctgcctcggggcagacgagaatgtgatgtggattggatccatcaacgttctcctgccagaggacaccccatcaacggcaaagggaggctcgacaatccaaagctctcttgaagcagtcaccaaggacgtgtccaaacaccaagcagaacaacggtaaacagccacatcctttagctccaaggtgtctggatgaacctgatgaacactagcaaagggactaagcaattgttccacaattttggtttcccaagcatggatggggataccctgaagctctatgtccaacaaggtaggtaacacagcacccctagagttcagaaaacgggaccatttcctgcaggtgatagtgaatgtggccgccctgagaaaaggccaattgcccacaagcatctccaccatgtcacagctaggcagaaataggatgaagcttgactcggaatactgtcgaattatcaaggacctctcttccaactccagcctaggagcaattaactcagcaatctcttcaactgggactctctcacgatcgctgataaaagtaatcaccactgccttctgaagatcatcctctgctctggtcatctgct

SEQ ID NO: 170793 - DNA, 478 bp, Zea Mays
ctcttttggcactctgaggcacttcatcaactgggatacatggaatacatcatatacatctgctagatgatcgggcaactccagttgataagccacttccctgactcgctttaggatttcgaagggtccaatgaagcaaggggacaacttccctttgactttaaatcttctcataccctgaattggtgacacctttaggtacacttgatcaccttcctcaaactctaaatgtcttctttgggtatctgcatagcttttctgacttgactatgcaattctcagactctcccttattatccgaacttgttcctctacctcctatataattttcgatccaaagaactgcctttcaccagtttgatcccaatacagcggggttctacacttcctttcatataatgcctcaagcggggacatcttcaaacttgtctgataattgttattataggagaactccacgtagggtaaactcttgccc

SEQ ID NO: 170794 - DNA, 538 bp, Zea Mays
acaaatcgcatgagctggttttctccttcgtactgtacgcaccgattaatactactgtactagtattaatcagacgcatgcaccagccaattaatcgttgccacatgagctagctagcatgttgacgacctgtttgtctccttccccgacccctccgatgggtggctctgcaactgccagacaacacggccaaggcgaacatttttctcttcgtaccgcatgttctcgttgccgttctggcctggacagcattttcatgtctatggagctgccgtctggattcctggctactgcttgaagcgaagtcaagcaagcggctttacggcagccacgagcccacatgccgtccaaccgggcggaaagcagagcagagggatggcgccttcaacctgtccgatccgggttatgtgcatcatatctgtccgatcctcgatggaaaagagcagacaaacgagcacggcagtccgccctcagatctcaactcgcaagtcaaattgcattttcgtgtgcgaccataaattagatcgaccaacggggg

SEQ ID NO: 170795 - DNA, 1007 bp, Zea Mays
ttattgtgcatgctctgagctccggagggtgtgcgtggagggtgcaagatttatactagttcgaacagaatgtccctacatcctatcattggtggtttgcgctaccgacaccattgatgatcaaactcatagtagaggttacaagtagtcgagagagggaggagaagcttgtagatctcttatgagggtggaagtggagcttagaagctgagaggtgtagtcctagctaagtcttggcttcgcagggctccggcctcctggtcctcaccggtgctcctcctcctgttcgtctttatgggctcgtctcagtctgaaggcatccagtcgtctccatgttgatctattctctccgtctgtcggcccccttgccaagagaccagcttctcccttttataggctaggataggtgtcgaccagaggtggcttccctaggaaggagccataagggtgggtgagtccacgcgtactcgcgaggcccgaggctgtctggctgccacgtatttatcgcgggggtggcgatggtcccagctgccatcattccggctacgccgacccctggcttccgtagtctagggctcggtgcaatccgtcgtgtagtgcctcacgggaggtctgcgtactcagaccttatccgataggccgtaagtgtgctgcattccgagggtgcgtgggccattaacgcgccgtagtccgggggctcgtaaatcatgagtgctttgtgactcgagggttccgtaggtcatgagtgggaagcgaaccggcgcccacgctgtggctcggtgccagatgtggttaatgcaaccagtcatttagtgtgggtcagtctgggaccgggcgcaagatccactcgagtggttcccttccgacatgcctgtcctctcttgtcaggctccaccacgccaggccctaggcgcagtggcacgggtttcgaccggggcgagtcctttcagggttggcgtaccagtctcttccgactaactaacaggccccgcgatcagggccctttc

SEQ ID NO: 170796 - DNA, 616 bp, Zea Mays
gcgatcttctccagcttcacctggaaccatgcttgtcaagctctcgccatgaggacatagggaaggtgcatgtacgccgtgtcatgcagctgctgccgataggtgtggctgagggaccacaaagctctctgagcagcattgctgaccgaagcaacataggtggatagcaatgtcagagactcgtgagatgatagagtcctaaaacctctatctcctgcatccaacactctgacatgcacgagagtgatgtagtaacaatcccgagggggctcagatacctgccttgtgtcatagagaggtcgaacgtaggttcccaacgcatgaagcacatcctacatcaagtttgggaagtgtcccatctcgaacattgaggtgtaatgctccgcgacaggccacattacaacaaagtcgtcttcttgttcctgttcattgttggcatcttcattattgtcgttttcttcctcttcatcctcgtaatcacctccatcattgtcagaaccatcagggtcatcacctccaggagcaggggcttgagctactagcacacgtagtgctgaagatgaagctttaagagccttctgcgagcgtgctgctttttgagaggtaggacatgttt

SEQ ID NO: 170797 - DNA, 276 bp, Zea Mays
cagaggaggaagaagctttggtggaaggttcagctctcaaccgagaaggttgttttgcttattctgcggagaagattagggacatacaataaggacgtgccaagtcacgatccaaaaggaaaaagaaatagttgaagctgaagcatggcagaatcagccaaagcaggtcctgcatactgcttcatgctattctccatacattctgaatatgtgggcaaccagcagtccacaacatcagttgcttcggtaagccactcgcaagctgcatgggccctg

SEQ ID NO: 170798 - DNA, 662 bp, Zea Mays
tggccaggatacgcaatgaccggtgctctaacttggatgatacctaattcaacatctaacaaacgtttcccctcgatcaattgcacggttcgagctcccaacctctctgctcacggtgaccgcgcaatccagggatgattcaaagtgttcccagtgatctactgggttctagcttaatcggtcaggtcggggagtatcaagagcacatcagagtactgaaacgagtgaacagagggcatgaacggacctgaagcatactggccacggtgagagccttttcacagcgatggaaaaccgatttggggaaagtgagcaatttggaggctctggtgaacaattgaggacgagagttggtgcttttatgtgtaattaccctatggagctcatggcgtgctcaatttatagagtcagtgagcggtggtgtccaattcgaagggattgcgctggcggccgagaagggggtgagtcatgacggtgatctaccgtggcaatcgcagggcaattgagctacgacggttactggatggtcactacggctcatgacgacgcgatagacgtcctaaggtgtggcgcccccatggtgaatggcgaacacgccggtgatggccgctcggccacgtcgccggtgcgaacagatgaataaccgagcgcacagtacttcc

SEQ ID NO: 170799 - DNA, 431 bp, Zea Mays
cgtctttccagtgaagaattagcagcaaagcgggctagtggtgagtgctaccattgtactgaaaagtatactgccgatcacatatgtgcaaacaaaggggttttcttgctggaattaacagaagataatgagggtggtgaaacattggatgatgttggcatctctctccatgctctcaccggtattgatattggcactaccatgaaactttctgtttgtttgtatggccgtcagttagtggccctcgtggacactggttcgacacattccttcatcaatgattctgtggtcagccagctgcagcttcaagttgaacctcgtccaggtctgacggtgaaggtggccaacggagattgggtaactactgcgggtgtgtgcactcaactgcctctggttattggagaagctgatttctcgatatccttctatac

SEQ ID NO: 170800 - DNA, 427 bp, Zea Mays
caaacctaaaattgtcagataaacagccacacgagtaattctctattttgtaaaccaagtctgtttgtgtttcagagaggtgtggtgttcagatttgagcgctcagagaggtgccttacatctcatactcgagcatcgcaagatctgggcggggctggcgcgtagaatgggaagtactcgagcatcgaaagatccaggcggggctggcgcgtagaatgggaagaatgagatggcggggtggtcctgcacttgcgatgggatgcgggccgatggtggtactgtgcgctggatgacgatgaggggattgggttgcgattccttccatggcggcgagacgtggattgcgtttggggcgagcagaatatgggcggggcatccgcggtgcatgagaagaacgattaggcaatgagtggtcctgcgcgtcgtc

SEQ ID NO: 170801 - DNA, 839 bp, Zea Mays
aaaccactcgcttttccaaccggtcggccatttggtacgatagtcaagaactgggcccttcgtatccttccgatacacaaagttgtaataaccgaagttctcatgaagaccatatgctctggccttcgtttgatagtgcagatcatgcatccggcagaaagcttcggcattgggactcataccctagcttcagagggcccatatgtagacactaagtctaatgattgcattgggtgtcagctgatgaattttttttcaaaacttctccaatcatctcatgcagggggaaatgaagccctgccctgaagaagcttttaaaaactatgacttcatcgtcttttggttctggaatcacctcttccccagcaaaccggacaagcttgctcttggcctcccccaaagtagcccaatttcttcatcataaccatgtcgtctgccttcatagtagatttaccaaattcaatgtggctaggtttcactgggctcagaatagtgtagtcctcttcttcttcattctcacttcctccttcaactgcgatctattcagcttcagcaatcgaggtaccttcggcaacagcctcctctggcacaacaagacccgattgcctcatcacttctgatattggtgccgtttcagtcacttcggtttcgtccccctcacgagacaccctagcagtggatcatactctggccatttcagtgtttacgcttttttgagacgaagctgatctcaagtggcgaagcgtttgctcgaaaatgcaatacagaaagcttcggctatggttaatttttttaacagcacaacagtgcgatggcaatgaatgttgtggtaactcctc

SEQ ID NO: 170802 - DNA, 808 bp, Zea Mays
taaagtgctgggttgtagaccttgaagtgatacctcagtgcagaaagccactccggcaagacctcgtgcacccgcctgagcacatgccagccacttgtcacaatcacaacaaaatgaatgtcccaccatgagccaagttaccctaccaacctcaggatgttgcgactacactgtgacgacgttgccactcacaatacgccgatcaagactccctccattataaactgtcgttcctccgcctataaatactgatgcccttaccagggaacctcacagtccagccaccatctcattgtcgcctccacatccgaacaacgcgtgccttactcttcaaaccagagaacaagccatcactgtcaatttgagacgtaggtgagcatgccatgatcttcgaccccttcctccctcgaagtcattcttaaactatagaagttatgaccttagcatcgattaagatagctttccccatggccatcacttgcctattgaaaatatgcaaggaaaacctcgcttaaacaattgtcatataataagcataaccaagtttctagaagcttctacaatattcatgataaaccttgatcataagcaagacaactttctaggaacaactatgaaaaatcatgatgtacatagccttctagaactccctacactaatcatgataagtcatgaagcatagatatttttagacctccctagaactatggtgatgtgtcatggtgaggtgtccccccatgtaaggtggaggtgacacatgcatgttgaggtgtccccccatgtaaggtggaggtgacacatgcatgat

SEQ ID NO: 170803 - DNA, 449 bp, Zea Mays
ccaacctctcgagtcttgtcgccctctcctatccggcatccttcatgtgacctgcatccaacataattcctaagtcctcctaaccctagccgccaggcgccagctgcccttgtttggcgcgagtgtgagtccgcgacccgccttccgtcggccgttgccgttgttgtccgcacctccgcggtccgaccaggcagttgctgccttccgctaggcgcccaacgcccagcggcccaggccatttccgttgccatgtggtgttggccgggtgagttgccgagtaggccgaggtgctgagcggttgaggtgctgactggttgatggaatcacggaagctataggccgagctgttgaggtgttggccggctgacgcctgatggaagctacatgccgagcggttgacggaagctataggccgagcggctgaggtgcagcatccagatccagtcggc

SEQ ID NO: 170804 - DNA, 912 bp, Zea Mays
gatggcacattaagtgaaccggtatgagattgtggccatcggatccgaatccaacggcccacggccgggacgcaggtttggacgcggggccagatcttaccgtcggttctcaacggactgtcccaaaccaatttccatccaacactaatcccagtcatccaaacatgatctaacggtcatcaacccttcttctacctcacgtacagaccagtgcgccactccgacgccggtgttggagatcacccagacaggcgccccagttctccagactccaattggacagagctatgcataaaagagatgatggcgaacgcgtgcaatggaaactcaccggtatggatgcaacatagaccactggccacgatgcaggcggcccgacggcgattccccagctccaaaccgtggactcgcttcgaatcccaaatccacggcggtgcagttcccacccatggcggcgacacgccggagcagagtagtgctagagccacgacacacaggtcctaatgtggagttgtgctagtcgatgaagagataaaggagaaactagtgggaaggttcttactggtgaacacgacgtagacattgtagaccacgccacaaagaagccctactaccaacatcagagtcgacatcctgcggctgcaggtttgatccgcagcggcgtcttgagttcgtatcgaccaggcctcgattgatttggtactttgaggggaaggtcacagataggttttataggaagaggcgggaggaggcatgcacgaccggcacaacagagccgtaacaatctgcacacaaatcgtaacaaacctacgacaggggcggatttggtggtcctagagattttgtgcgatttgaatctgggttacggctgatgaggcggatccatagtttagtagtgtagggccgcggcgt

SEQ ID NO: 170805 - DNA, 385 bp, Zea Mays
actatgacctttgcatgcccctcaaaatgacctgtttagtatcatctatcattcagcgcaggggtatgctgggaaggtaaggttgaagctaaggttaggggtagtgataataaaactgtatccacaggtacaagtggtcaccaagttgtatatgtttgctattgattaaataagtgtcacctatgcttgtccaatgaaaagtggtagttctaacgatgctcccacaagatgccaatggttacagtggacatgttgtgatgggtggctgctagattactccctccttaggattgctggaagaaaaaggagaaagactgtttacttagccttttcttgctgctgatttttttctgttttcatttcattattgtttttttgtgtgcag

SEQ ID NO: 170806 - DNA, 1055 bp, Zea Mays
cacatcggtatattttgcgatgcctgagcaaccatggaaccgtctcacattgtactgtactaacagctatttcagaggtgcttaatccctgcaagagtatgatgtgtgtagtctagattgcttttgaattgcctgaattctgccataaaatttatgtcttatcatacatatttccctatagtatatttggatgaatttacgaattttttgcttacttctcttttgaaaagcagaaatattcttgtcagattcaaatagattctgtaggcggcacttcttgtatctgaactgtttgatcattttatcttctcagttatagtcttgcagcaacttgcatagttgcatgttcctagcggatttgccacactttctgtttgcctaagattaggtatagtaaggttaggcaccaccaaccaaacaggccatgtatgacaataccttattcattgtttactatatgcttgagggatatggtttctttgtaatccacgataacttcagcatcactgagaaaaatgctacataactgtttatcatactatcgctattcatcttgtttttgaaagtgtgcttgaaactatatcgatatactgccttcttttttttgcaaggaccttgaatcatttgggaaatttaatgcagattggacactcagcatatgttgattctccactcgggccagatgcgtttcgggaatatgaaaccttacttattcaggaccatgatgagcttcttaagaagtctgagaatttagacagacataaagaaagcattcataaagaggcgagtgattttacctctgacgttgataattattctaagtggggttctggggtgcattatggctctaattctgaattcagcccaacgaaaagggatttttttgatgacgaaatgggccaggtagaagcaagagggagaagactgtttgtagctgtgcgtcactttccgatgattttctctcctatttcctcaagggtttttgttttgccctctgaaggcataattgctgactcaagcctgtcgaatcatcatgaggattcccttggctctgg

SEQ ID NO: 170807 - DNA, 456 bp, Zea Mays
catccctcggccaaaaaccctttcccccaactttattgagacaacgacggcgcacaggattgcccgcggtggtgccatcgccggcgctgcttgattccgccatccatgcccccattcactaattggacccgtgctactgcattactagcccacggcggagctgtgggagaagttctcaccggcaattgatagggcgaagaggctggtccgcggtggtcgcattccgcgcggcaacggagagctcccctggatgcggtaattgacggcgtcgatcaccaatgtgctcaaagagtggcgggtgaggacgagcatcccgcgccagagcaccacgttctcagcaccccctttctccctcggatcaacccggcaattcagggactctctctctctccctcgcgattctgatggcagacggggagtatggctactggacgcatagcccgcgacgcacgaact

SEQ ID NO: 170808 - DNA, 484 bp, Zea Mays
ggatcctggggtgttatattaggcttgcatgtgccctttactttctagcactcccattttcgccactgattcaacttcctgagcacttcgaaaaccccagattacgccaccgtcgtcagaccttgatcacattcatgaccattttgcacctgtgagttcgaggcattcgttggtgatcgaaaccaagtatctaaggaccttagtggcgatagggctcctccaatagaagaatatcatctagtggaagattctaggcaatgattccttctcaatgcccgatgccgaccaaatagtggtctttcttcaattttttcttacacaaatttggtcttcaacctacctgtaattagggatatgttgcattaataccaaatcgagctcatccatcttaatcataacttcatcttgcacatagccatatttgcccatctctatgaagcaaacttaggggagttcgtcattctccctcattcaacatatgttc

SEQ ID NO: 170809 - DNA, 372 bp, Zea Mays
agggtgtcctatggtttgaggacagactggttgttcccaaaaatccagaactcaggaagaaaatcttggacgaagctcatctttccaagttttccatgcaccccaaaagtaacaagatgtatcatgacctcagatccttgtattggtggaccaggatgaagagggaaatagctaagtatgtatctgagtgcgacacttgccaaagaatcaaaggtagtcatttgaaggtagcaggtaccttacaacctctccccataccatcttggaaatgggaggacctcagcatggatttcattgtgagattgcccaacacatcccggcaccatgattctatttgggtcattgtggataggctaaccaagaccgctcatt

SEQ ID NO: 170810 - DNA, 510 bp, Zea Mays
gggcagacggaagctgctgatgcggctgctcctgcacggccaggagaggcagagcagggtgatcagcaggtgcagcacgcgaagcagacgtgatggcgaaggcgacgaggcggctgccccccgaacattcccgtttggttttatggtgattatgagaatctacccatcaaaatctgctaagagagagccaaacaaacaggatattacaccttggattctgtgcattatctcacaatcaaggttcaagttgattttcttggttaatgtgtagaatccaaaaatcggaaccaaacggcacagagtcctttcttttggttgctctggtgttaggtgagatgataagagatgcgcgcgcatgcatgaagtgttttttacccagctagccggctagcctgctataccttgcctcgtaaactgtaggagaatgtagaggaacgcttgttttcacccatgagactggtctttgatgtttcatgagcagaaaacgccgtcccctgcacggaagctggc

SEQ ID NO: 170811 - DNA, 405 bp, Zea Mays
gaggaagaggattgttagcattctaagtagacaggctatccggtcgattaaagaagaccaagaggctttgaagaagcaaaaaactgtatcagagccaaaagtctcaaaaatggaagaccaaaaatggaagcttgccgagatatcctcttggaagacgaagatgcaagatgtgtcgaagcagactacgagcccttcttcatcttctaccgctgaggtcttggagattttgaaggtaatgattgagtctttcccatttgcactgctaagtactctgaggttcgaactgactagcctcttgcagacaagggaaatctcttcggctgccgaggggaaaatgatgggtagaagaagcgacatatgatgaatatactggaagccattgaacagaccccaccctcagcttcg

SEQ ID NO: 170812 - DNA, 619 bp, Zea Mays
tgttgctccgtgaagatggtctatgattctagaatggacggggtgttacaagtcacatccaattcatataaccgaacgaggccttatgtggtgatcccgtggattttttagaatagctaataatatgtgagaaaatgcatattcccttccctagttttcttcacttgcacatactactttacaagacagcataccacctctatttaaagaaagaacatagtagaatgtttgatatatttgactagctattggctcgaactagagctaaacattagcttaaattagttgtggttgaatagcaagttggctaacaagtagtcaaatactaactaaaaatctacctattggcccttatatttgcatccactagaattaattttgtgtactttttaagtgccaatcaattaactattgtattgaaatctagatatagcatgtatagatatagtgccttcgtttggccccacacgactctgactcctcaagaagccacgagccacaggatcgatcgaacatattgttatcatcaaatagggcatatacgccaaacatgtcaatagcatttcattcttatatgactaatgcagagcctagtcagccttcgtttgtccccaccgca

SEQ ID NO: 170813 - DNA, 589 bp, Zea Mays
agaccagtgacagtgaccgcgcgcctcgcatttttcttccactcctcacaatcatccatgccactggagccttaattagcagcaagggagcgagcttcctgtccacttgaaacccaggaggaccacatcgtctatgagaaccatacaaacaatttccatatataatagcctccatgttgcgctgggcgaatgcgagtttggcacacaatcaataagacctcatcagctctgtgtgagcaacaaactaaactattcgagattcttgtgagggtgacgtagccgggcaggaatatacccccatcaaatcccttgtgccttcgcaataaaaatggaatttggtttctgagcagcaatcttaatttatatcctgacgttggcgatgcggacgtgcccattgttttatgttttgatagtagggcgtattctgcaagtacctggaagaggaaggagatagtacttccttctttttgaaacaaacaaagggtagttagtactttccttccctcatcgattgatctggatttttttttttgaaaaaaaaccctgcaaattgcaccactttgtcatttgtggtgtggtttaagtgtgt

SEQ ID NO: 170814 - DNA, 412 bp, Zea Mays
cttttggtaaaatagggttattaaactggcccttatcagcgctcttttccagcttttctccactccgctccttgcttctcacatctctcacttctgcctgcttccctctattcctacagcggtttggcaaagaatattcgctccctgtgactcccgcatcagcacatgagataaccagggagagaatccgggggatcaggtactttttgcttcaagggtgtggtacaaaatgagtagagcgggagtgattcacgtatggagtcggacgcaaaaacactgttactccgcaaaatctggggagtaggagcgctgacccctccctgggggtgtgttctggagtgtgcttgtttcgagcaagtgaatctagatggtctctcaacttgatagtatatgaaattgtcccagatctcaa

SEQ ID NO: 170815 - DNA, 556 bp, Zea Mays
cttctttcttagtatagttgcccaaaatttcattgcacatagattcaatcatttctaaccattcttggcaaggctctttgaaatgtttcttgaacttgaagtgatagggcagtcgaacaagttcattctttttcttttctcctttgagcttcgactattccattcctttaacgtcagaaatactctattggctaagtattcctgcaccaaatctctagtaccgatatgctcagacacaactcggaattcacccacaacttctcggcatggtgacccttgcagcatgtcgcataggggcctagttaacccgaaggttaggtccagtgggctctgaactatcttctccttcttctcatcaaccttaacataaaaccactcattcttccagccggttggccatttggtgcgatagctgaccaccggggtcttcatatctttgcgataagcaaagttgtaacagccgaaattctcgtgtagcccatcctctctagcactcggcagaaaacttcggcaagcgggtccactccttgacttcggagagcccagataaagacgt

SEQ ID NO: 170816 - DNA, 611 bp, Zea Mays
ggagaagccaacgcagaggacgatgttgtcaaaccgccatggacaaggcgtactccaggttcaccagatctggaaacgcatcgtggacgaatgaacgcgctggtgtttccaatatcagacgtacaagggagacggtcccaaccatgtgtcagcgcctaaaggggctagaaaagaagacctccacggcggttgtgatccggtatcgctggagtgccatcacaactcacgattgcccgaaaagagtaaacaaagtagtcgaggatgagatggtgatgctagcaacaaggttgtgttggacaaagacgaagagatagacgtggcgacacatcgaggttcctggagttgccggcgggagagccacaacacataggaagaaggtcatcgacatcgccactgtagcgcgacggtggtgcttgaagttggcgaagaactcgaatagctgaagaagaccatgcgcgagagacatgcatcatatgcttaacgatgacgaagacaaacgttgcggttacacaaacatgtggcacatcctacaagggtgtttcccccggtggagatggatctcctcgtgagcaacacgaccatgtagaaaggagatattgtataaagcgtgg

SEQ ID NO: 170817 - DNA, 367 bp, Zea Mays
cgacaaaacccacattagcacctcacgacaaataaattcccaaaccctattgtagtcgcaccatagcagagccatcagatgggccagccaccaagtcgtggtcacgtcttatagccccacatgccatggagataccagcaacttcgttgcaccattgtggcttcgcagcacagctaggtacctagacttgaccggctaactatcattgcgttgcatctggcctcgttgttgcatcgtttgtcgtccgtcatccgaggcttcaatccaccatagtcaggcgcgtcaccacgtgccaggacagacagccagggggcaaggtcccatcgtgccaatgtccaagcccacctagcatgtggccacccgacct

SEQ ID NO: 170818 - DNA, 572 bp, Zea Mays
ccaacagttacccagccctcgagggtgttgctggtagtgatccagctcttgtgggtagtgcaagctacaacccagcccccgagggtgttcaggtgggctctctttcccacgcctccatggacatccatgttgggtcgtccccacctcggtccgatggggcgacggcggtacgtgcttccatagtttcaaccggacaagtcgccttagaggttggcgagctagatgtaaggagccagctgtctgctggtggggctgaggtacccccggatagtgctcttcagatcattcctgctgatcttccctcgtcgagccatgacttagctcctcctgccctaggtctaccactgttcctctccaatcttcaggtgagtcggcctcttgttctacgttgttcatattagcgaattatctttcttccactcatctgtctatgatcgcaggcttttgttgatgaaatatctgtccagttgagatcctacggtgccgctgttcctgaacaagctctatctctgatgcagtggaacccattgctgctccataaacagatctacgacttgaaggcgtcgaatgct

SEQ ID NO: 170819 - DNA, 984 bp, Zea Mays
gcacactattccgcgcttgtatgagtcttgcattgatgtcagacaaaatgtaatgttgcctatcacgataacgtggttccatcaggaatttaacttcaactcgagcgacaatactatactttcgttgtagcccataaaaatcttcatcgctatagtcgtcgaacaacttgaaactatattaaacatgcgactaaataacgttcataaatttgatagcgaaatcttgtgttaactattgtttataatataacttacataggcatcattttttcttgtccaatgcaactctttcacggttcaatatgactggctccatcaaaaccttttatcattagaaaatatttaaaactaaattgtaaaatggtccaatgcattgatatagcacgacgtaggagcagtgtgggttggttggttgagcacttattttggactgtaggtgtgactgtgattaagacttgtagttcacgagtctgcagctcatgcagaggtggatggcatgcatgattgcgtctgacgactttatattgcccagttggtgctcaagtacgttgtctgcagctcatactaaatacctttgatgacacaatgcctaaaacctcactggcagttaaaaagaacagacctaatacagtggtgcgttttcagcaattccaaacaaaccaaacaaggtagattggcaattttctaacttcatgatgacttctggatcatcagttcagtgaacacatacaagtcctattctgaattttattaatgcaaaaatttgttagttagatggtgttttctatttgagcagtaaatggtgtttgttcttgtatttaatggcagatccaaaaaaaagaaggaagagaagcatgtgagaaagagaattgtgaacggatgtaactcaccgtacataaatcatactattagctaagccttcccactatcattacataaatagcatcaacctctatatacaggaagcatgcatataaatgttac

SEQ ID NO: 170820 - DNA, 503 bp, Zea Mays
cgatgccatcagagccaccagattcgaaatcaagggtttggattttgaatgaccgcgatcacatcttaggcgtccatggccggatcaacggccaccacaactcaaccccgaaatggtacttaagttcaatctcagccgttaattccagaatctacgatcggcggttgtcttccctccccggtatgccggacggcggcgcagagctcccccgcgatggcgcatcatggccgaaaaacctccaagggcccgtggcacattataccaaaattctctaagcgcaattcatagtctagacacgggcgaactcgtgaagggaactctcactggtgatcgaagtcgtggcgagcctgccctcggcgcgccgcggttcttggtgtccgagcacgaattccggccaccgcagtgacgatctccccccgattggcagtagcactacaccgacaactccacgaggcttcgagcactaacgcagacccccgtttgtcggttgtgggcgagattgg

SEQ ID NO: 170821 - DNA, 320 bp, Zea Mays
actttctgctggaacgtgcctcactctgcagctcgtcaattgagagggaggaggagataagggaagagaaggtggcggtgctagcatctggaatgtgccccatctcatccaacagctcccaccccttctgctccacagatttgtggctcctgatgctgctccacagcctccagacctctgatctgtcagctcatcatgtcctcgccctctgatctgtgcctccaacctgtggttattccctgttgaggtgtgcctgcttctgcttttacatgggctcagcaactcctgcttgcttccctgccagtaggccaggcccagca

SEQ ID NO: 170822 - DNA, 677 bp, Zea Mays
gaaccgcgggcggggtcaggaggattgtcgccgcccagggaactcgccctcactgcctgtctgtgcgcatggtcgggccaaggaacatagagagtggaaagtaacggcgttcgctggctcggtgggaaggattgatcatcagggcgtcatgaattgctcaccggagctcttcgctgctgcagtgccgctcttcgccgtgggcgtggttctatgctacactaaaccacggtgagttggccctatagctttcacaatgagttctgcgttgagttgcactagttggcacgtgggatggtccaccggagcaccgagatggtgattgccggtctgccgccgccgtggtgtgcgcacagagccgcccgactcggataggggtggggaagacgcgcgtgggccgttgatcacagatggacgttggagattcgattccggttaccgcttcagggttgtgatcgggaccgtccatggggaatccagcggatcagatttggtctcatcaatttaagtgtggaccgtagatcgtgaatccagtggccgtcattggataccggatcatttataggactgggctgatctgggccgtccgcgttagattgggcggctgatcttcgccgataccccttcgtagaaccccttttacataggagccctcggatttcagtaaaatcaacccgccg

SEQ ID NO: 170823 - DNA, 326 bp, Zea Mays
aagagaagcggagactgaatcgggtgatggatgccctaggctttgagtaccctgactatgaaaaacttgaaaaagccggaggattgaagagaaaaaggttgtaactgtgttgacaaggcaagcgcagaggtgtgttgaagcaggcaagaagaaaaggttgacaaagaagccaaagctgacaccagagccttcgacaccaaagaaaagaaaggctatatcttctcaccacggagaagaagagggaccttctccgccaaagcatttagaaaagaccccttcggtagcttccattggcgtgacataaattctcgaggtaatgactgcac

SEQ ID NO: 170824 - DNA, 640 bp, Zea Mays
cgaattcgaccgagcagtgctggcggccggaggagagacgagctttgtgcgtggaataagtggctttcaccgtggcaggttctccggtgatcaccggacatgcaccacatgattcaccgtgacgagatccagcactaaggcacgtggtgcgcgatggtgacagcacgacggcggtgagaaccctatccgaaagatcagtgcgcaggggaggggcacggcggctagccggagtggagtccagctcaccgacggcgatgcactttcaccccgcgacgttatctacttgccacccgcacgaatccaaacaccagcgacacgaatcatggcggaggtatcgtcggcggtgagagttccgcgctggcagcctgatccaatccaggctactgtaccattgcgagtttcagtcagatgaacctgacagccaatgttgaactcgaatttcctccaaatttactgtggtgactgatttaagtctctatactaaagttatagacctatagttcatcttcaactttgccacggagctcaccataaaatagttaccgaatccagctcaaaatcaggttcaaagcctgcctaagtccactgttactggaaattcagtcctagggttgtctgacagcctgactttgggtgtgtt

SEQ ID NO: 170825 - DNA, 649 bp, Zea Mays
aaaactccctagactcagtgcaatgttgcaatggacggcgggttaatttctatggagtacaggggctcatctgcaaaagacataggccgaaggggtatggaggtctctgagccatccgatcacacgtgggtggaccagatcacagcgcacgtttatgaaccagtatcgaaccatggccatcctatcgcgatccaacggttcgaatcgaatcacgcgaaggggggcatgatctaatctgaatcgttcatcgagatatcgacgacttccacttctcccccacccttcatcggcccgaggcggcgccgcccaccgaccacggtcgcgacacgccggcgaacaccaaatcgaactcccccagcgctatttcccatgtggttagggcatcgtgaggagcagagggaggcaaagctagtgatgggattataccggagtagtaggtcgtgaaggcacctgcccacggcagggtgtggtccagagctgcccgtcaagctccggtgagaaattatttccccgctgcccaccaatcacgcctgccggggaccccacatgctccaacgttcaccgaagaggcacactaaccaccacacatggtccgaacgaccgcgcagccgagctcgatttaatggcggcctcgcgagcacccaatttc

SEQ ID NO: 170826 - DNA, 995 bp, Zea Mays
ttgtgcatccttttataatttaaaactaacatacactgggagtaaacttattaatgcatttttatttgttttgtccattaatcaccaaaaccctcaagaagttaattgcacttacaatctcccccttttgctacctagcttacccttgggcgtcgtggaagtgtgctacttggctctggcatccttagtcctctgtgtgctctagtgtggtcttctgtcgtctctgtttgagtcgtccgcgcgtctctatgtgtgagccgtatgtgatctctctgtgtgtttgttctcggtgaccctccccttttataggccaaggtggggatcagttaccggtagcttctcaaggaaggaggcaaggagctaatgcaccatggtaaaatgagacattctacctcgataatgtcaagcttgtcggcatgtgcctcggtcatctgagctactctggtcgtgctctttaagactggctgcgcgtgggcaacaaagagcttcggtgccatcgttactggcactgggccatgtcgacccctagcctccatagcctgggtctcagcgtggctcatcatgttgtgggtcttgtagacgaccagtgcactcaggcctaggcttgataggttatgagtgggtcacaggtctaggggcccatatgtcatgagtggaaggaggacctacccttttgctgcggctcagtgccagacgcagttaacgcagtcggtcacttatgctgggttagtcctaggtcaagcgcgaaacccactcgagtggtttcttctcggttcatccggcctcttatggctccgccttgcctgatctcggactcagtgccttaggactattagggggtgttcttccggacgtagttttcccttgtcctccagctgacttatggggcctgaggatctttcccctgacactactatcttttttataatacacgaatctattctaaaaactatttatttatgggcaacatttgatgccaaacagtgctaaatgat

SEQ ID NO: 170827 - DNA, 442 bp, Zea Mays
gggcatagtgtttggcttccacaatttcctcttcagacaactttttacccaaggcatgtcgaataataaagtcaagctcttcagtaggtgcttcgggagtaggagattcagccttcttgggtgcatcttctttctccaaaatcagaccgacgtctgaaggtccttgttcaatactctgcccagttccaacaagctctgtttcaatgggcactgagggcccagcttcgacttcagcatgagctacagcagcttcggcagtttcttttataggagcaggagttgacgcccttgtcgactctaaggcagcatctagcacactagccatcctcctcttgggagttattgcaggagctctgggtgccttcggcaactccggctctggtggcgggctcaggattttttgtaatcctgccgattctcctagatccggcacttcggccac

SEQ ID NO: 170828 - DNA, 1909 bp, Zea Mays
tgggcgagagagggaggagaggctctcaagtatcttatcggggtggaagtggagctaaaggttacaaagtggagtcctagttaagtcttgtcttggcggcggggctttggcctctaggtcctcatcgctgcgtcctcctcctgttcgtcggtccgtctaggcgtcttctcctctggggcccgtctgtgtgtgtgcatccgttcatcttagggccaaggcatttgaggccttgcatgatcatcccattagcccgctttgacttgtctgtttgcccaggggtgggccacggcgacccagtccacgaggatgtggtattcatcgcagaactctagtaacttgttcccggtgaactatgtaccattgtccgttgtaattgaattcaacaccccgaagcggtggatgatgttagtaacgaatttcacggcctgctcggatgtgatctttgcgataggccacgcctcgatccacttagtaaatttatgaatcgcgattaagacgtgtgtagtcctcgggtgcccttttgagaggtccgaccagatcgagcccctagtcggaaaatggctaggtgatggggatggtttggttggcctgtgcgggtagatgggtatatcgcgcatagtactgacatccttcgcatgttctcaccatctggtgtgtgtctgataccgcggtatgccaatagaaaccttgccggaatgtgttctccacgaggcttctcagggtagcatggtgcccataggtcccgctgtggatgtctttcaggagccacctgtcttgttcgatcggggtgcacaaacgctttattccgatactcccctttttgtagaggtcttccccaatcatgacgaaggacttggcccgtcgatgaagcctctacacctctgttttgtcttggagaagcagtccattggttaagaagttgcaatacgacgctctttggtcgtctaccgggttggttgggaggtccgttcattccaaggcagcggtcagatccagggtcggtgggcctgtgtctgagtgaagcttgcctcttggctaggccccgtcgtatcgaatagttgtcctaaaaaggctagtcatgagaacccccatcaggacagttgtttgtcccgacaccatttttgcgagggcgtctgccgcctcgttatcttgccgaggaatgtgatttagttcgaggccatcgaatcgatcctctagccgttgtacctcctgacagtatgtcgccatcttagggttgtgatattctgactacttcattacttttcctacaacgagcttagaatcccgtcggacgcctaaacgtcaaatgcccaactctatggcaatgcataggtcgttcatgagggcttcatactcggccacgttgttagaggcttaaaaatggagtcgcacatcgtatcacaattcttccctcgatggcgacataaaaacgaggccaccatcggctgcctcctttgttagcgacccatcaaagtgcatgatccaacatttctaggtggtcgacgctagctccatttgggtctcggtccactccgcgatgaagttggcaaggacttgtgatttgatcgctgtctacggtgtgtaggagatcccatatcccatcaactcaagagcccatttggcgatcctcccagaaatgcctagatttgcgggtcactttgcctaggggaatgacgtcaccacagtgataggatgcgattcgaaatagcgtctaagcttccgtttagtaattaagtcatcgtacatgagtttttgtacctaggggtagtgagttttcacgcaggggaggacttcccttacgaagtagatagagcgctgaagcagtcatacaccttctccttcctgcctttcgacgatgagcatcgagctgaccacctaggcagttgaagcgtcccaatcctctgggact

SEQ ID NO: 170829 - DNA, 427 bp, Zea Mays
atgaaatagaacctttcgatgagtcctaaccagaatagtagacttttgtgcctgtgtgggtgctcaaggggctctatcattgctcgaaaaggctggctgtgatcatgctaaggctataattcagccagaattcttagtttcagcaaatgatattagagaaccttcagccgaagctaacgcccttgacaggaaattttattctgaagtgtggttgaatggcggaagagagatagcagacgaagctatcaggtagagcgaagaagaatctcatcttgcttcaggggaagcaagaaaagctgaagaagccgcaaagcacgaaaggcatataggtgtgtttgtcatattttagcttcgtatttgacaaaatcttatatttttcgcagctgaactctctcctcctctggaaccgtatgaccctgacatcgat

SEQ ID NO: 170830 - DNA, 885 bp, Zea Mays
gccaaaatagcagcatgggccacaaaatctggcaactgcatttcaacaggataacacagctcccctttcagtcctatcaaaaactgagcagtaagcatcgtagaactcacagagggttcatataacctaatgtgataaaccatccgctcaaatgatttacgatattcctcatccgaaccagtctgacacaaatttaagagttccatggtcttcgtgcctttgtcaccgactatcgagcgtcgagctgccggcgtccatgcctctgtggctccaagctctgttcatgcggtgagaagcgccgtactctcaagtacaagggcaggaaggaactccatgttcttatcaatgttccagctgctgcggtcactgacccactagcgttcgacacatcagtccttttgttcccgttcctgtttccggaacgaggaacagtggaacggggagcgtgacgttcctagcttcttagagctgccatttaggaatgtttgaagcctcctggtacatggacaatagtcacacgtgaaaaaccatacttatcagtaggcctaatagtggtgcgatcccgtagattatatcgccgagcaacaactcatcaacatattagaatcatcaacaacaggagcatcacgactagccatccatcaatggttatgaaccaccaaccaaatgaaaaaaattgcaacgcaggagggcccaacttttccacattattctccatggactgaacctgattgttccaacaaagaaggctaataagcggacttgctcctgtaggagcccaacgtattcaacttccacttaaactggtcaagcacatcttgttgcaaaactataccatccactaagtcccaaacctgaagatattcaaccaaaacttactgtaag

SEQ ID NO: 170831 - DNA, 610 bp, Zea Mays
agcaaggacaggtgctgaacgtaacgcctgcttgagtaactcaaaggctttttggtgttccacagtccaaataaacagcacattcttctttaacagatcagtcagaggacgggatatcatgccaaaatgccttacaaacttacgatagaaacccgcgagtcctagaaaactgcgcaactctttgctatttgctggtgtaggccattgttgcaccacagttatcttgtcgggatctgttgagacaccttgtgcactgattatatggccgaggtaggaaatactggtttgagcaaattcacatttggacaactttactttccactgatctttccaaagcaattgaaataccgatgacaaatgagtcaaatgagaatcaaaagtggggctatatataagaatgtcatcgaagaataccagggcacatttacgtaagactggtgctaaagtggtattcatggcttccagaaaagtgttgggagctctagtgagtccgaaagccatcacccgaaactcaaattgtcccaaatgcgtttgaaaggctgtttttggttcttcgcctggtctcaaacggatttgatgataaccggccttcaattctagcttgctgaac

SEQ ID NO: 170832 - DNA, 1168 bp, Zea Mays
ggggattctatgagtctggcagtaatgttagccgcgatgcaggccatgcagcaggagttggccattctgaggcaagctattcctgttgcccttgctggtgctgctcagggtgccggaggtggaggagtgcctaggggcgctatccctgcgggtgctgctccaggtgggggggctgaggtgccccttcctgtcagtggtctctctgatgcagtggatgggcatgaagctggacacctttgatggcagtggtactccggttgaggcggcagattggctgacttatgtggaggataagatggatgtttttgagattgtgtatggagaccgtgttcgttttggcacacaactgttgaagggggaggctcaaatttggtggagaggtgcgcaggcagctcactcctcctcaccaggagtcctgacctaggacgttttcatcaggtagtttgagaggaggttctacctggtcaccttcctggagaaaatgaagattgatttgcagtctttcaagcaggagaagaagtctgtcacagaatatgaagtgggctttaacaagatggtccgctttgttcctcatgtggcttacaatgaattggagaaggcgagccagttctgtcagggcttgaaaccttctatcagacatgctctgggtgcctttccattggtggattttcgtactacggtagagcaggcattaggcgtggagatgcaacatcagtacaccatggaatctcagaagtcttcgggtgttgatcagtctcgtggctaggacgcgaggagggccaacactgggggtccagcccacaagaggggaaagtcgcaacaccagcgccaccacccctatcgtggaagatcctctgaatcgggtacttcaggagggagtacttagaggtatcgggctgttccgaagcccgggctagggttggtgtgtttccgttgtggtgaagcgcatcgccgtgccgagtgtcagtggagtggcaggtgctctatctgcagccaggatcacaaggatgtggtgtgtaggaaaatcccaatgggaagctcaaatgggagccagtgacttcttcctcttcgcagggcactgtcaacgtgatgtctatcgctgagaagcaattttctgtaccaccccctcagtagcagttctatatgcccgggactcctcagttcgtgc

SEQ ID NO: 170833 - DNA, 852 bp, Zea Mays
tacaagcataagactactacaggtggaactacacgtgagcgttcctcgaggtgctaccgaactctttctctaaggtatccccaaattccttgagaagatcatcaaggcttgctagggatatatcctcggcgtcggaccaatcatctattctagggggaggtggggctggaggggtcttcttcttctctgtttggcatccttggttggtggtcttcttctggattttcttcttgggagcgagcttccttagcttcttgtcatagtccatctttaaggttcgataggcctcacgggtgttggcttcctcgccttctgctatgtcgagactctcctggagagatgccttctcttgcttaagctctttgacctgctgctctaggctttccactcgggagtttaggtgggtgcagtgggaggagagatcatcgtagtggttgtcgagggtgtggaggtatccggccatgtagacgatggtggggtcatcttctgtggggtctcctcctgacagagcctggagtcttttcctccaggtgggggtatttttgttgctgggcggaaaatatcgaaggggggtctcagagatctctcggctgtagttttggcacagctgtttaagggcttttcgggcaacaccctggcaagtgtctggaaagcggtgcccgatgaaggtgatttggaagggagggtggtttggctagtttcggctttctcccaggtagactgccatagagcatttttctaatccaattttgcggtattccttccagacatattcgggcttcttgcagatccccatgcgtagcgcgcaacttcgtagaaggtgaggaaagccttcctcctctgagcaatagg

SEQ ID NO: 170834 - DNA, 485 bp, Zea Mays
cagagaattcctgatatgtagtttcacgcggtccttgaggaggagctctgcctccgtgctgttggaactgattgcccgccatttcgcgcaagaagcgtgtattatccgcagtggcattgaccagggcagcgatagcctcgaccaaagtcggtggtactggtggcgggttaggagtatcttcccgactgcgggaagtccccgcaccatcatgtgggcaagtccgtgatggcatctaaggcaaagaaatatttggaaaaaaatataacatgccagcacacaccatcatattacattaccaaaatgtaataattatacagactccagcgtacaacttgacttcattacttattttacataagtataacatctaaactatactattctagtcttcgtcgtccttggttcttcttttcctattgcaggagaccgttcatcagcaaggtttatggaaggagggggcctaaaaagatccaacttcccatcag

SEQ ID NO: 170835 - DNA, 498 bp, Zea Mays
caagaactcacggttgtcttaaatcttatgcttgttcaaatattgtagacttcaatgtacttaaaggaagcgcaaaattctagtaacaagctgacgtgcccttactaaatttggttggagaaggatccttaatggcctctaggtaagggttgacttttggggcaacacctcacttttgattgaggtagtcttggctctcaaagataagagaatgtcttttgtggcatcttttgcgccaatgaaacaacattcataacatccatagagctccggattctctgaacattcaactgatctttcatcttctcaataaacttcttaaacttcatcgtgtgcatgtgctccatccgcatcatcctcgtcaccatctacttcctctttggcctctttctccactgggtctgcttctttttctttattatctgttcgctccttgatttcttcatcttcttcgatttctctgtcttctttatctacttcaggatatcaatcctctga

SEQ ID NO: 170836 - DNA, 417 bp, Zea Mays
acccgcctgttcggcttccctcctagctccccttcccaccagcccctcgccggccatctctccggtaccggcgactacccccttgatttccacctcctcggcgtctgcgtcctggccgtcccagcggctgagctcccaggaagggcggtccaaggcccagcgctggcgcggcgactcttcagctggaggttccatgccatcttctcgatcctttaaagatgcactcctctccagctcggtttgcgccgctggtctctctcccttggcaagccatgtctccccctccccttctacgctagctgctcctgctttccccgctaaggtgtcgtctggtgtggcccttccggttgaagaagtgggctgacaggtggttgagcgtagacagaggacccgtggtgtgcacctccctcgtcgagg

SEQ ID NO: 170837 - DNA, 644 bp, Zea Mays
aatgcaacaaataaagcatgtgccatattgtggttagtagaaatcatgatatcacacaagcaatattattttttactggcatatttacagaaaactggaatgtcaaaatgcaatgcaacgtgtaagaacatcatgaataaccatttcaattaaaagaatacatttctaatcaagcaaaagtacagaaaagcggagaaagagatatacctctttcaaagatgggaagatcagagactgcagtatattgtataacgattcacggaccaccttgtcagtatcacatattctctcctgcagcttctcaattatagcaaccttgtgcagtttaagctctgttgggtgcttgacaacaatgtcctttattccattcagtgcagcttcaacataaagacaaacatatacatagtcagatgctaagaacgcattgaggcatcatggcagtttatccagtgtgtcaccaactcaccatacagactagagaaaactcaccccgccgcacattggcattgtagtgtcccgtctgctgcaggagctcccgtagcgtgagcccgcgcttgttcactgccatgcccgtcctctccgacgccatgctctgctccggcagcacgatcgctggacgcacacacaacaggagttcacaatac

SEQ ID NO: 170838 - DNA, 357 bp, Zea Mays
agggcaagaagatcaaggtcctaacacatcggccgagatacatcgagacgaccacagtgctgaagcttggtgaagggacatcttccactgccgaggcaagacagattgaattgccgaaggtgcctatagccgagccagccgaagccaaagaagaggcggccaaaaagccagagctagaaaaagcaatagtgctgccaaaaatcttgagcccaccggcagaagtagaattgtcgaaggttgcaaaggctcccgcaacaactcccaagaggaggagaatggctagcgtgcttgacgctgtcatggagtcaacaaaggcattaactcctgctcctgcaaaaaaggttgccgaagctgtgg

SEQ ID NO: 170839 - DNA, 999 bp, Zea Mays
caaagaccgactagaacaggaagcaatttgataaatactgacccgaggagcgctggccacgggtgttgcttctcggtggagctaagaacagaggagagagagatttgggggctacgtgggtttttcggtgagcttgagtcgagcgcttagtcgctgagatgcgggatatggtgaagaagcagcacccgcactcaatttataggctaccggccggaaccagatgagattcaccgagctgtgaccgcgctagcgagctcacccgcgtggcagagccacggcgaaagtccggtggccgccgtttaaccgggtagcgccacctcaacgctttgaagccacgtcgcaaaagcctttaaccgtggccgccgacgaccatcccacgctgcggtggcgttcaaatcagctacaaatgttgaggctcaatttactctcaaatttactcccccccaggcactgtaccatggtgagccccccatcagcacacctgacagtcaatgttgaggctcaatttactctcaaattttcatggcaacatactccatgctctacagcaatgttggagagctacaaatcagctacaagtttgtcatagcagccatgggcagattcttgctggatcatagttgaatccatgctcaaagtctcagtggttgcactgtttgtctgaaaattcagacccagtaacatgacagtccaacttcagtcttaattatctctaaattcttcttaacaactatgcttacattcttaagcaaagttgttctcctatgattgagctacaaacttgatgtggtgacctagggcaaaaaccctaaaatttgaaagatacaaagctcaaaagttgagcccataactctgaaattcagacttaggctatatagggcttaagaggtgatttttgcaaatagacccaaaacttagggtttaacttgcaaattcacatatttgtgaaccaaaggacttaatatgctttaacattgtagtttttacactttagtccaa

SEQ ID NO: 170840 - DNA, 723 bp, Zea Mays
aagaagagaagggtaagagagtatgacgcgcaagctggtaggcatgccaaagcaaggtggtgtcatcgtgagggcaaggaatgaccgaggtggctgagagtcaagagaggtcgtcgtggccgaggtggctaatgcgatggtgccaagtggaggcaagggcagtggaggcaagggcataggattggacaacatgggcgaaggaaggtggggtgggcaagcgaatcgggtataggtgactagagctgtcgtagtgagcaaccacaacacgagtggtaagatcctgtatggtgagcccaagggatcaaactccatagagcatcggttgccagtgatgaagcgacagaccgagaggaggttcttgattatgttaggggcaacaaggatgttgttgaggtacaaaggactaggaaggattatgtcacctactaaggtgacaggctgagtcaacccattaccgatagtgatggagaagggaaggtagggctatgggcgtggagtaaagtgatggttctagggttgggaatggcatggaatggggcgccagagtcaacaacccagtcaatgggaggacggggcagtgaagacaagggttgtgagaagagagacaagggaggcacccctatagagccaccaggaggagagctagggccaagagtggcgagcatgctgacgacaatcatggtgggagatgataaggtctcaatcgtcatggaggcaatcgcg

SEQ ID NO: 170841 - DNA, 1134 bp, Zea Mays
cggggatggatcatgagttgtccggggaagacttagactttttttgtcgcgatggacgtcatggtgtcgtaggccttcggggcagctggggacacttctgttggaatggatagggtgcctcgtgctcgtgttggtgcctagggtgaagggcctctttgcggatagacgattctggtccgttgacccgaaggtgtggtggtggccgacatcgggaattctttgatcttgttgatcttgtgtcagggagggaggtgcgtattagggctagtgagttggggacaaggacccagggcctcgtcgtgtgttggtgggggccgtaagtggtgattgcgccttgaatcaagttagcgagtcggtctttgggcttttttacaagggattgagagctagagatcatgctatttaattgcaaggagcgagggctgatcccgaaggaggatccctcttgtctgtgacttcgtagtttcacagttatgtaataacgaactcacgttgtttgcacatatgttgtgtgtgtacttgtgcatagggcggtttcacggcagtcgtcgtcgatcgaaaaaaattagtgtagaacactgcctctcccccttgtcgattgggggcaaatgctagactttttattgtattattgtataagcttcataacatgcgactcacttcatcgagatatttggatctgactgcgctcgtcataaatgtcttgccttgaggcgttgttcgcacccgggtggtgtcttcacgaagattttattgtgatctggtcgccctaaggtgttttttgcactcgggggcgtctttgccaagattttgttttaatctagcgtggccctgaggcgctttttgcaccatggggtgtcatttccaagtttttgttttaatctggcgtggccctgaggcgcgttttgcaccctggggtgtcttcaccaagatttgttttaatctagtgttaccctgaggcatttttgcacccggggtgtcttgtcgcacaccgtgaatgggtctcctagtgcagcggtgactgctttcatggccgaatgttggcttggagagccttttcggccgtgactcattcgttggggggttttcgctactttattacaaggctccgcctcgttaaaagcctcacccctt

SEQ ID NO: 170842 - DNA, 313 bp, Zea Mays
gttacaatccgatcaacaggtaggctagtcagaaactgcacgcgcgttagttctggtcctggccctaatgcaaacgaagactgctggtgtcatttaagctgtggtcgtgcaaattcatgcgcaaccagtcatcccagatgatagcactagcaccggcccggccgctacgcgtgcctataaattacgaagtcaaagtcgttacctcgttgtccatatcgacatgccgcgcttcgttttatccggtgcgaccacttcaagcatgatacgcgtggttggtctccgttgagacctgggagccgaggcaatctctaca

SEQ ID NO: 170843 - DNA, 1195 bp, Zea Mays
aactagagaaaaggtggggaaaatctatacgaagctcttcttctctttcccaagttgcttcatcttcaccgtggtggctccattgaactttgcacatctttataactttactcctcataactcgggtcaaagtatccaaaatcttgatggggtactcaacataagtcaaatcctcttgaacactaaggtcctccattggtaactgttcctcaggcactctgagacatttctttagctgagatacatggaagacatcatgtacatctgacagatgatcgggtaactccaattgatatgcaacttctcccactcgcttcaagattaagaagggtccaataaggcgaggggacaatttgcccttaactttgaatctcctcattccacgaagtggtgacaccttgaggtacacatgatttctttcctcaaattccagtggtcttcttttattatcagcgtagctcttttgcctggtttgagctaccctcaagttctccccgattatacagacttgttcttctgcctcttgaataagtttaggtccaaagaactgtcttcctctagtctgatccaatatagaggagtcctacatttcctgtcatacagagtcttgaaacaatggcatctccagactggcctggtaaccattattatatgagaactccgcatacggtagactcttatcccaactaccaccatgcttaagagcacaagctcttaacatatcttcaagcacttggttagtcctctcagtctgcccatcagtctggggatggtaagccgaactgaaattcaatcttgtatccaattactcgtgcaacttcttccaataccgagaggtaaactgtgatcctcgatcagacacgatcttctttggcacaccatgtaagcatacaatccgtgccatgtacaactctgctaacttggctcctgaatacgtggtctttactggaataaagtgggctaccttggttagcctgtccacaatcacccatatagaatcatatccagcagacgtgcggggtaatccaacaatgaagtccatgccaatctcttcccatttccactcaggtatcttcagtgggtgcagtagtccggttggcctctggtgtttagccttaactctttgacacacatcgcacataaccacaggtgcagccacatctctctttagtccataccaccaatacttttgctt

SEQ ID NO: 170844 - DNA, 494 bp, Zea Mays
ccatgaatcacacgcaagaaagccaaggcgatgatctgagctcgaagatagtggaattaaacccaaggacaatgatctcgattctagcggcatcacacacacaacgtgccatagatccataagagtgaaaatccacccacacaccaacccgtgcttgataatgtcaatgagttgaaccaagaatatgacatcaactttaacataagtttagatcccgactctttttctgatccttctactaccacaacgaagataccaaacccaagtgaagggttcaaagaaggtgagtgtctagccatcacgacaaattaacatctagaaggatatcacaaccctgaacaggctgctagcagccagccataggaaactcgccctaccgagaagctatctgcatcgagtggcagcttcacagctaggagaaatagggaatcctagtgcgtcaaaccgagacccactcaaagcaacaacaaaagcaagaaaccatccaactttag

SEQ ID NO: 170845 - DNA, 519 bp, Zea Mays
cggggggaaaacttctggcaggcttcgcacgatctcgtgactcaattcacggtgcagatcatggcgggccagtagaagccttgacggatcaccttggcagcgagggccctaggccccacgtgagagccacaagtcccgctgtggacttcgcgcaggatttggacgccttcggtctcggtgatgcatttaagcatgggttggctgacccccttcttgtaaagctggccctcaatgagtgcgaagtctcggcttcggtgcttgaggcgcttggcctcgttgatgtcgcttggatggtaatatctctgcaggaacagggtgattggccctcgccagtcttcggtcatgatgaggttgactatgcggtggccttcggtgtcgttggttatttgtaggccctctgggctgcggacggctggcgtgccgatgacatggtagaacacgtcggagggcaaggcctcgcctctggctgctgctttggccaacgcatcggcctcctcattcttggctcggtccacatgc

SEQ ID NO: 170846 - DNA, 600 bp, Zea Mays
cgatctctcttgccggcggtgatctctccggcgacctccagtgctcgtgcttcccctccctcaggtgagcagctctggttcttggtgcaccccctctctattcctttgaacagtgcacccccccttctctccccttgtgtgtcaatttcaaattcttgtgaaatcctgtgaaaccaagtggtggtatgtgttcctctgtgtgccttgaacatccttgtaggttctcagctccttagggagggtttcacagccttaaatagtcgtttcaccgtaaccctaaatcctcgcacaccacatgctcggtgaaatgcccaaaccagccaaaaatgctccaattgaacccaaatttttcatgcaccttcacaatacattcagtaacatattcaccaaatttcacgccaatccgatattccaagcttcaatttcaccaaattccctgtttcaagcgatcgtttccgagccgagtgcccaaatttcattttcttcgcctaaattcaaaccaagcacacacttcactcatattcacccatataaacctattcgtgaagtatcggctccattccacgtcatttcgtgcctcaattcgaattccaaacctcc

SEQ ID NO: 170847 - DNA, 331 bp, Zea Mays
tgccgagtgacttgaagacgatgtcggagttttagagataactgctgagcgactgaggacaacgtcggcgttttagaggtaaccgccgagtaatgacgtggcacgccggtgtttgagaagtaaccgccgggtgatgacatggcacgccggcgtttttagaagtaactgccgggtgactggtggtaaagtcggtgttttagagataacatccgagttagaacgggctgcgtcggccactttgaggataatagccgagtgatgatgtggcataccggtgttttagaagtaaccgccgggtgatgacatggcacgccggtgttttagaagtaac

SEQ ID NO: 170848 - DNA, 310 bp, Zea Mays
gaggaagtggacaccgacgagaatgtttcttggaaggcttgattggaccattcaactaccagctacagagccacagtttccctaatttctagacttcactgaaaaaggcaattggccttgagaacaaaaggaaagaactgtccgaccacaagaggaagtaccaagggcagaccggcagaaatacccgacaaaacaactcctaaggttctcagttccgctccggaaaccagagtgggaacaacaactatcaagcacaacgctctggacaacaaagtcagaggaacaatcaataccagaactagcagagaag

SEQ ID NO: 170849 - DNA, 1355 bp, Zea Mays
cctatctgtcaggtttactttctcttctaacctctggtggtagatacattgaggagtgggtcagagtattctataccacagtttggatagatccagatcatcagttgccaaggttatgttttgagcacgaggatgtgacgttgcatgctacccagatcagagagctctttggatttcccgagtcatcgacgcggctccacagcttgtgctacggcacatcagatcctccccattgccctcacggcggagttgctccaaccacagctcacgtcgctgcctgttcaaacctccattcatagatgggtcgtggtgttctcttgccgacttcactccagcagcgaagttcctttatgagctgatgaggcagactttgctacctaggatgggatatagggaggccaccacacatattcagctctggctacttggtgccttgatttcacactcgaagtttgatgtggtcgactttctgatctatgagattgaggatacagtgtcggatggtctccgtgctcaccgttaattgccgtacgctcactacctctatcacatctttgtgcagctgatcaagcctcctcagttccaggccaccatcgaggcctctcgaatttagttcgacttctatcgcctagctcctgaggacatagttccagcgccaggtccagtatccgatatcagggttgaggatgaggccatcagatagtttgagacttagggtgtcgctgcagatacttcttctgatgatgatgaggacctggggattccgcgaccgcctcctatgccacctcgttcccatgatcacgaggctggtagctctagtgctgctcctactacccctccaactattgaccctgccttggctgctattctttagtcgcgcacttaacaacaggctcatatggccgcggagcaggcccgttaggcagcagagcaggccagacaggccactatccagcagcagttgtccgagcggatgctcttgatgtttcagactatttagtaccgccaggacaccatacaacaatagctcctagcagatagggccaagcaccaggcattcatgacacatattctctagcatatcggtgttcagcttcctccagtgcagtctgctcctcctccagcacttcaggctgctgttgtcctagctcttcagtcaggacccctgctccactcttttggtccttctatctcttctctcaggccggtcaccctggatttctcgacccaggttgttagacccgtcagcactcagccaccagcgccactagcgtctgttgttaccactgctatcgtggttgtgtccatgactgctccagctccagcagatcctacaccgcagccaacgttagagc

SEQ ID NO: 170850 - DNA, 613 bp, Zea Mays
aagtgggtcgtctgatggtagtagaagcaaactcaccattgcatgagaggctgcatttcatagacgcgctggagagcctgtgcttggaccacctgctgaaagaagagatcggtgctgcgctgacgcagatcgagaccgccggtgtcagtgacgactgcgacattgggaccgtctctctctggttttacttgctccggaaacaccgccgcagggcgtcgccaggtaaataatctcagccaaaaaaacacgcacttgaggttcgtgaggttcaaattaaagacgccattgctgcatgcatgcatgcagatgtgttcgtgaggttcagagacgcggagggaggtttccaggcgaacgatcctggggacctactgaggctctacaacgctgcgcatttcaggacccatggggagacaatactcgatgaagccatcgcgttcgcgagaagccgtctggagatgatgctgccctacgtgaaagggccattgttggcgcatgaagtcagatcctcgctggagatcccgctgcctagaagggtcaggatctacgagtcaaagtattacatccatgcgtatgagacaagtggaacgctgcatgagaaggtactgcaacttgc

SEQ ID NO: 170851 - DNA, 276 bp, Zea Mays
tttccataacaaccctttatacttcctcgttccagcatcaagtatctttagcttcgtctccacctttggttgctccacacgtctctgaggttacctttcgagtgtaagttgccatcttctcccacatgttattcgtatcatcttctttcatgtgccatctttgatgatcctttctttaacaacccttgtaatctctgcttgtttatccctacaggtacacatctgaaaacgaaattccaccaccataaatttatattgaaagacaacacactctct

SEQ ID NO: 170852 - DNA, 336 bp, Zea Mays
ctgggccggtgtgttaaaaccttgatctttttgcccttcggcacaacagaaatggccgaagtagcagcttttcttttctttccctgctttcgcgagggatatctataatcagggtatacgaaaccaatgacgtcaaaaactctattcaaccttttcttgcctcgacctttgaaggccaaggtcattgcatcatcttcagcccttgtatatgtcccaagtaattcgtcactagttgcctcaatactgctcaaccactcatcatttggctcatcaaactggtctttatatctgaaggtatatttcaagtaaaccaaaccgccctgactagacctgcca

SEQ ID NO: 170853 - DNA, 762 bp, Zea Mays
gacgatcttagggactctagctcaattggatgggtcggagagtatcaggagcatccaaggatactgaaacaaggactcagagggcatgaacggacctgagatgcgctggccacggcgaggtcaaaccgctcagtgttcttgagtgatttgggggaaatcccaaattggggagttctaggggatgattcgaggcacgagttgcttcactggttgcacaactacctagcggagcaggcggggtcggcaatttatagcaggcttgagcggtggcatccaatttcacgatgatgcactgacgactggagaggaagaaggtcactggcgctcggggttagtggctttcaccgtggcagctctccagcgatcaccgggcatgcacgacatgtttcactgcgacgtggtctagcgctttagcacgtggcacacagcggtgagcggccaacgacgacgaggtctatctcggccgcacgacgagcaagtgggtatggtgaaactcatccgcgaccgagcccgagctaaacaggggcctggtcattccgaagtataaggacagcgggcacatgaccaccgtcatcagtttccccctcttcttctcatcagccttaatataaaaccattcacctttccagctggttggacattttgtgcggtaactaagaactggggccttcgtatccttgcgatacgcaaaattgtagcaaccaaaattttcatgaagaccgtctgccctggccttcgtctggtagtgcaactcgtgcacgc

SEQ ID NO: 170854 - DNA, 320 bp, Zea Mays
cccactaccttttggtggaggttgacgaaccaaaagcatatgcactgccagcacccttcagaaaacaatagatctcataaattattttgttcccgaagtaagaactaagcctgatgcaagtcaccggctttttcaaaccaatagggtgatcatttcaatagagctctaatgcataaaggtcgttttggattgatctttctcggccatgaccatctgatcgacgaatcaaaatgtatggaatgaagtgccccctaggctgaatagacaaagggactatgcatgtaccatgggttcatcgtcgtaccattccatatttgcac

SEQ ID NO: 170855 - DNA, 485 bp, Zea Mays
tttcacagtcttacccacgacaccagcatgtttaacggatttgacaaacttatgcttcagtttagcagaagaggagccccagtcactgaccttatgatcctttgccttctctctaagctcatcgtagtgaagctcatctataacatcctctgcctcctcaactgcatccctgaactgccacagccaaagatcaagggcagagctttgttccttgatgtattcagggtcaacgatatcaaatacaacctggaccttcttcactgactgcagcaccctacccttgacatcttccaagccatcagccttccagtagtcagtcaggcaggtgaaagctttgttgatccaaaaggagatggttgcatttgccaccgagctcccggccaacttcccagcgaacatgattgtggcggcggcggccatgactttgtgcttttgtgagggaagatatctgaggagagatcaaagcatctgaaagttttgcatgt

SEQ ID NO: 170856 - DNA, 404 bp, Zea Mays
gatttttctataatttctcaattcattctccagcttcggaaaaccaataaactttgtcagtgtgttaaccactctagctccgtctcggtgaggaacacattctagcagctcttcgtctacaccaccaaaaaggatggcaccaagcttgtaaccacctgcaatgacaaactaccttagctcggacatgccctcaacgctcaactctccaccagccaggtgtcttaaatcgaaggccccctcctctctagaagaagccccaactttgttcaccattgaagccaaagctttcactacaactttcttctgcttcgaaaccttggttaccacaacttctttttcgaccgccttctcaggctctgattctgcgattatcctttcgatagcagccatggtagtcccatcag

SEQ ID NO: 170857 - DNA, 496 bp, Zea Mays
gtggccttgcaggtatagtgttattggggcccaccagtctttggtcatgatgaggttgatgatgcggtggccttcagtgtcctgagttatttgcagaccttcggggttgtggatagctggcatgccgatgatgtggtagaacacgtcggagggcaaggcctcacccttggccgctgctttggccaacgcgttggcctcttcgttcttgttgtggtcgacatgttgcagggtgaaacccttgaattgtctctcaaggctgcggacatcggtgagatattgcatgagtacgggctcttttgctgagtactccttctcaacctggccggcgacgactttggagtctgtcctgattatgcacgtggtgacacccagtgctcgtaatttgcgaagacccaggatgacggcttcgtactctgctacgttgttagtgcacctatcagactctaaggcaaaactgaggcgtgttgcgtatttgtacttgacgcctgcgggtgat

SEQ ID NO: 170858 - DNA, 344 bp, Zea Mays
cgcaggactgtgaaactgtattggttgaagcgtaataccacgccgcaggtctcttgtttatatagtgccaaaggccaggcgatcgacatgtacaggatctatctatagctaatagcaactacctgaaggtattcaatggataatcatcgggaatggataatcactaggagcatctatatatcaccgtaacagacaggaacatcttccatcttcaattccaacaaggacgacgggctttatatccatcgtcacgaacaagaatccaactgatgaggagattggttgttcgattcgaacgcgatcaggcattcagttatgcccctctcggtgatcccatcctaggc

SEQ ID NO: 170859 - DNA, 591 bp, Zea Mays
tccactcaagactacacaagtaagccatcatcacatgtgacttaagttaggaaaggaataccaaagttggagctcaagatcctaagtaagtgcaacccaccttaaaagtcataccttggcttgttatgcacataaaatggggagaattgcccaagcactaattcaaaccccttttggacaagtggagcactagaagtaagcatgaacaaaagggtatgaaaaccacatgatcattacttgggccaattataaaagatgtagtacacttgataccccacaaatgatagtaagaaagtgaccccaaaaagaattcagaaaaaccccaaaaggttcaccaaagggttgagcacaaaagaaaaatcagaatttttctaagtcccaaaaccacccccttttcaaagatcaaacatgttcaccttgatcccaaacttaaaccaattggccccattgacaaagtggcgccaaaatacctctagaaaaccctagagaagtttgaacccatccctaaatcgtttgacacgacttgacacaagttttgtctcggtttggacagcttggatagagacaacttcccacccccatatctctcta

SEQ ID NO: 170860 - DNA, 884 bp, Zea Mays
tggggctctgagggaggtgtgaagcaggaagagccaagtagatggtgcttagcctcatcaagctgttcagtgagggtatcgactgcattgcgttcgtgctcctaggagaaagcagcgacacgatcgcgctcctgggtagcagccataacaactttggtagccgtgagggtcgctgctagggtggagtgggcagccaccacatcgaagggtgacaatgcattcgacggatgcgcgaggacggggccaaggggcagacagtctggggccacaccgacgatgccgaggctggtgatagggaggccctggctggccgcgcccatggtagccatgactggtctagagggagggaggtcggcggcgttcaggttagagagatggaggtgggcgacagaaatatcatggccctggtcagccatgcccaggccaggtatggtagggcccatggcgacgatggtgagccaggccgatgaagtggtgggcaggcctactacatggggtggtgtggacgacgaagcgaggagcccagggcccacaacatcgccgacatgctaggcctaggagccgccacctacgggagagggtgtgggtgggccgacgactagagagacagagatgaccatggcagcttgaggggcggggccgacgcttgcgttggccggagaggagggagaggagacaagtgaaaaccaacgtcaaggaaggggtgaggagaggggcagtggagggaggcgaaggacctgccatgacggctggtggagtcagccgctaccgacggcggtcgacataggagccgatggctagaaacgagaaagatgggagaaacactggccgaataccatgttagacgaaggaaaccctaaccctaatcaaagtggagtgggttg

SEQ ID NO: 170861 - DNA, 668 bp, Zea Mays
cttcagggttcattttataattttttggacctatttgttataacctctatgaaggaagggatggtgggttgattataataaagtgcagggactcttatgcaaagtgtcgaggtcgaaggggtaccggttaaccgtgagccatcagatcgcgaatcaaaggttcaaattagaagcttccttatccaaagaggtatgttatctgggccactggattaaagttctacggcatagatttcaaatatgtgcgatctaatccccactctccatctaggatccaacggtcccgattccgacccgaccaaatcgacatgaggatcaatcgtggccctcccttaacctatcaacggtccgaggacccttcttcctccctgcaccagcggtcatggccacgaccatgagcatgacggtgccatggccgacacgcacacagtcaccccctaataccttgaaagagatacgtagatgcgcaaaacaacctagagcctacgacgagtcaatgggcagagaatctaccggtgattaggcagcaccaaactccacccacggcgaagcatgggtcagcggcggaggattgcctcggcgagcaattccacgcacatcggacgacgtttcaatggatttatggtggtcgaagcttgcccaatcactggcgaccccacagagcaccc

SEQ ID NO: 170862 - DNA, 342 bp, Zea Mays
agcagctgtgcgttcaaaacgctcatgtctttttggcgtggcacaccaaaatgcaacactatcacgtaccctttcaatgcctttatccataacagtcattccatctttcacaataagattaatgatgtgtgctgcacaacgcatgtgtaacaatttaccatctagcatgagggagacgaggggcaacttatcttgcatagaactcatcaaactatcattggtcgtgcaattatcaagagtcacagtcgacaccttcttttctattttccaatcttgtagtacctcataaaggacatcacttataacttcaccagtgtgtggggcgggcacatatatgaacct

SEQ ID NO: 170863 - DNA, 1059 bp, Zea Mays
ctcgaaggaaggccgagtcgttggatcctcgatagaagtcttcaatcatagccgcctcaacgacttcagggatgcagttcctcatcgtttgaaatcttttgaggaacgattggagggtctcatcattctagtgcataatggatttgaggtcccatggctgcgtcggtttatcggagagagactagaagttcacgataaaccggcgactgaagtcaccccaatcgtcgatgaagtgtcgacgtaggtgtcggagccactacagcatgtcctgttcgaggacaatgggcaagtacaccgtcatgacgtccttcgttgcccgagcagcccgggcgacggttgtatagacggtcaaccagcctcctgggtcctacttaggctcgtacttgtcaaagttagagaccttaaaattaggaggctattggatgccccggagacagggagtaagtgaggaaactccgcacgtatcctcctgccgatgctcgtgccatcggtctcggggagggaagtcggtagtaggtcgtctcgaccgtcctcggaatgggccactagtcgatgctgccgccgactcaattagggtcacacgaatatgtgccggtacaccgtgatcttggtcgtactcctcccggcgcctcatctcattttcatgccgtcggtcacgcggaacgctgatggtgctttgtgcatcttgtcggctattgatggggtgatgtaggtcgttcgcaggatgagcgaggggcagaagatgattggccgcctgtgtaagcagtcgccggtaaccttccacgtctggggtttgcgggagtctatcggctatctgcgccattaatcctccatcttcactcggcgtgtttagtgctcgagcgaaatcggggtacatgtttcgagcaaggagagggttctctcgctggagcctggcgtcttgttcggctagctctcgctcccgatcctgagcctatcagcgatcagggcggcgggagttatgtctttctcggtgtactccttcatcgggagtttctcccacttctgaggcttcatcactggatatgggctgcgctggat

SEQ ID NO: 170864 - DNA, 422 bp, Zea Mays
tttgagttttttgtgattatttaattctacttggagcacaagtcaagttagacaactactctatctctaatacccaagcaggagaatttagaacacaaagagtggaccaaaagtcagtgaactactgtctaggtagtcctttcgtcgaaatgtccgcgaactagcgagaggacgagacgtggagcatgtgaacttgtcctattacggcctttttgcagacgaagtggatggcaatctcgatgtgcttcgtgcgacgatgctgaatgagattagggtcatatagacatcactgcattgtggaagcaatcaggacgtgaaacaccctgtagcatttggcgaacctagcaacacacaacaatgatgtgggcaacaacatggtactctacctccccgctagaatgaaacacagtgattgccatttg

SEQ ID NO: 170865 - DNA, 582 bp, Zea Mays
ggaggttgctcaccttgaggggaagcactggaggcacggggcaacggcgggggcacagggacgtgacggggcgacggtggcggagctccggctgcgcaagaaccacttcggtgagcgcagaccggacaaaccaaagagggggagggcacaccgaagggtgtcccgagtagctaacggcaaggcgaagctcaccgtggcactggacggggcacgggcgcaacagcggccatagaacaggcggtggacgtcagcggacggtggcggaggttctcggtttgcgtgggcagagcgagagagctgggcagagggcacaaatggaagaggggaggtgggcgagcagggcaagagggtcaaaaggggcgcgggggctcggatgtggccggataacgcgcggacgtgggcacgtccacggtggggagatcgtgggcgagaggttagggacacgctgacaggcggggtcggtggggcagagagagagggagcggcgcgcgcgagagcaacggcgccgacaggccggtcccacggagcagcgagagagcgagggagagtgtggcggaactgcccgaattattccgacttaag

SEQ ID NO: 170866 - DNA, 651 bp, Zea Mays
gctccacctcagctctcttgtgatgtcattccccctgcctacagctacaacttgctcaagcatatgggaatgcagcagcagcatagccggcatgcagtagtgctgctgctgggctggtagtggtacgataatgatgagagtctgctgctgttgggctggttgtacgatagtactactagtgatgagagtgacgctagctagttgctctgctctgcgttgctctgctctgctctatgtccccgatcaaacgagagagggatggcccacatcgacgcagtagtgcccggctgtttgcatgggctataaaatggaccaccacctcaatcgatagggacggtcgggtcacaatcgccactaccctacccactagtacatactagagcagccgatggcctcctcctctgtttcgctgctcgtcacgatcatgctgctgctgccgccgtcacatgcatgctcctcgctgagttgcaggcttgacttcaccagcgtggcgctgctctcctgctaggagacggccccacaaaaccctactgcctcatgctgcgacaccctcctcttttccatcgacatctgaccaattcatgaactagaaaaaggtctttgttgcctatgtgtgtacatggtttcaaggaacactacctttgacctgcc

SEQ ID NO: 170867 - DNA, 635 bp, Zea Mays
aaaaagttgagtcactcatgattcatgaagttggccaccaactgcgcactggatgggggtaaaaacgccagcacagctacacttatctcgattcttgacagaaagcgatggttcaacttccaatcctggcaagttgccagagtgtgcagttttcagctacctcgttcttgaatcataagctgggacacaaatgatgtgcttgccaacctgtgactgcttggatctggggagttctgaatacagcaacatcaagtttgtcataaaattcaaaggatttcttaagacagatcaaagtgaagcttcgagaactcctttgaacaataattcaatgaaatatggataatccaattgaactgagcaaactattctggtggtttgttcgattaagcaaacactttagtcaaaatttccatggcgtaaatgccaaggcaattataatcaagtttcatatttttcttacccagtctttactgaaatttttcaaaggtccaaaaacacgtcaccaattattgctacggacacaataagaatagtgacaacaatgtaactttctatatacggctttgcttactgtaacaaggactcatgcaacactaattgtaacagttcttaaacagacaatataaagatacaag

SEQ ID NO: 170868 - DNA, 565 bp, Zea Mays
cgaatgcaaaggggcgcagagagctcgaaggcgaaagggcgtggcgattggaagagaatgtgaaagcgtaactgctacacgcggggtgaatcccttttcaaggcagactctcccgctcgtgccccgagacgctacaggaaatcccgtccggcgcacacctgacgcctaggcggcccagtctctgacgcgggggcccgggtctacaagtcatacagctggtgtgccggtctccgagtgcgaaaaaggcgaaccgccacacggggagcaaactgccgcccgtggtagcgtgcctcttcatctccgccgcaagaaacatcagcccagtctatgacacgggggcctaggcccacgagtcatactccttgggtgccggttctcgggtgcggaaagagtgaaccgcagctcgcgccagtactgcgcctcctctgggctgccgtagaagacagagaaggtaatttttaaaccaatgcagcggtatcgaggtgccccacgcatggcccgacgaaaccaccaggcgtggggaccgcgggtctgtcagccgcggggacagatatggcagttggcg

SEQ ID NO: 170869 - DNA, 633 bp, Zea Mays
gtcggagatggacgtcggcagctgcaacactaggatgggactcactcctagcggcaccagtgtcgtgctcgcctcgccggtccatgcggggatgcactggaccccggcgcgctgctgcgcttggagatccgcgagtgtcttcctcatcgcctccactgcctgagggtctggggctgtctatgctgcctgcggcgcctcaaactggcggacccgctaccttagcatccgctccttctcctccagtgcccgctccttctccttcgcctagagctcatagtcggccagcagcttattccgcctctcaaacatttccttcctgaaggtgaagtctttctcccgccaggcgagatccgctgcccgcttatccagggaggcatccttctccttgaggttctcttcggcaagggcaaggctgctggccctgtcatcaagcccctgcttcaccctgtacaggttctccacagccgcagcctgctggtcccgctgctcctctagcatcttgttgtaggcattcagctttgcttggagctccgagatgacctcctccctctagtccaagtgcacctccttcttggccagcctcttctccttccgggtcacctccagctcctaggcaaacaccttctggaggtc

SEQ ID NO: 170870 - DNA, 635 bp, Zea Mays
cagtgaagcctctttttaggctcctagtgtcactgtcgcttggtttctaggggaaggtcctttctatttttacgaagaagatagagttagccgagaagcttcccgttaagtagattttttaaaggagttgttggaggagtctttaaaagaggtcttaccaaaggggtctcaaagataaaaataatgtttttatcagttgttatttaatctccgttagaatcacttttcccctaaaccttcatcaatcccacgcctacacctctattagggcctctctgttaggacaccactagcatatagcccgtgctaacgttacgatcctgagaaggtgagaggaggatttaaccgcggcgacgacaacgcaaggagatgggttgacgatgatgagaacgtggggagagagagagagaggaggaatgaaggatgatcctaataatattgtctagtgaatttgagtaagggagagggggttatccagcgatctaaaccgttggttttgatgatgtattaagtctgaaagcaatttgtttgatacatttaggggaggttatagatagggagtgatttggttaggtgtgttttgcaaagtttaaacttgtggattaaacaaagcaaaggaagttgcaaagctagag

SEQ ID NO: 170871 - DNA, 549 bp, Zea Mays
gtgtctgcctcattattcgtgacttttttatagctctggtaatgcatttaatgtaaaattagacgttggttttcaagtgagaaccatccagactttgaacattgaatcgttcatgaatacgtagatttcgtaggaatgttccataacgattagtatgtgtgaagggggtataaatatgatgtgttctgggtgtggtcatctctcttggccatttggatcacctattgagcatattcaagcctttttcctctctcactcacattcattgcttggcattgcattccattgggactgtgaacagtgggtccaaacacttgggagcaaataagatagcaggcgtgataaaatggatggttggaagctcaaatgtcttttcaagcatgtcccatctagctacagaacatgagtatttatagggcatctaggggccagtgtcataaatgcgtctatgcccctggttacctgctacattcctaaaatatgatgtataacagattaactatagggcagtgacccgctattctaattacacccgacattataccctca

SEQ ID NO: 170872 - DNA, 532 bp, Zea Mays
caaatgtgcataacattggtccaaatatatgtgtcggtgtgtggacccgagggcctaaccaaccagtgaaataatgttgtgtgcccctaacccagatggtgatgcaagatggcacaagtctttatcctggttcgagcaagagaaagccctacttccagcagagggagatgagacttatattacttgcacctatgtgcttgcagtagggaatacaagctaagtgggagagggaaggatccaaagtccttggggttgattgaggctagtgccaatatcgtgatggaggagaaaaccgtgaagtgttcgcctacctccctgaagctgtaggctatcctatttatagcctcaaggagggctgcctagagtactggagttggccgtgtatggtgaggaggtgttgtcgtgcctctgtagatggtatggcctagagcatggtcttgtacttgctgtttgacttgtgcccgcttgatttctgctgagagccataatcaggaccaagggctcgatcacgtacccgagccctttggcaagg

SEQ ID NO: 170873 - DNA, 817 bp, Zea Mays
tgaagattttgccctaggtcaatatagcaaatttgtagatctatgttaggggtacaattttgataaaaatactaaacactgatgttgtatgaaaatgggagataattgggtccaatgttgggctgtcagtcattagtgaagcctgaatattggccaacagtggcatcagatgatcttggggatcaaattgaagggaatttagtggatgtttgcgcaagatatttgtaacaaagttgtagctggtacattgcacaacaactttactacaggtggattggtgagttactacatagaaattggagaacaaagccatgtaattctctttgtcacgcactctaaagagtgtttgcgatggtacagtaacctaaataagatcgcgggttcagtgtatctcgccgccgatgactccgcgtcgtgatcctcgccgacgctatgattcgtgcccagtaacgtgcggataacgactcctggtgaaaagatcttgtcgtggatgaagtcggagcactatattgccctgtcgccgtacccacttgcccggcgatgtggccgcacggtcatcgccgaggctgccgccattttccccggttgcaccacgccttcggtagtttaccacgtcgctttgcaccgtggaggttaaccagtgatagccatccgcctatgtccagtgaatgccacgatagaacgccgcggtgactcagtccctcttctcggccgccagcgcatcttctcaaaattgggcgccactgctgatggacacaataaatcaatgccccagcgagctccgttaggttgttacgcgtctagtgcaccagccctc

SEQ ID NO: 170874 - DNA, 427 bp, Zea Mays
gttccgaggggctcccgggtgcgagtactgtgtataggcggcgaagggcggtggcgaaacggagagtgagtgaattgccgtgaagtggtaggcgtcatcgtagtgagatggagagtggtcgtcttcgcgtggacgggactggtaaacgggaattgttgtcctcgccgattggggcgagtgtaggtgaaggggagctgcgaaatctttttgagggtgaggaattgaggataatgttgttcaactacagggagatgggtatcatcccgaaggttgagccattgtaatatatgatgccctcgctgtgtgtatgtaaccgtaatttgtatgataaagctgcgcgccttcgttgatatgagtcttttgtgaaagacttcgatctttacgtagttattgtgctgttccggctgcacccttaggcgacttttgc

SEQ ID NO: 170875 - DNA, 838 bp, Zea Mays
actaaaaatctatttctaatttactttctctggttttctgttctctggactgggcgccaaatactgtgaagcgcaggagtctcggggtaaaaattcttaagactcagacaaatcagaactgaatcgcgggttcattatctaattccataaggttttttatgtaaaaacgccaggccgaaggggcatccttcattcagagccgtccgaacgactccgattagattctacacccgcgcgaactggtacgcaacgcggtccctcggatccaaatcctacgtccctgatttatgaagcccagagcgagtgactcacatccgatcccgatcgaacggttcctgttacccctatctgaaacgctacacactatcacatccgagccatcaaaaagagatctaacggcacctgatcgtcgtcttactccctgcgaacagcggcagcgccgccggaaatacggcgaggtgtcaccggggtacggccaacatggcaagctaacggaccaattcccacccgagacttcctacgcaacatatgcttaacagagaatgccatggagggacttacaacatgcacagaacggcggcggaagcaggctacggcgaagtgcggtccgcagcggcggtgtaacgacgacgaggaattctcccggccccgaggacccacgcacccggattcttccccgagaacgatccacgcccacacccgaacaccagggatcgggtcacagacacaaagcggtgatggagatgagagtcaacgacggcaatggcagcgcccgatctttctctcccctactctctggttgtgtaaagccggcggatggaagggagaacgtggggac

SEQ ID NO: 170876 - DNA, 444 bp, Zea Mays
tttacatctgggcactccgaagccaggatgcagaacctcttgccgaaggtttctgccggtcgcatgaacttcattatcagaccaaagctagagaagacgggctacatgataactttggctgctacaattttgcataccggaaagatgccaagtacccagttattagctaccgtacaaaatggccagccggctggaagggtgaatggttttatgtcaaagtggatgaaaagaaggaaaaattggttcagagctctttaaggttaaccttcggggaaactaggcctcaatgcaccatggatccagatagcgcatgccagaccgcgctgatcgaatttcggactgttgcagagcacattggcaccagggatctagtccaagagttcttagcattcagagtattcccaacttttagggaatgggacatgccaaagctgaaaggagaga

SEQ ID NO: 170877 - DNA, 660 bp, Zea Mays
agcaaaggggtatggttagagatatttctagaaagggcaaacactgcggctctaggatattttcctcccactctgtggctactaggacccgatccaatttctgataagtcaggttatccctagagttagcccaagtgaaccttcacccagacatgtccatctctctcaaatcaagaccatcaattatagcgttgaatagaaacgaccatcgatggtcaaatatatcattatttttcttagatggagattttagaatattaaagtctcccccagtgagaataggtgatgtctccgtattactcaaacgaactacctctgatatgaagctttgtttgaggcaatcctgagcatgtccgtatacaaaaacaagagcccacttgaaaccatcctccttattaagtaatttaagctttataaagaaatcaccttcctcaatggcacctatatcaaacacatcaagatcaactcctagaagcatccccccagatctaccatgaggttctttgcagtgccaaaggaaattcttcccagcacacaaattccttagtaaatgatctgaaaaggttttacgtcatgttttataaatcgcaatgaaacaaagattatgctccttggtaagatccgtaacaaatctgtgtttcttaacatctttaaacccat

SEQ ID NO: 170878 - DNA, 813 bp, Zea Mays
caggacccagatagatttggagccatagatcgacagagtcggagtctataataatgcttaattcagtgtgttagtcttagttagagttagtttgcttatcatatgttttgatgcatgtcatgatgaactcgtaatgaagtggaatctttgtaatgattgttactaaggtgtgggcatcccctgcaacttgttgtagttattaataaagttagttatttagttgggcaatccctttatttcctctttcctctttatctgagaagctgtgtttgagagtcagtgaagatgatcaattgttcagtgctatgaagatttccatatatcttttcttatgctgaaagattgtagagtcagatctgatgtgtgtgtgatttctacatatgtctgagaacaggcgtagagatggaagacgtgctcagcaggagcagcaggcaccccaggaggaggcagctcagcagtagttgccaccgccaccctcgatgactattgagcagatgttcttgatgcaaactcaagcagtccaagcgattggtcagatcttagcagcaatgcagcaagtgcaacagcaacaagaccagcatttgatcgacagagccataatgactgaaaggaagcaccagaagatggaggacaggaaacgcaagactggtggatctcagaccgagagtagcagtcgtccccgctaatcaggcaacccacctcagcagttcaagcaagatcaccctcaaggtcaccagcaccagcatcagcgtcaacagtaataccagaggcagttccctcagcagcagcaacagtaccatcagaacaaccagc

SEQ ID NO: 170879 - DNA, 437 bp, Zea Mays
gaggtggaagaaagggcaccggccgttgatcaacctgtgaacgggtcagattgaaatgctggtaccttttcactccagtgaaccctgaccattgatccgtgtatcaacgatctagatttggtctgggcatacctcttgtgtgggcagatcagaaccgttgatctgcaggcatgcagccagaattagatcgttgggtaacccttcgcgcatgtaaccttggccatcggatcgtgatcccacggctcaggtttgatcgtacccctttcacgcgtgtgatcccgaccgtgcgattcgatcggacggatcgggtggagtccagagtttgtaaaacccacgccgtagatttttgatctgacgattaggatagcgtaccggttcgtgggatgtgtgggtctaatctgggcggtcgatctgtgatcaaacggctcaaacccact

SEQ ID NO: 170880 - DNA, 708 bp, Zea Mays
ccatcctttgcttgtatttcgtcagacacttgtaagagcttggtaagatacattagagtgtgttcctgtgttccacctgagaagagcttgtagttaaattattagggataaccgtcaccgtttgtttcctgtttttgtgtttcgatggcaggcgacgacgaagaagcaaggatccctacagacttcgatgaatgtgttagccgccaagatcttgaggcaaacaacaagctcctgaaggatcaaatggaggaaacggtccacaagtcagtgcatgatgccttcattaacatggaccttggcaggacttacaagaggctggatcaaggattgtcccagatcatcgacagacttgctgtgttggagacgcaacaacaagcaccgccaccaccacctcctcgtccacgtcttcccgatgatgcggtgattgatgaagaaggtaattatgatgaagcggccaccagagatttgcgcctccgtcgtcgtcttcatcaaaacacagaaggtatgccacaccgccaccaaggtaataacaatcgtgctcctgacgacccttatgctaagattaaattttctataccatctttttcgggtcattatgatgctgagggatatcttgattgggagatgacgatagaacagaaatttgttgcccaccttgtacctgaacgacatcaagttagacaagccactagtgaatttaaagatttt

SEQ ID NO: 170881 - DNA, 622 bp, Zea Mays
ggcgtcggcagacacgccggactgcccatacccgtgcctgccgccgccatccgctgcaggagccatcaacggctacccgccaccgcaaccgtccactggaggcggcggcggcctcggcggcagctatccgccacctccgccagggagcttccagctgaccccgccgggagcgatgcccgcgggcttctccccaccgtacagtggattcccctctgggccagccccgccgccgccgaaccccgtcctcccgtggttcccgtggtactaccagcgcaccaacccgatcacggggtcgacgacgtcggcgtcctcacctgccatggacgcccggtggacagtcacagtcgcggtgcttttccatctgcccttgctcgttcttcttcgtgttctgtagagagtacctggctacctgcagccgataggcgagttaattaaggtgcttcgttttgctattttataagtgctagaaacgtgttatatatagaatatattacttaagtttgtgaagtagtgttattttatttttggtgtaatttattttgtctgtgagtgacccctcacatgcatatcgctctttttttactgtattctgagcaaagttttacatggttatcatgatcag

SEQ ID NO: 170882 - DNA, 657 bp, Zea Mays
gctgggtgactggccacgggaaacgtacccatcatcaccggctctccttccggtgtagtagccacttgggtgtaatatacacgccccgtcttctttgtatttttccccatagcatttcctttgggctgagctgatttcccagatccttgcgaagcatttgattgattttgcctaggatatgcgcagtctttgatgaagtgtcccgacttgccgcaattaaaacacccagttgaagaactaggcaaggcagggaatcgagtgcctggggcacccggctgatttggggtagtgggggtattgttggggcgaataatgataggctgtttgaaggggaatgagggtggacgagaaaaagtgcgattttggcttgaaggccggatcacaaaccgttgcttctttgcctggccctgattaggcctctcaccaccaaatcccttattcttcccagaatttgcgtattttgcttcaacagataaggctgtgctgacaagcctttccatacgtgaagatctatgcatgtggccattttcctttgtagcccgatcattttagtccccgcataaaacagttcttcttctttaaatcagtattcacctggtcgatggcatactgcgacaggtgattaaatttgttgagatattggttgacggtatctcc

SEQ ID NO: 170883 - DNA, 782 bp, Zea Mays
atttcttcatcaaccccaccgaagagcaaagaccccggctggtaaccgcaagatattgcaaactctttcagttccgacttgtcttcctcggacagttcctgatcacttaaagtgctgaagatcaaaatccctttcgtccgaaggagtattatcaatttcttttccttcatctggcactatggccatgatttcttctgcagctacatttgtctctgcagtaacatctgcaaatatatctgacacaagcctatcaatttctgacattgtcgtttcggcttcaccagcatctttggcttcggcagcaccttcagccgcagcttcggcatccacatgaatcgctgttttaactgccaaagctgagggtggtgtttgttcaattgcttgcatcacatttacaattcgccgtttcttttgctctttaactttatcctttgtagccgaaggctgttctttcctctgtaaaaattttgtcagttctgttcccgaaggacttagcagcttgaagggcggagatttagtcattaccttcagaatttcggctacttcggcggcagagggcgtcgaaggagcttcttttctgtctcacctatcttcggctcagcctagtgtgttaagctttcgttttttagagattgttgccttcggctctggagctgtttttgttttcttcaaaaaaatttcatcttcctttactaaccatgcaacttgcctatttaggatgctgacaatcctttttcttttcacccatttggcccctttgtcaagtttctcgtaatccgggt

SEQ ID NO: 170884 - DNA, 407 bp, Zea Mays
caccaatgagcctttacttgatccattgcccggtcagacctctcccggaccgtctctcggtcgtgcgggccccacatcctgtcaaagagcgcccccgccgactgcttcagcaccgggtcttcaacccggaaaatttcacgatcgaagttttcgtccgattggtcaaagacctcgaaatgcctgcacccctcgcgggacaaagcattcacggccccctcgcaggtgacgagggaggcaaaggacatgaggcccgtcacgatcgtcggcagcacccccagctcctcctgtaaccactcaaggaagcagaggcccacctcttgactgggtgcttcgaaggcggcggtccacgcacccagctcccggtacgcgtccacgaactgcgcatgcgtccgctcgacctccgcgcg

SEQ ID NO: 170885 - DNA, 508 bp, Zea Mays
gggggatccaaatagaaggttggtgtttgccaaagctcaagcctctatattcaaaagctatttcgaaaaaccaaaatcccttggacactctatgtatgactattgttaggattgagaaactgagagtgttcctgttgaaaagtagttgagctttttcaagtgcagttgaacttcatttcaactatgtcttcagctgcagttgagcattttcaactctagttgaacttcactttaactgtgtcttcaactgcagttgagctttttcaactctagttgaacttcacttcaactgtgtcttcaaacttcacttcaactggggtctagggcatgttcaaccagggtccaaacaggttcaaccggggtctaggacaagttcaaccagggtccaggcaggttcaatcggggtccagggcaagttcaaccggggtccaggaaggttcaaccggggtccagggcaagttcaacaaaggtccaagcaagttcaaccggggtccagggcaagttcaac

SEQ ID NO: 170886 - DNA, 391 bp, Zea Mays
ctcagcataagtcagatcatcttgaacactaaggtcctccagtggtagctgctcctcaggtaccctgaggcacttctttagctgagacacatgaaatacatcatgtacatctgacagatgatcgggtaacttcagttgatatgcaacttctcccactcgctttaagatcaagaaaggtccaatgaagcgaggggacaactttcctttgactttgaatcttctcataccccggagtggtgacaccttcaaatagacatgatcaccctccttaaactccagtaatcttctcctattatcagcatagctcttttgcctggattgtgcaactctcaaattttctcttatcattcgaacttgttcttctgcctcttgtataagttcaggcccaaag

SEQ ID NO: 170887 - DNA, 282 bp, Zea Mays
ccattctcattgttagttttctttttaccactgcctccctcaaggcatcctttgatcctatttttcctctgtcgacccacaacacgtttccaaattggagcacccacttcttttgcaaaaggaacatctagccaaaacgatttgtcaccgataggctggaccacccttgagtacgatgtggtgaacatagctacatagtagtacttgtcgacaaaatcctccatcctgacatccctaaattcctgagctgttatcaagcacatggcatggatacatggtttg

SEQ ID NO: 170888 - DNA, 538 bp, Zea Mays
gagagaaataggggaagacccaaagccgaaagcattggtgcactgcttgttgagggggcgtcaacaggaacgatgttgaaagcacgactcgaagagaccttagctctatcagcaggcaacagactcccaacatccgggtcactagcctctaaggtgaccggaccgacgagagcagcaaataagtttgtcaccacgagttcctcagattgaaccagtggtgatccggcgtgaacatccatagaagcagccgaagaggaacctggcccaacaccctcgggggctgggtcctccttagtggccacctccaaagcttaagctccctcagccgtgcccaaaggagccgggtgactctgatcagtggcattgagggtcagcgtgtcctcgcgagctggaccaccctccaaggtcgacaaagcacgagagactgtctgggttgcctcttgcccgacaggatcgcatggcaaaggaacatcgttcggggcctctgtgacaccccagtgtcacctagggtttcttctcagtactaactcaaggacca

SEQ ID NO: 170889 - DNA, 506 bp, Zea Mays
gaggacttggataaatgaggttcccaaactagtccttaacaaatttcactcgactagtaaaatagtactattattagctactagaaaaatattgctaacaatcagttaaactattagcaacatgtatttggattcaagaaaataattatgagtagctaattagtaattactatctttcttgaacctaagtaggatcataattaataaaaatcctatagtttttagagagccaagataggatcataattaacataaataatgtagtttaattttttgatagacagtactagggcatgtttagtttcattgtgctaaactttagcatcacttaaagagataaagtgctaatgtatgttaaactttagcattttacttttaatatcttctagtatattttagcactcatgtttggatttacaagagctaaagtttactaaagatgtagtgctaaactttagcattatggaatcaaacatgcccttagagtgtacataataagaactgca

SEQ ID NO: 170890 - DNA, 705 bp, Zea Mays
ctcgatatagcagaaggcgaggaggccaacacccgtgaagcctaccgaaccctgaagatggattatgataagaagctgaagaagctcgctcccacgaagaaaatccaaaagaagaccaagaaccaaggaggccaagctgagcggagaaagaaggcccctctagcagcaactcccgccaggatagagaatttgtccgacgtcgaggatatgtccctagctagccttgatgaccttctcaaggaatttggggacactttagaacaagagttcggtagtacctcagagaacgctcgcgtgtagtacgacttgtagtagctgtatgcttgtaatgtattggtgtaatgaataaaataacttggttgaaaacaattggcatgtgcataatagtgactctctccccctggcagatggattcagataaaaccacgcctaccgcctccgggattggagcagggtttcccctaagagctgaaagagaagccggtagagaagaaagtgagacccacctccccgcacctccagaactacccttagatttagcccaggttctagccaaccaaacccgactcatcgaggtcctcactcgaagtctggaaaatcaatgcccgaatggtggaagaccacaagacaggatgggagatttcctgaggctcaagcctcccacgtttgccggatctagcaatcccctcaatgctgacgattggc

SEQ ID NO: 170891 - DNA, 448 bp, Zea Mays
tagtgcaattcgatgtcgcctttctcataatgatcacaaagaaagtgaaagcgaacatcaatgtgcttggtcctcgaatgcagcacaagattcttggcaacacttatggcactcatgctatcacaaagcagaggcacatggtgaaaatccaagccaaaatctcgtaaggtagccatcatccaaagtaactgtgaacaacaactagcggcagcaacatactcggcctctatggtagacagggcaacactagactgttttcgagaagaccatgaaaccaacgatgtacccaaaactgacaagtcctagaagtagacttgcgctccaaaaggcaacccacaaaatcagcatcaaaataaccgcacaaagacagaaaggacgatgaggagtaccacaaaccaaactcaagagtgaaacgtaggtacctcataatctgtttcacggcctttct

SEQ ID NO: 170892 - DNA, 655 bp, Zea Mays
tgggctggtaactgttgttataagagaattctgccaacgaaaggcactggtcccaatccttaccatagtgtagcacacatgccctcaacatgtcttccaaaatctgattcaccctttctgtctaaccatctgtttgaggatggtaggctgagcttcttattacatgggtcccaagcgattcttgcaattgctcccagaaacgtgatacgaatggtgctcctctgtcagacacgatagtccttggtattccatgcaaatgaactatctcgtcaatataaatttctgcatacttttctgccctgtgggtggtatgtactggcaagaaatgagctgtcttggtcaacctatccacaatgacccaaatagaatcgtggtgccgggaggtattgggtaatcccacaataaaatccatgcaaatatcctcccatttccaagatggtatccaaatgctctttcttagatttgctgtaataaggatctcatcaaaataaacaaccacaaacaatcctatgaagggcctcagaacttcattcatcactcgcataaaagtgctatccacctcaagggccggcctcagaatggtgtcaacaagctcctgtaaaaatttcagattttttggacacccgagcgaaaagttatgcccggtttaaggaag

SEQ ID NO: 170893 - DNA, 381 bp, Zea Mays
taccgagtgatccaagtccatgcctgagtgggtgacgtggacaaaggggtgttccgcgatagaggtgcagcctcagtcgaccgagccacatgtgccacaatggtcctgagcgcaacggacgcaggcgcaaatctgcgtagggcagaagtctgtcgggatcctcgcgccttagagttcgtcgtcgctgttcttgctagagttgggtgagacaagcctactcccgcattttggcgccatcgaagaagatctctttctaaatggatccgcaatgcggtgcaggatgccttttcctgatctgcaatgcaggagagggatctaaagcagaagatctctacaacattgaaggtgactgggaagttgaaaacgatagccatgaagtca

SEQ ID NO: 170894 - DNA, 572 bp, Zea Mays
gttcagctatacccttagtcgtgtttttgttctgcaaaccagcacaacaccgaggtccctccgatctaaagctaacaccccggatttcaatttctcagatcgaatctcacccgcacgtttcgtatcggacgactgagaaccaaatccgaaccggcacccacgcttctaatctcgttcgctcatcggcagatcaacggatggcatgccttcttcttcctcccgcgcacaggccaataggcgcaggtacgacatccatggtggcgccattactagcgcactaggtccacgcaattccgcccagccctcattactaccgttcctacacgacgcagaggcataatcgaactgctaggaagagttctcaacagcggaggaggcaatggagaaactgccaaactggccacgacgtgctcgccgaccaccataacgccaggcgcaccttgagcgatggacccgcacccgagatgcccagacggaacaaaaacagagggggagacactcaccgaaattagtggtgcaaagaccctgctccacgacgaggggtggcgcaacagctccggttgcatgatgtc

SEQ ID NO: 170895 - DNA, 718 bp, Zea Mays
ctgggccaggccacactcgtgcaaaacattggcctcagccaggcccgtgggatacggccaaaaggcgcgttccacgcgagccaggctgcgctcggccactcgcgctctcctcgtgctagggtttcgccgccgcctcctctcccctcccatctctccctctcacgtctcttctccccctcgagctctccgtcgaggtccccccccccccccccccgcgagcaagctttcgcgtctcgtctcccccgcggcgagctctcgcgtcttctctccctcgcgttcgagctctcgcgtctcctccctctcgctgttgtgacactccttccaggtaatctgttcttttgatttgtagtagtattggtagttcttggctgagatatgatatttatgcataaaaatagctcttgggtgagatctgttcttcgtctgatctagtatagttgttcgctgagatctggtagttgttggctgagatatggtagttgttggctaatttctctcctctgagatctggtagttgttggctgagatctgttcttcgtctgatttgagctctccctcttgcatgcacccatttcacccctctcagatctggtatagtttgctaatttgttatataaaaatagtttctggtgtaggattttgctgcaaagtaccatgttgttagtgttcctcggatgattttagggttttagggttttgctactgtaggaaacgagtg

SEQ ID NO: 170896 - DNA, 348 bp, Zea Mays
agtacatcatagagcggaaatgggatagcgtgacgacgaggtggtgataggagagcgagttgaggagagagttccatgaggcgaagtcgtgcaaggcgtcgggatgtccacgaagacgatgaaggatgcgtggagtaggggctatgggagggagcaacagaaagtgatgagattgcaataatccacctcttgaagttatttgataatctagcattaattgggcactcaccgaccacgatctactggacacccaatggagatgtcgcgtagcataggtgcgccacgtgaagcctccatgtgcgcccacacaatgccttgcccgcgccgctcgccgctcacgcaccctcc

SEQ ID NO: 170897 - DNA, 399 bp, Zea Mays
tgaattccactgccttggctgaggtcaaagaggcaatgggcttgtactctatccattttgtgaatttgtcaatggcaaccagtacgtgagtatggcctccctaacctttcttgaaaggtccgatcatgtccagcccccagcatgcaaatggccatgttacaggaatggtctgcagctgctgtgcgggtaaatgttgttgctttgataagaattggcaagcttcacatctttggactaactcaacagcatcactcttcgttgttggccaatagaaaccagatctgaaagccttcccaaccagagtttaggacgctgcatgtactccgcactgcccgacatggatttcatctaatagtttcctcccaatagccgagtgaatgcacttcatgaggactcctg

SEQ ID NO: 170898 - DNA, 824 bp, Zea Mays
gcgagacggaaaaatataaggcgtgctcgatgggaatgttcggtcgttgtaggtggaaattgtctttgcttgaatagagaggtggtgacatgccgaagtagtcattgcttcctctatggttataagtcaagtcaaaatacggggtactagtggtacactaggcaggcggtgtccaaacaaattaacaggtcgatgtggtagttgtcgtgcgtgatttattgttagcgagtagtttgaattacgagttatatgaggattatgttagaaactagtatgcggcgtgtaactgtgctcgtgatgtgaataatatatcggtaggtattgttggtgtcattagcaagtgggatgattcctgttgtgcgataaaatttgaaaggcaaggaacatgggtagtgtgtcgatcaagttacccgataggttccataaacacgcttgtgatgctttgatgtgcatgataagatcgatgccttgccgtcatagtctcaggaaattttctgaaatgtgctagtgctctactgatggggttgaatgaacttgagatgtattacaatagctgtgtgtcgcgcaggttatccaaaaatggcgaaaggtggtgtatgttggtaattgggaaatagtcacgtcattagccaactcgtgttaagcaggagttgattgcgttaagtgattgttatatacatgttgtgtctcggactttgataataatagactagccgacgtgtatgatatatagcggcctatattgttgctctagttagccgaattgttagatgacttggttaagctcgtaatcacggtgaattgcttgttgtggtctaaatgtg

SEQ ID NO: 170899 - DNA, 742 bp, Zea Mays
agtggatatccacggggaggtaaaaagatctcgcgggggagcggatttggtcgcggaggaagcttatcaccgcgcctgtagccgtgtgacatggccgggccggcggttttgctgtggaaactctggtgacctcggttatgccacgccatggctcgttattgtgtggtagtaaccgtggcacacttaggactacaatctttgagccgttgcaccggtgagcgccacgattaacccactagtgttctcctctctcttcggccgccagcgcgcgatttcaaattcacgagccactgccctcgggccctataaattgagcgtgccatcggctccgctaggtagtcacgcacccaatacagcaacccgtgccctagatcgtccaccaaagcgccccaatttgagatttcccccaaatcggtcaagaacaccgcgtgtgtgagctcgccgcggtcagcccttcacaggtccgatcatgtcctcctttctcttgttttagaatccctatgtgcttgtgatgcttctcgacccggccaattgagctggaacgcgtaggatcaccgggaacacttcgagttgtctgttgatcacgttgtcaccgtgggcagagagattaggggctagaatcttgaaattggttgaggggtaatagttattaggggtcgaattaggtgtcaaccgctccagagcaccggtagttgagttatccggccagtgcgggctcgctggagccgctgctccaccgtcc

SEQ ID NO: 170900 - DNA, 306 bp, Zea Mays
tcgtcggccatagctgtacgccagttggggtccgctagcccactgcggtaatttgccgggatcggcgaaggagtcgtggcagacaggtttgtgtacgacacacgctggatcgtcccggtctgtgtgcgcgtcacaggacgggacagtgctggtgcaggtgggggcccagctggagcctgaggcgctggaggcggtggtcgcctgctgtagacgatgtagtggtcgcggacggggaccggaggtggctgggaggagcagggggcgccggctgcactgggtgctggcgttgacggcgaagcccctgat

SEQ ID NO: 170901 - DNA, 911 bp, Zea Mays
ctgctaccattcgagttgttctttctattgctgtatccagggggtggactctcaagcaactggacgtacataatgctttcctgcatggactacttgaagaggaggtatatgaaacaacctcctgggtacgaagattcaactcgacgagactatgtatgcaagctagacaaggcgttgtatggattgaaacaggcaccaagagcttggttctcaaggctctgtaagaaactttgtgatcttggttttaaaagttctaaggcagatacatctctgttctactatattaaaggagatgtcattatgtttatgctgatttatgttgatgacataattgtggtaagttcaagaccggaagcagtaacggttcttcttcaggatcttcatagtgaatttcctctgaaggacttgggcgacttacactattttctcggtattgaagtaagtaaaacctcgaatggaattattcttacacaagaaaaatatgtgaatgatttgttaagaagagtaaatatggctgattgcaaacctgtaagtacacccttgtccactagtgagaagctttcgatctatgaaggagttccactaggtcctgaagatatgatgagatacagaagtatagtgggtgccttgcagtatcttacattgacaagaccagatattgccttctctgtaaataaggtttgtcagtttcttcatgcaccaataactgttcactgggcggcagtaaaaaggatattaaggtatctaaaatcttgtgtcaaacttggtctaagaattaatagatcaaggtcctttttagtaagtgcatattcagatgctgattgggctggttgtcgtgatgatagaagatcaactggtggatttgcagtttttatcgggaataatcttgtgtcatggcatgccaagaagca

SEQ ID NO: 170902 - DNA, 736 bp, Zea Mays
caatgatccacagctactaggatagccaaaaattccttctcatatgtcgataagccttgcaacttcggccccaatgccttactcaagtatgcaatggggtgtccagcctgcataaggacaaccccgactcccagtccacttgcatcagtctccaaacaaaatggcagcgaaaaattcggtaaggccaggacaggtgctgttaccagagcttgcttgagagtctggaaagaaacctcatgatcttgagtccaaatgaaaagtgcccctttcttgagtaaggatgtaagtggtttcgctataataccaaaatgtcgaacaaacgcctgtagtacccagccaaccccaaaaaactacacaactccttcacattgctaggtgtggaccactcgaccactgcttgaattttgccagggtccgtcgccacacccgcagccgagatgacatgacccaaatatgccagttgaggtttagcgaacgtgcacttggaccacttgatgcaccactgatccttgagtaataattgcaacaccgcatacaaatgttgaacatggtcttcaagagttgcactgtacacaagaatatcatcaaagaacaccaaggcgcaacgacgcaacaaaggggccaaagttgcattcatcgcgcgctgaaatgttactggtgccccggtcaacccaaaagccatcacacggaattcataatgaccagaatgcgtttggaaggcggttttgtgagtatc

SEQ ID NO: 170903 - DNA, 412 bp, Zea Mays
tcccacaaggacagaaaacattacctttattccagctacaagacatcttcccttgattgatgattcttctttagctccaggaggcccaaagttagcatcatacttttggtcttcaaaactttgtatttgcaacaagttaagaacattgtctcgaagtttttcccaaatcatgtttgcacagcttgggtagttgtgaaccgctgatctcagcacctgagcacacataaaaggtggatgaattaaggacaagaatgacgacttgtatgcaaagacactcaatatacatatggaaaatgcatttttgtaatttgcgataaaccctacaagggtgcaggtgcactgtatttattccatggttaaaacccacatgcataggaaatttatgttatgatatctcaattggtgatccata

SEQ ID NO: 170904 - DNA, 608 bp, Zea Mays
tgcttatgctgtccgcacgcatgggaaggcaatggggcagggtactccactgctcggataaaggtaaggagccgcataataccttcgtcgttctacccgctgtgtatttcatgggttggattaaagcatcggcactctaaactcgtggtctgggggtggtcagaaccatcggcgccgcctcggttctcagcgtgagacatgggagagagaaaggggaggcaggagcacgtgaggttgaagatatacgatgaccatcggatctgttcccaacgcacgagattaagggttgtgaaccgatcaccagggttgaattaccatcgttgatctgaaatcgtgtggtaattgaggggacctcgtttcattaaaccacgaccactgatctcggatctaagggccaatactggataccggttcggggtggtgctcgatttaatctgagccttccatctcagatcagacggcccagccagccccgtaccccccttcggtgccgcaactttgctaaaacgcccctgataaattagctaatcaacccgccatccccgctcactgttcgctgagtcaagggaaccttgcgctctggcccctgagtttatttttatttggcg

SEQ ID NO: 170905 - DNA, 1143 bp, Zea Mays
gtaggtggtaagcatgtcaacttacaagtcagtaagaggaagatcagtgagaacatctattgtgccgttaaatttgttgttctgaaggtaactggcaagaggggagattggatttgtaagtaaccatgtgatgtgttttccaattgacgaagttaaacagaacatgtggagtactcacagtgttttcaaacttgtcaaggagttaaagctatgtgggatatcaccagagaatgtgttgtatgatagatccctggaaattgaacagttagttcatgtttaccactgtggtttgtggagcgatgaaaacagtaacatgcataagcagttagaaagaaagggaaatcactcacaacgttgttaaatttgtgagctgactaaacatatcgttgatgttcgagagctgattatgatcaagatttctacagcaaggagagtgaaagatataatttgtccaaatcttgtcaaagtgctcaaagaaaggtaatcccaaataggcaacttacaaatccctaagtgcaaccatctgggagatggagtaaggtacagtcccagtgaagttatttactgcaagatttctgcataccaggtaagtaagacctcaaaaatattttttaaaacgtaaatacgaatgattaggtacacatacaaacatgactacatgactcacaagctctggagattcggaggaagattataaggaatgtcactgcctccaagattattattgctcatatccctgcagaacaccaaacttaaattaaaaccgaacaatggcatgttgtctgcaaacatccgagcatcgagatttaagagcatgtgaggtctcacttacagctgaactagtgcagtgagctggttcatgttgtagcccaaggtgccgttaagcctcatcccagataactttctgtcgagcgttattcaggacaagaaaaaaggaaaatcagccgagaaggatcggtcgccgttacgcgaaaacaaccaacccgtctgaaggtttcagctagctcacattgctgtcactctggaacccgagcaggtgacccccagccacgactgcccacagggatccccattttgggacacccagttcgtcagctgcggcggcgaattcatggttgtgtagaacacattgagggcattcac

SEQ ID NO: 170906 - DNA, 897 bp, Zea Mays
ctcgggatcaagtcacgcgtgttctcttgtggagaaatttttgtggctctcaattaccttcgtttgctcgcctcaccggtccttcaccacacttgctgtcaaactagcccctcgctggggtggtgggggtaggcaccggaatttggcagggttggacccgaaaccaatgaagttcagttcaacctatcaaggtccagcccaatatcacttcccgtgcgtgtgtataacgagataaatgctaaaccatatccgtctggacgtgcaatcggaaactctggaagtatgaaactattgcaatgttgttcgtggccaattcatgtgatgtatattataaaatttatgctttttagactgcatctctgatccccagcggggcttggatctctagcggggatgaggatgagacatgaaattcctccattaaacactttgggacggagacagagatcaggtttcggaaatcggggtggagatggaatatacttctctggtctcgtcccgctccattgacatccctagttgaaacgcaacgtattaaaggcagagtgagctatgagtgacgtatgaaaattgtaaaccaaacgcttattactgaaattctaccatctctactctctctatctctcttcttctcctcctcgtttccttccctcttcaattgtttcctcaattgtttccgctaacaaaatgataattttcacccactccaatacatgagcatactaatttctagtcgttccaagtgcattcaaccttcggattctaggtttctattgtacacgagtttacacaaaatgctagcagtgcgctcttcctgtaaacgcgtagagcaaacatggttggaacgggtgctctccaggacgtgggtcgttgcacaaactttggtcgctgtcatac

SEQ ID NO: 170907 - DNA, 381 bp, Zea Mays
atttgggcagggaacggcgggatgagaaagaaatcgtgtggatcggtggaatggttccctacccatagtagaagacatgttcgattaacccattggaggattcaagtccggtccattcccgctttttaccgtatcactggcccgagaagcagccccctctaaggtggtgtggaaagaatccatgagcacgatgaccagtggcatcggtgacaatgcaagacggcgcggcttgcgcatgagcggtgacggcggggatgcgcacgagcggctacgacgactgcagcacggatccggccctccctcgcccgctctctgttccatgcacctccctcgccccaacctcccctccattctgcaccctcacctctggcgaaatccaac

SEQ ID NO: 170908 - DNA, 576 bp, Zea Mays
ggcaaatcctcatcccggtttatagaaacagaacccaggagggcaaccaaatcaatcaccaaatcaatcacacgagattacaggactcattgatggaaggtgagatctcctgtctaacacccccccgcagtaggaacgtcggtggaacaaacgtttagactggaccgaaactccaaaaatacagaagatggcaggcctttggtgaaaatatcggcgtattgggaagtcgttggaacatggagaacacggacagccccagcagccacacgctcccggacaaaatggaggtcaatctcgatgtgtttagtgcgttggtgctgcaccggattagacgagaggtagacggcactcacattgtcacagtagaccagtgtggtatgctgcacgggctgatgcaactcctgtataagcaggcgaagccaggaggcttcagcaacaccgttggcaacagcacgatattcagcttcggcactggagcgggagacagtttgttggcgcttgctgttccaagagatgaggttgtcaccgaggaacactgcatagcccgaggtcgaacgacgagtatcgggacatccg

SEQ ID NO: 170909 - DNA, 856 bp, Zea Mays
gctactggacgccgccttcatcgaagaagttcatcacccagtgtggctggccaatctagtcatcgttccaaaggcaaacgagaagcttcggatgtgcattgactacaccagccttaataaagcttgtcccaaggacccgtatccacttccacgtatagatcaaatcgtggattctacctccgggtgcgacctcttgtccttcttagatgcttactctggtttccatcaaatctagatgtctaaggaagataggaagcataatgcttttgtaacagtggatgggctttactgctatgtcgtaatgccttacggtctgaaaaacgccttgccgacatttgtgcgggcgatgagtaagactgttggggacctgattagggacagagtagaggtatacgtcgatgacattgtggtcaagactaagagagggtcgaccctagtggaagacttaaccctggtcttcgaaaagctgcgggcaacacgcacgcagctgaacccggacaagtgcgtctttggtgtctccgcaggaaagttgctggggttcctggtttcgcaccggggcattgaagcaaacccggagaagatcaaagcgattgaggcaatgaggcctccgatccgtatcaaggacatccaaaagcttatagggtcattagccgcccttagccgcttcatttcaaggctggctaagagggcgctacccttcttcaagctgttgcggaagtccggcccattctcttggaccgaagaggcggaacaagcctttcaagagttgaagcagcacctggtctccctaccaatactggtagctccagaacctggggagtcgttgtatttatacatcacggcggctgtagaagcg

SEQ ID NO: 170910 - DNA, 962 bp, Zea Mays
ctcctatataaggcctcaaaaggtgccatctttagactggactggtagctgttattataggagaactctgccaaagaaagacacttgtcccaatttttaccatagtgtagcacacaggctcgcaacatgtcttcgaggatttgattcactctttctgtctgaccatctgtctgtggatggtatgctgagctttttattgcacgggtcccaagtgattcttgtagctgctcccaaaagcgtgccacaaacagtgctcctctgttagatacaatagtcttcggaattccatgcaaacacactattttatcaacatagatttctgcatatttctctgtcttgtgggtggtatgtactggcaagaaatgtgctgttttggtcaacctatccacaatgacccagatagaatcatggtgccgggaagtattgggcaatcccacgataaaatccatgcaaatatcctcccatttccaagatggtatgggaaggggctgtaaagtgcctgctaccttcaaatgactggccttgactctctggcaggtgtcacattcagatacatacttagcaatttccctcttcattctggtccaccagtataaggatctgaggtcatgatacatcttattgctgccggggtgcatggagaattttgaaaggtgagcttcatccaatatcttctttctgagctcagggttcttggggacaactagtcggtctccaaaccatagaattcctttgttgtcctgatggaagcatttgtatttttctgccttctgttcgatcatttcctcgataacctgaacacccttgtcaccaatctgtgccatgactatttgctcttgtaaggtgggctccactgaaatataactcaaggcaccggaggaaacgacttctattttcatcttgcataattcatcacatagggtggtgattcttgcatccatattcatacaattgcactgggc

SEQ ID NO: 170911 - DNA, 1135 bp, Zea Mays
gtgggcccgggtagtcggccgcatgctcccagcgctctcgttgcgatgactggtgggtccgatcgctcaggtgtctcctacctcccgagataggcgcggcatgggcggactgtgcgatctccacgaatccgccgcttgaccaccatctccgctggcgcgcgcaattccagctgaccgagcgcaaaccaaccctgactcgacctcacaaatgcgcgcaactgcaggaccgcacccacgccgccatggtcaggacctcccttgcgaatctgtcgctgtcgcgtttaccgccgtccggattttgcgccaactgaccagctcgatggggcaataagggctcgaccacgggtaccatggaccatcttcgcgacctcctcccctccttctacctcctcgcgcgtgtttagctccccagaaccaccgccgccaccagtgtcgggcccgccatcgtcactttgagccgtcagcatcgctcgtgctccgagagggagtccagggacttcgtttggcactatggatgctcaccgagcaccgagcaccgagcgcgacaacggatcgattgcaccatcgacaatttctcgccgtaatactgccatccgccgcttgcctgtgaccggtaccctgcgcgacgaatttcctctggtacgattgctcgatcatgttcgttgtcatccctgtatcgcatagaagtgatcgaattggggaatgggggcgagaatggtggaattgggcagcgccggccatggctccgtcgctggcaaccctgggcgccgccgttgtcggactggagttgggggaaaagtctgggccgtccgtctattgattgatggccacagtttagtgcacggtaacgattgggacaagagcgcgagggtcgtccgatcgggatcggatgagtgagaaccgtgaatgcgttattaattctgggtcgtagatttgggatcggagggtcgcaaacgattactgatttgtaagcaggccgatctaatctgggccgcctgtgtgtaaacggatggctcggatcctaagataccccttcgggcgagccaaaactgcaaaatagcccctcagtttcattaaaatcaacccgccgtccattagtcactatgtgctgtgtctcgggtttcttgtcccgagc

SEQ ID NO: 170912 - DNA, 888 bp, Zea Mays
tcctgctgcatctgcccgctgccattaaagagcagaagaaccgacgtgagacacttgacattttttacacccgtcgagcgcgaggatggacagcgacttacgacagcaacacggaccaccacactacagtatatttaaacaccatttttctaattccatgatttccactgtcattgtgcattctatatttaaatgaaaaatgccaacattatgtacaatgaggattcaaaccatggttgttggttttaaaccaacatttacactcacttagccaatagaacacacatgtctttatgttttatattatatacttaatcataaatagaaaacgtagcaatgtacgaacactttactagtatacggtatacgtcattttctatttccaaagtgccctaattcttgccaagtaattacggttatatgagacaagctacgattacgtccacatatatggttatatcatatcatcaagattgaaatagtatttgtcgatattaataacatactcaatgtctctgtattaaagaatgttcgaagaaactttataagataatccaatgtgccaagtaagtttttattaatttagttaatataatatttgaacctttcaacatatatgtttataattatatatatgcatatgtagatattatatatatacatgggttaaaagggcctacttatgggttaaaagggcctacttataatttttcgcccagggcccctaaaatctcaggaacggccctgcactacacagagacacgtggggggcacatgctagcagcagcggcgcgcacgccacgtgagctgtgggaggagggggtgttcatggtctagcaagtaccaactcaagtactcaaccaaatcatcccaccgatctctatccat

SEQ ID NO: 170913 - DNA, 338 bp, Zea Mays
gccttctcaggcatgggtggctgataaagcattacctctccttaggaagaaccccaacatgggtgctaaagctatgcaaatatatttgcaggatgagtataatgttactattggatatgacacagtgtggaggggaagagaacgagctttgcatgaattgtatggtgggtggaatgagagtttttctttgttgtttaactggaaggtagactttgaaaagagatcaccaggaagtgttgttgagattgacactaaaattgtggatgaaaaggtatacttccacaggttcttttgtgcattgaagccttgcattgatggatttttagctgaatgtcgac

SEQ ID NO: 170914 - DNA, 429 bp, Zea Mays
ctgggccaaaacccctttgtctcggcccaccaacaccaccgcgcagcccatctgccgtccacagtcttaaccgcgggccaaattcctgaacgccagcccactctacgttctttccttttctttttcttgtgtggcgcttacatgtgggtccgcttcgtctatcgttctcctcctccactcggacttgctgccgcctgccggcaacagtgcccgcggaaaccgcacagggttgttggtcgaggattcccttgtcacgcgcatataaatggagccctaccactccccttcctccatcaaatcgaggccataaccaggccgatgggtgactcgccaaacgccaggggggtttggtgctcgtgcggccgccatggattcaacccggctgcgcggtcgttcggatcgcgtatggtggtcggagtgcctaattga

SEQ ID NO: 170915 - DNA, 692 bp, Zea Mays
attctaattgcccccgaccacgatctcccccgaagacgtgacacgcggcacccacggttgtcgatgaagcccccaatccgaaccctaggaacgaaacaatgccgaagatgaagcaccccaacggcggcaattcttcctccctcggtctctctctaccccagatggattgcgattctctctctcctcacgctgatgtcttcaaggctcccatcctaggtgccggtacaaggtggatgagggcacgaccggttttatataaggctggagtagggcggtgtcaaagattgaatcgaaatcgattccaagcgtagtttgcggaacagaatccccaagcagactccaacgttcggcaaaacccacgcgacggcaatgggttgagagaagcatgtgcccagtgtgacaggcggtcgaggaaggcggagttccatacggaggttgttgccaggattcgctatcgcttggccgaaagctccgacctccatggatttctgcgttgaatgcgtgcaagcctggatacgataagggaagaagctcctgacgaatggggcccacctgtaggtgactgggacggagtccgcacgggtagacattggctgaccttgtggggtcacactgtcaacatgtgggtatgtctggcttttcattctgggccgcacggggaaaaaggatgaagtgggccgcgtgggtggaaa

SEQ ID NO: 170916 - DNA, 354 bp, Zea Mays
atcctcttcaatccatacgtgatataaataatcgaataaggcataacattggtatctgagcgagatgattaaggtgactatggtagagatgactgtggaggtagagaaggcaatggtggaaaaagagaaggcgatagtggtagaggtgagggaggtgaaggtgatagtgatggagggaataagagaggttagcggggacaaggtggtagaacgaggtggaaccaaactgaggaaatcaacaaactcagaggaaggggaagaagaggacaaagcggcaatgaagaagggacaagactcatcaaaggtgacatatcgagacacctgaatacggcgagcgacagggtcccaacaatg

SEQ ID NO: 170917 - DNA, 512 bp, Zea Mays
tattcaatcgtttcactgacatgtgcacttagacccctaggtttctatttcttcactggataagtccctggcaacggcgcactcacctttcagccatctccttgttgggaacaaccatgaatagcgacgactaactaaaccaagtactggactagtgtccccgatcccaggcgaccctaatccatcccttaattgagctagtccgacccggagttcttctgtccacaacaacggcgagacccgagggtgaaccaaggtgttcccgatgactaggcgtggtagcgttaaaattctaagaacagggagcaccactataccctaaggaagctagaacagacagtaattgggttggaactacctcaggcgatgcttgccacggaagagctctccacggtggcgatggcgaccgaattaggggaaaatccaaattcaggcgctatggtggctaatcggaggcgagggttggtgctctggctttgtaacaacctagcggagctagctgtacactcaat

SEQ ID NO: 170918 - DNA, 512 bp, Zea Mays
gccagaaagatatgttggttcagtgaaccggccgccggcgaccccgcgcgtggattcacgtcggtgaggtgattcgtgctcactggtgcctggataacgtctcacggtgaaaagatctcccccacagatgagcttaaggcactgttctatccagccgccgtgtccgctcagccccgatcgctttgaatctaccctcgctggagttagacacctcgcggtcttgtgccacgtgcctcggcactttaaccatgccgccgtgactcatactaacttatccagtgatcgccggtgaggttgccacggttgtggccaccaatcgtgtgcgccagtgcccctcttcctctccgaccgccagcgcgccaatccaaaattggagaccaccgcttttgaacactataaattgcgcacacccttggctccgctaggtagtcaagcacctaatccagcaactcgtgcctccgattgcccaccagagcgcgccaatttcgaagttcccccaaatcggtttccgc

SEQ ID NO: 170919 - DNA, 1074 bp, Zea Mays
aaagaacagacagaaaagactactcggtgactacacctcgactcagattgggaaaaaaacatgtgttttctgcataactatgtgttttctacattgtaaacaaaactccatccagtctgtaggaagggaaaaaaaaccgaatgcataactgctggcaggaacaaactttctgaaaaaggcaaacggactaggataccaatttcgtcgccaatactaatacatcgtcgaaaaaaacaatcagaacaaacagggacgacctgtcctcgacctcataggcgtattcattggttcattgtggttcagtctgatcatttctactccactttgacccttctatatataccttcagcgagacttgccttaatgaacaacacggacatctgttgtttcaccatccatccatcaccacgcaattgctgttggccgattcatggggacaaggcttctctattttgctcacgtgaagaaaaacttgccaccaaccaagcattttctcgtcagtattggtacaaggtatattttcgcgtgcactgtctatgaccatctgaccaaacgagatagccggctcagcgcgttgaacaaaagatggttcagctttgcagccctgctcgcactgaaagaactgctgagcatctgctgctttggtagactacctttgcttgcccaacctaatccctattgcagtgcattacagcagaaaagctggtaaccttttctttgtttgggcatctgttttaattttggtttctttcgtcatggaaatatagatgtagttggttatttgttcttgtttggtgaaattttaggatgtccgttaatattcttatttgctatttggctatgcctcctttggtagactgctgcatggtagtcttgagattgacggcgaatgtagtcgatgactaagttaccatggttttaaaggcggaactaggcgcccagccaccgcctgaacgcctagacgacttaggcggacgccttactagccaaatatcaaacagctcataaactataaatcatcacaaatacacaatacaatagtggatctgaaatagccacaaagtagtctccgaa

SEQ ID NO: 170920 - DNA, 346 bp, Zea Mays
caaggacgccttatctcgccgaagcgccttacctcctaagtgacgccttgaaaactatgcatccaactgaccaatacctcccagactcatggttgaggcgggaatgtagtatctttctcagctgaggcaatacttgcccgtgtttaatggggaggtagaggtgctctcgctgttggcggttgtccctaaaatttcttgaggaacaccatatggaagacattattgatacgagcacatggtggcagagcaagtagacgacagggctaatgtgctcaagcacttggaagggcccatagtacttgagaaccaactttccttaagctttataaatcagtgatgttgcaag

SEQ ID NO: 170921 - DNA, 545 bp, Zea Mays
acattgacagacttctaagcgtctaaagctttgtcagcctcagggatgggtgccactaccaatgtttcagcaggagcggcatcagaagaatcctcggctaatatatcaagcatggcacttatctctgcatcacttggattcaaaggcacctcaaaatgaacctgcctctcgtcgtcaggaatttctccgagcgaggcaaccaaagtactaacttcttcgggagagggtcgcactctaagacccaaaccgctatcaccagcaggaggatttgacacgaaactattaaaagcctaggaaggaggcaaattccaggccgagtatgcaacaggggcgccgatgttcgataccttgcctccgagtatcatctcaagccggctcaccaagtccacagccgtaattcttctgttggttacacaggttgagtcagccaagcctcggtacagataagtcgggtatgctctgtctttcagtggttgaatgttcttgaaaacaaagtcagcgaccatagcttccacagtcagacccctttctttcagcaatccaac

SEQ ID NO: 170922 - DNA, 1290 bp, Zea Mays
aacaaatgctacggaagcaaggcaaaatcgaaggcgtttattggaccaacaacgtattgctaaaagaggtaagttctaaacacttacatattcaaattcaaaccatataatcaacaacacatattttacctaacaaatagttcttgttttttaacataggtctaccatgtcaaacaacagaaaattcacagtgtggtcactttactaaagaatacatacaagcactcaaaggtaaattactaaaaattaaacatcaataataatcattttaagactaaattaagggatatatctaacactgctaaccttctttaacttttctcttataaatgatttatttgcattggatatagcttcttatccaaatcgatcatattatggaacccctgactatgaatgccatcactgtaaagctattttctggtatggggagagagttagagccaaacaacgtgatggaacaattgtttatagcaactattgcaaaggtggcaaaattgatattcctccgtacaaaccaagacccgaacctctatccactcttgcaaggtttgatggcgatcacacatcaaagaagttcatcaagaatatcagacagtataactgcctatttgccttcacatcaatgggtgctcaaatagataaatcagtaaacaatggacgtggaccaccgctattcaaaatatgtggtcaagtttatcatcgtgttgggtctctattacctctggatggttctcctccgaagtttatacagttatatatctatgacactgcaaatgaagtgcaaaacagaatagaatgtattaaagacaatgaagggccacatcaggatctagatccgtccatagtgaaagatctaataaaaatgctcgatcttcacaatccattggctaaaaaattcagaatggcaagagaacgtctggctaacaataaaaatgaagaattcatcatcaggctaatcggagccagagaaggcgattctgtgcagtacaacttaccatcagttgaagaactcgccatgttagttgttggtgatttctctcttgacacattcaagcgtgacataattattgaaatgcgtagcaaagaacttaaacgaatatctgctttacacccagctttcatggctttacaatatccacttctttttccttttggagaacgcagatttcagattggaattatctacaacggtgtcaatccgtcagataaaggtaaacatactcacatgactatgcaagagtattattgccatcagtttcattaccgaaaaaatcagcccaacccata

SEQ ID NO: 170923 - DNA, 468 bp, Zea Mays
ccgtgcgcagtcacgtgccctttgtctctgccgcgcgggttccgctggccggctttacagggctcaagcgcatccttcttcagccacttatcggtggggccgtcctgtcatcaccttcttccttgctccgtgctcctctcaacggagtccgccgatatcgcgtggtcaccggcacaccgcaaacggagtccgaaactgccgacgggatcgggtccccgaaatccgcgctcccctggactcggaacctcgtagccgtataaaaccgagccgttctttttgcatccgtggcgtccgccattaccgagcgcagaaagcagcgccgccactggcccagttttgtgtccaccaccatcgcgtccactatttcgtccctgtgtgtctcgccgtgcgtcggggattgaaccggggagctccctgctgaagattggcggccgaggcccacgaatttgtcgccgtcggggaagatcc

SEQ ID NO: 170924 - DNA, 485 bp, Zea Mays
cacggattagatctagagtgcgccgaaacggtacgctcggtggaacgtcggatctacgatcgagggttagactttaatgaagcgcgatcactttcagcaccgtcccttgaccgatcaacggccaagatttcaggcgcaacagggaaaatgttaacctctaatcgcagccgcacatcacaggatgagcggcggaaacctcacctccaacccgacagcaccccagcggtggagctcagctccccgcggcggctggttcaccggcgagcacgaaatccggtacctaaccgcccccatctagaaattgattggtacaaaaccgagaggggattaaggcgaatctgcagagaggggtctcaccggagttagcgacgcaaagatgcccgaccacggcgcggtgtggatccgcggcagcgcaggagcaacggcgaggaatcggcggcgcacaggtgctctcccatgcctcaaactgccaccagagggttcgc

SEQ ID NO: 170925 - DNA, 1557 bp, Zea Mays
gtttgttacaaaattatcaccaaagttctaactaatagattggcccgctgcattacctctgtgattagtgaccttcagtatggatttatcaaagggagatatatcatggatggtgtcctttctcttcatgagattgttcatgaagtaaaacggaggaaacaaaatggggtaattttcaaagttgattttgaaaaagcttacgacaaggttaattggaattttcttcataatatgatgattaagaaaggctttggtgataagtggagtgattgggttttgaaaactgtgaaaggaggtaaagttgctatccgaactaatgatgtggtaggaccctactttaaaactcataagggtgtgcgccaaggtgatcctttttcccctctcctttttaatgtgtctgctgatggtcttgcttgtctgattcaaaaagctaaagatgaaggtattatcaaaggtcttattcctcatattatttctggtggctgctgctgtttacaatatgccgatgacactatttttctgtttcaagatgatttggaaaatgctagaaacctgaagtttattctctgtatctttgaacagatgtctggccttaagattaattttcataaaagtgaaattatttgtttgggaaatgcttgtaacagagaacatctgtatgctgacatctttacctgtcctcccagtggtctccctatgaaatatttaggggttccaattgataacaagaaactgtgcaaatctttgtgggatcccataattggaaaaattgagaacaagttgggttcctggcaaggtcggtttcttagtttggggggtcgattagtcttgatcaacagcagcctaaccattgttcccttgtatatgctctccttgtacaaatgccccaaggttgtgctgaaaaaaatggatatctttagaaaaagattattatggcaggggggcatgatcagaaaaaaataccatttggctgattggaatttagtctgctctcccaaaaatatgggtggtcttggtgttttggatttgcaaaaaatgaatgaagctttgttggcaaaatggatttggagactagaaaattctagtggtttgtggcaatccattgttaagagcaaatatgttaaaaataaacctatcatttctgtgaagaagagaccttcagattctcatttctggaagggtttactctcggttcgagacaaatattataattactgtaaaaagaatattggtgatggaaagagttccagtttttggaaaaacatttggtgtggcaatgtgaagttggctgacaagtaccctaacttgtttgaggttgcttatgacaaagatatcactgttcataaggtcatctcctccaatttccagatgcttactttcagaaggagacttattggtgatttaggtgaggcctatagtgaccttatggaacattgtagtcaggtcttgctttctgataatgacgattcttctaaatggttgttgggttgcaaaggtttttctgtaaaatccttttacaaaatgttaaagaattccatgattgaggttcctttgaat

SEQ ID NO: 170926 - DNA, 728 bp, Zea Mays
tggagaagaaataattccagagccggaggaagatgaagttgtgttattcaagagcttcttcagggtggggcttcggttccccctttacgagatgataggtgaagttttaaagaagtttgaaatctatcttcatcagctgatcctgaatgctattgttaggctcagcgtttacatctgggctctgtgaagccaaggaaagagcactaacgccgataggttctgccgggttcatgagcttcattaccagacaaaggcaagggttgatggtctgcacaaaaatttcagatgctacaactttgcataccgaaaggatacgaaggcccccgtgatgggccactggttggacgagtgaatggtttcacattaaggcagatgagaagaaaagggaaaagcttatgagcatggtgatgagtccactgcgattaaacttcggcatgactcgacccctatgtaacatgcagttggggtctccctgccagctagctgaagtggaatttagggtcatggctgagcatatcagcacaagatatttgatacaagaatatctggcaaactggacattcccaacttctggcggctagggaatgccgaagaagagagaagaggggaagaagtatgagcttgtttgtctgttgtatcgtttcaagtttcagaaaagatttaaagaaccatgcactgaatggttagaattgatagaaaccatgtgtaatgaaattcttggaaactat

SEQ ID NO: 170927 - DNA, 623 bp, Zea Mays
gaaagcttcggcattaacactcataccctggcttcgaagagcccatatgtagacactaagtctaacgattgcattgggtgttaactgatgaaggtatatctcaaaattctttaaaacttctcctatcatctcatgtagagggaaccgaagccctgccctaaagaagctcttaaaaacaacgatttcatcctcccttggttgcggaaccacctcctccccagcaaaacggacaagcttgctctcggcttccccaaagtagcccaactttttcatcataaccatgtcgtctgctgtcacaatagatttcccaaattcaatgtggctaggtttcattaggctcagaatactattgtccttctcactttcatcttgacttcctccttcatccacaatctgttcagcttcagcattggaggtaccttcagcaatagcctcctctgacgcaacaagacccgatcacctcatcacttctgatattggcgctgtttcggtcgtttcggtctcgtctccctcacaagacaccctagcagtggttcatactctggccatttttagtgctcaggctctttaagacgaagctgatctcaagtgacgaagcgtttgtttgaaaacgcaatgcagaa

SEQ ID NO: 170928 - DNA, 876 bp, Zea Mays
attaacaggaggaggagccatctgaataactgggccatcaacctcatgtggcccattaaaaggggcaacattaaaagcaagcccatcccctggcatcacaggtccatcttctaaaatgtggccattctgaaggggtgcatcctgaatgggaccaatggagctgtccgacgacaagcccgagtgttggttgctgagttattgttcatctggttgaatgggctatgggatctgctgattaggttgaatgttttctatccattgatcccaatccccctgaacattgtcctcttggtgggccggcaaatctcctcccaaaggatccggcgggaaattaaggtcaaggccagccggtggcataggttgacccagaccaaaaaaaaccaagggaagttgctaaccatcttccggagcatgcgaaattgggtcctcgtcttgagcctgcccaccaagcatgttttgttggattatttcacacgggactatccaagaatctccaatgaaaccatctgcctccgaaaaaacaatgaactgagggacttcttcaagggatgtgacacggacacgaagcaatgtcctggtcacattatgtcgatcctcctcccaaagaatcaacctgccaaacgaaccaatagctgcctgcaggtactctgaggaacggtaatctagaggaaaacccagcagcatgagccaacattcacggttaaaaaagagagcccgatgattccaggcgtcattgtgacaaagagcagtgaaagtagcatccaaatattgttgggggccaagcaaaacaaggttatcacgctccaaaacactgtaaaactgcaccaacacctgccccaagtgagagcgctgaatatctctcaccccaacccttcg

SEQ ID NO: 170929 - DNA, 627 bp, Zea Mays
aattggataggtcaaggagcatcacgggtacctgagaatactcaattgagggagcagaaggtgtgagctgactcgagttgcgctggccgcggtgaggcactcttcgcggtggcggaaaacagttttggggaaagtttgaaattagtgctctctggtgaacaactgtgaacgattcttggaggttggattcgcgataatctagcgcagttgccccggccttcaatttatagcgctcgcaagcggtggccggtgaattgagcgagatgagcggcggccagaggaagaaggagttcactggtgcagcggctgagtgtccagtgtcgtggcaattgctccggcgatcaacggagagcgggggtaagtcgcggcgatgcggtggaaaggggtaaacacgcggcacaaggccggaaggcggcggtcaccggcgggcttatcgggttccaccgcggtgagctttgtacggtggccggaatactttaatggccgggcttatccacggcggcgtgctccgagcgtttatctagtcatcctgagcatgacttgagacggcggcggcgcgaatcttagcgcagggaggtcgccgtcgacgagcaagccgcgctggcaacctgatccacatcggctact

SEQ ID NO: 170930 - DNA, 617 bp, Zea Mays
ttctgctggttatcaaagccattgttgagctttttgatcatgtctcaggactgcagactaatctctcaaaaagttcagtggctcatatacattgttctgttgaaggcaccaaactgaggaatttctagcctgttatatcactgatttatatgttacctaccttggtctgcccctttctattcataaaccccccaagaaagctctgcagcggcttgtggacaaagtctcagattacttgccggggtggaaagcctctttaatgaacagggcaggtcgtctggtcatggttcgagcagttctaacagcctctcccatctatcaaatgctagctgttgacctccctaaatgggtcattaaagcattagacaaaagaaggggttttctgtggaaaggacaggagaagactaatgggggtaattgcctcgtgtcttgggaaaaggtgcaacgccctcttgaatatggagatctagggatactaattcggagaaattaggatgagctctgaaaatccgttggttatgggtccataaggtggactgtccccgtccttgggctagtttccaaaggggctcctcggaatgctactacttttttaaatatggccatatctccagttc

SEQ ID NO: 170931 - DNA, 351 bp, Zea Mays
gtgagatcctacatctattactacttattaaggctaaggggtagcctgcctctgctttgttctgtcttccgacgatctcaaccgtccaatacgctctagagtctctcccgtccgatgcgcacactctctcccccacacacacccgctcgcgacccccgttccacatcccctattccgatccaaaaccctatacgacacccgtagcccggatcccatgtcccgctccccccgtcaagcagtcgcggatgatgggcaatcgattgcggagacggtgtgcgagagctcggacgcggaaaggtctgcggcgagctgcgtgacctatgttggcgtggagctgaggcagaggagcgt

SEQ ID NO: 170932 - DNA, 608 bp, Zea Mays
cttggtttgaatttaggcgaagaaataggttttggggcactcggctcggaaacgattgcgtaaatcgggaattttggtgaaatttaagcctgggatctcggattggcgtgaaatttggcaagtaggttactggaagtgtggtgaaggtgcctgaaaaatttgggttcaattggagcaagtttggctggtttggccatttcaccgagcacgtggtgtgcggggatctagggtttgagagaaatggccatttgaggtgggaatgccctcccgaaggagctaaaaacaggcagggatacacactagaggtatttgaactcatttcaccaactggattcatcggatttcacagaaattagaagatttgcaaaaagggtggtgttcactccctcactgacagagaaaagtgagagagagaggaaggacagagggctgctcaccgagggggagcagaaggggtgcgcaggtcgccggagatggaggccgccggagatggaggccgccggagagaagagatcgacggcgggcgctgggaagtcgccagagacagaggaggcagagcgcagccagggaaggaatgaggcctctggcctggctcgggctggaggccg

SEQ ID NO: 170933 - DNA, 1001 bp, Zea Mays
atcgccgacttaagccgattgctccgttagtagggtatagtggtcaccctgagttaagtaagaatgcaggtcgacaatgaataatttgagcgctcttgaagtctttttattgatgatatatttcccagtttacagagtacattgtcgtcccaatagcttttgaaatacggctaggggtaaaacttcctgaggtgttctatgttccatgagttcccaatttccgtgccgtccatctgagtgaggcgatatgatcccggccgagtgacttctgctactatgaacggtccttcccatagaggtgacaacttgtgccgtccttctcccgttagaattcggcggaggacgagatctcctactgtgaaggatcgatgtcgcatggtcttatcgtgatagcgcctcagagtttgttggtaccgtgctgattgaattaccgtgttcagtcgttcttcttcgagtacatcaacatcctccagcctagtagcctcggcttctgctatgttctcaaagatcaaccttggcgccccaaacttgagatcagcaggtagtactgcttctgaaccgtagaccatgaagaaaggagtatttccatgcagagctcgactaggttgagttcttaggctccaaacgacgtagggcaactcccttatccattttcctgcgaacttttcatttttattgaagacttttttcctgtgtgcctccaatatcatcctgttagctctttcaacctgcccgttggctcttgggtgtgccaccgaagcatatttgatctgaatgctcttttgctcacagaaatcgaagaactctgaacttgtgaagttggatcccaggtcagttatgatactattcggtattctgaacctgaatattatgtcttgtacgaattccacagccttaactgaagttaaagaagcaatgggtttgaactctatccatttagtgaatttgtcaattgctaccagtatatgagtgtatcctccttgagctttcttgaaaggtcc

SEQ ID NO: 170934 - DNA, 765 bp, Zea Mays
atcagaaagaaggatctgatgcttagatcatcgtcaaatcctttccttaaatgatattgtagagctgcaacaccaaattcttctttggataaaccaagttcagcccttaaattatttgcagcaacaacttcatcaatgcctaatggcttcctcccccagcatttggtaaccccaatataaggtgcaccatttcctttgtaatttttagctacttctctgggccgactcgaattgtcatatcattatggtcaagcttttccatcagccaagataaataagatctactgccaagcgcatcaactctcatatcaagtatactggagaaccccttccgtgcaatagcttgacgttgtctatcatttaaaatctgaatgcttactataacatcttggggattgcatctaacattaagcctctgctgtaaaaatgtaacaatgaataacgtaaacatttacatctgcataatcacaactcagtacaacataatttcacgcagaaaaatgataaattggcattgaccatcaattctaacctgtcgggggggtgatccactgctttcatccgttttgtaactatcttcttcaagatttttggaggactgctatcaaagttacgcttctttgatactggcataaagtcatcgtcctcgtcaccggcatgcattggtttgtgactgacagtattcgccggaacacggggtatgtcgacactaaagcactcttgagtagactgaattataatgtgctttggattagacggaggtcg

SEQ ID NO: 170935 - DNA, 707 bp, Zea Mays
cttccaagtaaaagggaaaaggggattaagagaggagaggagtaacacctgaattttgtggaaatcagcaaagaaattttatactcccaaattcaagatgttataagaagctaatgactttcggttttcaagcaaaaacttatcaccactaatgaaagagacattggttcttcttttcgttggcccataaattcgacctacccacacaatagcacatggccatcaagcatcacgacgctatgactgcagcccacgtgccagagcggtacggtgtttgatggcccaaaccatgttcccatgctagaggagcgaaaaggaaaaagtttgggccctcgggtttctgttcttccttgtatctcagtgacggctacgtcatgcacacaacaatggcgaataagggcatgtacaacctagatgttgcagttctccaaacaccaagggcttttttggtgccctgacctaggagcgctggccaggcagctcaatctaaccccagtgttggcaccgatttggtataaacttgaatgaaccacttgatagtgctctctgtggatagatggaccgcgatcttgcaccgaacggtccgtacctcactgaaggagctgctcctctctagggacgaatctagccaagaatatcgttgggggtcattagagttagcttcaccgtacaatataaattttcttgaactttaatagtgctttgct

SEQ ID NO: 170936 - DNA, 359 bp, Zea Mays
ccctacgtgaacatccatggaagtatgagagggagaacccactcggacaccctcgggggctgggtcatagctcgcgctacccatccgagccggatcatctccgacaacaccctcgggggctgggcaagcgctagcgccatccttgagggccgagccctctgtaacagccacctctaaggctgaaggaccttcaaccactttcatgggagcagagcaatccagaccagcctcctgacccttaagaccgtgctccaaggtcgatgaggcacgggacgctgctcgggataactccaacccagcatcaggcacatcagcgcaaacttccatcattccaccatctgccggctctgacaacagat

SEQ ID NO: 170937 - DNA, 887 bp, Zea Mays
agatccatgagagaacgatagtgaacacgatgggagggttattaccggtgttaggaggattggttaagctgctccccgcgtagtgcttccgcggcgacgacatagcgctggtgagcaatcgcccccgctagagacgacgacatggcttgcctaaaccacgcacgcacgagccacgcctgcgcgcagatccggtgcccctccctggtccctaagccacaccaatcgatggaataggcaggcgacggtggagcgcttctctctttcccactttctcctccccgggcgaacacgacgggatcacacagctgggcgcgaggagcgaaacgggacgcggaaatcctatttatccccaagggactcggtccacaactacccgcgtgcaaaaggcggcatcagaagcggtgaagctcgcgacagcggcggcgttcgttacggagaagatgaccgagctgacgggtgggtcctgtgttgcagtgtaacagagccgcggggcaaaggtttctggtgagcgcgtggcatggggagtgcatcaaatccgagcaggcggtagcgttcttcatagacatcatccatcacttcgaggtccccatctccatcatcacagacaacagcacacagtccacaaggaagacattcctaagcttctgcattgaccaccacatccacgtagactggtcaaccatagctcatccgaggacaaatgggtaagtagagcgtgccaatgacatgatcttacaaggccttaagccaagagtcttcaatgaactaaacaagtttggaataagatggcttaccgagctctcctcggtgattcagagtttaaggacaacctcgagctgggccacgtggttcacgccattttttctagcctatggggtagaggccgt

SEQ ID NO: 170938 - DNA, 1222 bp, Zea Mays
cactgccattaaacactaatgctcccttcgggtattttaatttttgggcatagtgtagcgcttctagcttctcttcttgagaaagtctcttccccaaagcatgacgaatgacgtaatcaatgctttcttttaaagcttcggtagcatcagcttcaacctttttagacgcaatttgctctgccgcttcttcttcaactatggtgggctctgtctcaatgggctctgaagacccagcttcggtttcagcttgaatttttgcagcttcggcttctgcttgcttcgtttcagcctcgggtagagctttggaagcttcggcaatttttcctgaaggagcaggactcaaggattttgctgtttctagcacaacatctaacacatttgccattcttctccttttaggagttgcggtagaacccttttgtgctttcggcactgttatctctgttgatgggctcaaaatctctggcatttttgttattttttcaactttcgacccttcagccttatccttatcagccttcgtctcaaccaaattaactgaaggtaacttcggcattacaaccggctcttcagtgctctgcgcaattggagcagtcactcttgtttcagcagctgaagaggcctccccgccaaactcaagcaccacggccggttcaatgtaacgcggtcggtaggtaagaaccttcatctttttgcccgcagccttcggcacaggctcagctggggcagccaaagcagcagcctttctcttcttcccttgtccccacaacgggtagcagtaatcggggtagacgaagccgatggcgtcaaaaactctgttcattctcttttttccctgacctccgaaggctacagatagcgctttatcttctgccttggaataagctccatgcagttcatcacttgtagcttcgatacatttcagccagtggtcgtttggttcatcgaacttatccccaaacctgaatgtatacttcaaccggaccagatcaccttcgctagacttggtgatggtctccttcggcatttcccagctttctacaagcggtcatactctgaatgctatatgctcttgaattaaatctcttgtaccaatgaaggagcagactgtactaaaggccttctgacacgcttcggcgacatcatcaatttcgaccttcggctttcggaggccgaagcgggaccagatggggcgcataatgacttccttaatatcttccct

SEQ ID NO: 170939 - DNA, 423 bp, Zea Mays
gggctctttagcacttttcacacgaccgaacgggtacgctgagatcccaaccgttcgatcagcatcagaccatccagattagatctgccttgattagaaccggtacacattcccacccgtccgatccacaaccaatgactcggattcaaaacggcagaaggggcatgttaggtttaatctcggccgccggccctagatccaacggccgagacctcatcttcttcaccagccgcacaccagggcacgacggtgccccacccgaccagactgcgacgcgccggagcacccccgcaccaacgcgtaagttcatgaaacctggcctcgaccagaactacgcaggaaggagaagaaagcgaacctttggggagggtctcacctagcatgggcggtgcagagggctccgcccacgtcgcagggcggtat

SEQ ID NO: 170940 - DNA, 769 bp, Zea Mays
cggcaggacagtcaccaggacgacaagtcttaagttagccttcgtgtgcgacaactaaatccgagcaaaattcgcctcagggtgtagccgagttagcacaaaaaatgcgcaaagacacctaagggtgtgaagtcgtccaatagatgcaacatctacccgaacaaaaagtcacctcagggtgcaaccggattagcacaagaagtgctgtgaactcacctaagggtgcaaagtcgtctattagacacaacatctattcgagcaaaaagtcacccaagggtgcagccggatacgcacaagaaatgcgtaaagtcacctaagggtgtgaaatcgtctacaggcacatcactcatccaagcagcaagtcgcctaagggtgcaaccaatatgcacaaaaaaacacaaagcaaaccagcaggcacaaaaaaagaaaaaagcctcaattcattcaagaaccaaagatctgcataatcatctctcggcaagggggggggcaagggcagcatttcactctaattcgctgagccacgtaatacaaatcttccaaataatacaaaggctctaccttcgggattagaccagcctcatgaaaattaaacaaaataagcctaagctctttgtctttgaaaagcgccctaaggtcatgttcttcagaacctcgttcgattgttggtgcaagaacaatccagtgaggcccctctttcgaatgtgccctctctctttcttaaggacataggggtgacatacaaagcacctcgtggagcgagtcccac

SEQ ID NO: 170941 - DNA, 521 bp, Zea Mays
gaagatgaaggaaccttcagacaaatgactgaaggtattcgtctggatcctgggtacactggaacagagcttgggcagtaataggcttcgactggaaaccctggaagctggtgagaagcatttccttgagcttcgggcacgaagtgacagtccttggctgaagagatgagtaccaagtttgggccacatttctgatcgtcataactgctaagtttccaccatatgaggatatggtagcttcgtagttcattaggaattgcttctagtgagacaagccatcatacataggcaatgtaggtggcctgtacaaaggtggctagggtgtggcttgcaactttggtgtaagtggtgaagcttcgtcatacaaaaaatcctaaaagttgaactcttcctgacaaaagttgtcatgttcttggttcttattgaattggttgtcgtgtgtttcggtgttggacatctccttggctgcttcgtcagtcttcttctggagctcagagagacaaagcattttctcattgcgc

SEQ ID NO: 170942 - DNA, 287 bp, Zea Mays
ctgcaggccaggtccagttcctaaaaagctgaagacctcttgtgaatttagtccatgaatatgaggccgagaagatccagccccacctagagacccaacacatccaccctctgttctccaactatggagacgtagacgcaccaattccttatgcctctatgttttatgtttcctaataaggacattacttccaaggtccagttacaagagcgtgagcatttcaattgaatcctcatgtgtgttctttcctagtcaattatttttctaaccttgtaggacctgttttc

SEQ ID NO: 170943 - DNA, 793 bp, Zea Mays
attttcttcctggttttccttacaaacaggccctcgggttcctattgcactaagtctctgacagcgcagaaagccccaaagccccctgggtaaccctaaatctaacccgcggtccttcctttatttaaacagtgcccacggtggaggaaagggcggaggggcttaccggcggcgagatagctctggtgaggcgtccagggaggtcggggaggtgacagtggtcacgtcgaggtgcgggtcagcgtcagagatggctggagtcggcgggtcctcgtgcgcaggcgggggagttcgtcggcggcgagtgttccagcctgctcacggtgggatagatcaattggttggcttgggaaggtttactaagggacgcagaggcggtatacgcgaggaattggaaaatggcgcagtgacttacccggtccacgttcgtcggtgagtggaagaagtctggcgagggtgattcggggtttctggtgaggttgcgctgggtctgaggctcggggagattcacgggcctctagcgaagctaaccgaactgctggcatagagtgggagcggctggggtgagctgaccgcggtggccgaagctcgggcagcttggcgggcgaaggagagctctctattcacggccaaaagctccggtgaacaagcgcggtcagtgtgggaagctgaggcgaggtcgtgcagggccactggcctttataggcgcgggtgcgaggaggacgcgtggcggatttgaccgtgcactggggcgagcgcgcgcgtgggttgggcgaacgtcggcgtgccgacc

SEQ ID NO: 170944 - DNA, 714 bp, Zea Mays
acatctccaaaagtaaagattaaacatttgttcattctaaaataagcaacgaatatttattaacctttgatcttggcacacattcaaagtactacctatctaaaggggacaatatgggaatatttcatttgactaaatagatatttgatatataaaataaaataaaccaagtataacatgttggagttttgtttggacacttaaatatacttttaagtttaaactctatgttaacttagttcgaaatttgaatttgaatttaatgtgaaagtaggaagaaaatgaaaaaaagagaaaaagaagaagacctaccactacctgggccgaatccccactctggcccagttactactcgactgtaccaagccatcttgcatccgtgccgacaggtggggcccactcgtcataagccgctcccacccacgcgtgcaccgtgaaactaaccaatgggcccgcaccatgctcttgccgctgccatgtgggtccctaccactggtcatcttccccacagactccttccctcatccaccgcggatcttccctgggattatggtaacaaacgcgcgacaaagcctaagaccgaatccccgtaatccccgctgggattagcactggttggactcgtcttctacacagtccgaggccacagcaacaacacctccgtgcttgcacggattccgcggatggttaagacctcgctcgccgcatccggct

SEQ ID NO: 170945 - DNA, 531 bp, Zea Mays
atcagattcatcccacctcgccgccggtgatcctcgcgcggtgattcgtgcccgggttaatatgtgtgctctttggtcgtgtggataactgagggagggtaaaagatcggcgaggaaggaatttaggcacgggttcagcttgtccgctatgtccacttgccctgcgcccaagccgagctatcgccgccggacgcaagtgcatgttcaccacatcgcagtaagtgtgcgagactatgacacacgtctcagagcccttcgattacccgcgtgccacaaagaccgagcaccagtgaaatatcctgccgtcgccccaaatagtttcatccaaaattcgtatcatatgtaacttgtctctttaaattgagtgcactccctgctccgcccctctgttactcgctcagtccaccctcaaccacctcccaccatttaccatagcttccagtcacctgaattccctgagaacggtcactagcgccgccgtgaggagcgccaccatggccagcactactccagttagttcatactcttatt

SEQ ID NO: 170946 - DNA, 401 bp, Zea Mays
taccagtacctccatgacttgcttttgtgtcttcatagctgatttaacataattatcccactctcgctgacactcaattgggatgataagtctttgcacgttgggtggaggacctacgtttagcaccccatcaacgacgatgtcctcaacatcatgccaaccaatcttctccttagccttagcaaccacctcactaaaggagggtctatcatcgaatatcacagccacacgttgcatgtcaacgaactcagcatttccataacgatcttgttccacgatgcctccatggtatatgcccaaaaaattgtccatctatttgaaatacgaattcaacgttgaataaccaattgtgatggttagtgcataaccccatccactatgactaactaatacctaactat

SEQ ID NO: 170947 - DNA, 780 bp, Zea Mays
gatttacactaccagtgatcagataagcttgccagatagtaacccttcgccggaggataattccggtgactcaccgccgtaccccatgtgccttgtggcttgcgcagataaactcgccggtgaaccgccgtcgcacggccttgcgccgcgtgtccaagcattgccaccgcaccgccaccattcactttagctccccgttgctcaccggaatagctgccacgacgttgaacacgtatttactgcgtcagtgttcttcttcatctccggccgccagcacggctcggccgaattgatcaccatcgctcgctatccctataaattgaaggccaggactgctgcgctaggtcatcacgaagccgacacacccgttcttcccctcaattgcccaccatagccgcagaattcccctttttcccccaaattggtctccgccaccgcaaagcacaactccaccgtggccagtccgttctggtaaggcaccatccaattcacgcgttgttctcgtgtctttgtatgctggtgatgctctccaacccgtctaattgaattaggccgccacccattgctgggaacacaagcaaaagtccttagccttcgctgtcctcgtgggcagggcggagtatgtcaccaaccgtgtgattaacttaggggaaatgctcggagtaggtctgatttggtgtccgccgctcgggaacgccagtcgttgccccgttaggccggtctgctagctcaccggagctcggccgcgttcaccgtcgtcgtggacttcaccctgcgaag

SEQ ID NO: 170948 - DNA, 422 bp, Zea Mays
gggagaccttgagataaacgaaatctccttcctcaaatctgagttcccttcgcctattgtctgcgtaactcttctgtcggctctgagcttcaagtaacctcctgcggattaaagcgactttctcttcggcctctttaacaaagtcgggtccttcaagcgtcctttcccccacattggaccacattaggggagtctggcattttcttccgtatagtgcttcaaatggtgacatcttgatgctggcctgatggctgttgttgtacgagaattcggcgtacagcaaactggactcccaatctctgtcgaaggttaatacgcaggctctgagtaaatcttcgaggaccttgttgactctttcggtttgaccatctgagtggggatgataagcggtgctgaaatctagcttggtgcccattggttgc

SEQ ID NO: 170949 - DNA, 951 bp, Zea Mays
aaataagtttttgggtttatttttatattaacaattcattttatgatttaattatgaatttatctattaattccagactagggacactattttgacaaagtctagggtgctctgcacaagatttccgggccaaactgtaatagttttcaacaagcgagggatggcgggttattttcaagcttcctcgaggactctttagcaaaaagacccggccgaaggggtatccaacgatcctggccgttggatcagagatccatgacccagatcaaaagttatcgtggctgattcttaatggtctagatctagatcgagggtctggattcaatctcgaaggggtatgcccacagtccaatcccagccgtacactctacatcctatggctcgcgcgaatttcccccaaccctctcttcttccccaatcagcagggcagcgacgaagcagagctccaccctgggagctcgctggatttcctccgcccaacgcactggcgtcaaaatccaaacacgaacgatgctaaacattgggggaagaaaggcgaagtgatggatagtatccttaccggcgaacacgacgcagagggcactatccttggatttcagcgaacccaggcataggctgttccacggcaagaaattccccgccaccaggttggccatcgactctggcgccgcatcgaacacatcccacgataaccgacgaagcccccagacccactgtcgagccactagcgacggcgtacccgtggttcgttcgcggcggaccttcttctccacatcaggtaagccgagcggtggccaaaatctctcactgctcggcgatacctcactctctatcgttggcgttttagcgctgccgggaagcggcacaccgcgacggcgagcgaggcagcgcgcggagcagacacgcgggtgtgagccgaggtggccatggcggcgacagcttcctttctct

SEQ ID NO: 170950 - DNA, 608 bp, Zea Mays
caggggacaaccaagacaaggcaacatacctcaatcgaaagactcaagatctcatgcggggattgcaggtctgctgcaggctttgcagcagccaagaggcgacaggacaggggtacaagcacagggcactcgtcaggtctctggtggagacatggagtgaaggcatcacacaggaatttaggagttgtgtgacgctagggttcccgaggtcgtgatgctagactaggccgcgatgcatgttggacttgtcactgatcctaagccttactcaatttcttacgggtatatattccccatgaataatcgggtttagatgttacacacctatacctgtacctgcgaatcccagtgagtgaaggatttatcccaaatctatgtccacgggtattgatttcctctcataccctaaccctaatagtggaatcccccttgggtaatcaggtttcggggcccattaacatccctaagcaggaccaataggaaggcccaacggaccaaactacaacgagacacccattgggttttcgttgtcactgcaaggtattatgtcaatggtaggatcctcagctgaactcgagacgttgatctctaaaacaactggttgtcta

SEQ ID NO: 170951 - DNA, 321 bp, Zea Mays
cgcgcccgacgctaggacgcgacaccgaagacaccggcgccctgcacgccgtgtccgagccagccgctccgaccccgcgcgtccgtttcttcttcacaatttattggaacatcgctgcatccgtttccctcccctcattcctcctctccccattatgagcagaaaacagcagcaccattgatggccatgaagaacagccgaccctttctctcccctccctctctctataaaagggcagcgagtctctccgttctccctacccaagctcgcccccatctctctcactctcctcgccgttagagccaccgccgccgtcgccgg

SEQ ID NO: 170952 - DNA, 455 bp, Zea Mays
cgaggcggagttttctcccgagaccgaggtcgtgtccagttgtcgcgtgtcctgctcagagttgttaaaatagtgatcgaagtgagggaacagtgcccagtattcacgctcgttcctcattgtaggcgttgaaggtagattagaccgctgtcgcgtcgtcctttgttgactttagtgccctcaacgggacatgtgttcgtacagctcacatttaatgcacacaccctagggttttgatgagtcggtcggggttgggctcataccaggacttggcccgagatgctctcgggcgaggcggacacacgttttccgcccaagggtgccctcgggtgggttgcagatccacgtaggcatagcgtttgtccgaggttaggctcgggcgaagcgtagttgcgtagtcagtacgtggagcctcgggtgaatcaagatttgggtcctgcgtgaccttggaggtc

SEQ ID NO: 170953 - DNA, 382 bp, Zea Mays
agacagcaaaaaaatttagttcctttcgtgcctaaatttagaagcgttcaagatccaccatgtatcaatgccacagggacacttgcatacaatacagatacaggcccttgacagatttgcatgcctatgcagtcatgtgtttttgttacaactaactacagtcaatttccaactctttcttggccagagattggtggggtgccaaatcttcttgaaccaactagactatgcaaaccaccaaacatgaccatgagggataaaaacgaaaacaacaggccgaggttggggttgaactggaaagataaaaacgaaaacacaggcttgaagcccaggccgaggttgctatctggagtaaagccaacaacagggaaggactcaccaa

SEQ ID NO: 170954 - DNA, 442 bp, Zea Mays
caggacgatgtcattgattgtgactcgatggtacgtgcggatgcacgtcggatcacacaagagtttatataggttcgggccgctagaatgcgtaacaccctacatccaattgaggctgagtattgagtattactggtgtactcgagttacatatgcgttgtgggtcgatgaagggtgaattctcctaacgatctaggggtggtgtagtcgctatgagagggctaatgagcgatgagatggtgatgggatggtgatatcgagtttgtcattttgttgtatttgtggatatctcatggatcaggttttttagaaaatcctagaaaatccggcctgtacacccaatgggtgcgcccaatgggtgagtatgctatcttgtctcaaaacagtaacctgatgtgacatggcgtaataatgcgcctgagcaattggtttactcctcttc

SEQ ID NO: 170955 - DNA, 713 bp, Zea Mays
aataattagggtggttctgccacaacagtggccgctctgtcactcgtccacttgtgccggcgacgtggtcaagcgaccgtcgtcgaggtatgcgttgtccaccgtgatcgcgacacactatgaccctttaaccatgtcacagtacatcgccttagcaagtctattcatcgccggtggtcttgccacggtaacatccacgaattgcttgcgccagtaacttcttccctctccggccgccaacgcgccatctccaattcacgggccaccgtcctcgaatcctataaattgagcgtgccatcggctgcgctatgtagtcaagcacccagcacacccacccatgcctccgattatccaacagagggccccaattcaagacttcccccaaatcggtccagagcaccgtgctgagtgagttcgccgtggccaatgctctacaggtctgttcacgccctctacttcctcgtttcagtacccttatgtgtccttgatgcttctcgacccagccgattaagctagaacccataagatcaccgggaatgcttcaagttatccgttcatcgaactgtcaccatgggtagagagattggggcctagaaccttgaaattggttgaggggaaatgattattaggggtcaaattaggtgtcaaccacttctgagcaccggtcattgtgtatcttggccggtacaagctcgttagagccactgctccac

SEQ ID NO: 170956 - DNA, 747 bp, Zea Mays
ccctcgcgtgcgacactccgtgcaaaagtcgcctaagggtgcagccggaccagcacaacaagtgcgcaaaatcgaagtcttcctcaaaaagactatccgtgcaaaagtagcctaagggtgcagccggaccagcacaacaagtgcgaaaaatcgaagtcttcctcaaaaagactatccgtgcaaaagtcgcctaagggtgcagccggaccagcacaacaagtgcgaaaaatcgaagtcttcctcaaaaagactatccgtgcaaaactcgcctaagggtgcagccggactagcacaacaagtgcgaaaaatcgaagtcttcctcaaaagactactcgcgctaaaccctacaccaaactgtccgcgcaaagaccgactacaggcgcgccggactgacataataaacacactagaccaagtgcgcaacgcctttatgagcatagccggatgcgcgaaggcgcacagcctcatcatacaagctatagttacatatgtacaacgagggcatcacaccttacatcggttcaaccttcggaatgattcccatcttcctatagttaaatggcattatcctcagctcctcaccctcaaaaagacttcgcagctccccctcacccacactcgcaacggccggcgaggacaacaattcctgcttgccagccctgcccacacgaagccgaccgccgtccgcctcactcactctacgcttcgcaaccgcccttcaccgcctacgcccagcactcggaccag

SEQ ID NO: 170957 - DNA, 932 bp, Zea Mays
ttccttgcgatgggataaatatgcgctaggccgggatacctgggtccctccaactcccgtgattcttccctcctttctaccaccgcagccatcatcgcttgggaggaaattgatccgccaggtgctgtgccgccgccgaccgcgtgtgttgtgctagtcggagtggggagatcctcacgccgcaaaccctggtgagcattgtgtattgcgtttcgccttatgtccttctacatctatggcatgcccgtaaccaagaccatggtctagcgccatgatttggggtcgtcggtgtgggttaccggcgagttgatgttcagcgtatgtgcagtttccccaaacaactaccatagtcaaattgtcggtaccccctgtgatcgctgcatattttgtgaagtcagggctcatttaattgagattcggagcacctggccgccgcatcgccgccgtgctttctgctcagtagggaagaaaagcaatggcctttgatcctgtgatgggtggctaggattagttgataacataccccttcgtcccagtgaaccctggccgtccatctgcgaacgagcggatgcggttcaatatcagttatttaaaatccgagccgtagatgcgagatcctgcggttgtgtgggtgtaccggttagttaagcgtttggatctaatctgggcgcctcgttttagatcggacggccgatattaagcgataccccttcggctctggctttttgcgtaagaaaccctagggttgaaagaattcaacccgccgtccaggggcactgctctctgtgtctaggaattctttccccgagccccctgcactttctagaaaatgaggcccagtccagaaaactcgaaaaacagagaaaataaatcagaaatgcatttttaatacaaaaataattactagaacttgtttaattggtagaaaattc

SEQ ID NO: 170958 - DNA, 1057 bp, Zea Mays
caagggctcatcacacatttttttgcaacacaagtttttttctagcacatgctcacaattcagcaacggctcatgccacattttttgtagcacaagttcacaatgcagcacatgttttttgcaagttccagtacaagtccatcattcacaatagtacacgacttgttcaccattcacaatattacgatccaacacaaattcatcatatgacacaagtttacaatctagcacaagttcatcattcactcaagcacaagttcatcgttcacaatattacatgacttgttcaccgttcacaatagtacaatccagcacaagattatcaagcagtccaacggcgaaacaagttcatcatacactacaacacaagtttcctacttgcaattgtagttcatcacaaagaacaacacaacaataaataacatagaagatagaagcataaaaggctctagtcacatcaataattttgcccaaattttcattcattttcttcacgcaccaagttgatctaggcagtcatatctgtcctcattgccaacatctcccttgagctgctcttccaccatgtcccttccaccatcttgacataattgttcatccacatgaaaaagttatattttttgagaacctaaaccactaaaataaacaaaattaagcagtaataaaaaaattaaatcgactataatggagaaaataaaagaaaatcgatctttcctaggtatggcttgcttttgcacttcacgaactcacgaccatagttgccattctcccttgttttcagtgtgctcataacgagtggctccacccggtcacactcggggcagcaaatgagcagcaaatgtggagctgctcgttcgtgacatgtgatgattcatgagaggttgctgctatgctccgcaacaagtcctagtaaacacaaccatatattatgcctccataagtgccgatcattctcctacacgaccatgaactacctttaagcaactatttagagacaaactacctatttgcagctaatctaaccatcatagtagtgtctaaattcttttaattcgcc

SEQ ID NO: 170959 - DNA, 466 bp, Zea Mays
aaacaatttctggggtttattttaatagtgctcggaccgaggaagcaaaatcccgagagttcaggggctaaatcgtgaaaaatagggtctaagtgtaattatctttatgcatgtgaggatggcgggttagtttagacaaaggtcaagggcctttttgcaaccttcgcacggccgaagcggtatccatgaatcacatctatcggatcacagacgaacggcccagattagatccatctttaagtgaaccgttacgcgacatggaccacacgatctgaatccaagggtccggaacccggatctaatcccacccctccttagccaatccaacggcttggattgctccaaccgaagcggtacaatccaattaatccaggccgcccattacgcatcgacggtcaccggttgtcttcctcaatccgaacgcagcgtcacttctttctccctgccggtccgtggtggaggcgcc

SEQ ID NO: 170960 - DNA, 720 bp, Zea Mays
tgacaaacaagatccttatcaaatttcaacttaggcaatccttagattagaccaagtgagctcaatctacacaaaagatcaaagctcaagtgtcctagtctcctatgccacttccaaatcaaagaagaggatcctaccaaaaggcattaagaagggcaagaagagtgtgtaaaatcagcttgaaaaactagaccaaaaggggaaattcgacaaacaagatcccctgagcatccaaaactaaagaaaggccccttttaaagcgcacttcatagtcatcttcaaggagttgtgaaatcgaaagcagattgaaatgcaaatctaaaccttgaggacaaaactctcattcactcgaacagagccatgagagacaaccttacctctcgacttatccccgaatgtgatgtattccttactaatcacagggtcgatgctggagaaccatttgttgatttcggtcatgtggcacgaatagccgaaatccatgagccatatgttctccaggcctctgtcctgcatcgatagaaagacacagggtgagcaaatggcacaacattagggttaggatactaagaataatactagtgctttgacatttacccctggaaagtgttagggaaaacaccaaacatccccggttccaaatggggaaagcgatcaccacgagaaagaaatcatggtccactagggaagtaagacccaaagccactgccacgaggtcca

SEQ ID NO: 170961 - DNA, 622 bp, Zea Mays
caattcaaggctttatccattgcaaagtcatgataaggtgataatgtaatgcaaagtgtagctcaaaccatatcgggtctgcgctgtaaagttggtatataaaagcacataaattgagttaattggagaccttagctttggtgtggattgttgaaatttggctcacttgtgtgtgacccaattaaaatatagaagccaaggtggtgtgtagagatgacatgggggctttagtcctatattgttcacctaagtaaaagagaaccaatttatatgtgaggttgttcactacttttcacatgagataaacaaaggctaatgaaggttgttatgaacttccacacgcgttcgctcgctcgcatttcatttttttctcgaaatcacaatgtgacttgtgacatgcaacgatacgtgaccgtgttgcgacatgttctaaacaacagtttattttttatcttttgtttatttggctatcatatatcatacgtagaatgccacgtcaacccgggagtaatgggcacacacgtagagaggtttcagggggtgttcctggaatagcagatcaaattgttgtctagttgaggctgaccgtctattcaacagagacgttcgagggattacattt

SEQ ID NO: 170962 - DNA, 692 bp, Zea Mays
aaaaaactggtttggttcatcgcttctagactgattccaaaggacccgttgtctgtttacactaagggctgatttggtgaccagaaatcacgaggatccataaaacctttggtattcaatttgccataaatcatctcgtgatccctgagcaccaaattgtcctcgggagtccggagtaaggacatgattagaaacctaatcgtcggttaatcgtgtttagccttggacgatcagagacatgattgttttaggaattctggtccacttcgttttgttttttaccattcattttggccaagtcccacgcatacaagtacacgacgcaaaaagcatccacattccagtttccacacgctaacacagccgacgtaatgttgtactatactacaatttagacttttagttgtacgtaatgttttattacaataacctcagcgattaaccgggctggtcatccgattaatcgatttgaccagctgatcatctctctgacagcagggtcactgacggcgtgccgtagtagcgcaggggcggacagggtccgagtccgaggcacggatatctggattgggattttgggatctgtggccatctggggaagacagaagacgggacgggacagcaagccagcagcggctgaggagaggaaccgaggatgaacagaacattctgattcacagattcagttaatc

SEQ ID NO: 170963 - DNA, 491 bp, Zea Mays
ggtctgtcaggttgactgatagagttgtgcgatggtacagtagccaaaagattagcatattctgtgagctggccgccggtgacccttcgccgggattagtgctactcgccgcgatttgtgcgtatgggttgtggattgagtttgccggtgaaaagatctcgtcgcagatgggttcaagtactgcgaccacgctgtccctcggttccccgcgccggcgacgtggccttacggccgtcaccagaatctgtgatactcaccgtggttgcgccacgcctccagcctttaaccgcgccgccgtgactcacgttagccatccgatcatcgctggtgagtccaccacggtatttgccacgaatcaactgcgccagtaaccctgtcttctccggccgccgcgcgtcttcgtccaattccccggccactgctcatgactgctataaattgagcccgccgtgagctccgtagggtaatcacccatccatagcacccacgct

SEQ ID NO: 170964 - DNA, 646 bp, Zea Mays
atatcttcatcatctccagcaacgttctctaaatttcatcctctatatctcattcaccatattttcacccatcatattaacaaaaatggttgcactatttttttaaccgggtcaaattacacagattataaattatggtacacgtacgaatatttttgtaatcactgttttttaatattaatttacaagttgcaaattctgtgttatgtacaaaaaataatttctttaaacaaacaaggcttccaaatatctctactacagagcaaaccaaaatacaacccaaatacaggaagcagtttattgtctattcctcttcttcctcttgcttcgtgtagcctccaatctccagcgacattggcagcccctcccatcgttccatcctgcaaggctagagctcgctagtgaagatcaaagctgatgtctgggcctccccaccaccaccatacttgtcgtcaaccgtacctgcgcacatggtcgccgtcggccctgctctcgtctgcacatggtcgccgctgactcgccgttgaccttgctctcatgtgctcccgcggtggctgttgctcgtcccagctctatgcccgcggccagtgtgccattgcaaactccgcgctacaaacatcaccggatgtggttgtgccgggcgatg

SEQ ID NO: 170965 - DNA, 1230 bp, Zea Mays
cacatgcatattagctgttcagcaaaaaatgctgccagctgcttaacgcccagccccactttctaagaaataaattatattgatccttctctcccaccggcattcctgaaataaacttggttgttctttgtgtgcaaagtctaaaatacaacaagtgtgcctgacaggctgacactatgctgaagtactttaactttaccgcacagaccacacaattgtacaagctttaaattgtatgatgtattccatctcataactttactaactaaatcttgtgttaattctcaatatttaggctcagacaatccatcagtatagattatttgcttcttatgcagtatgtaaagttgcacggctccataacaactgctaactggaggtgaaagtttgagaagacattaagataacattttaggaagaaaacaggaagatgcagtttaactaagttgaaaggccataggctaaaatctatagtgcctttgaactgcctggatgatctggacacaacatatagaatttatcaaaaggtgaagctaaggtgaaaggatgtttgtggttttgtgcacttgccggcaacaaaacacaaaccggtcaagatcagaatcacacatgcatcatgcattcatgcatgcacctacataccagtgcagctgcaaggttgggaaacactttacacatgcagcctatcttctgaaatactgtaggagtataaagtagtgtaccgtttaagcatggatcaaaaaatggagcaaattggcagaattcagggttcactccttattcattgcagtacagcatatacctctgttacagaggttatcaagcatttgtttacatcacccctttagcatgcctctaaaaacttataatgatgtttcaagttgtggtacacggggactgcagcaaacaagaatggagtaggcgtcttgatcgacaagagccttaaagatgaggtagtagatgttaagagactaggagatagaatcatcctagtcaaactggtcattcgggacttggttctcaatgttatcagcgcgtatgctcctcaagtaggtcttaatgagaactcaaagagggagttctgggaaggcctggaggacatggttagtagtgtgccagttggcgagaagctcttcataggaggagatctcaatggccatgtgggtacatctagcaccagtttcgagggtgtgcatggaggcttcggctttgggactaggaatcaaggag

SEQ ID NO: 170966 - DNA, 416 bp, Zea Mays
tggacggtgggcgccgtcggtgaaggacccctgtgcgccgacgggggaggaggttcgagagggttgttgttgccaacaataaggggaggacatctagaaggaggtaagagaggggtagcggcggtcggatggagaaccggaaagggtggtggtggcggctgggtggtgaaggggagaacctgtttctttccgattcatggcaaaaacaaatcgacgggactagtgatgaaaaagtgaccgcaaaacagatgaacgggagcactcgatgccaaaaagaccaccgacgttcatacaacgcaacgacatcgtagcttcgccacgagccatgcgcgaggaacggtgcattcgtcaaggatcgagtcttcgaaaattttacacgatatattaaacagcgtagggccggaccacattttctc

SEQ ID NO: 170967 - DNA, 882 bp, Zea Mays
gccggaggtggtccgcccatgaggtgttgtatatcaagatgtcgtcaaagaagacaagcacaaaccggcggaggtaggttcataggacgtcattcatcaaagcctggaatgtggctggggcgttgcacagcctgaacgacatcaccaggaactcgtagaggtcgtcgtgggtgcggaacaccgttttatggacgtcctcctgccgcatccgcacttggtgataccctgaccgcaggtccagcttggtgaagaggcgtgcgccatggagctcgtcgacgaccggaatcagaaacacgtctttgatagtgagcgcgtttaacgcgcggtagtcaacgcagaagcgccacaacccgtccggcttcttgacgaggatgaccggggaagagaacgctgagtcactacggcggacgatgccctggtcgatcatggcggcgcactgttgctcaagttcgtccttgtgcgccgcagggtacctatacggtcgcaccgccaccggggaggagcccaacttgaggacgatgtggtgctcgcggccctgtgttggaggtagtccgatcggctcagtgaatacatcggcgaaggtgtgtagcagcccgttgatgagggtgtcgtcggctgtggtggctaggagagtcggcgcggatggaggtgccacgctgcgccagcagacgtcccgcccctcccactggaatgccatggttcgggcggtgaagtcccatacaatgggcccgagcgtggccatccagtgcgtgccgaggacgatgttgtacccggctaagggcattacgaagagatcgatgccgaataccatgccgcccacgtcgaccggagcttggcgaagaacgcccgagcaggccacacactccccattagccatcgttg

SEQ ID NO: 170968 - DNA, 820 bp, Zea Mays
tactgatggcccaaaacaagatgattgtggtggttctcctccttgccacctttcttgtggtggcaagatcgttgtgggttccagaagaaccctcaaatgcggatgacataagaggtgcttgcatcgaggagtgcaccaaagaaaataaggctcctggcgacaagaagacatgcgaagtgttgtgcaccaagctcacaaaaaagcctagcgaagaaggcaaacatgattgatgaagtagcactccgataatatataccctagtggatgagtggtcatctttgtagccatgtctgccacacgatggccttgattatattgtcttattgttttgtttttggtttccactagtatcctaattccttgttcatgtaacctaatgtcactcaaagcattttatatgcttcacttaattaaataaatacaaaggcaaaggcatgttctgttttggtctaattggaatatcataggtcaaaccgatctataaaaagaatggtaaatattcttatatatagatatgttcaatgtgcgaatatgatcaaatactgaaaaagttgataccaataatagttgttgtttagcctctcacaacattttgagtaaatctcttgaaaagcaaaacgtgaacgatatggtagaaccccgctgttatatatcgtggtgcatcaatggtctttatgtagccatgtctatcacgaaatggccttgattaaatcatcttattgtttgtgttttggttccacaagtatcctaacttcttattcatgtaccctaatgtcactcaatgcaatttctatgatttacttaactaaataaatacgaa

SEQ ID NO: 170969 - DNA, 430 bp, Zea Mays
aaatatcccaagattagataacttcgccgacggtgaaccgtgcacccggattcacaccgatcgccgtgattcgtgccgtagggaagtagattgcgctcggtcgtgaaaagatcaagtcgcggatgagtttgggctattgtggcctcgctgttcctcgaccacttgcaccggcgacgtggccttgcggccgtcactggagtttgtgcccttcaccgtgaatttgccatgcctccggccattaaccatttcgtcgtgagttgtgatcgttacccagtgaccgtcgtggcttcttatcccgcaattgccacgaatcactacgccagtaacctctcctcctctccgaccgccgcgcgtctccttcaaattcactagccaccgctcaggagacctataaattgagcacgccatgagctccgtagggtaattaccc

SEQ ID NO: 170970 - DNA, 650 bp, Zea Mays
cgggggcgggcgagcgctgacaggcgggacagggagtgtcagcgacagagggggatagagcacgctgatcgagcgggcccagtgccagaggggaaacggacggctacaggggtccgagggggtccgagccgttcgatcaagatcggacgggggaaatcagaccgggacggatgagcggctacgggcggcactgacaggcgggccagggtgtcatgcgcgcgtgcgcgaagcggtatcccgtggtccgggccgttcgatctgaatcggacggaggggatcagaccgggggaaacagacggctacgggcggcgccgctcctctccacggcggtgaggtcgccagagttgaggccgacacgagctagggtggctccggtgtcgccgaagttgggcagagagggagtgggcaccacagcaaactcaatggcggggaagaggccacgaatccacggggagagaggggagaacagcggtgagaaggtctcgggtgggccagagaaactccggtgagcgattccggccacggggaggggacttaaggcgcgctaaggccttggctaactttagcagaggcaggggtgacacagggaactactccggtgaactagaccgggctgaatcagccggccaccgcgcgagcacggcggaccg

SEQ ID NO: 170971 - DNA, 951 bp, Zea Mays
ggaggcggaggcgtgcgtggcagcgtgggaggggcagaagacggtggcgcaggagaggcaggcgtagaggcgggaggtgggggacggggacgcggcggcgcagggcgagcagcgtgggagctcgcgcggatcccgccggatctcggggcggccgagcgggcgcacgcgcaggcagcggcggaggaagcgcagcgggcgcgaggacaggcggtgcgcggcgaggtgcgggcagggcggtggtatggacggggtggaagcgagcggaagtggaagcgcgtcccgcagcttctccgtgctagctgtaacggacgcgcgctgttgtctgtgcatgggcgccgccctccccgctggatctgcagccaccccactccccgtcgcgccgattccatgagaggtctctcgctcgatctctttctcactgctttgagttgcccggatttatctcgtgttttctaggtttttttttgtgtgtgtcggtggaggggtttgggtcgcgcgtagcgacgtggcggcagtagtgactccgtcaccgcagcgcagtgcggctggtttgggtgctggattcggtgggtagacgggaatgagtgggtggtagcgccgccggctcgtgatctggcttgccgggtacgcaggtagctgggtaatcgctgcttagtgcagctattcgtggaaactggtttgatggttttgcaattcggtagtggccgattcacttgatcgtagcggtagcggtagctgtagcatatgtgtttgtctagatctgggttaattgctgatgcctgaaacgaatttgtgcttgttcgatgcattgctgttgattgaatcgtgtgtcgtcgtggatctgacgcacgttgtttgctctcgagtgggtttcaggttgagaagcgaggtgggtgacgagatgccgaacggcgttgctctgcgcgaacaggtcctggcacttgtggctgt

SEQ ID NO: 170972 - DNA, 374 bp, Zea Mays
gttcaggggtccaaacgtgaatttgtttcagaaaagggccaacttgtaaaaagttcggcaaaatgtccaggtctgtggccctgtcgtgtttcgggtctcctcgggttcgagtctgggtctagggctttcccagtaatataattcatgttttcgtcgggtctttaattcgagttttgggggcgggtctgcggacgctgcacctgactcgaacccacaccattgccaactctagaaagtgactaaggcttctgccaaaagtcacgatatgccgtttgaccaaggccgtgaggcgaaggaaaccataaaaaaaaccaagcaaactagaaaatgcgtgaatcaacgaacacgtaaactaccccataacatcagaaggg

SEQ ID NO: 170973 - DNA, 1246 bp, Zea Mays
cgttcggttgctccaatacatggtttcagtatggcagtcacggttccatgtattttgtctgcttcatcaagcattcagatggcctgggccgttttgtcttcttttatggtctgcgccaactcgatcaccgttcttgagtaggccgacggactgagacggcaccacctgctcgtcgcacagaacctcctcgtcgtcagacgttagattccacatcagaaaggccgaatcccgccggccgccgctgcctcgccgaccgttctggctccagttgctctacctcttcgccagggatggtggacagcgacagtccctggcccggcacgcgttgcatcaaggccgactgcacctgtcaagcaaaggtgagtgctttctgtttaatttcttgtatggtgcctggtgcgtgcgtgctcgagacggtctcggttactgccggagctgtgtgtgcgagtgtggtgccatggcatgtaacgaacgcggtcgtgcccacagcctgttcgtggaaacgtcctcaagcagaagcagtcctagggatggacggttaacgtgttcgacgttgacatgcacgtacgtattgctggatgctctgtggcgctattgctggagaggcaggaggagagcggcgcctgtattttcagctctcgtcaccccactctggaaacaaacaagaatttgcaccaaccgagcacatacgctggttgtggttgaattcttcaatttgttatttgtcttaaattaacacggtgtcgtttcacccaattcattattgagactgggacatctcaccttcttcttttgtctttttagttgacctgactcttctaactcatcgcccatccctttctggctttttcgaattcttgtcgctaaggataatatatgtcggttttagtgaggacgtacagaaaaatgtcaacgccgcgttagaaccaaaatcaaagaaggtcactgcagacctgaagcctagcaactaagttgtgcctaaaaggtctcttcagccaaaaccccgcaagctcagttttccattgagaagatgcctggagattgcagggtggacagctgttgatgaggttccgaggtatctgctgctttttagacaagattaccctcttcctttatgtggtttttgctcaggtcatgctcgtctgttctttctctggcatcaaccatttccttcaacaagtagattttacattcgttcttctctaggaggactatatggcatactgaagatccaatcagtaaagaa

SEQ ID NO: 170974 - DNA, 796 bp, Zea Mays
cacggcgtgccacggcagcggcccaagcccggcccgaataacaggccgccacggcccgagcccgtcaaccaccggaccgtgccgtgtttgtgacgggccaaaaacgtgccgtgccacgggctactcgacggacacggttcatttggacatctctaatcttaagccctatatttcaaaatataaccttgattagagcctcttttggagatgctcggctacggcccatcgctaacatacaaaccaggaaggcagacaagctgtgtgtggttccttgtttcatgcaggaccattcgcccattccttttcatccaaccgccgcatgccaacctgcccccgctcgaccgcggcgctgccacatggcagcgccgaccgcctcatgacacagcctgcacggcgatcgacgatctccacggagaccatcgagatcgccttccaccccacttccgctgccgcctgccggagatgcccttcatgcacgcttcaacgccgcccccgcctccaccgccggcgccgttgccgccgaagcagaagcacggcagcggaaagcagcggccgcggccggggcgcgtcatacggtcgatgcgcgcggcgttccggtccttcccggccatgcaggctccgacctgccgcggcatgccgtcgctgcaccacctcccgggcctgcagggctccggcgtccggagccacttccacggcgcgatgcatgccacggggactctgtacggccaccgccgggcgcgcatcaccatcgcgctgcacgagagccccggtagcccgccgtgcgtgctgctggatg

SEQ ID NO: 170975 - DNA, 481 bp, Zea Mays
ttacactaaggaacgaagctctcgaaaaagataagatagtgctttccttagtggacaggctgagatctagcaaagccaaacttactgcacaaaccgaagctcacaaagtcaaagttgaagatttaaagaggaatgttgcagaaacgagcaaaaaattgaagttgcaatggcgaagcacgagataagcgaaattgaaaaatcaagggcacaaaagaatgccgaagagctccgccactccaaagagagatgctacaaattatccttggaatgcgccaagaatctaaagaacagttttgcaaaggtgggagcgtactcttctgagcagaagttcatccgcggtgaccccgatggggttatccagtggatcagtggggaggctgaagcttttgatgagatattcagggatttctgtgcttttgttagtgcccgtggggctgtatcaattttggaaaatgtcagttgtgaccatgcgaaggctgtt

SEQ ID NO: 170976 - DNA, 424 bp, Zea Mays
tgcctgtccgttcgcatggggatgagccacaacggcctaataaacgaatgtggtattcgtcacaaaattccaagaatctgcttctagtgaactgcatgccattattcgtgatgattgagtttgataccccgaagcgatggataatgacggtgacagacttaacggcttggtctgaggtgatcttcctgatataggccaagcctcaatccacttattcaacttgtcgacgacgactaggacgtgcgtgtagcgcccaagtgcttttctgaggggtccgactagatcgagcccccagaccgcgaatggtcaggcgatcgggattgtttggagtgcttgtacgggtaaatgggtttgtcatgcatagtattgtgacccttcataggtacgcaccaccgcgttagacaccgtggtgcgctaatggaac

SEQ ID NO: 170977 - DNA, 666 bp, Zea Mays
gtctcggacggagtgtggcgtcgtcaccaagttgaaaggtcgctcgagaggctgaagaagaaggtgtaaacgttacacgagtactacgtacgtatgcctgagggcagggtaggctacaggcgagtatattgtgttgtagttcggtttcgtgtccgtgcatgcaggcaatctggttcttaggtgtactgcgtgaccaaggagctagcagtgctatggcattgtcattccaacgggtctggttcttatccgtgcgagaactgctcaccagaggtctccgtcgtcgtctccgctttactacttactagtcagtagtcaggcggggccccgaccacgatctgcgcgctaacctaaccggccctaaccgaacccttttccctctctctgacgcgccgcccgctttgcgtggattgcaatccataacgacgcttttgtccgtgcattagcgttgggcattagtattacatacctgcatgtccggatcagaaatgactggtttgagcccctatctacaactctgcgtcgatctcgtttggcccaaagccgcacgcgcgtactcgcttcacgctttgttgcgaccaattattgtgtggccgcgcgctaaacccggttgaacaagctagaacagacactgctgtcctgtcctgcactaatacctttaattaatac

SEQ ID NO: 170978 - DNA, 763 bp, Zea Mays
acaaaaaatcttcttcgtcactaccattgaacaccaacgcccccttcggatatttcaatttttaggcgtagtgtcgtgcttctaacatttcttcttgggagagttcttttcccgaagcatgacgaataatgtagtcaatactcttgttcgaagcttcgggagcaagagcttcaattttttcagatgcaatctgctctgtcgttttttccttagggtcagcaggctccatctcggtgggcactgaaggtccagcttcggcttcagtttgagtttgcacagcttcagtttctgcttgcctagttttggctttggcctgcgtttttagagtttcagtaactttctttatagcagcagggctcaaaaccttcgtagtttccagcacagcatccagcacgttggccattctcctcctcttaggagttgcagcagaagccttttgcaccttcggcagtgttgtctctgtcggagggctcagaatttttggaacttgcattattttttcagcctttgattcttcggccttatcaaccttatctttgactggctccgctatggataccttcggcattatgatcgcctctttagtgctctgtgcaatcggagtagtttctgttgcttcggctgctgaggaggaccctgcgccgaattcaggcactacggccgactcaatataacgtggcccggtgggtcagtaccttcacctttttgctcttcggcgtaggctcagctgggatgatcgaagtagaaatcttcctcttttatg

SEQ ID NO: 170979 - DNA, 776 bp, Zea Mays
ctggttttatatttccctggagtgggcctcaaatcctagaacacgcaggggtcctagcgcaaagtgtcccgagacacagcaaaaccaggccgtggactgcgagtttattaacagcttttccaggggctcttttacaaaatgttcaaggcgaaagggtattatcggtcgtccgattagaaatcacgcgtccagattaaatcaacagacgcgcgaaccggtacgccatgggatccacatgatctaagatcaacggtcaccatttaatgaatacagagataagcgcctatcgtccgattcgagatcgacggcccgaacgaagggggtatcactgatctaatcagaaccgttcggccgtaaatcaacgaccatgggttcatcacctccaccgctggccacccacggcggcgctctgctccccaacggtggagccattgccgccaacagaggccgtgcgccaccgctatcccaaactccgattgaacagggcaacatgcatggtagatgatggcgaatatgggtaaccgagactcaccggtgatggcgtgcccaaggggtcggtctgcgacagtatgcggtcccacggtggtccttcaactgcggcgaggaattcaccggagttccctgtctccgctgacgtgatttcgccgcagcagcaacccacgcaccgcggtgacccgtccaggcccaacacgagtcccgcagcggcgatgtagagacgagtcctcggcagcgacggcgaaccgctgttgcggcgctgccagggaacagcggggagg

SEQ ID NO: 170980 - DNA, 631 bp, Zea Mays
tgtggtgcccatttcgattttgcatagcctctatcctatctatcgcattgtctggcgcgttttggagtgaaatcaggatgcagtctcttggattacagcagccacgggttggatgacactactgggtggtccctgccgccgcgcgggtccacgtgcagccgctgtagggagaggagcggatgggcgcgtagccgtcgtccacacgctgtcattcgtctccatcgttcctatgcgtcagcagttccaggcatggccgaaacagcgccacgctctgtgcggtacgacggtgagtactttcatcactttaatatttcctctccctggctcctggccatcttatttagccctgcactgagagtttgtcgacttcgtcttcctcgctgctcatcacttcggttttgccacccaccgtcgccatgggagcatttggtgtgctgctgttgcccgccacgacctacgcattgtgagcggcttcgtaaacccaggtctgcagtaccatcacttgcctttgcagactccccgttgttctcgccttttcccccttctatgcatgtggctgtgtttacttcctcccctcccaactttttgttatttctttttatttttgcaggacctggtttattcttttttg

SEQ ID NO: 170981 - DNA, 551 bp, Zea Mays
tgttcgatttccgccgcgctgcgtggacaactgcctccgtaccatcaaacgccgtcgggtaactactccacttgcccagctttgtctccgctacgtgtatgttggcttagatcgaagctttaggctcaggatcgggtgatgggggtttccggcgatggcgccccgccgcgggtgggcaagcgccgccgtctcaggcagcgggcggggggcgagagccgtggaccgtcggatcggtgcggacggctgagattaggttagagaatccccttcgtgggattcggtcttgtccaccggatcgcgatcgggcggtcgaggatggatctagggaactttaaatcgacaccgtttatttctaatccaacgcatagcactgcgtaccggttcgctcgagttatgatctaatctgggccgtaggtataggatcgggcggctcagaatgaaggataccccttcggccttggcattttgcttaagagccctcgggcttccggggaatcaacccgccatccacgtgaactgtgctctgtgtctgcggggttttactccgaagc

SEQ ID NO: 170982 - DNA, 490 bp, Zea Mays
cgctgccgccgctgcccagcacgccagccgactcgtggaagtggcgcaagagcgtcggtagcctcgccgcgagcccagctcctgcttacagacacaaaatcactactgctgctcctgctagcagtaaataaccgcgcgcccgttaactaacaaagaagaagcccgaaccgtccgtgtcgtcagcagcagcgacgctgctgggacgtggcgacgacctttacaagactgcagctagtagcctgcgtgcttgatgcttgttcgtcgtctagaatgcgagagttttccccacaaaattcctatgaacatagattttgcatgcttgttcgaggcggccttcatcttctggaagggggttttcaggtgtacgtgttctgaataatgaagtctagtgtacttttcagttcttgtgagttggacgctctagttcttttggtgcctctactcagagtcagagagccctcactcgatctccatcggtagtttcaatggg

SEQ ID NO: 170983 - DNA, 646 bp, Zea Mays
ggcggccaggcgggctgctcacgcgaggaggccccggctacacgtcggcctgctattagctacgcgttgacaggaaagagaagcgagaggagagaggaagaagaagaggggctcacctcacgctcgcaacgacggccggcggtgctgcgaatcggcacgaacagcagtggcgagctcttacggtcagcgcggcatgcgtcgcatggctgtacgcggcgctagtgcgagcaggaagagaggctgggccaatgttagaatcgccatccccatgagcagggaagggatcttagtggaggtagacgcggcgccgagtcatgagcggctactgctgaaaccgcacaacatgggtgagatttcctcggcgtatacacggaaggtcgttgtgggggagaagagaacaaagctggccggtggggcccaaggctagggacgagcgcagctgggcgggtacaaggtacgctctagttccttgtgtaaatatactaagcggcctcgtacgtgagagcagttttagcatttctattgggagaaagagagacattcagcgagctagttcacttgcacgcaaaagaaaaccaagaagctacagtacaagctagcaagcaatcctagctagacttttggagtaaaatgacgtcaacatttg

SEQ ID NO: 170984 - DNA, 909 bp, Zea Mays
gttaacacgaggatggggtcaatttggatagtgaggcgaggacagtggctgcacatggcgaggcggatcgtcgtcgtggctcgagcgctacgacagtgagcccctggggcttgattagggccgaggtgggtggtgaggtgatcggggtaagctggtgatgcttccaaggagttaaattttggcgcgagtttcttaacagaggggtgagggaggctcaccggcaatggtggatggtggtgcttgctttgagcaagcgttctcgggggaggggggagattgtcggcattggtgtggcggtagaagagctcgagtgtgctcctcttataggcgcccgaggaggtgttgttctggttggctctagtgaggcaagagagggagcaggggggagaatgttggaggatgtccgacaacgtgatagtcttgcggtgggaggacagagctggtgtagtagggtgtaggagtggagaaggaggacaaggcagtgcctaacttcgatgagacgcgacggtgaggcgaggacgatggtcggtgggggaagcgacgattgttgtgttcctctgctcggcgaggatggcgatgttgaccagcagacccaagctggtagcggctctgactgagggccccatctattagcgaaagaagggaggtctggttggcctaggatgggtagtgggctgaaaaggagggactgcggggcacggcgtagcctaggccaagaggggaagggtttttctttttccctctcttttttgtttctttttttgaagaggcatatatatatatgttcttaccaatttgagaagaaataaatttttatctaagtatggcgctcttcaaaaaatttaacaaacattcatgcataaataggcttgaaaaataggtgtgcttatacctatgtccatccgtaaa

SEQ ID NO: 170985 - DNA, 357 bp, Zea Mays
aagtggatagaatattaatcgaccaatgaaaacattgtatttcagctattcagttagacagtagcaaaggacagaaatgtctaccataaaggataagaaatgcatttttattacctacaaaattaaataattaacactgaactgcgctataaagctaagctttcatgaagttgcgtgaaaactgaagctcgcatttgtaactcaagatatattctaccagagcatcgacaatgcttaccaaaaccaagaccctatattactacaagctattctttgaatacattcaacagaacctactaatgaaaaatgcaaagctgatggtgtcagctaaccaaataaatgcataatttattttta

SEQ ID NO: 170986 - DNA, 722 bp, Zea Mays
cgggtcgaaggcagttccggtcaaaggacccttcctaaatttccataagctctataacaatcacaaatataatagactcacaaaataagaggcggatccaaaacttacctttgtttagcagatttaccacgcctagacatcctataaatcaggctgatatctctagtttcgaagaattggaatgagcacaccaaccagtcagacgtagggtcctatttataggcacgtacctcggcgccatagatcttggcgccgaggtaggcgtcgttgaccgggcgcctacctcggcgctaagatctatggcgccgaggtacatgccacgtagattccaggtcatacctccatctgacgtatgcacaccaaaaatgttggtgccggcacacacaagctaggcgccaaagatgatggcgccgagcatagggtccattttttgaaatgaaactgccaggggcataattgtgcaaaaaaaacctgaaaagagccaatttgcaaaaaagttggggggcgtaaggctggtgatagtgggacagtcggggctagtgcttgcttcgggactccgaaatttcttgccgttgggggaacttcgccgcggaaccacccgctgccatggccagcactgctgcaaccttaatcgacggtgagttttacctcctttgcttcgccttgtcctgctctatgtgatgcaccgatgagtggcgagtttaggcgctggaaacactgtg

SEQ ID NO: 170987 - DNA, 1045 bp, Zea Mays
accacattcatttaacaaacgcattcaccacgtaaatagcgtcatcacacatgacctcgacttaaccgcagagaaagcgatgaccacttcggcatgtcaccacctctctacagtccaatccatattaactacatcgatcgaacctcatattgcgcaactcttataatttactatctcaaatacaaccatagcatgacatgcacttgagactctttgttcaagttaacgcaatcacgactaccatacacatgcgtaccactttttcctccacgtacatttaatctacgccaaaaacatactcgtgcacatgcctacttacaaacctatgcacaacgacaaaaccgacgaccatctcactacaacatctaaccagagctgtgaataaaattaaaagaagcatctcaccacttcgtcacacccattcatctcctatatgcacactaattcatttcttgcgacacatgcactcaaaaatcaatccacactacagaaggtacacttatctcttatttatgcgtagacttaacacctttcgggataaaacgtcattatagacaccttacacataattgcattaggaacctattagttcactcgaaaacatccattcaaagtcataaacacaatcatacactatatgtgaagcacaatttaaggaacgcataacgcgtatagactcgacttataaacatagaggaagcaacgactactttggcatgccatcacctcactagttaagccaacacaatttctacttatatcgaccgaacattcgcgtcgagcacaccttatattaccttgtctctcatacaaccatgttgtggcgtgcactcgagacactacagattaacttaacgcaattaccactataatgcacttcgatatacacgttcgacatcaccgtgcttcgacagacccacacttacaatctacttatcacatccaaccacaccacgtgcccactgcattctcatgaccaattttagcacaattatttatgacaacgtttatcgactagacaagtgaaacactaaccgatcattcg

SEQ ID NO: 170988 - DNA, 895 bp, Zea Mays
ggccccaagcagctcatcacttgttgcttctatggcatccaaccaatcattattcggctcgtcaaaccgatccctaaaccgaaatgtgtacttcagatagattagaccactttggccggagccagcggcagcctcctttgacatttcccatccactcgcaaggggccatactctgtaagcaatatgcgcttgaatcaaatcccttgtgtcgatgtaggtgcatacggtattgaaagccgtctggcacgcttgcacatcatttccaagtgcgactgaaggtcttctgatgccgaagcgtgaccatataggacgttgaatgatgccccttatatcctctctctagtctaggtcattttttacataaaaccactcctgcatccaagagccaggccatttctttcgaaatgtaggcacatggtaactagtcctagagtggggcacgaagctatagcagccaaagttattgtggtattgttccttcacaatcgctttcgtctgataggataattcgtggatattatagaagcacttggcatctggctccaacccttggctcctcatggcccatatgaaaaccctactttaataagagcctcgaggataagttgatgaaggtatattttgaaagtcttcaaaacttcgaccaacatcttatgcagagggaaacaaagtccggctttcatgaagcttctaaaaaccaccacctcattggcttcagaaagaggaacggtgctccctcctctagctcttacaatagaaatatcacgaaagcatctgcctttcattgcttcgatctacccttgcttaacagatgactttccaaaaacaacatggcttggcctccatggccgatcttcgacttcttatttccactttctaggtcaaaacgttcact

SEQ ID NO: 170989 - DNA, 668 bp, Zea Mays
cgacccggtgattcgagcgagacaatgctttgagttgccatctccgttcacaggaaggaagagcgggaatcagtttgtaggtgcatcattgtcttcgcccatccaacaggtgagctccgcgttacattgcacccatgttaccatgatttcggcgatcatcataaaggattgaagatgggtggagaggagttcgggcaggaagcttttgggagggatgatggttttatctatcaatcacaaggccgataagggtggataacttggaagtttgtaaggatcactcgtttgcaaacaagccattcaagagagaatggtgtgaagatttgaattcatcccagtgggatagtcggcatcagagggcaatttctcaaataatatcgcttgactccacatctaaggagtgggataatctcgacgcttctaacaaccatcatcgtccttggatgcccatggaggtgcatcaatacgcgatccccatggatgtccttactgaccaggaagacatggcaggtgggcagtaccaactcaaccaaacaaaaaatgtcacgtgggatatccatggaggcatgatggatattggggacgcgtggataaattccaaggtggaagacaaagttgcagaggatgcacttctggaggatggggaggggaagaagccttctgctcgt

SEQ ID NO: 170990 - DNA, 497 bp, Zea Mays
ggaagatcgccatcctgcttttacctcgcgatactgccgggacaaggatcaccgatgcgacggctggcatatttctcaaccctattggtgaacagaagcatctggtgtggacgcgacaagatttgcagctgatacagtttactgaaaatgagatagataaatagagagagagagagatgagtaacctgcagaccactaatgtctatgcatgctgtggtttaaaagaccccatggtgttctgaaagaaacgcaaagaaactgagacatcagatacggcatgccatccaaggaacgcatagcagcagctggtaatctgaatggcggtgtcgactattaacaagaagaaacggcgagatggcacacaactgaatctgacgaatgacgcaaacagcagcaaccctactggcaggttagcaagcagatgggtgtgatcttgcgtttactcttcaattatatactaggtaagtgcccgtgcgatgccacggaagtaaaaaaat

SEQ ID NO: 170991 - DNA, 505 bp, Zea Mays
ttttagcaaagttgcggcaccgaagggggtacggggctggctgggccgtctgatctgagatggaaggctcagattaaatcgagcaccaccccaaaccggtatccagtattggcccttagatccgagatcagtggccgtggtttaatgaaacgagatcccctcgattaccacacgatttcagatcaacggtggtaattcaaccctggtgatcggttcacaacctttaatctcgtgcgttgggaacaatccgatggtcatcgtatatcttcaacctcacgtgctcctgcctcccctttctctctcccatctctcacgctgagaaccgaggcagcgccgatggttctgaccacccccagaccacgagtttagagtgtcgatgctttaatccaacccatgaaatacacagcgggtagaacgacgaaggtattatgcggctccttacctttatccgagcagtggagtaccctgccccattgccttcccatgcgtgcggacagcataagca

SEQ ID NO: 170992 - DNA, 828 bp, Zea Mays
cgcagaagaggaagctcccggagtgaagttaacagaagaaccccactgagccgtcgggtgaggcagacgcggagctccaaactgagaagacataggagtagttggtgcaggagtgggcgcagctagatactgaggaaaaccctgcatcaccatgaactaagaagtcccaggcacatagaactgctgcggagggagtggaactgcaaattgctgctcaacgcttgacatcatgttgacagtgccctgagaagaggaggaagtcactggctcccatctgagcttcccattgggattcctcctgcacaccacatccttgtggtcttgactgcagatagagcacctgccactccactgacactcagcacggcgatgcgcatcaccacaatggaaacacaccagccccagcctgggcttaggaacaacccgatacctctgagtacttcctcccaaagtacccgattcagaagattttccacggtaggggtggtggcgctggtgctgagactttcccctcttgtgggctagacctccagtgttgcccctcctcgcatcctagccacgaggctgatcaacacgggaagacttctgtgactccatggtgtactggtgttccatctccacacccagttcctgctccactgtagtacggaaatccaccaacggaaaggctcccagggcatgcctgatagaaggtttcaggccctgacggaactggctcgccttctccaactcattataagccacatgagggacaaagcggaccatcttgttgaagcccacttcatactctgtgacagacttcttctcttgcttgtaggactgcagatc

SEQ ID NO: 170993 - DNA, 460 bp, Zea Mays
gaagtaagaagtgtagtgaatgttttgaaaaggggcactcgattaggtcatgtccctatattaaaaatgacttgattattaacaaggatgataaactttgttttaaatgctccaagaagggacacttgtttaggtcttgtcgccatttaaaacaaaaaggcatagtgttagaaaagaaaatattcgctaaccatgtagcaagaaagaaacaaggaaagaagaaatcttcaagacttgaggatcgcctatgctacatatgccgaaagaagggacatcaatgcaaggattgtcccattggtaacaatcccactcctagcttgtcaattaattctcatgtaactaggcaacccaaaattgcaacttgtgctagaaaggtaatgagtttacctagtgctagcacaaaggacgtttgggttcctagatctttgttgactaaccttgatggacccatcaagagatg

SEQ ID NO: 170994 - DNA, 417 bp, Zea Mays
agagttcccccacaaggaccgcgtgatactacttattaggcattctctgagactcgaccaccgcttttcattaaagcagaggagcctttagaagctgacgaatgggtaagagtgatggaacagaagtttgggttaattcattcacagaaactcaaaagcccctattcgccgcacaacagctaagagggcatgccagtacatggtgggcaaatttctcagcaatctagcctgttggacatcagattacctgggatgagtttaagttggcattccgagagcattatgttctagagggagtactccagatgaagctagaagagtttatccggttgaggcaaggaggagatacggtgatgcagtatctcaacaaattcaaccacctctctcagtatgccattgactaggtggatactgact

SEQ ID NO: 170995 - DNA, 660 bp, Zea Mays
caggaaaggaattaaaaatcacaaaggacactgtgcaccttatccttggtgtaccaaatcatgggggtggaaaaccattggggattgatgaagcagttgctgcaagtaatttgaggtccgaagattggctaaagatgagttcaatgttacattgctacatgatcgcttaaggaaacaggatgatgacgacctcaccatctgatgattcttccttatcctattcaatcgtttgttgtttcctactactagctggggcataacaaaccatgaagtgcttttgacggaagaaatgcatcgatttcacgagaactattggtgccagcttatattcaatgacctatgtgaagcggtgaagtggcacacaagaagcaccacaaatgtctatacgatgatatacagatgctcgattgtcgtccttgtaagcatatcttatgtcttttgtacatctattgcttttagctcatttttttgtggggcatactctatcagattatatgttgattgttatgtttacttacatagaatctttacacgacttactaattaattttttctgtagttgtattaccgggatcattcggctattgtgatgtaagatcttcacactaaagaaatatacttccattttctgacaaatttatgtcaaatatatgttcttag

SEQ ID NO: 170996 - DNA, 476 bp, Zea Mays
catttttattgttctctggaccgaacaccaattacagagaaaaacgggggccgaaacagaagtttttcccagactcagacaactcatgtgatggactgggggttgatttaaaatgagacgaggggttcttttgaataatttagcacccgaaagggtaacttcaatcctgagccgtccgatcaaactcgcacgacccagattagatcgagtacccttccgaaccggtactcacgggtgatcgtgagatgggcgatcgatggtggagattttaaacaacgctgccagccgcacgaccgaacgatccaagatcgacggcccgcgcacgaagggtataacgtttataatcacagccgccaaccgcgagatctatggtctggatcccaccccatcaaagcggtacgtttctcagaatcctggccgttaagtatccgatcgacgactgagcgcccttcttctacctaacgttgggcacggcg

SEQ ID NO: 170997 - DNA, 593 bp, Zea Mays
ctccaaaagaaaagcggcgtaacacacttagcagtctctgtagtattccttcccttgtttgggaaaccaaaatctctttgtgtaggcccaaccatcggaacctgcacgagtatcgagtcagtgttagtacaacaccttgacaaaacatccacaaaagtattcaaacccccacccgtacacctaatcaccccatacaacatcagtagaacaatgagaagtctccacaactctaggctcatcttcaacaaccttttcccatttcgacaccaacaacgtcaattgtagtcagcgaagcatccaagccttccaagtcttcaatttccttatcccttcgcacctattatagaaaaccaacacgtcagtctcaacacggaaaaaaaacttagcttcaagctatccaaagaaacaccatcaccattacctgctccatcgcacaagtaaccctctccctaaccacgaagcgatcgtgagtgtctcacatccggtcgaagagtgcgttagcagattgcctcaaggacacatccacaacctggaaagcttcctggtcgaagtcctgattgctttgttcaaacacctcaaaatggtgacaccct

SEQ ID NO: 170998 - DNA, 790 bp, Zea Mays
atttatgtaatgcaaactatacagattgatagatagtgttctttaattaatgagcagcataatcgcaccaaagaaaacaatataatggctacgcgcagcacatgtttacaacaaaaaattcgattgttcctctaattaatgcgcagcataatcgcactggagacactggcgactaaaaaattgactgtatatgccaaatcagtcatgtattgatggcaatctgaacaactagatgcaaacatcaactatatactaaccacaaactgacgaactaaatgtagaaaaatctatgtgtcttaataacgaaccacgaaaaaaatcaacgaatcaaatagaatgttggcaatttagaacttactggttaccacggatccaatgcgagtatttggtctacgtttggtgcttccttcaaatgtcggtgggtgtagaacgaagtgaatcggcgacacaaatacggtggaggagatgaaggcgacagcggtggaggactggccgatgtatggaggggaagcatgactggccgattttggaatcgatgcggtggagaagatgaaggcgatgacatcgaatttgtctagggttccgccgccgcatgtgtgcgggtgagataacctaggaaggttgtgtgcgtgcgggtgagatcgtgggcccgatgcacatattgcggaactaaatcttctcgatggcccatagaccgacacatgcattactgttgcgtaaactaaaacataaaaaccgtaactccaatattatgtggggactagtacagatgcctagattacgggagcat

SEQ ID NO: 170999 - DNA, 778 bp, Zea Mays
caccatttctcctctctgcggtgtcggggcggcggcgcccgtgcatcccgcggcggcctagcccctgcatggttctgcccggtgcttcagtaatccaaatcccgatccaaatagtgctaacctacgctggagccatggtgggtaagacaagggcgacttaccgatggtgagggcggaggaaagatcagtccatggcgtatgacagattcatggcatcgtcacgcgacagcaagaaattttttagtcaccgttcaacgtcgcacatgacgattaccacccgcatgctccacagactcaggcgaattccctggagccactggccaaagctagaggactccgcatacgggtaccaatgacggcggcacacaccctctctttcttctctgtgctcgctctggtgaatgggtgctcgggcgccaccactagtggacgaaagggcagtggggcacgggatttatacctcgaaaacggagagtccgcacttgatgcatggctggaagataaggatcaaaggaggagatacaattttgggaactcgttccgccgttctgtttgagataggagaagcccctgatgattgggtcccacgtgtaggtgtcacacgtgtgtgtgtgcacgcgactgaccctaaaaccctaatacagacacaaatctttgtcctcgatggtatctcatcttcatcgcccaaatacagacgcaaatctgaaatgttaaacatgggactaacaccaaaatatatacagatctcaagtttatatgcattatcattaattttctc

SEQ ID NO: 171000 - DNA, 562 bp, Zea Mays
ctatttcatcaaaatttaaccaagaagcatctaaattaaattgcagaaactcaaaatagagaattagttagaacgatccatttccggaaaagtttggaatgataaaagaaggcagtgccagtggttcaaggctagaaaagtccaaaatggatactggacaccctttgttggccaaagcagagttagtcgcatagtggacaataggttgactgggagcatatcatgcacaatggatgacaccatggtgttgcagggccgagcttgcagtctaaccaagtaatttgcttctgcattagtgggtccatagcctggtgctgtgggggtgtgtaagtggtagaaaatagatagcaacaactcgaatttgttcaatatgatctgggaggagcttaaggttgcttcacccctggactaggtaagggaaaggttatttgacattaatgacctgatgtcatatcaagtaaaatatatttgcaacttccgagtccttcagaatctaaccctgtgctgtgcatgttgtttttttctttccttttcggcttgtcattctgtagtgtacaatatg

SEQ ID NO: 171001 - DNA, 363 bp, Zea Mays
cttcggcttcggcctggactttgacagcctcggcaattttcttgataggagcaggggtcaaggtttttgtggtctccataacagcgtccagcacgctggccatcctcctcctcttgggagttgtggcagaagcctttgtcatctttggcaattctgcctctgtcgatgggctcaaaatttttggcatcatcattgttttttccaattctggctctctggccatatcatccttggcttcggctggcccgactgtaggcaccttcggcactacgatcgattcttcagcgctctgcacgatgggagcaacttgtcttgcttcggtagttgaagaggtcccttcgccaaattcagtcactatggccg

SEQ ID NO: 171002 - DNA, 432 bp, Zea Mays
ttcaagtgactagcttttatcctctggcaagtgtcacactcggatatgtacttggcaatttccctcttcattctggtccaccaatataaagatctgagatcatggtacatcttgttactaccagggtgcatggagaattttgaaagatgagcttcatccagtatcttctttctgagctcagggtccttgggaacaaccaatcggtttccaaaccatagaattcccttgctgtcctaccggaagcacttgtatttttctgccttttgcttgatcatttccttgataacctgaacacccttatcttcaacttgggccctgactatttgctcctgtagtgtcggttctaccgagatataacttaaggcacctgaaggaacaacttccagattcaacttgcacaactcatcacacagggtggtaactcttgcatcc

SEQ ID NO: 171003 - DNA, 690 bp, Zea Mays
gccaccccagtcattaattgtgccacctcgcccctccctcaccccagtcgtgccaccccttctccagcccaggttgcgctgccctacctctttgccacccaaattgtgtcgtcacactgcaactgccccccctagtcggtcgtcccatgtacccgctcattgacatttgcttgccaactgccacacgatgcacacccatagagcttatcgctgtcgcacgtcgcattgtgcccgcacctaccaccgtgctatgctccagtgctcgccaactactgcccttcacgcctggaaatgtgttatatgttgattctatattgattttggtgattaatgaccaacacaacattatgatctaactagtttgctaagtatgtgaatgcgggttcctaagaatcaaattgatgtattcaatgcaacaattgcctcaaacaaaggctagaaagggcaaaacctacatgagttgaactatgaataattcataagtttggatatgttctaaattcccttaagaatgtttttgagcacctaagagagaatgaaaagccagactttagaaaaggtgctgtttggtgctaagtttgagctagtttgggaatctgatttggaaatcacctaaaatcaacaactatgacttagactagttggatagaccctaaataagtttgtctaagtcataggaatgctttcaag

SEQ ID NO: 171004 - DNA, 573 bp, Zea Mays
gactttggtctcatacagcttgaggtctttcgagcactgtcatgggtcttgaagacaaggctttgggaacttttttctaaggggtgtatttgttagggtagtttttggagagatgattttgctcatttttgtctctttctaaaggaactagtttagcttttagagttatcggtgtgctttcatctttttctttgttcattggctagtggtgtgtaagtctttttctacctcttattgagggttagtcattttttcttattcgtcgtccatgtctttgggaaccaaacattgctcattttcgatggctttgatttgacttttatctaccgtcttatgattttgagtgagttttttcgttcttccttttgagtgagttattttgttcttcccgctcccttctttcttctacgctaaatctttgtgtttatgcgatcaaggggaatattgcgaacacaaggttgcgaagtgctcttatggttcagtttgtgatgagtgcttgttaatgtagtagaatcttggtttgagtcgtgtagaatagttagtgctgaaaggatcacgatgcccaagaggggg

SEQ ID NO: 171005 - DNA, 663 bp, Zea Mays
gtttttgatgctattggatttgtgtaccctgactatcgctacccgccacaggggcagaaaagaaagggtgcaacctctagaaaggttgctgcttcggctgctccaagcgagcctacgccgaagagtaaaaagttgaaagtcctcacccaccggccccgctatattgaaccggccatagtgcctgagtttagtggggaaacttcttcagctactgaagcgaaaggacctgctcctcccacacagaagattgaagagctggctgcaatgctgaaggcaccctctcctcccatgcagaagattgaagagccgactgcaatgccgaaggcaccctcagccaagttagctgagccaaagactaataaaactgagaagccaagaatcgaaggaacaaaaacattagaagttttaagcccttcggcagaagtgacagtgccgaaggcacaaaaaggtcttgcggcgacccccaaaagaaaaaggatggaaagtgtactagatgtgctagagtcagtaaaggcttcaagttctataccttcagggaaaattgccgaggcttcgaaaatgcaaatcgaagctgaaacaaaaccggccgaagctaaagccacagtgagccaggctagcgccgaagctgggccttcagagcctgctgataaacaaccctcggaa

SEQ ID NO: 171006 - DNA, 525 bp, Zea Mays
gggaaggctgctactgagatcttacttgttgttggcttggctgaccctgagattgggttgtcttttcttcaccctgcactgggttatgaatacttcaaacatgtctcgggtgaaatcttcccccgaaaccccttgcgaaatttggtgtatttgtgtaactcctcccttctttggtggatgtcgtcgttggctcttatgtactcatacatttttacagtaatttctcaagagaatgtgggggcttgcttgcgaagtattgagctgctggtcctagcctgagccccttgacatagcttcgatgacgatgtcatcttgaactactggtgcatgggcccgattgtggagaaaccttcgaatgaatgactgaagatatttatatgaatcttgcgtacactggaacatggcttgtgttgtgactggctttgactggaagccttggaagctattgaggagcatctcttttaggttctgccatgaagtgacatttcttggccaaagtgatgaatacgaagtttgggccacatt

SEQ ID NO: 171007 - DNA, 946 bp, Zea Mays
cattcctctcccttctctgattcgtggtttcatttgtttgatattattgtttcatgggcctagtttagtaggtgtggatctagcgtggtggctagggagggtcttgcaccctctacctacatgttgtccatagaatccccatgaagcatctcttagatttctaactatggatgaaaaggagaaaagatgacaaggaaaaagtgaatgatgagaaaaatgaagatgatggtgagcaccccctcttgcatgatcttggatccatgcctgtagtttagtaagggatacatgtaaaccaacatattattgttattattattaattatatgaaggctactttaaattgaccaatagattgaaacatttaccacaatatttgttctcctacctagggctacatacacctacaaccatgtatttcgcacaattacgatctatgtcattcctcctccctatactaatcatgggatgacctagggagctacatcgatatggttgaaacatacctaaggcccaacccaacaaatcaagcaatagttgtaagaagaaaagaaaactcctttcacatacaatgtttgtattcgtctagctccatttgtgaataatgatgctcacgacacattcgacctgtccaagtgcgaaggtgccatggattgatgaggatagtcaccgacgagtcaaaaagattcttgaagtgaacaatgtgtattccccatctcgccccctagtcctctttctccccagattccaaattcgtaacctctatatctctaattagatgtttaggccgttgtagagggcaccaacgcccctatttgttttcttatcattgcaacattgacttgccccttgctcaatagttgtggaccatagagggcatgacaacaactgagcatgtaatctccacacaagaactcaacccaactcttttgaactccctaaggcacaa

SEQ ID NO: 171008 - DNA, 854 bp, Zea Mays
atacccagcatttaagaattagaacaattaggggataacatatcttaaacatttcagctatagccatgattcagatgccaggaataccatgctatttgaaagcaattagaagctcttccaaggcataagaaattgacaacatcataactaaagcgaacaagaagatggtgataactatcacagttgacacctgaaagcttgagaggtgtaaattataatcgttcaggctaagaggaaagacaataagacagtgacagttgtcacagttgaaaaactaagaaatgttcaggctagcaagaaaactccaagctgtttattcatacatagacaccaattttattgtttctacttattagtgcacttctcttttttttaagaagaagaaaacaaatgagttcccatgaaattgtgacttagagatgaccggaaacaattactagagactagcacaaagtacgcatggagtaaaaaattctcggctctgcaaactttacacttggctggggctctatgagatggtgcacagctgcttggacccagagtgtagccagttatcacttattagtgcatatcgccaggagctcacatgttgagcaatcatttgccagagccgagcttcttttttttttgcagtgcagacagaatgcaggtagtcataaatcttctacttgccacatttgcttcttgcaaacttatcgaccaccttttgttgctatgcccaatgcttgtgtgatctcagtgtagctaatttggttcaaattttgcaggaagttgataattttgtttctgctgcagagtcagatgacggtgttcatatcttgtgtttcatcatccttgtttatctgtactttctt

SEQ ID NO: 171009 - DNA, 495 bp, Zea Mays
tcgaatgagtgagaccttggcctacgcgccaagctccactgtgatggtagcgcgcatgatggggcacgcacgccgctgggtgagcaaggtaggttggcgaaccatctcggtggcctgctcacggcaccatcgtggtgcatctcaaagatgagccacgcaacgtcgacgccttcggacccgtagccacaggccctttgttggctcaccgtgactgagatgcagtcgcccttgacgtagatgttgtgttgccatgtgccgagcacgtagaagaagcagcacaatgccatggccaccagcaggctcagcccttgagatgcccttgttcgccattgccaacctcacccctgccccattgatgcgaccaaccaatatacacaataccccaatgcggggatcagacggcggatgcgagagggagagaaaatacaacatgccaccagatctagcgcgcgtacctgagttagatggacctaggacagcaccaccatgactgct

SEQ ID NO: 171010 - DNA, 827 bp, Zea Mays
attatcgagcctatagcgaagttgctagaaaagaagcccaaaacacgagcatcaagctcacagggtatatgtctgctggtgttttgggaggctccaacgccttccgagtgttcgtcgtcagctcccatccggagcttggggaagtgaacgtcgagaacgtgtaaggcccctacctggtgcgacaattgtcggtgttttgaaccagcttgtatgtgcacgctctatggtttggatggtgtgctcggtgggtgtaagatttatactggttcgggaagaatgtcccaccatctggtcttcggttgctcgcactaccgacaccttatcgctcaatcctcgtagtaggggttacaagagggcgagagaggtaggagctcccaagtctcttatgcgtggctagacctaaagactgtgggagcggtgctctctattaagccttggacatcatggtgattcactcattgtcttcggcttccgggtcttctggtctcgccatccatgtgcgtgtagtagggatggcaattttacccatgggtttgggttcaggcacacaatttgacccacgggtctcacatgtacccgacccgtgattaaatcgggtcgggtatgcgtttaacatcttgctcgtgggtatccgatggatatctgaaaatatcaaatctgttttttatcatattataaattagcctcgagttctgctgaatggctatgtctacagcgaaaaggtactgagttgttccttgtaaagcgtcggctcagttcaaaccgtcttggcttagcacctgctctatatttacccatagacgcttcaagagatgcccaaaaaattg

SEQ ID NO: 171011 - DNA, 1582 bp, Zea Mays
tcttttcccctacgttggaccacatgagaggggtctggcactttcgtccatacaatgcttcgaacggtgacatcttaatgctgacctgatggctgttgttatacgagaactctgcataaggtaaactggactcccagtttctgtcgaacgttaacacacaggctcttaataaatcttcgaggaccttgttgaccctttctgtctgaccatctgactgggggtgataggcggtgctgaagtctagcttggtgcccatagcttgctgaaggctcatccaaaatttggaggtgaactgggttcccctgtctgacactatcttccttggaatgccatggagtctgactatctctttaagataaatccgggcaagggtagctcctccaaaggtagttttcactgggataaagtgggctaccttggtaagacagtctattattacccagatagagtcattccctttttgcgtccggggtagtccggttacaaaatccatgcctatttcctcccacttccattcaggcactgggaggggttgcaataggcctacaggtttctggtgctcggcttttgttcgttggcaagtgtcacatcgggccacatactgtgctatctctttcttcatccctctcgaccagcatctggttttgaggtctaggtacatcttggtggttcctgggtagatggagtaggctgagttgtgagcttcatcgagcaggacttcccgtgtttctccttttggtacacatagacggttcttgaaccaaaggactccttgttcatctgtcctgaggtccggaagttgttctttgcgaccttttgccataagtcttgttgtttctgcgtccaggcattgagctttgcatatgaggtcttctagcattggcttgacttctaggctgtcgttgtttcccagacatgcattcagctgagctaattccttcttccagtcttctaaaaagttgatccccttcatctcgaaaggttttcggctgagggcgtctgctaccatgttggcctttccggggtggtaatggatctcaaggtcataatctttgatcagttccagccatcttctctgacggaggttgagatctggctgagtgaagatatacttcatactcttgtgatcggtgaagatgtggcatttgttcccaattaggtagtgcctccatattttcagggcatgcactatggctatcaattccaaatcgtgggtgggataattctgctcatgcggcttgagtaagcgtgatgcataagcaataactttctcatttttcatcaggacacaccctaagtcttgccttgaagcatcacagaagacgacgaaatcctggtgtatcggtagtgtcaaaatgggtgcggtcgtgagcttttcctttatgatctggaaactttcctcacacttcagggtccacacaaacttattgtctttcttgaggagctcggtcataggtcttgctatgctggagaatcccttgataaagcggcggtaatatcctgccattcccagatagcttcgaacttcactgacgttggatggctgcttccattttgatactgcttctaccttggatgggtc

SEQ ID NO: 171012 - DNA, 1502 bp, Zea Mays
gggtagcagtagcagactccatctagttctgcccttagctatcttcaagacagaacgagccactgcttgcccttaaaatcggacttgcagcagtactcggacagttaggttagccttgtaccttctacttacaaagcaacatgagaatggactcttcctttgcgataagataaattgtgatccagcccggtaaggcttgcctattcccagactctagcgccatttatggtccaatctggtaggggccacccttgtaaacctagtctctggtgttcattacacaaatcacatgtacctagttgtaaaggaaggatttattctcatccaattatttcttttcttgaatcgacgtgacgctttcctccgcttttcctgcgggtccaagcttctattgtaatcatgaatttgagtcatgtatctaaccttgcacctagttggggccttgcttgatgatggaaaaggaacggacaactaggaacccaacctacgggaaagagtccacattcttaggggtggtccagagctaggtagctgcttagcttactgtaatcctacaccttccaccaccccagagcagctaaccaagtaccaacgactcactacctaagggtccagaccttttccagattctagggcagatcctagagctaggctcagtaaggttcggttgcatgattcaaaggattgactgcgacaaagcagaagttccataggtatgctgctaagcttcggtcccaagccgtattcaggactggactctagttttgcaggccccttagacaatcgaagctacctcacaggggatcaaggtacctagggccagtctacataaacctgatttctggcaccatctgtcgtccaaccgggtaggggccacccttgtaaaccctgtgtctagtggttttcgtgcaagaccttacacatccagaaatgaagaaaggtttttcccttggtacgatccttacgtatcggctctatcatttttaacctacgcatgtttctctttctaccccagctcgagattatcatttttgttgttatcacgaaatctgagttatgcaactagcaatgccgcttattttgtgatcccctcatatgctaaacaaagtatagactggtaggggcttagtctaaaggaaatgtccacattctcaggggtggtccggagctgggtagccgcttagcctggtcccgtaccgtaagtctacaccttccactgccctagaatagctaacttagtactttctagtccaggtacctaaaggactacacctttttcatatccaagggccagatccaaaactctgcttggcaaaagcttagctacataactcgatagattgaaagcagcgaggtaaggatctcgagggtacaatgctaagcactattcctgaaccacactcaggaatagctctctggtctaaaaggtatcccagacatcaggactgcctccaaggagcccttacgccagggggccaggaaagggagatccttgtcttcag

SEQ ID NO: 171013 - DNA, 392 bp, Zea Mays
ttctgtaacaattttttataagacaatttttatagcattataaatcagcgttagcgttgcagtaacattatgtgcttataacttgtcattagccataaagcttacgtttttccggttcagtctatgctagccttctggaagggcaacaagtttaatggttgcatttcattcattctttatcaaataggtaatgcatggtgtggattgtgacataatgtggctccaacgggatttgtacatctacacatgcaatcttttttgatacatgacatatatttttaaattagggccaataataccaggcttcaaggttcttatggatggagagaagataccaaaatataaactggaggttgaagccactatctgatgaaatgatcaagtgttgcgca

SEQ ID NO: 171014 - DNA, 855 bp, Zea Mays
tgcatccgccacatgcatggtgtcctctgggcatgtttggctctgaccagctgctggaatataatggagcggtttcatttcaggtctcggtgaaccaaaagtcagcacaagcgacttgacattgaggcagggcgaggagcgagggcccgcacagcatcagccagcagcaaacgggcgacaagaccagaccggcaaacgggttgctagcaatagtatgtatgggcacgcagctaagctactactaccattggatatatatatatatatgcaatggcaaacgccaatgggcgagcactactgtgcactgtgcaagcaggccgcatgggcgcagcgcaggactctttctggctggggcttcagcagccttcagctgatgtgagctctcttcccggcggcgataggagacggagcaggcaacgactttttccctgatacaggttgacaggacttgaaactaggaaaggggaagagatggccgtgtgaaaggtggcgagagagactgcctccaactccaaccctctggttccactgtacgtactttgcgcctaggcccagcagtgcgtggtcagtgttctctcgtacgtacgtacgttcgtgtgtgtgtgtctgtggccgtgtcactgtggtctcgccgcatggatgcatgcatgtgatgtgactatatataatgctcctctcctcttctcgagatagacgacgtttttcaattttaaatactagtatgaagttttttttgtaaataataaaaaataaattatgaagtctttcgttttcgtaatggcagatcgatgtagagatgagcggaatggccgggtagctacgtcccagtcccatccggactcccatgcccatgct

SEQ ID NO: 171015 - DNA, 474 bp, Zea Mays
aaagaccttgccaagatcgggcttgaaatggtgactacacgcgcgagaaggaaggctcaagcaaacaaggcacgtgttcgacccgggctggcacgccagatctgggccaacctgcgtgtgcgtgcgccctggtaccagcggtcggccactccattgccgcatgcgcttgcgcctataaatccctccccatgcgtgcggcagttcactcctcaacccgccgcactcccccgaacaaagccagaactccggtgagctccacatcgcccgccattgccgcccgaggctcaccgtcgtggccagcctgccctcaccattccatcgcctaagcaagcatgccagagacttccccgcaccctcccacagctagcatccttgctcgattaaactctaccatgccagaggggcctcgccactgccagccgctcacggtttgccgccggagcacggtgaccaaccattctgagcatccaccgc

SEQ ID NO: 171016 - DNA, 441 bp, Zea Mays
ctcgctccaaggacccgcccattcgcccattagccgcatggagcaccattgctatcacactggctcgctcatcattgagtgtgtgcctcttccagctcccctccccttccttcaattggccacttgcgacatcatccatcaaatgcttgctaccattgtggataccatgctagtggccacaacagaatgtcgactgtgcccctgcttcctctcatccatttaagatactatcagccctcgcaaaccctagccctaactctatcctccactacctcattattgtcattggagttctctctcgttggcagcaatttgccctccccaccacccctctctttgatttgtcgcttgccgagcttcctcttattatcctcgtccttcctttgtagttatgtcctcttctctccactgaccatgccactgccatcattcttgttcgcc

SEQ ID NO: 171017 - DNA, 1932 bp, Zea Mays
ccagcgtcttgttccaggcatgacaaccgccagagtcgccttttcttcctcttctcctcaacaggtgcagctggatggttcactcggcatgaacgtttccaacgagcaccctctggtgtctgaatttcctcgtcttcgccaatctcttgcctagtcacaattgtcgtcggctcagtgcgggcagagtcagatgattctccggccagcaggctaagaatagcatccatttcagcatcatcggtactggacgccatctcgaagtgagtttgcttctcagccttgggaagattccggaggggagcaattaaggcctcaatgtcctctgaggatggtcacactctatggcccgggctaccatctcgaacaggaggattggagacaaagccagagaagggactatgcggaggcaggttccatgcagagtaagataagggaggaccagcattcgaaatcctgcccctcaatatcatgtcaagtcaccctagcaagtcctcattggggatttgcatgttagtgacccgggtaggatcattgacgctagtgtacaagtaagctaggtagactctgtccattaaagtttgaatgttcttgaagacaaagtcaacaaccacgacttcggcagtcagacctctgtccttcagcgagcaaatttcggcaagcagcaccttggcttcggccacctctgaataagtgggggactccacctagctgggcgtgcgaacgtctggttgcctccctgatcgagggggagggatttgttgtgattctccatggtgaaccactcgaggcaacatcccttgatgctgtccttgagagggatatcaaggtattccactttcctccccccgcgaagctccaaactagcaccaccaacaagctgatgctgccctccagccataccgggtcaacagtggtaaaggtacctccagagtccaaagtgggggaggattccaagaaaggccttgcacaggtgtacaaaaatggcaacttgaagaatggagttaaggtttaaatgtgtaagatttaaatcgtagaagtcgaggagaccgcagaaaaagggagaaacgggaagagcaagtccgcggatgaggaacgacacataaacaacggcctcgtgggtgtcctctgtcggaacagtgagcccgcgccagatccgccaagaacacagttctttcagcggcaaaaccccagtctccacaagatgcaaaagatctgatttagaaattatggacatgtgattaccagcgaatggaagctggctgttgggaacgataggtggaatgatcggaacgagcgggctcaagaattcagaaagcggagaagcagtagaggaaaagtaagatttagggttcagaactcaagaaggcacgtcgacatgagtataagttggctccttaggtcgagcattacctctaaagtgtcagatcacaattcggaaaagtaaagaccacaatcgccattcgggcattacctctaaaatgccgtcactgtcaagcacacggacaaactttcaagcgcacgaataaaaagcaagcatcggtgattaaatggagtaacttcatccttcattcgtaataggggaagtaacacaaactcgaagctggctgattatgagtcagcctcttttacccctggtcactgcagtacattacattacatcaccttactacttacactacactacgctactaacttacactactttattctgcaacttactactactactactatttatactaatatttaaaccagtggcattgtgccactagccttgccgctgccaccgtcgcccttgccgccactgccgtcgttgccaccgccgtcaccgttgccgctgctgttgtcgccgtcgcccttgctactgccaccccggctacggtcgcccctaccatcactatcgctgctgctgccgtcactattgcccttgcc

SEQ ID NO: 171018 - DNA, 753 bp, Zea Mays
aactgaccgggatggggttggccgcggtgaggttagtttcgcggtggcggaaacccaaattggggagaaaccaaaattcaagctcccggatgcacggttgctagcgattcttggtggcggggtgggtgatgatgttgtggagctagtggagggctcaatttataggaagcttcgacggtggtcgagaattttaacggggattgcgcggcggtcggaaggatagggaggtactggcgcgcgtgaacccgtgtctaacgtcgtggcgacctcaccggcgacgatgggatggccatagagagtcacggcgacgcagtggaaaggcagagccacgcggcacaaggccgagaggcggcggttcaccggcgagccaacctgcaccagccgcaaaacaagggagctacgacggtgagtcaccggagctatccccagccgtcgagcgacaacctggtagacttatcttgttactgacaacgtgaatcgcaacggcgatggcatgaatctttgcgcagagaggtcgccggcggtgaggatccgacgctggcagtctgatctttatcgggttactgtaccatcgaagtgggattcagttggcctgacagtcaatgtttaggcttgatttgctcacaaatcattatggtaacatactctatgctctgcaacaagttagagagctacaaaccagcaataattcgactatagagattgaactcatttgagcactagataaaggttgaatttaaacccaaagatggc

SEQ ID NO: 171019 - DNA, 978 bp, Zea Mays
gaggacctcgatgagtcgggtttgattggctagaacttgggctaggtctaagggtagtggtggaggtgcggggaggtgggtttcactttcttctctaacgacttccccttcagctctcaggggaaaccctgctccaatcccagaggcggtaggcgtggttttatccgaagccatctgccagggaagagagtcactattatgcacatgcaaattgttttcaaccaagttattttattcattacaccatcacattacaagcataagattactacaggtggaactacacgagagcgttccccgaggtactagcgaattccttatctaaggtgtcctcaaatgccttgagaagatcatcgaggcttgctagggatatatcctcttcgtcggaccagtcatctattttggggggaggtagggctagaggggccttcttcttcttctctgtctggcatccttggttggtggtcttcttatggatcttctttttgggggcgagtttctttagcttcttgtcatagtccatcttcaaggtccgataggtttcacgggtgttggcttcctcgccttctgctatgttgagactctcctggagggatgccttctcttgcttaagctctttgacttgccgctctaggctttccactcgggagtttaggtgggtgcagtgggaggagagctcgtcgtagtggttgtcgagggtgtggaggtatccgaccatgtatacgatagtggggtcatcttctgtgggatctcctcctgacagagcctggagtcttttcctccaggtgggggtgtttttgttgctgggtgggaaatatcggaggggggtctcagagatctctcggctatagttttggcacagttgtttgagggcttttcgagcaacgctctggcaagtgtctgggaagcggtgcccgatgaaggtaatttggaagggagggtggtttgggtagttctggctttctcccaagtagactg

SEQ ID NO: 171020 - DNA, 429 bp, Zea Mays
aaaggaggcacgatgatgttgttctcctttgtcttttaaaaggatctattggatggcaatgaaagatacccattgcgtcggagtcatgtaaccttgtatgtgacatgaaatcactttcatgcctcttatggctagctcatcggtcatatatgagacgatacctactaatatatagcttcgtgcatcgatcattgcttaggtgggtctacttttgcttgtgtttattagggtgtgtcctctacacgaggtagttaacaggaactggggtagagttattcctaatcgtccatccatgcttttgatcggaggctatcctaaccgttggttgtagccctcggtcatacgatcacaaaacctaattgacatccacacatgtccccatcacctaggcgtgcgtagtgcctgaaagagctatgatctatggcgtcg

SEQ ID NO: 171021 - DNA, 924 bp, Zea Mays
ggggcctcatccgaatcggtaagcagcaagcatcataggatcaaagatcggtggcctcgattttaaaataccccgatctaatcttggtcatacatccacaattgatcgaccctgaccaaatcagcgaagggggtactacaggatctaatcctagccatcaccgcggagatcgacggttcacacataccctccttcaccccctctctccttccccggtcatccgagtggtggcgcgctactctaaacggctgaaggctcgccggcgtcctcccgcttgatgccttgatgctctccttctaaaaccagatggtgctaagccacacaaaggaaacagtgaagtgagttggaaggtcattaccataggtcgtgtagtcctatgcctggtccacgatagagggcgattccatggcggtctacaagctccgacgagcaattgagagtgtcccgatggtcgatcccccctgccacgcccacgaacgtctcctccacgcaccgcaacactctccatccagtccacttgttccaagcgacaacgaagatgaacttccccggtggcggctcccttttctctctgtggtgatggcgttgctctcccgatctccctcttcgtgagacagctctcggaaatggacggagggggtgccagggagggccacctttataccaagccggcggggatccaacagactccaggattcccggaatttctattacggtgtcgggtgttggtgaccatggcaaaggaattgctaaatctccggccccacacgacagtgacggatcagcgtgggcacaacgcgctgtgaggctggaggtgggggtccacctgtcgaggcaagtgagtgtgggctggcgagtggggcccgcgggacaatgactccagtaaaaagaaaaggtgagggggatgttgggccacacggtggt

SEQ ID NO: 171022 - DNA, 999 bp, Zea Mays
ggtcgcgcgcactcggccgaaacgatacgttcggcttctaatcgtggacgttgataatgaatctaacggttgcgagcccccttccccaacccacatactcaggcaacggcaccgcccaacagtccgccgttgagctcgccggagatggtggatctagtgcatcgggacccaatcttcacgaccgatagatgcaaaacgatgaggagcccatggcgaatactgtggtggcgtcaatttggtgcgccataggcgtaccaggcacaaccacggcagcgccagcatggacccgcggcggcaactacggccagcgcactatatccatgaatcaaggcccaagatccaaattcgatcaacgctgcgccatgcttagggaaaggcaaacaggttggtgagcttattacctcaatctggggttgcagtaccacagtccacgcggcggcgcggcaatgcacatgggattgactacagcagcgggcttccccctggatctctcccatccgtcggccatggtggcccacgcacgcgaagctcccaggcggatctgcgctgagtctgttgttgtgtttgcgttcactacggaggtagacgacgagtctagcgccctggtgagatgagcgcgagcgagggcttcctctctccccaccacaggcgacccgggcacgactttatattgcccatggagtccgcggatcggaaggattcaaccgaatccgaaactatcgctcgccatgatcccgacgaaggcggtgacccgcgcggcggacaccttaaagcaaggaggggaggggaggtccacgacttgcgcgcgacggagcaggccccaacggccgagtggcagcttcgggtggcgaaggatccgcgtagagggggtagcgggccacggaaggctgcccaagttgttacgggaccgaaggaatcgcagccacgagcaccgagcatggcggcctccccagtcgcacgccgaggatttcgcggccgcggcgagcttttcggctggtg

SEQ ID NO: 171023 - DNA, 535 bp, Zea Mays
gtcgccaggcggtattttggcccacttaactccattgccgcgcggcccaagacgttattccaccgccgcggtgccgacagcagggcccacgggcagcctctcatactctcgcgcacacttgcctgcttctctccgttacgccgacctgcggacccccttctgtcagctgctattcgcgactcggtcacacattcgcaccctcgttcctatgccactgaccactgggccgacttcgtcagctccgatctcaacagatttccacgcatggtggaacgcgcgcatggcgagcggcgttggcgcaaatcttgcgcgcgcgaaccgattgaccacgccgggcgataaaaccctggtcgccattgcctccctccattccgcagctccatagagtccgcaactaacctaaattccagagccgccatagccatcagtcgccgccaccggtgaatcttaccaacccatgtcgtctgccctctgcgttaggtcgggaggttcgtcttcgcctgggaaagccttctgcgcctccaattcgagttgg

SEQ ID NO: 171024 - DNA, 684 bp, Zea Mays
aaagtactcaccctcacgggtttggtaaattatattatggtgctggtgtgtcgtatggtgagatggggagtctagctaggacgaatacggagttggatatccatccttctcaaaaaaaactctgtgccagaccgtccggttaaatacgcggaccgtccggctccgtgcgtggactgtccgaccatgtggccagaccatccgacattatattcggactgtctggcgtcatacgcggagagtctgaatgggttatctagggtttgcacggtatgtggaggcttgggtgcaggcctcggtaattcgcttctaaaaatgggatcggccgccgctggcccggacggtccgcgctcacgtgcggacggtccggacatgcgtagatcggcaaatttatcgccgatgtgcgtgggaggctgttgttgcccaaggtacatgtctatcggtatcccataaaggggttgtgagtggtcgtgacaacctgtagccgatgaattacgtgtgtattccctcagttcaacctcgtgcgaaggaagatttgcaatagtagacttatcaagcgcacgcactagccttttatgaccattttgtatatcccctacgatacgttgcatctgctctcgttgttcgtctatgtaagctttaagagattggagttcattggtgctacttacatttggggtattcgta

SEQ ID NO: 171025 - DNA, 1154 bp, Zea Mays
gaaattggatttgaatttaaaatagaagattggaaaataagaaataaaaggaaaacagaaaatcaaaggagaccgccccatgggccaatttctctgcggtcggcccatctccactttcgcagccgctcggcccatctcgcgcgcccttgacctaattccgttgcatggcgccgacaggtgggccacctgtgtcagtctctacgcgtacgcgtggtaacgctgataggcggggccaagttggcgggatcgtctccctcccgtgatcctcgccaggttgttgcaagtgccgtgcgcaagcgatcttaacgaatctcgcgtgaccccgcataacgccgcttcaccgacacgtgggcccatgtgccagtccctgtcctccgtcttcctcgcgtgctccccgaacggactccgcttcgtgcggggcgattgcagggcggactccgtgctctggcgcgtggtatccggttggggccgcagctccttgggccataaatgacgactgtcatgaccccctcatctcatccacctgtgcccacatccgagcacaagcaccgtagccgtcatcgtcgcaagctcggagaaaggtgggccgccgccacggacaattgctttgtgggtcgtcgccgaccgcaccatcacagggagggactcagcatcgcgtcgatctgaggtaaacgcgcccccgcaagctttgtcaagctctattgcgtacgtagcacctctcggatttggaattgggcgcacctggcgtgatttggtcgtgcgacagcgaggatccgccgcaaccagggcgcgccgccaccgtgcgcgatgtcggattggggaaagagatttgggccgtcggatttggtgtcaacggctgtgattagacgcttgcgtaccgctttgctgagttaatccatgccgtcgattggatgactgggggtgtggatcagatcgcccgtgatgtgatccggaccatagaaattgtatccaacgatctctgtccgcacaaaagcaataagtgccatgttccgatcgtggccgtctcggtctgatcggacggtcacgattctactataccccttcggttgtgcaatttgctaaagagtccccgtaaaacagagaaatcaacccgccatccatttttactatgcactgagtctaggatatcttgc

SEQ ID NO: 171026 - DNA, 582 bp, Zea Mays
cgctgctacggtctgacggcacgggtgaaccggccgagcgggggagaaaagctggccgccggtgggctcgacggcgattcgccgccggtggcccggttcttggtccacggggaggtggcttagcacgggcaggggctggtgatcctaggggtaggcttaatttggctagagggggccgagaggggcctgtccacggggaggtggcggagctccgcggcggggatcgctgccggtggtctttgggcgagggactggggcggggaagtggtgctttgagttcgcggcattgcgaggaagctgctcggttgacttaatcgctcgctagaccaacggagagggagagagaagagggggaagaactcaccggagaggaagaagacggtggcacttcacgaattgcgctcgggcgaggggaggagggtagtggccgaggccggtgcggggaaggaggtgcccggggcgacctttttataggcgcccgaggggaggggagcggcggagctcggcgggcgccggtgaggtgcacagcgccggcattaataccgcacagcggcgccgatgagactccacggcggggcgata

SEQ ID NO: 171027 - DNA, 577 bp, Zea Mays
gtagatggacgcctaggggtccttttatagccccaagggagctcctagctgttggttcctcaaatggtaagcaatcagccttccctgtctgcgtgtgcactggactgtccgatgcacactggacagtgaatagtagatgatttccttcctttcctggcgaagccgaccgttgccacccttcagccacttggcacaccagacaatccgatgcgacttgatgatcattggcttggctgacgtggccggcgctgattgcgcggcgaccgttggtcaggcgtgcggcaggcgcaccggatagtccagtgcacatcggacagttcggtgatttatagtagcagtgcccccaactgcttcccgagagcggcctgttcaccgagggccagcctgggcaccagacagtccggtgctcccaaactggtgcaacttctttactccaattgtcttcttttgggatgatccctagcacttagacacacacagttaaccactaaaacaattgactaagtcttagggtcatacctctttactccatgatttctgatctactttaaacagagcttgaaaacatcaagtcaac

SEQ ID NO: 171028 - DNA, 391 bp, Zea Mays
tggaggtactccttccacccggttcggagttgaatgatggccgacccaacatacggttgattgctatggcctggggacactcgaaagctgaagagttattaccacaagccctagtgtgggtcgatccccataaacgcctcacataacgtaataaaaatgctatgtgaagaacaacattgggatgaaggttatgcacctccaactgatagtagtgaaggagcccatgtacgaagggatgcaagggatacgagattgaataaggaaggacttcatgagatgccccaacggattgagccccctagtgggaccacacatagaaactatgtccagccaaagggcggtcagatctcacttagataacccattcacagcttgatggctccccaccaca

SEQ ID NO: 171029 - DNA, 969 bp, Zea Mays
gggccttaggcttccccgatggaagttagataatttccgttggatcctggttgacagagtgacactcattaaaaaataaaaattattaattttcgttgggcgcctgaggatggggccttacccttcagggcgatagcagctgccacaacatagggaatattatacgagtatgggcacatgtttaaagtcgacatcaccaatctagttgttgcatcaccccggaggcccagggcacacttctagttacactctttttttctcgcattgagttaacccttctatattgcccccctaaacttatcgtctgtaacaatcgccaacgcacattcacacctttaatgtccatctcttctgagatcgaagttggaggcgtgcaggtggcctccaacagtttgataaagtccaccgacatagagtcagttgtcgtatcgacttgcatcttcgaaggccccgacaggatgtcgaactgaacatgagccattttagctttcgtgccctctgggtgaaccctcttcttcatcccccacatacaccctcccttcacccctttgccttgctcgacctccttcccttaacactagacactgaatatggcccatactctctatcctcatcaactcaaacacctagttcgggcgaatgtcgccctagcggatgtcctgattcctcaaaccctatgcctcgacatacttcccaacaagcttacaagtctctttgttgacttcggtgatgaagtctttgcctgtctcccctcagatcaacatcgaaggggggctccacacttaaccttcttgaacaacgttacacatcgccgctgacaactgacacccaacgaaatgtggcctcgtcctgatccccctccgcaaccacataccgaggaaaagatatttattgcatagacttcacctcgtgtgccttcgaccaataaattaaaacgtgtcttaaccatcaccaaccttaatatagaac

SEQ ID NO: 171030 - DNA, 444 bp, Zea Mays
tgctctttatgtttggtgccatttattttccaaggacaattaagactagacttgcaaaaacacttattcctctttttatctgacttctctgtccctaaagtaaactcctcattgatggcaaattgtcgtactgccatcttgaactcctccattgttggatagattgtaccaatatccattatagggtggtccttatcatacgaaataaccatctcacttggtagaacatcactagtacaaatgcaatcaacatcattatcaaccccatgttcaacatattcagattcatttgtagtcccctcttctcttaaacctaaaagtgcatacatctgattttcgctcaaatgtgcaattcgaccttcgtcatcatgtgtttccactatatgtaagctattccaatcaactcttggcatattttccacaggttcaacattggacctaaac

SEQ ID NO: 171031 - DNA, 694 bp, Zea Mays
attttgttagcaactcaagttagaacaagagaatttaaagtggaagagtgccattaacaggttagaaaaatggaaggtgttggtcctaaccttgatgtaagcagcataatgaccctcttctaagcttatgacaaagttatcctcatcccaaagagcgccactaatgtccttgagtttgcaaaccttgacccacctagaccgccacttacgaaggtgattgtacacttgttggcctgttacttcttggccacagaacccagagacatttttagcaacagagttaaggtggatttccttaaaacccttgtaagtcttaaccccatttcctatcaagtcaacaaaacgacgtagaacgaacccagacattacagcagtccacctaagagcaggcctagccccctgaccagcaacctcagagaccatgtcagccatagctggaacaagtaaaagattaggggggagatagaatttaggggggagatagagattagggggaagatagtagaagtagcatagaagtaatagtgatagtagaagtagcatagaagagtaacaaaattgcagttttaacatagtacaaaatagcagagatacaagtaacagagatagtagaagaaacatcattgctagtagacaatggtatcaggatgacataggtaagtaatgacatggaaaagttcatcattgctagtcg

SEQ ID NO: 171032 - DNA, 1008 bp, Zea Mays
ataattcaaatgctgattgtattgtttctgatgctggtaataacattcataatgatagtcttgatgataatttttctgatcttgaagatgttatgatccttagaaaaggtcgtaaaattcagcacaggaaaaaaactgtgaggaaaaaaaacaataataatctggctggtaaaactcctaaaaataggaaaatccctattaagaggaaaggccagtcagatggccaggccctgatttgttcagaatgattggtgtgatttggaattgtcaggggctcggtaaaagtgtgaaaagtgaattccttcgtgatgttatcatgaaagagaaggttaacttcattggtcttcaagaaaccaataagaaagattttgatgattcttggttgaatttcattagtggaaatagtaatttcgtctgggtttggtctccccctaatggtaggtcaggtggattgctggttggttttgattccgacatgtttgatgttagagaaaaagagttgggggaatttatgattcggttgttggtgattcaaaaagattcaggttttatttggaattttattaatgtctatggtgctgctcaaaatgatcaaaaacagaaattcttgagcgagttatccgctttctgttcaaattgttctcaccctttattgattggcggtgattttaatattctcagaagagaatcggataagaacaaacctagggggactaacaaatggagttctctttttaattctattattgatgttcatgatttgattgagttggatcttagtggtcgtcattttacctggtctaataatcgtaatcctcctacttttgagaagttagacaggtttcttgttagtcttgattgggatctgcattataataatgtgaatgttactggtctgagtagatccttttctgatcatgtccctttatgtcttaaaactgactttatttctccggctagaagagaatttcggtatgagctttgttggaaatttagacctgattttaa

SEQ ID NO: 171033 - DNA, 698 bp, Zea Mays
caagtgagatccaaccactcgccggtagggttaagtctcggcaagtggtcccaccggaggcttcacccgctgggggcatctcattgagtccttctttattcgaccctgtattggccttttgatcggtctggctgaccaaagagaggccatgtggccacccagtcagtcaggttaccacaggggaatatgaggtacgacctttgatgtgtgaccaagaattgcttggaactgaggaggttggatcaactacgcaaaatatggtagcggtaatgggcataaggcaacaaacggtgagcccaaagtcagtccaacaccgagtgagaaaccaaggaacctaggagctagagttgaatatgagtggcggcctctctgtatcccattcgaggtaacaatttatgtctcatctgagcatgtagaaactttgcagttatggtgaagtcggctagagagcgccttgatttgtctgtgaaaggtgctcagaagagaacaaagacatgagcagtacctggagcgactccgttgtgagggcaacgaggtgggtttgtagaacaatagcaaatactaaagcctcatcgatgacttaggaaagccaaacaactctctaatctgagcagcatgcaaagtgacgtcctctcgctcaaagcaaaacctcattcactggtggtcggggttaatccagactgtagcttagaatactg

SEQ ID NO: 171034 - DNA, 531 bp, Zea Mays
ttgcgaaagcaaggaaagaaaagaaaaactgctgcttcggcgatttctaacacgccgaagctgaaaaaagttaaagttttaacacaccgccccaagcgcgttgaaacggccgaagaaccgaggcctattgaggggtcttcttctgtatctgagccaagtcactccacccctgccgaagctaggacataatcgaccgaagagccagaactgaagaaagcagcagaacaaccgaaggctttgagtccgttgcaagagacggagctgccgagggcatcaaatattcctgcagcaactccaaagaggaggagaatggccagcgtactagacgctgtcatggaatctgtgaaaatacaaacttcttcttcagcacttgatttagagggtgaagccttaaagaaatcttgcgaagattgtgtggcacaaactacttttgaggttggaccctcagctcccgctgaagcatggccttcaggggctactcctatacccacggaaaaagaaagttgttaactccgataggttcactagtcg

SEQ ID NO: 171035 - DNA, 506 bp, Zea Mays
agccttcggtttgagttatgcatttcaacataggttggctgattccttttttgtaaagctggcagttgatgattgcgaagtctcttcttctgtgtttaagccttttggcctcattgcaatcggatggatggtagtggccttggaggtatagggttattggggcccaacagtctttgaccattataagtttgacaatccggtgcttgtcggcgtcttgcgttatttgcaggccttcaggatttcggacagctggcgtaccgatgacgtgatagaatacatcggaggcagggcttcgccttttgctgctgctttagctaatgtatcggcctcttcattcttgtttctctcaacgtgttgtagactgaaacccttgaattgtttctcaaggcctcgaacagcggcgaggtactgcattagtatgggctctttggctgagtattccatttcgatttggtcgacgacgaccttggagtccgttttaatgatgcatgtagtcacgccgaggg

SEQ ID NO: 171036 - DNA, 790 bp, Zea Mays
cgttttctagcggcaggatatccgtgaccgacgacaccggtcctccgtgatctgcgtagctctcaggaatgggtcaaccagcgcacccacagctcaccatccctgcgtggagtcatcttcagggaacgccgcagctctgcagcactaaccaccttggctggcacgtggatccccgcccgtatcgtcttcatcgtgaagccgtgcgcaactgattccgcggtgtccgggcaccttcatctaaacggatcaacggattgcgctgggatcgccttcgtcataccgaagaccatgcggaacctccgtaccggccgccgcgttcatgcgggtggttcgttgccgatcggatttctcggggcatggactccttccttctcctgaggccgagttaccgcaagcacctattcaccataaaagcctcggcatcctccccctcgcagctgtgccaccccgacttctcccacatggcggctgtcggcgtcgccgtgttgcctccagctctggcaagctccctcggccagccccttcccacttgccacttctcacgctcatgaccagcggctcacgctcatggcgtgtcgctctttgacgcggcggtcctgccttagcccccctgttcctcaacatttccgaaggttggaggtaggcgcttgccgctcctcatcgtagacgctgcgggaccttgcagatgaggggagaccggagtgcggtggtggtgctcgtggtcggatgaatggggatcggtcgggctaggacttcaacgccaaatcgatgtctgctatgggccaaacgt

SEQ ID NO: 171037 - DNA, 864 bp, Zea Mays
gcacgagctctcgagtatggcgttgtaggatcctgggaagtctgccacctcaaaactacaagcgttcggtgcggaaatcggctcggacgccaaacgtgacggggagagtgattcgcccgagggggtaggcctggtggctgggtatgacgccacggaacggccccatgcttggtcgcaacatggagcgtgtgatccctagtccatagaaggtctcaatggacatgatgttgaggccacttccccgtccatcagcagcttggtgaggctcttagagcatatggctcgatgagagggtaggccccgggatgcgggatgctatcggggtggtcgcgacggtaaaaaacaatagaaaattccgaccaccgaaggtatcgtggaactgttaactctgttgtgtggacttctcaatgaatggccttgatgcggcacttatcgtcgtaggcctcggcaccatcgaagatcatgaggaaccctgttggcttggggaaatcatcagcggggacctcctgttctgttggttttgtcggttcctccggtcttgcctttttggcgggaggtttggagataaagcgctttaggagctcgcactcccagagcttgtgcctgatgggaaagccatggttttgacacagcgagtccatcagcttctggaaatggtcaccgccgttcttagccagtggccttggtggtcgacctacggtggcaacttcctcttcatcgcgccggggacggtggcgacgttcggcgcttatcggggtgctcccgacgctcccatttttctccactgggttcgccatcaccctgtgggtcctttcccttatggaaaatggctcccacggtgtcctccccgtcagtgaacttggt

SEQ ID NO: 171038 - DNA, 601 bp, Zea Mays
tcataatgctgaggtaacacgtcacggccccatggtctatggcgtataggtacctggtgagctgacacctcggtgcacgctagcaggcagatgtggcctagctcggcgccacagatcgtggcgccgaactaggcgatggctgattgaaacatgtgtgaggcatcatggagaagattgaaagggaaatggccttaaaccatttcttatattttggtgcttgatgaccatcacaaccattcggactaactagtttgcttagtctttgattcagaggttcataagattcaaaagttcagtttcttagacagaatcagctcagactcaaccaaataggggtaaaacatggaatagatgaactaccaataattctactctttggataagttcaaaataccccgaggaacgtattcaacacttctagaaaggttggtaactcaaaatcaatatatcgctattttggagctagtttgagcaaaagaagaaatataagtgaaagaatcaaaatgttcataatctatgacttacactagatggaaaaccacttgagatattttctaagtcataggatctctctcaagtttagtcaaagcaacttggagaa

SEQ ID NO: 171039 - DNA, 507 bp, Zea Mays
tagggacacaatgtgctgcttcaactcttgaaaggctcgttctgcctcttcggtccaagagaatggaccggacttccgcaatagcctgaagaagggtagcgccctctcagccagtcttgagatgaagcggctaagggcggccagtgaccccgtaagcttctgaacatccttgatgcgggccggaggtctcattgtcccaattgccttgatcttctctaggtttgcttcgatgccccgatgcgaaaccaggaatcccattaacttctctgcagagacaccaaagacgcacttgttcgggttcagcttcgtgcgtgttgcccgcagcttgtcaaagaccagggttaagtcttccaccagggtcgaccctctcttagtcttgaccacgatgtcatcaacgtaaacctccactctgtccctaatcaggtcaccaaaagtcttactcatcgcccgtacaaatgttggcaaggcgtttttcagatcgtaaggcattacaacataacagtaaag

SEQ ID NO: 171040 - DNA, 602 bp, Zea Mays
agcgtcctgatcaaaactggatactcgccggaggcgtcttcttttcttcttctgctcatcagcagaaggatcaggctgattggctcggcaagggcgcctcgggcgagtactgacaggcttctgaacatccaaagtcgtatcagcctctaggaggggcgccactaccaacgtcccagcaggagcagcgtcggatgaatcctcagctagcaaatcaagcatagcgcttatctctgcatcactagggttcaggggcacctcaaaatggacctgtcgttcgtcatcaggaatctccccaagcgaggcaaccaaagcaccaacttcttcagcagagggtcgtactctaaggcccaaactgccatcagtaataaagggtgaaagctttgggaggaggcagattccaggccgagtatgccaccggagcaccaacatttgacaccttgcccctgaggatcatttcaagtcggctcaccaagtctgcagaaggaattctcctgttggtaacccgagttgagtcggctagccctcgatacagataagctggataggccctgtctttcagtggctgaatacagatactgatgttgtcccccggccatcccagg

SEQ ID NO: 171041 - DNA, 408 bp, Zea Mays
aggagacaaaatagagaggcattatcaagtaggagtagggagacaaagaattcggtatatccaggtagttattgcgcaagggtggcaatacaatggcaagaaagcaaaagtataagaagtcaagggttatatagcaatattagggattagaaaaccacttgtaatataatataatatcgtccttaccgatctagtcgaaaacttaacactatagaactatcctatcaacctaaccaagaagaatggtaatagatccaagagatctataacgaaacttcttgcggggcggggataagatagagaatggggcatcttccatagcttataaagggttcctttcggtagacttcacttcaagttcctcaatcctaacttgatcatcttgtagtgcttctatgtagagtcttc

SEQ ID NO: 171042 - DNA, 848 bp, Zea Mays
cctaactgggccgcagaaaccctttttgacccaacttcgaatcacctgcgggcgcggcccaactccacgctcgcgggcgcggccgcatccactctgcaactgacctggtggacccgcgcgtcagtcgctgtttcacatccacgttgaatcggcctctcgctgctccgccgggcccacgcgtcagtcgctgctccctccccttcgtaacgaagtcgcgagatcctcgccgcgcggaccgcgcctacctcgcgcggggagctcttcggggacctcggagttgcgcaacggccgcgctcctacacgttttaatgaccgtgtttccgtcaccccgacacccttgaccgcctcccgttctctagaactcaaaagcgccaccgccgtggtagaactcagtccgccgcgtgccaagtgtcgctcgccgtcgatttgccctccgttgagcgtgcgggttcacctccgtgatcccttgaagccggcgcaagggtctcccgggcttgtcttcgtccctggagcactgaattgctcgtcggtgtcgaactggaccagggagccgcgccatcacgtcgtcggactcgtcctcgcgacgaaaggctggtatgaccgatctggcgagttcgcctccctctcccctttccctcggtgtagtttcgctcggtttaggttggtaggccaccgattcgccgactccggcgagggcgccaccgcggtctatgccgcgccaccgctctgtcgcgccgggggtagaagatggaccaggcgccgttcatctattgcgcgatggccgcgattagaagttgcataccggttcggtgggacctggtccgtgccacacgatcttgatccaacgc

SEQ ID NO: 171043 - DNA, 680 bp, Zea Mays
aaactgaaggcacgttcaaatctccaaaaaaaagaagagccaaattagcagactacacaagcaacatcgtctgtgggggagcagcgatactcaagcacgcgcggatctagttgtagatgtcgagggagaaggccacgttgaacgctcagcttggggcagcagagcgaatccttgtgcacgacgacgaagggcatctcggtcgcggattcgggatggaatcaccacctcctcgctggatctttgccaacagtcttcaaatccaccccgagattcccaccgggcaaggaatcgccctctgctgaaggtcacttcccggcctcagtcccaacttcatccctcggacgacctaagtcttctggaatgcaaacctaagtctttctggaatgcaggagatgaagaggtcgggggatcaagatgccaggaacgcgggagatgaagagggaaatgggacgacctaagtctttttggaatgcaaacctcagtcccaactggtcacgtcgaccaatctttcctctgccctcgatgtccactaccaccctattgtctaaataggaggaactatgggagagcaaactatttttactactaatagctatttggcaacttactaaacaaaagtttagatagcttttttcgagaaaactatcggagtttgctctaacatggtgttcccatctttc

SEQ ID NO: 171044 - DNA, 416 bp, Zea Mays
cactctctgggacagtggttttgggtattccaatcccaatttccactgcccggtcacaggtatgtggtctccctcttctccatcgtccttttcctttgccccgctcatcgattccagccagcacggagtgcttcatcgccagttagggggttgcccaagcttaattttccctcatttgatgggaccaatccaaaatcatggcagaccaaatgtgaaaaatattttgacatgtacgccactgatccagtcatgtgggtgaaggtttccaccatgcactttgagggtgtagcatcacgctggctccagtctgtagaaccacgcttaccttctatgtcttggcgtcagttctgtcagtgtgttcaggaacggttcggccgtgagcaacatgagattgttattcgccagttgttccacat

SEQ ID NO: 171045 - DNA, 291 bp, Zea Mays
cctttgctgcaggatccggtcgccttcttctctgttcagatgatatagcagcgacgcaacgagccaccgcactgcaaatgaacgctgaaaggaaagcagcggtacccgtagtaccatcacaacggcggattagtcacaggaagcaagccgatgaacacggcaaattcgattgggttcaagaaccggtttagttaccgagatctcgcccgtgtgtagatatcgcgccggcgccggcgccggtggccgcggaggtggcgagccggaaggaagcagaaccgaactcgatcgtcg

SEQ ID NO: 171046 - DNA, 433 bp, Zea Mays
gtttaaagtctggctgtcagaccaccctaaaggattgagtaaatgagttaggtctctatagtcgaattgtagctggactataggactacaactttgttaaagatggattagcaagttattacatggaattttgagaattgggcgctgcaatttgctctgtcagaacgactgaagcagttcttgttggtacagtagcaaaagatctgctggttcagtgaacctcgccgccggcgaccatgcgctcggattcacgccaggcgctgcgattcgtgcttaacggagtactgatagttgctcggggtagtaaatatcgccttgaggatgaacttaggccactgttcaacctcggccgccgtcgtctgactcacggccggttcagataagatcaccagagttggccgcctatcgaccgcgcgccacgtgcctaggtgcc

SEQ ID NO: 171047 - DNA, 601 bp, Zea Mays
tgagaatcttctttacgtgctcgccatcaccccctctaggcttatcaccgaccaattttaggttaggggcgtccgggcatcggattgcgcgaccgccggcgaagctccgccgtgggtgggcggcgctgctgtccacaccaccgtggggagggagaagatctctggatcgtgcatctgctgatggatggtcacgattagaatagggaaaggaagcgcaggggccgttaatcgatggttggacggcgcagattagatcccaggtgtcggttcggccagaagaaatccaagccgttgatcgatggatggaggggcgtgaggtgatcctggcgttttaaaatccagggcattgatctcagatcctagggctctggatgcgtaccccttcgtcatctaatcgggactcttgatctttgatcgagcggccagggcacatccgagttacaccaccttgacatttttccaatggagcccctcgtcttttgcgtaatcaacccgtcgtcctatcctagtataaagtaattgcggccgggcccctggtttttgcaaatcggcccctgtattcttagaaattgaaggtcgcggtcatgaaaatttataaaat

SEQ ID NO: 171048 - DNA, 674 bp, Zea Mays
gccgtctccggccgaggtcctcaccgtgcagggcgaccgcgccgctgcgcttgtggctttggaaaagctgcacgccctagctacagaagctgctcgcctagacgacggagggaggaacccctcgacctctggtaccaaggcgcctaccaaggtgccgaaggtgcggccatccggagcggatgacatccccgtcaaggccgtccagctcagcgcgggttcctcctagaccactcgcattgcgggtgatctggaggaaaaataggaactcgcgctcatcgccttcctctaggaaaacgccgacgtgttcgcatgggagccgtcgcagatgcctgggatcaccagggaggtgatcgagcaccatctaaagatcaaccctgacgctaggccggtaagtcagaagcctcgcggacagtccgtcgagcggcaggacttcatccgaaaggaggtccagaagctgctagacgtcggctttatcgaagaggtccatcacccagtgtggctggccaacacagtcatcgtcctcaaggcgaatgggaagctttgaatgtgcatcgactacaccagccttaacaaggcttgtcccaaagacccgtatccacttccgcgaatagatcaaatcgtggattccacctccgggtgcgaccttttgtctttcttagatgcttactctggtt

SEQ ID NO: 171049 - DNA, 814 bp, Zea Mays
ctggaacaagaaaaccagccgttccacttggtggagcagcgtaattgccgattttctgtaccagggagcatgttacagtttacattgaccgaaacggaccagaataacaagggcaacagaagagaacgccaacactctgtatcgaccgaagagcatttttctttagtactagtactattatattcagagaaagggttgagccgctgacagcataattggttggtgagtggcggcggaaacctacattttcagcaccaaccataagccgggacgccgggtatccggggtcacctaaattagttggaatcaacgcaaagagcaccatccctacatgacacagcacagctactacatttcgattagtaaaatttgcagggaggtccgaaaaaacgcactgattattcaaaaaaaaagcttctttaaaactcggtacaggttaacagcaactccaaaaggatgttaaaaattttaccctaaaaattgattattaagagtagacaaatattttaaaagtgaattatgatgggtactccaacagttctttaaatgtgacatgtggcgcaatctatatagtcgttgagaggctgtggatgatccgatacgttgagaatggattgaggatggatggaacacaccaaaatatgagggagagaaagctgtggatgcgagacgctaatttcttggaggaagaatgagagaactattggagtaagaaaaactattacttttgactaatatccgttttaaggttagtttacacgttcttttagagttgatttaacagaacaggacgtaagatcgagggacgctcagc

SEQ ID NO: 171050 - DNA, 764 bp, Zea Mays
tcccctctggatggatcgcggacggtccgcccacttggcccggacggtccgccagccccatgacttagcaacttttcaaacacgctttcaaaaagatttttaactctcgaaactggaagcgctgttagtcctcatgcaaatgcaaccactagatgctctatgaggcactaagttttacacagaccaaagtcattgacccctcttaatagtatgaccatctagcctgctaatccggtcaaatatcttctctaaacttctggagaccggcaaaaacaaaaacctatgttatacctttgccttcacttgatccacaaccaatgcttataagtctccaagattttctgttctatgtggtccaacctgcattcttatttctccaagaaccattagtctacaaatagttgtcattgattaccaaaacatcactaaggggcctagatgattcacaaccgtgcccttgactcgcttgaggaggtcgtcggtggtgagggcgtctgacgccatccgagaactcaccacagaggccttgagcgttatctcatcaagacacaggcgccgctccactagcggcagcaccctcctacaatggaaagcggcaatgacccaagccataataacccctcgattgtggagcttccgcaaggcatctaagagggctgcaactaagactgatgctcccgtggtgtgccccaccaccagtgttcctccacagcagtcatgacccgtttggtgtcagcctcccgtcaacattacagaggtaaaac

SEQ ID NO: 171051 - DNA, 488 bp, Zea Mays
ctcgttgccacaaaattgtcaatccgaggaattatcgacccaacatgagccaccattgaagcagcagaaggggaaccaactgcgacaccctcggggctgaaacacccttgggggctggagaaccctcgggggctaaagtgtcctccagggccaggagtggattggcggcaaggcttactaacacagaacccctaggggactagcaggcttacttcaggcttacccctgggggctggaacaccctcggtcagcaaaccagcagaacgtgcttcatccgagcgagctatgtggacatcgataacttcaattttaggcaactcaaggagcagctcctcatgaatggactcttcaagtatgccatcgacaaccgacatagacagaccttggatgtccaccatccttgttggggcaacaagacttgaagtatcaatccaagccttggagcaccattcgcgctgaaccaaaggaagcacctcttcctcctcctc

SEQ ID NO: 171052 - DNA, 721 bp, Zea Mays
tcgaaccctattatcctccacagttaaacacgtacggctgttgtgaccatcagctatgccacatttctggcacttcctgctcatcttcttaggtcctttcgcacccaatttaagaacttgttgctcactacttttgattgttcttcccttaggcttggccttatctggtcttgctaagcttacaccttccatatgaaactccagtttctacaaatcaaagatattaagtcagttttttatattcacgtatttcatcatatattgtagtaatgttattacctttctagcttccacatccgtagcactactatcaaccatctgaatatcagtgttatgttccaatgttaatatcggcatattacattgatcatcgttagcattgcattcatttgtattagaccccattaaaatttcctgtgaaataacgcaaactccagtgaatacacaaattttatagagcagcatatataatacattaaaaatttgtgctccatacctcgttcccatcatctaatttgcgtaaattgtctataactatgtcttctgtttcatacgcttcgacctatatcatcattacatacatggatcattatcgacatgtaattatgcaaaacttataataacacgatgtgcgtacctggatgtcatcgccagcacttgtgccacaactctcaccagtacctatatcaggctccacacgcatcaataaccctaataattc

SEQ ID NO: 171053 - DNA, 378 bp, Zea Mays
cagctgaaggtgtaaatttttcagagctggctccgatagagtgaaacacatccttcagccgttgcacgcatcggctaccgaaatttaggcatttctcctgaagctcctttaatgacttttgcagatttgaattcttttcgatctcagtcttgagacttgtttcgaggttgttctttttctgctcagatttttctgactttttgagtaattcattgtttaacctgtcatttttggcctagacctgagctttccatagaatgaataacgaagtctttcttttctaaggcagcttcgtgttctttagctatgatttcaaggtcttgaatgacgaagtccttcttcttcagagcagcttcgtaattttcaactttgtcttcc

SEQ ID NO: 171054 - DNA, 668 bp, Zea Mays
ggagggaggagggagggacgaccgtggggagctgcagggaaggagctcggctgggcgagcgtcgcgcggggaagagagtggcctgcgtgaagggagcagcggccatggcgaggtagagatccggtcgtctagggagagagaggagatggacgcgagatcgtggagaaggatgaggctgaggaaaacagtggcggatgaattttctagagacgcatacgtgcacaagataaggattagttggagatggacatgtagaggcaagaaaattcagattttcccttctctcttttctatacaaatatacacagataaatacaatttcagcaaataggattttgaagatgcattgggtgtgagacggcctccggcggcggtgattcttggggttcggagtccatgattattgggcggcggtggtcgttcccgagggaggcattgggtgtgtatggtgagaaggtgtcacgggatggaaacaaaatgatagcgatttgtatatatcatcaactcaaggtgatttcactatttactacatttttcatatacgtcttatcagactatcatgtgaagacggttccatatttataagtgtctagtatactcactaacatctatgacggttcttatagtctagacgactctaatagtattcttatttgagatggtttcat

SEQ ID NO: 171055 - DNA, 910 bp, Zea Mays
ccgtcggaaataagctctgaaccgtcggaagtagttacttccgacggcttaaggcaggtcccgtcggaagtatccgcgtttccgacggggccgtcggaagtaagtttatttccgacggccagcgtgggaccgtcggaaataaagtgaggtgggccccgcagacggccggccgccggcgcctgacgccgtcacagcttatttccgacggccccgtcggaaataagaggccgtcggaagtaattaaaaaacagagaaacagaatttgcctgctttttattttacaaacaatcacacaaattcaatcaatatccagtttccaataattcatccagaatcacatacaataccacaaatatccataattcatcgtttcacatgaaacacacaattaaattcacaaaatattcacccgtccacaaattaaagcacaagttcacaagttcacatgttcacaagttcacaagttcacaatagcacaagttcgttcacaataccacaagttcacaagtccatagtacgagaaaaacacaaggagacaagctactcaaatggaggaggttgatcaaatggatggggttgatttgatccgctagctcctccgctgtttagaagaccgtccacaaaagaagcgactgcatctttagagtcctcatttcccggagttagcaagtttcctggagggacctacaacattcaaaaaaatgtgttagtagttaaattcttgttatgcaacgtcaaaagaaaaagtcaagtaatataacctgaggtgcaggtgtgggccaactaaattgtggagtcggtacaaactgcgggataggtggaggagttggcatagtcatcgctgaaaaatctggacgttgtcctagtgctatttgctgaaagaaattgaaagctatgttacgaggatata

SEQ ID NO: 171056 - DNA, 544 bp, Zea Mays
cggatggtctggtctttcacaaaacagttcggactttaagaccgaacatctaccgtagcgtaaagacggtattacggataatcatatccccgagaccggaaagtccgccatcacacaaagatcatatgattcctctgtgggggacatgatagaggaattcagagatcttgataaactaggacaggggtttacatcggctgatcctttggaggagattgacataggagatggtaaaactccaaggctgacttttgtaaacaagaccctggagaccgatcctagaaatgagatgatcggtctattgaaggaatattcagattgctttgcttagaattacactgagatgcctcgattaagccgagagatcgtagagcattggctgcctattaagtccggtttcagacctttcaagcagaaagctagaacatttcgtccagatcttctcccacaaatcaaggacgaaatcaccggctgctagaagctaagtttattagaccttgcagatacgcagaatgggtctccaatgttgtgctggtagagaagg

SEQ ID NO: 171057 - DNA, 384 bp, Zea Mays
ggaagcatgggtatatatatatgtatagtcaccttatattgtgtagtatgaaagataggttagggcaagaatagcctggggtaagagacagtttatggtgagaagaactccgtattggatggtaatgcatctaaagattaagtttgacttctctcctttcttgacgaggttgagcttttccctcttgagctttggtgtcaccaagaggttaagatagatcagtaggtaatagttaggtagagggtttagtaggtagctatatgctagttgggattagctatgtaacccattatgtaggtcaagtggttcgtgtatggctgagttgatctaagtcaccaatttaggcgtaagtggattagtagcatggccttatccttgtaccgg

SEQ ID NO: 171058 - DNA, 689 bp, Zea Mays
gatttcatcgtaggattacccaagacatccaagggatgtgattctatttgggtgattgtggaccgttttaccaaggttgcacattttctaccagtaaagactagagatccagtggtttcttacaccaaattgtacattgcactcattctgagcttgcatggtgtgctaaagatgatcatctcagatcgtggtcctcagtttgtggccaaattctaggaaggattgcataaatctcttggtacaaagttaattcatagttcagcctatcatccccaaaccagcggacaaacggaaccggtgaatcagatcctggaagatacgttgcgagcatgtgtattagcctattctagaaaaagggatgagtgcttgccattggctgaattctcctataacaatagttaccaagagagtatcaagatggcaccttttgaggctctttatagtcagcggtgcagaactccattaaactgatcaggacatggtgagcggtttttctttgtccagatttagtaaaggaggcggaagagaaagtgcaacttatccaacagcgtttgaagatagcacaacatcaacaaacggtatgcagataatagaagacaacctttgtatttccaagtgggcgattttgtgtatctgaaagtttcatctatgaagggagtaactcgttttggcatcaagggaaagctggc

SEQ ID NO: 171059 - DNA, 342 bp, Zea Mays
gaaacctccttggcagggggctcagatacgtgatcgaaccctcggtcctagcctcggctctcagcagaaatcgggcgggcacaaatcaacagcaagtacaagacccacgttctaggacataccatctacaggggctcggctgtgcctcctcatcgtatgtggccaactccggtactcctgacagccctccttgaggctataaatagggcagcctatggcttcagggaggtgggctaatgcttcacggttttctcctccaccatgatattaacacttgcctaaatcaaccctagtgacttgggatcattccctctcccgctcaacttgtattccctactgcaa

SEQ ID NO: 171060 - DNA, 559 bp, Zea Mays
catgaaaccattgctaggtgattttgaggaccaaccaccaaaccactgcagatagtgcattccatatgcgtctccataacctagacatgtgtcttgctagttcttaaccgcatcggtaacatgatctgctctaccatgtccttgcatctgctaatgtccctaggtgcaagccatcatagttgatcacccgacttctccagtccctctgtcaagacccaatgctcgtccctcacttctctcgatctattggcacaaacctagatggccttcacctttgttgttgaccactgcctttaaactccacacttgtgcatcataatctacaagacatgttacacatactcacaccctggttagtccacatgacttaagacactactccgttgataattagtcaaaacaaacttgaaccacaatggcacatatcaaccttatattcacacattggaagctacatagttcacgctattgagtacaacacaattggtaggctatatggttggacatcctttacagtgcttatggtatgcctacagtcctagtatggcgatagtggttc

SEQ ID NO: 171061 - DNA, 458 bp, Zea Mays
gtgattgagggttttattcctcatatcatccaaaacggatgttgctgcctacaatatgctgatgataccattttccttatccaagattatttagaaggtgccagaaatcttaaattcattttgtgtttgtttgaaagcatgtcggggttgaaaataaactttcacaaaagtgaaattttgtgttttggaaaagctaaggaaattgactatttgtatgctggtatcttcacctgtcctattgcttgtctccctatgaaatatcttggtgtgccaattgataataagaagataaataaaagtctatgggttcccatgattgaaaaattgtaaaaaaggctcgctgggtggcagggtagatttttgagtctaggtggtaggataactcttttaaacagctgcttatccaatgttccgttatacaagctttcgatttatcctgcccctaagtcagttatcag

SEQ ID NO: 171062 - DNA, 704 bp, Zea Mays
gtcgtatgtttttcttatcatgaaatatgtttatacactcttgtttcctcgtttatggaactttcaaaggaggtgctgccaaaattttatgccagtttgttggaagtgtagctttagtgacacctctgggtgtttatggaccttagggtgttacagttggtatcagaggataggctgtagattctagcaagaaaatggtgataaattgacacactacacatataggatgggtttcttgccatcatattgctataacatgaattgtcaggggctcatttgttttagttgaagttgatgttgtgctattttattttgtcctgtggctgtagctatgccgcctagaagaggtcgtggcagttcgcaagatcataatggggattctatgagtccagcggcaatgttagccgcgatgcaggacatgcagcaggagttggccattctgaggcaagccattccaattgctcctattggtcctgctccgactactggtgctcaaggtgctggtattggaggtgttccaggggcaatgtccctgtgggtgctgctccaggtggtggggctaagatgccttttctagttagtggtctttctctggtgcagtggatgggcatgaagttggatacttttgacggcattgatactccagttgaggcggcagattggctaacttatgtggaagataagggatcatgttcgctttggca

SEQ ID NO: 171063 - DNA, 513 bp, Zea Mays
gtttgcttgtagtagatttcaaacaaagcctaacttctcttgcttttttcgaaacgacacgacctcacctttttacaaatttgttatcctagtaaatgttaagatgatatgccaaggttttagttctcgtaacaccagctgttatagttttgatgttttcttatgtccgtgaatctagttttcatccatcccaagcttcgacgtttatattcatggtgcatgtttctgatggcggttttctgttctacatctgttaagtgtgagatactcgattatgtgatgattattgattctttatttgaatccggaactccaaacaaatttcagaaatattagcagcacaggatcaatggttgaatttggctctgcagtgaaatgtattcaagcatcacaatattgtcttacgctatatttggaagttcaatgctcagagcacgccggcctgtgcacaaactaaaaacaccctacactttattatggccaattggccatgaaacacagaattagaaaaac

SEQ ID NO: 171064 - DNA, 903 bp, Zea Mays
ggtgcgaagatctcgccatcgaagaaagtagatgactaagccatcgaagtgaaagcatcgctttggcatgctaacagtccccctacctgtcgtgtcaactgtcgtggtttcgaaaaccggggacataatagaatttgtgttcggcgggggaggctagcgtggacttactccaaatgatgagtcaagagtggtgagtcaagagaccaaagcaggggtacatattggttcaggcttgcaccctagtctagtgtagtgctgatcgtagtattgctataaggaacatgttacaatgggtgcaagtgtgagaatgagaggaagtggataactcaggtcgaatgctcccctctctttggctgtttggtcatccccttttatagttcaaggggaggctcttacaaggggatttgttgtctgaagcaaggagcgtcgcattgtctatggcggtcctgcttacgaagttctcatgacgtcgtcttctggtacgcgagtagtcgtacgcccaatatggcggatcgctccatctacctggtatgcgggtcactctagggactctagcgtttaggcggcacccacgggacagagtcaggggatactgagggccgtacgtggcgatgcctcaacccgttgttagagactctctgtcacccctcagcgcatcgtggcatcatccaaggcggtgtgtggtggcgatgtgccttaccatggctggcgtggggtaacagtgcatgtcttgcctccatgtcaggcgagtattggagtgctcctacgcgcacgtgataggagggcatggcaccagggcccacatgtaccaaagagaaagtcaacgaaatgatataaaggacatgtcctcataaaaatccccggactggatggcttcacgaggcacttctataaatgttgttg

SEQ ID NO: 171065 - DNA, 320 bp, Zea Mays
agcgggtcacaagtaaattttaggaccccaacgcaatgatcttaacaacgcactggactgggggttagttcagctgaagtccaggagctcttttagaaaaccgccccaccgaagaggtaactttaagtctcggccgcccgatcaaaggccgatggcccagattagatccgccacaccccaacccggtaaacagtccaggccgtttgatcaaaagtggaaagcgcagattagatcggaccctccctgaaccggtacgtgatactgcgcacaggatcagagatcaacggtgtggcattaaataccagggactcagttccacc

SEQ ID NO: 171066 - DNA, 735 bp, Zea Mays
gcgatgcttatgcaatgtaactacgaggctttggatatctggggtgtgatcgatcccagcgacaatcgaaagcgggtacaagatcgtcaggcgatgagcgccttgctgcgttccgtgccgaaagagatgtggcaatctcttggtgggcggaagactgtgaaggaggcgtgggaggcgatgaagatgatgtgaatcggtaccgatcgggtaaaggaagttaatgcccaaagacttctccaagaatttgagaacatcaagtttaaagatggagaaacagtggaagatttcgggatgcgcctaaccaatctcgttaggaatcttcgcgttctcggagagcaagtagaagactcccgagtggtgaagaaattcctccgtgtggtgccctctcgttttactcaggtagtagtctccatcgagatgttttgtgatatgaaacagcgcatcgtggatgaactcatggggcgactacgtgcagtagaggatcagctagaagacaaggtcgaacagattgttgacaaagctggccgacttctacttgccgaggaggaatggctggagagaaacaaacatcgtatccgctccaacaacagcaaggagggaggtggtcatccagactgtgtcttcaagaacaaggcgacagcgcgtcctgacggtgagtccttggagtcacgaaaattgactttcgagggaacgccacagcgaaagggtctgtgccgcaactgtcgcatatacggc

SEQ ID NO: 171067 - DNA, 669 bp, Zea Mays
gccggattgcacaacggtcggtaccctaagttggtttacgccaaattcagactttggcgatctactgggacacactaattcaacccgaacaccactcaagggctcggttcacgcatactcgcagcgttggagacattcttaacgtgttcctaatgttctaacacagtatagcctaatcggccaggccgacaagcatcacaagcatgcgggagtactgaaacacggacaacgcggacgagagcggacctggaaatggctgaccacggcgtgaggtcacacgacgacgcgaaaaaccaatttgggggtaatcgcgaattgaggagctacgatggacgatcagaggcgagggatggtgcactgggcacgtaacaacctagcggagctagctagacgctcaatttatagagatcaacaacagtggcatccaatttggggaagacacgctggcggtcggtgggaggaataagttactggcgcgagttaccatggcggtcatcggctaatgagctacggtggtcactggttactctccacgacacgcgacgacgtggtaaaacatcataaggtgtggcgcgaccgagtgaacggcagcagccacagcaacggccgcacaaccacgtcgccggcaagtgggtacagcgacagggcggttacggtaccccaaactca

SEQ ID NO: 171068 - DNA, 430 bp, Zea Mays
atttcttgtaactcgagtcaaagtatccaaaatcttgatcgggtactccgtgtaagtcaaatcaccttgaacactgagctcttccattggtaactgttcctcgggaacacggagacactttcttcagttgggatacgtggaacacattatgcacatctgatagagtaacagttaactcgagttggtatgacatctccccaactcgcctaaagatcaagaatggtccaatataacgaggggacaatttgcccttaactttgaatctcctcattccacgaagtggtgacaccttgaggtacacataatctccttcttcaaatttcaggggtcttcttctattatcagcatagctcttttgccttgtttgagccaccctcaaattctcccaaattagacgaacttgttcttctgcttcttgaatcagttcagg

SEQ ID NO: 171069 - DNA, 661 bp, Zea Mays
ccaggcccgacctcgcgctcttcctcgtcgtccatggtcgacttgatggagtcatagttcgcgctatgcagagtgaggttgtagaggcgacgtggttgttgtatgggtggtttcgtcacgcggtagcaggggagctggaggaggaggccgtggactcgtggagacagatgggggagacgacgcgcggggtggcgggagtcccctgaggcgctgactcgaggagagcggttgcttcgatagtgggccttggtctgggacacaacaagcagatgggcctcccagatgcgtgtacttcgtatttgcaagctaaacttagtaccacatcagccactaaattgtgcacacacctgtttataagttccagtgcagatacaacttgtgtagtcttggatagttatggttgtgacctacacagctagcttttatggtaaaatttggtcatatgcgcgaagcacatgtttgagaatgagaaatgggaaacgaagaagaggcaggtgtgggaatgggaaacggagaagaggccacagtcgttggacccacctgtcagatgtacgcgtgagacccacctgccagagcggcgcacaggtgtgggaatgggaaacagagaaagatgccacagttgttggacccacctgtcaaatctacgaccagggtgttggat

SEQ ID NO: 171070 - DNA, 321 bp, Zea Mays
catctacttcccctgagcaattcgatggaatcccggtcaacgtgcgtcattgagcagggccccagttgacgttttctttcccctcttcgggtgggccttgtgctcctcatacttgagacccatctagctaaatatgcaattacgtgaaatgtggcctctgcgcagagcaacacccttctcaacttcaacctccatcacaagaccaacaaggtcctccgcctccttttcgatctcagcaacaaaaagatctcgagaacaatcgcccaactcgaccgcggatgcgggactctaaatctgcttgtcaaacccttcgaagtttct

SEQ ID NO: 171071 - DNA, 916 bp, Zea Mays
tatttctatccacccaatccaactttcgcagctttcctcgcgcacggctgctgctctgcctctgcctctgctcgcgctcatgtgtgctctgcggaaaagcccagcccggttttgcttgctgctgctgcccagttctggtggagggggaatcagggaaaggcaggcgcagcgcagcagccaggacaaaagctaggatctagcaacgcgcaggcagctgagctgctcagtctgctgcgccgtgcccagctcagctcagctcagctcgctgatccatccaggccaggggaatgtgccgccaaaagctatattacccgtccggcccccgtcatcgcgtcaggtgggggtggcgacgagagctacgacccggcatctcggcgcggcagtggacggacccggacccccacaagcatctggtgcgcctgacgctgacgcccctcagatccgctctgctagcctaaaccatactacatactagcggcttgccttggcagtcgcggccaatcattcccaccccgagcctacacggactatttaaaagcatcatgcgtttacatttttgctcatctactagcgttgtagtaggtagcatcagcgcgcggacagggaagctgcggccacaatctaccagtagcgttagcttagcggggcagcagccacttgtggagccatccccccggtttttttttgttagcgaaccatgtgcatctaaaacgggcgagatctccccccgtccggacgattattggagcacctaacgtagtgacactagatgggcctggttcggtaatgacgcaatcaagctaatgctttgcaaatggcatgacgaaccagaccaggttgcggatcctcccaaagttgttcaagcctttatgccgctttgtgattgaaaacagaaaactctgccccctgcgcgctg

SEQ ID NO: 171072 - DNA, 474 bp, Zea Mays
tatcggcaagaaatgagctgacttggtcaatctgtccacaatgacccaaatggaatcatggtgctgggaggtattgggcaaacccacgataaagtccatgcaaatgtcctcccatttccaagatggtatgggaaggggttgcaaagggcctgctgtcttcaaatgactggccttgatcctctggcaggtgtcacattcggatatgtacttggcaatttctctcttcattctggtccaccagtacaaggatctgagatcatgatatatcttattactgcccgggtgcatggagaattttgaaaggtgagcctcatccaatatcttctttctgagctcagggtccttgggaacaaccaatcgatcttcgaaccataagattcctttgctgtcctgccggaagcatttgtatttttctgctttctgcttgatcatttccttgataacctgaacacccttgtcttcaatttgtgccct

SEQ ID NO: 171073 - DNA, 314 bp, Zea Mays
gcgttccagacggaattgccaacacagcatcaacatctgagaggatccttagacggaaccgtgtcagcagctgccacgtctgagggggagggaggaagccagtgacaggattgggagctccaaccccttccaaagtcaggacgttcttgagcctttgacgagagtaaactttcagttgcttcgccttcacaggtgaagtaaggaccttgtcatcagtcttctctatcagcctaggagacaaggtccccccatcggattccaatgttctcattagatctgatactgccatctccgagctaatgttccgctgctgc

SEQ ID NO: 171074 - DNA, 1046 bp, Zea Mays
cggggctgcctaggccgtcagattagattcggacggccacgagcagatctaaccagtatcgtatcggagccgcagctggttagatcgacgggctagatgacatggcctgggatctaatcgtgtcccatagattctgatcggaccagctcccatggttttggctgagttgctatgcttgagtcgatcctgatcgcatgttgtcgatccgacggcccaaaaatcatcactccgacccaatacacctcacggcggcgcagcaatcctccatggcggagagatggccggaggtcggcgaagctacgcaaacgagccctaaatcctaatccacggtgtgcgatatgtaataaagggcatggcgaacacgggaaaagggttcctcaccgagatatgcgcagcccaggtcccccgcccgcggtgcagtgcggtccagcggcggagatcgggcaccgacgaggaattccgggctgacagaaacgtaatccgtccaaatgaagtcgcggacgtgatccgcgagacttgatgaagcccccagacccaacaccgaagccctgacgatgatgaactcgtggatctaagccggtggccctttggtggcggcaacacacaccgttgttggaggcagggccgtcaggcgaagaagcgtgtgtccgatgcgaggcgcaggttcagtgctccactccctcttcccttctccggccgcgggtggagctcatgcttgcttctagcagcgcccacgaagaactccaggtggacggtgggttttatagaggcgagccgtatgacgttccttgagatggcgcggtttggccagctccagaatccagggcgcgttttgctgccgattcaaaccacccgagctacgattctttgatcccattggttctacgcctagcgaagattgagacgagtctataggggaggatttcgcagagggtttctcaccgtgagtcgtgcacaccgaggctcggtccccgtcggggttgcggcatcgcggcaagaaattccccatggtccgaggctgcccctgtcaaattggggtcacgcac

SEQ ID NO: 171075 - DNA, 559 bp, Zea Mays
gcgggaggatggcccaaacggttgaaaaccgaagaaccagcccggacagcatgccgagcaccaccaggcggcctggcaaggttccgaatcggaacagcattggcaccggtgagagggagcttaaccacgtccgcatacgacggagaattcctgacccggaccgtcgaccaggaggcaacttcctcatccaaaaaagcctgaattcatgcttccaattgggtccaccacgattccagaggttgaagaaagctttgaactccttacgctcaatggagcccaagttataaatgtgaaaacccaccgccatcgaggaaaccgaaaaccgaaaaacgcggtcagccagctgaagcacttcgaaatccttggcgagcccaccaagagcagcctggagaagatgaccgaccgagaccgaattcaacttgaagatgcatctgccaaaggacaccaccagccagaagggcgaccgcaaacaggggcaagcagggcaaaccgaggcttccaaggaatcccagagggattccgcgaaggccaagcctggccgaaagtccaggagggagaa

SEQ ID NO: 171076 - DNA, 851 bp, Zea Mays
atgagcatatgtcttgtagaattcttcaactgcctctagagaatcaaatgacatgccaacagtaggcttcaatccctcattgcaatcaggtacaaatgatgtaatctgcaaaatcaatcgttaatatatcaatatagatatctagttcatcttgaacaacaacttaaaacaatgtaaaattctcaccggtgatgctgttcttatactttttgggggtgttctaaattgatcagcactgtaataaggatcagagttgtttagaaccatggtgttgttgcctgcgatatccatgtttggctgcaacatttgcatgccggtgtctatgctccccgcaacgcctgttggatgtgtatccaatgcggtcagtagagccatgaagccgccgccgtacccaactggcgaggtcgcatccatggtcgtgcagaatctacatcgcgatcagagttattttttttcttttttctttgttttttgagcaagaaaccaagaaacagcactaaaaactcataccaaaaccacagcaagaacagagacagagaatgcagtgaaggaattggaacgggcagcaagcaaagggtaagggatgcacattcaccgtacgtacgtacctttgttccagctgtattcgttctctgagaaggcccccgtgtactcggtgacgatgtcgtactggcggctgcgttcaatcacctaggtcaatgaacgaagtggaagcggcggccagaatacatgggcgcgacagccagaatacgatggggcggcggccagaaataaggatcagagtcgtttctggcgtacagggagcttgagggggttttcgttaaagattcagggagctttaggggaggtgg

SEQ ID NO: 171077 - DNA, 641 bp, Zea Mays
cgcagcgtcgcaggagaacatgagcgataggaccgtggtcccgtcaactttcaccaactacgatgacgcataactgagtaaaacgactactattcccccacgccgcctaccaactcctgatgaaacacgcatacgacaaagcgcgggcttgacctcaggaggaaactacgcctcgcccgaagccagcctcaacctcggaacaaactccgcctcacccaagcctgaccttggctacctgctccccgtgaatcccgcaggaggccactccttcaattgtgtcatgcatgtctaagaatcctagagcgggctcggtcacggcctcgagcagacttctacctcgcccgagcacaacttcggcctcgataatatcaacgaagggcgcccgatatcaccggaaacagcgaagctgacgtattacccaggggctttttgccatattcagcactgcaccaaccactatggcatgggcaacttcctcatcaggtagctcaggtacgtaaccgatcccttagtcctggtctcggctctctacgtagttaaagatgcaaatacacgaactagacgtctccaccgggcacaaatcaataacgggtacaaaggccataccggctacagggctcggctatgcctcaacaccatac

SEQ ID NO: 171078 - DNA, 688 bp, Zea Mays
cacccatcgtgggtgatcagtgagtgaggtggtgagatcgaaagctgatcgatcgattgattccgatcgatctcgcgtccatgtcccgccgacgcgcgcggccccgcccttcgcaggctcctcagctcgcaccagctagctagccgccggcgagtcccttggttcatctcgggggtcggtgtggtcactcatttccaaaagctcgctcgctcgctcgctcttcctctcctcatcacgagtcttttgaaaactatactactacttgcatggatcggcgcgtactgtgcatcaggatcatgctcgcgtagacgccttggcccattccatggccgtatgtccctaccctctcgtacgtacgtcccatgtgcattacctccctccccccaacttggttctgccgggggcaccacgtactccgactgtgcaactctgagatcgcactctgttgatctgttccggcggtcaggcatgctggtcttcttggttccaaagatgcggcggtctagacgtccactactcctgttgctcccaaactggtcgtcctcctcttcgttctcacacccctttctcgtttgcgtctttttgggctgacgctgtcccttttcgaacctcgagtcccccaaacaaatctctctccgtctctcgctcttcacgctactcccaaactctagtaatataatatttttga

SEQ ID NO: 171079 - DNA, 359 bp, Zea Mays
aaactaccacttcatcagcttcgggcagagggacattattttcccctccagccctcacaattgagatatcacgaaagtacctccccctcatcgcatcaatctgcccttgcttaatagttgacttcccgaagacaacatggcttggtctccagggccaatcttcggcatcttcattcccactttctacatcgaaactttcactatcgctggagttcacagatatcccagccaacatctcgtttgcaatcttctctgcgttggttttctccatagcttcataaaacccggacaacgtcggatcaacaatcttcttctcgtcagccatcaagtcaatggttgttgaaatgccgaagcctgaa

SEQ ID NO: 171080 - DNA, 797 bp, Zea Mays
ttggcaccttgaagtgattccatgcgacgatcgcacaaaactttctatatttcttgagtcgtgcgatgtattttcctcaaagtagttttcgccaaggtaatggtgtttgctaaaactcaagcctctcatattcaaaagctattttgaaaaccaaatcctttggataatatgtgagttcaactggtgaggtttggggtcagagatcctccctattcaaaagcagttgaacctgccctcagtgccagttcaacttgacttgagctgaggagctctctactcaaaaccggttcaaccggcccctcagacggttcaaccgggatttactccctcgacctctctggtcaaaaccaattgaactggccctgtgggtggttcaaccgaggttaaggtcagatgaccgttctgacctctactagatagtcttactagcagactgactaccagacagttgaaccggccttaggggcttcaaccggttttggcacttcacttggagtaaaacaatgccttttgaactgatttttgcctatggtcaaaaccagttctactggtcttggagaaggttcaaccttcctccacacataaagtttcaaaccttggcaccttttgatgagactctataaatacccatcatacctctctcctcatttactctagctactcccttgcattcaaagccaacctaacttgagacaaagctcactctctctctctctctcccaaatcactgttaaatcacttgattcaagagaccttggtgtgaggtttgtgctcatgactttcacatttgattttcc

SEQ ID NO: 171081 - DNA, 473 bp, Zea Mays
ccactcaaatccatcaaatttaggctcttatgaacatttccaatactttttgagataacactcaatttggcctcaccacacccatataccctaatcccatggttaagtaccctactttagggttaagaagcacttcaagtcaccacatcacacttgttttgaagtttttgcctagtggatgcattctaggtgtaacaaacataatgacatgtcaatgcatatgatgtcatgctcaaattttagttgtggtaacaccaggggtgttacaatagttgtgcctcgatggccttccatgtgattatccaacatgtgtgattaggtggagtcgcactagcgctagatgaggttggttcattgcgaagccaatgtttgttgataatcttcactgatgttttctcgagtctccatcttatttcttggacttagagtctatgactaactgcatgtcgatcatggtgttgttcgacatccac

SEQ ID NO: 171082 - DNA, 780 bp, Zea Mays
agaagggtatacaagtcacgattaatgcactaaaatcgattttggcactccgccggggaataaccgtaagaacccctcacaatcaccaccggtgtggcctcgaaaaatcaccaatcgagcttaacaccaccttgctgcctccaagccgtctaggtggcggcaaccaccaagagtaacaagaaaactagcagcaaatcgatcactaagtgcctctagatgctatcactcaagcaaatgcactaaggatcactcccaactcacttgagatgcacaatcaagcaataggatgagtggtagggtgttgctcaagctcacaagaatgttatgtcaatgaaaatgatcaagagagggagcaagagcaggccaaacgacttaaatagcctccaaggggtaactagccattttctgtttcagggcaaccggaccaaggtcggttgccaaccggaccatcaagcctcggtccggttgctctccgtcagcttctctgagctcaccacgtatgcttgaccgttacctctgcgcgcgaaaaccaaccggactcagggtccggatgcaaccagactaatcagccctggtctcgttgctccccttcaactccacgcgctctgtgcaaacaaccggacgatcaaccggacttagcacagtaaccagccggaccaacaaagactagagtccgactgggtccagagaggttccagaggactaaaaatcaaccggactaacaaccagggtccagttgctcctttgaatttttcccgcgcacacgtacaccaaccggac

SEQ ID NO: 171083 - DNA, 574 bp, Zea Mays
gttttgatattttctcgtttgattcagatccgaggatacatacaaatattatcgagttgtgtcagatacaaattagaattgacattcaactttgaatataccgatataaactggatacggatacagaatagccagactcgaaaacgaattggattccagtttttttctagacgaatcgaactcgaacacagaccaataacatccataccatttacacccggatatcttgcacgtctctagacttccagttcatacgtgtcttggtccactactttggagcgctctgccgcgttcagggaataccgacaaggggtgcaggcatgcatgtctgaatttgaggcagcaccggtgcactgatccaatagtagtcatggcgccaaggagtcagccacacaatggttctgctggtgaaggttcggcgcgtaaggacacgacatgacacgatccatccattccgaaagggacaggcagatcgttaccaccaccagagattggagcccgtggccatgtcgcagttgcttgccgttgacaaaccgggcagaagcatagggtggtgttggtgtctggttcccgg

SEQ ID NO: 171084 - DNA, 686 bp, Zea Mays
gccttaagtcgttgccgacttaagccgattgcttcgttagtagggcatagtggtcaccccgagttaagtaagaaagcaagtcaatcgtgaacaaactgagtatctttgaaaccccttttttattgatggcatatttccactttacagaatacatcgtcgtcctgatagcttctaaaatacagctagggataaaacttcctgaggtgttctatgttccaggagttcccgacttctgtgctatccatctgagtgagacgatatgatcctggccgagtgacttctgctactatgaagggtccttcccataaaggcgataacttgtgtcgtccttcccccgttagaattcggcggaggacgagatctcctactgaaaaggatcgctgtcgcacagccttgtcgtgatagcgccttagagtctgctggtaccgtgctgattggattaccgcattcagccgttcttcttcaagtatatcgatgtcctccagcctagtggcctcgacttctgctatgttttcgaagatcaaccttggcgccccaaacttgagatcggcgagtagcactgcctctgacccatagaccatgaagaaaggagtgtttccatgcagagctcggctaggttgggttcttaggctccaaacaacatagggcaattcccttatccacttccctgcaaatttttcattctt

SEQ ID NO: 171085 - DNA, 370 bp, Zea Mays
agctacaactataaatttggcaacattgtactaccattgcttagtgacaacctcgctagcttccgctgcaagggggttgcgaaggattacttcggttgcatcgagtgaaccaagcccacttctagcaccgaaattgaggcatcgatggacatggcatgacagaggatatagggaggacccctcaagttgagtggactcctccttatgagcttagggcgaagccagtggagtggcatgtcatgcatggtcatgatctttacgtgctagtagagacacatgatgcaatgctccttgagggtggtgtttcattggagggacacgagaagagtcaaactctgtcgatgtagtgttgtgtgcgccaaatgtcgtg

SEQ ID NO: 171086 - DNA, 291 bp, Zea Mays
aatataaggctgggcgcagtgaggtactgggaagctctccctaaagctttagagtgaggtatagggtaacccgaatgctgcagcggtgtgctctaaacctcaccgtatggtagggtgaacgttctctcacctcagctatggagttgctgtcgtggctcccctaccgcttctctttcttcacgtggcaggccaggtcaccgtatggtagagagagtgtggagaacaaagagaagggtagttggtatagggtggaaatatagggtagagatgagtgcggaggattgtagtata

SEQ ID NO: 171087 - DNA, 329 bp, Zea Mays
gacaagtgtttgaattgggattgggctgcatagtggtttgtactttgtaggctattacttgttaggacctccaaggatcgtgtttctgtccatgtatcggtggctgttggtcccgtcttgttggctagtaggataattgacttgagttaatgtcatggatttgcagcatgccagcatgcttgagtcttgctctgctacataggcagttgatagcaatcttgggtctgggaggtggtaatgtaaagctgaaaataaaagggggatggattattttgtatggttgatctggcctgggttcaggattatgatgacattttaaccggctcaga

SEQ ID NO: 171088 - DNA, 358 bp, Zea Mays
ctcatgtcttatggacaccatatattaaaggtcagcccccttcattgggatgaacagtatttcccaatcctacctctctacatggtgtcagcgaccgagatccatctctcccgagaccttccttccgctgccccacccactccaagccaccaccaacctcccaggcggtgctgaacctacttcgcagcctcaatcttctccaacattgccgacgacatcgccacgcaggcatgggacatgctgtctgtgaaggaacttcgcctcgtaaacgagcagaaaatcatcaacttcatcgcactcctcgtcgggactgcctcgtcctgtaccagcccgggcgagtgtcgctccacttctgccc

SEQ ID NO: 171089 - DNA, 1005 bp, Zea Mays
tgacagtgtctagcacgctagccattctccttctcttgggagttgtggcaggagcctttgtcaccttcggcaattctgcctctatcaatgggctcataatttttggcatcatcactgtttcttccaattctggctctctggccgcatcatccttggcttcggctggcctgactataggcaccttcggcactacaatagatccttcagcgctccgagtggcgggagaagcttgttttgcttcggcagtggaggaggtctattcaccaaattcaggcactacggtcgtttcaatatatcgaggccggtgggtcaaaacctttattttcttgcccttcggcacaacagtggtggctgaagcggcagttttcctcttttttctttccttctcaaggggtagcagtaatcaggatatatgaagccaattgcatcaaaaaccttgttcaatcttttcttgccccgaccccaaaggctgaggacaaggcatcatcttcggccctggtatatgtcccaagcaactcgtcgctagtagcctcaatgcatttcaaccagtcatcatttggttcgtcaaacctctctctgtatctgaaggtatatttcaatcgaactaatccaccttcgctggattcagcagtagtctccttcggcatctcccagctatccacaagtggccacactctgtaggctatgtgctcttgaattatgtcccttgcgccaatgaaagcacagacattgctaaaagtcttctgacacgcttcagcatcactttcaataaccaccttcggccttcggaggcctaagcgagaccagatggggcgctcgataatttccttaatatcctccctctcaatcagattattcttaacataaaatcattcctccatccaggccccgggccatctttttcggtatgttggaaccgggtagcttgcattagagcgagcaatgaatccgtaacaaccgaagttgttgtgatactgctctttgtcggtggccttcgtctcgtac

SEQ ID NO: 171090 - DNA, 792 bp, Zea Mays
gcaaaatcacaaagttaaataaactagagcaaactcacaactagatttcaaaacaggagtgaaaacacaagaacccttgcagtaaaagcccattcatgccaacctgagtaataccatatgatctgcatttaacacattttcttgcatttgcatctgttgatgttctcggtgctagactgctagtaaattctaagatcatcgatgcttcatatgcatgcatgaatgggaataactactaaccttccaatgttaatcactcaatgaaagtaaactattattatttactatgtcataaataatttctacattatttgcacattaatctggatactggaaaattgacattgacacgaggaattatcccctcctgtttctcgtcttttgcatgatgtcattgtgtggttttcagatgtagaatatattgtttgactgcgtatcagtttgtatactctgtgaattatgctcattatgacagagatataccaaatttctgctggttacgtgcaggcaatagggaagccagtgaataatgttaaaatggcaacactggtgtgaaacttatttgtctatgtgtgggaacctctgtatttagtgagtgaagcatctttattctctctctatgcagtgttgttgcattcgtcacagatgagtcttcagttacatgctagggaaatttcgctatgggatgttaaacaaacatgatactgtattggtcagttcacactgctattaccgaaatttgctaggttccattatgaaatcatgtttatttgtcgtaggacactgcaacgg

SEQ ID NO: 171091 - DNA, 744 bp, Zea Mays
tttctcttttttatttcccttgacgaggataagttagaatttaaattttgatatattggtagagcagataataaaatatctatatctatggtttttttagatttttcatgacttttggtagtttaattgcacaggaagcttgattgcacaacgaattttcccagcagttttttcccgtcttgattgctagttttactattaagtacagcttctgaacaaaatgctacgctagaaacatgtagcctaactgtaagagtgccatcacaggcagccttgtgtactgctgtaattctgcaatgccttttgacattgggggtttcctttttttgtgaaggcttgctatcatgaatcatacacggcttgtacgtcctaccatttcatggtggttgggttagaactctctgtgatggactgcaagtttttttttcttgtcgttttgtggcctaatcatacgcaatagcgtagttgggatctatcgattaaaaccagtccttggccatctggtggaggctgttgaatagctgcggtaccagatgtcgttgtcgacttcgccacactaccagcgtaatgactgaatgccgctggaggtgtattagtttatatttatacattaattcgtgtctgatttaaaccctaccctgcttcctcttaagaaaacacgcattgctgttctacacagtgacggagctagtaattttttcaggagggattaaactaagctgctatagtatataagactcttct

SEQ ID NO: 171092 - DNA, 512 bp, Zea Mays
ccggtgctctaacttggctgacacctaattcaacacctaataatcgtttcccctcgctcaattgcacaatccgagctcctaatcacgctgtccacggtgacagcgcaggctacggatgaacggaagtgttctcgatgatctagcgcggtctagcttaattgaacgggttgaggagcatcaggagaacataagggcactaaaacgggagagcagagagcatgcacagacctgaaacgagctagccacagcgaagttacttcgcgcggtgtttcggaccaatttgggggaaattccaaattggggctatctggtgagtaattagaggcacgagcgggtggattggatgcttgactaccttgcggaaccgacggcatgctcaatttataggccccccgagtggtggcccgtgaatttgagatgtcgtggtggcggtcggagagaagggggtgcactggcgcaagcaattggtggctttcaccatggcgagctcaccgacgatcaccggatatgca

SEQ ID NO: 171093 - DNA, 826 bp, Zea Mays
aggagaggagcttgagcggtggagaagataagagaaaaattcagatttttccttctccaatctttaaccaaaagaatacccaaataagtgaaaaaatctgggatttgaatccgggcgagatgcaaacagacccatcaaaacaatataaattttaatatttttggactacgctaacactgttaggtattttcgggatcaggcaaattttcacagttgtagacagtggaacagattaattacgagtactcatttcggttctagttatctcggtccgatttaatttttcagcacttctatcgtgaagttctagtaatatttacttgggcaaaaatacaagagtggatcgggattccaaattcatgttctcttaatccataaattctaaacaaacaccaggctcgacatttcgcgaaataaatacgcgagatcgatccggcatcgaaattgtgatcccttcggaagcgaagtcacacatcgttcacgtgggcgagaggctgtgcgctgtctagacaccgcttaacaccagccacgcgccacgatgccaggccacagagagacacgggcaacataagcgtgaaaggatttcaaatgaagtttaagaaaccagatccgatttccagaattaaagtttgggcaagacgttgatggcttaacccaaacgatactggagtcgatgttccgaaattactaaagtctgaattttgcaaaataaattaggacaatttagacagatggagacagacacgatatcaaaatcgtgatagacgaggatgattaaaatttagtgacctttacattcacagctatcacgtgttaacgtccgcac

SEQ ID NO: 171094 - DNA, 682 bp, Zea Mays
cgcgtgtgtcggctagatcacccggatacttgaaacagaactccaactctatcagatccgtgagcgtctgctttttatcttgttcttgcttgttctcgattgcttgcaggttcaaggctgttcttggcatggcaagagcagcaacaacaggagccggtgtaactatcgctaaggcgcagcacccttgtggttgttgtagttggatagcacaacgtcgacctccaccccaaatcgtagttatcaggagacggtgtacctatcgctcaaggcgccacaccatcttggttctggtagtcgggtagccaacgtcgttctccaacaagttttccacctccatcatctctcatcgaaagatcgggcacccttctacccgttgggtttatcaagtggtatcaaattttaggttgctcggtgagagaactcaatcttccttgttttatttacctacagtccacttttgcccaaagatatatttagatcagaaattcacctaaaaacagtttgagcctttgctttactacttagtttttgacttgttgaattcatggttgctgcatttgtgtcgagttgctggtctaaagttttcttaccgctagagttttgagttcgcgccaccttgtttcaatcaccagtttagacctcttgctgcaattcaaccaaaaagaagagaaagcaaaaggcg

SEQ ID NO: 171095 - DNA, 934 bp, Zea Mays
cgcctgcaatgatattcttggttgcatccaatatccgcctgagaccatatccacgggtagaaattcatatccatgaccacgtccattgggtttcagatggatttctgctgtcgtacattatagagacaatcattttcaacaatttaatagcacaatcaatcagatttcttcccaattcaccatcatacacaattaaaacttaataaaagaatttacaaatagacatgtcttttaacaagcaatattctcaacatgaccaaatggaaggggcgtcggactagaaggggtggggagttgaggaccgctagggaagtggcggaggaggctctacagcaccggactagaagcacgaaggggcgacgatggcatgggctaaagaggcaggggcgactgagcgggcagatggcataagcaagaaggggcagccacgatgctagaaggggtggtgacagtgtggattgaagagccaggagcggtagggttggtggatggcgtaggattaaggcccaagcaagaaggggcagccacgtgcacaaaaaggggtgacctgcaagacacgggttgtggccaagggcattggagcctaaaagggtagacatcggtcagccgccagcggtgcaggtgttgtggcatgtgagacttggaaggggcatagggtgcaatgcaggaagccagcaaggttattagtggtgtccagcagtgggaaattaggaggcattaagcgtgaggttcagggagtttgagttttctctttgttgtgtaatatgggctagatcaaaacaataatctattggcctattttggatatctaataggcaacccacaggtggaaggtaatatcctaatccgtgcccgcccgatttcgggtcagacagagttggacccatgggtcaaaacttgtatccatgtccgcctctatcggatcggatatccg

SEQ ID NO: 171096 - DNA, 541 bp, Zea Mays
ggtttctgtaggtaatttaaattatatctcggtagagcccacatttcaagagcaaatagttagggcacagattgaagacaagggtgttcaggtgatcaaggaaatgatcaagcaaaaagcagaaaaatacaaatgcttccgtcaggacatcaaaggaattctatggtttggagaacgattggtcgttcccaaggaccctgagctcagaaagaagatattggatgaagctcacctttcaaaattctccatgcaccccgacagcaataagatgtatcatgatctcagatccttatactggtggaccagaatgaagagggaaattgccaagtacatatccgagtgcgacacctgccagagaatcaaggccagtcatttgaaggcagcaggccctttgcaaccccttcccataccatcttggaaatgggaggacatttgcatggactttatcatgggattgcccaatacctcccgacaccatgattccatttgggtcattgtggacagattaaccaagtcagctcatttcttgctagtacacacc

SEQ ID NO: 171097 - DNA, 339 bp, Zea Mays
attttttattgccataaatatatgaccaaaaatatggatttgagtgcataggaaggtgctaccactgtaatatcccaaaaaaatgttgaccaaaagttgatcttcggtgcgtggatgtggggaaatggttgtgggccattggaagtttggagtccgcagatgtgaagatctcatttaaacgatatcatttgagtattcatttgtctgaatcggggcttggatgggggatttggttgtgagccgtcggtttcgcatcaagggcatcgggggcatcgctccctcatcttctcaaaaaccctagccgcccctccccttccctcatagcagcagccgcccccc

SEQ ID NO: 171098 - DNA, 317 bp, Zea Mays
ccctccggccgccagcacaacctgctcaaattaatcgccgccgctgtcgctccctataaattgagccccccaccagttccgtaaggtcctaagctaaccagccaccgctaatcggccacaatcattcactcgtgtgctcgaattcggagtttcccccaaatccgatttccgccaccgtgaaaccaagctcaccgtcgccagccatactctggttagtccctcccctctgctcccttgtttaagcattctcgtgcatctacgatgcttgccgagccattgaattgaactaagggctctccggtcgccgggaacgcgac

SEQ ID NO: 171099 - DNA, 984 bp, Zea Mays
gattaacagtagatgataggggttagcacgtaaaaaggaccttcatctacctttcacgtgcagggaggggttaacgtaggaggagcaggggacgataatggcggggtcgatgaattcggcgtggttgatggtgacgagcagtacgtgtggatcgacgacgagcagagtggggaactccggtgatgtctagcaagcgaaattccggtggcgccggggcatagaagctgacggtgcgtggacgaatagggaacggatgacgatgacgttgctaggtgagctccggcatggcgatggagaacaacaatgatggcgtggcttcaccgatagtgctccgacgaggaaaatttacagacagcagggcatcgacggtgaaggagcacagcagcacgacacaacaatgacgtcgggcaggagtggcaattgatgaacgagcagagaactcggatggtagcctgcagcgcacggcacgacaataaggaactcggatcacgaagggagagaagcgaggcaagtgacttagcagctggagcaagtgtcgagcagggagaaaagggatgaagctcagcaccatttataggctggtagaaggaaatcacggcctcgaatttgattatcgtagagaaacgtccgcacgaaatgccattaatggcaaggagaaattgtcatcgcagagaagaggagtggtggcggcagtggtggagagtacgactgggttggggagatgaatcggatgagcggtggtgagtgctccataacgctgggaggtgaagcagtgacgacataaggagcagggcacactagacggcggcgagatttatagagcacgaaagggagccagggcgtcgacggccattaatggaggtggagctgtgtagaagaaacggttagcagtagtgaagaagggagaggagcggacgacactcggtggaggacaacggttggtgcgcggtggtgttctatggaggtgaggtggaatccgcgggg

SEQ ID NO: 171100 - DNA, 659 bp, Zea Mays
aatacttttagtgttgaggtggactgcaagtttatttgtaccaagacgaggggttcttttgaaagaagtgcatggccgaaagggtacgggccgatctcggccatccgatcgatagggacggccaggattaaatccagccagccccgaacaggtacgccacgcagaccatcggatttagatccaacggccatatttttaaatagcacgaatcaccaggcgcccgtccgatcgcaatccaacggaccagatcagatttttgtcttctcgaaccggtatgctctctccaccgcagaccccgaatctatggtacggattttatgaagacgcgatccaatctggatcacccgatccataccaagggcccagatttagccactgatgagaacgttcagcgctcaatcatggccgttggtttacggatcagtggttacgacccgtctcctccacccgtatacaccgcgtggtgaacaccacaccccatggcggcacggtccgctggttgatatgaatccccacgtgcgacagtgcccctccccaacactacatggtagaaacaccctacggttcatggcgagctcgacagaggggtttctcaccggcgatggcgttgctacgggggtcggccacggcgaccggcggttcagcagcgccccatgaag

SEQ ID NO: 171101 - DNA, 483 bp, Zea Mays
gaaatctagggtgattggttggagaggagggggcatcagaccaaaagagtgcaattgagctcctgactaaatggctggcaccactgaagtatgaagagatggaggtagagccgattgaaataggggcataggagcaccgatatgctgatgtatgtgagtcatacaagtcaggtgctttgccctatctgctagtagctaatgttgaagagtgtcttgaatggtctgaaacatcaaaagcttccactcgcacatcttctactgaatagctgcctagcgagcctacttggcagccaagtaagcctgcaactgtgtcaaatgatgaagtatggctgccagggctagatcaattgatggaggagcagcggagggagcaacactggaaccacctacctcatgatcatatgagcgaggtggcacaagaggtggtggtggtggaatcccgaggtcatcatcattagagtcagaagaagtatcagcactaag

SEQ ID NO: 171102 - DNA, 566 bp, Zea Mays
gccggactagcacaataagtgcgcaaaatcgaagtcctctccaaaggactctccgtgcaaaagtcgcctaagggtgcagccggattctccgtgcaaaagtcgcctacgggtgcagccagaccagcacaataagtgcccaaaatcgaagtcctctccaaaagactctctgcgcaaaaggcgcccacaggtgcagccggactagcacagtaagcgcgcaaaaccgaaagtatttcccaaaaggttccccgcgcacaagtcgtctacgggcacgatcggatcaggaagacacacagcctcatacaaatcacgggtacatacatacagcgagggcatcacacgttacattggctcaaccttagggatgatgcccatctccctgtagttgaacagcattatcctcagctcctcaccctcaaaaagattccgcaactccccctcacctacactcgtcccagtcggcaaggacaacaattctcgtttgccagccccgtccacacgaagatgacttccctccacctcactaaccctccgcttcgcgaccgcccttcgccgcctacgcccagcac

SEQ ID NO: 171103 - DNA, 720 bp, Zea Mays
tccttgatttttgacctaaggtcacggtaatagttttgaaggtccctcagtgtgcaaccaacattctcaaaacccccatcactgacatgaagtaatctatatgcaagggacgtgccaatgctagctttatggcaattgaataaagtattctttgccctctcggaaacatgacggtttgatctaagaaaatgccgatgagggggtgatacaagaccatggttgtgctggtcgaccatcctagtaatcttgaaccttttgtctttaccaaggctaacataaatatgtgtgtcacaaccacaccttttttcactcactttatgagtcttctttctctttttctctgaggggtcgataactttttcatcttttggtacattgtatccttctcttgcacaataataatacttgcctactatctctgaatccttcttcttatgctgcccaacacgaactgagaaaccaacatcatgcgcatagtccttgtaaaacttctccacatcagcaagattatcaaatatcattcccaccgttggcttcaaattttccttaacattggaagatgattttatcggagtttctgcaacgttgcaatgaagaaaagctccatcagatgggccactgagatccacaccatttgcaaccaacacacccacgacggcgccatcccccttcacgacagttgctgacgcttgggcgaccacgaattggctagcctcttcc

SEQ ID NO: 171104 - DNA, 511 bp, Zea Mays
atcttaactctacattgttggcagaggtactttgccatccttagctaactggtaacagcctgaccacagttctagttgtgccttgatcgtctcacatgtgattttccaacatgtgtggtctgacagagtcatgctagcgctagatgaagttggtccatggtgaagtcaacaattgttgatcgccttcactaatgtattcctcgaatctctatcatttttcttggacttggattccctggctaaccacgagttaattgtgatgttattcgacatccatcctcgtcttatgtgctaggaatttctaatgaccacttgttggtaaacctctttctgtgtgttttacccaagaggttgcatctcacatggtttgtgtgattgatatccatttgtccaccgttctcaacaaacttagataatacagtgttattaggaaaaggaaactgcacacatggaaccttatatgtttttctagtagatatcgtctctattttagacatctctaattagacta

SEQ ID NO: 171105 - DNA, 786 bp, Zea Mays
cgaagaacgattttgattaaaaggtcggatcaccaacctggttctctttttaggcccttgatttgacctttcacctccaaacccttttgattttccatgtcctgcatttttggcttccactaccagtgctaagctgatagccttactataggtgacgtccaagcatgttgccatttttcgctgaagcctatcattgagtcccctcataaaacaattcttctttttcagatctgtattcacctagccaatggcatactgggagaggtggttaaatttattgaggtactgcattacagtatcacctccttgttttaaccgaataaactcttcttgtttcatatggagcactccctctagaacataatgctcccggaaagctagcttgaattcctcccaggtaatctgatgcccagcaggttggattgctgaaaattttgcccaccatgtgctggcaggccctcttagctgttgtgcggcaaacagtggcttttgtgtctctatgcatcgaattaacctaaacttttgttccataactctcacccattcatcggcttctaaaggttcttctgctttgatgaagagcgggggtcgagtcttagagaattccaaataagtagtatcacgcggtccttgtgggggaactctacctccatgcggttggaactgattgcccgccatttcaagcaagaagcacgaatcagtagtggcattgaccagggcagcgatagcctcggccaaagttggtggtgctggtagcgggttgggagtatcctccccgcaccatca

SEQ ID NO: 171106 - DNA, 621 bp, Zea Mays
cgggttcatttcttggttagcagagggctcttatgaaaaacgtgctcgcgaaggggtattcggagatctcggccgcccaattacaaacaagcggcccagatcaagtccagaaggtagtgtttgagcggtcaacgtggaccgccgattccatgatggacggttcggattttgaaatggctagatccaatcgcgctcgtcagatccgaatcgaacgccgcagatttacttggacgaaccattagctagggtctaatctcgaccgcacacggtttaatctacggctagcagttgtcttccttcctcagccgaaccagcacggcggcgcgacacagaccgtggcggcgacggcggccattgccggcgatcccataccccacgatttcgcccacacaattcctaactgtctagcgcatctcaatgctaggattcaatttgagtcgagggcgaggaattaccagagaagtagatgagtgcggtgctatccacgcggacgcggtggagaagaactccggtgaggaatcaaggtctcaccgcccgacgatcccaccagctagcgcttcggacaacttcgctacttctcggtgcaggtccccgactagctgccgggaccaaaacgacgag

SEQ ID NO: 171107 - DNA, 834 bp, Zea Mays
ccgaacttgaaagccctttggtgaagatatcagcaaactgtgatgttgtgggaacatgtagaaccttgatgtcacctatagccacacacacgaacgaagtgtagatcaatctcaatgttcttggtgtactagtgctgaatgaggttggtgaagatgtaaatcgtgctaatgttgtgatagtagacaaggattgcatggtggtggggcgcgactggagctcaaggatagctagcacagccaagtagcctcgacgatagtattggccacatcatggtattctactttagtgctgaaaagagacatggtagcttgttgcttggaggatcgctaaacgaggttgtcaccaaggaatactacatatccggaagtagaactgcgtgtatctggacaaccagcctaattagcatatgaatacaccaccaagtcagattacgaagatagccaaaagaacaagtcctaggtcaagggtgccttgaatgtactagaggatgtgcttcggagcagtaggatggggtgcctgaggatcatgcatgtgaagacaaatctgttaaactgcacaagatatgtccaactggtaaacatcaggtactggagtgcgccaaccaagttgcggtggttgttgggatcctctatagcaaccttaggttgagtgtcaacgggcatgatgcaaggcttgtagtcggacatgccgacctgagcaagaacatctaccatgtattgtcactaagataggaacagactacgccatgacgttgaacatgcatctcgagaaagtgatgaagagggcctagatccttcatataaaactcgagttgggaggagtagatgtagagg

SEQ ID NO: 171108 - DNA, 389 bp, Zea Mays
aacgggcacggccggataagcgaaggcacacagcctcatcatacaaattatagttacatacatacagcgagggcatcacaccttacattggttcaatctttgggatgatacccatctccctgtagttaaacaacattatcctcagctcctcaccctcaaaaagacttcgcaactccccctcacctacactcgccccaaccggcaaggacaacaattcccgcttgccagccctgtccacacgaagacaaccaccctccacctcactcactctacgcttcgccaccgccctttgccgcctacgcctagcactcggaccaggaagaacttcagcatccatcacacgaggagaagcctccaccgtagccacatccaatgccgcaaaaataatc

SEQ ID NO: 171109 - DNA, 282 bp, Zea Mays
ggggatagaaaggcatagagtataagggaaactttaagtgcctctacaaatttgccttcatttttctatttagagcaccatttaataaatatttggtcggtaaatcaattagatttttatgcactatactccaacaatttatcataaattttcatgcatgaaaaagttccctagaaaactaccacattttgcatttagagacccatgtgacctccccaaaagtggaaagcgaaaaacggaataaggtggttatggagagtgaaaaatatggtgtgtattgga

SEQ ID NO: 171110 - DNA, 563 bp, Zea Mays
ggatgactagcgggccagggttgtcagggtcaggggcgagatggcctgaccggccggccccagttgcagggcgcgggtgagagagagtgagaggagagcagtcagatctggatcgggcggttgggattagatctggcttaattgaaatcgggtcgtccgattggggttggatggtcaggatgtgcgccgggggacttcaacttcgctgggtagctaggggctgcgctccccatgggcacggtggcgccatcgccggaggtgaggtaggttgggactcctagggcgcgagaggtcggttcgggtagctggagaggttggggaggacctggcgaacactatggcaaggtcgggtttgtgtgaatgggaccgaggcgaccggacggcggaggggagtcctcgacggaccggggaatactccggtgagcaatctcgggcaagtaaatgcgagacaggggaaaataagggcagggctaggacggttatcttgagggaagtctcaggaacgcacaaacggtggccggggcattgtgagggcatgggtcgacgacggcggagctgcggca

SEQ ID NO: 171111 - DNA, 734 bp, Zea Mays
tcacaacggatctggaggaggtttttgtcagaaatttccaaggtaggtacgtatgcccaggaaacccatgggaccataaggattgtctacagaaatcggacgaggccctgaggcactacatctggcacttttcacgaaaatgcagcctactgacaaacctcgcggacgtcaacgttatcgacgctttcatcttggggaccacagacaaaaccctggtgcataagctacgacagaatagcttgcagacggcaaaggagccttttgacattgcaatcagccatggatcgagagaggaagcagtgggagccatcttcgatcgctgcaagcggaaggttgtacgcgacaaagaattggacaagggtgtcaacagccagctcaacacagaagggagaggaagccgacgacagcgagtcagcgtgttgatggttgtggcaagccagacggaaagaaggcctctaaccgaggaaaccaccgaccacttcaaaaaaaactcctcgaagccccatgtacaaaccattagcatccggttcgacatgcctataaggatcgtgggttactcggaaaattactacgcaaggcggcaccatccgaaggggacccgaacctcagaaagatgaaaggtcaaggggaagaggaccgcttacctcactgagatcggctgctcactgatctttgggggcgtggttactatgcctcaaggaagcaccaaaaactcgaatgatgcaagatgatcg

SEQ ID NO: 171112 - DNA, 759 bp, Zea Mays
cctcagtgcaaaaccaggaatcccagcaacttccctgcggagacaccaaagacgcacttgtccgggttcagtttcgtgcgtgttgcccgcagcttgtcgaagaccagggttaagtcttccactagggtcgaccctctcttagtcttgaccatgatgtcatcaatgtacacctctaccctgtccctaatcaggtccccgaaagtcatactcatcgtccgtacaaatgttggcaaggcatttttcagaccgtaaggcattacaacataacagtaaagcccatccacagttacaaaagcagtatgcttcctatcttgtctagacatctggatctgatggaaaccagaataagcatataggaaggacaggaggtcgcacccagaggtagaatccacgatttgatctattcgtggaagtggatatgggtccttgggacatgccttattgaggttggtgtagtcgatgcacatccgaagcttcccgttagccttggagacgatgactggattggccagccatactgggtgatggacctcttcgatgaagccaacgtccagcatcttccagacctccttacggatgaagtcctgccgctcaacggactgtcttcgaggtttctgactcaccggtttggcatcagggtggatcttcagatggtgctcgatcacctccctggggatcccaggcatctgcaacggttcccatgcgaatacgtcagcattttcctggaggaaggcgatgagcgcgatttcctgtttctcc

SEQ ID NO: 171113 - DNA, 1244 bp, Zea Mays
atttttcttgggcaataaacactaatctgtcatttgggtttcttctccaggtgatgaaaattaagatgaaattgacaatggctgatagaaaaaaaaaagaggtgatacatacatgacataacatagcagcagatttggccaccccacttttcttgcttatgttgtgtttctcagctgtaccatttgcttcagacgaggacaccatttgtggggaaccatttccgttttccttgcatgttttcctccttttccttgatgacccacttgtcgaaatttgacccgctttcatatcctccgtaaatctcccagagcacgggtcacatgaggagtaaaaatctttggaagcagcatcagactgtgggctggctggcattgctgagaggtcatccataatgtcttgccaagctgaattagccgcagaagacacttctggttgttttggtggacagtggccctgatcttgacttgctgtgctaactgaaaaatgctgctgtggcgtccttgtgaagggtacgagaacaatgaagtccccatcgccgatagcaaggctgccaatctcagcgtctaaacgcaatttagcacccttcagcacatgaggaaaaatttcagcacgagaaaggtgctactgtatttaactagtgtcgatagtgaagctgcaaccgctaatctaataacccaatgaggaatcaatgccaatatgccatgatgaagcgacacagtcttggcacacgccggaaagctagaggccggtaggctgttgcgcggcaccttcaggaagaggtggaagctgggggagacttgcgcgggcaagaaggacgtccggagcgcggccttgaggtcccggacggaggcgccaaggggcagcttgacgaccgtggatcgcccgtcgagggcccggacctggacctcactccactcctgctccgccgtcatcaacaaatgcggttaggaggtggaggagccggagcgtaggactgcggctcgggagattggcagattgcggccggtgactggttttggcgcgtgcctaagcgaagaggtggggcggacgtgccgacgcggcggtggcggcgattgcgcgccgtttcactctcctcgccccgtccggtcccgtgcttcgggccctggtgggttggacagaaatggcaggagggcttgattatgtgcgtgctatctgatgtgggccgctgccgtcctcttgtctggcagagcccagcttcaaagcatggatcacctcagaaatt

SEQ ID NO: 171114 - DNA, 601 bp, Zea Mays
tttttccctgcagccagcggtctgtacagaaaagggttgagttgccatttccaatttcagtgattacaacaatggaaaagaaacccttcattgtttctgggatctgcatagggagcaaggtccagggtttttcagggtcagtttttgccatccacaaccatctcattcttaaagcccagccaagtacttttaggctaaaaattcctagccctccaagctcaagtgaacgacaaactcttccccatgccactaaacggtgccccctctaacatccttcctcccacgccaaagaaaacccttcctaattttatcaatagctttaagtgctcctggaggcaagtcatcagccatggccagatatataagcatccctgtcattacaaattgaacgtgcacccttcttccagccttggtcattaagttcgccttccatccaggtagttgatctgctactttatcaagtaggggctgcacctgatttctagatagcttcttcagggataaggacaggcccaaatatttgcaggggaaggaggaaatttggcaagggatttgctcctgcaggactgctaactcagcctttccacaacggatggggaac

SEQ ID NO: 171115 - DNA, 560 bp, Zea Mays
gcccgagcgcctaggtgaagaccctgtgcccccctcaactcgcccctgccccacattcgctctaccctgccctcgcgctcacctagctcgcaacgccgccccgttgttgctccgctgttccaccgtcctcgccgggcctcggccacggtgagctttgccagagttttgcgcaccaggaacccgcggtggttttcccttccaccaacccctttgcccggtccgcactcaaccccttccctgtgcaggtcgaagttcaccaccgccacaatttctcgtcgtccggccaaccggagcccctcacgccgtgccaagctgccccgaggtcgagcgccgtctctaggtaagtaaccttcccccgccttcttctgcactaattttgtctcaccgtgggtaattttggctcgctggagccgcccctcatcggaccgccgtgtcttcacggcgtccgatcggtacagcccttcctcgttcccaaacctaggcatagagcactcctaccctctcaccaaagccgatgtcggcctagtgcgctggattattccccactgtggcgggtaatt

SEQ ID NO: 171116 - DNA, 2382 bp, Zea Mays
caggtcgcggagaagcccagcatcgctctttccatcgcctccgccctctccggcggccgcgtaagtccccccgctgccctcctcaccgaatgcgtgctgattattgtttttagtgtcgaatttgggcgagacgtttactccgattcagtgggttgtgtggaaggagctagccctaacggccggcgcaccgataggttctgactcttcggacgtgttggtacttttgattggtcgctgcctagttttttttccctgggagcagtggcggacatagaagtaaaatgtaacaggatccagttaaactaaggtctttgttccgattcaaaacgtacataagtgcctctgttccaattcaagtagtgaattaagggtccaaaaactggaggttgcccatgctccacgactgggaccatcttttgttttgaaaaaaaaatcagaaatggatttctttataataagcacaggcttgtcattctctgcaaatttgtagtgctctaaagttatatgaaccaggaaatttggtggtgatatgtgtgtgtgtgtgtgtgtggggggggggggggtaggaagagggaaactatcctaatgagcagtaatgattaaggatacaagcatgctgctcttgaggttcggaagcaagaaatagaaaaggcaaacagacatcctgctagtgcctactgcacttgccagctttcggttgccgaagagccctgactgatgaccaggaagcccttgcagcttgagcagcgtggcactaggaagtacgaattgcggattggagagtgcagcaggcagcgatagcgaatgtggagtgggaggttatcgctggtgatgtgcacacgcggatgcgccgtcagtagggtaggtaaggcagctgacagtgcggtagtgagataggtgccagagtgattctcttcctccaaatgaaaggcaagaaacaagaacagctgtctatgttaaatgtgctattggactgacatgtagtagactcgctgaaaaaaatcgggtcacggtctaggtttgccgacatatagctccgcgcctccgccagtgtctgggagcttgagctacgcccttggtgactgcaaatctgtgatggttcattccatatttccatctcattgtctcgtttatgtacctattaacttaatggagggtcaggggttgtggtaggtagctgagtattgattaatttcgttgtggtaattggatttccccagtgccatctgccagggtaaattaattgtcgctgttttgcctgatgaccaatgcttaagctcagtagccctggtagttctagaagaaccatggttggcctctgttccctctaaaagtgtctgcacattttcacttgctgttacagcccagctgatatgtgccagactccttttttacctcttgaaaagaacagtagggaggccccaactgaaatagtattattattaggaagggtcagacttcagaatgcaagtgttttgacttaagagttcactcgcattggtgtcctttttccccaacattcatgcagatgtctacaagaaaaggaagcacagatgtccatgagtttgatggaacatttcagggttcttatgcgaacttcaaagtgacatcagtcattggacatgtcttaaggttttgttttattctttagttgttttaagagtttttgtcacagctacatcatttaaagcatgcacatttgaattattttacatacacatttctgtatatcagtgttgaatgttgatatgtacagacatggtggactggtgcatagttgaagtgttaatattgaaagctacaagtagctataaactttagcaggatctacctacagatgtttagatgcttacagtttctgaacatacattttttttgtgttttcttaatctccttatctttaccagtgtagatttcccccctgcatatcagaactgggaaggaactgatccaatggacctatttgaggctccagttctgagatctgaatgcaacccaaaggtaatgtgttcatttacaactctagttgagacagaatgcaacttagttaactgttaggggtcaactcagatcgtaagacaatataactcagttaattgttggtgtaactcaacaaagtgaagcggtaataaactctattatgcaaatctactctacccatggatggttgatcaactatgccgtttctctgaaatttgaacttatgtcctttgccctccatttagttgactctaggtggaatctgaacaacaaatgtcctggttactgtttccaccatttttttcgcaagctcttaattacacctgcagaatctgcaaaagcactgaatcctagtggcagtgtttgtcttattctgtgtctttgttatatgttccactgttc

SEQ ID NO: 171117 - DNA, 632 bp, Zea Mays
gcttctaggtgacaataatgaaaattcaaaactgtttacctctgaagattaaataccatatcagtctgaagctttatactacctctggtctcaaaaacatgtcgcttatgacaatatttggtcaaacataaaactaaacatcattaactttgcaggagacatgtagggtatagataaacacttgcaaaatataatatatttgaaggactctaagaatctgttctggaagttattagcggccaaagatatgcatcaaagaccttgcagagtatctaaataactgcactgaaaaaagtagctggtcaataattgtggactgtggttatagctgattggtattgtgatactatatttctctgcattttatattgataaacagcagtatttctgctgtgctccctaatgtattatgtattcataagtttaacatatcatgcactttacagtactgtggcctgtgggtgctgaatgacatggaagtcatatttttttttctaatctaatgctagctgatcatcgtctctcttggtgacgggatactgctactgctttttcttttattccgcttaggtctaccttgtatgttttagtagttttaagtactcatcagttgctacttctcttcattcttt

SEQ ID NO: 171118 - DNA, 405 bp, Zea Mays
cgccgccattcgcgactcgccccgcgcagtgagcttcgcgccgtgtctgccggtaacccccttcccttacctgcgtcacgttccttgaccggtagcaaatcacctcgcgcctgaattttactagcgtatactgcggaattgctcgatgacgttacatcccgccgtgaaatcgccccatccgtggccgagaacctccgcgacgggtaatagcgggcaaagcctcgaggcaaccccccattgcgcccacttcagtccgcactagtttgcgcaggggattagctctgggagacgagggattggatctccgacgatggcgccgtcgtagtctggcgggtgcgccaccgcgcggcgggattggcgcaggggtgtccgggcgccattggatgtacggtgaacgacccagat

SEQ ID NO: 171119 - DNA, 2066 bp, Zea Mays
tgcgaactgtgcagatattgatcccttgtgacctaggataagtttcgcaaaatgcttatagttctatagaatttgccaagtggaacctgcatgacaagaatagcaacagcaaatccaagtccaaatcctaatccaatgaacatatatagagttatatcgacatgatcttgcgacattttttgtttcaggtcatttggctgaggtgaactggcacattgtctgcttaagggtgctccacagaggcctatgttaccttcaaatgaactgttctcaaatgttccaaattggcgtgattgtggaatcatccctgccaaattgttgttagacaaatctagggtctcaagaaatgtgagatttgttagttcttgtggtatctccccggaaaggtagttccatgacaggtccagtgattccagctggctcatcctgcctaattggagtggaatatttcctgtgaaggcgttgtgtgacatattcaataaatgtagtataacaaggtttccgaccaaatctggaatagtaccattgagtttattatttgataagtccattgcagttaaggctgtcaaaatcctatcaattgagacgtaattccccttaactgttattgcaacagtatcttggtaatattggttggatgcagaatgacccaggatctgtccagtgttattattcttctccctcatagatttaaacatcttgaaccattgtggtttcacatagccagagaaattgttcaaggcaatatcaattatttgtatccccaagaagtacccctggaaatttccacttgtgaaagggtcatctagtgtgccatagaattgattggaccttaatacaaggacacgaagattggaaaggttgccaagccaagatgggaaaacatctacaatgttattgtatccaacgtcaagaacctccaaatcagtgcattgagaaagagctttaggcagctgtccttgaatgttatttccatttatatctattgtccgcagatcacattggctactataatttttataagtcaactctccttcgaagcgattccccctcaaattcaatatatttaagttgccatcttctatcaggcaagatggaaccttccctctgaagtcgttatttgccaggtcaaggactttaagataagttaaattgcaaagtgtgggtggtatgtagcctgctatgttattgtcggatagcttgagatacacagtttggctaagatacaaagtgaagtttaacataacagatgtgaaactgttatttgaataatccaagacttgttcataattgctttccattgtcaacatgttcggaatcgggatttgaccctggattctgttggaactcaaatcaagaaattccaaatgactattagggagaatatatgaagtgagctgcaaatttgtgaatgcgttgtttgaaagattcaaattcctaaggctatggtcccatgtgtgccatatccaatttggaatagtcccaagtatcttgttgcaagaaaggtccaatatagtgatatgatcaaggtgtaccaagaaactaggaatttcagttaagccacatgatttcagatctaattcagtgagctttggtaataaccggaatgtggagttacttctttttccctccttgatatacagcttgttgttggataaactcatttgagcgagcttccgtagtttccaaaaatcatcaaggtctacaaaacctgttatgttatttgagctaagatccaaaataaccaaatttatgaggtggaagagtgctgaaggaatatttccgctgattttattatcatttaaagtaacaacttcgatgcacgaagatagtgtatggaactcttgtataggtccagagagttgattcgatgaaagatccaattgtaataatgatggtaaagtgaatagaaatgtcggtacgccccctacaacgaaatcatgggtaggctatgttaagttcgtgtttagagagcaaagtgcatattctgtgaaaaaaggtagtaaataagaaaatgagacgatcttttgggatgtcaagaacataaaaataaactacaataacaa

SEQ ID NO: 171120 - DNA, 645 bp, Zea Mays
atggtgaatttcaaattgaccactttttaaaaggtggtcctgtctcaaacggatcataaagtcctgccaacacaacacatggtgatgatgtacgataccaaagcaagaaagaaagaaagaaagagttcaacatcatcgtcattaccagattctgtttatatagaaaaactccgtccacgaaagaccaatttcaatatgcacttgagttgttcccattttcaaacgaacttcgtggaaaattgaatcatacatactatcgcttgaataagcctgcaaatactagggtctttgtccgttcgtgttgtcaaacacccttgtaatcttgttccacccacccatcatcatctccatgacaccatgcctgtgtccggccgccacacctattttaatcacagctccaatgtccctcgactgaatcgacatggatcagcacaccagcatctctcctcaaaactacgtcgcgtaggaggccccatcgctgcttggctcggcgctgtcatcagctcccgacgagcctgatgcgtccggccgccacgccgacaccgagtagagtggccacgagctccagcacaagagcaggcagccgccctgctccctgctctccgtcgccgcgcacccgctgaggccgcacctgtccagcacgtc

SEQ ID NO: 171121 - DNA, 475 bp, Zea Mays
ggcgacgcacgctcgacctcggcgccgcacgagcgacctcgacgccgcacgcccaccatttatcctcctccctgtgcgctgaatcaggcgaggttgaagccgtgcgcacgtaaatggcggagctggcggagcggttgaggccgtggtcgtgggggaggaggtcgaggtcgtgggcatcctgcagcgcgccgtcgctggagtggaggcggcaggcggcaggcgccgtaggctggcatgtagaaggcacgcgccgtaggatgggctgcagaatgggccgcaccaatcgttgggccgcatacaccgctacaggcactgctatgatgttatttaattagtgccataccggcccacccagagtgtcgaaacgtgacttataagcgttggtgtgtgttgtctgttgctcagactaatgtctctggtgccgcagcaagatgattttttggcgcggggctgtacggccgtcggaggcagaacg

SEQ ID NO: 171122 - DNA, 806 bp, Zea Mays
ccgctacgaagcacttgcctgaatcatggcaaaccccgtgctaggcgacagctacgaagcggaggtcgaaagcgcctcgatggtctacgagacgtgacccggtacgaataagaaaccacctgcacgtggagaaaattgaacagacatgagtaaattaacatttggtgagggaaaagggactaagggagagaccaaaagggtgagggaggaggctggcaagcgtgggcgagcgatgagactggagcgtgggtagatgggtggggcaggggcaaaggcaggtggcatggttggagcacgagtaggtgcacgacatggccacaggaaaaaataggtggaggaggacacacagggactatatcctcacgccacactaagaacatctccaataattatataaatttagcactctaaattatagatttagaaagttgttcaaacactttgaggagtaaaaaatgtttgtgctccaacaactttctattcattgattgctaatttttaaagttgtctgtcataaaaaaataagtgggtctattttctatttttttattgaactagcgacataaatcagtaccaacaaggcaacaaccttacctgacgttttggatgattggagttgtcaatcggtcgcggtgacggtgtgaaggcaacacatgaggtgctctagcggtgcctcgacacaagaggttacctagtggtttcaacatcaagatgtttggatgctggagatggatttgtgatcaaagggatggtgggacaacgtgaaacaacggctggagtatgcttttcttgatggacttagcacc

SEQ ID NO: 171123 - DNA, 367 bp, Zea Mays
taacggtgaaccgggagagttgatttatcatcaaaggggtctccgtcagggagaccctttatctcctatgctctttgtgcgtattatggacgttctaaattctctaatcttgaaggctgagagctatggtttgttacacccgctgcttcgtcgaggaattgggcagagaatttccttatacgccgatgatgtggttctttttatgcatccggtgaggagtgacttggagacagtcaaacaagttttgaaggttttcggtgaagcctcaggacttgttactaatttaccaaagagctcgtttactccgatttgctgcaatgaccaggaggttttggcaatccaagagacgctatcttgtaatttggtg

SEQ ID NO: 171124 - DNA, 480 bp, Zea Mays
tcgaaggttcttatctcgtgcgctctctctgatcggtgggccacaagggttcaggatctttttcccgacacatcgataaatatttgcccactaaaacatctgtgatttttagtagtagtatattgggagagaatgtgtcaccaaattttgaggccaatcccgtgaaaaccatcattgggtggttttaaggctcaacatctaaatctccataggtagcatactccatacgcatgaacaccggacgctgagggtggcgattggacaccagacgctgaggatggagggcggagagcaagcagagtctggtgggtggaggaacggagttcgattggaggatgggccggtagaggttgggatgggtggacgacgaagatctatggcggtggtggcggggtgacggggtggaaggctgtctggatgaagtcgtgaagaatgggtgagccacttgagcacttgggccagatggatagttgggtagtt

SEQ ID NO: 171125 - DNA, 895 bp, Zea Mays
ctaatcaccgcgcaccatgtgttcgttgaaatgcccaaaccagtcaaaatagctcaaatcgaccccaacttttctagcaaactccagctactaccagtacctctcacgccaattttcacacctatctgatattccagacacccgtttcccaacctctttatctttatggtgatctattttgagccgagtgccaaaaatgtttttcctctgccaaacttcaaaccaaacacccacttcactcattttcatacaaatatacctatccgtgaagtattggctcaattcctagtcatttcatgcctcatttcgaatttcaaaacctctatggcacaattcaccgttcaaacgccatcctcacgtcgtttgacctctgtttctccaaatcactctgtttttgtgtcataactctatgtgtatgtatttattcacatttcatatacttatgactatgtgactaatacgtgctctcctcttctgtcatttcagtgatttcgtctgctcgcctgcgcgtctcctgtcctgcctggttcctctctcttctcaagaagttcccaggtagctatcgcactctattctagccttacctactgctctactactctcgcttatcttttctccttatcttgcagcagtcagttcaggatggtgaggatgaagaatgtcacaccgtcagggggaggagatgaccaggaccctccttgccccttcagacaagtcaaggggaagactgtctaccttgagtagcaagggggcaaaaagaagagatgtctggacagagccactcatgcaatgatttcagcaacagcagtagtagatcaagaagagcaaggaggtcagttgcagatatcttctgatcagatcgccttctgagtccgtcgcctcaggtctcggactc

SEQ ID NO: 171126 - DNA, 541 bp, Zea Mays
cagactatgaacggctaagcaaaggtgccgaagggccaaaacaaaaaagagttgtcagtgttatgcaaagacaagctgccagaatgataaaagaagatgaaaatttagcaaaaaagaaaaaatccagtcctgagtcgaaggtggccgttttgaagaaaagaaaagttacagctccgaagccaaaagctgatttagaagaagaaattccctcaacacattctgctactgacgcagaagaaattttaaaggtaatgaccgaatccctacctaataagctaagtccgctgggatcggaactgatgaagcttttatagaagaagaaggagccttcggttgccgagaagcccgctgaaccaaaaaagcgaaggattattactgtcattgaggctattgaagaaacaccaccgttggcctcagcgctgaaaacagcagcagccgaagctgcccctgccgaagcttctacttccgaagctgcagcagccgaagccacaaatttggaaaacacactttctgacattgatgaaatgattttgaatatggc

SEQ ID NO: 171127 - DNA, 591 bp, Zea Mays
gcaggtgtaggacatccggatggtgtgtgactttgccgacgtatttccagcagagcttccaggccttccaccggatcgcgatgcagctttcgaaatcaaactgattctgggtacgcagcctattcataaggccccgtatcggatggctccaaaggagcaggttgaattgaagcggcaattgaatgatctactggctaagggtttcattaggcctagcaggtcgccttgggcttccccagtactgtttgttgagaagaaggataaaagcaagaggttatgtgtggattatcgggctttgaatcaagtgacaatcaagaataaatatccgctaccccatattgaggttctctttgaacagttgaggggtgcccaggtgttctccaaaattgatttgaactctagttatcatcaattgagaattcgtgaggaggatattgagaagacaaccttttgcaccaggtatgggcattacgagttcatagtcatgtcttttagcttaactaatgcccctgccgcttttatggaagcaatgaataggatgttacatgagttcttggacgactttgtggtcatgttcctggatgatattct

SEQ ID NO: 171128 - DNA, 436 bp, Zea Mays
cttgcctctaagaatcatttcaagccggttcaccaagtctacagcgggaattcttctgttggtaacccgggttgagtcagctagacctcggtacagataagccgggtatgccctgtccttcaacggctgaatattcttgaagacaaaatcagcaaccacagcctctgcagtcagacccctctccttcagcagtccaacttcagctagcaaagcccctgccttagccacctcctgatccatgggggacttggtccaactcggagtgcgaacatccggctgtctccctgaccgtgggggagagtatttccgtggttctcaacaataaaccactccaagcgtcatcccttgatactatccttgagcgggatttcaagatagtcagtcttcctcccacggcgcatctccaaactcgcacccccaaccagctgatactgcc

SEQ ID NO: 171129 - DNA, 484 bp, Zea Mays
aagctgccaacaaagtcctgaaagaatactgaagttgtgtatttttgatagttttgtttccttgtacgtagctttggtttttgtaagaaaaattatcaacacttgcatgtatgttgatgtaatatatttctttgtgattcgtgaaaccttcgtacataccgtttttgagccggcagcgaaaaaacaccttcccttcctttcatgtttcagaaaaatcccccttctttattgaagcaactgtgtaattcttgtcgtagacattgcataagaataccattatcgaaaacataaactccgtatgatactacctctgtcacaagcatggatcatgccttattaatacgctttcatgagtctctgccgaagctgaaggagcaattttccgtgttttttcactgcttttgtcgatgcaaaatgatgtatgatgtgatgctatgcaatatgatatgatggtatgatgcaaatggtgtttatgcataaatca

SEQ ID NO: 171130 - DNA, 644 bp, Zea Mays
taggaagcaatgtaacttacgccaggtaaacctcctgatattttttaggggcaatagttaaccatggcacggaactcatccccacgagcagaaagcatttcccaacatctcccaccatcaaccacggttccttcttcccatctctctctctctcacgctcaaccagccatgccaagaactggtggcgctggccaccagccgaccctccctcttcggcaaaaatcacggcgagcagcagcccaatcctaccttcttcactgatcggcagttgaaaagggagagggagcagtgtgcttagcataggaagattaccgcacgacatctggagaccaaggggcatgcggccgaggcgcagctagagcctagaggatagcttgaaggagccacttccaagaggatcggggaaaatgatgcctgctgagtagaaagggacgacggagtcgaagttgcagatgatgatgttgcgcttggcagggctagcgctaggagaagtagggacggcggcatggtgaccacaagacagggaagacgacgacgtgacagaatagccgcatagttccttggacgtgagagggtgctggtgggagcacggtaggcgcggtggagatgagcatcgtgggcaagatccacggttttctattgca

SEQ ID NO: 171131 - DNA, 400 bp, Zea Mays
cgctaaggtcgtccggtgatcgccggtgagaccgccacggtagaagccacctagcgcttgcgccagtgcctatttctttcccggctgccgcacgtaatcgctcgattcaccggccaccgcccccggagtctataaattgagtgcaccatcgtctttgttatgtattcgagcagctagagcacccacctgcaccccaaatcccccaccagagaactcgaatttgagattttccccaaatcaagtctccgccaccatgaaacccgcctcaccgcggccagccctttcccggtcagttcatccctcgctctccctcatttgagcactcttgacgctctgtgatgcttgccgaaccaccaatttgtacagagtagctttagatcaccgggaacacgtaccaatt

SEQ ID NO: 171132 - DNA, 292 bp, Zea Mays
tcataacatctatagcctttgtgctccggattatatccaagaaaaacgcactcaacagattgagcagttaatttagtttgttcacgagaggctaacaacacgtagcatgcacatccaaaaactctaagatggtcatagcgaggagttataaaaagaacttcactaggagtattccctgagagttttgatgatggttgtatactgatgaggtagacagtgctagacactgcttcacaccaaaaatgtgtgggaacaaaagaagatatcaaaagggtgcgagcagtttctatgt

SEQ ID NO: 171133 - DNA, 1022 bp, Zea Mays
aaatcggaggattaattctttggaaattgcaagctgtaatctcgtgtctcccactttggtcttacgccatagtttgatggcctttgttgcacgcgctaatttgatatgaaggcgcttcatgggtgtaaaggaggaatgaagtggttcagccaggcagcctgaacagcctccttgaatccctccatctttacccaaaaaatttcgaaacggaaagaggggctatgtgtcgtcgtcaattctctctggaggagaaacgaagtgtggtcagacatgagggagggaaaggagtgcatatagcggctaggaaaaagaagctcccattccgttgtacagaaaaatctgtcaattcttgttagcgttggattcacttgcccgttgctccaagtgtagcggcggccattgaggtggatttccttcatctgtaggttgtccagtgctgatctgaacgcgcccatgaggcgccgattcaagttacaattatttttatttcaggcttgatatatgagattgaaatctcctaacgccaaccactttgcccaacgttgtgctgcgaggccacttagttcttgaaggaaaacaagtttctcagcgctcgactgtggctaataaacccctgtgatccaccaagctgaattgtccgccttcatagtgatcatggccgagacagtgtgtgaggtggtgtacacttgcgaaagtgagaaaaagtcattcgaagctgcaaggagaatcccacccctagatccatttgcaggcagcacaacagtgttgtttagaaaattctgacccaatgtacgaaggatggttgcatcgtcgattgtggtgagtttagtctcctgcaagcaaacaatggtactaccggtatcccaaactagttcttgcatagaatcacgcctggccacttcattgagcccccgcacattccagctcaaaattttgcagttatgttgagacattggtagacaactgagacccaagataaaacagaccaagccaaggaagtggcaaattaattccattacact

SEQ ID NO: 171134 - DNA, 664 bp, Zea Mays
ctttgctgttgcgtgccacgttcttttgcctcgcaaactaattccagagaacttgattcatgagtttagctttcgagagtactcaagaaatgcccaatcagagatattgtccaacttgtttcactctgttatgccaaaactcgcctgagctaccagcctgtcacgctgtgcctgacttaatgcaccaacctatatttttgtcaacgttttcttggcccatgaaccctaggttctgtttttcctccactgctttctagcttcccgagctcccacaccttctcgcctttgttcttgagtcactctgtctgagggatcacgatggcgcccaggaagaggaaacaggatgctgctacgcctgttatcactctgattgatccttgtagccaactccctttctgcggtaaccatgtttttgtttttttctgaagctgatctcttccaccttgtcgaaattggtgttctgccgcctaaggaattatgctcctggcggatctagcggggagttaccgtcctgatggaggatactcacgaggcggtaattttcgtgccttttctcatctaaggactagccctgccagtttctccctttttcgtggccttcttgatttttattcttttaatcttatgcatctcaatcccaattccgtaacaccctgaatttggg

SEQ ID NO: 171135 - DNA, 405 bp, Zea Mays
caaagcctaccttcgcctaagtataccacctgcaatccaacgacgtcgtcgagcgcgccaacgacaagattttcactgccatcaagaaaagacttctcgacgacaagaagggtaaatgggctgaccaactacctgaagtagtctgggccctaaacatgaccgaatgtcgggcaaccggattcacaccttttcgtctattatatggatcggaggccatgataccacaggagataaagcatgggtcgccccgaacaagcacatcagcagtccccgacgtcgacgaaccaacgtctaaagacctcatcgatggagaccgcgtcttcgccctgcaggccctcaacaaataccaagctcaaaccaaggcctggcgcgacaacgcggtcgtcccaagagagttcaacaaag

SEQ ID NO: 171136 - DNA, 624 bp, Zea Mays
ccaaaactgacaatattactttttaacttcgggatgtaatacactctggttaaaaccttgtgttgaccctatcgaccttgtatcactacagattcaagtccacatatttctactgcagatccatccccaaatctcacagagccgtggacattattattgagatgtgtcagtactgaccttgaaccagtcatgtgattactggctcctgtgtccagcacccacatcccttctggacacatttttggcaccagtttctcttcaccttcaactgtgctccatgttcagctagttcagctagcaggagtgctccatgttcttcaccttcaacaaccacatttgcttccggttgcttctgttctttcttctccctcttgggtcttttgcagtcttgtgcccagtgtccataaataccacaattgcgacatcttcctttcctccttggtgttccctgtgatgtgaacttccctttgtttgagctgcttgaactcccaccatctgatcgatgttaagcctttgccttccactgacttgaagcattacaactactgtctttatttgtattggcctgaaaacgatgcttatgtttttcaagccaatcctcctcagctaatagtaacctccctg

SEQ ID NO: 171137 - DNA, 279 bp, Zea Mays
gtttgctcctcgtctcagaagcagaagtcaccattgctgccattgttgaatgagaaacttgttccgtgggagggctgagccgctgccaaaatgccaattgacgtggtgcggtctgaagaggtccactggcaacgagatcctagatggaggcacgcccaataggctccttaaccaacttcctagcctttacatcaccgccggcgaggcgatcccagattgaaacacccatcttacaccttaaccagcgtcttggtaccaccctttctcgggcaggaggac

SEQ ID NO: 171138 - DNA, 509 bp, Zea Mays
cccccccccctctaggcgactttcactctgcgagtgcaccgtgttttggaccttcccgcttttctgctagccgctggtgctgactctgaggtgcacctctcctatctgcctggccttctcactcttttgactaccagcggcaggtatgttgaggaatgggtccgagttttctacgcgactgtatggatcgaccctgatcaccactagataaagtttcgttttgagcgagaggatgtcactattcatgccagccagatttgacaactctttggatttcacaagtcattgactcgtcttcacagcttatgctatggcacctctgaccctcctcgtcgccctcacggcggtgttgctcctggtacagcccacgtcgcagctctgttccgaccgcccttctcagatgggtcgcgacgctctccagtagacttcaccacaacaacaaagtttctatatcagcttatgagacggacacttctgccgcggatggggtacagggaggccaccactca

SEQ ID NO: 171139 - DNA, 538 bp, Zea Mays
ccaataggtggaacctcattactaggtaaaatgcattgtcgatcttcattagcaacgacattcctttgactgtttggttcagtattggaaaaattggactcgacttgcacattctggatacataaatctccttggattgtttcatttgcaagatgactaccactaataaaagggactggagcagaatctgtccccctagtcgaccatgaatggattaaagcattaaaagaatttgatgcaattgggatagataccttggaatgtgcagaacattggtcttcctccatagcttgagtggcaagatccatacctcccagtgaaatggaattttcagcagagatgtgccctttagaaacatctgtaggccagatagcagtgatgacaggatctgcaaaagagacctttttgttctttatcttgggaatccagcgccctggctgccccatccccatccccctatgccggaaaggagtggatggcctgtatcttccactcgagttgtagcagtcctccacaccaccacggcatcgcgaggaac

SEQ ID NO: 171140 - DNA, 840 bp, Zea Mays
caaggaagagatcctacatgggacccttgccaagataggcaagctagggcagctaaacaggcgcttggacatgggcagaagcgatcctccacgtgttcgacctcagctaactgcactctgaccgcgccgcgcacgccatgagctccagtcggctcgaccgcgcgctcaacctagcgcccatgcccgagccctcgcctataagaagccccaaccctcgaccttgccctcccacacactgcatacccttttaccggtgactgaacaccgataatcgccagaacaccgagcgtggcatcgtccgcaagcttgccgacaagtcgaccacgtcagaccggccacaccaacctaaccccgtccattctagctccccggctagcctccctagaggctagcaaagcttcctagccgctcagaccgaatgatacctagaagccagaacacctcgccggacttgtcccgtctgcggttccctcggtccaggtaatctaaccatccattcgtcaattccttccatgcacacactccctgtcacttagtgaacctccctgtgcagtctgattaagctctactaccgtggtgtggccggtgcagacatcgccgacatgctccgccgcctggatccgtggctagaccagctctagacaccaaagacgtcgacccgtaccttgatgtgaccgctagaggctctccttcctcgcccgaccctacgccggaaccctaccaaaaccggtaagccgctcctccgtcttattcaccgcgggtactgtgtaacctagccaggaaccataggttagaggttaggaaaacctagggggttgtgcgtaaaggtctctactcagg

SEQ ID NO: 171141 - DNA, 558 bp, Zea Mays
tgttagtgctctactgttgggttgaatgaacttcagatgtattataatagttgtgtgtcgtgccggttatccaaaaatggtgaaaggtggtgtgtgatggtaattgggaaatagtcacgtcattagccaactcatgttaggtaggagttgattgtgttaagtgattgttatatatattatgtctcgaattgcaataataataggcaagccgacgtgtatgctgtctagcgggttgtgtcgttgctctagctagccgactcgttagatgactttagttaagcttgtagtcacggtgaattgcttgttgtggtctaaatgtgtatggttatggtcacgggtaaaaagtagtagtgctcatgtgatgtctaatttaaaacgcaaattgttgggtgattatcgtgaagaatgcgttgttaattggttgtagtaattttagtgcactaaatgacttgagtaaaaatttgtaagtctacttgttagtcctcatttgattattttaactctaacaaatggtaaagtgttagaataattcaagtttctatatcatggcaattcttg

SEQ ID NO: 171142 - DNA, 467 bp, Zea Mays
gtatgcattatggtagtttttaaataatggggagtgtaaggataattcatcatctcggttgatcaaggtagtaccaattaccccgattaactgacagctcatcaacagtgcatacacaatcctttggaatgtttggaacaggcttggacttatgcaaactttgtgaatcatggtcatggtgctatcgcaaccccgccgccccactcgccgccatggcgctctagttgtgaaagcgtgcaggctttccatggaaggcgcctagatccactctatctccttcgtggtcctatcgctaccgcgccgccccactcgccgccatggcgctccagccgcgaaagttggcagcctactggatcttggcatctcaccgtcgccgctcacttccgctccatctggtatgctcttctccctgcttcccctctcgctagacgactccactgctccaggattggattggatctttgctt

SEQ ID NO: 171143 - DNA, 769 bp, Zea Mays
attaaacgtagatcgtaggaggtattaccatgatttttatcttctaccttggtagcacatgcagagcagattgagcaaaggaggattcgacgacactgtgctcgggcggttttcagcgtactagcgacgtcacgggatgacgggcgattgcggcggactctggcgagtggcgcgggctacggagggatgacgcaaactaagagctcgacgcaatgagagaaggggtcgtagcaacaaggagagtctccggtgagcaaagcacaacagcggcaaggatgcgaagagcagcgaaacagcaatggcgacgaagtacgacaacaatggcagagcagtggcgcggcacggactcgagcagggcacgaaggtgagtggggaggaatctgatgagctcttcggacgcgaagcaccggcgacagcaagcgatgcagtagcaatgccggcgacgactgcgagcagcggtaggcgcgccacgcggaggcgagaagacacaatgcgggctcggcaccatgaaggggtggatttttcgtaaactaagtggcgcaggagcgagcataggacacaatttataggcgaatagagggatgcgaaggggcgctggcgcgatgagtgggtggcatggtgtttcagcacgacgcttcagccattgatggcgcacaccgagataaccaaagttgtggcctggtggagaagggaggcgaagcaaacgcggcttaatgcagagagtctgggccggcgtggtggcggttagctgggcgacgcatccacaagt

SEQ ID NO: 171144 - DNA, 1753 bp, Zea Mays
ataaaatctctaatctgcatacattttaaggcttttttgtgctgacatgggtactatgtatcatcgaaaaccgctggattttgggatgaaggttgcgttttaattagatggttttgagagacatgtgattaagtgaatgattcaagcacgattttgattaaatattgttctttataatttggctacttgttggtaaatttactgctgcctgctcactatggccaagttagaatttcccctgaagttttcactcgactgtcctggcgattgcaaccctttacccctggttctgtgtaactgatatagaactcaggctagctttgtatattctgattccagtaaagtgcacatatggatatatgctgcaatatggtggtccgtgacatcactgcatgcgattaagaaggttagatttgatggtctttggaatgtaaaaaggattcaatatgatttatggaaacacacaaaaatagatgttaatttttggtcttatctacatcctacatagtcatgtaaccagtaattgtcaaggatgctggaataatatgcaacttcatttgctttcgtgccttttctgtggctggtgtatacattttgcatgggcgtcttcaactttccttccctctcgggtatataaccaatgcttcctcgtgttatgatgccaatatgtttgacaaaagaagcatgcatttcatgaatctactttgccgatctgtgtaattccattcggtgcttcctatttcctttattctttttctcttttgggggaaattgacatccactcattgttatatggcactatcacagtggtgatatgcagtgggtccgctgtcctaaccacatgcaccatacctctttaaaaccccagcctaatgtgcatcctccagtccaaggccactaggagtttgtaatggagaacaatacccctccaaagactgggacgggcttcttaaaaacttgcttcaatggagttaatgctctctcaggttcttagtttcttccatcctgcctctgttttctatatgcttgagatgcaacgaagtgatgctatagcagttttacatatggttgtccatgtgtccttattgaactagcgaattctctgtatgtgtctttttttcaggcgttggaatattatctattccatatgcattgtctcaaggaggatggctgagcttacttatcttcttaaccatagcaatcatctgtttctacactggtattctcctacagagatgtatagactcgagttcgcttgttaagacctatcctgatatcggtgagctagcttttgggcggaaaggaaaaatcatagtagcaatattcttgtacctagagctgtatcttgtggctattgatttcttgatattagaaggtgacaacttggagaaattatttccaaatgctaacttccatgctgccgggctgaaggttggaagcaagcaagggtttgtgttgatgttcagtctacttgttttaccaacaacatggcttcagagcttgaacatgcttgcatatgtcgcccttggtggagtcatggcttctgtcattttaatcgcctctgttctgtgggttgggacatttgatggggttggttttcataagaaaggtgtgcctgtggactggtctggtatgccaactgccatgagcttatatgcgttctgcttcagtggccatgctgtttttccgatgatatacactggcatgaggaacagaaaaacgttccccacagtaagtaaagcagaagttcttt

SEQ ID NO: 171145 - DNA, 701 bp, Zea Mays
gtggcggaaaccgtgattggggaaagtgagcaattctcggtccctagtggataatccggggcaaggattggtgcaatagatgtgtgattaccctatggagccacaagtgcactcaatttatagtgatcgtgagcggtggccagtgaatttgggttggagatcagctcacggcgacttggatattttaccgtgctctgcgtatcgtggcgcgcgtggagaaaacggtgccggaggggtaactggctatcctccacgatccctacgacgtggagaatgctttgcggcgtggcacgattgagtgaaacggcgagctccggtgaggataaactcggtcggccgcgcggcaagtggacaggatggccgaaccagctagcaatcacaatccatcccgcggccgatctttttacccgtcctcggtgttatccattcctccccgagcacgaatcgagacggcgatgacacgaatcgcggcagagaggtcgtcgacggtgaacggctgatctgatcttattcagatactgtaccatggccattcctcattcagacagtctgtcagccaaagtttagggcgaattttctcttaattttatgtagtaacatgatcgacactctttagtaaagttatagctctaggatccagctataatcttggtatagcaaccctaggcaaattcttgctcgatcatgcttgaattccagtc

SEQ ID NO: 171146 - DNA, 458 bp, Zea Mays
ccctggtagcttctcggggcacagctgtcgccttcctgaaatctggttgtacacatggaaatattgttaataggcccaactttagtttgtcaccagcagatctagttgatattcccaatcttgcccaaagcataggaaataggtttataaaactaatatggacaaagcgcggacgaagcatggcaggtgacgaagctcgaagtcatcttaagccggtaacaaaatcataccttgtgcttaactttccctttaaacttgaataattcttacaatacttaaatatgtacaggatgacgaagctgaggagcaagttgacgaagctgaagagcgtgaagctgaagcttaataggcaatgatgaagcttaaatagatagctatgtaaaagactaaaaattcttgtaataacctttgtgaagaatattgtaacttgagaattagattttactctgtacattttg

SEQ ID NO: 171147 - DNA, 613 bp, Zea Mays
gagaaaactgcttcgtgggctctcttcggggaagatgaacaggggctaggcgagatcgtggcggcggtttccatttgcaaggcaccagcgatagacgggcagcaacgcatcgcagccagcggccaggagcagcggcaaggcatggcgagcgtgctgggctgcggcgctgcaccgcggctaggccgcgcagagcgcatctgtgcagggacgagcatgggggagcgacgcgctgggctacgcagtggcgggcgtcgagatcggctaggatgacggaggatcgagagatgctgggggtttttttatgcgcgaagttaggaaggggtggttgcagacttgcagttgcagcttcgtgcgttcggagcgggagaagaagttttctccacggaagcgcgggtgacaggtgggcctgcatgaaatgtgagaggagaggatgacggttgggagccacatgacagccaatgagaggatagggagcgttcacaatttggcctagccgctaggcctcccgcacgaacgtttcagatttgctcttttctttctttatttttttattatatggatatagatataaatttatatttgtatataaatatatttatttattcatttcctt

SEQ ID NO: 171148 - DNA, 553 bp, Zea Mays
gactggcccaaggctaacctccggcaagacaggtagtcacaacccgcccgaggccatcctccggtggggatacacattcatgactcgctcgagaccactctcgggcgggagaggctgtcaagaatcgcccaaggccaagcccggcgggagacgcagtcacgactcgcctgaggccaccctcgagtgggagacataatcacgacttgtctgaggccaagcccgggcgggacaggcagtcacgactcatccgaggccaagcccaggcagcagacacaatcacgactcatccgagaccaagcccgggtagcagacgcagtcacgactcgcctaaggccactttggcagaactgtccgcacccggcctcctccacctcttcctgcctctcgctctaaccgcgccacgttccacatgtcgcggcctccatccacctaacgccctccaatctgcctcccgacgcaattcgcggtcctacacacccaacgccccccccccccccgagcctgcctcccaatgtcacctccctcgcatgttgacccgacgcgtgaaggttgg

SEQ ID NO: 171149 - DNA, 1147 bp, Zea Mays
agtgatctgagtccatgctcgagtgagtgacgtggacaaaagggtctgtcgcggtagaggtgcagcctcagccgaccgagtcataggtgtcacaatggtcctgggtccacccgacgtaggtgcaattctgcacggggcggaggcttatcgagatcctcatgccttagagttcgtcggcgtaggtcttgctatagttgggcgaggtaggcctgctaccgcatttggtgccattggagaagatcttttcctggatgagtccgcaatgcggtgcaggatgccttcctgatctgcaatgcggtgcaggatgccttcctgatctgcaatgcatcagagggatctaaagcagaggatctttccagcattgaaggtgaccgggatgttgaaggctatagccatggagtcgttgtagatcaatgttgcaccccctacctggtgggctagctgtcggtgtttgtgacacgaccgtgcaccacagggttacccacgtgatgcttttgggtaggacgacatcattgaccgcaactcgatggtacatgcaggagcatgttggaattgcatagggatttatacaggtttgggtcgcttgaatgtgtaacacattacttcctattgaggccatgtattggagttgctttggagtatatggattacaaatgagatgcgatggtgctcagagatcatggatgagtgctagtgtgtgatgggatgagatgtgatgttttcgtaggggtacccccttggacttatatagatgactagaggggtatccctttacaagttgtgatcactatctactctacttatctcctttatcacgacatgtcgtcctgtttatccggagttcaaacgcttcctcagccgagttaatgctgattgtatagctcttcaggtgcgtgcaacttctttatccaagatatcagagtttcggtctacgcctaacctggacgtccagtccttgccttcttggatcgaattcgcccaacctagccgtggcctgatgactcgtccctgaaagcaaaccatcgaggggccctttaggcggtccatgatatgtttctatgtttgtgaggacccgaaggatatctatcccccatacaaggggctccctcatgctatcccaagccatttcatggcaacccactcaccc

SEQ ID NO: 171150 - DNA, 360 bp, Zea Mays
ccgagacatcttacgcgacatatgcttaatggcgaacatcatgggaagacttacagcgtgcaaggaacggcaacggaagcaggccacgacgaggcacaatctgcggcggtggtgtaacgacggtgagaaattcgtccggtcctgatgcacagtaactcccgccaaggccacgaacgagttcccagaggttccacgcagcgtcccaacctcgcgccgaggccccaaccacggcgcccagaggtcctcgacgacggtcgcacttcgcgcctccgctgctcacgataagtcactcatggcgaggttctagcgatttgggttcaggcgaagggctcatgggcgagacacgtatttatccctccc

SEQ ID NO: 171151 - DNA, 504 bp, Zea Mays
atgcacttgcatacttcatgtatctgatgaattctgttttcatgcctgaattggacaagttcgtagtggttttcatcgaagatatcttggtgtactcaaagaacgaaaaagaacatgccgggcatttgcatgtagtgcttcaacgtctgcgagagcaccgtctttatgccaaattgtcaaaatgtgatttttggctaaaagagatcaaattcttgggtcacactatgtctcaggcaggtatagttgttgatcctgataaggtgcaagaggtgatgaactggaagccgccaacgactgtccgtcaaattcgaagttttctgggattagctggttattatcgaagattcattccggatttctctcgaattgcgaagcccataactaaattgttgaagaaagaagtcaagtttgtttggggtcagaagtgcgaagatgccttccatacattgaggcaacatctgaccacagcactggtgttagtgcaacccgacaatagcaagccat

SEQ ID NO: 171152 - DNA, 553 bp, Zea Mays
cgcaatctagatccttcaaagcatcttcaatcctgaaaggttcaatagaagacacaaaggagtaatcttcacaaaaatagaaattctagaacgagtagttactcccttgtttatgtctctaaggatcatatccaccaggtggtctctttgaatagtgtggtggactcttgggtgtggcacttagattttgtgtggtggtacttcatcttcatcctccttgtcttattcttcctcaacccccacttgactatcgccacgatcttgagcttgttgttcctcattttgagttggggttgagcttgtgtggaggatggttaatcttgcacttgttgaggttcttgtgggcacacgtctccaatggacttgttgaggttcacgtgtcatatttagagtgtcccatatctcctcagcgctctaagtcgttcaccttgttatattcttttaaggtggcaccttctttttgattggcaccttccttctgaggtggcaccaaactagtatggtgcgctaggccaacaaatcccttctatagagctatctacgtaagcggccc

SEQ ID NO: 171153 - DNA, 333 bp, Zea Mays
tgaagagggaaatttctaagtatatatctgaatgcgacacttgccaaagagtcaaggccagtcatttaaaggtagcagacaccttacagccccttcccataccttcttggaaatgggaggatatttgcatggatttcattgtgggattgcccaatacctcctgacaccacgattctatttgggtcattgtggataggttgaccaagacagctcatttcttgccggtgcataccacccacagggcagagaaatatgcagaaatctacattgaccagatagttcacttgcatggaataccaaggactatcatatctgacagaggagcaccattcg

SEQ ID NO: 171154 - DNA, 750 bp, Zea Mays
attgaaggccaagatcacagagttgacctactgataataagttgaagctcaagggtgcaaccaagagaacatttgaaattgatagatcatttgaaattgccaccgtgtcaagtccttgaacttttccctttgaattatccccaaatgtgattttgtcttgtccatcaacattctcatcaagtgaggtgaacatctgtgggttgcctatcatttgttgtgtgcatccactgtcaataacccaatggctcccaccggtcttgtaggtcacctacatccacagataaatcaagcttgaactttgagggccctattttgcgtaggaccagtgactttttcaatcaaggactttgcaacccaaatttgtctaggtctactcttgcatggtggacctaggaatgtaactctgactttaccatttgctacttttcttagaacataatgagcattgaaggcaaatgctcttgagtgctttggcaagggagttggtggcttggctttgcagttgtgggaaaatgaccttcttttccacactcaaagcatttgataggcttatgagtctgctttggcttgtattgaattgtagctttcttttgcacaaatgaattatatctaataccactcttgttgtttttcatgatagtgttcatgagcaattcattttggaggtattggcccttgttgaacttttgcacacttgttgcaagatgttcattttcactcttaagtttcttgacctcattttaagccttt

SEQ ID NO: 171155 - DNA, 384 bp, Zea Mays
aaaatgacacatataaaacgtcttcgcagcagttgggttctagttctgctgcccaggtctgtaggcatttgggtttctgtgatgaaaacgagaacatctctcttgaggatgccaatggatatgcaaagctattcgagaatggactctcaagtaaccatattgttgcagtagctgcgctatttggctggcaggtgcctcttggtgggcaatgctaggcctttttgctgtttggacttttcaggttgcttatattctatatcaatgttggatagctgttttttgatttagaatgtgagaggccttaatgaccgggcgaaaagggattctattaaatcagtggtggttgaccttaggccttccattatttgtttgcaggaaaccaaa

SEQ ID NO: 171156 - DNA, 741 bp, Zea Mays
agatgtactcgatcaccgcccaacagagactgctgccctcgacctccaggcgggcgccaagaatctggtctaggcatcggaggtgatcggcggtggagtctagcaccgggagcgcgtcgaagatggacgtcggcagctctgacaccaggatgggactcatccctagcggcaccagtgccgtgctcgcctcgccggcccatgcggcaatgtgctaaaccccagaacgatgctccgcctgaaggtcttcaagagccttcctggtagcctccaccacctggggacccggtgccgcctatgccgcctggaaccgctggatctgctcctccagctctttttccttcttctccgcctccagctcgtgctcggccagcaacataccccgcatgtcaagcatttcctcctagaaggcgaggtctgtctcccacctagcgagatccaccgcccgcctgtctagggacgcatccttctccttgaggttctcctcggcgagcgcaatgtcgctggccttgtcctccagctcttgctcccattttctgattttttctatggcctccacttgctgggcccgctgggcctctagggtctggtctagggcctttagcttggcccggagctccgtggtgagagcctccctctggctcaaggcctcctccctcttggccaacctcttctccttccggctcgcctctagctccctggtgtacaccttctggaggtccttttgtaatctttacggtcccg

SEQ ID NO: 171157 - DNA, 798 bp, Zea Mays
gttttcatttgggcagtaaggagccagggattggaaccggatgctgattgcgtttgcaatattcacgagttatcttattagatgaaggccactgggaaagaacagtatcataacaacttcagatgttataccttcgtgtaccggtctgatgcaaggtgtcacgtgccaacttttcagaaaaagtggctgggttcatggatgaagcaatggttttatgtgaagaatgatttgagtcaaagaggtgatattaaggatgtaatccagtggcctatttgatccatcttcggactgaggaggcctctattgtgaatacggagaaatcacaaggttgctaggcaacattcaatgctatatgcagttacattggttctagagacatagtgcaggaacacatagccttcagggtatggcccctggctgccgaatgggaaatgccgaagggtgttgaagctaatacagaagtcggaaagggcaatctggtttgcctgaaatacacctatcgattcaggaatcaatttggtgaaccagttgatgattggttagatgccatcgaagcaacaagtgatgaattgctagggggctatacgaaggctaaggatgaagctatgtatactgccttcggtgctcgggggaaacaaagactgaacagggtctttgatgttatcggatttgtttaacttgattaccgcttggaactagtagattagccgaaagttcaagagttgccgaaggtgccagcgaaaccacaaattgccaccgttccagcgagaaatgcctaagggaggaagaagaaatact

SEQ ID NO: 171158 - DNA, 572 bp, Zea Mays
gcctgtaatctcggattggcgtgaaatttggcaaatgtgttactggaagtgttgtgaaggtgcctgaaaaatttgggttcaattggagcatttttggctggtttggccatttcaccgaacacgtggagggcggtggtttagggtttcggggaaatggctgtttgaggtgtgaaaaccctcccgaaggagctaagaacctgcaggaatgctcaagacacgcagagacacacatagcacaacttggattcacaggaatttacagagatttgaattttgcgcaaagggaggaaaaaggggaagcttcactgggtgaatgtgcagagagaagagagaggagaagacaagagtacacaccagggaagcacgagcacggggattgatggaggatcgccggagcacggccggagaacagatcgccggagaggaggaggtggttgccggtgagggggagcaattcccagagaacagagagcacagaggtgaaaagagcctctggctcggtctcgggctggaggccgttttttaaaacgcgatatgggcgcaccggacagtctacagtgcctgtccggtgc

SEQ ID NO: 171159 - DNA, 432 bp, Zea Mays
gataaggaaagttgtatggactttcctcatcagcatgcttaatccacagagtagaataaaactgagcaatgatttcatcattccaatcatattggaatgtcatgatagtcttcatcctcttttgctcacaggccctcaatgcctgtgtcatctcaggatccccaatagcttcgcatccactccagttgattaaacgctggtggaggatgggctggtgcttctttggatggataactgaattatagaaatcaacatgaaggagagtccagaagcgattaccatcaatcctgacatcacgaacacgaaaggtaggattttggaatcgcatatcttgaagaagggcagaccctccgctggcactaaaatcaataacctcttcattggcggaacgatgggcttgtgctttgtgaagcactaatccttggatactgg

SEQ ID NO: 171160 - DNA, 679 bp, Zea Mays
gaagacttgaccctggtcttcgacaggctgcgcgcaacccgcacaaagctgaacccggacaagtgcgtctttggtgtctctgcagggaagttgctggggttcctggtttcacaccgatgcattgaagcaaacctagagaagatcaaggcaattgaggcaatgaggcctccggcccgcatcaaggacgtctagaagcttgcggggtccctagccgcttcatctcaagactggctgagagggcactgcctttcttcaagctgatgcagaagtccggtccattctcttggacctaagaggccgaacgagcctttcaagtggtaaaacagcaccttgtgtccctgccaatactagtagctccggagccgggggagccgttgtacttgtacattgcagcggcttccgaggcggtgagcatggtgctggtcgccgagagggcgacacaacaaccccaggggagtcaacaggttcccccagaagaaggtggtgatccgaccaccacgttgttgacggaaggccaggaggttgaggactcaggatcaaccacaggggtccgaaccatccagaagccggtctactacgtcagcgaggtcctccgtgaggcaaaggccaagtaccttgagacgcacaaacttctctatgctgtacttgtcgcgtttaggaagttgcgccactattttta

SEQ ID NO: 171161 - DNA, 409 bp, Zea Mays
agagtatggttacatacatacagtgagggcatcacacactacattggctcaaccttcgggatgatacccatctccctatagttgaacaacattatcctcaattcctcacccgcaaacagacttcgtagttccccctcacccacactcaccccagccggcgaggacaacaattcccgcttgccagtcccatccacacgaaggcgtccaccttccacctcaccacgatgacgcctaccacttcgcggcagctcactcaccctccgtttcgccaccgcccttcgccgcctatgcccaacactcgcacccggaagatcctcatcacccattacacgcggtgaagcctccaccgtagccacatccaatgccgcaaagtaatccaaatcctcatctgaagactcctctgtccaca

SEQ ID NO: 171162 - DNA, 646 bp, Zea Mays
tgatcattgggttgaaccagacctggtcagcatttcccagtcacggcgccgttataccctttccgtcgtcagcccagccacgtctcccccgtttcccggtttccaaaaccgtcttcgcgcaatcaacagagacaaacccgcgccgaaaagaaggaaaccccagcggtcgcggcgtctttccttgcggccgaggcgacttgccaggcgatttccgtcgctccaatccagcgccgctccaatccagctgagctccttcaatctccgagcattggagcccgattcaagagccaatgctttcccgagaagttccaggtaatccaacttgaaatacatcgaggtttccgtcgatttttgaagcatttttgtcgattgaagtgggtttgattgtaacccttattttttagttgtgtgtgatttatatccgattaaacatttctctaatcggctcattgcatctctcttttgtccaggagccccgatcttagagcatctgcatttcttctagatccactctatcgctcggcattcatagacctagacaaaggctgtggatcaggtatttattcatgagtttgcagagagtacctttacacaatattagtaacacgtatatgcttattggatttgatatatatgcatatcgtca

SEQ ID NO: 171163 - DNA, 605 bp, Zea Mays
caacgttccttccataagggaaaatctttaagtcacgagctaatcgagacataaaaaaatattcgccagccacccggggtattggaacattcctaggccagcgacctcctgtaaccttcagcattcatgtagaggtttctcggagctcgggtgaagacattgtttccccgggagctgcgcacgtctctagcaactccccaacaaaatgaccagaagccctcaaccccaaatcatcagctggtgtacctaattttctctttctggcggccgcacatggagccttatcccgtgaggggccttcatcggtcaagggccttgtttgcttccctcggcgatcagtggtgtcggcagagtctccctccgggtaagcatcatacggcaaatggttcagctcaaaatgcggttcaacctagcgttggaaccgcgaatatcccaactcctcaaagtctctgtcttcaacgcgtacttcccaacaagcttgacggcctcggcctcgacctcacgcacaaacgcggccgtgtcttgaccgcgcagatccacgccgaaggcaggacttcgcaccagctggccccccagtgtcggcatcccgcggggggtaacctcac

SEQ ID NO: 171164 - DNA, 646 bp, Zea Mays
gtccgttctccctcggcgtaaagaaacttcaaagcagccatttctcttccccacgttcttctccattgaagccgacgacatcaatagctttgaagccggtcgtcgatcgcgcccttccctctcctcggcgccctctcaccttctctcgctctctataaagggcgtcgtgcactgggccatttcattctgcctccctgcctcgctctcacacgctcctcttcactgcttgcttgtttgcgtgtgtgttcgcgccatcgcgccgctcgctgtgactggaggacctgctccttccctgtcgccggcgaagacgagtccccttcgacgaatacatgcccagaacgccgttgagccgagtgaagccgcgaccccaggcaactgctaccggccaaacccctctgctcgatgaccctccctgctcacgcatcgttctacgcataggaaacaatgaaggtagaagatgactcaatcgcgatctacccctgcaagctatatttaatatcgttcagatccctgcaacaatttctccattttaaagtcatgtatttgagctcaaatgaaatgatgtttgaagaattagctttataattatttgataagcaaattttagtttgtaattctattatgtctatatttccttttatgcaat

SEQ ID NO: 171165 - DNA, 3523 bp, Zea Mays
tattcaccccaaaactattgttcatttgttcttaatgtaaaaggatgaaaaacactaagttagaaagtcagcacaggtagataattcagaaggtaagattactagattagacttcactacttcagtatcctcaaaagtaccatcagctgtaactaaaagcatattacatcagaactttgccatcagagacatagcttatctgccaaattttctggcaatagtttggcaataatattacattcacacagcctgcaaatgcaccatttgaaatacgatacaaaatacccataaagtgtcaagaacttctaagcagaattaggaatatgaccagacagcagcaaaggacatgaaaagagcaattcaaatcacaaatatgtgcatgtagaggatgaagacacatgcaaacggttattagaggctctggattgtttaatatgtgggtttctagaagaacaatgacaaaaacacattagataaacggttaccagttactacaaactctggattgtctgactgagaatgaagatacatacactgtggttgggttgcagcttccagcttctcctgatttttcacagtcagtccttttgattggtgaattgcaatgaacggaacaaactgaccccaaacaagctccttgtgttttctaatgagaacagcaaggcaatccagtgtttgtggccatagatcactaaatctattgtacaatatgccaataataccatgtaagagaggaggtatgtaatcatcatgaaccatcttggaagataaactcatttgtatccgagaaatgaagatagcaattttacggctagtagatactgaaattggcattgactcaataatcaaaagaatatccacaacctgatttcaatgaaacattagaggcatgccaagaaaatagcaaataaaagtattagttcacaagacatacattagcgtatttagcaacagcttcctctccagaaacttctgttctctgcctcttgtgtggtcgctcctcatctgtgattagacgttgatccatcttcacaaaatatgatagaatcctcaatgttaaaatccgaacatccttggttggactgctcaaattgaaagcaaagatggagaacagctccaagagattttgtggatcaaattcttttgtcacttccatggatgatactctgctcatagaagcatacaaaaaaaaatgaagaatcaccttaatcaaatatattaaggagacaaatgataaaagtgcagggtaaaaactaaaaagtatatctagctttacccttgcagggaatccaaatattcagctacagcagacagtacttgtgggcatgtactgtgactcttggcaagcgataagaaaaaactaaattctgaatttctgctggtgttgaccaacagtagtttgtggtacgatgacaatgctgcaccaagtagacctctccaggtagtcattggaagaccattcatgttccctgcatgtaaatcctttgaatttatgccatttagaaaaaccaactgcagtgatagtaatataaagaaatcttcaagtaaaatcaccttctcccacttcaagcaaccgatcaaagttgatgattaacttcctcagcagtgacaaactatcttgatgtacacctttcatgttagggtagcagaaaaaagatccccacagtatagcagcttccttctcactgacctggttactagatcgattaccagtgccggctgtatcatctaataactctatccacaaagaaaattttgattcaaagaacttgcaagttttctccactgaatccagatgatttccatcagtgctacaaagaaatatttgcttctttgatcctttaaagaaatttaaaaggataaatatgacatcctcgggtgaacttacaatgaaattatccattgcactgcaaagcataaaattgcatggtcaaaccttttgggtgtgaactgttaatacacataactcttttaaggaatagaagaaaatatattgcataccttaatatttgactttcaaaatgttgtgcaacttggggaccttttaccaaaagtttctttataaagacaatcaccctggatacaaagttgaatgggcattaggtgctagatcactaccatttggtaagaagcaaaatgtccaggagttaacaaagtaaacagacaccatcagcaagaacaaatttacctcggatttttaagtttgaacactggggcatagaaaggtgatatgatggacaaattgcccaaaatggttggaacatccagaacagaaagcataaagtcaagaatacttccaagaacctcaattgaagaagatcctgttatgttgctaccagggaacacatatctactaaccagcaactcaacaagtttaatcatcttcaccttatctgtggcaaaatagagaagaatctactaatcatctaatctgacctaacaataaattcaagcagcgaaaggatattgacaatgaattggtaaatctgaccgaatgcattgttttgcttcttttgtaaagcaaatgcaagaaaaacaatcaagcacttcaaatgctccaaacagccatcctcaagacagcagttgatttcttcacataaacaagtatacatcaatggtaattcttttggatccacttcatcgcataatctttgaatcagccctgtcatgacggcatgaacagtagaagaccctgtgttttgtactatgcagtgattattattgaacaacaaaaagaagtgtgtaaaagagcagctttctaaacatatttttcctgacatgattatgcacaaaaaatgatgttagaacttgcattatggttctgaaatatgtagaggcctaaatctcaagaattatgatggggcactgatgaattcagttaaatggtgatacatgatgaggttagccaatgaacacaagcaatgatagaacaaatgaaacataaggacaagtgcaactaacattaagaaaatcacaatagtaaatgccattgggaatttggcagaaagtcgtctcaccatcagagaatagataaaatgtggaggacaaaaactcacttgttaactataataatgagacactgatcaatctagcaaaaccataatgcgaaatgaggtggcccaatgaaaacaagcaataagttgaacatatggaacataaataagggcaatgcaaaaaaaaaatgtgtcatccgcagaaagttctgaccatcaggaaatttatcacggagagtggaaacaattgacttgctcaacaagaacttcaagacctgcccagcttttgagtgtagctttgtggaagttcctttcatgacatgccacagcaaagagaccaccccgtctatccgtgcaggtgatggttgtttagcagcctcaagtagaactttcagtagacctaagggccaatcaagaaaaatgcaagttaaaataaattagatacctcatttaaacaagcatgacagcctagcttcccactaccattgatggtagctcagcctaaacctttttagtacccgtactccctc

SEQ ID NO: 171166 - DNA, 805 bp, Zea Mays
tagaggattagccgactagggtttgaggatgttgggattttaactctcgagccactcaatttgactgcccatgttcgtctggcggggaacgggtatctgtggaatttttttttggggctcataggttggtaaattttcgaggggtactggtcggttcacttgtcgagatttttaattagggttctgggaaattatatccgtaagatgccccttggtgagggttgtgggatttccttgtcggattgtgccattgtgccctagcaattccggaattagggtttctggtggtggtccgtgtaatttgggcccataggatggtggttgaggtatttttcgttggtgtggaattggggtaaagggctttaaatggggatcgttgtcctgtttgtcattctaatttgactgcagtggatgattgctagttcctgtatggttgagcatagtatggcgcccttaaaatagggggaagctcatgctgttgcttgtttgtcatgttgaaagctggaatcgtatgtttaatctactagaaactttattctgggtatcaactgctgtaagatgtggttttagaagcctatcttgggtatttatagcggtgtagatataggcttaagcttcagagctgtgagtattgttcatattatttgatcttcaggttatgagtattgtttgcatcgtactgagtggcagtacagtgtgcatcatctccacagaaacgtgtatacttggaagcttgtagagcgtgcctaacttgctgctaactttgtttctgtatgttgtcaaattctattgttgttagttttcc

SEQ ID NO: 171167 - DNA, 533 bp, Zea Mays
taagtcgttgccgacttaagtcgattgctccgttagcagggcatagtggtcaccccgagttaagtaagcgtgcaagtcaatcgtgaacaaactgagtatctttgaaacccccttttttattgatgacatatttccattttacagagtacatcgtcgtctcgatagcttttgaaatacagctagggataaaacttcctgaggtgttctatgttccaggagttcccgacttctgtgccatctatctgagtgagacgatatgatccgggccgagtgacttctgctactatgaagggtccttcccataggggcgataacttgtgccgtccttcccccgttagaattcgacggaggacgagatctcctactgagaaggatcgctgtcgcacagccttgtcatgatagcgccttagagtctgctggtaccgtgctgattggattaccgcattcagccgttcttcttcgagtatatcaatgtcctccagcctggtggcctcgacttctgctatgtcttcgaagatcaaccttggtgcccc

SEQ ID NO: 171168 - DNA, 344 bp, Zea Mays
ttaccaagctcttacaagtgtctgtcgaaatacaagcaaaggatggtacaatcggaggctggttcgtgatacttaccaagaggtagtgaaaccacgattacaaggtcacagctgtattgatcagaagaaagtatgtggagcttgggaggccaaaaattaatatcaaggattagcaaaattcgagtgcagattaacgaagttcaataagtgtccaaagcacaagtcacaattgctggctaagacgtgtcctatcgaagcacaacaaggtaaaggtaacaaggaatggtggacaaaaacttaaataaccagcagaatggcagttctgaaaatagcgcagatttttc

SEQ ID NO: 171169 - DNA, 349 bp, Zea Mays
atagacccttgcagttctatttcttcacagtgccgggtccacgacggtggacggcgacgggcaagtctccggcgagcctgtatcagccaagatacgcaatggtcggtgctctggcttggctgacacacaattctacccctgacgatcatttcccctcgattaattgcaagtttctagctcctaatctcgctgcccacggtgacagcgcaaaccaaggacaatccgaagtgttcccggtgatctagcatgatctagttcaattagccgggctgctaagcatcaacagcacacaaggatgttgaaacaagagcgaggaaggcatgatcggacctatggagagctagccacg

SEQ ID NO: 171170 - DNA, 309 bp, Zea Mays
cgctgaagggacaagggagcaacctgggcgccatggagggagctcggttggcgcgacgtcgttggccgaggaggaaccggagatggtggctgggagctcgcggcaaagcaccaccgtgccaggggaagagagcgccaagcagtacaaataatgcaagttgcggccgctttttggctcagtgttgtagattccactttactttttccctagaatatccccgtgctgctacgcaactgattcttctcttccatttgtctaccgactccacttgtttatattaaggtttcgaattgtgcatcccagcatgat

SEQ ID NO: 171171 - DNA, 889 bp, Zea Mays
ttccgttagcattaacaaaaaaatcctcttgattctgttttcagaaaaggaaatgatacctctctccaaaactcttctgagtctgcagcacacactattcaagtgcctgtttcttttaacacaagttattgttcaaactcaaattaacatgcacatagtggattgtctctatccattcattcttttttatataatacgcaggatagctgcgtatcattatattatattgagaagaaggggaaaaaaagggaaaagacccaatacaattgaacaaactaactaccctgggtcaaaccccttgaggaaagacaggccaaaacatcagccctagcaatacttagggctatatgtagatttagagacccctcttggaacacacacctatttctatgtttccaaaggacccaagcaccaagaatcacctctatccattcttttcttgggtatcatatccactcatcaacgcacaggatgagattgaaaataaaggatgcatataccataggcagttatgagctcattcagtacgatcttcctaaacacatgcaagaaacaaagttactgcaacttctacaactactagccgttctaatccgcgaagatgataagtttcagcattaactacatacatcacattgtcacaacaaaacatagtgaccccttccatatgataagttgtgcaaaccttaccagatacagttttgtcgctttcaacagaagtatttatcgtctttgttcctgtaaatactgaacaactgctcagagcattgcaatactactctctcaagtaaatcatgacctgtagaatcacgcttcactaggtcctcagcagttcttgtcagcggtccctgaaggttgccatccaaaagaaattctgccaactcagccg

SEQ ID NO: 171172 - DNA, 6878 bp, Zea Mays
ccattcatgtggcgttctcccatagccagaattgctagggctcggtgtccgaccactatccggtgcggcggtgcctccgatcaggtcatagggcaccagccaccgcgtacatccactcctccattcctcaacggaagtttctagaagaggtgacaacgaacctgctcttatgttgtcgtaaaggtcatcggcacccaactgcctacgacatcgttgttgctgctcctgcatgcacaagagtcgggccgatggcctctacctccgatctgtgccctctcctcttgccacaaagctaacgtatgtgaacatcctctcctccttgcttccccaattaaatctagaaagatgtttcttacttagaaattacaaattaatgctgctacaattttggacaggaagaattttacattagcttgttgcagtttttgccttgagagccttgaccaagcgaacatgaattgattattgtggtccgtagctagatataggtggtgcaattgctaatcttagtagggattttatggaagtttcttatgacacatgattgatggagagcaatgaaactagtccacactattttcaacacataatagtcttggaaacatgatacgaattccctactaagactagctaccttaacaactgcaccttaaaaagaaaacacactgctgattacttgtggctctagctaagctgatgatgctttgatacttcaacaacaatttatttgacaacatgttaggtagaatcatttttagtaataaatcatacaatatgcgtaacttgttcaacacttatatgtcttgctatgttctgaatttgcgctgccatgttatgagttttttcattgctcaagattgccatgttcttctatgttgcacttgaattgctcacttttaaaattcattttaaacaacctcatatggagaaatgaacaaaatgaatgttgtagataacaaaaagttatgcaactttaaagttgatatgcttttatttgaataatttctttaaataaaattacatttaaattttttaaatatttgaatcatatttaaaattcaaaattttgaaaccacctcagatgaagaaatggccaaaataaaagttgtagagcttgaaaattataaaacttttttttgatgaaataggatgggtgagaacccctagtgaaattaatatttaaaagtaaaaatacaacgagttaaaaagttgacatcaaaactattacattttgactaatctaagtaattatgccaggcacatatgatagagacatttttttcttctgcactctaagaagaaacaaatcaaaaagatctttgaaattattatagtagttcattactgaaggatttatgccttagaatagccaagcattcctttgagtccagattgaccacatcataatgatgatgatgtccattgcaaatggcaaacccaaagcagattttattgcagtgatggtctggatgtgggagcctcctctttggaaagtaactccaatttttggtacaacgctttgcaaacccacaatggaaaaataggtgcttcaccgattctagcttctgtagaatgcaaagtccaaatactcattttaaagtataataagcataatgtctagaatgaatattttaaatgaacataagtgtcttattgatgcatttgttagacaaataacccgcaaggactgagatatcgagctcgagcaatggcagccacaaacccgtttgtccactatcctaatggtcgtcagcacccgaccgtctcccacattgttgttggtgctagatgcatagtccaagctctatgttggatgtatgcccactttttcacacatatagtgtcgaagccaagttccaatatgtctcggcacatgctcgagctttgaccgaggtattacgtggaggccaacccaacacaaaggttaggacgccagacccaacacataggtgcccaagtgggctaggacgtcaggaagtggtgtccaatattcaatttcaagctggctccactagtatgagcatcctctcctccttgctcccccaatcagatctctattccccttattctcccaattagatatagaaagatgttgcttagatgttacaaattaatgcacatgacttgattactatggcaaccattatgtgctaatatatacctaaataggtgttgcaattgacagtcacattgaggattttatgaaagtttcctatgacccatgatttatggagagccatgaaactaattcacattattctcaacatacgatagttttagaaacatgcatataaaattcgttgtgatctttggtgtgctcgaatatcaatagcatgtatgcatgagctcaaatacatatgtgtggagctttccaggtgcatcttacaatgttgcacatttaagaaaaataaaacattcatatgcatgccaaattctagctttcggtcacccatggttcctagaaatgaataagctaacttccaatgcacaataaaaccaatgcttccaagaaattaataatatgaactatcagtaagtgagaagtaattgtagatgagctttttcggcttagattttggttcggcaggagaggagcttttgtgcggatggttgcgagttagaaaaactaaatattcaccacaatttccaccagttgaaaacaaactttgcatgccattcatgtggcattccccacaactggaattgctagggcatgttgttcgatcgctccccggcgcctccagctaggttatagggcgccagccatcacatatatccactcctatattcatcgctagaagtttctagaagaggtgatgacaaacctgctcatatgttgcctacgatgttgctactgctcttccatgcacaagagtcaaggcgatgacctctaccttggatctgcgccactcatcttgtcgtacagccgacatatatgaacatcctctcctccttactctcctgagcagatttggaaaggtgttggtccctaagaggttacaaattaatgctactacaatttagatggcaagaattttacattaacttgttgcagttttttccctgaggcccttgaccaagtgcacatgatttgattatcgtggcaaccattatgtgccatagctagataggtggtgcaattgctaatataataacagtggggattttatgaaagtttcttatgacacacgattgatggagagccatgaaactagttcacactattttcaacacataatagtcttggaaataggatacaaattccccgttgagactagccttaacaattgtagcttaaagagaaacacaagattgattactagtagctctagctaagttgatgatgctttgatctacaactgtagttcatctggctacatgttaggaataatatattttagtagaaaattgtacaacatgcctaacttgtttagcactgatatgccttgttgtgttctgaatttgcctgataagtgctgccatgttatgagtttttagtgctcatgatcgtcatgttcttctatgttctaatttgttcattttcataaaattttcatgcattgttttacttgtatagatggccaaataaaccatctgatctgaacccgcataagcctgaccaagacaggacccaatagttgtcaggcgagcaacacacgagtgtgactaactaacacattgggttgtgttgcacctactcatggctacacatgtgcctcggttataaccttggtcataaccccataaaccttgagccttactaggttggcccattgacacacgagcccgttgtgcttgaagcattgcaaatctattatgccactaaggttgtgttcggttcagctttctgaaccagactcgttgccaaaaatttggaacttcaaacaaatgggtacaacaacataatagattcctgaaaatcgacatatttctctagttcaattcagaatcaccttttaccccagatttttagattcctattatctatgctataagctaccattctcttataaaatatataattgatagttgtttcaaattttcagtttttccacaatcgtcccttcacagcagttttctcatagctcacagctagaatccgattttttaggaatctacagttgaaccaaatagacccgaagttacccctaaatagaaggaggctaccaccctacccctgcatagatcaggggtgaagtcactgcctcacccctgcacaaatcaggaaggatgatgcatcaccctatccatgcggtcggatctaagggaaggaggcccacaataccacctacacatggatctgagggaacatgtcaccatggatcttggtgggcattaatgagaggacaaaccgagaggaattaatagacattagtgagagaaggaacattaccaattagaggacatatttcgtttcgagaggagatgtgacattaaattgactagggagtatgatgtaggagaggagctcgggaggtgatttttctagggataggatctgggaggtcatcgattgggattaggattatgagaggagagggaataaaaataaggtgtccgagtgagagttcgatggggtggtgttggtatatactatataagctagggtttaaagtagtgggccatgttgcgtcaggctggcacgtgtgccaaggggatggcctaggcattgtgcaagcgtcggctaggccaacataagcatgacgattatggcaaaacatcaggctatgggtcatgttgatggctaggactcgagccttatggtcatctatagttagttgtaatagtaagcagaccctatttattattgcatagtcatgtacatttcattttctcatcttcatgaatgctagtgaatatctagttggttgtgacaataattaattttatatatagatggaaaaagggacaaaaaggaaaaccattgcaaaattggatgccagtgcacatatagcgtgaatagacatggtttaggaagagatcactagctactagctagaatagggcataaggtcacacacaaatcatgttaaattttgaagaataaactggcagggatcctactatcgtggacaacatagaaataggtggtaccgatgctcacaaagctgaatctagagcagggaagactttgaagatccatgacccaaggttagcggtgaccctgaaatttggacaatttttagggattattttggaagcaccctggtttttaagaatccagtttctagaaattggtttctaaaaaaaagaggtgagggtgtttgaaacccggtttctaagaaaaacaatttctaattttttgatacacaatgtctagcctatccttcctctataaattgggtgagggtggaaataaatgtaaatgtcatgaaataaataagggcatgatgtaattaaacagacaaactagttttagctgggagaggtcaccttctggattttaagaaactagggatctagattctataaactagagcataaaccattatgtttggaatcactctagtttccataaactagtttcttaaaaatgggcccttaagagttgtggaatgaaaaggttaaggtataaacaaatacatgttttcttttttagttgacgaggattaattgtttaaaatggattggcatttgccttttaattataggtcactctagtttgtaagaagtacatacatgcaccactagaatatgaacatagattatatgttatttttcttacacaccaatgattccctcatgttccaaggctaatggatggagctatcaattgatgccatagccatgggcaatagatgtgagatccaaaatgggtcaagtgaggcttggaacccaaggcattgagttgttcttttttagtaattttatttaatattgcggtgatttgtcaatgttggccttgggctagagataaatagttcattgattgaaatactagctgaatttagcctctaggaaggctagaggttaagctaatccacttttagagctaaacactttttgcagctattagttgaatttagtacactaaatgttctagatagagctccatttagcccgcaaatcaggcgaggggaaccaaaaaggactaccaaactagctgaccaaagataatcatttataaattgatgtgtttgttagactatcacttgttagttggtatttatagtatcttgttcatcttttttgtttagatatgtgtaaaattccctgatgtttaacatgttttttgcccacccgctaaattatttagcgcactaaaggtcatagcagactatttagaacactgaataccagtctattgttttctcttgtatagaacccgttggccatacaaagtatgcaaactaaattatagttggactctaaacaagagcttgttgtttgattaaaattctaaatgactggagttttttttggacatgtcagtttggacctatagttgtatactttgaaataacatttgtttgttcacttgttctataaagaaattatgtaagcttagagcctagactagaagtgcattttccttgtgttggttgaaactgcacctatatttttactatcatcaattctaatgtattataacaatatagtaccatcatgagcttttccaattattctagaaaacaggtcatgttcctctattatccatttaaggtttttaaaaagacaagtaatcagttttgatgtaaagtttgcaagaacttacacatttatattatttatttgataggtcatgaagcataatactaataaaagtattgaccaaagaacgcaaatggcttcttcaaatggtcatgtcatacctaatgtatctcaaaatgattcaaagctcgagctctttggttttgattctctagtcaacattttgg

SEQ ID NO: 171173 - DNA, 1315 bp, Zea Mays
tctatatttaaattttaaacttctctgttccctggttgcgcgcataaaaatagaggaactcggggtttgatttgtaaaaactctcaagactcagctacacctaggaaaggatcgcgggttgattctgaaataagaaagggtctcttttgaaagacgaccaaggccgaaggggtatcacatgatctcagccgctcgatctgattcaacggccgagattaaatcttcctaactctgtaccggcacatgagccaaccgttggatcgagatccgatggcccggatccatttaaccaaacagctctcctacagtctaatcatatccgttgaacaccagatggatggcttagatctcggcttcaatgtgacaacatgagatctaatcttcaccgtccagcgagcgatcaacggccggtggtaatccccccttccctcactcttacgcgatcgacacgcggtggcccccgagcatcacacggtggttcttcaccggtgaattcactgccccatgccccagtgctccattcttcaatccaaccagtgcaatgcgaaccaagtagccagataatctatagaacacaagcttaccgtgagtcgtagcacacagtcccctgcccacggtgggtggcggattcacggtgctatcctgcctccgatgaggaattggaggtgactcagtcgatccacgcaccccaagaagctatgccctggttcccagcaatctgaagaacccctccaatcaccaaccgagcgaccaacgttagcgtaccgaggttttcccctgtggcaatcctgctttcttttctctctgcgcatggtgacagagcttggtgatttgttgacgtgaggcggtgctaagtttctgggagaggcgagcacgggcagatatatatgcgccacaggggagaatctggatagaggtggtgagcaaccgatggtgcaggcgaaggactacggcggcgacaatcttcttctctctccctctctttctgtctctcaaccgcggtggatctcggtgagctagggagcgcgagggcgcaaagttttatacaccgacccgaggaggtaacgagcaacaaccggcgacatttatgcagttggatcttcggtcgttccgagctcgacgccgcgcaatggggaggaaggagtccgacgcgagatccgtgaggttgaggattgtgctgacaactggggcccacccaatagagacacaaagtgtgaaacgtgggtgcagagtgcggatggatgaccggccgagcggctgagggtgtgggtccacatgtcggcgcagtggggaggattggctgggctggcaacgc

SEQ ID NO: 171174 - DNA, 815 bp, Zea Mays
caaacactagtgctacacaaaaatgagagatacatgaggttaaagtggcgctgtcagtcggcctgacatgtgttcattcactacatctgatcaggttaaggtttcagtattgtcgtgctaatttgagcatccggatctagttgatctctgaagatttttggtatggttgttgtaccaaaatgaaagaccattagtcctggtacaactttgatgcagacttgttggcgtgtagtcacataaaatttgaagtaatcgccattcgaattcggtctggcaggcatactgttcaccggagttcagaaagatctcgctggggataagaccgccaccgtgactggggattggactgcggccgcggtaaaaatcttccgcgacgtcgcgctagaaccctgaggtggcgctgcccggttaatcagcaatcaccggacgctcgccctggctctgcccacgcgggtgagctcgccagcgcgtttacagctcagtgaacctcatccacctctggccatctgcctataaattgagcctgagcactgcttattcaccacattacgcacacgagcgcttgtgcaatcgactcaattccaccggagaactcagacagaccacaaatctcctcctccctgttcttagcgccgccgtaaaggacctcttcgtgggcagcccttctcgggttagtactcgcccgattgtctcttgttctagtgtgtcgttagcttcctattgctctcggtgccaaccaattgaagtttaccagagtcccaccactggaacacctcgttgttccgtagaacaccgtcgtatacaccctctctgtc

SEQ ID NO: 171175 - DNA, 507 bp, Zea Mays
ctcgactcagggtgaccactataccctactaacggagcaatcggcttaagttggcagtgacttaagacggtgcaacatgctcacgcttacttaacttagggtgaccactataccctactaacggagcaatcgacttaagtcggcagtgacttaagacggtgcaacatgctcacgcttacttaactcagggtgaccactataccctactaacggagcaatcggcttgagtcggcagtgacttaagacggtgcaacatgctcacacttacttaacttagggtgaccactataccctactaacggagcaatcggcttgagtcggcagtgacttaaggcggtgcgacatgctcacgtctactcgatctagtatagacatgcttacgatcactcatcttagggcggtctctatgcctcacaaaataggaagaagtttcggaaccagcacactgcatttacttctacaatcgtaacaactattgaattcaaacaacagaaaaacaaaaatagc

SEQ ID NO: 171176 - DNA, 563 bp, Zea Mays
tggaacgactcatgtcagaactacgccacaggagtagggagcatgcgcgagatagccgccgtattgctgaactgtcagcagaggttaatcgcttatagcaggaaattgtggaatgagatacggctattgactgggtcgtaaattcgtgctctttcgcctgggattgtgaggcaaaggctctagcccgggtagcggaactaagtgcatccttggaaaatctgcaagcctattgtaacaccctacatgaagaggtgcacgtgttatacgactagctgcatccaaatgtaccccctaaagttgcagccatgggagccggaccatctggagcagctaatggaggacctgatggggagttggacctttttggagcccctccttccatgaacctcgcagatgaacgttctcccgatgctagcaatggtgcggccaaggacgaagataattagagtagtgtagtttaagtagtgtccttatgtaaaataaataaggaagctgagttgtactaatgagtatgtataattattaccagttcagcaaaatgtaataaaggtggtgtactttcg

SEQ ID NO: 171177 - DNA, 930 bp, Zea Mays
cagcggccaagagcgtgccatgccacgagctatttagagcccacggattgccatccgacggccctggtttcaaacgccgaaggggtatgcacctattgaatcaagagcgtctatcggaaatccgacggtctgaaggcttcgtcttcatccggttagccacccgcggcggcgcacaggccctcacggcagagctcccaccggcggcagccgtcccagcacaccggtgccctaatccccaatccagagcgacccacgcgcactagagacaaagcgtacgagatgggagggcgtaccgggtatagggaagacgccagagaagctacccacggtacgtggcgaaggtgcagcagggctcccactccggcgaagaatcccggagatctggagcacgattctgcctaggcgaagccgtgacgagcatccttgtgcgctagactccctcccgggtcgatcaccaagggctggacgcaggtggtggagcccgaccatggagcgcagtggcccagcggcggaggatctccaacggcgaggaatttgtagcgcataagtggctccctctcacaaatatggtggtgccccggttcctagtgccgaagcgaaggtctacgagtcactcccgtaccctgtatgatggtcgagtagaggggtgattgcggcagccaattcctcagccccaactatgacagtgttcgtcgacggtgcccatcaaggcacggccggatggaatgggtatgcgaaggaatagcggcgcccggtgtttatacctgtgaggactaatcgtggtcaacaaatccaggtttctggggatcgaatcccccatggatcggccaaggttgttacgcgcggaaggtgggagaatatcagcagtgccgcgccagccgggtggtggagctgaatcattgggcccacaagccggtgagccaaggcttt

SEQ ID NO: 171178 - DNA, 326 bp, Zea Mays
cagggccgccttctcacccgcgggggcgaagacacagaggcgatgtccataaccatggcgaggtgggctagtccctggctaggctgggcccactagtcagccttctatggggtataaatctggtgtaactaggaaaagttgttccgccctacaattaccctattgtacaacatatttcgggaatgtagcaggtaaccgggggcatgggcgtatttaagccacctttccctggttaccttataaataccctcgtcctgtacctggatgtgacacgcttaagaagacatatgcactccttgcctactgtttgttgagacatccatttg

SEQ ID NO: 171179 - DNA, 403 bp, Zea Mays
tccttcccttgcaattgcaacgcattcatagaagaagaaaaaataagggggttaggcgagtgatgtgacgtcacaagatttgaaagcgccaaagcgagtttggggaaagccgtgtagctcgccctcgccgtgcgtcgcattcacatcaacgacaaacagtctggaagggaatggggttctgtctgtctccgtggacgaagccatgaattggctccgtcgttcgtttccgggctctgcctcccctgcgtgtctcagtgaagttttgaggtggaagaaagcatattgatctctctgaaccaacttgcaggcaccagggacgtactgcattgttttcctgacctcatacctcacccgagtcaccgcattgatgttatgctatcagcactctgcctcacttttcttt

SEQ ID NO: 171180 - DNA, 530 bp, Zea Mays
cgtcccaagagaattcaacgaaggggacctcgtactcgtccagacaactcggacagagtcacggggcaagctggagccaaagtgggagggtcctttcatcgtcaagacgaaggcgtcccccagcgcgtacaggctaaccacgccatccggcgagaacctaaagcattcctggaatatcgataatctccgcaaattttttgtttgaatcctcagggctaacacacccttgtaattcaccaaccagtatcattctggcccgcactcttttcctcccgggggtgaggtttttaatgaggcggagccatgtaatataaccgcaaaaatccccagcaaaaactaagacacaatatgtcaaaaaagaccgcatcgacggtcttcggcattcgaccacaccgaagtcaccgcgaggggcagcgctgactaccctcgcgtgcgacactccacgcaaaagtcgcctaagggtgcagccggaatagcacaacaagtgcgcaaaatcgaagtctttcccaaaagactctctgcgcaaaagt

SEQ ID NO: 171181 - DNA, 566 bp, Zea Mays
catatactggttgccattgacaaattcatgaagtggatagaatacaagccaattgcttctttgacctcaacaaaagcagtggagtttatccaggagataatgttcatgttcggaataccaaatagtatcatcactgacttgggatccaacttcaccagctcagagttcttctgtttctgcgggcaaaggagcatccagatcaagtatgcatcagtggcacatccaagagctaatggctaggtggagagagccaacagaatgatactggatgcactcagaaaaaaggtattcgacaagagtgagaagcttgcagggaagtggatcagagagatgtcatacatggtctggagcttgcgaactcagcccagccgagctctacatggaaacaccccgttcttcatggtgtatgggtcggaggcagcactgcctaccgatctgatctttggggcgcctaggctgaccttcgaaagcatagctgaggcagaagcaaccaggctagaagacattgatgtgctagaggaggaacgactaaacatggtaatccagttggccaggtaccaggagac

SEQ ID NO: 171182 - DNA, 979 bp, Zea Mays
cctccgccgaattctaacgggggaggggcgacacaagctatcaccaccatgggaaggaccgttcatcgtagcagaggtcacacagccgggatcatatcgacttactcagatggacggcacagaagtggggaatttgtggaacatagaacacctcagaaagttctacccttagcgatgcctcaaaaactcttgaagaaaagttgtactctataaccagaagatttcatcatcaataaagctttcattttccaaaggcgttcaaactcttgattgacaactgacttcgattgggcttgactcgaaatcggcatgacttgacttagggtgatcactatgccctactaacggagcaatcggcttaagtcggaaatgccttaagtcggtgtgacatgctcacgcttacttgacttagggtgatcattatgccctacaaacaaagcaatcggcttaagtcagaaatgccttaagtcggtgcgacatgctcacgcttacttgaccctaaggtgatcactatgccctactaatagagtaattggcttaagtcggaaacaccttaagtcggtgtgacatgctcacacttacttgacttaggttgatcactatgccctactaacgaagcaatcgacttaagtcggaaacgccttaagtcggtgcaacatgctcacgtttacttgacttagggtgatcactataccctactaacagaacaatcggcttaagtcagaaacgccttaagtcgatgcgacatgctcacattcacatgatttagggtgaccactataccctagtagcaaaataaccaactcaaattgggagtacttcaaaaaaataaatatctcgcttataagtgccagggatgtttttcggcaccctgcccacggaacaattggttcaaacataactattgtgcacatacagaactcatattacatcttttctctaaaagatgctaactcgataaacatgtgtctttcaggta

SEQ ID NO: 171183 - DNA, 460 bp, Zea Mays
tgacctcaagtttggggcgccaaggttgatctttgaaagcatagcagaagccgaggctactaggctagaggatgttgatgtactcgaagaagaacgactgaacacagtaattcaatcagcacggtaccagcaaactctgaggcgttaccacgataaggccatgcgacgtcgatcctttgcagtgggagatttcgtcctgcgccgaattctgacgggggagggacggcacaagttgtcacccctatgggaaggaccattcatagtagcagaagtcactcggccgggatcatatcgtctcactcagatggacggcacggaaattgggaactcatggaatatagaacacctcaggaagttttatccctagatgtatttcagaagctatcgggacgacaatgtactctgtaaaatgggaaatatgtcatcaataaaaaaggcttcaagaatacttagttcgttc

SEQ ID NO: 171184 - DNA, 1464 bp, Zea Mays
cagagcttcacctctgaggtgcgggtctttctgactgctgaatcaagaatcttcaccggcttctcacgatactgaaggtctttctgaatctacactgcctcttcttcgatgtgactttctggtgcttgcaggcatttgcggagctgggatacgtgaaacacattgtggatgttggacatggattccagttattcaagacggtatgctgcgggtccaaccctgccaatgatgggatagggaccgacgaatcgcggtgctagcttcccttttacttggaacctcctgacaccacacattggagaaaccttgaggtagacaaagtctccttcctcaaatttgagttacctccgcctgttgtccgcataactcttctgccgactctgagcttcaagtaaccttctgcggatcagagcaactttctcttccgcctccttgacaaaggcaggtccttctagtgcttttcccctacgttggaccacatgagaggggtctggcatttccgtccatacaatgcttcgaacggtgacatcttgatgctggcctgatagctgttgttgtatgagaattctgcgtagggtagactggattcccaacttctatcaaatgctagcacacatgctcttaatagatcctcgaggactttgttgactctttctgtctgcccatctgtctgagggtgataagcggtactgaaatctagcttggtgcccatagctttctgaaggcttgtccagaatttggatgtgaactgggttcccctatctgacactatcttccttgggatgccatggagtctgactatctccttgagataaatccgggcaagggtggctcctccaaaggtagttttcactgggatgaaatgggctaccttggtgaggcgatctattattacccagatggaatcattccctttttgtgtccggggtagtccggttacgaagtccatgcctatttcttcccacttccattcaggtatcgggaggggttgcaaaaggcctgcaggtttttggtgctcgaccttcgtttgttggcagatgtcacaccgggccacatactgagctatttctttcttcatccctctccaccagtatctggttttgaggtctaggtacatcttggtagtccctgggtggatggagtaggctgagttgtgagcttcttcgagcaggacctctcgtgcttccccttttggtacacatagacgatttttgaaccaaagggctccttgttcatctgtcctgaggtccgggagttgttccttgcgggccctttccacaagttttgctgtctctgggtctaggcattgagatttgcatatgaggtcttccagcattggtctgactttgagactgtcgctgtttcccagacatgtatttagttgagctgattctttcttccaatcttctaaaaagttggtccctttatttcgaatggttttcgactgagggcgtctgctaccac

SEQ ID NO: 171185 - DNA, 592 bp, Zea Mays
cggggctgctcgggctcctggccggcggacaccgtcgcgggctgggaacagccacaacgctgttgcctgatgcctcgcgtgaagaagaagggtgagggccatcggatcctcgatgaagggttgaggtaagtcgatgtgaacagccgtgggatcggagataagcggtggagatttgatcttgcgtaccccttcgtcaaatgaatatgagccgtaggatggtagtttgatgaccgagattagatcccatcctcataaaaccctagccgcaggattttaatcggaagccccacgttatgtatcagttcgtagtgaatcgggatctaatccgcaccgtccatttgcgatctggcggcccagatttgagaataccccttcggccatacacttttcctaaagagcccctgttgagttacgaaatgaacccgtggtccataagcagtatagggagacttaatctatgcccctggaacttacattttagcccctgtaaaaccacagaattgtgcgcgccatccagaaaaatagaagaaaggggaaattaatattagaaattgatttgtagtattaaaataaatccagaaacttgtaaaat

SEQ ID NO: 171186 - DNA, 773 bp, Zea Mays
gttcgttttcctcatggaagaacactgaaacatcgcccgcttgccagttgcagccgccgcaccctgcgacccgcgcaagagcaccacgcagcctcgacgccgacgccgccagggagctgtcaccacgcccgaagaccccgcctcaagccgcgacgtgcaacggagccgagcgacccgcgccatgcccagccgccctccagcctgcgccagtcgaggagccgaccgaagccccgcgcaagaaaccgacacccgcgcatccgttttcctgcgtttttggagtttactgggtccgtttctccctccattcaagctccttgaacgccattgatggccctgaaacaccccgatgacctctgctctctctcccccactcacgaatgccgttttttctccccgtaactgccgctaccaccattaatagccttgcagcttctcctctccccagctccctccctcgcactataagtcgaagctgcagccgcgccagagttcgggtccctcctcaatttctcctcccagccctccatgcatgctggccgcgtgaagacgtcgtgccgcccctgtctgctcgccggaacccctgtcctgcgtgccgccgccgcaccccggagactccgcgccgctgttggagtgcgccagcaagttcaccgcgatctcctccgtcatttccccacctcggcacgacggcaccgcccctgcgacgactttccctgcccagcttcgtcgtcccctatttgtcgtgtccctgctgccgtgaccagagagaagcaagg

SEQ ID NO: 171187 - DNA, 692 bp, Zea Mays
aaaaactcacctgtgggtcctatcgggtcagatacccaaaatatatcgggtcgggtatgggtaaaatactttactcgtgggtattcagtggatatccgagatatcaatatacctttttaaaatgtgatacatccacaaaaaattaaggaccataatagaatggagccaaaaaaatacacaacaatcctggttttgttgcatgttggttgctgctacttcaccatggacacaggcacaaccacgggctgctgttgctggcggcaggctgctgctactatacaccatgtcacgggctgctggagctgattgctgcatgcagtttttatttatcaatttatcatggtgcatgtgttgttgattaatgaatattaatttgtggtgtgttaacagtcaactgtaatgtactagagaccaatgagacattaacaatattatgactgtcaactgtcatgaactcattaagcttttattatctgtactcgaatttaaatctattggatgcgataattatgagttgagatattgtatcgacgtgtagccaaatatagtcattctcgtgatgtactggtgcttagatggaaactaaaatattttatgcatttattataacactaactgattgttatttagtctacagtaacatatccacgggatacccgatacccggtggatacccgatgggcacgggtacg

SEQ ID NO: 171188 - DNA, 579 bp, Zea Mays
gtcgagtgtcttctgcatcacctccactgcctgggggcccgaggccatctgtgtcgcctgagcaacttgcgttgcctgaaactggcggacctgctcctccagagcccgcactttctcctccaaaggcttcctcctctcctctgcctcgagctcaagctcatccagtagtttgttccgccttgcccacatctcctccctaaaggcgaggtcctcctcttgccgggtgagatcagttgcccgtttcgcaagggaagcttccctcgccttgaggcttccctcggcgcgagcaatgccactggccctgtcggcgagctcctgttgtagcttcacctcagccgcaacctgtttgtcccgctgcttctccaacaccgtattataagctttcagcttatcatggagcgctgtgacggcctcctccctttggtctaagcgtacctccttcttagccaggcttttttccttctggatcacctcttcctctcggtcagacaccttccggatgtcctccttgaagtcctcgcgctcctgctcaaacttggcccgctctgaggcgaaatggcaggacaccgccttagtgcg

SEQ ID NO: 171189 - DNA, 838 bp, Zea Mays
tttgtgctcttctaaatgtgatttcttttaaactaactcaattaaatcttccagtggaaagcatgggcctctgaagttatcctctaccagattgatcagcattccagaatatttcaagtaagtgtctttgcttgacagggcacctatgaaccgtctcattgaagatattgacaatgacctcccgttcttaacccatgatagggttcgcaagctaatgagatctggattactccctttgtatttcagcaagacatgtggtttatcgattcctgacaccgatttcattgaagaaaaccttggtgtgctgcctgagttggatttactggtattcagatcactgaacatgagtcgctctgagtctgaaatagataattgctacaagtcatttgtgaagctcttcaaggctcttgtgggtaagtatgctgcaagggatgcaatcttcaagctacccaagtcactttatctgcatttgaagtaccttgagttgtctattgtcaaggactatcgtgtgatatatggtacatccctcttccccaagcttttgatctctataatgtactgcgaagtgcatcgacttttgagggagcagtgtccggcacgtggactgggtgctgcagccaatgcaatcatggtgacgattgaagagaaaatctttaacttcatgaagtcatgcagcacaaatactctgctaattagctattctggtgctcatggtgagagggcaaagaagcacattgtgggcagtgaagatagaggagatgaggcgctgacatctgaagttagtgatgacactaaagatctcaaagcgtcgaatgtcccactgaaagttagaaatttt

SEQ ID NO: 171190 - DNA, 462 bp, Zea Mays
cttaattggcggggtcgacgagcatcataaacacacgagagtgccaaaacacgaaccagaagggtgagagcggacctggacatggcggaccacgacggggtgactcacggcggcgcagagtgtggatttgggggaaattccaaattaggacgctacggtggacgatcggaggcgagggcttgtgctctagcttcgtaacaacctagcgagctaacggtgcactcaatttatagcctccgggagcggtggctccaaatttgaggaaggaagctagcggccgaagagagggggtgagtcaccggcgagcgctatcgtggcattcacagtgcaaggacttacggcttgcgacaacatggttaaatgaccgagagcatggtgtaaccgagagaaacagcggcacaacaacgatggtcaggcggccacgttgcggcacaagtgggtacggcgaactgagcggtaaca

SEQ ID NO: 171191 - DNA, 453 bp, Zea Mays
tgctagaacagggatgaaaaaggaatgagcagacctggggacggctggccgcggggaggcgagtttacggtggcggagacccgatttggggagaattggaaattctcgagctccagtgagggactgctagcaattggcgatggctgagtgcgtgaggatgtggtgaagctcactgcggggtcaatttatagatccccgaggcggccggagaggaggaagaaccttggcgcgcgtggttacgtgtcctatggcgtggcagtaactccggtgatcgatagacagttagagaggatcacggcgatgcggtggtgcgggtaggacacacggcgcatggtcagacggcggctatcaccggcgttcttatctgcccagccgtagggtagaggggaaggcacgaggggtcgccggagtggagcccagctcaccggcggtgaagattcttctcaccccgcg

SEQ ID NO: 171192 - DNA, 626 bp, Zea Mays
caggcgccgccatgggatcctccgctgccagctccgccaccgccttcggggggtcctctgccgtcggcgcaggggctggcaaggagccttcaccggacacagtggacacaggtccggcggaggagccctcaacggcttccgagcgcagggccgggtcgacctcagcctcgggcagcaccgggttgacctcggcctcgggccgcgcgtcgttcagatccccaaggtcttcgacatcctcggcacgcgccatctgcagcaacagcacacttattcagcaaacccacacgtacccacattcaaccacatgaaacaaaaaacaagccttacctgctctctcgcccgatcagaccgctccataaccgcctcccggccatgaggaccccacatccgatcaaagagtgcccccgctgaatcctttaccacagggtcttcgaccttaaaaatctcgcactcaaagttttcgttcggactagtcgaagacctcatagtgtttgcacccctcacgggacagcacattcatggccccttcgcaggtgacgagggaggcaaaggacatgaaaccctccacgatggtcaggagtaccagcagttcctcttgcaaccactcgaggaagcgaaggcccacc

SEQ ID NO: 171193 - DNA, 421 bp, Zea Mays
gacagtcgggcgtgggtctgatgtgcagcgccgccttgggggagagctctccgccgcgctgttcgcgcgtgaggaggaagatggggcgccgatcgtctgttgccggatgtgcggccatgatttgaagtggggtactctttcgaccagggttaatctatgccgtagaatctggatcaaaggggggctcgggcttgttgggtgcgtgggcaacttctataccgttgattgcgtagggatcagcctggattgatgggtggataacgcttcggccgaggctcttgtggttgtcagatcgggtatgggcggctttgatcggctccaggatacctctttgactgatctgaatccgcgtcgtgggatgtgtaatcagtggccgcgattaggttacatgatcagtaaaccgagaccgtacagatctaat

SEQ ID NO: 171194 - DNA, 553 bp, Zea Mays
cttaaaaccaggggtgggcaaggtgggccatggccccacctcaatttttcttaaccccttatacctaggtttaggtacacaccaaaataaacaaatttttgtatagttagcgtggacaaatctaatgaaaactaggttttgatctatttttctctcgatgccttcactactcagtccactcttcacctgagccatttgattctcttctctagcgcaagcccactcgtggctcactcgcttcttcggtcatctactgaccagtaagtcggtgacctaacccgcccgctgctgcgcactttgccttctcatcactcatcagctcgtcgactcttcgggatcctacacacaacgttgatattttgcctcctagtctgcaccagcacatgggcaagctgttggtgggaccgtggcatcacttgtccctcgctaactcactagattcccaccacgccattgcaacacgacaatgggtgtcgcttgtcgtcaccatcatctatcgccacctcgcctcctgcactcgctcctcctacttgtcgtcgtctcaccaacgcca

SEQ ID NO: 171195 - DNA, 350 bp, Zea Mays
taacacaaatgcatcatttctgtgttaggttgatctcagactcggtttggacttatcctaactgcttctatccgagtctccagtgccttgatcggcggtgcaacaaccacaatggttgcggccctctttcacgcccgtgcgacattaaaaggctagggggtgccggctcgggaaccatcgttccccggtataccccacgccaatatacacttatccgatctagatttgcgcatgggaagtgaagggaaggtcgtgcgaggtttaccatctgtatgtgaacccgtcactctcatctcgccgttgcggtgaagaacaaccgaccctaatggcgagctcgacaaatcccgaag

SEQ ID NO: 171196 - DNA, 418 bp, Zea Mays
agagagccctagcccacgtccgataactttttatgcaagcgaactgatttagcgtaaacggaaacccattttagcgtaaacagagtaacagtcgcgagccctcgttccagaaatagcggcttaggcccactttccacgtggtcaaccatatcttccttagtcaacacatgtttacgctattccattcttctgtttatacataatagtgatttagcgtaactacttcagtcgacccacgttccagaaataaaggaattggcccactaccccacttcccacgcggtcaaacatttctataccctaacccccgcgcggtcaaccttcctgaccgactcgccgcgtttcttcaggggtcgccagggcgattcttcttcatccgccgccgccagcgcgtttcgtcgtcctccgccgccgcacg

SEQ ID NO: 171197 - DNA, 589 bp, Zea Mays
gcccaatgcactgacagggagaaggtaatatatgcatcgggtcgtcttactggcccgctgctaattggtgggattcttaccgtgctgcacatggcgctgttgacaccatcacctgggcaaaattctcagccaatttcagaaactatcatattcctgctgggttgatgaagattaaggagttcctttcatttaggcagggaagcatgtctgtgagtgagtactgggataaattcatccagttgtccagatattctcctgaggaggttgctgaagatgaaaagaagcatgagttgttcttggaggaacacattgggccactccaatactagctgatgtctcattcatttccatctttctagagacttttggacaagaccatagctcttgcacacaagcgtgttcagctaggtgagatgaagaggactataactcagggatagggtgacaacaatagtcgtccttgttacactcagcctcagggtacactatctcgttcaggaggagagcaacagtcataccagtaccctgttcagcaaacaccgcaggccacacctcagacaccacgccctcatcaagatgccctagctag

SEQ ID NO: 171198 - DNA, 790 bp, Zea Mays
cggcgtgtggctattgcgggtcgcctaggcacgccaggcgtgagtgcggtctcacctttggagatcgaagtcattggagctgggaacttcctcctaggggtgttcgtgatgtggagccgtcgcgcggatggagagcttccctactgctttgatctccggtaataatgcctctctcgagttatgcattgcctgcgcctactttttcacccagaagtgaccgatggggagctcggcctcgatggctgtttctcgtcgatgccgccgtcgtggtctgcatggccaccagtcccgtgcagccgtctggtggggttgtgaggtagaagaaggctgctagccgtcggatctgtgatctgcgatggagatgggtgtgtgtcgatgcgtgcttggcgacgtggatcctgtattgggcggtacagattagaagtagaaaaactcttcgggctgatggattctcgaccgtaaatgggagatcgttcgtccaccagtgcacatccgattcgcatagcacggttttaatcctgatcgttagattctaatctgacgatataacatcctagataccccctcggacggaccctttcgcatttaagtccctgtaaaacttggaaaccaacctgcaatcctgtcagtgggattcttagtcttaaaaccttttgcgcagtggaccctgaactttctaattatagcagctcagtccggtcagagaataaactttggaaattcgcttagaaaatgattattagggcaaaatttattctagaaacctatttagttcctagaaaattcatat

SEQ ID NO: 171199 - DNA, 658 bp, Zea Mays
cgcttgtagagaactgggaaatgccgaaggaaactgtcgccgaatctagcgaaggtgagctggtctggctgaagtatactttcagatatggggataagttcgacgagccaaacgatgactggttaaaatgcatcgaagtgacaagtgatgaattgcttggatcatattccaaggcagaagataatgcattgtccacagcctttggaagtcgaggaaagaagagattgaacagagtttttgacgctattggcttcgtctatcccgactaccgctatccgctgcgggggcaagggaagaagaggaaagctactgctgtggtcgcctcggccaaacctgggccgaaggctacaagcaaaaagatgaaggtacttacccaccggccacgttatattgaaccagccgtggtgcctgagcttgacggggaggcttcttccactgctgaaccaagagaacctgttcctcccacacagaagactgaagagccggttaaaatgccgaaggtaccctcagtcgagctggctgagttgaagattgataaagataaatctgaaaagccaaatattgaagaaacaaaagcgctagaaattttaagcccttcatcagaagtaacagtgtcgaagacacaaaaaagttctgccgcaactcccaagaggagaag

SEQ ID NO: 171200 - DNA, 674 bp, Zea Mays
cagacttcttctcctgcttgtaggactgcaaatcaatcttcattttctccaggaaggtgaccgggtagaatctcctttcaaactgcctgatgaaggcatcctaagacaggactcttggtgaggagtgcgctgcctgcacgcctctccaccaaatttgagcctctccattcagcagctgtgtgccaaagcgaacccgatctccatacacaatctcgaagacattcatcttatcctctgtgtaagttagccaatctgccgcctcgaccgaagtaccactgccatcaaaagaatccaacttcatgcccatccactgcatcagagaaagaccactaactggaagaggcacctcggccccgccacctggagtagcaccctcagggacagcacccccaggcactcctccaccactagcaccctgagcagcatctgcagaggcaacaggaatagcttgcctcagaatggccaactcctgctacatggcctgcatcgcggctaacattgccgccggactcatcgagtccccactaggaacttgcggactaccccgagccctacgaggcggcatagctgcagccacagggttgagaataataagtaaataagatgggcatagcatctcttcagataatgtcaaactagctcagacaataacataacatatcaatagtaaagca

SEQ ID NO: 171201 - DNA, 1259 bp, Zea Mays
gggatggcgagaggtctacggccgtggcatcttatagctaggagatagcaatgctgagaaggaaagaggtgattgcggctccaaaagcttccatcaatggcgtgactgtgcttccatatgagcagatgtgactggctgctttccatcatgggaggaaacatatagggatgaaaaaaagagtgaggaaggaaggagatcgagcaaagaaggaaggagattgtggcatctcagggtagcggctactgctccttcattcacgggaatcagtggtggtggcggctgctgtgttccttgcatgagagagaatgaccagccattccattgtgaagaagagcagcaagtgcgaaagggtagtggggcccacctacaagtgtaagggagagagaaaaaggaatggggagaggcatgcacagagggatgagctgggttggtggcgaggcgaatggggccacgggagcgagggcaacacgaggcgggggcaggcggaggcatatttggtgtggacgctgacgctactctcttaatagagtagtatagaaatagggaggtttggacccgttataagctagtttttgagttaatgccgcaggtttagctaacaaataccacaagaaattcggaaccctaactgattttgagcacgcgcggacggtctgcgccactgtggaagacagtctggaccacggaccgtccgaactcagggccaaaccgtccgccaagcacttttagtgctcaacatatgcccctgccttttggtggaggttaacaaactaaaagcctatgtaccgccagcacccttcgagaaacaatagatatcacaagtcattttgttcccaaagtaagaactaagcctgatgcaagtcaccaacttttcaatccgatgatcattcaatagagctctaatgcataaaggccatttcagattgcatctttctcagccatgaccatctcatcaatggatcaaaaggtatagaatggagatgcccccagcctgaataggcaaagggactatgcacgtatgttcatcatcgtaccattccacatttgaacatgacaatatatcgatgagtaggcgggtggaaagtatccttgcatcacaggatgaatatgcgatgcttgttgtgtcgcctttcgggccgtttcattcggccattttgttttagcaggtgatcgggttcctttgttggccgatctcgtagaacagccttcttgctagcgtatttagataacaattgatcaaaagtagggccgactttgac

SEQ ID NO: 171202 - DNA, 540 bp, Zea Mays
gaaatgggcaagtggtggcggcgatggcggtctgtacccatcccttccgggctttggctctagggatatggtcatggtcgtgtgtgtttgtaggtggatcaggcgaggatggttggaatggatgtccctgactcgtgagtgaaagaggtgaggagggaaagcacaagcatcgagagggagagggaaacaattgcatatttcgcactccaaacatctcttatttgattcaaatgtcatttgacacattctctttattcttattttttctttgtatttggatcctaaatagatgaaaatgtctcttacattttgacaaatcaactggcgtctgaggtcgtaggtataccccttgacactatatagtgtgtgcaggtgcatcagtctctatagccacacctaggccaacaagtgtatatgcaagcattataaagtatgtatagctacaccactaaccaattgcaacatacttaatggcatggattattgtagtggccactatagcacaacatgctcactgatattgcatgattaaggcatgta

SEQ ID NO: 171203 - DNA, 794 bp, Zea Mays
tggtgatgatgaggcgagcgtcaatcttgagagtgacattgagagttgtggcggcactagagctagtaggtatgtttcggaggaagaggatgtgccttctttggttcgtaggaatcatcgtagcaaggtcaacaacaatgtcccagttcaagctctcttggggatggttagccttcaaggaatgacaatgtccgccattgaccatgcattagaggatattattcccgaagacctcttgttggaactttctgaagctggaggtgccgacatccgtatggaggtcccggattgtgctccctccgctagttttctggctaggcaagaaataatcgtgccagttagccatgcgcctccaacctttaagggtactctgatttgtgagaatactctggttcctaaggatacagttgagggttgtccagcccccgagggtgatgctgaggatgatccaaccctcgagggtgctgctaaggatgatctagcctccaagggagctgctgaggatgatccagcccccgagggtcctgaagctggttcttattctgttgcttctatggatgttcatgttgggtcatcgctggttcaatccgaggaggctgtggtgatgaggcttgatcttcctgctgtcctcgctggttcggctactttagaggttagtaatctaggtaccgaggatccaatatgtgctgctggagccgatatcccgctgggagtcgcgctgagcatgaattacaatcttcctttgacgttcaaacctgctcctgatactgcttttgttagtgccttgccatctg

SEQ ID NO: 171204 - DNA, 718 bp, Zea Mays
ttgaggttctgtttcttcgcagggggaggtccacgacggcgttgcgcacaaccgaactccggcgagaacctgtaccggccgattggggcaacgactagggtctccgaacgactaacacctaattgaatccatcccaagcctttcccccaacataatttcggtaatgatcaagtgttttgctctggccatagtgaccgtgagcataacggctataccgtcgtgttcccggcgaccagaggacttctagtgcaattgcgtgggtcggtgagcatcacagagttatgagaaggctcaaacgagggagagaggaggatgaactgaccggaaagggggctggccgcggtgaggtcagtttcgggtggcggaaacccgaattgggggaaaaccggaattagggctcgctggtgatcggctgggggcaatactggttggggtggtgcgtgataatgtggtggagctagccgcgggctcaatttatagaagaagcgagcggtggtcgtgaatttgggcgctgacgcgcggcggccggaggtgaagaagaatttaggcgctgtgaattcgtggccaccgtcgtggcgagctcaccggcgacgattggacagccgtagcgagtcacggtgtcgttgtggaaagcaaagccacgcggcgcaaggtcgtgcgacggtgatcaccggcgttcttatcggttttagccgcagggcagaggggaagtacgggg

SEQ ID NO: 171205 - DNA, 874 bp, Zea Mays
cgacgccaccatggccaagtcattcatcatagccctcgaaggcctaactctcacatggtactcaagactgccaccattgtcaattgactcatagaaaacacttcacgatgaattcttgctaaattttcaagggtacaaacccgagacagacgccctggcagaactcttgctctgtaggcagcaagagaaagaaactcttcgagaatactacaaaaagtttctcttactgaaatcacagctgccttcgatcgatgaccatatagccatccactatgcaatcatcggccttcgagcaggcgttctatacagccactgcataaggaacccaccaaaaaacctacataagttgtatcagctctttgaaaagtatgcccaatcagaagagctccaccagagaaaagtcgagtcttagcaaaaaactaaggagactccacaatctagaagaacatggaccaggcctttgcaacctgactcagcttggcaagaccgtgcccagtcccaactacacaatattgcaaatcagctgcaaacaggagataacccccctcgtcgtcaagattacccccacaacaaggtcacggtggcaacacgaccaggggcaggggccgaggacctcaacaacagaaaagattctattatcttttccgtgacgaagacttagcacacccaaccaaggactgcccagagactaaagcaacaaaggaccaaatggctagggccatgctagctgatgaccaaagagtcattgctcacacctaccaaccccatcaatacaaccaacatcaatttcaaaacgaacaccaaagagtcgtcgctagaaacatagagagggacttcgtttctagccagcacaatgtacactgcctcacatccg

SEQ ID NO: 171206 - DNA, 888 bp, Zea Mays
cgaggaagagcccctggtcgctgggacccattggtccgctagaaaaggtggttacatcaaccctaaaaaaacccgcccccggtcgagccccgcgacaccgagcctggtgtcgaccgcggtagaatctgaaaggaggggccaggcatgttggaggggaaccactcaagtggatctcgcgcctggccccaaaatgacccatcattaatacccgaccacattaaccatgcctagcaccgagccacagcacggacgccggtccacttcccactcatgacctatgaaccacttgggctgcatagcactcatgttcgataggttgaaggcttggcttcgcaaagtgaaaggcgctgcatacatgtgaaggctacacggctctacggtggggcccaggctatgcctcgtcactgtttgggcccatttgtaagcccttctttggggtaggttccgtagtatgtctagtttaattgtacttcacaccactgtaatgaccccgtagggggcaatattccggggatgtagcaggtaacaggaggtataatggtacttggggtcccacctacccgcccgatgacctataaatacccccgcactgtacatggacaggacacgcataacaagacgctatagttctctacctactgttttgttgtgcacctgagccctctcattactgagtgattgggcccacctacccacgtgtacacccgaccgagtaccaagtgagtctgttcttgtgccccaactagcaacaggtcaccggactggtccgttggcgcaccaaccggttacccatagattttgttttagtacagacaatgactgcacgccagactagtctgatctaccaccagactttgttcccaaagagtttgtaaaactagatcttgc

SEQ ID NO: 171207 - DNA, 778 bp, Zea Mays
ggaagacatcatgtacatctgctagatgatcgggtagttctagttgataggcaacttctcccactcgccttaagatcaagaagggtctaataaagcgaggggacaacttccctttaacttcaaatcttctcataccccagatcaccctccttaaactctagcagtcttctccgggtacccgcatagtttttctgccttgactgtgcagttctcaaatttctccttatcattcgcacttgttcttctgcctcttgtataatttcatgcccaaagaactgcctttcaccaatttgatcccaatacagtggagttctacattttctgccatatagagcctcaaacggggacatcttcaaactggcctggtggctattattgtaagagaactccgcatatggtaagctcttatcccaactaccaccatgtttaagagcacaagatcttaacatatcctccagtacttggttggtcctctcggtctgcccatcagtttgaggatggtaggccaaactgaaatccaactgtgtgtccaagcactcgtgcaacttctgccaaaaccgagaagtaactgtgatccccggtctgacatgatcttcttaggcactccgtgtcgataaactatgcgagccatatacaattctgctaccttggctccgtgtaattagtcctcacaggtatgaagtgagccactttggttagtctgcccacaatcacccaaatggagtcataccgtgcaggaatgcgaggtagaccaacaatgaaatccatgccaatttct

SEQ ID NO: 171208 - DNA, 1123 bp, Zea Mays
gggtccaggccgttgtcaggaacatcggtcccgggggtggatggcataccctcaccaagactatgtcgagtgggccgcagtgatgagggtacgactccaggttcgccacatgtgggaagcagtttggtacgacgacgtcgactactacaaggatcgtcggccgctggatgctctcattattgcagtcccgcccgagatgtatttttcgctttcccaaaagtagactaccaaggaggcctgggacgccattgctgcgacccacattggcaacgaccgtgcccgcaagaccacactgcagacacttcacaaggagtgggagaacctgaccttcaagccaggtgagggcgttgatgactttgctctccgcctcaacactctgttgcagaagatggtgcaattcggcgacgacacctacgatgaggagagagctgttgagaagctcttctgttgcatcctctagaagtacaagcagattgctcgctcaattgagtctctgctagacctctccacgatgacgataaaagaggcgataggtcgccttaaggtcattgacggtgacgaaccacatgctctctctaggcctatcaccatcgatgggaaagctacatctcactcgggagcagtgggaggcctgctaaggtgataggaagaagggaaattcttcttcctcgacaggcggtcgcaaatgtggcaacgtgcaaggtacgtgaaggcgcccaggccgaggcatgagcacgagtgctaagggtggtgcccgtggaggcgcccaaggcgttgtcgctggaaaccagaagacactacgagatgacacctgccacaactgcccatctctgcagataagaaatagtgttatacaagatcacagtagagctgttcggaaatcttttttctattgccatcttgttgcgatttcgccacattgcccaaactggccagaaagcagaaaaagattgaaagtagggtctttatacaactgaatgacagccctgtcatcaaacacctcctccatcgacctgagtagggtaatacagccaaaggccattttcatgttgtcccaaacacatctcgacaggatgcactggaaaaatatggtcaatcgattcgttattccgacataaagcgt

SEQ ID NO: 171209 - DNA, 593 bp, Zea Mays
atctcttgccatacggaatttttttgcaaatggattgtgatcatcaagcatttttatcaacccattgactataacagggtccaaaccaccatcatttctatcgttattccccaaagagttcattctattttgaatctcatttgcagtatcgtagatgtacagttgaatgaatttaggtgaggatccatctggaggtaatagagatcctatacgatgatgaacctgtccacatattttgaatagcggtggaccacgaccatcattaacagaattatctatctgagcgcccattgatgtgaaagcaaataagcagttgtattgtcttatgtttctgataaatttttttgaggctatgtcaccatctaaccttgcaagagaagatagaggttcaggcctaggtctatacggaggtatgataatcttgccacctttacaacaattgttatatacaatagatgagtctcgttgccgattacgaactctttcagcataccaaaaaatagcatggcagtgagagcactcatactcaggttttccgaggtgcgatctgtttggatatgaggctgtgtttgattttggccgatcggttcgca

SEQ ID NO: 171210 - DNA, 329 bp, Zea Mays
caattgaacattgaacactattgtacttcattaccatacaagccgaggtgcccatgcgttggtagtttgcttcaaggtctcgaatacatgatagtttaaaattgtattgctggaactgggtgatgttccacagcttagaaagtggtcttataagtaggcctgtgggtaccgtgtacgaatgtaaaggagcaagtcgaagtggtttcagccaaaacaaatagactaactatgtacatttcatcttctccacttcctcacgcagccacagccattaattccctcacactgtcatgagctcacggtcgcacgactccttcccccacttcctc

SEQ ID NO: 171211 - DNA, 1040 bp, Zea Mays
cgatcctagagatgaaatgatcggtctattgaaagaatattcgaattgctttgcttggaattacactgagatgccgggattaagccgtgagatcgtagagcatcgactgctcattaagtccggtttcagacctttcaagcagaaagctagaacatttcgtccagaccttctcccacgaatcaagaacgaaattcaccggctgctagaagctaattttattagaccttacagatacacagagtgggtctccattattgtactggtggaaaaaaggagtcaggtaagctcaaagtatgcattgattttcgcaatttaaatagagcaactcctaaggacgaatatcccatgcccatagctgacacattgatcaataatgtgtcaggaaatagaattattagcttccttgatggtaatgccagatataatcatattttcatggccgaagaagatgcgtctaaaacgacctttatatgtccaggcttcattggtttatttgagtgggttgttatgacatttgatataaagaatgttggtgctacttatcaaaggactatgaatttgatctttcacgagatgttaggaaacactgtggaagtctacattgatgatattgtagtcaaatcgactgagtttagctctcatatagctgatttacgcaaagcctttgataaaatgcgtcggtatggtctgaaaatgaacccacgcaagtgtgcttttggagtgtcggctggtaagtttttaggattcatcattaatgaacatggtatagaaatagaccctgaccgaatcaaatccatttggaatgtgggacctccaacctgtaaggtcgaagtgcagaagtttctcgacaagataaattatttgcggaggtttatttctaacctagccgggaagattgatgcattcacccctatccttcggcttaagaatgacgtcgaattcacttggggggcagaacaacaagaagcgtttgatctcatcagaaagaatttgtcttcggctcccgtattaaaagcaccacaagtaggagtaccattcag

SEQ ID NO: 171212 - DNA, 273 bp, Zea Mays
ctcgtgcatgcgcagccccataccaaccgtggtccacgaggtcgatgctcctcttgccgtccgcggcgccggcagtagcgagctccagcttctcgaaggaggtcccagcggcggcgaaggaggaggacgatagggtcctcagagggagcgggacgcgagatccgggctgatggatgggatgagaccgcgtgggggagctggatcccgccggttcgagcaggcagcggcggaggcgtggctcgttggcagatgtgaagtcaggggagagaagct

SEQ ID NO: 171213 - DNA, 756 bp, Zea Mays
cgcgcgtgcacgaagtgttatctgtgatctgggccgtgcgatgaagatcggacggaggggatcagaccggggaggggtgaacggctgcgggcggcgctactcttctccgcggcggagaggtcaccggagttgagactggcgtgagctagggtggctctagggtcgccggagttgggcagagagggcgagagcaccacggcgaactcaatggcggggaggaggccacaaattcgagggcagagaggggagagcggtggagagagggtcttgggtgggctggagtaactctggtgaggcatttcggtcacagggagggggcttaaggcgctctaaggcctgggtagcttcagcagaggcaccttagggactaacgccggggaactagtccgggctaaatcggccggccaccgcgcgagcacggcggtccgccgtgaccgagcaccggcgaagtcgaaattggcctagcacagagtgcaatagggaaaattgggcacagggataggtgtctcacctcggggcggagctcagggaggcctggcgcgatctccggcggcctggacggtcgggaacgcgggcgcgggtctctggtggcgtgggcaaagcgtgagagagggcggagctacatgaaatgaggcggggggagtgcggggcactggcggggctctaagaagggagctaggcgcatgggcgggcgtcgtggctgagaaatccggcgacgtgcgcgagtgcgcactcgccggtccacggcgggcgcgg

SEQ ID NO: 171214 - DNA, 776 bp, Zea Mays
caaaattgccgcagtagcctacacaccctagggtgcttaccagtgacactttaccacctagggacaaagttccaagagaaagattgcaacaaaacaaagatatttgaatttctcaagtgctaaaaaatggggcaactctcatggattttcaagccctctagtgccacaaaggcaagctcacaaaggttgggatactccctaatcaaggtttaatattcatctaatcaaacactcacaaagataggaggaattcctaggccctagtctggtcatggacaagagtggggaggatcagcatcatgaaatggtggagtgggagagatatttatagctagcataccaaaactagtcatttgagactgggtggacaaacctggcctagataggttggaaacttggtctcgctaggtactcaaaccaactagcagttagcccaaaatttagcctagctgaccctaacctagcctagtcgatatgccaactcgggctggccaggttggtgctagggctacaatttgagtggtgttttacttcccctctctcaatcttgggttgctcttgagcaccattttgcttctctcaatcttggtatctagaacatctaagattaatagtatggtgctcgtgcgttgcaacgaaacacaaactattcgttaaatgtttattacctgtgcatatctatgttcttgaagcgtcgtggtagactggttacctcatttaaactattgttccacggcataagaacttgcaaaatatcagtcattaggtttgcaaag

SEQ ID NO: 171215 - DNA, 863 bp, Zea Mays
tgcacggtcacactcattggggtcaacttctggaaggtcacacggattgggatccacttcaacaaggtcacactcattggggtcagcttcaacatgtacacccccattgggatcaaccttagtaaggacctctatcggtacttcttcacaaatagaagcagaagggccagcatcctggtccaagcatgatagtcgccgaagctgcctcttcttcttctcctcctcagtaggcgcagttggacggctagcttggcgaggatgtttcgggcgagtaccctcaggcttttgggtgtccactattttgttaacctcttgtccaaccataacagccatcggttcagcatgggccgagtcaaaagattctccagccaacatattgagtacaacatctatttctgcatcatctggacttgccgacatcgaaaagtgaacttgcctctcatcatggggaagatcacaaagaggagcaactagagcttcaatgtctttaggagagggtcgcactctaagacccagaccactatcacaagtaggagggttggacacaaaattgaaaaatgacctaggaggtggcagattccaagcggaataagcaacaggagcaccaacatttgataccttgcccctcaggatcatatctagtcggttcactagatcttcagtaggaattttcctgttggtgacctgagttgagtcagtaataccgctgtacaagtaggctggatacgccctgtctttcaaaggctgaatattcttgaaaacaaagtcagtaaccacagcttcggcagtcagacctctctccttcggtagacagatttcagccagtagaaccctagcttccgtcacctccaaggcactgggag

SEQ ID NO: 171216 - DNA, 720 bp, Zea Mays
gggcaccactgccaacgccccagcaggagcagcatcggaagaatcctcagcaagcaaatcaagcatagcgtttatatctgcatcactagggttcaggggcacctcaaaatggacctgtcgttcgtcatcaggaatctccccaagcgaagcaaccaaagcactgacttcttcagcagagggtcgcactctaaggcccaaactgccatcagtaacaggtggattcgacacaaaaagggtgaaggctttgggaggaggcaggttccagaccgagtatgctactggagcaccaacatttgacaccttgcccctgaggatcatttcaagtcggctcaccaagtctgcagaaggaattctcctattggtaacccgagttgagtcggctaaccctcgatacagataagctggataggccctgtctttcagtggctgaatgttcttgaaaacaaagtcggtgaccacagcttcagcagtcagacctctctctttcaacagtccaacttcagctagcaatacacctgcctcagctacctcctgatctgtgggagactcagtccagctcggggtgcgaacgtccggttgtcttcccgaccgggatgggagagaattcccataattatcaactatgaaccactctaggcgccatcccttaatactgtctttgagggggatctcgagatattcagttttccgtccgcggcgcatctccaagctggcaccccc

SEQ ID NO: 171217 - DNA, 385 bp, Zea Mays
gcagggtatcactacgtggattttccctagggtcctcactatgcggatgttggaaatgagcactgtataaagtccatctgacatcccaaaacctatacctctgccctcaggaaaaagccgtgggatgatacccgtacctagatccttgagcgagaatataggagccataacagatgcgaccactgcatagataccatctgacgtaccaaaacctatacctccaccctctggaaaaatcatgcgatgatgatcgtacctagatccctaagagagaatataggagccataatagatgcctccgttcccaatgaccaaaactagcacccaacacaagacttccctaattacttggctaagggcgtgtctcataccaccttcatggttg

SEQ ID NO: 171218 - DNA, 558 bp, Zea Mays
gcatgctcaccattagtagtttggttagtgaaatcaaacacgtgatcatctaactgttccttctcaagaaaaggcacaaggccagatgggagaagtgcaatttcagcacggagacgggcaccggcattggagtgaagcgtagagaaagggaaaacttcttcatcaaagatgacatctcgagaaatgtatactcgcccggattgaatatcaagacacttataacccttgtgaaggttgctataaccaaggaaggcacactgcttagaacgaagttcaagtttgtggcgattgtaaggtcggagattgggccaacatgcacaaccaaaggtgcgaagagagaggtagtctggttttgttggagtaaacgctcaaagggtgtttgattatcgatgactttgctaggcaaacgatttataagaaacatggccgccataaaagcctcatcccagaatttcaagggcattgaggcatgagcaagaagagataacccaacctcgactatgtgtcgatgtttacgttcaatgaccccattttgttgatgagcatgaggacatgata

SEQ ID NO: 171219 - DNA, 621 bp, Zea Mays
gccaattcacaagcaaactttgttgattactttccggttgttatttccgagctaaatgattaacactgctacaaatgggtaaaatcagatttgtgcttatttatattcttcgtagttctattgtgtcatgtgaataactaattaaactctccaacagtaaaatccctctctttcttgaatcttattctcggacctgtaaatagtgttctgcttcctatcactaaatgcagcagatgaaactctcttgttttttgaataatggtattacgtccaggctaaaggaaatgtagagagtacctgtcgtttctccttatattttttgtatgcagtcaagttctattgactcccaacaagaaatggagttaatataaggagtgctctgcttacaaatatcctgtaaatagtgttctgcttcctcttgttgaaccatgatgaatgcattttcatttaaactttctttaattggtaaaggtacatcaccgttgtcggcttctcctgctcactgctcctcttgtgcacgtctctcatctccggcaaggtattgcttttaatttgtagcgcagcctcctgtacagcttctgtttctgctaactcggtgcaaggtacgatgccgccatccca

SEQ ID NO: 171220 - DNA, 493 bp, Zea Mays
gtttccgtatgtagcttttatgcctactgaactactatgcattgcagttcatgatctaaattttctaaaacaaaacagatacaacatgagttgaaccatttggaaagttactttagggagtgttacaacggaaaccaacgcccaagtatgtgttttctgaattacaattactagggaaaggtaaattgcaagaactacttttccctacgtgttttactttaaaaaacattttttcgtgctggctacaaggtttggcatgctctgatggtgctttctactcaggtgtaatttgcaatccaaggcttcttagtcacaattctgtcaacttctatctctaaggtagctacacgaatcctagcagtccaagcatacaccttagagcttctgcttgccacattgtgtcccctttgattctcgagacctcccagtcctaatgaaagaaacaatactctatgtggtctgttcgcacgcacatgcataagcacatacttcc

SEQ ID NO: 171221 - DNA, 999 bp, Zea Mays
ttaagtaagttctagccattattttcatgttaaaaatccattttaattagtattctctgattttataacatcctggactgggcgccaattaccagaggcaacagggggcttagcgcaagtaaaccccagactcaggcagaccacccggtggactgcgggttaatacctaattacttcgggggcttttctgctattctgactcgcgaaggggtatgaaaggtttctggccttcggattcaaattctacggttacgattagatcgtcaaagcggccaaacggtaagcagcgccaaccctccgatctgagatcaagcgccaggatcgctcatcactagaacgaatagttacgcgatttgtggccgctggatcgaccatctacggtccggattctattgaacgaaggggtattttgcactctaatctcagccgtccgagaaccgatcgacggcgcctggtccatcatctacccccagccgtgacagacaacggcggcgccagcatccgccgcactgctatggcggaggagtccggcgagcctcccctcaaagcgcacacgatgctccgattcactatggacaggtgcaaaatgatgcgaacgaccagacggacgaggtgaggaagtgttcaccttggattatggcggcagcggttctggccacgcggagatgaagatccgcagtggagcttgactacggcgaggaattgctcgccaccgggggaagttttgcccaatgcggtgtgggccgaagcttcgtcgcgcctaggaggtacccaggttccagcgcagaggaccagtcacggtgttggtgagggcagtcacggcggcggacttctcacctccgcagcatgtactaattcgcacacgttagggttctaatggttgagcacgagtgacggctcggcgtggtatgcttttatcttcaagggccggcggaatcggagacgtggggagctggtgcggagtataggggagaagagtccgcgcggtgcgctcgggcc

SEQ ID NO: 171222 - DNA, 527 bp, Zea Mays
caggagtcctcatgaaatgcattcactcgactatcgggaaacaattgttggatgaaatccatgccgggcagtgcagaatacatgcagcatcaaggactctggtcgggacggctttcagatccggtttctattggccaacagcgaagagcgatgctgccgagttagtccagaagtgtgaggcatgccaattcctatcaaagcaacaacacttacccgcacagctgctgccgaccattcctgtaacatggccgtttgcatgctgggggctggacatgttcagacctttcaagaaagctcaaggaggctatactgatgtactagttgccattgataaattcacaaaatggatagagtacaagccaatctcttccttgacctcaaccaaagcggtggagtttatacaggacataatattcaggtttgggataccaaatagaatcatcactgacctgggatccaacttcaccagttctgaattctttgatttctgcgagcaacagagcatccagatcaagtacgcatcagtg

SEQ ID NO: 171223 - DNA, 353 bp, Zea Mays
tctgatgtccttgctcttatgttctttcttcctgttttagcttgtagatgggagacgtgttgatcccagagctccagcatgggaacacttccgtgaccatatgtgctcacgtttctcggttatgggatttctgtgatcctcaggatgaagcaaagttgctccattatgatatggtgctgctggacgaagaggcacaacatctgcatacttatctatttgctaaagggaaggtggcactagtatcagactaattgttattatgttgtttcctccatcacctttttgtgcagggaaacaacatccatgctgcaatattcccactagtcatacaaaattcaagcctctgataaaag

SEQ ID NO: 171224 - DNA, 1138 bp, Zea Mays
aagaattcctctagggaagctgtagcaaagatgaagagggattgtagctctacaactttgctaaagagagattaacaaggcatcatatgaaaacttgaaattcgggcactgtaaaatgatctgtcaggcagactgatggtgtcgcgccatggtacagtgcaccggggggatcaggttcagaacctcaccgacgacgatctctatgttgtgattcccgccgctgccgcgatccgtgttcactggtaaggtgataaccaagataaggtaaagatcttggcactggattaactcgggctcgagcgtggatgaggttcatcgtacccccttgccttgcggccggcgcggataagttcaccggtgatggccgcctgctggtcttgtgccacgtgctctggtacctccactgcatcgccgtgaccaatcataactctccgttgatcgccagagtgattgccacggtaataggacaccaatccactgcgctagtaacttttcactcctccgaccgccacgcgtcatcgctcaaattcccggccaccgctcttgcctagtataaattaaagccaccgtgagctctgtaggatcatcatgcacccagccaccaagtattgtcctcagtcgatcaccagggagcttcaattttggatttcccccaatctgctcaagaacaccgcacagtttcaacctcaccgcggccaactcaattcaggtctgctcataccttctgctccctcgtttgagtgttcttatgtacctgtgatgctcatcgacccgcccaattgaactgagctgccttagatcatcggggacgcgcttagtggtctgttgttgtcgctgtcaccgtgggcagagcactgtagggctccaatccagaaattagttgaggggaaacattcctcagagctggaattaggtttaaaccaaagattagcactggtctaagtgtaatctggccagtattagctcaccggagctcggctccccgccggtcaccgtcgtgggtttcagaccgtgaagaaatagaagtccagggtcttttctgcatatgtcagtgactcatttaaatagtagttagggttcttaaccagttattcaagtcttcggggacctctgtgcaaatctgccaagcgcacgtggg

SEQ ID NO: 171225 - DNA, 799 bp, Zea Mays
cgaattttgtaatttgcatcaaaatctggaaagtcactgacagtatcattagcaacaaaaacccctatttcttggagctgactttccagaagttttctcccaatcatgctctatcaatatcacagcaaatatcagagttctcgtaagcaagatgttaaagggatataataatggactgcaaggaaatgatatatgtcagcatgaaagcgcaaatatttttagtttgatccagtcgatattgtgtacataaacttcttggagacagccttatgcaaggtgaggcatgtaatgactgcatcaaaagtatgctttgctcaagcacagagaatcagaagactttttcattgctaaaccaaaaccagaacaaaactgtagactatgctagcgtttaaagctttgaagttaatagcaggctagctgttgagctgacttttgaaaagctagaaagctgaggaaatgaactaaaagctgaaaagcacagtttgaggggcgtttcctgtcttttagtctgctaagaagctaaattttattataaaagctaatcgcaaaagaccaataggtagaagccaaaagctagaaaactagctttgagccaaaaacgcaaaaagctgcagttcaaactaacaggaactaaaccatgtaggttgcaatacttcaaaaggaagacatacacaccttggcctctgctactgttgtgaacaattttgtcggcatatacaccttggcctctgctactgttgtgaacaattttgtcggcaaaacatacacacgctgcaagaagcccatgtccacaacagca

SEQ ID NO: 171226 - DNA, 587 bp, Zea Mays
atcaattaagttttcattttcaagggcattcaaactgttaactatcacttgacttcgattcgattggacttggaatcaacacgcttacttgacttacggtgaccactatactctactaacaaagcaatcagcttaagtcggcgacaacttaacacggtgcagcatgctcgcgcttacttaacttagagtgaccactataccctactaatggagcaatcggcttaagtcggtgacgacttaagatggtgcaacatgctcgcacttacttgacttagggtgaccactataccctactaacagagcaatcggcttaagtcggcgatgacttaagacggtgcaacatgctcgcgcttacttgacttagggtgaccactataccctactaatggagcaatcggcttaagtcggcaacgacttaagacggtgcaacatgctcacgcttacttgacttagggtgaccactataccctactaacggagcaattggcttaagtcagcgacgacttaagatggtgcaacatgctcgcacttacttgacttagggtgaccactatgccctactaacggagcagtaaccttaggtcggc

SEQ ID NO: 171227 - DNA, 329 bp, Zea Mays
gttcacatctcgctcactcccccgttggaatcaacctgcccgggaacgcaagttccaacattggtgcccaccgttcgtgctacgagaaaaccacccgcgatggcacccaaaagagctaactcgaaggcagccccatctgtcgacgaagcagcgaaggcagccctgctagctgagaaaaagggcaaggccctcgccaacaacacccaccaaggagctggcgaagacgaagcacacagcaagagacaacgcaacgatcaacacactccagaaggcacccttcgcacctgcagctccgaagggcagccacaagtgccacccccaggcttcgc

SEQ ID NO: 171228 - DNA, 361 bp, Zea Mays
gtggaaagtaacgaaggggtgtctcggagacttccctgctgtagttttggcatagctggcgaagggctttttgggcaaaattttggcaagtgtctgggaagcggtgtccagtggcggtgacttggaaaggagggtgatttgggtagtttcggctttctcctaggtagactgccatagagcatttctcaattccattctcgtggtattccttccagacatactctggcttcttccggatccccatgtgaagcgcgcaactccataaaagatgagggaatccttccacctctgagcagtaggatgtcctaatgacaaaggagccttccatctggtagcaagagaagaagggtttgttaatatc

SEQ ID NO: 171229 - DNA, 674 bp, Zea Mays
actgcaagacccagatagatttggacccatagatcgacagagtcggagtctgtaataatgcttaattcagtgtcttagtctagtcagtcttagttagagttagtttgcttatcatatgttggaatgcttgtcatgatgaacatgtaatgaagttggatctttgtaatgattgtcatcaaggtgtgggtatcccctacaacttggtgtagttattaataaagttagttatttaattgggtaatccatttatttccactttcctctttatctgagaagttgtcagtgaagatgatcaattgttcagcgctatgaagatttccgtatatcttttcttatgttgaaagactgcagagtcagatctaatatgtgtgtggtttctacagatatctgagaacaggcacataggtgcaaggcgtgctcagccggaacaacaggcaccctaggagcatgcagcccaatagcagcagttgccaccgctacccccgatgacagttgagcagatgtttgtgatgcaaacttaggcagttcaggcaattggtcagaccttagcagcgatgcagcaggtgcagcagcagccacccccacctcagcctccagtgcaagttcagatgccacaagtgcccagagacaagcgagcaaagttcatgaggggccatcccctgtctttgcccact

SEQ ID NO: 171230 - DNA, 794 bp, Zea Mays
cgtttgacagacaaatagtgacataggaggtttggaatttgaaatgaggcacggaatgatatggaattgagccgatacttcacgaataggtttatataggtgaatatgagtgaagtgtgtgcttggtttgaatttaggcgaagaaaaaggaattagggcactcggctcggaaacgatcgctcaaaacggaattttggtgaaatttaagcctgggatctcggattggcgtgaaatttggcaagtaggttactggaagtgtggtgaaggtgcctgaaaaatttgggttcaatttgagcaagtttgggtggtttgggcatttcaccgaacacgtgaagggcgagggattagggttttagggaaatggccatttgaggtgggaatgccctcccgaaggagctaaaagtttgcagggatacataatagggataatgaaatgcattccaccaactggattcatgggatttcacagaattttgaaagatttgcaaaagggagagaaaggggggagctctactgtctgacaggcagagaacaggagagaaggggagaggagaagagcagctcaccgagggggaagaggaggggagcccaaggtcaccggagcacggccggagaagatggccgccggtggagatcgccggcgggggggaaatcgccagacgcagagagcagcgggcggctgggaaaagaaatgagtgcctctggctcggtcgggctgggggcggtttttttaaaacgcgagatgggcacaccggacagtctacagtgcctgtccggtgcacaccggacagcgc

SEQ ID NO: 171231 - DNA, 345 bp, Zea Mays
gctgtgtcgtgtaatgggttgaggcgcgcaggtagtggcttttgacgaaggggatcgtgggtgcgacagctggcttatagccacgaccaggtaagcactaccccaacggcgcctggaattttgtggaggctgttaccggcgcgcacgattcttctggggaagaacgctctgacttgccgggcccataagacagtgaaggtggaaatgcgagacatgtgtggaacacgtcgcacgaccgatttgtcagtgagaacgtgcagatggtttctgtcccgcgcgtgcgtgcgggctgaccgggcggacccacctggaaatctctgcgggcgggcagcgcgtaggaacctg

SEQ ID NO: 171232 - DNA, 292 bp, Zea Mays
gcgacggtgaagggggttcttaaggaacacggcgagttccaaaagtggcggccggaggtggagaagaaggtgggggagatgaatgaagctctgaagacgatccaattcgtcatcgagaggcaagcacagaagcaaccagaggaggctgcaccagcaccaaatggggatgcgtcgaactccgtccatctgggaacactgtcgatcgaagcaacacctgggcaacagcgccaacgttttgtggaaaccaaccggagaccgggtgccgggatcgaaacgatccggacacctcctc

SEQ ID NO: 171233 - DNA, 324 bp, Zea Mays
gatgagcaaaaatcgcaagccgagctactgcgacgtggtaaagtgctttagcacgtggcacacggcggtaatcgaccaacggcggcgaggtcgtatcccgatcgatcgatgagcaaggggtacggtgagcttagccacgattggatccaagttgatccaggcgccaagatctttacctgcccacagttatccacaatccacaacgtacgaatcccgacgatcgacgtgaatcacggcgtgacggtcatcggcggcgaagttcactgaacctgatccgatcaggctactgtaccatgagagtcatcttcagagtgcctgacagag

SEQ ID NO: 171234 - DNA, 1930 bp, Zea Mays
aaaagaaaaaaaagtctacaaacccaaaggcccagctagctagcccagcccaacagcaacagttttaggttcaaacagctccctccccacccgtgcagtgcatgtgcagccgctggtcccctcacgtgcagccgccggccgcagcaatctctctcccgcacctccatctctctccctccccacagctccttctctctcactccccgcaggtccccttcctcctctgactggctggctggggccgcacatcctcgtcgcagctccatgcgaggtccccttcctcctctgactggctggctggggccgcacatcctcgtcgcagctccatgcgcgccgccaccgccactgcgcgcgctgccgcagcgccctctgccctcgccttactcccgcggcaaggcgataggacaccttacgtggtgaggctcgccttaccactttagcgacaccttaataaccatgattcttattattttccactttccacatatagcctaactacacaaaataacatactaataatgtattgacatctgaaaaaactcagacaatatgcaactggagcacagaacatttgttgtaagttgtgactataatcattttatatccagttaatatgtacttgtaaactgtaaacactcagaatcttgtaacataaagactcaaacctttgtcctatctgaagccatcttcaattgaactgagaaccagtaatatgacccatcagaagcaaatgttttgatatcaacatgctcctgaagatgaatggcatcttatatattttacaatgcttcaagaagattagcaatagatcaaatgcaagcacaacacattgcataccttgttctcaagctcaaaaagcgatactcctacgctgtactgtgtgcaaccaccaacagccatagatattgcaactcgagctggactgaaattgttatcccttgactcagagcgcataccagcagatcggttcaagtaatcttgtggtgatagcatcacatagtctgtgctacaatcttcaatatcttccagtacttgcatatttctgtgcgacattgttcctcttctgacaagagactttgaagaatatttaagggaaaattttgaagacttagacactctacttagcgagtctggtctgctaagtgagtctgcttctgtgctttctgtggattccccttctactatgcgataacataatggaattgacgagtggttttttatccagtaagggacaaacaatctcagtgtctttggtgcagcatcactagcacctaggtcatgctcaacactaactcgtagtctcctaaaattaaccaaaaaaaagtgcaactatcaaaaataacaaaataataaaagctaatgcaccaaaagaaaatttaaatacaagctcaattaacataggaccctgtcttaagtttgcgtagcaaattaacctacgaccctgtgggcaattgccgacaatcacagtacatctacatggcatcctttatgcatgattattgcacataattggtttatattcatggtttgtaaatttttgttgttgggtggttcaggtatcttgttagcgagctagtgtactttagcgtgagcacatagtgatatccattaaagagacgatactgatgttctagaaaatcttagaagtttaattcacattatggtgtatttaatttgatgataagtcagacaatcatggaataatatcaggaactgaggtgatataacactgttcctcatttttgtagtagtcttaagaaggatgggatgacataattgcattaacttattgtatcatctataaacagctcaaatctgagttgcatattgttagatacagcagttacaagcaatgcaggttctctaaaaagatgacaccacaatgaggaaatgctaggccatgaccacacagctcaaaatgagaatcgac

SEQ ID NO: 171235 - DNA, 319 bp, Zea Mays
tgcaagaaacagaaggcaacattttcagttatagatttgactggtaacttaaatggtgatgcaactccagagggtgatgcacctacaagactcattggtaggaagaaggctaagcaactattacaccgaggtggtgctgatggttacattgaggcattggacaatttgtgggagaaaaagaaacaagctgatgtagataaagaactggagaaggaagaaagattcaacgaatcactagaaattgagaaggagagacttgagatagagcgcacaagggttgcaaatgaacaaaaatgtatgcatatgaagagaatgctag

SEQ ID NO: 171236 - DNA, 328 bp, Zea Mays
gcctaaagctaggtctgagagcctcctctttgtaacgtcgtatgcctccccttttatagctgaagggggcatgcacaaaaggactgtccccgacatatgggcccagggacataaagaatatagtgcttggatcctctaatgtctgttgccgaggcaatcttcttgtgccctggcgctcgaggtctacgtatccttggcgtgcaggggaagcttcttgcggaagagaagatgagtatagtgcgccgctcggcacgggcgcactgtttgccagcagacccagcaggcgcgccgcctgctggatgaccttgacgccgcctgccagcggatg

SEQ ID NO: 171237 - DNA, 456 bp, Zea Mays
gtggtcgttcgttctgttcactctgtgaagacaatggcacgtgggaccctaatgtcagtacagtcgtcttgctcacgtcctcagatcccatcaccgagcagagagtgggcggcgccgcattggtaactgaatgtgcgccatatccggttgggagttgatcccaacaaaatcctaacaaatcactttccccctcactagcgaaaagtcagggcctcggaggcttgtcctcatgcgctctccttatccatacgggtctgacgcctacgcagttgtgcacgccggaaatctcgcctcgtccttgggttctgttgattcgtataccaagctataaaactagacgctgtgctaagccaaggcttcgtgaaacgcgtagagtcgacaccccctgatggcgcgggatggggccggtgaaaattccttaccggtgtttggagatccgccgttgacgctctgcac

SEQ ID NO: 171238 - DNA, 516 bp, Zea Mays
accccaacaaaaccctattcaaaactgagtttttaaatctggtttggttgcactgatgttttcatgctcatacttcatgaatcacttcttcctcggcgcttgttgtctacaaaatttgggatcattatgaacatttttcatcgcacgacactccaaacctacgcatggcactaccgcttgcttctgcaggtgttttttgaaaactgtttgatgtagccaatcgacactggattaggttgttcctatcgaagtgtgttttggtgtcccttggggtttggattgaatttgggaatcgaatctcgtgtgctcaagtttgagaattttagaggctcacattcccctctagttgccttttcggtccgtcaagacgacgatactctaggtagatatggcagcgagctctacaaaactaggtagtggtgcaagcgaagtctagggaggaaatggagacccacgcggagggggaggtttatgcgatcgactagagcaacagttgccgaagcgacgtgaccaggc

SEQ ID NO: 171239 - DNA, 683 bp, Zea Mays
ggcaaatgctgctgcggagctacctcctcctggggtgcctactgctctggctgagcacgcctcgcacctctgggcctgttctctaacatctgtagaaatcacacacatatcagatctgactctgcagtctttcagcataagaaaagatatacggaaatcttcacagcactgaacaattgatcatcttcactgacaacttctcagataaagaggaaagtggaaataaatggactacccaactaaatgactaactttattaatatttacaccaagttgaaggagatacccaccccttggtgacaatcattacaaagatccaacttcattacatgttcatcatgacaagcatccaacaaaagataaccaaactaactccaactaagacagactagactaagacactgaagtaagcattattacagactctgactccatcgatctatggatctaaatctatgcgggtcctacagtctggggtaccatagtcaaagcgaccacggggcggtgaatggtaagggtgctgaatcccaacaggggcgggagaaccaccatcaagatagtggcgtgccgcgcattcaacacacaattctgcaacctccgcccgaaccttgcccaactcgtcaagggcgtggtccaactctgtgttgagcacggcggccaggttgaccatgctgctcagcctg

SEQ ID NO: 171240 - DNA, 1863 bp, Zea Mays
aattgccagcaacgtcgattcgttagttcagcaccaaccattatatagttcaccacacaaaggttagtcttatcgaatgctcacacaacatacacacgtacgatggtctacctagcgattaccttcccaaactttcttttttctttttactgaaaacaacaacaaaaacagaataggtcaacattcagtacttatatatatagagataagaaaggcctcctcctccatcttcagcttacttctgcttcggcagtccagcttgatttctttccatgtcctgtcatcttcttccaagctagctaggtcagcagcttactgcacaaaaacagactctctacatcatgccaaacaaaagagtagattcagatgtttgagctactactacaagtgctgagtgctgacatcaccactattattttctttttcagcctctgaccatgctactgggctgggtgctgaaaaccaagttgagaaacaggacaatgtcagcgctcaacaaactaaccacagttcgagtaatggcaacttggaaaatggttcacactctaatggtgtgcatgagatctccagcagcagtgaaaccgtgacgaccattgcggacggactcaaactgatcacaaccatccgcgagggcaggcagcacatcttgccaagttggagtggctctcttgaccacgtttctggtggcagcacgagcacatctcaggttcatgaaattgaagttgagaaggaagtcagtaagggcgacgtcaaagttgaagagtatgatcttgagaagattctggacgagcaagaaacccatgacctctattgccccaactgcaaatcgtgcataactcgaagggtcatccttaaaaagagaaagagaacagtaaggcaagaaacaggcaaggaaccaccaaaaagaccacagcttgtagagcctcccgccaatgctccaagccaaacaatcaatcaagactcgccggaagtatttagatgcttgtcgtgcttcactttcttcatcccaacaggtatgtactatacctctcaacatgcctccacgcattatattatatgtgccttcctccttttcatcaactaatacctgagttattatgagcatttagattttttttgtctttttcttcttaatgcaaccatacacaactctcttgcgagtttgagatagattttttagtattattctcccaggcaatcatgctttcaattaagcttaattagcatcagtacatgagtacttatggctgtagatctacaaatagtaaatctgaaattatttcttctgcagtttgagatatgtagatcatggttaattaaacatgggtaccttaactgtacaagaagcaagactggaagccttgcatgatttgatccatacataagtaagttcctggttagaacaacgaaatagataaaacatatttagatatttgtgctatgccacctcagtgttggctgtagtttcctagcttagttttagagagaaaaaaagaataatcataactccatgtacctgtgcttctccagttattactagtactagatattatttctaatgtgccagtttaatatttatgttgccaccaggttgcgggtttaatatattccgcatatttgaaaggagggatgtagaccaacaagttcaatctcagcattcttctgcgtctgttgaaaattgtggaagttggcttctttcttgtttccggacaatagatagtccaaagccattacataatgcaggtattgtaatgtataatgtacttcagggtgttttcctagtagcatcactgttgtacaacacccaacttgatttgcactataagggctagtttgacaactccattttctcaagggattccc

SEQ ID NO: 171241 - DNA, 713 bp, Zea Mays
cccttagcattgatatgcacatatcactggattcttcaatactcttgtttcaaatacttacatctgaatttctactgcctacttaaacatttcagtttatatgtccatgaccttcctgtcttttgagaccctttcctgttctgttgttaagtcgctatctttcggcaatttcttgtctcttggtattggtatgctcatctccttgaaatctttcatactctcatctttttatgctcgcctttatatcccatggtctggttaagatattttattttacatgcccttgaccacccttgtttcttaatgatccatgagcgatcattttattttgcacacccgtgataatctcgttgtttccttgtaacttccttcggtaatgaattcttacttcaaccattctattgaaacatcctctatcttaccttgattgttttctccacttcgccatttcgcgagtcttgccttaactctatcctttgttatgcctttcgttattatcaccttcgcctttgacacctctatatcttaccttgatgcctatattacacttgtgctccaaaaccttctctcttttgtctcaattttaaaagttgaaggtcacctattttcccttagttgtaccctattccttgtcgcttgcgagtttttagctccaccctttgttgtctgttactacctatgcattcgtcgtctctccatcttaccttgatgac

SEQ ID NO: 171242 - DNA, 282 bp, Zea Mays
ctacctcttcggcggcctgagacataaactcgtcatcttcctcttgagcatgtaatcctgcctcagctagtgcgatgagctcactcaaccttgatgtgtcctcctcctcttctccatgtaatcctgcctctatgagagcgataagctcactcaatctagatgtgtcgtcctcctcctcctccatcagctcaactgtcgccattttatcctgaacatatcttgcatgcgcctcatcgctcatcggccaaatagtttacgccacatccaatctctgcaaatata

SEQ ID NO: 171243 - DNA, 520 bp, Zea Mays
tgagaagttgccacaacattcattgctactgcgtcgttgtgctgctgaaaatttttactgaagccgaagcttcctgctttctgtgaacttgttgtataagcttcagacaaacgtccaatcatttgagtgtagcttcgtctcataaaacctgaaatggctagagtgaggtctactgccagagtagcacgcgaaggagaagaggctggagcttctgagacgggccctatctcaggaatgatgaaacattctgggttagttgtacaagaagaaagagttagttccaacagaagatgttgttgttaccgaagctgaaccaactactgccgaagctgacagtgataacaaagatgatgatggcattttaagtccgagcaagcccagccatattgagtttggaaaattatggttttaatgaagaaattaggatattttggagagaatgatgacgaactagttcggtttgctgagggaagaaaagtgattctagatccgagagatgtcgaagtcgtagttttcaaaa

SEQ ID NO: 171244 - DNA, 897 bp, Zea Mays
cacccgttgggatcagcagcagatggagcacacccattgggttcagcgacagatggatcacccccattggggtcagcatcagtaaattcaggcacaggtacttcctcagcagtaggaactgaaggaccaacgtcccgatccaaactagatactcgccgaagacgtctctttttctttttctgctcatcagcaagagaatcaggttgattagctcggcaagggcgtttcgggcgaacactgacaggtctctgaatatccaaggttatcccagcttctgggagaggcgccaccaccaatgtcccagcaggagcagcatcagaagagtcctcggccagcatatcaagcatagcacttatctctgcatcactaggatccaaaggcacctcaaaatggacctgccgttcatcatcaggaatttcttcgagcgaagcaaccaaagcgctaacttcttcggcagagggtcgcaccctaaggcccaaaccgccatcagcgacaggtggattcgacacaaaatgagtgaaggccttggaaggaggtaggttccaggccgagtatgccactggggcaccaacatttgataccttgcctctaagactcatttcaagtcggttcaccaagtctacagcgggaattcttctattggtaacccgggttgagtcagctagacctcggtacagataagccgggtacgctctgtccttcaacggctgaatgttcttgaagacaaaatcagcaaccacagcctctgcagtcagacccctctccttcagcagtccaacttcagctagcaaagcccctgcctcagccgcctcctgatccgtgggggactcggtccaactcggagtgcgaacatccggctgtctccccgaccgtggggggagagaatttccgtggttc

SEQ ID NO: 171245 - DNA, 348 bp, Zea Mays
atgcagcaaaggaccccgcacttatgcaatacctcgcggctatccgtagtctcgagagacagttcaagggtttcaccttgcagcatgtggatcgggccaagaatgaggaggccgacgcattagccaaggctgtcgccagaggcgaatccctgccctccgatgtgttctaccatgtcatcggcacaccagccgtctgcagccccgaagggctccaaataaccaacgacagcgagggccaccgcatagtcaaccttattatgaccgaagactggcgggcaccaataaccctgtttctacaggggtactaccatccaaccgacatcaacgaggccaagcgcctcaagcatc

SEQ ID NO: 171246 - DNA, 307 bp, Zea Mays
tctgtctgcgaatggtatgctgagcttcttattgcacgggtcccaagtgactattggagctgctcccaaaagcgtgtcacaaacagtgctcccctgtcagacacaatggtcttcggaattccatgcaaacgcactatttgatcaatatagatttctgcatacttctctgtcttgtgggtggtatgcactggcaagaaatgagctgtcttggtcaacctatccacgatgacccaaatagaatcatggtgtcgggaggtattgggcaatcccacgataaaatccatgcaaatatcctcccatttccaag

SEQ ID NO: 171247 - DNA, 351 bp, Zea Mays
tacgaagccaatagcatcgaataccctgtacaaccttttcttattccgacccccgaaggctgcggacaaggcattatcctcggttttggagtacgccccaagtaactcgtcgctagtagcttcaatacacttcagccaatcatcatttggttcatcaaacttatccccaaacctgaatgtatacttcagccggaccaaaccaccttcgctagagttagtgatggtctccttcggcatttcccagttctccacaagcggccatactctgaatgctatatgttcttgaattaaatctcttgtgccaatgaaggagcaaacagtattgaaggccttctgacacgcttcggcggc

SEQ ID NO: 171248 - DNA, 662 bp, Zea Mays
gggcactgccgcgaaatccgctgtgcaccgtggccagcgtcgtcgagtcaacaattcgcggtaataaacctacccccaccttccttaagccttccgcattgcgtagctgagtttaattaggaaatgggtgtgtgagcgtggggtttagcctcgccggccatggcgcaccgccgtgggagcttcgctccgccaccggtgtccgcccagttggggcggagatcgtgcaccgtgcgatgcggcgcgggcggttaggatcgtttagttgcgtagcgcttcgggatgcaatctcgatcgtaggatttgatcggtcggattagagtgattctagggtgattgcatctgaaccgtagatcctagattcaagggcctacacagtggatcatttattcgctatgcgcgatctaatcctcgccatcaggatctgatcggacggctgagcaccctcgataccccttcggttgtcacattttcacatgagcccctaaaattattagaaaccaacccgccgtcctggcggctgagatctgtgtcttgggacttttcgcgcattaacccctgcactttcctgtaattgaggctcagtccagtggcgtgttaaaatgaataaatgaattataaaataggtttttatgatataaatgagtgctagaacttcaataatt

SEQ ID NO: 171249 - DNA, 589 bp, Zea Mays
aacgaacagaccctaaggctgatttagtgatcagggatcacgagaggatctacgaggaaagatctccttgctattcaattttgaatatcaagaagatccctctcggtagataccccatggatcttaatcaccaaaactagccttaaacgtttcggaaacggggcggaaaatataaaacagggatcagggcgggaaagtagtagcatgtttggttagtggaataaccttgttcagaaccaagtgatccagcatggactcactccttgcaggttcggataggaggaatgagttggttcgcctattttgcgagaaattggtagcttctagattttagttttagatcgaagagtggatgacagatgagatgaatccataacggtaaccaaacgctgggttcggatgactccggaccattggatgcctctaaccaaatacatggtagatgcctcccccggccccaccccattgccatccttattcacaaatcagaccatcttgctcttcatccaaacattctgtaatagtaacagttaaattggtgttagaactcttccggacggcagtacacaaattttcacatcctttgttt

SEQ ID NO: 171250 - DNA, 1714 bp, Zea Mays
gctctcgagtccaaaaaagtgaaaatccatataggttggcgttgggtgaaagatatcagatacaaatacgtatgtgccacactactcagataaattgacgatatagagtagaagcttgtttggatcgtataaacattagcacaggacacaatttagacaaaacctcgcaatcaagccacagaagtagcacaaaggcagtacattttcgcatccgtgaaatgtctgaaatgtagcggcagcaaatccgtgcactggtagaccagaagcgtctgtctcctgcccagaaattgaagggcctgaccacgacttaatcagtgcatgcattcagacgtttgggtcacatcagcagcgacattgtatattcgcctacctagtcagtacaagcagcgcctacccatgctccccaagtttcacacttcattgcggcaccatatttttttcgcagcacatacatacatacacacatctggaatatgcaagtacaatgtataatgtgtttttaaaaacttttaaactagttcacctcgccttttaaatagtctggcattactcttgaccacgaaaggaaaaactgggatgtatatacatacaaatagtaagtgtgaactttaattagagccgaattgaagaacaaaaaactagccaggttctccaccatgcgatcatgacagccatgagcaacattgaggcagagttctcaggtcactatccacagcataaaagtgagcgaataaataaacggtaacagtattaaacatggtagatgtgagaagtatttctgtatctgtccaggaccgcaaaggaagaagatgaatagtaatgaagtagcagaaacgttggtggttgacaccagtattccagcccagatgcaaagggcataattcaaaatttttgtattgattctttgcactcgcagaaaagggaaactagtttttcccagctcagttttcttttctcaacgtactattaggttaagatgatttcactattactggcatatagtggatttccatttgctagtgctagttttatccgagataggcattctgtgaatttagtgcagggtttatttatataaaacaaaataaagaagtgatgtgcgggctctactaataaggaatcatctgctcttgctctcacggaacatgtagagtggatagcaacgacaatatgcagtcacatgccaaagcagcaaagctagtagagcgtctgctaacaaacagtcgatcaacaatcatgcagcaacggagtgagagtgcaaccaaaaaataagcaaatgattgaccttatcagttcaatgctctataatgaattgaatgaagcatgactgcatgagagtaccacaagcgcagtcagctatcgatcagaaacttgcactgggaacaagcgtgcagcaggaatatggaacgagggcgcattcaccattttatgatgttaccctcgtttcggactcggtagagaatgtcactatgcccgtgtccttgctaccgcgagtcaaggtcaatggttaacaacagatttgaaatgaaataaaaaaatgctcattcgacaaaaccacctaccattcagagcaaacaccagcagcaaaacatctagtaaaccgactgagcagtgaatctatcaatcagaatcaacaaaaaaaatcaagtggtctaagatcagaattgaactttcaaaagtatatggaagttgttggtactacctgctttaccaa

SEQ ID NO: 171251 - DNA, 449 bp, Zea Mays
gaaagagtgagatgctccagaatcaaataaaactgatgcagatatggagttaataaggaacataccatacaccacgtcagcatcctctggaactgtttctgctgtcacatgatttactcttcctttactctgattctgcggagtcttgttctgtgcagtaccacgagcaggtgtattctgatcaaatctctgattgttgttcctctggggtgtttgtgggttgcgctttgggcaattgtcggcataatgaccaatttctccacacatgaaacatccactaggctgaactggggtagttatattgttatttttgattggtgtgttcacgactcttcattgatgattctgctggtaaccaccagacctttgaccggactaagagttgtttctctattggttctgatattggttgcttctctatccttgctgtccaaagcgttgtatttgat

SEQ ID NO: 171252 - DNA, 530 bp, Zea Mays
ggggcaaaaccaaaattgttcccaaggcacagatcactggcacttggagtgcgggttgatttcttttaaccacaaggtctctttagcaaaaggcgcaggccgaggggtattgcggatttcagaccgtccgattagaaatcacgcatccagatctgttgattcataaccgtgaaccggtaagcgacacaggccatccgattatagatctacggtccaaactctacctacgaagggggtacgatggaacccccaacaaccgtccgatcacgatctggcgtccaagcattcatacccgaagcggtaccctaggtcttaatcatggtcgtagccacgagatcggacggtcgcgagctcttcacccatcgcggcggccccaaatggtggtgtacaggatacccgcggcagagctcaccggagaaatgcccgcctgcgccccgatgtacaacatccaaaaccgaaaggcgctactcatcgatgggccaacaggaaacaacagggaagagttcataccaattttagcacagtgggga

SEQ ID NO: 171253 - DNA, 727 bp, Zea Mays
cgggggcagaagagctcgtcagcggtgaggagtccggcctacacttggcggtctagttcaattggatagctcggggaggttcactagatgttgtggaagatgtgcgcacaaggaatttgacaatggcgcaacggcatacccggtcgacgcactccggtgggcggatggattccagcgaggacgatccggcgcttccgatgaggtcgtgctcagtccgggggcttgggaagcttcacaggactccggggaggctagctgagcagttggcgcgggcgagggatggctggggtgagctggccacggtggctagagttcgggcggcttgggagggcggtggagctctcggttcacggtcaggtctccggtgattgagcgcagtgagcgtgcggggctgaggcaaggatgtccaaggggctgatggccttataggcgcgggcacggggagagcacgtaggtggactgaccgtgcgcggaggcgagtgcgcacgggggttgggcaagcgccggcttaccgaccagggttgaacacgtgtacgcgttgtttctgcctgagttctagcgtgtgtagtcactcgtccgggcctgctcttgccttagtcagtgcacaagacctcttccccttccctcaagctaccgatcttttgtggtggtcaagggatttcgtcgactggatccatagatatggtacactcaggtgggatctgtctcacagcccgaacccgaggca

SEQ ID NO: 171254 - DNA, 1319 bp, Zea Mays
ggaaaacaaatcaggaattataaaataaaaaaggggaacattaacctccgcttgggccgaaatcaccaggcttcggcccatctgtgctccctctttccagcctagcagtgggcttcacccggcgcctatgacaggcaggcccacacttactgcacttggcgcgtgctctgcgcgccttccttggctcgcttggggtcgctgaccgttgggtccacctggtcaaccattccttccttgcgcagattctttccctatcactggtgcgtgggaccgcctcgttagtctcccttcaacagaatgtgtccgtcttctccgcgcgccactcgccccgcgcataccgtgtcgcgccgtgagctttggggccgttacagccatcccgacctgcctcgctagtacaaagccaccagccatgatcctcctgcctccccgttccgtcacatctgagttggaaccgagtgccaacgccagaccgaggggagaacgggagcagagagtaccaccaacgccgccctcggcctcagctagtgttcggagttccacgggggggtctggggggcttcactacgttgcttggagggcgctcgtggccggagaaggaagtaacgaccatcggggcggccagaatttcacaccgtcgacatccctcccgccgctcagctgctcgtgccgtggacagactctacggtcgtcgttccaccagtaagaaccctactattcaatttgcgttcgtctaagcattgtgttcctttagatggcgggcgaaatcacgtcttgaaccgagcgacgcgtttgcgttggcgatggcgccgccgtgtttggtgatgcgccgccgtgcgcggtcggccggaatcaggatttggggagaaaacgccccgtatccaaatcctgtccatccgatcataatgaatgaccctgattaagtgttgaatgccttcgtctggattagatccgtgccgttgaagttagatctgaggggtgagtgttgatcgcgattcataaaatctagaccgctgatccccaatccaacgtgcgttgttagatgccagttccgtgattcacagcactgttttgggccgcctgtttctaattagacggctgtgagcccatcgtaccccttcgccatgcccgtttcgctaaagagtccctgaaaaatttagtaataaacccgccatccaccacgggatacttctaagtctcgggaaatcttttggtttagcccctgcatttctatttaattgaggcacagtcctgagggcagggtaaatcatataagtagttatagaaattgaattttagtgcaaaaataaatttagaaactt

SEQ ID NO: 171255 - DNA, 903 bp, Zea Mays
aaacctgtgggtcctaaccaactagtgaatttgtgttgcgtgcccttgtcccggatggttgatgcaaaaagatacacaaggtttatcgtattttgggcaagagaaggccctacttccagcggaggatgagacttatattatcttgcacctaagtgctcgtagtaggggatacaagcaagtccagagagggagtgagtttgaggcaagtgccagtatcaggaggtgagtgaggagtgaatggtgaagtgttgttcttagccttcctagagaaggccctcggctcctccttttatagtagcaaggaggaggcccaggtgtgcctgtattgctattgttgtggtcgtcggaggcgtgtctgagccctgtagtggtatggccggcgggatggcccttgtccttggcgctgtctctggtcaagaaaaggatgcccgatctctatagcctgtccttggaccacgtagacaaaagaggctgggtcgggagcatgggcgcgtgttcgagcctgtcctgtacagacgtgcggatgagacgcttccaagtgtcaattcggagttgttgaaatagcgttcagtatggtgaaaagatatggggtaatctggtccgagtgtcatattggatggaggaaggtagattggacaccggtcttgttgctgtagacatcctgtattcagtggggttcgcgtgagagcaggtggcatcacgtgtttccttgttgggacagttagccgaggccaagctcgggcgaggcaaagattcccgagacagaggccggggtaggcattacatgtagtcacgctcggatggttgaagcagtggtcggagtgggggaacagtgccctgtattcgcgctctgaccattgtcgtggagggtaaaagtagatttgacaaggtcacgtcgtcctt

SEQ ID NO: 171256 - DNA, 387 bp, Zea Mays
acctgggcacggtgctcgtcacggtggtgcagagcgccaccagaggggtgtggctccaggacaacatcaacaaggggaggctggactactactactggctcgttacattcctcttggtgctcaatcttttctactacatcgcgtgcttccatttttacaccttgaagacgttcgaggtggacgccggccgcactaatggtggagaacggcagccggaggctgcggagccttgccatgtacaggttggaagtttgtagtgagagaagctttcagggacctgtttgctgggcgtgtcaggtagggtagatgtagatctcacttccggtttctgcactcctagaaagtggcaagtctcgctgtaattgacatgtgactatgttttagaac

SEQ ID NO: 171257 - DNA, 343 bp, Zea Mays
ggtaactgttccttagggacacggagacacttcttgagctgagacacgtggaacacattatgcacatccgatagactagcaggtaactcgagttggtatgccatctccccaactcgcctaaagatcaggaatggtccgatatagcgaggggacaatttgccctttcactttaaatctcctcataccccggattggtgataccttcaaatagacatgatcacccaccttaaactccagtagtcttctccgggtatcagcatagctcttctgtcttgattgtgcaattctcaaattctctcttatcattcgcacttgttcttctgcatcttgaataagctcaggc

SEQ ID NO: 171258 - DNA, 547 bp, Zea Mays
gcttcaaatatgtaattcgagtgaggccttggttcctttcgcaagatccaagcgtggggtccgctggggaccgtcctaatactcccgatcactaactcatatagttgttagttccatttgatcggaactgatagcttgctacctctctccgcgataaaccatgagttagactctcctaggactcgaacacgagttggtgacgccctcaacgtttcgtatgtcagggtcctgggcgctagtgtgcccgtcttcggctgcccctcactctattttcgctggagcggccatgagcccttcgcggaccgacatttgaactccagaaattaacggacgccttgccatgagtttttcgctcttcgatccctaccaaaggaatttgaacgggttcggttgcttaccgaaaattgatcctttgtcgttcgtctagttccttaggccacagcgttctcaaagggtggcttggtcaattcttgctccctttgaatttattgagatcctgcatgagtcgggtagacaacaaagaaatagagagatattagcgtggcca

SEQ ID NO: 171259 - DNA, 650 bp, Zea Mays
gctgattccttcttccaatcttctaaaaagttggtcccctttactccgaatggttttcgactgagggcgtctgctaccacgttggctttcctagggtgataatggatttctaggtcataatccttgatcagctccaaccatcttcgctgacggaggttgagatctggttgagtgaagatatacctcagactcttgtgatcggtgaaaatgtgacatttgttcctgattaggtaatgcctccatatcttcaaagcatgtactatggctgccaattccaaatcatgggtggggtaattctgttcgtgcggcttgagtaggcgtgatgcataagcaatgactttctcgttttgcatcagcacacaccctaagccttgcctcgaggcatcacaaaagacgacaaaatcttgatgaatatctggtagtgacaaaatgggtgtggttgtgagtttctcctttatgatctagaaacttccttcacattttggggtccacacgaatttatggtctttcttgagaagttctgtcatcggtcttgctacgctggagaatcctttgatgaagcggcggtaatatcctgccattcccagaaagcttcgaacttcactgacgttggtcggctgcctccattttgatactgcttccaccttgga

SEQ ID NO: 171260 - DNA, 711 bp, Zea Mays
tgagcccaaagttgggctgtcagtcagccttaagtctgaaactttgtttaacattgtgtaggatcaactttggaaccatgtagcgcttgattcagtggttgtttaactaaaacctctatggcaaacttaaagctagtttgctgaactacaattttgatgtagattgttggtctggtcactacacaaaatttggcacaaattgtcctcaaaagagctctgtcagaccaactgaataggattcgcgatggtacggtgtaccgatcagattgccagctcagtaagctccctgcctgtgatccgcgcattcagatttgcgctggtcaccgtgattcgtgctgggcacgcagaggatatccatgggaaggtaaaagatctcacgagggattggatttgatcgcggattgaagtttatcaccgtgcctgtagccgttgcgacgtggccggaccgccagcgtcgccgtggaagctccggtgaccttggttgcgccacgtcgtagcttgttactgtgcggttgtactcgtggcacccttaggagtataatccttgagccgttgcaccggagaacgccacggtcacagccactcgtgttcttccttatctccggccgccagcatgccgtgaccaaattgagacccaaccgcccccggagccaataaattgagtgcgccatcggcttcggtatgtattcagacatctagcgcacccacccg

SEQ ID NO: 171261 - DNA, 541 bp, Zea Mays
cgcacacgctcaggggggttccctaaaaaacgtaatccctgtcggctaaatcgtacgaccgaaaggagttaggttatccccatcagctaaatcctacgagccaacaggagttagcttgtttatggtttagggattgccaaaaaagtaaacgccatcggctagcttgtggggccgatgggagttccttatgggaattaagtatccacgttggtatgcatctttggccgacagagtttaatatttaccagtcagctttggcctcagccgacagggattaatatagccaacaggaatcttcaaggctcctattgtgtatgttgtggaaacctcatgcttgaccccaacctcatcacaatgatattcaatattgatgttgtcaaactcttttgttgtcacttctaatcttcttgatattgtcatcaaattaattttgtgttttcttgttaaatctcttgaatattgatttatcttgaaggaagatcacccaattgtacattaaatagccgtccactattatgatacaatagagattgcctcccac

SEQ ID NO: 171262 - DNA, 418 bp, Zea Mays
ctcattcgctctagcgaaaagcactgccaacatatcggctacaatgttaaatagaattggtgataaaggatccccttgacgtagtcccttgtgtgttgagaaaaaggggcctatgttgtcattaactctaacccccacatgccctttggagatgatactttggatccatgtacaccatttcggcgagaaacccttcatgcacatagcttgctgaaggaacttccacttcaccttatcatatgctttctcgaagtctaacttgagaataattccatctagatttttcctgtgtagctcatgtatagactcatgcaaaacaatcaccccttcaagaatgttacggccagacataaacgtagtctgagagggtttaataattcgatctgccaccatacctattctgtttgtgagtacttta

SEQ ID NO: 171263 - DNA, 689 bp, Zea Mays
agcatctggactgcgaagaccatgtgttgtaacctactactaattgtaataaggggcccgtgtatagtcggcccatgctaaggatcccacctgtaggccgctacgcgagtagagctgttagtggatcagcccatgtttgtaattaattacgcagtaatgacccgccataacccccaagggagaatatctcatggataacgtaggtaaccgagggtataatcgtctttgacggggcagggccgaccctcggttacctataaatacccctgtacagcaccattgcgggggacgggaaaaattactattgccctaatactctgtgtaactaggcatcaaacctcttcctgtttttctaatgtttgagctcgattgaccacgagttagcgagttccaacaccatagtaaacatatagacacctaaactgatggtaaacatgtctcctcgctaaaaaaaaactcatttctaaaaccgaccgcaacatttttgccaaacacctcagaaaactttggagtagacctgctctttcctggtgttttggagcagagttgctctaatgtggagttgagccatgccaaacacgtcctaacactctaggtgaagcaactctgctttggagtctatagtgttttctcatagcaatggcgagtaaaatatctttaaactccatatgttgctttttaagaatttt

SEQ ID NO: 171264 - DNA, 488 bp, Zea Mays
taggactccgtgatggtttcctagagggggtgaataggcgaaacttgaaatttaatcactttaaaacaaaaacttcgatcccaattagtcattacaattggggtatatagaggagttcttgcacgtgttgctctttcgaatgcataattgacttagggagcaacacaagtgattttgaatcaagatcaaagcaagagaacttatagagggagaggaaaaaaacaaatcacaacaaaacacatgacgatttgattcaccgaagttcggttccaaaaaacctacgtctccgttgaggtgtcctaaagaacagggtctctctcaaccctctcgattgattccaaagatcaagcctgagccctctagttctttgagattgagacaccatagtctccacaaggcactccacaatctcggagcctcttgctagcctttacagtgatgggagtttgcaactccaaacacaagagtacaagattgcaacaacacac

SEQ ID NO: 171265 - DNA, 296 bp, Zea Mays
taggtgtgtgacttattccattatttgtaccacatgattgtcagacatattaacagcacaagattgacaagatcactcatgtattttccagtaaatcatcttgattaccttggtgtacaagttgcatgggtcactggtccatggttcctatctatttttatgaacatgcttccctgggaaagtggtgagccttattctttattatttgaaacatctacattttcctttttgaagtgatgtttctctgcctgacttattttgtgttatttgaaacatttaccttttccttttcgaaa

SEQ ID NO: 171266 - DNA, 552 bp, Zea Mays
gcgttggcatgctcgtacctgccacagccgcgaagaggacgtcgtagtgtgtagcgttgcagcgctggatggacattaaacttctacattggtaggagagggcggctggcagaaggcgttgtagacagcttagactatttgtaacgttatcttctaaagttttctctataccgcactatgcagccacgtcatccaaattctatcttctaattttcttccgctcgcgacagttacccctaaattctcactctatgtcatcactacaaccataaaaatttattttcttacctattattaatatattcttgtttttttctcaaccaataattactactgtgcacgtgctctgaggaaagggggtcgtcttgctctgcctaaatctagtgtgtccctatactatcatcttcttctgtggcgcgtagaggaggtctcagactgtccgcagcggtgtttcctaaattttttccccctaaatgttactatgcagccacgtcagcaagattctctcccctatattcactcatcccgcaatcgtcccccctataaattccc

SEQ ID NO: 171267 - DNA, 1379 bp, Zea Mays
tctagaattatttttgtattaaaattcaatttctaatattaattatctggttttctctgttgtctggaccgggcgccaatagcagagaaacccaggggctaactcgcaatttctcccaagactcagtctaacccttaagtggacggtggcttattttgaggaaaactgaggggttcgtttagaaaatatccgggcgaaagggtatctagggtttctgaccgttggatcatcaatctgcgccccagattagatcggcgcggccgtgaaacggtacgcgacgagaaccgttggatgcaaatacgacggggaggattttattattctggatttgattctatccgtccgatctagatcaacggatcaggccgaatgctacggaagggtatgcgatcatctaatctcagcccctgaattctagatctctggcccacggttcttcttctctccgccaaatccacgcgacggctgagcactgctcacccacggcggagcatcaccggcggacgcacaatccgacgcccggacgcccctaacctgaaattggccggtgctaaacctagacggggtgatggcgagcacggaagggagattcttacccgcgattgaaggagtagcgagctcgtccacggttcggggcgggtctgcgacatgaacagagcgctgttgagggattcccgacgctctggtgacccacatcgtttgggaggacaacacataggttcccggtgcccagaccatcatcccccacatgtcgtcgaggtcggggcggtggtccaatcggcgttcaaccgcggcggacccaagactggaccggcggccatggcgagatccgtctgtggcacacacaactctcttctccgctgaggcgctcggttttcgggtccgttgctggcacaggctaagggagaggcgatggcgccggtttatatacacgcgacaagggaatcctagggccaactactgcgcgcggattccgcggttctgttctcagcggtgagtccgacctgaggaggaagacgactgacgaagcggacccacatgtaagcgccacacaagaaaaagaaaaggaaagaacgtagagtgggctggcgttaaggaatttggcccgcggttaagactgtggacggcaggtgggctgcgcgggggtgttggtgggccgagacaaaggggttttggcccaggcgcaggtttccttcactttttccttttcaaatttaaacttcaatttgttttcaactattttaaatctaaatgagtcactaattcaaatctgttttgaatttaaaagtccagtttatacgcaacaaccagtataatcctagaatgatgcaaacttttattttatttatttagacaggatgcttcacattcactttttc

SEQ ID NO: 171268 - DNA, 408 bp, Zea Mays
catagtgcctgaatttggcggtgagacctcttcggctattgaagccaaaggacctgctcttacgcagaggattgaagagccggctgcaatgctgaaggctgacaaaattgaagaaccgggaaccgaagggacgaaaacatcagaagttctaagcccttcggcaagagtggaggcgccgaagacacaaaaagatctagcagcaaccccaagagaaaaaggatggctagtgtattagatgtgctggagacgataaaaacttctactccaggaaaaattgccaaggcttcgaaaacacagattgaaaccgagacaaagctgaccgaagccgaagctatactgagccaggctgacgccgaagctgggccttcaatgcccgccaaggagaaatcctcggaaactggagaaaag

SEQ ID NO: 171269 - DNA, 372 bp, Zea Mays
gcctgagctaaagaaaggaagttgttatcggatggctgttgatagcagtgaagcaagtccacttgggattatcaaggttatgtccgagttcctagatatgtttccaaaggatttaccaggcatgccaccagaacggaaggttgagtttgccatagagcttcttcctggaaccgcccccatctttaagagagcttatagagtatctggaccagagttggttgagcttaagaagcagatcgatgagctgtcagagaaaggttacatccggccaagcacctcgccttaggccgcccctgtcctatttgtgcagaagaaagatggaactagaagaatgtgtatcaattatcgagctctgaatgaggtcacaatcaa

SEQ ID NO: 171270 - DNA, 1401 bp, Zea Mays
tacactagtcatatgcccgtgcgttgcaacggcgcacaaattattcaataaaattgtatattagttcagattccaatcatgtgccctactttagccaaacacacaaaaaaatttatggagtatttcatattgaaaactcatatgaaggctcaaaaacactgcccactttatctagttcaaaattcgaattcacgcctgcaaccaatagataaacttttgtgcaccgccacgaatgaaacctaacctagcaacaaaatgcggaagggcgaaggcaataggaggcaacaattgccaactggatcagtagcaaccttctcatgcggctggcggggagggtgacctctgcacaggcagccaattgtgcatatgatcatctacacaaggccctataaaagaacacagattaagaaatcaccaagtatatgctttcaacactttgaaagaagtaatatatgtgtaccttggaataacaaattaaaaacgctaggaacaaagaagaatatatattcaagtgagtcgaggccttgtcatggtcactgaaaacaacagtagactcaacaattttatcggcaccaacagtcaccacagtgtgaggatatagcagtgtgctgtccttgtggaggaggtagtagcatttgatgcagaagtagaaggggttgttcagagcccacttatcgtcgtcagtcaccttcgtcgcacttatgcaagcccctctacaattggaacgtctggagagggtattctgcttggtttcagtgtgccatctgggagtaccaacctcatgtcccttatcacgatcttgtgcttgcagccccctgaaaatgtccaacaaggtatcagaaaacatggttgtatgatctgatatctttgttttgctgttggcacggtaaggctgcaccatgaataacacagtgaagttgaaattagcaatgagcaaacatcaagaatcatccgcattgcagtttagataataaataaatgttagatttcgtcaaaagcatagcataagaaagcaacttatgctcacattctatctttttttatcttttttcttgaaagtaaataaagaaaagaaccaagcctgtctggttcacacgatgtgacataaaagcaaccctgcccaatgttttcatatctcatattatgaccgataaacattcaacttcagcatatgagatattacagccaaatgaattataatataaaagatctggaaaaacgaaggaaatcaaatacacacacaaacttttcaccaaggaaatggaactatctgaaacagtaggacaaaagataagacgagaacctaatggcagtagaggtacctagcaccgggccgaaacacatatttgcctcatcttgtattgcactgaacacttagaggtgtcttgctaactttattga

SEQ ID NO: 171271 - DNA, 717 bp, Zea Mays
aaagtgtatgcatatgatgaaagaaaatctaagggagttcttggaattagaggatgaaaggaggggaaggggtagattagggtttcaaatctaggttaggattttgggatgctacaaacctaccccacttaaaggaatctcaccctcgagattcagacggggctcgagaaaaggtaagggtattccttccttagagagtcctcactttcccaggtggcttcctcttctccatctctgctccactaaaccttacagagtttcacttctgagttgcgggtccttctgactgctgagtcgagaatcttcactggcttttcccggtactggagatccttttgaatctgaattgcatctgcctcgatgcgggtttctggtacctttaggcatttgcggagttgagacacatggaacacattgtgaatatctgacatggattctggtctcaagacggtatgctgcgggccctattcgggaaatgacggggtagggaccgacaaaacgtggtgccagttttcctttcatttggaaccttttgacaccacgcatcggggagaccttgagataaacgaaatctccttcctcaaaactgagttcccttcgtctattgtctgcgtaactcttctgtcgactctgagcttcaagtaacctcctgcggattaaagcgactttttcttcggcttctttaacaaagtcgggtccttctagtgtcctttcccc

SEQ ID NO: 171272 - DNA, 653 bp, Zea Mays
ggaggattgtgtcgggcctgcagcagccgtcagggtgatgggaagggtgggatcttcgagttgaattgggcgatgccgatgtagatcaggtgcacaggggcagtagcggtggcacacgactacgttattcatagctcaacagttgttagcgtcggcaccagtgctgatggggaggcgtcgctggcatacaggtcctaaaaggggaacaatgtgagtgcaatgcccctcttctccctctacccctctgcgcttttcttcctcctcaatttccttggttgacagtgtggcatggatttgtgcctcattgatgtcgcaactcaaactaaactagcactaggtcggctcatgtcgtagctagatgttgggattgccttgttgagcttctcaattttgtttggtcattgttgtctccaaaaaatagttgatgatttggttttctcccatttgttatatgattttttactgagattctgggaatgtatgctctagaacggctggtcaggttaagtgcctcctatccaattgaccttgctcagagttaaggccaagactcttaagttttatgactatactggtgcattattatacttcgattgagtgtcattacattacatctcagaaaagtttcatcctcagttttattcagtgagcta

SEQ ID NO: 171273 - DNA, 455 bp, Zea Mays
ccctccctttcagatcaccgctactggccaccgcttcctagacacctgccagaatgctacccaaaaagccctttgcaaactatgccaaaactacagcaaggaagtctccaagacacccctccgctactttccacccagcaacaaaaataaccctgtgtggaggagaagactccaggccctgtcagggagagagcataatgaagatgaccctaccataatctacatggtcggatatctccacacccttgacaaccactttgatgacctttactcccactgcacccacctaaactctcgagtggaaagcctagagcagcaaatcaaggaattgaaggaagaaaatgcagctcttcaagatagtctcgagatggcagaaggcgaggaagccaacactcgtgaggcataccggaccctgaagatggactatgctaggaggctgaaggggctcacccccg

SEQ ID NO: 171274 - DNA, 419 bp, Zea Mays
aatgcccttgagaaaaacaaattttacttcccacaaagactcccctttttgttctcttcaaaatactcaaaatttggtttcagcccccaaaaccgattcaaccggtcctgaaaccggtttcggtactgttcacctgccacctctgctctgacctgtctgacagtcagagctgtcagaaaagtcgcagcagatatttttcagaaaccggttgagccgaatttttttcctactcagccggttttgaaacaggtcgagtctccggctgagtagctcagtggaccgggatccccctggtagaaaccggttcaaccggtctgaaaaccagttcaaccgatttttgctccttttctcccaacggctgccagcttttgggggatcctttatataccccctcacactctctctctcatttacttctg

SEQ ID NO: 171275 - DNA, 381 bp, Zea Mays
gggtttgggtgctctgggtgccgcacggggcttctctgggtggtagccgccgtcatggcgggtgaagatcgattaggcatgggcggctgggcgtgttgccatagagaatgggcgcaaggttgatgacgagcgactgaccgtgatgggtgcgccgccggagaacggtggtgtcgggtgttggtccaggctgggtccgccggttgaccaacgggagagagagaagatactggggagtccagcgccactgggctcggtcgcttggggaagaagataacactgtcgctgctggatcagttttgaagggctaggattaacagagaaccctgaccattcatctgtgaacctgtgtgtacgattccacggcgattgtataggatctga

SEQ ID NO: 171276 - DNA, 355 bp, Zea Mays
tacaactagagctcgtcgggctgtgagctctacgttggcggcgctggccagaagacgtgcctctgctacacctgcggctactgcaagaacgttagcgcctccaggttagtacgcgacggcgggctccccgacgacgctagcgccaagatggacctcgacgcctccatggagcagtactagaacatcctgctacgctccaagtacctagcgccttcacgccaccgccttcctcttcctctccccacctgcaatccttttgttacccgttgcgccattgttgtctcgtcatcagtgccatagacacagccgccggagatccaacacttggaccgtcgaacagggcaggatagctggt

SEQ ID NO: 171277 - DNA, 600 bp, Zea Mays
cttgtgccaccttgagggccgaaaatggatgtaacagtggtaggaagtgagcatatttagaaaaggtgtccaccaccacaagaatagtatcaacattacgagaacgaggcaaaccttcgacaaagtccaggctgaccacttgccaaacctattccgggacaggaagaggttgtagcagccccgggtatttactccggtcaggcttggcttgctgacacaccttgcactgagcaacataatctctgactgccagtttcataccagtccatgcaaatgtttgtttgactcggcggtatgtgacaggaaagcccgaatgcccacccaaaggactatcatgcagggctgcgataattgtcttatggagaccaggatctgctcccacccatactcttcctttgtatcgaataataccagattgcagcgtataaggtctagatgctgctccagtgatagacaaagcagacaacaattgttgcgcctttgtatcctgttgataactgtcaacgacctgcagtatccattagggcacaaccgtggacagactaaacaacactgcatccataaggggacgtcgagacaatgcatctgccgccccattct

SEQ ID NO: 171278 - DNA, 762 bp, Zea Mays
gctgttggtagtctatccatcgcctgtgacagtgccccggtgaatgccacgatagacaactccggtgactcctcccctttctcactacccacccttccccgcctaaattcgtcgtgctcgcaatcgcacactataaattgatgccccagtgagctccgttaggttataacgcacccagtgcaccaactctcgcctctgatcgtccaccatagcctcccaatttagcagttcacccaaatatgttttctgcgccaccgtgaacgtcgcgcagtggaccgccgtctctaggtccgttctcacccttgttttagcactcaggcatgcttgacatgcttgtcgacccgatcaattgagctagaccgcaccccaatcacggggaacacctcagtttgtctccagttttcactaccgtcatgagcagacaaaatctgagccggatttgtgcaattaacgtagggtttagggtcgccagaggtaggattaggtgtcggccgagctagggctttggtcattaagtatctcggccggtatgggttcaccggagggtgtgctcaccgacgttcgccatcgtggacttggcgctgcgaagaaacagaagtgcagggacctaactgtcaatgtcagagacacagatgaatagtgcgcagggattcttaactagttattcaaaaggcctaggtcctctgtgcaacaccgccagctcgggcgcgtgtgcaggcacgtttccccgttcgtgggccgactctggctcatttgagcccg

SEQ ID NO: 171279 - DNA, 501 bp, Zea Mays
tcggagtaccagccggaaagctgctcggattcattgtcagtcatcgaggaatagaagcaaatctagagaagattgaggccatcatgagaatggaagcgccgtggtcatagaaaaaggtgcaaaggcacactgggtgcatggcagcgctaaacaggtacataacaaggctaggcgagaaaagaataccattctataaattgctcaagaaggtggacaattttagtggaccacagaagcacaagaggctctagaggcactgaagaaattcttgaccactccgccagtactcaagccaccacgccgagctacgcccggtgagccggcagaagatttgttgctatatatctcctgcacgattcacatggtaagcaccttattagtagtcgagtgggcggaagagggacacgcatacccggtacagcatctggtttacttcatcagtgaagtcctcgggccctcaaagataaggtatcctcaagtttagaagctgttgtacgcggt

SEQ ID NO: 171280 - DNA, 705 bp, Zea Mays
ctgataacaaccatatatcatttgacgaccaaatttagcgaaaaatcattgtcgtagggacatttgttctcactttccctttttcctgaacaacttcgcgtacacaccctgcttcttatgaggccactacagccagtaatgcgtccgagctccatggcaacccgccaccgcaaggtctaactcatccgacaccaacccttgaatactcgatcactcagatttttaggccagcgaacggtgatggcgattgagtcggctgagagtaaggtggtgcgacgacacgaatcagcaacgagaaaggtgtcgcacgacatgctcaattgcggggtgtccccgtggcctctgtgccaggctgagctagccaccatcaagctagggcgccgcataaccgccaacgcacagttcgacaccgacgacgatcatgccttgttcgacggaatgtcggataaggcccttatcgattgcaccgctcgatcggttgaatgttaaagtcgttcgtcaatgatatggcgcaaaatgttagggcggtggcgagaagcataacctaccacaacagaaacataatgcatttttggcgcttccaacagaaaactaaaataatgattattttttacggtctagatccagccgttaaaaattaggacttatttttgacgactagagatgaaacaccgaaaataaacagacatcgcctttgttattctc

SEQ ID NO: 171281 - DNA, 649 bp, Zea Mays
gggcttatttcttttgaaatgagttgaagcagaggaagactggctagcattgctatacttttcagtgatccctatcggcatgtcagaaaggacttcgaatggattagaagaggttctcttttgagttgagaagggagcacgtgatgatgttgaccttctcgaccgtccaaccaacctttcatgaatagggcgagcatggttggatgtcgagttactagtacatcccaccctactagccatagagtcagctggaagtgccaactctcttcgtttgttggcagcacgactagcgcgcacattaacagcttgtttgacatacttcttgcgttgtgggtttctctttacccaatcttggtactctagccattgtgcaaatgcttcagcacatcgcatgatctcaccattaatatcatctccagacattgatacccccgggagtaacttattcaaatcttggcatatggttctttccaaggaagcctgcatggctcgtcttgccgcatcttgaattctacgacaactttcttggtgttgagttaaaatcatatccacaatggatgaacgatgtgcatttgtcaacgcggcactgtcaaccacaatgaggttagctcgcgcacgacggttatttcgacggtggcggcggtgcctt

SEQ ID NO: 171282 - DNA, 791 bp, Zea Mays
gtttcagaaaatagagacggtaagatttgtgtttggcggggatgctagcgcagactcactccaaatggtgaatcgttgagtctcgagcgatggatttgagacggtggattattctggctcaagcttgcgtcataatctcgtgtagtgttgatcgtagtattgttgaggacgtgttacaactggtgtgcctgtgtgttcagaaaaagagggggtccttcccttttatagtttaagggctggactctacaatgaggacttgcattctgttgggaggagctccactggcgacccttaggcaacgtggttcctctggtgctgcccgtagggtcgtgcgtagccgtactcccattatagcgtactgtctcgttcgctcgtcatacgggttctttttgtcggtctttcgctaacatccttgtgatagtgcgcgaagggtcccgcgggtaagtcgtatggagcaatcacgcgtcgtgcggtcttgcctgtcgtcacaagcctacgtcactcgttggtgtgcgtaggcatacacccagtatgaagctccgatgctgaggtattttatgatcagggtcgttcggtccttcgaagatgtggaagcacattttgggaccgtgctccggaggtgtgttcatgtctttagcggtttctcgacgtgcctacgacctaccattcggatgactggccatggcccgagatgtcatgtattgtcttagtaggcgtggattttgagacgtttgacttgggtttccatcttgcttctcttccttggttaagacctagttaagacagctctg

SEQ ID NO: 171283 - DNA, 395 bp, Zea Mays
gggatgcagagacgtgtagcagtcgtgcgcacgtcgtcccagatctggcgcgaggcaggcttttttactagacgtgcgtgggacaaagaacgtgcgcgcgtgctgcatgcgctgcatctatgcgggagaagcatgcaaaaagctgcaagctagtagctttctctttctccctttttttatcatgtgattaaggaaatacttaattatgtccactcaaaagctatgtgtgtgagaatggaatatagcagcatgcatgcgtacatgcaaatgcatagttgattgatgggaatgcatagttgattgatgggagaccaatccattcaccactattgcacgtatccgtaaaaaaaatttattcatggctagaggctatgacggttgtatgagagtaatac

SEQ ID NO: 171284 - DNA, 649 bp, Zea Mays
gcgatcaaagacgaccaccgacctctttgacattgcaaccaagttcgctgacggggaaggcgcggtcgaggcaattttccgcaagggaaaaagcccgcgcgatgccggcgagcccaacgacgaaaggagggatcaatgggagcaccccaacagacatcataggaactaccaccccgcatgcaccgaggaaggaggagtcgctgccatggaccgaccacctaggccaccggtgaagaacaacaacgaccatttttagaagttgatggattcaccgtgtaagaatctccttcgtccgccacaaacttcggaagtgcgaactcctaaagagattcatctccaagccatcagccaagaaggcgaagcagaagagccaacaaagctggcagaacaagagacccccactaaagacttccccaaaaccacgggatgcctcatgatcttcggcgagggagaagcgtacgatgacaaatgccaccacaaggcggcccgacgagaagtgttcgcagtgaggtctgtcgtcccgtgatacgtctggtggtcaaaattctcgatcgtcttcgaccgccgcgaccaccccgacgtgatcccgcatctcgagacctaccccctcatcgtcgagccaatcgtaggctcaaagcacctcaccaag

SEQ ID NO: 171285 - DNA, 373 bp, Zea Mays
ttctggggtcccttatgtaaaaagtacactgtgaagtacgcgcgatccacgtggatccgaccgatccaccctcaacggcccagatcacaccgcgaaccggtacgaacacgcgagagcaggattccgatccaacgatccacaagcttgccttactctcgtccgcacacctgctgatcaccggccgagatgaatcacggcttgggtctcatatatacaggcgtggactgccacccagtgccaggcacgcgtaacaacccaagcagcacgacggcttcgcccggtggtttcggcatcagttgcgaccagaggtggatggtggcccgacccgtgggacccatgtggcggtgagcaaacgagatagagcccgcccagg

SEQ ID NO: 171286 - DNA, 682 bp, Zea Mays
ggaacattctgcaagtaaatcagaaaattggggataattgcaatgtttgtgcataacctaacatttcagtttgaataaattactgagccagatccatagaaaatttcaccagttttacatgtggctgcaatcatgtataccgcttgaaaatgtttacatggacagcaattagtagaattatcattttggttttttgcacagaatcaaactatagtaccacatcacttgtatttataggttcattcagctttcctgtacattatgtaggtatagtggataatgatacaatgacctagatcaaatcagaatgctagtctgtagttcatctgctatgatgctaacagtgggtataacttgctttacttgattaaagctcaggtaaacctaaacaagcagatggagatagtgagccacacaaacttcttgttaaaaatattctgtagagtttaggtgtagatgctaagagttgggttcatatacctattcttccacaaaacaaatttgtggaatttatatgtcaagtttcacaaggctaacaaaatatcagaacagaaaagatcaaacgagatctgatcaccgtgtgagggtccatacaggtattaaggggtctaactcagcctcactgcataaaggtatcatcacctaatgtcttctttcagaatacacttcaccttggagtgtg

SEQ ID NO: 171287 - DNA, 491 bp, Zea Mays
tgagtaagccagtatgatcccgaccgagtgacctctgatacaatgaatggcccttcccatagtggcgacaacttgtgccgtccttccccagttagaattcggcgaaggaccaagtctcccactgcaaaggatcagtgtcgtatgaatttatcatgatagtgcctcaaggtctgctagtatctagctgactgaattactgtgttcaatcgctcttcctccagcacatcaatatcctctagtctagtagtttctgcttcagctatgctttcgaagactagcctcggtgccccaaacatgaggtcggcgggtaacactgcttctgaaccataaaccatgaagaacggggtatttccatgtagagctcgactagattgagttctcaagctccaaatcacatatggcagctctctgatccactttcctgcaagtttttcatttttgtcgaacactttcttcctgagtgcttccagtatcattccattggctctttc

SEQ ID NO: 171288 - DNA, 323 bp, Zea Mays
aaccaagccacgcccaacgccgacagtttcttctacgcgcgttatggaacttcattgcttccgttactctctcccccacttcttcttccttgaagacacgccattgatggcgttaaaaccgaccgttcctcctcagcgatcctctccctccatctctctataaattgaagccggctctctctccaatccatcccaagctcgcctctcgcgccctcctctcttgccgaccaccgtgtccatcatcaccggagcagccgtatccgtcgccggagccccgcccgacgtcaagaacccctgcccgccattgccgtgtacctctgctg

SEQ ID NO: 171289 - DNA, 722 bp, Zea Mays
cgggtattcttgttcgatgggcatgcatgaatttacaaaacacatttaacgaaggttctgcctccattccctggaactgaccagcaacaatattcttgtttcgcggcatggatttagtaacattttgattaacaaaggttctgcctatatcttctctttacaatgcttttttttcaggcatacttaagacggtcggcaacggtaaagtcgttgtttatgcacatcccaatagtttgtcggccgagggaaaagcgtgctagagttttcagtactacaatcggattcgagtttggccaaggtaagtgtgtgattcttttagacatatgccgctaagtatactgcacgtaatctcacacttgtgttatttcggctacaaagcaatctgcccggtggcttagcaaatgtgattgccaaggtcgacctttatttttgggcatctatttggcatatatttgcatgtgcatcttgacccaaaaatagctacataaaataacctgtgcggatgcaaatcctgaggaaattttaaaaaaaaaagaattagaatccgcggttgacctgataagatcgatcatccgcatgcaggaccatgcctgcatctgcattatttattatgctccaccgttgccataacgtcagatgaatgacatgtcaatcggaaagcacaattccatctccgtccaagaaccgattcgcggtgtcttgtgtggtacactgaacgctcc

SEQ ID NO: 171290 - DNA, 295 bp, Zea Mays
gaaaatctgaagaacaccaaaagatctacggcactgttgatttggatgaacttggatgaatcggtgaggatttgatcgcctgggagtaactcggtacgtggcatcgttccgtgggctgagccacgcgtggccggagttagtcaccggcgaccaccgtgactcgattaacttttgccgcggtgtcacccatgcctcgatctccctcactgtgtctcttaccgacgtggtaggcatgcgctaacgaagctatccgtggccggagatcgctagccgagccgccgtggctataaatagc

SEQ ID NO: 171291 - DNA, 535 bp, Zea Mays
atggactatagctcaacagctttggtgcagatgaatgatcatgttgtcacacaatgtttggagtaaatcgtgctcaaacttgctctattaggcacactgaagacacttccgattgtacagtaactgaagaagatcttaggtacgttgcacctcaccaccggtgatctcgcgcctggatttgcgccgaccgccgcgattcgtgcctagtgcaagtggataacttaggggagtaaaagatcttagcgcccggattggctcggactcggtcactgttgagctcgccgtacccacttggtctgtggccggcatgaatgatcttcatcggcgttgtccacttactgatcgtgcgccacatgcctgggaggtttaaacacgtcgcagtgaacccttgtagcaagcccgaccttcatcggtggccttgccacagtgaaacccacgatatcacctatgcgagtgacttcccctctatccggtcgctagtgcgccatctcaaaattagccgccacctctctcggacactataaattgatggtac

SEQ ID NO: 171292 - DNA, 484 bp, Zea Mays
tccagctctgagctgataattgcaaagctagccggatgagtctcatatgctctcctaagctagctagaccgttagagcagcagtgcgccagtgtctaagaaaaaaaaaaggccatgaacctcggattttaatccaccttggcaaaaaacctgttcttttttgttttgtgtgtgtgatgtctgatgagagggtggggggaggcccagatattcagagctgtatgggatggatagagatccagtacctaggaaaatcaaggcgagatcaacgtcgagaggtttaatccccccaacgccatcagatgtgatgtgatgcgatccgtcccgcgccagcgccagagccatcatgtgatgtgttcccatgtgcatgtactcccggccggcccacgcgagtgtgtcgtaacggcgtcagaatcagagaccgggactattcgcccgacaagagattgcttcggctgtgagaatcgtttctacgagaatcacag

SEQ ID NO: 171293 - DNA, 408 bp, Zea Mays
gtttatattttctcttatatgatatataaaaactatagcaacgcacaggacttgtatgttttttttgtaaatatgcatcaggagcatgttacattggtacatgcgagagtggactcaaggatgggcatggtatgttttataaaccaagaagtaaaatgccttgtaaccttgaagtgtctaagtgtgtaacagaccacgatgtttcaagtaccctcagcaaaacaatttgtcacaagattcatctagcttactcttggcaactggtgtagaggccaagctagtggaggttgataaagtattggtctatggaagagaatatgtacagggaatacttatctcggagaagccaaaacacaatatagttgttgcctgtgaccgaatggccgaaacacctcatgtcaaaatgac

SEQ ID NO: 171294 - DNA, 338 bp, Zea Mays
caccccgaagggagggcgccgggtctaatatcgcggccgacgcggactcaaggagggtcaacgaacaaactcccgcggatgcggggaattctgttgacgccacgccgcgcgcgagatcggttgcaagggggaagacccagctgacgagcgggtcccgcccgacagcagcggggtgagccggacggggctgacacatgggtcccactcaccagtgagttgcgcagcgcgcggatgatgaccagcagggtccacccggtcagttgcagtggggaggcggtcgcacctgtgcgtgtggagttgggctgcccggaggtgattcggagttgggccaaataggg

SEQ ID NO: 171295 - DNA, 1036 bp, Zea Mays
taaaactcaacaaagatggctttgcactgaaggtttgaaaaataccttcctttgaattcattgttgaaaacgatttattactaaaaacataataagttgagggaagggtgaagggtgcagtcgggcccatgaagcagcgtgcgagtgttgtgtgcctccttaggtgttgtgtcatttttcctatataaacatgtgtcaaccaccgataagaacatgacattagttgttttctagcatgcatatagctcattatgctctgcattcaaagctcttcactgaccttccaccatactcatgcaggtggagccaaaccggatccttggagatggctcacatcaagtccaccactcgagtttagactcctccatcatcatctaaagcacttcagtgtgatgacaatgttagcaacatcgaagagtacattagcttaggtgtggacgatgtagtggaggaccccactaggaaccctcaaccagacaaaggtccaagtgacagtaacaattctaatgatgaggaatctagttttgaagaagtggatgaggacaatggggagtttcgtccaagaaagccaagctatgtaaatattggaaagttgatgattaagagtggtcatttgaagacattaaaaagcttggatattttgacgatttgaatctggtgaaacaccctagccacaggagaacgaagacatggtctaagcttcattttgccatgcaccctatggtgttggtgtattgaagaagtatgaagttttcttcatcagcttacaccgagcgctgtcatgtggatgggtgtgtttatatgggttgtatgaagctagctagccaaacccaatgataagtgtttctacagaattcatgaaccgcattatcaaacgaaggctcatgataaagaaggcttgcacaacaactttgggtgctacaactcctagtgctgaaaggatacagttgcaccggttcttgcttaccaaagcaagtggcctgtaatacctaaattgtgaaagcataagaaatgaaattatttcctatatatttgc

SEQ ID NO: 171296 - DNA, 480 bp, Zea Mays
agatgctttgagcagaaaggcccagtgcaattgtatgagcatggatgcaagaatcaccaccctgtgtgatgagctgtgcagattaaacctggaagttgtttcttcgggtgacctaagctatatctcggtggagcccacgttgcaagaacagatagtcagggcacaggttgaggataagggtgttcaggttatcaaggatatgatcaagcaaaaggcagaaaagtacaagtgtttcagataggacagcaagggaattctatggtttggagatcgattggttgttcccaaggaccctgagctcagaaagaagatactagatgaagctcacctctccaaattctctatgcacccgggcagcaacaagatgtaccatgatctcagatctctatattggtggactagaatgaaaagggaaattgccaagtacatatccgagtgtgacacctgccagaggatcaaagctagtcatttgaaggcagt

SEQ ID NO: 171297 - DNA, 687 bp, Zea Mays
gccggttgtgcgccgccgcaacctgggcgccccgccgtgcgaggccgtcggccggagaagacgcaaccagggccgtccatccaagcgtgaacggctctaattagaagaaggaaaataccccttcatgacattaaattgcgaccgtagatctcagatcgtagggctgggtttgattagtgacgcgggtagttaggggccgttgattttggatctggcagtcaccagcgtttactggttctcgcgggggtttgatctaatcgaagccatccggatttgatccaacggcccgtgatcgcacgtaccccttcggccgacgactttgcaaaagaagccctgaaccttgtagatttaaacccgcagtccaccgcaggtaggttctgagtctgtggagcctttgcgttttaaccccgaattctctgcaaattatgcacgccatccaagactcaaaagaaagaaataaatgaatatagaaaatgaattcctagtgtaaaaataatcctaaaacttgtttaattcatacaaaactcattttaactcctttttagtccattcaagttctcataattttgtattaatattgcctactacttggtaacactattttgtcatgaaacctatactagaattgattactcaataaattttgtagcaagcacataaaatcttcggaaattcataactcctccg

SEQ ID NO: 171298 - DNA, 467 bp, Zea Mays
gattcctgctgtggatttggtgagccggctcgagatgatactcagaggcaaggtgtcgaatatcggtgctcctgttgcatactcagcctagaatctgcctccttccatggcctttatcagtttcgtgtcaaatcctcctgttggtgatagcagtttgggccttagagtgcgaccttctcccgaagaggttgatgctttggttgcctcacttggcgaaatccctgacaacgagaaacaggttcatttcgaggtacctttgaatccaagtgacgcagagataagtgccatgctggacatgttggctgaagattcctctgatgcaacccctgctgaaacactggctgtagcacccatcccagagtctagcaaagctttagatactcagagatctgatagtgttcgcccgaagcgtcctcgccgagccaatcatccaacttctcctgctgaagggaagaaaaagaaaaaga

SEQ ID NO: 171299 - DNA, 677 bp, Zea Mays
gctgagtgctctttgttttactataactgtgaccacggaccaccagtgcagtaaaccatctctccctgtttgtgttttttatctaaaaccgagcagggttccactgtccataccccacgctcctaaacacctggtcatgtcagggtgttcggtctgatgtcgccttgagaatctttgctcctcagtctggtgagcacgccgccgatgcctcatatcatcataatctgtcgagctcgatgctgttattattgataatcatctgttctgtattccttgggtagtaataaagctctggcagccttgggcagggtagattaggcgtgatatcaatacgatttcggaactaggtctgaccggtccattaaggaattgatacgtgagcctaccttcgctggagaagttcatcgaccataggtttttacgcacagctcaggcttgaacctgagttcgtcacctacgtgcagtcttggaccagagttgagaataaaccaaagggaagggacctcgatgcaaatgtccatgacacatgaactggtagtaagggttccgttgtaattatttttgggtctgggatgtttatagcgaagtggcacggtcggacggcgcagggcagatttccctgtgttcgtgggccaagcagttgatttcggcccagtctattaaagtttgtctttttt

SEQ ID NO: 171300 - DNA, 952 bp, Zea Mays
ggaactccgtagaaaggcaggacaatgagcacaaaacgtagggaaaaaataacacaacaaaacactaagaaccaaaagaagaagtcttaggatgcagttcatacaatagagttagatgttcattacaaacaccacaaggcaaaataatctatgcaatatgaggaggggaggtatcaccctcagcgtcgtctagagacaccatgacagagtaggatccagcgctcaaaggagacactggtggaaccacctcttcatcgaagtggcgcaccagtgccgagcctagaccctctacaacgtcgctgagtcttcgcacctccgcctcggcaaggtcgtcctcgtccggtaggatgtagccctcgcacacctgctagagattaatctcatagttggatgcaacgatggctagcgcccgcttcaccccgaggtggacaacctcatagagtttgctctgtacatagccactcggggcttgcatgcggctccacggggactcacccaaggggacgtactcagctctgaggccttggccaaagtctgacaccgcatcggatagtgccttgagctcgacgatcttctggtccacagcctgggagagcgtccgggaggtgtcgatggaaatgtcaagatcccaccgaagctctggaaaacaaccaagacactaagccatggctagagtaagccaaatagataaagcagaggtaacaacatgtacctcccatttttgttttcaagccttgggcctcggaccattcagcctgtagatccttcgcaagggagccggctcgggaagaggcctcagcggtttgacgctgagacacatctcactcgcccgtcaacttcagaaggctttccttcagaaggcggacctcatcctccaggggagccaccttctcgcgcgcagccgcggtctcgtccttcagctccacgcacaacgatgtcagctccaccgccc

SEQ ID NO: 171301 - DNA, 896 bp, Zea Mays
caagaaccactcacttggtgaatatgagggttgctttaactatggagaccctgaccactttgtccctaactaatctaaaatgaaggacaaacatgaatctagcaagcacaagggcaagcgcaagtataccttcagcaagcataagtccagaggaggttctacaaggaggcactcaagaagaagtatatgtggtgttaggaccttagaggaacatatctacgaactcgttttggcagatttaaaagatttcgaacaaagtttagaaaatctcgatccccaaaggcacattaatattttttaagttgtttttgggtatagtttctaaagcaattgatacatttccatgtactaaagccattcttttgatttcaactgcactaaatttaataaaagtattcgcaccggattagttgtatttggactcatcacatgtttgattagaaccaatctttttccatgaccctctccttcatgatacttactcttgtcaccattacatgtctctactcctttaaagcacgagttttgtgcgtcgtgcatcacacgcgaagcgcgtagacctggtttccctcacatctcgcctaacaactagataagataaaccctaccttttcatacgcaacgaaccatacaccaccatgagcgcttcctcctgctcctagcttcgtatattaacctccaacctcccatcacttttccgtttccgccttcgtcatctagattcttttgtaccaccataaaggacatgagcaggctgctagccttcgactcgccatccgccgcagctcctctcccgcggtgccacctttacctttccgtgtcggtaagtgtctcaaaccgctgctatgactccgctgccatacgcctctgtaggcagtagggcaagaacagacgag

SEQ ID NO: 171302 - DNA, 691 bp, Zea Mays
ggttaaagtaaacattttaatatcatactggtacagctctgaaatgttgtgattgtactaatcaaactcttagtatttagcagtatcaaccttacattctcatagtgtaaaatttcttgcctcagagagtgccctcagtccacgatctctggatatgttatcacttacaacactcttcaaggaacccaaatcagatgtcaacaaaccggtcaattcaccaacctgccatcaaacagtaagatatttatctcaaaatatgaagaggcaatttcttcccaatttatcgagtctagaaggcacaatttttatatgttttcatggatgatacatacagctaaggattcaagcttgaggcagagatagacaaaaacaaaaccattcttagagaatttcccttggatgggcgtgcatggaaagcaatattcatgtgcccaaactatcagcaggctctagatcccctaataatatcactattgttgatgccttagatatacttattttatttttctctttcttttccttttttgttggtagctcatgttggaacaactctagcccagctcaacttgtttgcaaccaaatgactttgttcttgttgtaataaattcagataaattgaaatagcttattgccatatactactttgtttgttagaacacatggaattttggcatactaattaataaatttt

SEQ ID NO: 171303 - DNA, 764 bp, Zea Mays
ctagcagacctcatcacttctgaattattgctcagcttacttgcggaatagctggttatgattaccagtctgttaggagatggacaacattcaagaggctgggttatggacttgtcgagtgtgagaaagtaaaattatattttgtccttttcaaattattggacttttccccgtttcatgctgatgacctatatccaacttaccatcagaatttatgacacagatctttgttccagtgcatagaaatgcacattggtgtttggcactaataaacatgaaggataaaacattgcagtatcttgaatctcttgttggttggggccgtgatgtactggacatactggtaggcttatctgaccaaactgaaagttacactattcttagactagagtgcctgaattgcatggggttgcctttgcaaattattcatgtaatacttgtatatgttttttttgaaaggtatatataattgatattcattatcaagaaagcaaaattacaaagtacgatgttcttcataaaaggacccagcacaaaattaaagggcctgcaagatttctctattgttggattgaagcactacagttaaattttctgtctggcaggctagatacatcgtggatgaattgaaggacaagagtaacatagaggtagaacctagttcgtggactgtagtgtcagagtctttgcccttgcagcagaacgggtatgccttccttctagtactaatcaccataaaatccagcatgtggcgctgattgatt

SEQ ID NO: 171304 - DNA, 856 bp, Zea Mays
tgaagcaaaattactggtggaatgggctgaaaagagatgtggctgcacacgtggttgtgtgtgatgtttctcaaagagtcaaagccgaacaccaaagactagttggcctactgcacccgttaaaggtacccgaatggaagtggaaagaaattggcatggatttcattactaggttgcctcgcacctcgaagggtatgactcgatatgggtgattgtggatagactgaccaaagtggctcacttcattctggtcaagattacttataaaggatctcaattggcagagttatatatggctcgaattgtgtgtttacatggtgtaccaaagaagatcgtttttgatagaggatcacagtttaccttaagattttggaagagctttcatgagaatatggatacaaagttgagtttcagttcggcctaccatccctaaactgatggccaaactgagagaactaaccaagtgctggaagatttgttgagagcttgtgcccttcagcatggaggcaattgggacaagagtctaccatatgctgagttctcatataataatagttaccaggccagtctgaagatgtcaccatttgaagctttatatggcaggaagtgcaggactcctctatattgggatcagactggagaaagatagttctttaggcctgaacttattcaagaggtagatgaacaagtccgtacattctgagagaacttgagggtagcacagaccaggcaaaagagctatgttgataatcgaagaagaccactggagtttgaggagggtgatcatgtgtaccttaaggtgtcaccacttcatggaatgagaagattcaaagtcaaattatcccctcgctttatt

SEQ ID NO: 171305 - DNA, 789 bp, Zea Mays
ttcaaccatgatctagtgagtgtttggccatggttgctatagcaagattgtagctagatcatctggcaacaactttgttactggtggattagtaagtcgctacatggaaaattgagatccaggccttgcaaattaggctgtcaggcgcactgaataagggttccattgtacagtgactgaacaagatcccaaattcatcccccttcgccgccggtgatctgtcgttgcaacttgcgttcgtttgggagattcgtgccacgagaagtgtgggtaacgtcgggtgtggtgagaatatccaacgcggggtgaatccggtcgctggccgaaccgctcgtcgtgtcccgccgtggttagccgcactggcatcacctccattggccattatccggccaggctacatgcctcgacaccttaccatggcacagtgagtcatcgtaaaccactctctactactggttcgtcgtcggtaaggccgccacggtagatgccaccaagctctagcgatagtgctctcctcactctccggccgccaccgcgccaactcaaattcatgagccaccgcccccaagtcctataaattgagcacaccgtcgggtccgtaaggtagtcaagtactcaagacaccaaggcgtgcctccaattactcaccaaagctcaccaattctggatttcccccaaacctgctttccaccaccgtgaaagaagcctcaccgtggccagctcgtctcaggtcctctcatactttctgctctttcatttcattgtccttgtgtgcccctgatgctcccc

SEQ ID NO: 171306 - DNA, 785 bp, Zea Mays
atccgtcatgctgaagttatttcttttgctccaatttggcaacatcaaattcatgcttacgatagctctgttccactttattatctccttttgtgtagcttgttttggttgtcccttgatctcttgatatggtgacttgtgaagactttggatgatcaaaatgtgtgaggattaggctttggtcaatttgattgtgccttcctgagacaatgggtgcgcccgctccctttacctcccctttcttattctgctccctttacctcccccttcccattcaacgtggtttccaactcatgcttcttccgtgacatcttcccccatatataactatgaggaaaggttgcacattttatggttagtttgaaggagttatcagcttcccccaccatataaatgcgtttgacttatatagctgatgaggctaaatctgggagaagaactactgcagggtatgttgttatctctactactctatatgttcttagagtggggtcataattacttcccctaatggagaaatgtttaatgaaccctctgtgcagtaaatccttggggttgtagattgttctagcttctttgggtttctgttattgtagtttagtaagtggaataaaagtttaggtaagcttacccttgatttttgtgatgacagataaggaccagaatgattgagatagtgtcccatgggcttgcaaacttggaggtatgtctcacatgttggtttttctttcaaataaaaatgggtgtttatttgtgtgaagtaatcaatgattatgatgatccct

SEQ ID NO: 171307 - DNA, 610 bp, Zea Mays
caaaaatctcttcttcagataacctttttcccgaagcatgtcgtataatataatcaagagcttcgaaaggtgcttcgggagtaggtgtgccaactttttcaggcagaatttgttctacagcttctttttccaccgccttttctctggtttccaaggatttctccttggcgggctctgaaggcccagcctcggtgttggcctagctctttgtagcttcggcttcggtcagccttgtatcagtctgcgttcttgaagcctcggcagttttccctggagtagagcttgaagtttttatcgtctccagcacatctagtacactggccatccttttcctcttgggggtcgttgtaagacctttttgtgccttcggcactgtcacttctgccgaagggcttagaacttctaatattttggtcccctcgactcctgtatcttcaatattatcggccttcggctcagccagttcagatgaggatgccttcggcattgccgccggctcttcaatcctctgcgtaagcgcaggttctttggcttcggtagccgaagaggtctcaccaccaaatttaggcactgtggccggttcaaaatagcacggtcggtgagtaagaac

SEQ ID NO: 171308 - DNA, 811 bp, Zea Mays
ccctcagcaggagaagttggatgattggttcggcgagggtgcttcgggcaaatactatcagatctctgaatgtccaaagcttttccagactctaggatgggtgccacagctagtgtttcagcagggactaaatcagaggaatcctcagccaacatgtccatcatggcacttatttctgcgtcgctcggattcaaaggcatctcaaaatgaacctgcctctcgtcatcggggatttcaccaagcgaaacaaccaaagcctcaacctcttcgggagaaggtcgcactctaaggcccaagccactgtcaccagcaggaggatttgacacaaaactaataaaagccttggaaggaggcagattccaggctgagtatggaaaaggagcaccgatatttgacacctttcctctaagaatcatcacaagccggcttaccagatccacagcaggaatccttctgttggtaactcgggtcgaatcagtgaggccacgatacagataagctgggtacgctctgtctttcagtggctgaatgttcttaaaaacaaaatcggcgaccacagcctcggcagtcagacccttctccttcaacaatccaacctcggaaagcagagccctggcctcagctacctccaaatctgtgggggattcagtccaacttggagtacgaacatctggctgtctcctagaccgagggggagagagttcccgtgattctctacgataaaccattctaggcgccatcatttgatgctgtccttgagtgggatgtcgaggtactcggttttcctaccacggtgcatctccaaactcgc

SEQ ID NO: 171309 - DNA, 823 bp, Zea Mays
gttgagagcctgcagggcgaagacacgatctccgtcgatgaggtctttggaggttggttcgtctacgtcggggacggctgaagtgcttgtccgtggtgacccatgtttgatttcctgcgaggtcatggcctccgatccatatagcaggcgaaagggagtgaacccagtcgcccgacactcggtcgtgttcagcgcccagactgcttcaggtagcaggtcggcccatttgcccttcttgtcgtcgagaagcattttcttaatggcagtgaaaatcttgctgttggcgcgctccacgacgccgttagattgtgggtgatatactgaggcgaaggctagcttggtgccgatggagaagcaaaaatccctgaaatcctagctgtcaaactgtttgccattgtcaactgtgagctcagacgggactccgaattggtagataatgttttgccagaaaaatttctgtgcagtcttcgacgtgattgtggatactacccttgcctcgatccacttggtaaaatactcgacggcaacgaaggtgaacttgaggtttccttgggccatgggtagtggcccgacaatgtctagcccccagcgttgaagaggccacgtgtgggcgatcaactttgtgaattgcgaggggttgcccgagcggggagagaacttctggcaggcttcgcacgacctcgtgactcgatttgcggtgcagataatagcgggccagtagaaaccttgacggatcaccttggcagcgagggccctaggccccgagtgagagccgcaagtgccgctgcggacttcgcgcaggatctggaggccttcagtctcg

SEQ ID NO: 171310 - DNA, 598 bp, Zea Mays
ggggaagcagtcacgactcgccgaagccagctctgggcgggagatgtagtcgtgacttgcctgaggctgacctcgagcgggagcgcagaaatgctccatgggccacttgatgggcctcccgatgacttgcctagcaaggcatgccctcggtctgcaaccaagctagatgagcttgactcgaggagacgaagactggatgaccgagtcatgcgctgatgtctcgggtagggaggttgagtgctcgacccgaggaggcgaagaccggacaaccgagtcatgcgcggatatctcggacagggaggttgagcataccagaagtgctagatacttggagatgactcggatgaagggcaattgaactccgtataagaaggcatgttgcgttaaaaaggaggatttaggtagaattatagtcatcacgacttgtatagggataaccctctagtcatctatataaggtcgagggatgcccctatgattgtctctctcatctgatctcaacttgtcacatctcatcactacctcatagctcattagccctctcatagcaaccgcgccaccactagatcgatcgataggagaactcactctccccgcc

SEQ ID NO: 171311 - DNA, 786 bp, Zea Mays
gattactgagaaccacaccgttgtagcttaacctacaatctaatacccattgtcaagtagcattacttcataatcatggggcactcaggagataaagtccattgcacatcggattgagaagggaaaggtacaggcaattaacacgccggtacatcatgttgtttggttcgtgtcacattactaaaagctgagtacatgtgtccctgattcatagcaaggacacaacgagcactctgcagcttgacctacaaattaacgctcgtgtgggctatcaccgcaataacattatcgcacatagggaatgaaagggaaatgcaccgagacactctacatcgtgaggggttaggtccgcgtccaaaaattcagaaaaaaatcatgttcgtgattgaaattatttttttgtttgaaaccatgattgaaattattggctctggacaagcatgattagtggggttaatcttgatctgactagtaacaactagcactgacgttgtggtattctgaattctgacctccacatgtttccaacaaccaattcatgcatcatcgttagctcaataggtggaaataataccgcaaatatttattccaggcatgtcggctccaattggggatgaaatgaagcaacaaatttcatttcactgaacaaagggtgcatacaatgggcggtcttgagcttgagatgatgaatgtaaaaaaaaattaaaacacggatcttagctctatgctcgagataaaaagacatagttgattggtgaattaaatactttaattggtgcaataaat

SEQ ID NO: 171312 - DNA, 463 bp, Zea Mays
tctcgtcctcgagatttgtaagaaaagggaatatataaagccaaatgtttggttgcagtttaacttcgagttttttttcaaatggatttaagcacaaatgttttctatatttttttcttaagtcattaaataaggaaatgatcaggaacacatgggtatactttgtttagctattgggcaggagtagggaaggttgcgttaataaagattagggcaaagaaagattccaatatggatgggggaacttttctcatatgatgatccagcttggtctttgaagacttgagttggtgcttatccttccttgatgaggttgatcatcttcggtctttaatcttggagttatcatctgagtttatggacaagtagatagatgtgggtaggataggttttatgagatagttcaaaatcttgggcgtttttaatttatgttgatctatacggattatacatgtaggtcaaa

SEQ ID NO: 171313 - DNA, 720 bp, Zea Mays
actggatctggcctcgtctagaagtagtaggcaccgatgtggtccctagtcttcccagacttgaccaacacgaagaagtagcggaagagagaagtacaaggggccacacctacgaacatctcgcagaggtggacgaagatggctgcctggaggacggagtggggcgtgaggtgttgaagctgaagcccgaactcctccagcagcagcagaaacgagggcaaagttggcagcgccaacccgcatgagatgtaggaggtgaacagcacgaactccccggcggagagatcgccgaggggggtagcgccagcacagattctcccgacgagccctggcgcgctccacccaagcaggccgcgcaccaggttgagcgcttcctcagactggaaacggtcagggtgaccaagcgaagccatggcgtgtctggcggtgcgagcggggagcagaggagcatgaaggcaaaggggctcaagcgattgggagagaatgcgaaaaggtaactgctgcacgcggggtgaatcctttttcaaggaaacctgagtccttgttagggaaacccttccgcgcgcccctcaatcgccgtaggaaatctcgcccgacgggcaccaaggacaaaggcagcccagtctatgacacgggggcccaggtccacaagtcatatggtttgtgtgctggacttcgggtgcggaaagagtgaaccgccgcacgcgcctgtagtgcgcc

SEQ ID NO: 171314 - DNA, 440 bp, Zea Mays
ggggaacactatggaccacaaccggggctcaggacgggactaatttggctagacatcatgtgggcgcggtgagctggcgtgtccgagctccagcgaggacaaattcaccacgacaggacagaattaagggaaaccgagcacgggagcgagttcctcacctcgggatggtgctcaggaaggctcgacgcggcttctgacggactggatgatcagcacggtgggcgcgggtcaccggcgagctctagcggcgacggcagagcacgagagagggtgagcgtgggcgaaatgaggctagggagagagagcaggtgcgggcggggctcaaaaggagctagggcgagtgggcaggcgacatggctggtcttctcggcgtgcgtgcgtgggtcaacggtgattgtgcggaagacggagctgacagggctggtcagcggtgcagcgag

SEQ ID NO: 171315 - DNA, 516 bp, Zea Mays
tctagtatgctggccattctcctcctccttggagttgctgcaggaatctttggtgctctcggcagctccgtctctcgcaacggactcaaagccttcagttgctttgatgccgtcttcagttctggctcttcggccgattatgtcccggcctcggtaggagcggagcagcttggctcagatacggaagaagatccctcaataggcctcggctcttcggtcgtttcaaagcgcttggggcggtgtgttagaaccttcactttttcggcttcggcgtgctagaaatcgctgaagcatcagtctttcttttctttccttgctttcacgaaggataacaataatccaagtatacaaatccgatgacatcaaaaactctattcaatctctttttgcctcgacccccgaaggccgttatcatagcatcatcttcagcccttgaatacgcaccaagcaactcatcaccggttgcctcaatggcatctagccagtcatcatttggctcatcaaattggttcatgt

SEQ ID NO: 171316 - DNA, 329 bp, Zea Mays
gccctggatgcacaagcacagatcacaaatgcacattcgcccagacggtagccactgatggaagctagcagattttggtgtctaaatttcagcaacgtcaaagcaaagcaaagcaaggcaaagcagcacggatgatgcgttccgactttattcggtcattacgttgcctgaagaatctgaacagcaacgaaacgaaacaggtcgccagatcttaccagcccctgaacagcaacgaaatgatcaatccctgacgttgtagtacgaagcgactactacaatacagcccgccgactggtagctagcatcgaccaccgccattaatattaggc

SEQ ID NO: 171317 - DNA, 673 bp, Zea Mays
aatgaaacacatagataagttaattctttgctctctcctcatgcataaagttttacccgaagtaacccgaagatatataatataatgcatcaaagcctttttggcatataagatatcacaaattgggattatattagtaagcaaaaagaccttaccaaatgatttaagatcagaaatctcagtcatacattgctcaaccagatgttagcacattgctctctttgtcgctggatgacatgaagcaaactatgagataaaaggacatttaaccgctaacaacacgaagttgcgagtataccgagaggttattctgagaattttttcactatgttggtgtgaaaaccatagtgagttcccgttgaaccactttacttgttccatataggacctctatgcttgtgtcgcatacatctctcagaattgtaaatacttatagtcactgaattgactcgggatagtcctttgataagtttggtatacattgtaagctaaatggtaaaggtcggtcctgaatggacacatacctgggggtttatgtagccgaactacactgaatttcaccctttggcatgcttaccattatctacctccgatctaccagaagtgagaagagtagacaaataactatgaaatcccacatcaccacagagcttgaagctaaattagacattaa

SEQ ID NO: 171318 - DNA, 689 bp, Zea Mays
gcagttattcttgaagtgactggggtctccatagtgccaacaggcatttgctggtggttggttgcttgcgaccgagggggcctaaaaggagctctgactctgctggctgaaacgtgacggagtgggtccagctggtctattaaagcttggtcccttgggtggaaacccgaaggatcgagctctctggtgccggtcttgctgctgagcttggagaacttggaatttcctcttgaggtgacctttttcttcttcctttgccctttccacttgtatggctttattggagaggtgcgagaagctgaggaaatcttggctggcaaggatggtcttgagttctggtcttaaccctttcagaaaacgggccatcctcttggcttctgtgctgacattgtcaggcgtgtagcgagccaattctgtgaatttgtgcacgtactcactgacagatcttccaccttgagttagttcccgaaattcatcttccttgagctgaacgatcccttggggtacatggtgctctcggaaagcagtttcaaattctgcccaggtagcatctctgacggtagtgctgaaggtatcccaccatgagggccatctcggaaagttgatgagcagccaattgaacacgctgatattctgggcatccgatggcttctaatttcctttttatcgtgcgcagccagtcgtcggca

SEQ ID NO: 171319 - DNA, 417 bp, Zea Mays
acagtgctccgagttcatccacggcgagatcttttcaccaggggtcgttatccgcgcgttacttggcatgaatcgcagcgccggcgcgaatccgagtgtgtgggtcaccggcggcgagatacgctgtatctgcaatcttgttcagtgaatgtaccatcggaactctattcagagcgcctgacagagcatgtttgagagcgatttactcaaaaaattgttcagcacctggtcaaggttggtatagcaaagttgttcactaatgttagagcttcaattttgccatagtgaccctgaccttatctccattgaatcaaccatgaactgctcccaaagttaaccaaatgtcactgaacttaggttttcagagttaaggctgtctgacaggccaatttcaagtctctttttctcccattttca

SEQ ID NO: 171320 - DNA, 372 bp, Zea Mays
attataaacattgaagtatatttaataagcaacaataaagattgaagaagcttggccaaaataattcaaataaaaccccaagcaagcttctcatgtggggactcaataggaaattctgaatttcagaattctaaatttcagaccttgagccaaagatcaaacgtgttcaccttgatccctaactcaaatcctaatgaccccattaacaaaaacgtgcctaactaacccctctgtcgcctgccagaagatggcattgggacgcgtgcctcggacacgtcaaaccagagattttctccctgtgtgcggcagtgagacataccagatttcttccctctctatctcctaatccagtttaccaaacctgctaacctc

SEQ ID NO: 171321 - DNA, 363 bp, Zea Mays
caaggtttttgtggtctccatgacagcgtctagcacgctggccatcctccttctcttgagagttgcggcgggagctttctgcattttcggcaattctgcctttgcttgtgggctcagaatttctggcattttcactgtcttttccacttgtggctcttcggccaagtcatctttggcttcagttggcccgattgtaggcaccttcggcactactgtagacccttcagcgctctgagtggcgggagcagcttgtcttgcttcggcagtagaggaggtcccctcaccaaattcaggcactacggccgtttcaatataccgaggccggtgtgtcaaaaccttcattttcttgcccttcggcacagc

SEQ ID NO: 171322 - DNA, 494 bp, Zea Mays
ccagaaccaatagaggaacaccactcagaccgatcaaaagtctagtgggcaatagcaaaatcgtcaaggaagtgccataaacacaccggctaagaacaacaaaacaactaccccagttaaacctaatggttgtttcaaatgtggcgaacttggccactatgctaacaactgcccaaggcgtaatcaacagacaccccagaagaacagcaaccagaggactgaccagaacacaactactcatggatctgcacagaacaagactccgcagaaccagagtaggggaagagtcaatcgtgtgacagcagaatcagttccggaggatgccgacgtggtgtatggtatgtttcttattaactccatacctgcatcagttttatttgattctagagcatctcactccttcgtaacaaagtcatttgtggaaaaacataatataccaaactatcccttgaagaagaaactattaattcgatcactaggaggtgaacttagag

SEQ ID NO: 171323 - DNA, 356 bp, Zea Mays
ttttgaccttcaagcaggttattaaattatgcaacatattttctttgttgcagttcacctagagctggagtgtattgtggactgctgttgctgctgtgcttgaagtatggatgtatctgtgtatgatgcctgaagcagaaactttctgtgtttgtggggtgtggacagtggagagtggactgctgcagtgctgctgctattgtgcttgctgtgtcttatttcatcgaagcgaccaagccaattagccaagcactcaactgctatgtttgtggactactacctgtaacctgtgtgactgtctttgtgaaatgaactcttttatgtattatctgtctttagtctgtgtttaattgttt

SEQ ID NO: 171324 - DNA, 731 bp, Zea Mays
atcgccgccgagaagctccccggccttatcttctatgcccagtacatatgatctgtattgcacgaagcattaattaacgctcgactgacatgtagtttgctccaccctaaacaacatggagattctactcgtcggtggggagatcatggtggatggccacatccccactgctgctgccattgacgacaccaagcttcgatgtcgcgtgcgctcctttaccaggcctaccgtagggaacatcttctatatcggatctctcggtacgtaacgcccactaactcctcgctcgacatccatctgaacatggagtgatggagaagatgtaagatgatcatgtgtgtgtcgctgcaaaggagactcggtacgtcggtggagagatcatggttggccgcagccccagcaatgagcatcgacaagacctcgttgcgactcccagctacctcggtatgtgacgccaaccacctcctcgctcgacacctgaacaatgagatgattttgtgcgtcggtgcagagacttgtgtagatggccgcagccccaggtttgctgccaacaacgatgacgagtttctaggtctcctccccgccgagagtcaccgcgtgcgctccgcctacatggccactaataacgacaccgaccatcgacatttccacgctggccctatttgcttgctgcagcatcccttccgcatcatcgccaccgagaagctcctcggccttatcttctatgcccg

SEQ ID NO: 171325 - DNA, 408 bp, Zea Mays
cagagataagtgctatgcttgatatgttggctgaggactcttctgatgctgctcctgctgggacattggtggtggcgcctcttccagaagctggtacaaccttggatattcagagacctgtcagtgttcgcccgagactcccttgccgagccaatcaacttgattctcctgctgatgagcagaaaaagaaaaagagacgtcttcggcgagtatctagtttggatcgggacgttggtccttcggttcctgctgctgaggaagtgcctgtgcctgaatttactgacgctgaccccaatgggtgtgctccatctgctgctgatcccaatgggtgtgctccatctgctgttgagcccaatgggggtgttgtttgtgttgctgatgaaaacgacggggaggaagaagatgagg

SEQ ID NO: 171326 - DNA, 372 bp, Zea Mays
caagagaaagcaggttaggaagcgacgttctagagcaaagcctaagggtgatctcgttccttcatccttggaacgccaggattgcatggaggcccatgatgcagtagttgccccaatacaccatgtaccgccttgcatcttggggtggatccacccaatgatgagagcggaggatgatcttcaaaatgcgattatggtgacagtgacaattattagtgactgggctttggtactagcctcgagatcgttgagttgttggccacgagactggaggttgaagagagctctttggtgttgcgacacgcctgaatgtcaaattatctccttttcctccctacccgagctttggtagaggaattgactggtagatgg

SEQ ID NO: 171327 - DNA, 485 bp, Zea Mays
cttcttctctgctcttggatgattccgaggttgggcgcgtaactatgggggtggaacagactcagctagggctgctaccgtgttggccacactgccgccgggttgtgagagagagaggagtcatgatttggtggaaggtagccgccgcgccggtgttgggcatggcgatcggtgtccggcatgtgagtgatgaggaagaagggttccgagccattggtgttgagatttacggcctagattgggagtgggtcttctagccgcgtgcccgggtctgggggagaagcggggaccatggatctctgtgtgaacggtcgagatcatatcaagcatacccctttgcctcatcaaaacggagttgttgatcttggatccgtccgccgggtgcgctcgcgatggtacattaattaggggatgttagattgggacccgagggacatgatcgaatctcgagtaattaaacctcgaccgccaatctctccatctac

SEQ ID NO: 171328 - DNA, 524 bp, Zea Mays
gtatagtaaggaagttttagcatttgaacttttcaaaatccccaaaacagcccctaaactaatgcacttgggggaaattcagaaattcagaaatctgaatttcagcccctttccaaagatcaatcgcgttctctgtttttcaaaactcaaatcaaacaagtccaaataccaaagtggcgccaaattcccttgagcacgccatggcaaagtttggaaacctctctccaccatttgacacactgttgacatgattttacctcgggactcaaccttgtgacactgccacctttgtgacacgacaactctctgtacactgccccaaaccgctcgacttccacacacaaacgacaaagctctgtcgggggagcaaatcttgcatagtgatcatgcccaaattcgcgaagatattcaacctatgaacgcttgaactcgggcagaagcaaaaagccacgtgttcgatcgcttccctgaccggccgagcgcggactggccgcggcagcgcgcgtcacacgcgtggtcgcccc

SEQ ID NO: 171329 - DNA, 902 bp, Zea Mays
agaggcggttatggtaatctctacttcaaatctttctcccttagaaccggtgagttctacggtcccctaatcacagtgtataattgcctttgctttcctcaaccaggacatcccgagaatcaaatctttactgttgtcttctaatactatgggtgtagaccagaattcccttcccataattgtcagtgttaatctttgtgtcatatagtttgcttcaacaggccctttaggagtaattactaccaaaggtgttttcatattttgtagtggtaattcattggtggttgcaaatagagcagacataaacgaatgcgtagctccaaaatcaaataataatgctgctggaattgcattaatgtaaaacataccgatagcgatgtccgcatcgtcagcagtggcctcatcactgacttggttagccctggcaatgctgaatcccttgccaggagtctgttgcttgttctgagctggtgcactggaattccccaccggacaagcaatagcataatgtccaatctgactgcacttcaagcatgtaggacctgtcttctgtcctataggcctcaccggggtgccaatgggggcagccttacgagtgtggggtgtctgtggagttccctgtggagcgtacagagctgggcgttgtcctcctcctggacgagctggtgtaccctggggcggcacgtagtcagggagaatactgctgctaccctgcccctgggtaatggccttccgcttcatgtcacccagttgaacccgcttgtgttcaatagctagagctttatcaaggagcctctgaaatgatgggaatgtctgagcaaccagtgcataatgtagtggcccattgagtccttctgtgaagtgctcttgctttctttcatcataagccacctcatcaggag

SEQ ID NO: 171330 - DNA, 331 bp, Zea Mays
gttgagaaacaatacaatctatctgatgtttttggcgagttaattgatgaggtcctccgtgctgagtcgggggacaatgaagatggttatgatgtgcagaaaacaacttcaaaatcagatgatattcttccccagtcggcaggttagtcagttttatggtctttacgtcaatataaaaaagttattcaaacatttgttgatatcgttatgatgccattatttaaaatgatgtttttttgtataaatgatacgtaaagaaggatgtacgtgtccggccccacaaactgtaccggatatgtctactccagcatcctagcaggatacgcagttg

SEQ ID NO: 171331 - DNA, 1166 bp, Zea Mays
tgatctataagagacgcgatgatgatagatacattgttaagaatggagttaagctagataacaggagcattgttcctaataacatggtgttgctcaagaaatactgtgcacatatcaacgttgagtggtgtaacaaatcaaacatgattaaatacttgtttaagtacgttactaaagaagtgatcgagcgaagatatattttgaggtgacggcaaagacaaccaatgtgtcacctgaaccttaggtagctccttgcaatgaaattcaagagtatatcgatgcaagatacctatccatatgtgaggccatctggcgtattttggagttcgacattcattttagaatacctgtggttgaacgttttgttgtccatttgcccaacaacaactatgttcggtatgaatcgggtgctaccttagcatctctcctagagtgccccacagcaaaaagttccatgctaactgagtggtttaacaccaatgcaagaaatcctagataccgacacctaacatactgtgatttccctactgagtggtcttggcactctttggatcgactatggcagaaaagaaccccttgtcacaaaattggacggatgtactacgttcatccaacggccggtgaactgtactacttgcgcatgctattgatgatagttaaagttgcaacgagttatgttgatctaaggacatttagtggcacagtatatgctaccttttgcgaggcatgtgaggcgaggggccttcttgagagcgataacgaatggagccttctctttgacgaggccatcgtctctacctcatcgcaccagctgcgccaactctttgtaacacttaccctccattgctcggtttgcaatgtccgtgctttatttgataagtactgtctctatttcagggatgacattcaccactcactcacccgcacattggccaatccgcgctacgttgtgccactggaacaacttatgtcgctgctgataaagaagctaacacaactgttttctaacagcagagggaatattgaagacttcaacttgcccaaactgtctacacaaaatgatcccatgtttgaaaataggctgcttaatgatgaacttgacgttgaaccgttggtgttgtccatgcaagcccagtctcttttgtcccaactaaataccgatcaga

SEQ ID NO: 171332 - DNA, 619 bp, Zea Mays
ggcctgtgtctggttctaaaggtgtacctggttctagttccttactagtaccatcatatgttactggaggtgtttctaatggtaatggggatattggtggtgatgtgtcagcaaagggtgctaaaccatctgtttctagggcaaagtgctggaagcatatggataagcgggagattgtcgagaatggtataaaaaagttatattgttgtatgtcactatgtaaaactgagttgagtgcagattctactggtggcactgggcatttgaatcgacacttcagagcttgtttgaaaaaggcagggcaaacttttggtacaggtgtgcaaactcaactaaacttcgccgcggacggcactgtaagtacttgggtttacaatccacaattagcgcatgaagaaattattaaatacattgtttttgaagacttacctattatgatgggagaaagccctaattttaagaatctgattcagcgtgccttctgcccacaataccaacatgctagtagaactactataaaatctaatttgatgtctcagtaccgcaaacaactagctgctcttaaagaaagtttaaaaaaagttcagttttcgttttctttaactttagatatttggac

SEQ ID NO: 171333 - DNA, 665 bp, Zea Mays
gtcggctatgggcatgggatactcatctttaggagttgctctatttaaattgtgaaaatcaatgcatactctaagcttacctgactccttcttctccactggcacaatattggagacccactttgcgtatctacagggtctaataaaattagcttctagcagccggtggatttcgtccttgattcgtgggagaagatctggacgaaatgttctagctctctgcttgaaaggtctgaaactagacttaatgggcagccgatgttctacgatctctcgacttaatctcggtatcttagtgcaattccaagcaaagcaatccgaatactccttcaatagaccgatcatttcacttctagaatcggtctccagggtcttgtttatagaagtcggccttcgagttttaccatctcctatatcgatctcctccaaaggatcggccgatgtaaacccctatcctagtttattgagatctctgaattcctctatcatgtcccccacagaggaattagatgttctttgtgtgatggtgaactctctgatctcaggggtcggatcacccgtaataccgtctttacgttgtggtagatgttcggtcttaaagtccgaattgtttggtgaaagaccagatggtccggcgttagaaaccgaactgtccgtgaccaagg

SEQ ID NO: 171334 - DNA, 491 bp, Zea Mays
aaatgttggacagctgatcggttaagaaacgggggctggctcatcctattagatgtccactttgtgatcaacaacaggaaacaattgataacctgctgcttaactgtgtattcgctagggaattttggttccatgtgctcagtaaagtcaatcttcaaagcttgtctccacggcttcataattgggggtttatggcttggtgggagtgggtttctatgcagatttctgggattgcgcagaaggggatcagttccatgataatccttggaggacattgtggaagcacagaaataggagtgtctttgacagttttcctcctaatatgggcgctgctatctcccagttcaatcaggagtcggagatgtgggctttggctagagcaagggatctctccctccttactgctcccattcctggcctccagcagtagtttgctgcatcagctataatgttggattttttatgttttgttgttttcgagcgccatgagt

SEQ ID NO: 171335 - DNA, 314 bp, Zea Mays
agaagtaatgcagtacctgcttcctagagcacatcatcataggatggaaaagcaagaatatgatcacctgcggaagttgtaggctatgatagacgagtatgcatcgtgtccatccgttcaacaagtcttgaaactctcttcaacctttcagtgttcatgttgagtgcatcacatatagctcttattataatgcggagctctagatgggatgttcctgtcattgttgttacaaaacagaaacaaaggcaacaagcaaaagttgtgaaccctacaactactctcaaggatggtggtgtaacacaagttgtgaagcg

SEQ ID NO: 171336 - DNA, 447 bp, Zea Mays
acggcggccttagccgtagctcaatccggtaccggatttttaccaggtcaagcttatctgttgtacacggtgcacgaatcgcaacaagagatcgaccaccggcgacagctcaccggcgacgagcaagccgcgctggcaacctgatccactttggtctactataccatggcgagacctcatcagagcacctgacagatcatgtttaggtcacattttctctaaaatttgcatgtgaacttcatcaaacctctgtaccaaagttgtagagctatagttaatcttaaactttgccacaatgcttaccttcaaatagtcactgaatcccattcaaaatcaagctcaaagttcactccatcacactgctactaaaaattcagtccagggattgcctgacagcctgactttgagctgaattatctccaaatttctcacaagaacatggcttgc

SEQ ID NO: 171337 - DNA, 864 bp, Zea Mays
cgacgtcggacaaattctctatcctggcgggagttggtgctggaggggccttcttcctccgctcagcttggcctccttggttcttggtcttcttttggattttcttcgtgggggcgagcttcttcagcttcttatcgtaatccatctttagggttcggtaggcttcacgggtgttggcctcctcgccttctgctatatcaagacactcttggagggatgccttctccttcttaagttccttgacctgctgctctaagccttccacccgggatttaggtgggtgtagtaggagaaaaggtcatcgtagtagttgtcaagagtgtggaggtatctggccatgtagacgatggtggggtcatcctcggtagggtctctccctgacagggtctgaagtcttttcctccaggtgggtgtatttttgttgctaggtgggaagtaacgaaggggggtttcaaagatctctctgctgtagttttggcatagctgtttaagggcttttcgggacacactttggcaagtgtctgggaagcggtgcccgatgaaggtgacttggaagggagggtggtttgggtaacttcggctttctcccaggtagaccgccatagagcacttctccattccattttcacggtattccttccagacatattcgggcttcttgtggatccccatgcgtagcgcgcaactccgtagaaggtgaggaaatccttcctcctctgagcagtaggatgtcctaatgacccaagagccttccatctggtaggagaaaagaagggtcagttaatatcggggaaaggagagaaggtttttcttaggggtaagaagtgttttcttgttaagacaacttttaaggtcagggctgtc

SEQ ID NO: 171338 - DNA, 659 bp, Zea Mays
tccaacccaatggatatttcaagtgcggcgaacttggccattatgctaacaactgcccaaggcgcaaccaacagacaccccaaaagaacagtaatcagagaactgaccagaacacccccgatcgtggatctgagcagaacaaaacgccgtagaactagaatagaggaagggttaatcacgtcacaacagaatcagttcctgaggacgccgacgtggtgtatggtctgtttcttatcaactccatacctgcttcagttttatttgactctggagcattgcattcatttataactgagtcattcatggcaaaacataacataccaaagtaccctcttaagatgatgttacatattagttcatcgggaggtgacatgaaggccacacattcatgcctccatgttaatctcaatattcaaggaatagattttccagtcaacctagtggtcttaggatccaacaatattgatgtgattcttggatgcaactggttgaaaagttgtgatggagtgatacaatgtgccaaaggaacaattatgttgacaagtccacaaggtgaaagaatccaagttagcacagacatgtcaacaaatgcaaaaggagagacaatggtaaatcacttggaagaaaagcccctggaaaatatcaaggtagtgtgtgaa

SEQ ID NO: 171339 - DNA, 723 bp, Zea Mays
cagggtcctagcctctagtgtacccgtctccggttgcccctcactcaatttttgctggaggggccgcgtcgccgcgagacctcaatgggccgacctttgaactccagaattcatggttgtcttgccatgagttttttgctctttggtctgtgctaaaaggaatttgaacgggttcgggtccttatcgaaaagtgatcccctgacgttcgtgaatcggttcgtgtctttacctgaaagtgatccctaacatttgtcgagttccttaggccagggcattctcgaggggtggcttggtcggttcttgctcccttcggatttctcgagaccctgcatgagtcgggcagacaacaaagagaaaagagcggtatcagcgtggtcgtatttgctcagaaaggtataaatgtcacgcatacttgaaggacaaaaaattgttagcgagagaggctagttattatgtgctccagtactacactacgcacgactccatgctcaaaatcagaaggattacgccaccaggggcaacactctagcgagtagaatataagtttctattgtaacatcccacccttgagctataaacgggcaggttcccttcccttcttcacacaagcacagctatagtaacacgctccacagcgatactatgattagcactacattggactggagcgaaagcctgaaccagtataaaccccatggctcaaaaccatagctcgagtccta

SEQ ID NO: 171340 - DNA, 604 bp, Zea Mays
gccgctttcaaaatgattttcccgaataacctggtgatgacatctgtccatatcttgttaggtccggaatcaatttgatcgatggtgagttagaaatctagctggttgaaacagagaacccttggctggacaccattcagccccatactttaatgcttttgctgattggacttgtgctttggtaaccgcatttggacttcctcccgtttcagccgatcttccctttttgtcgtggcatattcattgcgtatattttgcaggtatcaccacttcaacaaatcttgaagagtccgagtggtacccaatgggtgtgcccaaagggtgtctgctctacgaaaggtgtttatcgtgttgtcctaaagcagtaacttgatgcgacagaggggtgtaatcatttgcctgagcggttgaattgaattcaacaggtgccgtgttacacgaaacggcgccagacgcctgactcatttttaggcggtttgaattgcttattgaattcttgcgactgttcggtgagcggggtaggaagtggacggtcactccttggcctctttaaatagcccgcttgcctcggctagtttcttcactcgcccttgatcacttgctc

SEQ ID NO: 171341 - DNA, 845 bp, Zea Mays
aattaacaatattacttctcgcgagttattttatgaaaaacacttggataaggtttaagaccgaccaagagtcgtatataaggagcgctatttgtcacctaagtaataaatacattcaatcgagttagtcaccgtatttaaattttgcaaaatccacccaactagatcactcccatatttataatatatactatatttactaaacaaattgtacttagacttttcacaccatcaaaattaacagttcagatcataggatcattcattctcacttaagactcaaatccaataaataatttggatatctctcatccttcccctctcacccgcgatcctaccgctccccctcccacgcgtccccaccgccgtcgacggtggcaaccggcaacccctcaaattgtgtcgccgccgttcattgctcccatcctttccattttaagtttgaacctacaaaataaattttctctggcaccaatctaatgatgtaatgttctgaatgtcgtcggatcacatttgtaccgtgtgtaacttatcccatttcatcttttttacacttataatagacgtacgcctatttaaattgagtcaatctgatatcatatgtatccatataattcatactccttccctccgttctaatttatagttctaatttataatccgtttaactttttaacatcaagtttaagtttcttcttattttaaaaaattataattattattaacttttactgtaataacatttaacatgtaatatactttaggtatatggctttgaattttttgtttgttcaaaaaaatgaataagacgaaccgattaaggttggcacaaaaaagttaaacaa

SEQ ID NO: 171342 - DNA, 724 bp, Zea Mays
ggatctcttccttgcgccaagatcttgcttttccatgtgagtcctgagccatgagacacatcaggcgaggagctacgccagtgtcaagtcaggtttgtcacagcgcccgggtcacgacaaaagcgtgcgccaagcgtgtcaaacatgctcggttcaatgtcaactttttccaagacgcgcctgaggtaattaggcgccattttgtccattggatcatttggatttgagttgagaagctaggtgaacacgacaagtttttgaattcgggttgggggacttagagagaatctgggttttcccctagggttcttttggttggtgatcaatttgtggctgattaatgtctgttttgaggaaactttcttactatctttgatagatatttttatgatcatcaattgtttaattagcccaactaatgataaggtctaattcatcatttgttttcatgtttttagttttggcttataaaacccgagtggtttagacttaggtttttctaaagtttctctcttgtcatgggcacatatggtcaaggtaagcaccacatgaaattagacactagctaaccctcttgttgctaaattgtattcatcaaagattccactattccacatgtgatgacagattagggtgtggctctagagtggaaaccctaagtaacaccaagggtgttacaattctactcttagttcttctactctccccaggtggcttcatcttc

SEQ ID NO: 171343 - DNA, 656 bp, Zea Mays
gttagagtcactatgttgttgatgccttgtgcgtaacctggggcacgtatgtgcgtgtgtgccgtggtgtattatagtggtggtggcataagatatttgattgagatgtgcgggtatatgctgtgatatggttatactcgcgatgatggaggatgtatgccttgggaacgcgacgcttaggtcgctgttgtataatcgaatgaaggctgtattgttgagcttgaatcaaaatgtgggaactagtggtacgctaggcaggcggtgttccaaataaataaatcggttgatgtggtagttgtcgtgcatgatttattgttagtgagtagttgaattacgagttatgtgaaaagcatgttagaaactagtgtgcggcgtgaaactgtgttcgtgtggtgaatgcgttaattaaatgtgtatgttagttctcgcgcgtgaattaacttgtataaaaattagtaagtctacttgttagttctcccttggttatgttaactctaacaaatggtaaagtgttagaataattcaagtctctaaaacacgtcaattcttgaattatatagaagctgaaatttgttgattgttgttttggactgcacgcactgtttttgtcgtgctgtatgtttgatgaactaaattgtattttctgtagatatgtg

SEQ ID NO: 171344 - DNA, 902 bp, Zea Mays
ccgacccctttgagacggctgaagtgccgaagcctgctgaagggtcttcttctgccgctcagccaaatcatcccgctactgccgaagccacagtgggatcagccgaagaaccaactccaaagacagcagcggagcaaccaaaagtcgaaataggcgaagtgccgaagtgtcctaccgaagctagggcaaaaacgaccgaagagccagaattgaggaaatcgacagagatatcaaaaattcctgcggtaactccaaagaggaggagaatggccagtgtactagacgatgtcatggaatcgacaaagttaccaactcctgcctctacagaagtgcccagcatgagtgagaaaaatataaaggaggccgccaaagctgttgtaactcgggttgaggctgaagctgggccccaagttcccacaaaaacagggcttgtggatcttgttgaaaaggatattgaataagagccctcggatgctgcaaaagtccgtttctattagaaggaaagagaaccagcaaagaatctaaattctctgccgccgaagcttctactgagggattcaaaattatagtgcgtcacgcggcagggaaaaagctatcagaggagcaggttgccgaggatgtgcaatatgctatggatctgaagtatcccccgggatcctttgtgtttaatggcactgacgaagatgattgtttgtactacctcccggactacaaggaattgtctatttgccgggagatggcataaaatataggattcccgaagctagagcttggcatgtctgccatgtcgaaggatgactttgcagacagccttgcctataacagtctgaaggtgaggatgttttagcttatacgtagagtatttttgtatctttccttattattgtgtgttgatccttcat

SEQ ID NO: 171345 - DNA, 574 bp, Zea Mays
ctaacatcttcaatgaggtagtcgtccatagacaactcccgaccgacttctccagtcttggcccccttgaccccttctacctcgctagcccgcgaaggcgagggcgctctcctggctaccgccgcaggcaccgctggaggagacatagcagcaggcgtggtagggcgcttcacgcttggacacgacacctttgcgtcgcgtcggggatccaccagccatagcggagccttccgcttcttccgcgtagactcctggcgatccttttccatcactgctgatacaacaacaccaatgtttctcccataaggaaaattttaaaatctcaagccaaacagcacgtaaagtaatccttgccggaggccagggggatacagtcatttttgtgccactcaccccagtcaccttcagcattcatgaagatgattcctagaggtcgggcgaagtcatgacctccctaggctcagcacatgtctttgccaactcctcaacaaaacccattgaggccctcgaaaccctgtatgcctttatcgtacctttgagcagccttccgtctacctaggtcgccacctttttc

SEQ ID NO: 171346 - DNA, 1294 bp, Zea Mays
cgagtgcatgatacaacggcgaacgttcgctgtcacataatccgtgaagggagtaggccatcgcaactcgcctaggtgagccagaatgtcgtggttgtcgcaacgctccttgacaagctccccgaggctgagactccatgcgaatgaaggatccaccgcaagatttagggtcttcttgacctcactgcaaaacaacaagttgagagtttcatgtcataatgtcgaaagccagaggtcgaccagcataccgtatccgcaccgtcaggaaacaacgcttcatcggtatagttgctcgagtatgaggaggaaggcacaacacaggttacgccttatcggcgcccgaggttaggcagaaatgagtggagcgtgcccgacccagggccctgggaaaagggacaatagggtctaggcaccaaccatcggtacaatcagcatcatagaggacaatctaatcagaagaggaccagaatttgagcccccctccaccgtggcctcaagccttctgccaccacatcgtctaggctccaataccacgtcgatataggacacccaccaacattgcaaaatacttgggagaattgaaccccaacctatggctaggagattattgacatgtgtgtcaaggaggggtaaacaacgacgattttgtcatatggaacctcccctgtacttggcagactcggcacgagcatggctaaaaccctgtagcctagatgtttccgaagctaggctgaccttgaggaaattttcgttggaaatttctaggtaacgtacgtgtgctcgggcaactcgtgggacctcaagaactattggcagaaaccaaatgagaccttgagagattacatataatgcttcttgcggcaatgcaatgagctgactaactttgccaatatcgacgttatcagcaatttcatcttgggtaccacaagtgagttcctggtgcacaagttggggcataaaagcctcaaccatggaggaactcctcgacatcacgactagccatgcgtcggggacaagatgtggtgtggatgattttcgatcaccgcaaggagagggccaaacacgacaaagagcctgatggaggcaccaacggatagcccaacaaaagaaaatacggagaggtagcgtcatgacgatatgctagtacccgcaatgggccagaaagggaggaagcctctgtccgaatgagcatttcaagaagatgctcgaggctccatgcctaaaccaccgctaccatatccggcacgcctacaaagattgtgggctactcaggaagttcctaagcaaggaggtg

SEQ ID NO: 171347 - DNA, 658 bp, Zea Mays
gaaaaatagaggtggctggctagagggagccatagggtcagttctagaaagacgtctagctcgatagtagagctagagggggatgtggggaagaagtccgtctcgtagaaatataacatggttggagatcaacaagcggttggtgaggttaagacatcgatatcccatatgatcagaagagtacccgagaaacacacaacgagaggatcaacaggaaagcttatgagaagctgtggcatagagactggggtagcacacacacacacccaaagacacgaaggtggtcatagaaaggagtggttccgaagacggcaaaatgaggcgtgtgggagcagagagagctttggtagatagtcaattgagcaggtaggtggcggtgtgaagactctcgacccaatagcgagcaagaacagaggcctgaaacaaggaacacatgatgtcgatagtagcacgaatcatatgctcaaccttgtcggtttgggaagaggatacgagcatgacattctagctgcataccatgtgacagtgacattgttcatccgccgcgctgcctcctcacatcgatgccgcccctgtcttccctcattcacccctaccgattgagagagatccctggtaggatcaggaaccctaccagtccgcctcattgcttaaggcg

SEQ ID NO: 171348 - DNA, 444 bp, Zea Mays
cgttgtcgccctgggcgcgcatcacctcgccaacctcctccttcggggcctttcccagcctctgcggtcatggagcgtctcgtcggggtgcctgggttcacgcccgtcgtaccctatcgtctatccagtaaccggcatcgcacccggaggaaaacaaaattagtggcgggctcgccgtgcgcagtacctgcaacgcacgagcaccgcgtcttcggcaccgacgtgtgatcaccgtctactcgctcgttgcagggcagacattccacgatctcgtctacggctgcgccggtgtcgtctccatccctctggtccgtgccccgccatggcccaacccaagctacagcgacctccggcaattgctcaccgtcagcacagttccgctccacccgtgactggccctgtgatcgcccaaatcagcggtaagtagccatcggtcttactcac

SEQ ID NO: 171349 - DNA, 348 bp, Zea Mays
ggggcaccaaggttaatctttgaaaacatagcagaagctgaggctactaggctggaggatgtcgatgtactagaagaagaacgattgaatacggtgattcaatcggcctgatatcagcaaactctgaggtgctatcatgacaaagccatacgacatcgatccttcgcattggaagacctcgtcctccgccgaattctaacgggggagggacggcataaactgtctccactatgggaaagaccattcatagtagcagaagtcactcggcctggatcatatcgcctcactcaaatggacggcacagaaattgggaactcatggaacatagaacatctcaggaagttttac

SEQ ID NO: 171350 - DNA, 337 bp, Zea Mays
caggccttagcgcaactcaagcccctccccgtggccggaatccctcaccggagttcctccagtccgcccaaggccttctccctgcggttctcccctctttgtcctcggattcgtggcctcttccccgccactgagttcgtcgtgacattctctccctctctgcccaatcctggcgaccccggaaccaccctagcacgcgcctgccccaactccggcgatctcaccgccacggagaggagtagcgccgcccgtagctgttcatcccccccggtctgatctcccccgtccgatcttgatcgcatggcccagatcgcggataccacttcgcgcaagcgcg

SEQ ID NO: 171351 - DNA, 393 bp, Zea Mays
tgtgaccttgcaatcgcggtttcactacctcttggtaagtatcacgaaccagcctctgattgtaccatcatttgcttgtatttcgttagacacttgtaagagcttggtaagatacattagagcgtgttcctgtgttccacctgagaggagcatgtagtgaaattattagggataaccgtcaccgtttgtttcctgtttttgtgtttcgatggcaggcgacgacgaagaagcaaggatccctacagacttcgatgaatgtgttagccgccaagatcttgaggcaaacaacaagctcctgaaagagcaaatgcaggagacggtccacaagtcagtgcatgctgccttcattgacatgaacattggcaagacttacgagaggctggatcgatgatt

SEQ ID NO: 171352 - DNA, 361 bp, Zea Mays
tgaggacgatatatactatactagctagtaattcttttttacagcagattccaagggggagctgatagatgatgactgtgagtcggtgtggcctgtgggatgaaggaggaggccaccggcaggcaggacgtggtgggaagcggccgaaccgtacggggagagccgccgcaacgcaacaagccagcacaaacagatgccaaacgctcgtgagtgaaaatcagaccaccgactgtcgcggagatatggatgaggggccaaagcgtgacgagctgctctactagctccctcgtctctttcatcaagtcttgttcgatcccatggtcgccaaaaccttatacccgtttggttgtggatattgtag

SEQ ID NO: 171353 - DNA, 571 bp, Zea Mays
aactgagctccggcgaacctgtaccggccaagataagcaatggtcggtgccctaacttggctgtcacctaattccacacctaataattgtttcccctcgctcaattgcacaatccgaacccgaaatcgccctgtccacggagacagtgcgaactacggatgaacagaagtgtttccggcgatctagcgcggtctagcttaattgaatgggtcgaggagcatcagtggcatgtaagagtgctgaaacaagagagcagagggcaagattggacctgaagtgcactgaccacggtgagagcttgttcacggtggcggaaaactgatttgggggaactcccaatttggggctctctggtgagcaattggaggaacgagcgggtggattggatgcttgaatacctaacggagccgagggtgtgctcaatttataggacccttgagcggtggccagtgaatttgagttcgcgcggtggcagttggagagaaggggatgcactggcgcaagcgattagtggctttcaccgtggcaagctcaccggcgatcaccggatgggctaaaatgagtcacgacg

SEQ ID NO: 171354 - DNA, 501 bp, Zea Mays
tgaaattctttaagtccatatgcactacttctgctccctctattgctggtgatactaacttgtccaagggagaagaacaagaacgatggcaaccaaacgatgaatccacctcatcaacaggtttgtcttccactagtaataaatgccttattgctaacaatgatggtggagacaaaagcgatgatgaggaagaatatgaggatgaggagtctacatcatcacaaggtacattttcctattttgcttccactgataataatgacagggaaaatgagaccgacgatgtggaagaggagattcgccgtttctacacccatctcaacaaagaagacaaagcgctcttgattaagctgttgagaaggaacaaggaacaaggcaagacgattctcaggctagaggagactctcatcaaaaccaacgatagcctggagaagatgaccaaagaacatgaggagctaaagtactctcatgggaatttggtccaacggtatgaatttgttt

SEQ ID NO: 171355 - DNA, 335 bp, Zea Mays
tcatccaaacacccttgctctctctcgctttgcacgcgcgctcgtggagctctgtcgtgattcgccgcctattccgtggctgccgtcgagcgtctgccgcgtccgttgcctcggtgagctccacatcttcgccagcaacgtgggaaaccctctggtttgcccccaacccctctgtttcacccggtccgtgctcacatgccttctccccgtacagccgaagctctgccactgtggacccaaggcctccctgcgtccctgtcgtttctcaagcgctctagagttccctctcgaggtgaggaactccccccacacccttaatttcccttgtactgccc

SEQ ID NO: 171356 - DNA, 673 bp, Zea Mays
acagacttgattagtgagtgccttttggatggttcgcgaatcagtcatcgtataatgacccttctaaggattgtttgtctctcgtagagttttatggtcgctggtatgggcttaaggttaagtggtatggctgcattagctggcttgggtcaatggtggtggcagtggttttacaggtccttcaatttcgaggagaaatccttaggtctaaccttagttggttgtacctaccaatggtcttgttaaagccattttttgaattttgaggagctctctttggtgaaagcttttagtctagtcttcattggttggatcatcgcaacgatggtgcgtgcatgatttctccttagaggttgttggggcgaaggcgaacatgcccccctcgctcgaagattcccatgctgacgtatcacagatcgaaggccccgtcagcaggctccgctagccaggcccgcggacatcgcccatgtgaaggctcaagcgctcccttcgattcgacgagccgaggcaaagaccatcaaagacttcagggcccggatggccgagaccgcgaataccccaagtctttgtctccctcaatgtaagaaggggtccgcgtacaatccggaccatattgtagggccccgcccgtaggtcgtcgtgtgggcagatcgggctgggccacgtcagtaat

SEQ ID NO: 171357 - DNA, 637 bp, Zea Mays
gtcatccgccattgcgcttggaggttggggttctcttaggcttgaagagaaaacagagagttcaagaacacaaaggtggggcgataggaaacaacaaggattcacatatttctggacagatgggttaccgcttcatgtcccattcatacagtgaacagtcagagacaactaatgtgccgcttagagttccaagagatagcacaaacacggcatcggaggtcagttatccacatcacgactccacctcaaatgagggaactattttctagacaagacaacacactcattgggcgcgcccattgggtgggagtactacgtcatgctacttgaaaaaatggacaggtacatcacatcatattggatgagttttctctttggcaaatggtccttacaccaaatgagatttagtcggccaaaccacagtgagatttagtcggccaagccatagtgaaactcagtcggccaagccataataagatttagttagacaaataacatgtgagcagatttctactggtcaagtcctcaaacaacccaataaaaagcaaacacaacgatccattgaaaaaagattctctgggacctttaagtcgattgctactcaagtcgggtcgaagcggtgcacccaatggatcag

SEQ ID NO: 171358 - DNA, 827 bp, Zea Mays
aattagtgcatgtatatgtgtgtgttccgcggtgaattgtagtggtggtggcgtaagatatttgtttgaggtgtgcgggtatatgccgtaatatggttatactcgcgacgaggaaagatgtatgtattgtgtaacacgacgcttaggtcgctattatataaccgtgtgaaggatgctcccgagggtcatgtgactaaaagggggttgtagtggcaaagcgagaagtaagtttaatatttttaaatgattagttgatagcacctatcgacatcgtcatgatttttgctgtatggcggattgatgccttgtcgtcgtagtctcgaggaattttcggaaatgtgctggtgctttactgatggggttgaatgtacttgtgatgtattagaataactgcgtgtcgtacgagtatccgaaaatggtgaaagttggtgtatgttggtaattagaaaatagtcacgacgttagccaatagccaagcttatgccgaaatgtaaaatatgggcaatttgagttgaaattatgcttatataggcgtgtggattaataataataattggaagaacagtcgttcaaattggtcagtccaattaagaatgattttgcgtgtgaggtgaggtggtgacatgccaaagtagtcaccgcttccctatgtttataagtcgagtcaatacccattaggcgttcattaaatttcacgtcgcacatagtgtttggttgtattcgtgacaaggaggtgtaggttttaatcaattagaagtttggttgatgtggctaggaaatttgtttcggcttgggtaatgaagtggtgacgtgaccaagtagtcccc

SEQ ID NO: 171359 - DNA, 402 bp, Zea Mays
tttcactgtcaatttcagaaaaattctctcgaggaaagttgttgctaaaaagacaccagacggaggagaaacactgaagatcaatatcaagtccgccaacactaggggcagacgtagacggaggacagggccaggacccatgttctgtgtatcgtggatggtctggcccttaggcgcagacagtctagatctccggcgaacagtccggctagcacgagcggtgcgttgtaatctcctttttagtcggaaataaggctgagggggaaaccctacgaaaacaagacagacccccgtagagtagtcatcttccacctctagaaatctcttgtaatcctcaatcatcaagcaagatacatccacaaactcataggacatagggtattgcgtactcgagcggcccga

SEQ ID NO: 171360 - DNA, 432 bp, Zea Mays
gccagatatattacatagcggaacattgtttattcaacacatatgtgggatgggtctctcacaagaccacttgaaccatcacattcaccacacattatttcaatagtgcccataaatgtccgaacttcaagctcgcgactttcattttgcgattattggttcagcctcgattgcttttatcaatgacccgataagagagcttaaagcactcatgcctaggactttgttttggatccttttgcaatctagagaggcaagataggtgtcgacatatttgtctcccacatttaataatgatctcagtcatttcccaaaacgaaagattcattgttccgtattcctagcacaatgatattgcgcgcttcgtcgctaggaatttcatcatcaagatgaacctcttcgtgaggcaaatcaccatcagggtgaattaat

SEQ ID NO: 171361 - DNA, 586 bp, Zea Mays
ccacccggtcgtggatcaagcgtcgctgctgctcttcttgccaggtgcgtgcgtcgcttcagctggccaaaatcagtcatcttaatgcttgtctctgaagggcagcacgtagctggaggtgctgggcaaacggagcaggagagaatcagtatgcatcaatgcatcatacacagccaaattgtgtactaatacttcatctgtatttaccaggatgcaccatggaggggtgcaggtgttgctgtacccatgttttcaatcagatcatatcaggaccttggcgttggagaatttctagatcttaaacttcttgttgactgggcagtcaatttgggcttccatcttgttcagctccttccaatcaacgatacttcagttcatgggatgaggtgggattcttatccgtacaggtatgactaatattcgataccaaaggtttcctgctcataatggttgtttttcttgaaattagtaaggacgttatctaaacagtagcagtgcccctcatgtgtgaattacagctccctctctgtgtttgctttgcatcccttgtacctgagggtacaagcactttcagatgcaattcctg

SEQ ID NO: 171362 - DNA, 548 bp, Zea Mays
gaaataacactagcgcttgacaacccaaaccacctgtaaaaattaaaccccaccggagacttatatctcttttctactactggaggaaagagaaagagaaacatgtggaggtaagtagtctattagccattatttttagctattagtgatggagccatagaaattaaatattatttttgtcggttagaggtaaccgacggaaataaatgattactttcgatggacaggacggagccaccaaaaaattcctaattcctattgtgataagacccacttgtacaacagtcgctcccccgatatgtctaacactatatagatttaacagtggcactgcgtttgaggttcgttgctaagacaagaacaaagattcccaagatgctattacctttggggatgggagttaaggtaaggtaaatggtctaggtaaaatcgtaatcaccaccaaacatttcatttcaaatatatttttggtggattccctagactacaatttgtgttccgtatcacaattatgtttcattggttacaatttttgatttatcaatgtt

SEQ ID NO: 171363 - DNA, 360 bp, Zea Mays
actagataccaattccttgacttacagaggtaccccagtcctgattgctccatttcttgctcattttctcttctccaccttgagactacacaagatcgctcaagatacaattagtctcaaaagacgcaagttatgtgtgctccccctacacttgtgcatcaagtatttgaataactttgcactttgcacattctagctttctcagaactagaggggatcacaacatatcttggtcaaggcatactctcaatttcatcacaaagagataccaatttgaatatcaaatgaaagattgacttaatacaacaatgcatgcctcaagaagtataacattttacaagcaacctaggcatgataatc

SEQ ID NO: 171364 - DNA, 429 bp, Zea Mays
ttcagatttggaataccgaacagtatcataaccgacttgggatccaacttcacaatttcagagttcttcgatttctgcgagcaaaaaagcattcagatcaagtatgattcgatagcacacccgagagccaacgggcaggtggaacgagctaacgggatgatattggaggcactcaggaaaaaggtcttcgacaaaaatgagaagttcgcaggaaagtggataagggaattgccttacgtcgtttggagcctaagaacccaacctagccgagctctgcatgggaacacttctttcttcatggtttatggttcagaggcagtactacctgctgatctcaagtttggggcgccgaggttgatttttgaaagcatagcagaggccgaagcaactaggctggaagatgttgatgtactcgaagaagagcggcta

SEQ ID NO: 171365 - DNA, 745 bp, Zea Mays
caccgccgcacctaaccatctaccacaccggaccttgcccctgttggtggtcgaggtgaatctccgtggctcgtggaagtccgctgtggcactggtgtggaaattgggcccgcggggacggctagattgcccaccggagtcagtcttccgccgctgaaccgcataactgcatgtgcgtcgccatcactggtaagatcttgccccctggactcacccaacacccgcttcgcgtagcaccgtcgggatccaagttcgttgtgcgggtcgcgcgatcagggcaccgtggcaatggcgctgctggcgtccactcgggctccgccactggtgtgttctagggaggaagagagcgtctgggacgtccatgtactgcgtaatggctgtgattagatgtgagtgatgctgtggatagatgatgtgtgggccgttgatcgcctagtgatcggcccggatttgatgagaggataatgtttcagttggtgctcttgtgaccgccagatcatgtatggacggctctggtcggctccaggttaccccttcgactgaattgaatctatgctatgggatcttgatctgatggccagattcacgtaccggtttatataataagtcaatctaatccgagccctcaaatgccgatccaacggttgaaatctcttcataccccttcgttgtgaccctattgcataagaacccttggctttactaaaaatcaacccgtcgtccactataatataaagagtatcgc

SEQ ID NO: 171366 - DNA, 678 bp, Zea Mays
tctctagaccgaacgacatcattacatatcagtatgagccgaaaggggtgatgaagaaggttgtgggttggtcggattccttcatcatgatctggtgatagcctgagtaggcatcaaggaagcttagaattacctcgcaactggaggtagaatcgaccacctgatcgatgcacagaagggggaagggatcctttaggcatgccttattcagtctgatgtaatcgacgcacatcctccatttcccgcttttctttcgaaccaacatggggttggcccgcattaggggcgcttaatctcgttgataaaaccaacaacgatgagcataccgatctcttccctgatggccttgtagttttcttcgtctaagcgacgcagcctcgaaggtaagggtttcggtcctaaagttggtcggtgtcccgaaggtaacagggaggtcgattcgcccaagcggggtcacccgctttcctagtacgaccccatggaaggggcccctgtcggccagaggcgatctcagtctaggcccatggcatcaagcgtggcagagtaaaggatattgagtatgctccctctgtccatcaacaccttcgctagtcgcaccggtccaacaatgggactgacaatgagtagatatcacccaggttaggggatatgctccgagtgatcagtgtggtcataggt

SEQ ID NO: 171367 - DNA, 793 bp, Zea Mays
cctcactctcccaggtagcttcctcttctccttctctgctccactgaactttacagagtttcacttctgagttgcgggtcttccggattgctgagtcaagaatctttattggcttctcatggtactgaagatctttctgaatctgtattgcctcttcctcgatgtgactttctggtgcttgcaggcatttgcggagctgggacacgtgaaacacattgtggatatccgacatggtttctggtaattcaagacggtacgctgcgggtcccactctgccaatgatgggataggggccgacgaaacgtggtgctagcttccctttcacctggaatcttctgacgccacgcatcagggagaccttgaggtagacgaagtctccttcctcaaatctgagttctctctacctgttgtccgtgtaactcttctgccgactctgagcttcaagtaatcttctgtggatcagggcaactttctcctcagcctctttaacaaagtcaggtccttccagtgcctttcccctacgttggaccacatgagaggggtctggcatttttgtccatacaatgcttcgaacggtgacatcttgatgctggcctgatggctgttattatacgagaactccgcataaggcaaactggattcccaacttctatcgaatgttaacacacaggctcttaatagatcttcgaggaccttgttgaccctttctgtctgcccatctgtctgagggtgataggcggtgctgaagtctagcctggtgtccatagctttctgaaggcttgtccagaatttg

SEQ ID NO: 171368 - DNA, 640 bp, Zea Mays
gtgtcagcaccggacccttgcttacgctaaggtatcccctgtcccgagaccttgtcgtggctcggaccttactcggagggatctggaccccatccaagggatccggcatgcttacttgggagtcccgggccataatcgggggtccgggttgtgcgtacagaggtccggtgtttccttgcggaggtccggcccaactgacgcatcctgagatgtatcatcttttctcgccacgtggtgccccttgagccgcccacgtggtggggtcgggtgctgttcaccgtgcggctagagaacgtcgtacgggcaccgcgtcttcatactgtagtaaggggtacccctgatgcagggtactgacacacatgatcgagtagaatcttggctgggcagaagtaaggtgaaactcccacagattggggatttgatttcgacgatgcggctggctacatctagcactacttggtgtcgggtcatccaattggctcccagaataatatccaccttctccaatcctagaacaaggatggtggttttgataatgtggcttcccagatgaataagcacactttgatttaattggttggttgcaattttactcccaggtgtggctatcatgaaggacccttttgtatgatagaagggc

SEQ ID NO: 171369 - DNA, 684 bp, Zea Mays
agaactgatttggggcgaattcgaaattcgcgagctctggcgaacgattgagggtgggattggggctctggttttgtgatgatgtagcgcagctaaccgcgggctcaatttatagggagcaagagcggcggccgggaattttaacggtgacacgcggcggtcggagatagagaagaaccttggcgtagtggattcgtgtctaccgtcgtggcgacctcaccggtgacgattagacggccatagagagtcatggcgatgcggtggaaaggtagagccacgcggcacaaggccgagaggtggcggtcaccggcaaagttatcggattacactgcggtgaacatggtacggtggctggagttgtttaatggccggagtctatccatggcgaggttatttacgcgaccccgagtgctatccggttcccagtgagtgcgaatcttaacggcggcgacgatcccgatgcgaagtcatcggtggcgaggggagcagttgatctgatctgtccaggcactgtaccatggcgaacctgattcagttggactgacagagcgatatgggaccagatttcctctaatttttacttgacaactcatccgaggctctgtagcaaagttgtagtcctatagatcctctttatctttgttatagcaatcctagtcgaattcctactggatttaactcaaa

SEQ ID NO: 171370 - DNA, 883 bp, Zea Mays
ggacctcacttatagcagggccgtgggcacaactctttcggtggaagccaagaattccggacagagaaaaacaaagaggtatgggggtgaatgatcgtctcaagggtccgagaagcggtcgaggttggtgattgatcctttcaacctaaatcgctcttctcgtcgtccacccgtatatcctttcaagcaaccagttttatccaccccacaactgcccccgctcagaacaatcagccaagtgcccctgatgctcatttccctgccctacccagttcctctaacgtctgcttcaactgtgggaagtctggacacttcatcaaggactatccctatccaaaggagaataaatcaaattttcaatagacttctgggaacacgtctcaaggcaagggaaatgtggccaacattctagcgggcaaaaatacaaggaaaactgggcgagtctactacacccaagtggcgaccaccctagaaggagaaccagtgatgatgggtatgttttttgttgccaaccatcccactgtcatcctttttgattctagtgcatcacatacttttatgagcaatacttttgttgagaagcattgcatacatagtattgaatcaagggagggatttgttattcaatcacatgggggtcaaatctttactaaggaagtagtcttccacgtacccgtaagattggctggacatgagttccctaccaacatgatagttataaagggacaagatgtggatgtgattttaggcatgaattggttatcccagaataaggctatcatcaatgcggatcaaaggactattcagctaagtcatggacaagaagtagtcaagttgtccatccctgtatctgtcccagttaaagtatctggacaagcttttg

SEQ ID NO: 171371 - DNA, 408 bp, Zea Mays
gcggtggtgtccaatttggagaaggtgcgctggcggccggagagaggagaagttcactggcgcaggctgtcgtggctttcactgaagtaatgacttagacgatggactggctatctacggcggtttgtggcgacatggtgaaatggctgacggtgtggcaggaccgcgaggaatgacggcacgacggcgatggtcgcgcggccacgttgcggtgcaactgggcacagtgacagagcaactacagtgtcccatcttcatctcttgcccaagatctttcaccccgcgaagttatccgcacgccaccgggcacgaatcgcagcgccgacgtgaatccgggcgtggggtcaccggtggcgaggttcagtgtatctactgatctttttcagttactgtaccatgggcttcttc

SEQ ID NO: 171372 - DNA, 571 bp, Zea Mays
gtcgcgtcggcccgagccttagccaatttctgggtccaccactgcatatggggtggagcagaggggcacgtccggcgttgggggctagggcgagctcggccatgggagaggcagagagcagcgctgggcgaatccaatctagggaggggaaggtgccaagtaccacaagcttgggcgccgggagccatgggtgaggggtgagctgtaggagggagcagggagagcgccgtggagaagtagctgatggaggctgagcagcatccattctggaagacgatgggtgacgagaaaaaaaaatcaggtgaggcggcgctgaagcatctgacgtctggagagaaggatgcgtgggaatgtagctggcgtgaggaagaaaaatcttcctggtgagcggctacaagataatgaagagagggattttgtttcttttttttatcacagaatacatcactaaccgagtttaggagttaaacatgactaaaatggatcgaattaaatgatattttgattttagaactaagatttgagggatctaaaagatgtataaaagggtcaaaccaaaaatgaaatcgac

SEQ ID NO: 171373 - DNA, 275 bp, Zea Mays
gtagttgatgcggaatctctaggaatgtctggtttcttgacgagcagaattggtgccgagaatgccgacgtgctgttctaatgacactatggacgagcatgtcggcacactgccttttgagctcatctttctgtaattgccgatagtggtatgggtgcacgacaatgggggcggttctaggcatgaggtgaatcttgtggtcgcagctatgtggtgggggtagccctgatggagtggcgaataccacgtcgaatgcctagaggaggttgtccagc

SEQ ID NO: 171374 - DNA, 1985 bp, Zea Mays
tgacctgcaaatagttcctaagtatgtcttgtgcttctttggagagaatgtcatgcagtacactgaatatctgaacagcaggtgccaaagctggtgcagcagaatctgttatggggccaaataaatctgacaagccagttggagaatattcatccagtgatttgtaattttcaaacagagctgcaaggagactcttaatccgatcttcacagtctatcaaaatacttcgctgtaacaaagaacaaaacacgataactgatgtgtactactgaaacctggaattgtagaaggttctcaatttgcccagtgtattttgtggacatgatttggtaaatattttgccgagcattttaatgttttgcaattttatctccgagttctccgagttttgcaataatatatagagagaacttagatgatacctcttgtcttgttaaagttctatcttctcgtgcttttgtgactggaacgataagttcatatataagttccaaacaatccttggttggtattgccacgttcatgatgtaagacaagtacctgtaaaaagtaacatatgatgtgattctatcatgtataattatattcaccaatcatcattgactatacacaagcaaaacaattgttcacctcaattttctatatgcatcagatattccatagtaatcagaaaactcgtccaacagccaaatccatggaccattgatatgaagcattttgctgttgaaattttgagccctcattgccgcttccagaaccatgtcatatatgatggtatccactgcagggccaccttgcagcatctgtaacgataatacaatatgttttcttataagaatatagatgagacaaggttaacacaatgtttgatggatttggagaaagaaaagatgagaataactaaccttttcggacccatagttattggaagacatggataaattcataccaagctgaacttttccgacacaatcttgatcatcaagatatagaggccaccacctgatgatttcatcctgctgcttttcaaatttgtccaaatacaaactccttcagtgactacagaattatcatgaaacatttgcactaaactcatgaatttgtttagacatacttgagtatcagtcaatgatgaaacttgaatttttgcacggcctatgacaaccctattgttgtcttgtacttcaacaagaataacatccccctggctctctagataactaaaacataagtgataacagacggttcaagaatactatctgtttcatagttccaatgaaagaatgaatatgcaagtacatcacagaacaacgactaaggatgtaacttacaagagttgagattcaccagtccctggcttcaaatattgtggagaaattgaatctctcttatgacctttgcaagaactttgcagttctagagtgcatgtgaacatttctgaaagcatagagccatagacactgtgttactgtcgatgtaaatattactgtgactggggtttgctataggaaaacaaaaactttcatattaaccttccggcaaagatgtagatgatgtggatgtcaacatcgtaacctggctcttcagaatcttagaaatctgtctgacatactcactgccagcttgcatgtagagatttctaaaggatgatgttgctcgaagctttggtctttgaggtacaacccgtatcttttttactgttaataaaaatatgttagtgtaagcttgctttgtttttcaaacattgctacaagtttacagttcggacattccttattgtaatatgctagccttttcctgaagaattttccgatgtaatgtttcaaggcgagtaatgttgatgactgaaatgattgcttatacataccttcaatctcaatctgtttaacaagtttccttccctttatagtacaatttccatccttatcatacatttgtttaccatcaacttgactattgtgttttggatgaagcaagaagttctg

SEQ ID NO: 171375 - DNA, 760 bp, Zea Mays
ggtcgtgcgaagcttgctagaagttttctccccgctcgggcaacccttcgcagttcaccaagctgattgcccacacatggccacttcaacgctgggggctggatatcgtcgggccactacctacggctcaagggaacctcaagttcaccttcgtcgccgtcgaatattttaccaagtggatcgaagccagggcggtatccacaataacgtcgaagactgcccagaagttcttctggcaaaacattgtttgccgattcagagtcccgtccgagctcatagtcgacaatggcaaacagtttgacagccaggacttcagggacttctgcttctccatcggcaccaagcttgccttcgcctcggtatacgcgtcgttgagcgcgccaatggcaagattttcactgcaatcaagaaaaggcttctcgacgacaagaagggtaaatgggccgaccagctacccgaagtagtctgggccctaaacacgaccaaatgtcgggcgaccggattcacaccttttcgtctactatatggatcggaggccatgacgccgcaggagataaagcatgggtcgccccgaacaagcacatcagcagtccccgacgtagacgaaccaacatctaaagacctgcaggccctcaacaaataccaagctcaaaccaaggcctggcgcgaccacgtggttgtcccaagagagttcaacgaaggagacctcgtactcgtccggaccacacggacagagtcacggggcaaactagagccgaag

SEQ ID NO: 171376 - DNA, 334 bp, Zea Mays
gctcgattcaatgcccccttgatgaaattgatttaggggaagtgtttgatagaagtttaattatgtccctgtcgcacgggagctccagccatggcgtcggccggccggaattggctcgccggggtgcggcgagggctgttcctcgtcgtggaccttagtctgcaaagggatggaaggtggatgtcctctttgtaaaccgtcagtgactcatctcaatagtgcgttgaccttgcttcaggatattcaaaaggacagggatctcaatgcaaagttggcgcgggcgcaggcgcaggcgcgcttctgctcattattgggccgcctgtatcgaatttgg

SEQ ID NO: 171377 - DNA, 834 bp, Zea Mays
gttgattgcaagcaaacggtttggaggacgggagacagagagatcacagcggcagcatgcaattaagaatccaagaacagcagacgctaggggggttgtggggaggcaacgtggatgctcacacagtgagcagagctgctaggccaggcgcggccgggcggctgcagcgagcggtggcttgagctttataacgggcggaggagtggaggacacggatggatggatggatacaggaagcaaggagcaaccccgcgggtggggtccgagaaaaggcgggcggcgaaggaagaggaagagaaggcagcagggtaagtggtggttggagacagcacaggaagaggacgatggcggaggtgggggacaatttactgacaataattgccgggaggcgagctgctgtccactgctcactcgactcctttgttgtacctagcgatggcagtaaacatatatacggtgtgcgtgcgtgatgcctggtcggggatgcatggtagggcggagggagaaggaactcggagagacagcaagcggatggaatggatggacgtgggcgtcgcaaaagattcagacagggaagggggatagaaaaggaaggccgaaggagaagcagcagctaccactctcgtcgtcggcgacgaagcagcagctagcaagaggagggagaggacggatcggctgaggcacctcttcgccttcggtggggtgctgcctttcgtttccgttgctttgcttgctccctcagcagcctaggactaggagtttcttgcagggctgggactgggttgcaactttgcaagcaagcaagtaaaggaagctcagggacgggacctttgt

SEQ ID NO: 171378 - DNA, 413 bp, Zea Mays
tggtatcagagccataggactggtcgtagatcgcagccctgaccttaaaagttgccttaacaagaaaacacctcttacccctaagaaaaaccttctcacctttccccgatattaacgggcccttcttttattctaccagatggaaggctcttgggtcattaggacatcctactacttagaggaagaaggattccctcatctcttacagagttgcgcgctacgcatggggatctgcaagaagccggaatatgtctggaaagaataccacgaaaatggagttgagaagtgctctatggcaatctacctgggagaaagccgaagttacccaaaccaccctcccttccaagtcaccttcatcgggcaccgcttcccagacacttgccaaaatgttgcccgaaaagcccttaaacagc

SEQ ID NO: 171379 - DNA, 688 bp, Zea Mays
tgcaatatttttggtgtttatttttctgcttttatttattatagcagaaaattattaaaatgcatgtaaagtctatataaggcatactcaaatcgctctaaatatttatattatgttgagcttttggaatttggacttacgtcgagcgattaaattgtatagtgggtacacagatgtgccgatcaggttacattattaattggctgagttaagacattggctattggctgcgccctggcaacatgacgcaatatttgtgtcatacgaacttggctgcgtcatgtgattgctatgtcgcgctctctattaatcggatcgctcctgttgagtcagaccgccatcgctgagtcgcgtatttttcgcataccctgtaggcattgtctgtcatccgtgatcatcgagccacaattgcgcctgttgtgcacgttgtgcggacttattgtgtaccccaattactgagccataattgtgcctgttgcgcttattacgaaggcttgttgtgttgtcgtagccctgatggccgcacacgcgttgacaccagacgctagagcttgtactcgcgtggattgtggtgggttgttcaaaacccctgaagtcacattatacgcaaccttcttaaacaattttatttggctgtatattttatttgactgtgttgtgtggcattatatatttatatatcgccaag

SEQ ID NO: 171380 - DNA, 522 bp, Zea Mays
tgccaccgcggtcgtcggtgtcggtgttggggaggtatggggtggccgtggatctgggtatgggcggtggtgattaggcgtgtgattatagatcgtgtcgatcgttagatccacgatgagtggactggatttgaggctcgtaccgattcgactcagcctgatctcgaccgtagatcgatgtgtgagcgggcacggttggttggggctattttaaatcacgagcgtcgatctgtgatcgcagggccaacgacgcgtaccggttcaaaccctagagatttaatctggcgcgtccggtgttgatcggacggccagtatttgtccttaccctttcgccgtggcgatttgcacatgagccctcctgaaatttaggaatcaacccgccgtccgtgacaggggcgccctgtgtcttggaatctttcacaccgagaccccttcatttctgtctaatacacgcgcagtccagagaccatttaaagtggataaatgatttagaaaacgaatttttaatataaaaacaatcca

SEQ ID NO: 171381 - DNA, 590 bp, Zea Mays
cttacccgatcccgttctggccctttggtcggcctggccatccaaagtggggcattgtggtcaccctatcagccgggttttcataggagaatgtaaggttcgaccttggatatggatgcgagcaaatgacctatgtgccaatcacctacgttgtggcttactgagagcttgcacggtccacccctctctctgcgtgggaatttaaggtgagttaaagttttttacctggttggtatgatgcagttaccgctgtagcatggtaaagggggtggtcatcattacaccgctccgcgcgagtggctggacgggacacgaaacggcctgcctaccccatccacgctggggtggcatggtggcttggttacccacctcacccgttgttggggcatcttctgcggcatgcccctttggtgctctgtcctaggaggtgagaacctgcaaagcgcatagtcttttctgctcgatacctaaggcggcccttggtcgaaagggtggatccttcggtgccgtttggggtggccccacctttcagatgtcatccttgcccctgcacttctacataagtagggagggggagtgctcggggttga

SEQ ID NO: 171382 - DNA, 1004 bp, Zea Mays
gcactaccgcactagccctggcaaccggcttggcctgctcggccacccagcaccaatgtgcgcacgcacggcgcacgcgggagcaggggcagtgcccagccatccttggtcgtagcctcgcttgtcagccacttgtagcactgcattgtgggtcccgcacgtcatctctatcccctccctcctataactgctcggctccatttcctccgccgctagatgcgcccacggcttcggcaactgacgctccttcaagcccagtagcaactcccccactacacacaatccacgttgcgcataccgtggcgaccctcctcgtcggggctccgccgtagacgtgcctcgctgaaacaccttgcgcagcacgcccgccgatggtgccttgactggtaagctctgccgtttcctccttgtcgagtcgttgtgtgcactgtcgcgctcatcctcgccacaccgttgatagccacaccgcgcacctcgtctccaagtcgcgatgttgctcggtgatccctgccgagccaccgcgggcttcgccttgccgtagcaccgcgtctaacccgtgcactgtgcccctacgccgcgacacggctgctgcagtttgcacctatccctgtgcgtgtgcgtgtgcgagcgctctggccgcggctggcccctgctcgcatgttggcaattgcgttgagcctcaatcagggagcgtagcccttccttgccacaccattgtagccctagtcgccagcgagcctcaccgccgtttacggtagcaagccatcatgcacacagaaataagaaaccgctttctatgagcccacctgcatgcgcctcggcaaaatctccgaagtatagtccgcacataggaaaatgagaaaccacctgggtcccatgcgcatgcacatgagcggcatgcaacatatctttattatttctctgatgcatgcagccaacgaaagccttggtaagttcaagcacggccaatggaaatacggtacatgactttaaagccacgatta

SEQ ID NO: 171383 - DNA, 692 bp, Zea Mays
ctataatggcgacctgctccttccacacaacattgacgtgatgcacaccgaaaagaatgtcgccgaggcactttgggaaacaattatggacattcctgataagtcaaaggataacgtaaaggcaagagtggatctagcagcgttatgtgatagaccaaaccaagagatggagtcgcctagtggtggaaagtcttggagaaggcctaaggccgattttgtcctcagcagggcccaaaggaaggaagtactatagtggatcaagatgttgatgttccctgatgactatgcagctaacttgagtagggggtgaacttatctactctgcgagtcttagggatgaagagtcatgacttccacatatggattgaacggattcttccagtgatggttcgaggttgtccctgagcatgtctggctagcgcttacaaagttgagctagttcttccaccagctttgtgcaaaagagttatctcggaccgtgattgcagacttggaaagattgacacccgtgttactatgtaagcttgagaagatatttccacccggcttcttcaatacaatgcagcattttattcttcatctctcgtatgaggcacgaatgggggggcccgtgcaaggacgttggtgctatccaatcaagagatgtctaaagactattcgaaagaaatgtgtaaataaatgcaaaattgagc

SEQ ID NO: 171384 - DNA, 480 bp, Zea Mays
taaaggcaaggcattatgtgctacccatgcttgattggcattcccatgacttatctggctgcttgaagcacaattatgctcattcactaggacggtaacctacaaaacaaaataaagaggtaagtaataccaacttttatgaacacaactatacaattggagaggaacaaaagaaaggttagtaccataacactagaatccggtcttctagaaccattcagtttccaagggcatgtgcatcattccctttgttgtacgcactatacctacttctatccgattttgttatgccaagctcaaactcatcatttatagcatactgcctcacagctagactaaactctttcatcgacggatagagagtacccaacttcagatcagggtgatcaacatcatgtaatatattcaacatttctgcattttcatcatcaactggcatggcagcatctagatcacttggatcaaaactattacttttcg

SEQ ID NO: 171385 - DNA, 584 bp, Zea Mays
ccacagtcgtcattgtgtactggatgaaacaaggctcatgacatttatcttgaactgtgaatgaagaggatgtctgggaagaaaggcgtgggcgcagtggtgtgttccttcccgttctcccttgagggcgcaacaatcgtgacgatagtctgcatcgcttccctaccccggtttggagcatttgtctccttttgccgagtgatccgtgtccactccttagtgggcgaggtggacaacggagttcatcgagttggggagaccatggttgaccgaccttcaaccctctaggggatcctaagcctggcctcgtgcgggaccatgctccgttgcgccattggtggggtttttgttggcgcggttcgtggttttgccgtagcttcctttggcgatcccgagggagatgtcctcttgggtgaagtcgctatgtgatgcagaatcacctctacatctgccacacatgagatggtttcgaagtagaagactgctcctgggctgaaggtgatcatgcccttgaaaactatggccatggagtcagcgttgatcaacgacgcaccccctacctggcacgccagctgtcggtgttt

SEQ ID NO: 171386 - DNA, 571 bp, Zea Mays
attgactggcgggccccacgggtcatcttcctcagccgcacgcgtcagcttcaacggaccatggaaagcgcgggcgcttcaccgcctcgtgtggcgttctgttccagcggctccggggaagacgtccctatataacccgacgaccttaccctcccgatcgcataacccatctggagccaagcgaaccgcaggaactgtgggccgtgagcaccttgccgatagagagagaaggccgtgagagggtgagcaggaatggagccaccgtgtgtgggcttcggttcgccgcgaccgaagaaccggtctgcgcttggcgccagccacatccccgccgagagagaccgaggcgagagagatagagaacggccggtgctgcagatcttcatcgagcgcgatgtaatggtggttggactctgttcatcgctcgccgggggagtagccgtcgatgtaagacttcatccacgccatcgtcgggggcgcagtagactttcgtggagcctcgtcaagcacggtggccaacccggagctactgaattgctcaccgaagcaatggcggcgcctcggatccgcgagc

SEQ ID NO: 171387 - DNA, 1410 bp, Zea Mays
aaaagaacgtccactgacaaaagcacggaagatcagggaagtacatacctgaaaattggaaagaaacaaaggaaatcccaaggccggaggtatcagcgcagtcccagaaggaagaacgttaacagaaacaacataatggataggaccaggagccaaaggagcagggtaatccaagatgagtgcaacactcattgggatgtcaactccaaaagcatccattgggtcttcagtgccatggccactgacttctaaggtggccaagctagccagactagcaagaaggtcagaacttgccaccgcagcgtcattatattggggcattggtgaccccacgtgaacatccatgaaagcagcagagagggagaccgcaacattctcgaagggatgaaacaacaccgggggctagaaaaccctagagggctagggtaccctcaggggctagggtacccttgagggttggagagttgcggcaatccggcagagtcatcctacccagtcagcaggctagtagagggcacgtcatccgggcactctacacggatgtcaacgaccctgatcataggaagttcgagtaaaagatcctcgggtatagcttcttccagtgcgctttcaatagaagacatgctcaagccctggattgtcactagccctaagggtgcaaggctcagaatatcgccactagctttgttgtgccattccccacgaaccagagagaccacatcttcatcatcatcttccaccaccacatatctacccgccttcgtaccaacacaaccctcaacaacatcctccagatcaacatctactgtatcaccaccgtgattcagtgcaacaggggcggtcactggctctaggcccaatgaacaacggagtcctcttttcttctattttacctcggcaagctcagcctgaaaacctatgaggcacgctcgcttgcgacgattaccttcgggactgccgacctttttccgagttcctaattcattcagtgctccgctccccgactaaacttgcgctaactcggacgactcgccagccagcatggcaagaacgacatcaatcttagcgtcattggcagtagcctgcatcaggaagtgggtctgcttttcctcctcgggtagacacatatgggcagcaacaatgcctccgcctcgtgggaagaaggtcgcactctatggcctggattcccatcctctcctcgggtagggggattagacacaaactcagaaaaatccctctacaacagtgaagtcctgtgatgagaacataacatacaacaatctgagagcgaaaggtacaaacaactagaacttacagttgggggaagattccaagcgaattaagaacgaggagcaccaacctttgggacaacgcctctcagcatcattttagcacgcttcaaaacactcc

SEQ ID NO: 171388 - DNA, 683 bp, Zea Mays
cggctgccaggttggccagaatcgtcgcaagagcagggtccatagccggaggaggagcaggggcagcacgagaactcccagcctcatgatcatgtgagcgtggaggcataggaggcggaggcggaggaggaaccccaaaatcatcatcatcatcatcattagctgctgtaccctgagtgtcaaactgtcgaagagctgcatcctcggcctgagagtcaaacacagaagctggcactggaatctcaggagcaggacggtaagatccaaatacaaggcgtgaggcctcaagggtgctctgaaatcgaggtggctgaatcagctgcgcaaagatgtggcacaagtagtgagcataaggtaactgtcgacgagcacgaatcccatccagaacggtgtcctcgatctcacagatcaggaagtccacaacgtcaaactcagagtgggataccagggcaccaaggagccaaagctgaatatgagtggtagcctccctatatcccatccttggcaggagtgtccgtctgatgagctcatataagtacttcgctgctgtagtaaagtctgctggtgaacgtcgcgacccatctgtgaaaggcgggcggaacagagccgcgacgtgagctgtccctggagccacaccgccgtgagggcgacaaggaggatcagaagtgccgtagcagaggctg

SEQ ID NO: 171389 - DNA, 492 bp, Zea Mays
tgtgaatccgcggcggcttgcaactacggcgaggaattgcaggggctcgggtcgatccccacgtttggcactccacacacacaatccacacacgctgcagagcgcccaagacccaaccccgaccaccgaacgtcggtgcaggaacggggcaacaatggcgggcggtggccttccctctcgggtctgtttgctcggtcacgggaagggggcggctggcttcgtggggttttggggttccgcagttaagcgtccgcgtttatatgcgcagcccaggcggggtggaggttacgccaccggcgaaatcggcccggttgttggcgtcagctggatccgcggaggagatgttatgactgcgattccgattcgaacggaggtggaagacgcgcagatggatgggatccgatgctcagtggagcggcgagttcacgtcgtgggcgcgggggaggccgagtcaatccgctcctgtggattcgcggcggaggaatcgcgtcg

SEQ ID NO: 171390 - DNA, 464 bp, Zea Mays
aggtgaaataactgaaaataaaagtggaaacatcacagaagcaaaacttgaaatgcacctttcatttggtgacccagtcccaaaatctcagtaaccaattaaatttgtggtatccaagcaaaagagaacatgtccatacagacaaattaaatgaaaaagaaatgaaagcaaactcaggtgttctgtcaaaaatatatcaaaagtcctatagccctcctagtaaaatcacacagtttccagttcatggtgattaagtagatcagccaaatgtgtctaaacctgattaataatatgcaacacaacattaacccatgtagtgctacttgtacccccaactgtccatgtcgttcttgcagattaagtaggtaacagaaaaagcaaggcagcactatgaaaccaccaattattcttttgcattcactgcaaaggccagaaaatttcagtatctcaaaagcccaaaattc

SEQ ID NO: 171391 - DNA, 416 bp, Zea Mays
tgagcatcacagacgcatgagaatgcttagacaagggagcagaggggaagagctgacctgagttgggctgaccacgacgagatagagttcacggtgttctagaaccggattggggagaatccaaaattcgtgcttgctagcaaaggatttgggaggcagatgggtgcaacagctgcttgagtacatggcggagctgggggcacggttaatttataggccgccggtcgtaaatggatgaggatcggggagcttgggattgcgctggcgaacatgccgtgcggcgaattccggtgacagcgcggttatcgccgtttaaccggagcctgccacctcagtgatgttctgacacgtcgccgggggcttttaccgtgaccgccgacgaccaattcgggccacagcggcatccttatcgccgg

SEQ ID NO: 171392 - DNA, 776 bp, Zea Mays
ttaaggttgcttccccctttctttgaatcgtgcattgagattagttgcgtaggtgggacttaatgggtgtccctaccttttttctgcgagcgtgatatgtcgtcttaagttaatccccaagttttatactgagcattcttcttgatggggtttggagtgcacccttttatctgtatgtctgagattgtgacaccggcttaaggcacgtcctgacttaagtcgattgctttgttagtagggtatggtgtgcaccctttatttgtaagcgtgagcatgtaccaccgacttaagccgatccccgacttaagttgattgcttcgttagtagggtatggtgtgcacccttttatctgtatctgtgagcatgtgacaacgacttaaatgatccccgacttaagtcgattgctccgttagtagggtatagtgtgcacccttgatttgtatgcgtgggcatgtaacaccgacttaagccgatccctgacttgagttgattgcttcgttagtagggtatggtgtgcacccttttatctgtatgcgtgagcatgtgacaccgacttaagtcgattgctccattggtagggtatggtgtgcacccttcatttgtatatgtgagcatgtaacactgacttaagccaatccctgacttaagtcgattgctccgttagtatggtatggtgtgcacccttcatttgtcctgggcctgctcattagcggttgttgggaccttccccttccgaaggtcctaaaacatgactagcaatgtactttcagtataat

SEQ ID NO: 171393 - DNA, 575 bp, Zea Mays
cactttctcagctgacgacacgaaggacccctcggtcgaagcttctttgctaggcgagaggttctattatgatgtctggatgaagggcggttgtgagatgcctgatgaagccattagaaagaatgaaaagaatatcacgacgctcgagaaaaggcgaaacaagctgaagaagctgctgaacgcgccatgattataggtacttctatttgaagttttgcttcgtcgttcgtttctagcttcgaggtttatcaacatattcttttattgcagctgggatttcaccaccaccggagccgtacaaccctgaggccgacccggttatgaaagaggctttggatgtaatgaagattgccaatgaagtcgttgacgaagtcgtcgacagactattgcatgaagctactgagaaaatactaaaggaagattaaattcttgtatgctggaaaatgtaatgcttgtgtatggttgccaccatgtgtacgaaacaaacatcaagtatttgtatgtacattaatgtaatatatctatttgtgatgcatgaaatctacgtacgtaccgtttttgagcctttggcgaaa

SEQ ID NO: 171394 - DNA, 449 bp, Zea Mays
attctcaaattcctcgcgcacatgtcttccttgacctctggtgaagctccctgacccgttcaattggactattgcgtcgtgagcaggctggatcccttgccgccgacgagctcccccgcctgcgcacgtggaccaacctactccgaccaccaccgccgatgatccgcacctcaacgtgatcgccagagaccctcggacctcacccaacccctcaccggagcaacctcgccgctggtaagcccctccgcccttttcttccgccacggtcactgttccattaggggaaggatcgcggattcgatttcacaaaatcctagggggttttctgcagagtcttagactcagatgaatagtgaaccgaggacctgtctgtaatacacttaaaacctttcgccagggaccccagtgcaaaaccctttttcctttatccatttctgtttattcttttt

SEQ ID NO: 171395 - DNA, 419 bp, Zea Mays
tgcaaatcttcaactgttttcggtggagggaggaagggagtaaggaaagagagagaacccaaggtgatttttgtgtttatctcttgttcatttgtgctgcaatccaattgtttagatgttgcgtatgcgattgggtagaagggctgtccagaattttagggggtggacgaacagcagcaggattagtggtttctgggcatctttcgtggagaattaatgggaatcagtttgggaatcatataaaactttggcatacctttccaacgagtatttatgcgctcaatttggagttataaattaaaagttatcaccggttgaatccgggtatgtggctgtccaagaaacagattttcaggggatgaacagcagtagtattagcagtttctgggaatgtttcgtgggtaattagtgttaaccag

SEQ ID NO: 171396 - DNA, 441 bp, Zea Mays
caatagctccgctccagattcgccaggaacatagttccttcggcggtagaaccccaatctcaacaagatgtagaaggtcagcctcagaaacgacagaaacatggttaccatcaaaggggagttggctgttgggatcgatcggaggaatgtctggtatggtagtactttgttttcttttcctgggcgccatcatgattttttaaaacagcgcaaaaggatttgtgaactcagaaagctagagagaggtggaggaaaagacaagaactagggttcagagctcaagaggacgtcagcagaagcatgggttgttatactaagtcgggcgcaaaggggcaagccgatatctcgggagagttttggttgcagcaaaacagcttcactcgggcgttacctctaaaatgctaagtgaatcatcagacacaagagcggagtacgcagccg

SEQ ID NO: 171397 - DNA, 724 bp, Zea Mays
cgacaattggagacaaattttagataatatccttgtatatttcaaattaatttcaaagtacttttcgcttgtggcagcaacataggtactcactcctgctgggtcaaggcagatctctatagatgcatatagccacgaatctactggttgtccagcttgacttagggttgggcccaccatatgtggcttcggtctagttgggctcgtttcctaggttggatcggcatcgccacaaatcccatagaagggaataatcaacaacttcgaccgtaggtctgggttcccacgggcgggacctgaacctccacaattccacatggcccactggatccccacaaagggatccggagcagctccatgcccttggagtaaaaaccctctttaactacaagatcggttttggaccccaagagtggttctggaccccgcatgtgtcatccagaacttaagtcatgtgaggtccggtgtcgccacgtgtctgaatcattacaaatggggtctagagctgctcaagcatgttctggaccccgagtcacgggaggtccgagggtgccatgtcaccgcatgttcccgggtctgcgccctgcttagttggggaggtctgggagtgccacgtcgcaacacgttcccgggtctgctctctgcccaagccgaagtctggtgccaatgcatggctggggacgcctgatgtaagccgttgggcgacacctaacgtaagcctctg

SEQ ID NO: 171398 - DNA, 513 bp, Zea Mays
gtgcaagctgaacctggaggttgtttcttcaggtgaattaaactacatctcggtggaacccacatttcaagagcaaatagtcagggcccaggttgaagacaagggtgttcaggtgatcaaggaaatgatcaagcaaaaggtagaaaaatacaagtgcttccgtcaggacaacaagggaattctatggtttggggatcgattggttgttcccagggaccctgagctcagaaagaagatactggatgaagctcatctttcaaaattctccatgcaccctggtagcaacaagatgtaccatgatctcagatctttatattggtggaccagaatgaagagggaaattgccaagtatatatccgagtgtgacacctgccagagaatcaaagccagtcatttgaaggcagcaggccctttgcaaccccttcacataccatcttggaaatgggaggacatttgcatggactttatagtaggattgcccaatacctccaggcaccatgattccatttgggt

SEQ ID NO: 171399 - DNA, 411 bp, Zea Mays
ttccaacacttggtttgttctttctgtttgcccatccgtttgtggatgataagctgaactaaagtttagcttggtatccatggactcatgtagtcttttccaaaagcgtgaggtaaattgggttcctcgatccgatacgatgttctttggtactccatgtagacaaacaattcttgacatgtataactctgctaactaggctcccgagtaagttgtcttcacaggtataaagtgtgccactttagtcaacctgtctactatgacccatattgaatcatagccatcccgagtacgaggtagtccaactatgaaatccataccgatttctccccatttccattccggtaccttgagaggttgtagtaatcctgctggtctttggtgttcggctttaactcgttgacatacgtc

SEQ ID NO: 171400 - DNA, 578 bp, Zea Mays
gttgtgtgcatgaaactgttgataacatacctaagcatactatgaaaagggccgcctactttagtgagcggtacaaaaacatgactcccgtcgagagggagtctagacgtgtaagccttaggttgtataataagacaccaagacggaaagatgctaacaaagagtgcagcagaaaacgtagagcactggagagtgacactttgaatcaggagtccatcgccatggaggacccagtatatacccctgaggttgtacgtcctacaacatatggaattgaaccatatggatcctcagttaccacttgcgactgggttatccctgaattcgtcatgatacctttcctgccaacttcaacacagactaaggatgttggttcactcgatatgtctactgagccactaagacgtagacatcatgtgctatctgggacaagaccagctaccttaggccgtcgaaaccaacaatttgaagccagcattgcaaggaatgtggctatagtgaccgaggatactatttgtgacgctatggaaggaaacgattggacacagccccatctaactgcagagatccacaacaat

SEQ ID NO: 171401 - DNA, 1565 bp, Zea Mays
caccgccttaagtcattgccgacttaagccgattactcggttagtagggtatagttgtcaccccgagttaagtaagcatgcaggttgacagtgaacaatttgagtgcctttgaagtctttttattgatgatatatttcccagtttatagaatacattgttgtcccaataggttttgagatatagctaggggtaaaacttcctgagatgttctatgttccatgagttcccaatttccgtgccatccatttgagtgagacgatatgatccaggtcgagtgacttatgctactatgaacggtccttcccatagtggtgacaatttgtgtcgtccctcccccattagaattcggcggaggacgaggtctcccactgcaaaggatcgatgccgtatggccttgtcatgatagcgcctcagagtttgctgatatcgggctgactgaatcaccgtattcaatcgttcttcttctagtacatcaacatcctccagcctagtagcctcagcttctgctatgttttcaaagattaaccttggtgccccaaacttgagatcagcgggtagcactgcctccgaaccatagaccataaagaaaggtgtgtttccatgcagagctcgactaggttgagttcttaggctccaaacaacatacgacagctctctgatccactttcctgcgaacttttcattcttgtcgaagactttctttctgagcgcttctaatatcatcccgttgcctctttccactttcccgttggctcttgggtgcgccaccgaggcatatttgatctgaatgcttttttgttcgcagaaatcaaaaaattctgagcttgtgaaattggatcccaggtcggttatgatgctattcggtattccaaatctgaatattatgtcttgtatgaattccactgccttagctaaggttagagaagcaatgggtttgaaccctatccatttagtgaatttgtcgatagcaaccagtacatgagtgtatcctccttgagctttcttgaaaggtccaatcatatccaatccccagcatgcgaacggccaggttacaggtatggtttgcagttgctgcgctggtagatgttgctgttttgacaagtattggtaggcttcgcacctctggactaactcggctgcatcactctttgttgttggccagtagaaacccgacctgaagaccttcccaaccagggtcctggatgctgcgtgtaccccgcattgcccagcatggacctcatccagaagttgttttccagtagctgagagaatgcatttcatgaggactcctgatgcgcctcttctatatagcgtttccccaatgagagtgtaatgagctgactgcctcgcaatgcgttcggctgcatttttgtcatctggttcctcctcattctttatatacctgatgatcggctccctccaatcatctagctctggttggctcagaatattgcatccctctacccgatccagtgaaatgctcgagtgcagtacttcttggacgaaaactccaggtgggacctgagtccgactgaatcctagcttggacaatgtatcagctgcc

SEQ ID NO: 171402 - DNA, 835 bp, Zea Mays
aggagacagagctcctttctccattgaatggacgcctcttggcagtgctatccctgctttgcttgatgctgattcagttaacagaatacatccatacatttcctccactgataagtatctgtcaacaacacagggatcaggtctgcagatcatgtgtatgtcagtgtcaagaagctgataatgaagagaaaccacataatcctgcggttgttgtgtataatgccgatgcaataacggtaccactctctttgtatagctaccaaacccaacatcatgccatcctgggtccaagttttggcactgcagtactttagcgaattcaacattatcgtgcagctgtgcggccaaggattcatttgtgacacaaagctaagcctgctctttgcaaatgaagtcacccttgtatgaattttcctcaactccatttaaaggcaacggttcttcttgtgcagccccttgcacttcaaccatgttgttttctgaagaagagacttctgatgcagcaagctaaaattctctgcaatccaaaacatagcctccatctgattttactacatcctgtatgtttcttttgacatcatctcttttgcattcctctagagactcttctgatacaacaagctgatgttctccaatagcctgaacactgtccccatatgatgttaattcaccctcaaaagaagttagggagccttgacttgaagctgaagcttcatgctgcatgacattttgcatttcaactgtattgcaagacggagacgcttctagaataggaggctgaagctgtctgtcatcaagaacatgattctcatctgcttttggtggcttttcttct

SEQ ID NO: 171403 - DNA, 474 bp, Zea Mays
tagccagagagcttagatgaccaaggcaaataccgacaaacacatttctaacaggcgtagaacgctttgttccaccacgacgtagtaactccttccatgagaagctacatgtaattggccccctccttggtctataaaaggaggagggtcagcggtgaccagaaagggggagaaaggaggaggacgattggagactagcagagttagagccagagaacaaattgcctcgacgcccacagcttagctagatagcgaacaccgaaaacgtagtcccttagaacccactatgcatagagacttgggaactcttccctcttttgtccgcttgtaacccctactacgagcattgagcaacaatatgttgttatcgcgagttgtcgaagattagatgtaggcacgttttgcccgaaccagtataaagctcgttcccactaagcacaccatctgaatctagaacacgcacataaaaattta

SEQ ID NO: 171404 - DNA, 1480 bp, Zea Mays
tgaacacgttggttttcagggcatccaatggcctctgacttcctctttactgttcgcagccagtcatcagcatcgagcgtgttgctagatccagcgaacgtgggaggtttgagccataggaaatcccccattctgccctgaggttttcctccaatcgggcactggttctcgaggcttctagtgaggacctcaatgagtcgggtttgattggccagaacttgacctaggtctagtggcagctccggaggcgcggggaggtggatctcactcccttgtccatcgacttctcctttgatacctaggggagtccttgctccaattcctgatgtggtaggcgtggttttatctgaggccatctaccagaggggagaaaggattactactatgcatatgccatcattttttctcaaacatgttattttattcagcactccagttcattacaagcataacaacccccacagattacactacacatgagcgttatccactaaagtgtccccaaactctctgagaagatcatcaaggctagccatggacacttcctcgatgtcgaaaaagttctctatccctagggaaggtagtgtgggcagggcttcctccttcaggtcagtctagcatccttggctcttgaaacactttcggatgttcttgacaggggcgagcttcttcagcctcctagcatagtccatcttcagggtccggtatgcctcacgagtgttggcttcctcgccttctgccatctcgagactgtcttaaagagcgaccttttcctccttcaattccttgatttgctgctctaggctttccacctaggagtttaggtgggtgcagtgggagaaaaggtcgtcaaagtggttgtcaagggtgtggagatatccggccatgtagattacggtagggtcatcttcattatgatctcttcctgacaaagcctggagtcttttcctccaagtaggggtatttttgttgctgggtggaaagtagtggaggggggtctcagagacttccctgttgtagttttggcatagctggtggatggctttttgggcagcattctggcaggtatctgggaagcggtggccagtagcggtgatctgaaagggagggtgattcgggtagctttggctttatcccaggtagactgccatagagcatttctcaatcccgttctcgcggtattcctaccagacatactccggcttcttgcggatccccatgcgaagcgcacaactccgaagaaggtgagggaatccttccacctccgagcaataagatgtcttaaggacaaaggtgccctccatctggtagcaagagaagaagggtttttaatatcggggaaaggagagaaggttctttaagaggttaagaggtattttcttttgaggaaagctttttaggtcagggctgcggtctacggccagttctatggctctgataccaactgaagcgtcccgatactttgggactcaaatgtgat

SEQ ID NO: 171405 - DNA, 630 bp, Zea Mays
attttcccatgaatatacttcatacccttatctgttctttgagcatcaataattctttgtagaagaactaactcaagcttcaattgcgtcaaagttccttgttgtactatccccagattcaacctttccatttcttgacataaagtggtgtcaggtgttcttattgtaagacaatgacaagaagccttgcgacttaaagcatctgccaccacattagcttttcctaggtgataatgaatttccaagtcataatctttgattagctcgagccacagtctttgtctcatgtttagctcgaactgggtgaagatatacttcaaacttttgtgatccgtatacaaatggcatatattccccagcaaataatgacgccaaatcttaagggcatcaaccactgcagccaattctagatcatgggttggataatgttcttcatgcaggcgtagctgccttgaagcataggctatcactcgtacttcttgcatcaggacacatccaagtccactgcctaacgcgtcacaatacacatcaaaaggcttttcaatatccggttgggccaaaaccggtgcagtggtcaataacactttcagctgatcaaaggcctcgttgcatttcgaggaccaatcaaac

SEQ ID NO: 171406 - DNA, 416 bp, Zea Mays
cggcaacgagggcctccagatcctccacagcaacgatggagaaaggccacgggtcacgcggcggaatgacggtcaccttgtcagccattgccgaacggaggtggtggaggtggaagggatgaggtgtgtggtttccttttctctggctactctcttaggttgcagaaaccaaagcagaaggcaagcgcaaatggcagggtaaagaacccccaccggcccctcttccgagtatataaaggcccgggcaagatccacccaaagcttcgcccgaacccgtcgagaaattcaaactcgaaggtgaaacggtctttctgttcctcgaacggctcgcgcacgcgcaacagacgccccacgaatcctccggcaggggaagcgggcgccgtttcacctccgtcatgatgaccgcttcaaaaaag

SEQ ID NO: 171407 - DNA, 741 bp, Zea Mays
aagcgctagccaccctcgcgtgcgacctatccgcgcagaagtcgcccaagggtgcagccggactaagcacaacaagtgcgcaaaaatccgaagtctatcgcgaagactatccgcgcagaagtcgcccaagggtgcagccggactaagcacaacaagtgcgcaaaaatccgaagtctatcgcgaagactatccgcgcagaagtcgcctaagggtgcagccagacttagcacaacaagtgcgcaaaaatccgaagtctatcgcgaagactatccgcgcagaagtcgcccaagggtgcaaccggactaagcacaacaagtgcgcaaaaatccgaagtctaccgcaaagactatccgcgcagaagtcgcctaagggtgcagccggacttagcacaacaagtgcgcaaaaatccgaagcctatcgcgaaggctatccgcgcagaagtcgcctaagggtgcagccggactaagcacaagcgcgcaaaaatccgaagtccatcgcaaagacttcgcgcaagagccgcctaagggcgcagccgacccagtaaaacaaaagcagaaacgacagcaagaccaattataatcatactggcacagcataatcaatcacaccagacaaagtacacagcgccctcgcaaacacaggcacgcgagggcacacaactccattttacaagcgagggcaccgcgccctacatcggctcaaccttaggaataatccccatctctctataattaaataaca

SEQ ID NO: 171408 - DNA, 401 bp, Zea Mays
tttgttgtctcaacaaatttgcatatatatgcctaatctgctctcaaatgtgtagcttcacgaactcactgcaaacttctttatttaagcacattattattttgatccaactaagatcaaatttcgattgctttaactagctgcgaccagaaccattataatagtgtctaggctcctcatagtgctaagttcgtaaattgcaatgttctacggcaattttgtactaaccaactctacacaccggaacaaaacatgtctacggtggtggaacttattactcaatacaaaacaacatgaagcacgagtcgtcctcttccaccatttgattaggttgtacccacttagcattaggcttagtgctcgatacaacaacttagtaatattgccattttagagacgaa

SEQ ID NO: 171409 - DNA, 827 bp, Zea Mays
tgaagaacaactatcaaaagccacagatattgagtcgcctgtggatggtcaactctgtttagctgtttcagtggctgcagttcaaggtagtgatgctattcagaccattaaatttcgagccaaaattcagggacaagaagttttggttcttgtggattccggtagttctcattcatttctcagttcacgggtggtgtctaagttggaaggtgtgtcagagatgccatggccggtgatggtgcaagtagctaatggtggtagattgttatgtgacaaagaattttttggggccacatggtcgatccaaacttgtgaattctgcacatattttcgagttttggatatcgcagcttatgatattattgttggaatggattggttagttgtgcatagcccaatgaaggtagactggggacatggctggttgttgattccgtatggcacatcgtcagtcttattacgtggtggtattgaggatgttcaggccactacagttgtgcggtctactacttcagaatctttggctatgtcatgggctgatatggagttgccgcaacagatggcctcgttgctctcggaattcagttcagtgtttgatccaccatctgggctaccgccttctcgcgactgcgaccactcaattcctttggtggtagggtactctcctgtacatgtgcgtccataccattaccctccacttattaaggatgaaattgagcgccaaatagcagcaatgttggctgaaggtattattcagcacagcaccagctctttttcctcttctgtgctctttgttaagaagaaggatagttcttggcgtttttgcg

SEQ ID NO: 171410 - DNA, 536 bp, Zea Mays
caggtccaggtaccagtcgaggctacctcctgggggccgggacaccaactctttcttaggtacgctggtatctagcctcgacacgtcgagcctacatcccagggggggcaagtaccaggagaggagttgataaaaccacacacaacaagaactgtttaattgatagttcccaaaagtatcttacaaaaacaaaagttattacatccgtcttcaagcggagccctagcctcatctctacaggtatgagctactcgacatcagtagggtcgcgctggaagcgcgggccgccgtctccacgacatcttgtacgacctcccgggcggcgtcttcagtatcggcaaccggaccagcggtcaccattggaggcgacgtcaaggccataaaagccaaagatatggaggcacaaaagatggagccgcagcttagctcgcttctcgcctcatggagttggagctagaccagttcatggaggtgtaccatgggatgctggtgaagctcacgcgaaagatggagccgcagctcagctcgctttccac

SEQ ID NO: 171411 - DNA, 579 bp, Zea Mays
ggaaggaacaatcttcgaacataaaatacactcaacaaaatccttctttgttgtgtctggccaccacccaaacttccatcctgggtcctgtgaccttgcctttctttttgggtcagttgcttgtgcactaagctcaggagggagtgctgcaatagccttttcagcaagactttttgagtctgcagcagctgataatgccgaagcagggcctgtgctatcaacatttgaggtcacgggaggaacagaatcacttgcatgccactgccagccacattggacccagggaataagacctcaacatcagcacctcttcgtccaccggcagcatgaaactctgaacatgtcaacagatagaggtcaagtcactactaggcactagatatgctactgctgggctgatggaaactggttggcagagatgaagctaagaactattgaagtaaggcagtagaacatagaagtatagaacactagatgagcagggccagggcagactgcaaacaaatgggtactgttgacgtgctgcgcagaatgcaaaactgcagagtgcagacaagggggaaggaggggagcatggat

SEQ ID NO: 171412 - DNA, 606 bp, Zea Mays
cttcaagcttgcgcagattatccacaccgcgcaacgcaccggcacacagtcgctctcacttttcgccgaagcccggcagcgcatcagctcagcggggaagcccctgatctgatcgcaactgaaaccgagcacgcacacgcggccgtcgtcccggcgccatcggcccccaccccaggctcacctctctctctctctctctctcttcgatctgtctgttatcctcgtcgtcccgtcacgccagctcgtatccatcgccttcctctttctccccgactgatagctacgctacgcacccctcgcatcgcatgtggtgctggactcctcgcttcgaatctacggaacggcccggtgcgcgcccctggtcctggcagccaaaagcggcggcctcggctgcggcgcacgtatatcatcattctttctttcttaccctaccccccactcacgagaaatcagtagcgacggccacccggtgcgcgatcgacagcgtcgtcagcagcccaccactcctgtcctggtgcctaaaaagctggggctggcgctggacggtcctcggatcgctcctcgagcccgatgcaaaccatgattcctttatatttttattttttc

SEQ ID NO: 171413 - DNA, 287 bp, Zea Mays
caggaaaggccaatgtggtagcagatgccttgagtcagaagttgcagtgcaattgtgttctgatggactctcgtattgacaccttgtgtgatgagttgcgcaagatgaagattgaagtaattccttctggtgcattgtctcacatttctgttgagccagctttgcaagaccagatcatcatggcctagctcagtgacaagggagtgcagattatcaaggagaatctccatgagaagaccaagaagtataaatgtttccgccaagatggaaagggtgtcttatggttt

SEQ ID NO: 171414 - DNA, 996 bp, Zea Mays
catgcttcgaagttgaagatgcggcccctgtgcggaatggccccctgacgaaccaccctctgccgatccctagaatctgagaaaattgccaagtactgctccgggtgatgcttcaagacctgcagcctctccttgtgaatgcctaactagtcccagagagccgcctccacatggggcggagaggtatcatggctattgccattaagctgacacaccactgcccgccccactagagagtcgcgactaagcttgatgtcgtcggatgctgaaactgcacaggtctccagatctggacgcgccctcgtgtccctagggtaagccatgggcggcgaccaccccgtaagcgcacgaaggtaggaggtggggttgagtttgcttgactgccgtgggtggggaggtactggccttggctgaaaggagcatgaagaattgtgaggagaggatggccttttaagcttggggtagagacgagctcgatgcccaactccaaagcagcgccaacatcttgttcgattggtgcacaccgccactctatggtcttgggcaaaacaattaagacacctcccatctgcatgcctgatgaatttccttcttctctcctccctgtcggccgattggagctggcatgaatactaatttgatgtcctttgcctacgccactagtagggagggcggactacctcccagccatgagttaaatcctcccgagcctgggtagcagtagcaaaacgcgcatcggagagatctggttgctgctgaatttgattcgctggagaagatctcgctgacagcttggttggtgagattgaatgcccttcacttgcctttcctttccccttctcatgctcactgaatctcgatgtgcgggcttccgccgcggcattgaagacgggctccgataatgctggtacgacatggtggccatcttcaggttgggagacttgaaggctgaggtccactggtactcttgccgctcacgctggcgagccgctcgag

SEQ ID NO: 171415 - DNA, 673 bp, Zea Mays
atctttactacatattaagacagtaaaggtagtctgcctcccctcgttctgccgttctgccgtccatcgatctggaccgtccgtatcctatcatgcgtctgcgtctcccacactccatctccctccaccgcacgaccgcacccaatccctaaccttcccccgcacgttcctctcctctctgccgcgttacccgcccctgcccctaccgcgatagatgcctcgtggcccctgacaacgacgaccgcgccgccatgacctcccatcgcctccacctccgccactggcccacaaggcgcaccctccccctcgtcgttgccttgcccagctctataaactcgggcaccgcatcaccaactaccctttgcatccgcctgtttctaggagtcaaacgcgagcacctctgccgtcatccatcctggttgagagagatcggtgaggaaggagggaccgggcgccaccatcgctatacgcgagccggggtcgtcctatcgtagaaaccaagactactacgtcgtcatctttggtaaggcctctttgagctttgcctttttcctgggaacattgtagcatcgagttcggggatgtgccgtgggttgtattatcgctccgccatggaggccgagtgagtcctcggcgttcggccgttttgcggcggccgcttctccgccggagg

SEQ ID NO: 171416 - DNA, 966 bp, Zea Mays
gatttctgaatttcagccttcacctacaacttgagcgggttcaccttaatcactagctcaaatccttaagtccccattgacaaatttgttctaagctaacccctctgcaacgtgtgtgaagatggcatcgagatgcgtgccctagacatgtcaaacccgggattttctcgcagagttcagcagtgagacaaacccaacttcatccctccatatctcttgatccagtcagtgaaacccataagcctccacacataaacgacaaagtaatgtcaggggaagagatctctcaacgggatcatggccataatcgcaaggatttggagccaatccgcgcgtgaacatgacctctctctgcaatgcctcgtgctcgacgtcgtgcccaggcgctaaagcgcgcactagcgctcgcccacgcacaccccaagcgcgtgttagagccacccctcggccgtgctcgcccgtgcctttaagaccaccccagacgcgcctcacctcactccacgctcaccctcgctggccagacaccaaccttagctccggcgagctttgcgccacctgcccgagccacccgagcgccgggcaccatggccagccatttccagagaccttcagcctcaacagagcccttggatagcttccccgaagagcagtgaagcttctccaagcaagaatcgaggccctatctcatcggaacagcaagatcatcgtcaccggactttggtcgcccgttgccgcgcgtagaccgagcaatctggtgagcctttctccaattcctcgtacccatgtcttccttgacctctagcggaactcactgaccagttcaatcgaactttaccgccctggttaggctggagccctcaccaccgacgagctcccccgcctgcgcacgtggaccatccttctccgaccatcaccggagatgatccgcacatcggcgtgaccgtcaagacctcccctacaccctcg

SEQ ID NO: 171417 - DNA, 784 bp, Zea Mays
acaagtttctcattcttgtcgaagactttctttctcaatgcctacaggataatttcatttgctcgttccacttgaccattggtccttggatgggctactgaagcatacttgaggagaatgcaattttgctcgcagaaatcaaagaactctgcctctgtgaagttggaccccaggtcagtaatgatgctatttggtatcccaaacctaaatataatctcctggatgaactatactgtcttggttgccgtcagcgatgcaattggtttgtactcgatccacttcatgaacttgttaatggccacaagtacatttatgtatcctccttgagctttttaaatggcccgatcatatccagccctcagcatgagaagggccaggaaatcggaatagtctgcaattgttgcgccgacaaatgctgctacttggctaggaactgacaagcttcacacaaatgctgctacttggctaggaactgacaaacttcacacttctgaactaagtctgctgtgtccttcttggctgtcgcccagaagaaccgtgctctgaaagccttcccgaccgacgttcttgaggccgcatgaaccccacaccgttcagcttcatctcttccaacaagtgttcacccatagacgtgtcgatgcatctcgtaaaaacacatgtggctccacgtctgtacaggacattgccaataagtgtgtagttggcagactgccgggcgtggagctcgacaactgctttgtcatccgattcttcttcatttttgatatacttgatgatgggtatc

SEQ ID NO: 171418 - DNA, 279 bp, Zea Mays
gttggattcttttgatggcagtggtactccggtggaggcggcagattggctgacttacgtggaggataagatgaatgtcttcgagattgtatatggagatcgggttcgctttggcacacagctgctgaagggagaggctcaaatttggtggagaggcgtgcaggcagcgcactcctcatcaccaggggtcctatattgggatgtcttcatcaggcagtttgaaaggagattctacccggtcaccttcctggagaaaatgaagatttacttgtagtccta

SEQ ID NO: 171419 - DNA, 535 bp, Zea Mays
gcagaatatcgttttgcaatgcaaactgctacatgtgaaatggttttatcaaacggtttaccaaaactgttttaactccacgaagttattcatgacgttgaagaagaaaacacaaagttggagaaagaaaaaacggcttcgctagtaaagtgaaagtgtgccaaacgaaatctgactcatcatctcacacagaaatagaatatgatgatgctagaaataatagcttatcacagcttcatcacacacccgtcggtcctgtgagccaaacgaaacctaaatcatgatctcacataggaaaagaatatgccgaagcctaaatcatgatctcacataggaatagaatatcgtgaagctgaaaacaatagctttttcacagcttcaaaacacactcatcggtcctgtaagattctgtaagaacaaatgtacatacaaagctgtcttgcaaatgattcaccaaaacagcttttaacttcactgagaaagttgctcgtaaaactaaaaaactgagctgtatgcctgttttgcaaacggttcg

SEQ ID NO: 171420 - DNA, 1139 bp, Zea Mays
gggttgctacaaagatcaaataccctcaagtccggaagttgctatatgcagtactcctcatcgcgcgatagctgcgcccctattttgatgattacaaactcatagtggttagaggcttcccgataggagacatactccgcaatagagaagcagtgggaaggacgacaagtggccatgtgaacttggagctcacgacatagaattctgaccccgcaccgcaattaagagcctggctctagtggatttcatatcagaatagaccgaacaaaagatcccctaaaaccccaagtcagtggaggtatggaagatgtactttgatgggtcgttgaagttacaaagagcaggggctggtatccttttcatcgcccctggaggagattagctcaaatatgcactccaactattatttcctgcctccaacaacgctatagaatatgaagcttgatacatgggcttaatattgttgtatcactcggtatcaaaagattgatggtgtacggagattccatggttgtcatcagccaagtaaacatggattgggactgctccgcagaatcaatgaccaattactgcacaggaaagttgaggacaaatttgaagggctagagtccctgcatatagagagcgaccacaacatggcagctgatgctatccaagctaggatcgagccgagcgcaggctccaccgaacattttcgttcaagagatacatcaacctagtgtcatgacagggccacgagaagaatgcaaggcagtagagcaagcgaaaccggatccgaacgattggagagcaccgatcatcaagtacatcaaaaatgaagaagagccagataataaatccacgaccgagcgcattgcgcggcagtcggctcactactcagtcataggtgacgccctgtacaaaagagggggctgcaagtgttttcattaagtgcattgacttgggcgctgggaaacgtttactggaggaaattcacacagggcaatgcggggtacactcgtcgtgaaggcattcagagcaggtttctactggccaacttccaagaaatatgcagtcgacctagtccagagatgtgaggcctgtcacttcttagccaagcaacagcgtctaccagcatagctactcaggttcatcgtcag

SEQ ID NO: 171421 - DNA, 293 bp, Zea Mays
agggccctgtgtcagatctatgaagaagaagtggtcgacaccccgctcagattctttccgccctttcagagaggccgtccagtttggatggctaggatgcgtgcattggaagggcagcagctgcttgaggacgaccccacagtcatgtacctcactgcatacctgctcaccctggatgcacggtatgatttcttggctcagcaccaccgtcagatgattgctcgagcagaaaatgcagagaagctcaactgtaagctccatgtggacctcaccacagctcaagcccgtgtagc

SEQ ID NO: 171422 - DNA, 314 bp, Zea Mays
actgagggcccatcatccttagaggtggctaccgcagagaacttggaccctaaggacggtgttgacacttgcccagcccccgaggatgttgtcggggatgacttggttcgggtgagaagtgcaagccactgcccagcccccgagggtgctaccggggatgatccggctcaagtgggcagtgcaaactatgacccagcccccgagggtgtccgagcggggtctccctcttgtacttccatggacgttcatgcgggatcgcctccgcactccggctgcatggtggtagcccaagctttggaccaggggtcgcttta

SEQ ID NO: 171423 - DNA, 379 bp, Zea Mays
cgggcactgagggcccagctttagtttccgtatgtgttgtagcagcttcggcaaccttcttcacaggagcaggagtcagtgctcttgttgtttccacaacggcgtctagcacgcttgccattcttctcctcttgggaggtgtggcgggagcccttgtcaccttcgacagttctgcctctgtcggaggactcagaatttttggcagcatcactatttttccaactctagctctctgaccgcattatctttggcttcggctgacccaactataggcaccttcggcactacaatcgatccttcagcgctccgagcaatgggagcagcttgttttgcttcggcagcggaggaggtcccttcaccaaattcaggcactacggcc

SEQ ID NO: 171424 - DNA, 2324 bp, Zea Mays
cctgcaacaaaaataagaaacctgaatactcaaactatctgcaaggaaagcctagcttagaaaacatatcaccaaatgaaccaactactgacgtattccatattttccagcatgccatcaatgactaatttgcagaaattatgtggactggagtcattgttgaatacaatagaagatcatggagacaaacatacatgcgaacatatcgaatgttacagcaattacttctataatgataggtctactcgattttgtgtttctttgtctctgtaattagaagagcagctaatgtgtataaacctttgacaaaaaatgagaagatgttttatacaggtggagaacatgtgtaatcaaagcgtatgtatgttttagtgaagttcaagaatgcatccacactacacgctacaaaaaacatacctttgcagtgcaactttaatgctcttaaggtgtgtccaggcagcagcaggcacctcccagaccatgctgaagtcatcatcggggcggacagatttagatctacctgctaaatctctcacatgaccatagcttggtaacacttcatacatgtccccaaggtacttctgaataacttttgcttttgtggctgattccacaaccacaactgatttggctctgggaggatacaatggcaccagtggctttttctcaataactgaaccatcaatagaggattgcatacaaatttcaggtacagaagaagcagcagaaacctctgcttttgactttgccctattatttacttttttctctttgaaactatcagcaccccttttcaatttacaattatcagtcttcttgttttcttggttcgtgctaatattatcagacgtctttgttgcagctttacgagttctagcaaatatcctctttttattggtatgtacttccttttctttcatatctccatcaacttcctttttgcttcctcttgaactcttcctcttggcagtgtcagtcttagcatcagtaacactcttgctgttgttactagtagatgttgaagcctcatcaacaatggtgctacatgtagctaatgtgctttggcatttctcagatctatgaagcaaactatgtgcaacacttccgtctttccttctcatatttagattactgaatgaaatcttatttttaacaagaaaccttatttttttactgtatgtagttgagaatggtcgtgaattgccaatattattagcctttaaagcaattccacagctggctgtggctctgaaacatacagaactatagctgccaaagagccgaggagtaataaaggcactacttttgggctgtaaggcaaccccaaaattatttcttgaagatattttccttgttgaattgctcctaaatgcaaccccacacattttacaagggcggaaaggtgaaaagggccagggtgaagaagaatatctctgaaacacctcgaattgaagctgaaaagaaaataaatagacaacacaaaaaacaagcacaactcaaatgaaacattataccaaattataacaggtagaatcatgaaaaaaaatcattccctcccattctcatgatcacttggggaaaaaacagaaagacaaagggcaaaagtcattgttatcttcataaacattcctcatcaaacagaaaaataggcgccccatattcagtaaatgtccgtagttgaataattatttaaggataagtagatgaaacaaaagaaaaataaggtgatcgacacaatagtggttgatggtatctggttcgttttaatccttgcaaatcaggcttgcacattgttgtgcaatggcaaaggatgtctttctctctaaccaggggataatattttgatatgcgccatgacatagctccgccacaaaaccttgttgtttcgcaaagccaccttgttttattgttttaagagaaaaggaacgaggctctatgtggctcacgggtaatacaacgaacaggtggcgttcacgccgcaccaccatgcacatcagacacttccggacgtgataaattctcatcagaatgacagagagccactcaccattgcgggcggcggcggcagcagcgatagcgcgtggatgacggcgcggtgtcgctgggcgtatccgtgcgggaggaggcggcggagctggagagccatggccaacaaggggcggccacgagcgcgctcaggggaggagagacattgtttctttcggctagggtttagctagggttttacgggcgaagcgggagcggattgcgaggcggcggtgccgaggaaggagcagcggaaccagattgactgcagtactgcaggctgcattgcccacgttcat

SEQ ID NO: 171425 - DNA, 436 bp, Zea Mays
gaagataccaacgataacttataaaggagtcttactttgaagttcgagtaaagtaagctgtcaatgatgtgctgacgtctgtagtagctgatatccttttcaagctttgccaatccaatgctctttgacagagtgcttataatttacccctagcatggtcgcggatgcatcccacaatttcttcatcaaccccaccgaagagcattgatccaagctggtagccgtaggatatggcaaattcctttaactctgatatgtcctcttcgaaaagctattgggcgcctaggtgccgaaggtcaaagttcatacttttagaagcaatttggctgtggcagtagcttcggcatcgacgggtatggtagctttgtctaccgaagctgagggtggggtatgttcaataacttccattatattcatcatatgccactgcttttcc

SEQ ID NO: 171426 - DNA, 985 bp, Zea Mays
gtcccaaagttgatctttcacccgcatatcattttgactttccgtatcccacatttttggcttcgactaacagtgtcgtacggatagccctgctctatgtgaggtctagacacgttgccatcttacactggagtctgtcattgagtcccctcatgaagcaattcttctttttcaagtctgtatccacttgatcaatggcgtactgggagaggtgattgaatttattgagatactgcatcacagaatctcccccttgcttaagtcggatgaattcttccagtttcatttgtagcactccctccagaacataatgttccataaggccagtttgaattcttcccaagtgacttgatgtcccgcaggttggatggcagaaaagtttgcccaccaagtgctggtgggcctcttaactgctgagcagcaaataagggcttctgtacctcgatgcatcggatcagcccgaacttctgttccattactcgcacccattcatcagattccaagggttcctccgccttgacgaaaagcggtgggcgggtttcggagaactccagataggtagtgtctggtggtccctgagggggaactctccctccatgttgttgaaattggttgcccgccatttcgcgcagaaagcgtgtgttgtcggcggtggcgttgaccaaggcagcgatagcctcggccatgttaggaggtacgggtggtggattgggggtgtcctccccgccgcgggatgtacctgtcccatcatgagcacgggtccaggatggcatgtgaggcaaagaaacatttggaaatataacatgccaaacatacaccatctttatttcattgcggaacagtagtaattatacatactccattatacaactcgactttcttccttattttacataagtacattacttaaactatactactctaatcctctccgtccttagttgttctgctgcctacttcaggagaccgttcatctgcaagattc

SEQ ID NO: 171427 - DNA, 786 bp, Zea Mays
caatgcactgtgaagactctcccagaatttggatacaaatttggagtctcgatcagaaacaatggacttaggtaccctatgaagcctgattacttccttcatatacaaggggaccaaatctaaagctgaatttgtggtcttcatgggaataaaatgcgcagacttagtcaagcgatccactaccacccatatagcatctctaccccgaggagaacgaggtaaacccaccacaaaatccatggtgatatgctcccatttccactccggaatttctaatggctttagtaaacctgcaggccgcttatgctcggccttcacgcgctgacatacttcactggcggccacatacttagaaatgtcaaccttcatccgcttccacctaaagttttgcttcagatctcggtacatcttggtttcgccaggttaaacggtgtaaggcgttttatgagcttctctcaatatatccatcttcacctctgatttctgaggcacacaaaggcgaccctgaaacgaaccaaatcattctcatcgatggagaactcccggggtttaccatcgccatccctcttttgaacttcttgcaataaacgatcctgctgctgagccgcacacactctctccatgagagaagattgaataagtatatgagtctcctcactagcggtgccaacatagcacaaggcgatccccaaacggtccagatcagcaatcaactgcaaggccacttttggaaccccggacctgctaagggcatcagccaccacatttgccttccccgggtgataa

SEQ ID NO: 171428 - DNA, 323 bp, Zea Mays
caaaaagtacaacagtaggggtaaattcgactaggaactcactgagcactactccaggggcttgctgagcttcttgggcgtcaacgtgattcactcgagccctgccgtgaaactgggtcttgcttatccggctgttggtggagggtgccttggaggtgggtgataaaacattcttggggccattcaccaagttggagtaggcaggtacggatgtcttcaactaaggacaattattcttgtagtgactggggtctccatagtgccaacaagcattggctagaggttggctgcttgcaacagatggggtgtggagggaactttga

SEQ ID NO: 171429 - DNA, 545 bp, Zea Mays
ttggtagttaatgtcaaactccgttagttagcgtgctgcgtcgcgcgcttcgccgcgcgacggatttgtctaattttagattctatttatgtgttgcgtcgtgcgcttcgtcgcacgacgatccattttaatttcaggttgtttaaggtgtaacgtcgcgcgtgtattcacgcgacgttccactttagactcagtttagtcgacgtatgccgtcgtgcgttttgtcgcgcgacgcttaacgtctctttataattaatgcgaagtgtctcgttgcgtgctcggtcgcgcgacgagtcgttaatttcttaattcgttttagagtgctatgtcgcgcgtctcgccgcgcgacaattctttttatttatcttcatccgcttataatgattagacatgaaacatgactttactttacgctaaacatagtgtcaacattaatttcgttctattaagcgagtggttaatttataatcatgtaacgtgaccgtttctcgactgtcttgttctctttctctcttaaccataattgcgagcccgcgtggaacgtc

SEQ ID NO: 171430 - DNA, 500 bp, Zea Mays
taaaaccacgcctaccgcctctaggattggagcagggtttcccctgagagctgaaggggaagttgttagagaagaaagtgaaacccacctccccgcacctccaccactacccttagacctagcccaagttctagccaatcaaacccgactcatcgaagtcttcactcgaaatctggaaaatcaacggccgaatggtggaagaccacaagacagaatgggggatttcctgaggctcaaacctcccacgttcgctggatcaagcaaccccctcgatgcagacgattggatgcgcacgatcaagagaaaactggaagccattggttgcccagaaaatcagcgtgttcaactggctgcccaccaactttctgggatggccttagcctggtgggacaccttcaacgtcaccatcagagatgctacctgggcggaatttgaagcagctttccgggagcaccatgtgccccaaggactggtacagcttaaggaggacgagttctgag

SEQ ID NO: 171431 - DNA, 387 bp, Zea Mays
cttttcttatgctgaaagactgcagagtcagatctgatgtgtgtatgcttttacagatgtctgacaacatgctcagaggtggaagacgtgctcaacaggagcagcaggcaccctagcagcagttgccaccgccacccccaatgaccattgagtagatgtttttgatgtggacccaagcagtccaagtgattgcacctctttcttaacaggagcaatgcagcaggtgcagcagcaacaacccccacctcaacctcagatgcaagtacatatgttgtagatgactggggacaagcgggcggagttcatgaggggtcatccccctgtctttgcccattctgtagaccccatggacgccgaagactggttgcacacaatgaagcgggagct

SEQ ID NO: 171432 - DNA, 593 bp, Zea Mays
cacttgtttgaacccaacatttggtgcccactatgaccgctctaaaaaccaagcccacgatgcctcctaagaagaacacctaatcgtagcttggccccaagtctgcaatgacgaaggcagtatccatcgacaatgcaggaaaagtgaaagtggccttggccaatcaaactccatcagcccatgcaaaggtagcccccatcatccctaacaagccaacaagagtgaggtcccctttcccccaccacaaagagccatccatcgaccccattctgaagtggagtttccacaccaacagctcagagacccctcgccacactccattcacccctagaaccacccctactaagccaaaatctagcccagtttatctcaaggccaatcatagacccccacccagttgaatatcaattcacgtgttcattccctagaccgtcgacaactcaagaatgacacaagagtcatatgcccccgcatctcagcatcgaggatgaccttgtaagttacctagaggagggcctcgatgtgaacaatgaagatctgctactactcaggagcctgcgcatgagaaacaaacactagtagaagcagaaaga

SEQ ID NO: 171433 - DNA, 416 bp, Zea Mays
cgcgatcctcggtgtacctctgcatttgcatttgcttttgctttgcgccccggaaaatttggcgtccttcacccagacccagagttggtcgttcgacaacgtaatgtccgaggttcttatggtctgtcctgcctgcctgcctgcctttactaccgttggttgtgttgttcttgtcaccacactagtacagtaccgtaggaacctgcacagacgcagtacacgaagcacttgacagtgggacaagttctccgtaggtatttttattttagtataactaccgcctgaagatgtccagtggttgttgtttggttgggccattttagccattcaatggttcacggtgttaatggataagattgtttcacgtttggttgatccaatcagcaatagatcacgccatgaacagttatgtgcct

SEQ ID NO: 171434 - DNA, 896 bp, Zea Mays
taggaaacctggtatcacaaaatgtcatttgctagcccaatgacgtcttcatccactagttgtactctaataccctcacgtgcaattacaatgcccttgacatctaggaaacgtcttttgtggtataaaaggtgatctattgttttgaattctttatattccaactttttagcaattgtacggtggaaaaaaggtgccttacaaccttaacctatatttggacagttctctcacgcaatttggctaaatttcccatggtctttattttactttgagaaatagtgtggcataatgatgtatggtgttatatttgagtggacataaacaccatctaggtatgccttgaatagaggggattattggaaacctggtatcacaaaagtcattagctagcccaataacgtcttcatccactagttgcactctaataccctctcgtgcgaatatagtgccctcaaaatcatagaaacgtcatttgtggtttaaaaggtgatctattgtttgaattctctatattccaactttttagcaacgatatggtggaaaaaatgtgccttacaaccttaacctatgtttggacagttctctcactcaatttggataaattttccatggtcattattttattttgagaaacgatgtggcatattgatgtgtgttgttttcttgagtggatataaaaaccatctaggtatgccttaaatagaggggattataggaaacctggtatcacaaaaggtcattagctagcccaataacatcttcatccactagttgtactctaataccctctggtgcgaatacaatgcccttgacatcaaggaaacatcatttttagtttaaaagatgatctattgttttgaattcttcatattcctacttattagcaatagttt

SEQ ID NO: 171435 - DNA, 402 bp, Zea Mays
tatcatagagagggaaccgaagccccgccctgaagaagcttttaaacacaataacttcatcatccttcggctctggaaccacttcttcgccagcaaaacgaacaagcctactctcggcttctccaaagtaacccaatttttttcattataaccatatcatttgttgtcacagtagatctaccaaagtcaaggtgactaggtttttctgggatcaagatggtgtaatcttcttcatcttcattaccacttccctctccaactgtgattccctcagcttcggcagtcagaataccttcggcaacaggctcttctgatacaacaagacccgactgcctcatcacctctgatattggtgccgtctcagttacttcgacctcgtctccctcgcgagacactctagca

SEQ ID NO: 171436 - DNA, 794 bp, Zea Mays
caatatggagctataagtgcaacagtgggctaagatctccttctcctccaccgtcacgcgcatcttctgtccagatatgttcttcatcctgttttgtcagcatgggcccatagcgggatgttcctggtatgcttacatcatcggggctgggcaggctgacgagcgaaggagttaatgcgatatctctatgctgtcaactccagtaagtgatgcctcatgatgtcgtcgtgcactcatatgagataaccgcctcagtaactcgagttatcctgagtaggcattaaatgcgcatagcatggctacatcgttgtgtgcctcggtagcgcactatgatgatacctcccaatctataggagcacaagtaccaaaaacatctgcttccatagttgtttgaacatacttgagcccatataaacccggtagatcgccgagcatcccaaaggacctcagtaaatcaactcacaaccaagatcgtagaataagtaaatacacaatcacatgccggagtttttgcagcggaaataatattacaataagtttgcaaataaggagatgggagtaagtacaaaacttcatttgaaggaataacctttgaacaatatagatataaccgtagttttgaaatacatgctagcttagtgacaattctacaaaaacaacatgaatgagaaactatatagaaggtcgagcccaccggcacttatccaccatcctcagcaggcctagatcttcactagttgcaacagggtgggataaaccctgagtactcaaatgtactcagctagacatacccg

SEQ ID NO: 171437 - DNA, 518 bp, Zea Mays
ccaaggggagatcgggtctagcttggaaaatatggtggcgccatgtattgtctgtctgcactgttcacccaacgacaaaaagatgtcaaaccgtgtcaaacattcctggtttggtttcaaaattttcaggggtgtgccttgggtagtttggctactttttgttatttggaccaagtggttttggcgccagcaaaagggtgaacacttctgatctttagactagggctgatttttgacatagagaaaaatggcttgctctagggtgctctccacttggggcttaattttggggtttttgtaggacctttttgtaatacctcccttactatattttgtaggtatattaatgtacttcaactttggtaaagggttcaatccatgaattggccatttgcatagttttccctttaatccaatgtttgggggtttaatggcccaagaggggaaattagggttttagaacctttttcataggtgaagatacatgaaggctagggtatccctcccatcatgatcat

SEQ ID NO: 171438 - DNA, 643 bp, Zea Mays
cgtatttccactgcgcggcccattctcccttctttcccccgtgccacgcactggcatctgggccccacctgcacttgtggtcgacaagtggacccaggtctgtgagccgagttgcgtgtttcctcttcactggtggctagtggaccccacatcgtcaggtgcttcgtctttaccggatctgctccatctcgttcgtcgccgcgcgcaaccaaattagcgctccggtctctactggattcctggaaatccgggcggttccccttcatctgaagcctgcgcagggaccccgacggcttaatctcatgcgctctccttatccctacaggtccggtgcctgcacgattatgcatggccaggaatctcgcgaccagacgtctaggctctgcccggatccttcgcaaccgaccttctcagcgcggggatcgatcatagtgactccaccctcaactataaataggaccgtgacttattacgccgttgcagccgcgtattgggggtgcggtgagctgagtatgcgaagaaagggagggccgccgtgatccgtatcgctaagcacacagagagaaacatgagagagaagagagaacggtgaagtccgtccgcaccactgcctcgtcctcgggcgcgagctcgcgggactcgc

SEQ ID NO: 171439 - DNA, 815 bp, Zea Mays
taggtaaccccatattttagggataactctttagctactctataaatatctagacccggatgcatcaatacccaaaaggcttagggtcatgccacaaattaaggtagcactagggagcttaaggacctcggagccaactaacagagggtctcaagtgcctaagtgtcattatatggtttggggccccaaactaccgtaaaaaccaataactcattattccttggaggcacaaagggtctaaggggattatccacacgagcgccctagggcacaagggggcctcggtcgcctattctcatgagtttccaaggacgtgaagagcctttggatgcttattctcaggagcgtcctacggcacgagggccccttagggcattagaccactgactattcccttcgagcacaagactcacgggggtttatactatttgtcttctgggctttctcggagcattacatgacccgacctctaagacctcgagttctttgtgactttacacgtcttagtgcgcaattattcgcttaggatgccttgatgtcaagtcttccggtatcaagatgcttctctagtcgggctaaggaaattcttcaaggcatagggctccggaagtgatggtccctacataatgggccctgtattagcttcttataacgggatccttgagtgcatctcgacaactgatggaagtttgtccttcctaaggccttgacacccctattcctacttttacaacaatagctgcataaaagcggtctctgtgtgtcttatcacaagggtttggcaaagcacatatagcttgggtatgtcgataccc

SEQ ID NO: 171440 - DNA, 824 bp, Zea Mays
ctattggttatcaattggcttcgacttgattagacttggaatcaacggacttactcgacttaggtgaccactataccctactaacggagcaatcggcttaagtcggcaatgacttgagacggtgcaacatgctcacgcttactcgacttagggtgaccactataccgtactgacggagcaatcggcttaagtcggcaatgacttaagacggtgcaacatgctcccgcttactcaacttagggtgaccactataccctactgacagagcaatcagcttaagtcggcaatgacttaagacggtgcaacatgctcacgcttactcgacttagggtgaccactataccctactaacggagcaatcggcttaagtcggcaatgacttaagatggtgcaacatgctcgcgcttactcgacttagggtgaccactataccctactaacggagcaatcggcctaagtcggcaatgacttaagacggtgcaacatgctcacaactactcgtcatagagcgacatctatgccttagcagccgatcaattggcgtaaatcaggaaaagactccaaaaccagcacgccgcacttacttccacgatcgttcataacgactgttgaattctaacaacagaaacaaaatgttagagttttcagcaccaagaacacattctagtaccctatccaccgagtatccgagcacactgatcacgcacacatataattcacgaatgcattcagtatcttctaaacacgtcgctatggcaaaacacctctatttggcaatgtctttcacaggggcaatcgaggaggaagggcgactcaaggcatca

SEQ ID NO: 171441 - DNA, 780 bp, Zea Mays
gtggtgctggtgctgtgactttcccctcttgtgggctggacccccagtgttgccctcctcgcgtcctagccacgaggctgatcaacacccgaagacttctgagactccatagtgtactgatgttgcatctccacacccaaggcctgctccaccatagtacaaaaatccaccaacggaagagcgcctagagcatgcctgatagaaggtttcaggccctaacggaactggctcgtcttatccaattcattgtaagccacatgaggaacaaagcggaccattttgttaaaacccacttcatactctgtgatagacttcttctcctgcttgtaagattgcaaatcgatcttcattttctccaggaaggtgaccgggtagaacgtcctctcaaactgcctgatgaaaacatcccaggataggactccttgtgaggaggagtgagctgcatgcatgcctctccaccaaatttgagcctcccccttcaacagctgtgtgccaaaacgaacacgatcaccatacacaatctcgaaaacatccatcttatcctccacataagtcagcgaatccgtcgcctcaaccggagtaccacagccatcaaaggtgtccagcttcatgcccatccactgcatcagagaaagaccattgatgggaaggggcacctcagccccgccacctggagcagcacccactgggacagcgcccccgggcactcctccacctccagcaccctgagcagcacccgcaggggcaacaggaatagcttgcctcagaatggccaactcc

SEQ ID NO: 171442 - DNA, 941 bp, Zea Mays
ctggcggatgaggatagtccatacaactatccttatcttaacttctacattgagggaagctggtacaaggtgaggtaccgtcggtttgctcacattcttggattcactgacaatgatatttctggggataagataaagattcatgatttccgccaacctactagagatgaagccagagaccttcatctctctgagtctacgaaattttgggagtccaccaacgtacacaagtattacggatacatcaactccctcaaccggatgaccctcattccaaaaagggggtaatcagatgaatattcttggcgagagcaaggttttgctctctttcatgaagcccaacagctcagagagtatcaacgtctttgatatgatctggcaggaaatcattcatgctgcctgctttccattgaagggatgtcttcatgctccttttatcatgaagatgattgaagttgtgacccagtttcgatatgataaaagtacaagacatcaatcatatacccctttctggattgaccccaacaatccagcagggcgcttaaggaaagccccttccagctcccgtgctcatacctctgctggtccgtctgctggtcctgctgctgctcctgccggtgcctcgcatccctcccctggccgcggatctcccacgccatgtggtcgtggccgtggtcgaggtcgtggccgagggatgggtgcccgcttggcccacgggattgcggcatttttctccatgtgccggaacatttctgcggatgttcatgagctggccaggcgtcagcgggagacggacgacaatcttcgtcgtcaagcttcttccatgggtatgccctttgcccctcgctcgcctgacgtgcatctccatcctcctcccccggagataaatgagtggcaccagcagacctatggggtgcccttcatgtcagcagaagacgaag

SEQ ID NO: 171443 - DNA, 516 bp, Zea Mays
gtggctttcctggggcacgtgattaatcagcagagtattgcggttgatcccaagaatgttgtggctgtggtggagtggaagagaccttctagtgtctctgaaatccggagtttcttggggcttgctgggtattatcggcgcttcgtaccaaatttttctagcattgctaagcctttgactaggctcttggagaagggtgttcccttcgtctagtccggcgattgtgaggtcagctatcagtcattgaagagcaagttggtggacgcccctatcctagctttgcctaagagcggtaagcgtttcacagtttatacggatgcttcgcgtattggtcttggttgtgtgctgatgcaggaaggcagagtgattgcttatggctcaaggcagttgaggaagcatgaggggaattatccaactcatgatctagaattggccgcagttgtttttgctcttaagtcgtggaggcattacctttatggcgagacttgtgacattttcaccgatcacaaaagtctc

SEQ ID NO: 171444 - DNA, 499 bp, Zea Mays
gatcctcaagaggatcaagtgctttctatgagttgattcttcaacactccaacatgatgaatcacccacaactgtttacaccatgaattggacccccccataaccttcatcgggtgacaaccaagctcccgattatcaccaagtcgtataggtgatacgattactaagagaaacaaacacaaactctcacttgatctggttaagcctaataagaatggtaggtgcacactttctactcttaatgcaccaatgaggccactcatctcgcgattatcaaatgtcaatcaacacattaggcaaaagttctttgtctcactccactatgattcttcaactgaacaaatgggcaagagacctcaaatggatgagatgaagggctatatgtagtccaagtcaaggaactagacattgtccctccacttagcttttacagtagcaccagatatgtcagatgcacatcaacctcctacaccggtcacatttgatgcatgttccaatg

SEQ ID NO: 171445 - DNA, 483 bp, Zea Mays
cgagttcaaatcggacagaggacaacctcgagcctagccttagccaaagatctcaggaaccatgaagacatgcacattaaatacaatgatttggatatatgctccatgtgacaccgcattcaacagaggacgatgggacaatggtccatctactttcaccgactacaatgacgcacacccgcaaataccaaacactactcccccacttcggccactgttttcgaactaccccgcatgggacatgcaaatgtctaggaacaacctcactcttaggacaaaactctacctcccctgaagacgaccccagccccaggagaaaactctgtcgcatctgagctcggcctcggccaactatcctagcagtagccaccaactcccttcgaatcccgcaggaggccactctgacaactgttctaatcactccctacatgactgcatgcctaggcgtaggtctgaccatggcctcaggagaaacctctacct

SEQ ID NO: 171446 - DNA, 274 bp, Zea Mays
tattcagcaaaaccacacatacccccactcataaccacacaaaaaccagactttaccatttatattgcccggtcggaccgctcctggaccgtttctcggccgtgcgggccccacatcctgtcaaagagtgcccccgccgactgcctaagcatggggtcctcgaccttgaagatctcacgttcaaagttttcgtcattttggtcgaagacctcgaaatgcctgcacccctcacgggacaaagcattcacggccccctcgcaggtgacgagggagg

SEQ ID NO: 171447 - DNA, 526 bp, Zea Mays
agaaaccgggatgggaacgtgaggtggaggattcttccaaaggacgaaggtgaggctacagtggagtagaacaggcggtggtggccagatctagaagaacgacgaatcacccccaaatcgtcagacgatagagagcaaagaggagaggttcaagagagtgtgagaggacgaaggtgaggctacagtggagtagaacaggcggtggcggccagatctagaagaacgaggaatcacccccaaatcgttagacgacagagagcaaagaggagaggttcaggagagcatgagaggacgaaggtgaggctacagtggagtagaaccggcggtggcggccagatctagaagaacgaggaatcgcctccaaatcgtcagacgacagagagcaaagaggagaggttcaagagagcgtgagaacgagcgctgacgaggcgaggcccagaagggagcgacacgttaggattgaaaacgacttaggcgtagctatgcctgagagctaattgaaccgtgtccaagccggtccatgtac

SEQ ID NO: 171448 - DNA, 998 bp, Zea Mays
gaagggtgcccctcgtaggtgagtccatccagctgtcttcgtcacctgagcgaagggggtagacatcgtcgcctttggggtccattgcttggccttcgcttcttcattggggtcgtggccctatacctgacacttcgatagtaggtaagtgtatcgagcgagagggatcgagcattctgtcttcgctccaacaacccccttctaattttatcaatcgaattgatcatccatttaggagcattcatagctaggagcaaataaaccgagatcacataaagtacaaacttcaccattaatgatctaccaacaaggttaatgagggatgccttccaattaggatgcttgtcgacaattttctcaatccaaggcatcgggtcactcctcttcaacttcttgttggatattggcagccctaaataggtacaagagaaggcagtcccatcacattgtaaaacattgtagctgtcatgcacagcctaccgctcacatccaatagggatggcacaacttttgtgtaggttggacaccaatcccgaggcctcaacaaaacaatcaggaataatcttggtgcaagtcaaatcatccttaaaaggtttgatgaagagcaccacatcatccgtgtaactagagattctagatttgacattgccactatccaactcttgcagcagacccatatctttagcctcactaaaaaactactcaagacatccatgattaagatgaaaagcattggagatagagggtctccttggcgtagcccccccggtgcctgatatgatcacttggaatcccatttaagatcacttgagtagaggaggagggtaacatgttgaaaacaaggttgcaccaagtatgctcgtgttagagatttggctaagaggctcataaataatttggattagagtccaacttgtattgggattagaagtttaatgggccacgacccattaacatgctctataaatatatgggaaggggctcgggttacgtcatcc

SEQ ID NO: 171449 - DNA, 920 bp, Zea Mays
aaaatttattactttcactaaaaatcacaaacttatttttactaaattctagggaaaataacaagcctagaaaaattagtttcacaattttagcatttttctacatttttctacatatttctaaagctctgctgtaaaagaaaaaggaaattgattaaatagaactgggccggattcagcccagcggcccaggtccagggaggaaaggcgcccgcgcgcccgcgccctggcggctttacgcagagaccctcgcgtctttgtctaacagcgaacgagccctttcactattttgaggagtcactgacacttcacaaaaagaccctccggtttctatctattcacgatttgaagtccacgacgccgttcatgcgtggccgtgctctggcgagcatctacgtcggccgattagggcaacggcagggttctccgagcaccggacacaaaattaacactaccccgaccattttccccaacccaattgcacaaatagtgagctatcaagctctgtccgcgtgaaccgaatgggtggcggacagttgatcgtgttcccggtgattggtgagctcgcagttcaaattggtggttcagcgagcatcgtaggcatgtgagaaagcttaaacgaggaagcaggggacggggactgaccgggaaagggctggcgacgtgagcttggtttcacggtggcggaagcttgaattgggggaaactccgaattcgagcagatgagtggatgattgtggccgattagcggtggttagctagctgactacctcacggagctagacacgggctcaatttataggaggcttcgacggtggcgcttaatttggccggacagagctggcggccggaggggaggaagaagcctggcgcgcgcagttacgtggccaacggcgtggcaacctttccgacgatgatgg

SEQ ID NO: 171450 - DNA, 372 bp, Zea Mays
gagtataagcccaaatgcaggtaaagctagctaatcaagagagcaccaacacctagtccccagatcttcacccccgaattcgacccaggaaaccccgcagaaaagccaaaagattccgaccacgggatgactcccgcgtcctattcctgtcctaccagcgagcttctacgaaaatttaaccagaaggcaggcaggcagtccccagcagcacaacccacttcaagaaccaacaagtcgcccacgcccacacagaaaaggcagagagaatgccataaagatccaacctttccgaggcggaacggcggcggcggcggcggcagcagcaggcgcggggactcacggagccggcgccaaacccgaggcaaatcgagg

SEQ ID NO: 171451 - DNA, 578 bp, Zea Mays
gcattacctaatcgaaacaaatgtcacattttcaccgatcacaagagtctgaggtatatattcactcaaccagatctcaacctccgtcagcgaagatggctggagctgatcaaggattatgacctggaaattcattatcaccccggaaaggccaacgtggtagcagacgccctcagtcaaaaaccattcggaataaagggggccaactttttagaagattggaagaaagaatcagctcaactaaatacatgtctgggaaacagcgacagtctcgaagtcagaccaatgctggaagacctcatatgcaaatctcaacgcctagacccagagacagaaaaacttgtggaaagggcccgcaaggaacaactcccggacctcaggacagatgaacaaggagccctttggttcaaaaatcgtctgtgtgtaccaaaaggggaagcacgagaggtcctgctcgaagaagctcacagctcagcctactccatccatctagggactaccaagatgtacctagacctcaaaaccagatactggtggagagggatgaagaaagaaatagctcagtatgtggcccggtg

SEQ ID NO: 171452 - DNA, 793 bp, Zea Mays
atttgtcacctaaatacacgaggctttagtttatatactaatgcatattaggctcgtcccatatttgtcaaatacggaataaatacgggttcaatccgaaaaaacgggatcccgcaaaaacagacggaataagccctctcccgtttccgttctgtttccatatttttccggaaatacggaaacagtcgggtcaaatatacaaaacggtacgggtcgggacgggattttatccgtccgttttcaactctagttgttggagagagtctaacagcttgcaggtctgttgggagatttttacatatttggcatcgtcttcaacgggcttcagagaattggactctcaaacacggcaattgcaatattgacatcataatccaccacgctttgaagaattggcatcgatcctgcttgatggctattagcagctgcgcttttccccttttgcccctaccacctttcttcctcctcctgtctccctctcatttgtttcagtttcttcagtgtctgtcgttttgtgtgtgttcttgggtgtaaacttcgtgtgcgttgcttccactcacaactccgatgatcaacaccggcaagtccgaacacctcttctccctcaacctgtctttgttgtgcttgttcaccatttgtgtacttctcttgcatgcttgcctccggtctgtgccgatctcccagggcgtggtcagctagaggactgatgccgttgctgcttgcgtcggctgccatgacctacccgcccaacctctagtgatggctgaagcaaaccgtggccggatgtgcctct

SEQ ID NO: 171453 - DNA, 704 bp, Zea Mays
gcaacgtggtcgatgccacgttcagtaaaggaattgaggagcttcttggggctagcctggtattaccgtcgatttgtgaaacactttggcattatcgctaagcccctgacagctttgctcaagaaaggatccgtgtttgtgtggactgctcatcatgcagaagcttttcaagctctgaaggatgctcttgtgtcagctccggttctagcactgccaaatttttcccagccgttttgcttagaaacggatgctagcaatttgggtgtgggtgcagtattaatgcaagcggggcatccggtcgcttatttgagtaaggcactgggaccaaaattgcaagggttgtccacgtacgagaaagagtatttggcgattttgattgcggttgatcattggcgtcattacttgcaactcaaggaatttcacatactcacagatcatcgtagcctcgcccagttggatgagcaaaggctgcacaccccatggcagaagaagatgttttccaggttgctgggccttcagtaccatattgtgtataaaaagggaactgacaacagtgccgctgatgctttgtctcgccatcctcaattgtcgcagtcatgttatgcagtgtcttcttgcacacctcagtggctcactgacattgtggactcttattctcaagatgttgcagctgcggatatgatatctaagctggctgtggacgc

SEQ ID NO: 171454 - DNA, 568 bp, Zea Mays
tccctccggtgtagtggccacttgagtgtaatatattcgcccagtcttcttaatattcttgcccgctgaattatttgccatgtttcccttgccttgatttgaactccctgagttctgctgattgttggatttgttctgcctcggatatgggtagtctttgataaaatatccagacttcccacaattgaagcagccagttgaggaactagggagggcggggaaacgagcaccaggggcactcggctgatttgttgaagtgggggcaatggcagcgcgaatgaagacaggttgtttaaatgggtaggagggtggacgtggtgaagaacgattttgattgaaagttcggattaccatccttggtcgcttttcaggcccctgattggacctgtcacttccgaatcccttcaattttccttggcatgtattcttagcttctactgccagcgctgtgctgacagccctgctgtaagtgagatcaaggcaggtggccatttttctttgaagccggtcgttgaggcctctcatgaagcaattcttctttttcaggtcagtatttacttgatcaatt

SEQ ID NO: 171455 - DNA, 344 bp, Zea Mays
caatgtctcaggcgatggacaggctacctacgacgatctactgcgacgtggtaactcttctaagtacatggcacggcaacaaagagcggcaaactccggcgaggacacctcaatcaatcgcacggcaagtggcacggtgaacagtccggtgatgaggctccaactcttccctgcattgagatctttcaccgccagccgttatccgcacaccagggcgcatgaatcgcgatgaccagcataaatcgtggagtaagttcaccggcggcgagatacactgaatctgaagatcttttcactactgtatcatcaggatcttcttcagtcgttctgatagagcatcttca

SEQ ID NO: 171456 - DNA, 765 bp, Zea Mays
gtttaataactgaacacgccttaccaacctccgtatcataatgtgacaacttctctatgaaacccaggcggtggcgggatggaagctgattcagcttgcttgatatcaaatccctgatgagcgggagttcgatgtgaattgtgtgctgtccagatgggtcaggacgaggtacatcaaaagtgtttgttctggtcttatgctgttgtaaattgaaaattattaagtaaatatatagtgtataactgaatattatgttgaaattctatgacaaaaaatatataaatagaatcttgccttaaattgtgcttcaacaggtggtacaactgtgtagcaggtctctgtggtgcttcggaactaaaaaaaggcgtgaaagatggagtaaaacttatacacacatatatagtggagtttgatttgtaaatataaatgacactgcttctatccatgtaccatatataaggcgaattaaattgataaatgtgattcatatgtttaattgacaatgcacaaaaagcatcataaatatgctaacaaactggcataaaggtatgtgaaagttatcatatgcagataaaaaaaatatgatagacacataaaaaaataccgaacaatgtccaaatggttcttgtcctttgtgtatcttgcccttgtcagctcttgtcagtgcttgaataatattcctatcaaaatatttgatgcgtggtgttccacgtttattctgaggtgccgctgagtcatgaagatgatccaaataatacagctgca

SEQ ID NO: 171457 - DNA, 335 bp, Zea Mays
gcgccaaggttgatctttgaaagcatagcagaggccgaagcaaccaggctggaagatgtcgatgtactcgaagaagagcggctgaacgtagtaattcaatcggcacggtaccagcagactctgagactctatcacgacaaggtcgtgcgacaacgatccttttcagtaggagatcttgtcctcgatcgaattctaacgggggagggacgacacaagttatcgcccttatgggaaggaccattcatagtagcagaagtcactcggccgagatcatatcgtctcactcaaatggatggcacagaaattgggaactcctggaatatagaacacctcag

SEQ ID NO: 171458 - DNA, 455 bp, Zea Mays
ccagttgatgctgcagctctcccaaatgtcttggatgcttcggttgtagagtcgctggcgcctgggtctgctgtaccagttgatgccgtaactctcccgagtgatctggctgctgctgttgattccaatttttgccctacagttttggggggtgctgatgtcaacattgcggatccctttggtccttccctaaatctgcatgggagggctgggcctttgctgaattgctggttgagtgccaagccgccatgtttcaaggtctactccagaaggcagaagacattgacggttgaaaatttggtgctgtcaccccaattgcaggatttcagaaatgatattattttgccaacggctcagctgttgcctaatcctcctctcagcgttaagcgcagaaagttgttgccgagcaatttcaggcctcggcgtagcagaagggttgcaaagtttccccctga

SEQ ID NO: 171459 - DNA, 942 bp, Zea Mays
ggtataatactaccttccatacgaccttgggttattccccttcaaaattttgtatggttatgaacctcctgtgatggttgttccctggttgagggaggagggagatagagatgttactgtctagttgcaagagggtcagacgacctctgcgttgatcaaagagaggttggctcaagctcaaaacagaatgaaacaaatggcagatcgaggtcgaactccaagggaattccaggtgggagaacttgtgcttctcaagttacaaccctatgcccagaagatagtggttaacaggccatacccaaagttatcttttaagttctttggtcctttcaatattgtggcaagaattggtgctgtggcttataaattggacctgccagaacatgctccaatacatcctattttcatgtgtcccagctgaaggcctttcatcccaagcataccctagtatttgctaagcttcccagggtggtagatttgtctggtccagggatttggcctgaagaaattgtggaagacgtttggtccagaaggggaatcatgaagtgccttaagtgctggtcaaatggtcgggtttgcttgtttcatcagcaacatgggaagatttctatgtggtcaagaacatgtttcctgttgccctcgccttgggacaagcaagttctgtaggagggagagatgtcatgaccagcgcagaggtcattgttgtgtagcagtagagctgagatctatgagaaacttctagaagtattaggcttaatccgggcctaagtatggcttaatctttgattgtaatccggtccatatgatggcttataaatacctgtactgatgaactagaaaggataacgaattgaataacagattagacaccatacttgttgtctctacggcctccgatgatttacctatggtagttcatcggatccagtctgctcacgcgct

SEQ ID NO: 171460 - DNA, 729 bp, Zea Mays
gtaggactaacaattatactggttcacccggaatgtccttactccaatcttcaacgatctgcactaccggcactagattgctcgtagtaggaggttacaagcggaacgagagagtgagaaacttccaagtctcttgtatacgtgtgtgttgtattgtgatgtggttgcgacctgtcgttgtccctatacctttttatggcacaagcctcaaggagagggccaattacaattgtcgtcccgtgcgatagtgtaccaagaaaaataaagatggtccccttgtttcctgttagtaacgccttttcccttgtcgtatgttggtcctgtaacctcctgcttgatgacgtgtcttgatcaaggcgtcctcataccatgtgcgcaggtatagtgcccgtgtcgttgaaggtccctggttctgacgggcacgtacccgagttggcaacatagtgtcgtccgtagtggtggtacacgtctccagaatggagtcttcgctcgtaccctccggttttgtgggcctcttataccacatagttcgtccgtagcaccttttcttgttttcgtatgaggggtgtgggagtctatgtctaatttagacgtaattaggtgaaacgaggacgacctccattctgtgtcacgctgtgatgactgttgcgacattggggacagagtatgaagtgatcagatctcgtaccatcgtccctcagacagtgtacgtttcatccaacccctttg

SEQ ID NO: 171461 - DNA, 516 bp, Zea Mays
cagtgttgcctgccgatctaatcttcgtggcgccgaggctgaactttgaaaacatagctgaggcagaagcaaccaggctagaagacattgatgtgctggaggaagaatgattgaacaaagtaatttagtcgggcaggtaccagtagaccttgaggcattaccatgacaaaattgtgcgacaccgatcctttgtagtaggagacttggtccttcgccgagttctaatgggggagggacgacacaagttgtcaccaccatgggaaggatcgttcatcgtagtagaggtcacacggccgggatcctatcggcttactcagatggacggcacaaaagtggggaactcgtggaacattgagcacctcagaaagttctacccttagcgatgcctcaaaagtctcgaaggaaaattgtactatataactagaaggtttcatcatcaataaagctttcatcttccaaaggcgttcaaactcttgattgacaactaacttagattgggctcgactcgaaatcagc

SEQ ID NO: 171462 - DNA, 1106 bp, Zea Mays
gttgggtgttgtggacatcataaaaatgaccattctttttttattatgcctcaaatatttaattatcaaggaaaggtcttatttgtcatgttgattagttctacagcaaagctaagaattatagagtagtacatttcttgctgtagagtattgatgatgctcacagaacaaaaataaaggcaactttattacgtgaggcaagaaaactggttccatatcgattccatttgtttctatccttgtttaccattttctaagagtctaataatgtccctgttacctttcctaattggcacatactatgaagaattgtcttgtgttttcagatttaaatacatgtggttacatactaatcctagagctcaaattgaaaactgagaaaagatgtatacgctaatgaagaaaggctatagtccaaatattagagatgctgcttcggatgctcaaaatggacagcaagtgaaagttaatatgggcagaaagaatacaactaaatatgggaagaaagaatacaactaaatatgggcagcaagtgaaagtaaatatgagttatactgatgtagttgattttgcagatttgtgaagtgaggatgggcatcggcagtgtggctgtgtactgagttatgtattgcataacacagtttccatgttttagtttcatattcagctctgtttcataacacagaaaagaaagcaacacatttctattttttgcaacacagttttgttttcattctgaacatagaagcagtcctcagtacataggaaattaagaacacaggaagcagaaagcagttgctgacattcagttttcactgagcgcgaagaaaggagaatggaggcgagagggaagacagccgccgggacctgctgctccatccccgcgctccgtgtccgctctccctgctgctccatccccgcgctccgttgcatttggactgaaatttagctgaatttggctcgttgcggacttgtagctgagatttagctgaatttggactgaaataactgctcaaatatctgaatgtaactgaatgtagctgaaaaggcaaaactgtgcacctatctgaatgtaactaaatgtagctgaaaaggcaaaactgtgc

SEQ ID NO: 171463 - DNA, 527 bp, Zea Mays
ggagcgggagggggaatagtggaagctggagtggtggaggtggtgggtatagcgaaagtagaggatggctcaggagcaacatgagtaggtgaagtgggaggtggagtagaaatagtggtggaaggtgtggagggagtaatggagcgaggtcgagatgcgaggcgacgaactctataggctatctgatcagaagggatctgcagctgtcctccctgctcagcctgctctactgctgctaccgctgcaagtgctgcatgagcggctctgtccatacgacgcttcttcctgccctcctgctgctcaaggtaaaccgtcttccccttgacctgcctgaatgggcgaagagggtcctcgtcgtctcctccccttgatgctgaaacattcttcgtccgcaccatcctgacctgactgttgcacgatagagtgaaaagctaagctgaggtagagagcagtcgataggatctcaaatgaagtgatagctacctagaaatttcacgagagagagaagatccaggcaggacaggaga

SEQ ID NO: 171464 - DNA, 430 bp, Zea Mays
agaaaatcaagagtccggtcgaggctgtgaagccgcaaacggaaagtgagtctcatcaaatacaacgtggcgggagatgatgatcttgcgagtggatagatcaagacaccggtagcccttctgagaaggaggataaccgagaaagacacgccgtggatcgaggggacaatttgtggggggtcgtggcactgaggtttggatagcacaggcgaccaaaaactcatctggcattttgcgataaaggagatggtagggaataccattatgtatggacgacgaaggccgccggtttgtgagaaacacggcggtggagagagcctcggcctaatagggaggaggcatagccgcatggatcagaagcgtccgaacgacattgttcagagtgcgaagcatccactcagctttgccgttttgggcggatgtgtagggg

SEQ ID NO: 171465 - DNA, 564 bp, Zea Mays
cgatggagcaagagaagacccaggtgccgtcgtccatcaatgtcaacctcctagaccccatattccctccagcagtgcgccgcgaccacaaacacgctagcctcgctgacagggacgtggcccaggcagtgcgccgcgatcaaccgccatagcgtgtgatggaccatgaccgacggcgacagtgcggatagggaaccgagcaggcgaaaccctaatagagagattacaggcgattgaatgaggaaggagagaggcacaagtgtaaataggtgccgaaccatgaccgacagcggcagtgctgagagggaaccgagcaagcgaaaccctagcagagagattgcagacaagtgaatgaggaacgagaggggcacaagtgtaaatagctcaaggaagcagtaggcttctcgcggacgtggccaccgaggacgactgacaagtttctccatggccatcgtagagggtggttgtgacggctactgcagagcgaaggggaggatggggacctcggtggaggacgcgacgtcagaaacgcacgaaactcggcgtgggctagcgggattctcg

SEQ ID NO: 171466 - DNA, 331 bp, Zea Mays
gatcctaagcaacaattactttggtatccaaattgtgtatttgggttggctacctaaggaaactataaaacaatccccagatttaagatatatatttactctatgcaggattgcaggcatatgtcccatcagtagtgtactccatacgcgttcccacgtcctggatgatgtatcctgtcagtcttcaaccgcgctatgacatgatctgctatgccacgtccctacgatggtgcgtgtcccaagtgttagtcaatatggctagtcacctaacttcttcagctcctcgatcaaggcacagtgcccgtccttcgccgctcctggcccatcggca

SEQ ID NO: 171467 - DNA, 736 bp, Zea Mays
gcttcaagttgctctgtcatgtcaactgaagatgaatgccatggtacagtaactgaagaagatacccagttcatcccccttcaccgccgacgaccgtagtgccgcgattcatgtcggtcgtcgtgattcgtgcgcagtgacttgtggataacggtgaacgagtaaagatcttggcgcccggatcaatttgggtccggccgcggctaggttcctcggaccacatgctcatcggccgatcgggataaacctcgccgctgtttgccgattaccgccgtgcgccacgtgctaaagcgttagaccacgtcgctgcgaatcgcgtctcgcatgcacggtgatcgccggtgtactgccacggtgaaagccactaacccgagcactagtgatctcccacctctccgaccgccgcgcgtctcaagcccaaattcatcggccaccgcttagcaatcctataaattgatggccgggtctgttgcaccatgtaatcacgaagccaacacactagctattgcctcaaatcgttcaccagagactgcgaatttcttacttcccccaatcctgtttctaccaccgcagagacaccctcaccgcggccagcttactctaggttaattcaagctccctgatcatttgttctagcatccttaagttctcctcaagctccttgacccctctgattgaactataccgccatggatcatcgggaacacgttgttcctttgattgtccacgctgtcac

SEQ ID NO: 171468 - DNA, 868 bp, Zea Mays
caccgacgctgaggcaccggagggtagtgatccacgacgaggcagctctgtggcaacgctacctcgctccagtgagaaattgcgcgcaacagagagcgggggaggggaattagaggccaaggaggttggttacctcgagggaagtctccgagacccttgaacggtggtgggggtacaaggtggctcgggtcgacggtggcagtgctccggctgcacgaaagaagtccattgagcgcgacagaggaaaccagagggggaggaagtgaatcaaggtgcgtcccgagtcgaggacgccgtggcaaagctcatcgaggaaccgggcacgacgaggcctcaacgccggtggtggaacgataacgcaacgacgacgatggcgctgtgagctgggtgggaacaaaagggacagggagagagtgaatgggaggcaagggtgtgctgggggttcagggtctccaccttgaggcccgagtgacgcacgtgggatggggtcgtgggggtgtgggtggcggtttgtccgcacggatcgtgtggcgtagccgtgggtgcggcagttgcggtgaaggagatgggaatgaccggtggggccagggcgtcagtgggtgagcgcgaatgagcgagcagcgcgcgctgatggggtgggcccatggcgcagagagcgggggtttccacgcgggtgaagggaacaacgacgataggccggtccatcgggcagggagcgggggagagaaggtgcgcaacgtgggcgagctgggcctactgggccaaaaggccgagcggaggggggttgcgggcatctttggtttttcctttttcttctgaatttcttatctcttttctttttattttctctattaaattcaaatccaat

SEQ ID NO: 171469 - DNA, 579 bp, Zea Mays
ttcttatcgcttacgaaagaagactcaaaactgcgtcatcaggcgttcataacgaaagttttgatgaacaaccccgggctattgattcttgatgaagggcacaacccaaggagcaacaaatcaaagttgagaaagttgctgatgaaggtgaagactgaattcaggatactcttgtctggcacggtctttcagaacaactttgaagagtacttcaacaccttgtctttggccagacctcgttttgtcaacgacgttatgaccacgctggttacagaatcagaaaagagaacacggagccgaaccggcaaacatcaagaagcactggcaaggcatgtttttgtggaaagagtggggcacaagatagagtctagcagcaaacatgacaggatggatggcatctccttgttaaatgagcttactcaaggattcatcgattcgttcgaaggtacaaaactgaacattcttccgggtatacgtgtttatacccttttcatgaaacccaccgacgtccaggaagaggtactggcgaaactgctgatgcccttgtcaggcaatgcgcgttaccctctcgagtatgag

SEQ ID NO: 171470 - DNA, 359 bp, Zea Mays
aatcttacacatttgaatcccaactacattcttcaagttgccatttttgtacacctgtgcgaggactttcttggaatccttccccactttgggctctggaggtatctttaccactgttagattggtatggatggaggacaacatcatcttgtcggtggtgccagtttggagcttcgccgggggaggaaaatggaataccttgacatccccctcaaggacaacatcaagggatggtgcctcgagtggttcaccatggagaatcacaacaaatccctccccctcgatcaggaaggcagcccgacgttcgcacgcccagctaggtagagtcccccacttatttagaggtagccgaagccaag

SEQ ID NO: 171471 - DNA, 331 bp, Zea Mays
cgtgtcagtaggatgctacatcccaaacatcatagtgaaggaaacaagtgtgcatcacacctatacccaacaccaagaatgaaattggtcttaatcctgaacatcagtgacccagacagaatgagcaaataaaagcatgattcctctaccccttaaagctccagtcggcagtgatgggctgatggcttcaccacgacaccaccccaccctaccatgtctagtcactatacatggtctacctgatgcatgattgtatcaacatgtatacatgtagtaatagcctaatgcttcttttccttctaacactggtcagagtatcattggaactgca

SEQ ID NO: 171472 - DNA, 358 bp, Zea Mays
cgtcccactccctcgccccgtaggtcgatgttgttgtgtgcatggcaaacatatgcaatgggaaggtcagccggggcgcgcaattcatgaggcataggctacgtggatctgttgtccatggtccccaccaccgattcatcgtctccttttttccctccctcctcctcatgcctccctcttgcctagacactgccacctcagtccacactccacacttgaccaccatcgttgctctgtgctaggacgctccgtcggaggacaagaacaacccgctggcagtgaggttgtcgcccccacctagagcatcaacaggtcgctcaccctctcctccctgcaccgctgccgagcctgccctgtg

SEQ ID NO: 171473 - DNA, 604 bp, Zea Mays
taccaccccgccaaccccggttctgctccctggtctgtctatgctcggtgggccccactggcaggcactcatcctcgcacgcctgtgtttccctgggatgctgtcgcgtgggccgttgttggcacggatccgcgctcggggcccaactgcttcatccagtggcgacccaatatgagaagtggacgcttgagcaccgagcggtggccccgcctgtcagtcgtcttcctcaacggattccgcggctagcgcactccgtgaacgaatcgcgagcttggcggcaaggccgtcctcaccggccacgaatccgggccattgtaactgccttggctcccctgcctataagaacacacgccctgcgccctccccttggccatctagctgcgaccttggctgccgtccgtgcctccaccagacgggaaaaaagcagggagagagagttgtgagtgccgtcacgccactaccggtgaatcggcacctcaccatcgctgggggctcggccgtggcactatgaggttcggtggcgggcatggaagcttgcggtggcgtcgctgggtggggaaagaccttgcggccaccagaattgctctctggtgtggcgtctccg

SEQ ID NO: 171474 - DNA, 360 bp, Zea Mays
tgctgtagcgcgttgctaaggtcgatggaatttgctactcaaatttgcagtcacagttcagggagttgatgtggcctcctgacgcttttggtgaacttgacttccatgttgtaatacgtactgatttccatctgaagctggagtggtgtagtagtactgaaaaagtcgtgtatatactagtgggggatgtcgtgtttggttaaggtggtgtttatgttctttgatatatataccaaagagttggtttcgggtccggggaatgttttttgggtcttgcaaggcaccttcgtctacctggcacttggaggcagcagaaaaatgtttgtggagttttggacattcagttgaactgcctgctgt

SEQ ID NO: 171475 - DNA, 451 bp, Zea Mays
ccccgccactgtgcccgagccgtcccctcatcctcagcctgcccgagccgtctcgtcaccgtttgctccatgcccgccatcatggaagctcgtcggagctcgccgtcccctccatccctctccccctcctgggcgcctataaaagggacagcagagcccgagccctccacaccagccccggccatctcctccacccctccccgagctcaattgagctagcagcgccgccgtgcttcctccaccgctccggtaagctcccctctccctccctggcgaccttccgttcaattaaatagtgccaagagttccgccacacttccacgttcacaacacgccacctcccccgagctatttcggccggaaaactcaccggcggcttcgccgccgcggacacccgccaccgtgccgcggaccggccgccctaggcccccgcaggcgaaattagccccgc

SEQ ID NO: 171476 - DNA, 456 bp, Zea Mays
gttcaatacagagttcaggcttatatatccaaatcaggcccaggcccatttaccacaactattacaacggcccatggccaatataaacctgtacatggcatactcccgccaaccagctagtcctcactcctcagtcgccaccgtcgttacactatttcgcttggggaggtaggatggatacgctgcatgaatagcctcaactatcgaccaatgcgccacaacatggacgcgatgctcctggtcaaggacgtgatcgagggtgtggtggccgtggtagagtcttccaaaagaccaaaacagctctagaggatggggcacagcaggaaggcgatctgacagacctcaggttacatgtcaggtttgtgataggataggtcattcagccttggactgctagtacagattcgatgaagattactcctccaactccaattttgagggataactggagacaac

SEQ ID NO: 171477 - DNA, 441 bp, Zea Mays
cccacctctcgcgcccgaggagcacctcacagaggtgaacgtacattggatgacatcctcgacgcccagtgcccgtaccacaaggacatgcgccacacccttcgaaactgcagagacttcaagcactccgttgggaacagccgacccttccaacctctaccacctcccccacctcgaggaggacccagagaacctcgacagcctcaacaacaggaagggggaggaggcggagcattcccgcgtgtcgatggagaagtcaacatcatcttcggtggacatgggtcgcaagaaagcaagaggcaacagaatctcaacgaccgtcagatactggtggcggccacaggtcctcccgccccgtatcgatggtctgaacacccgatcaccttcactcgggcagatcagtggctcaacttcgatcacccgggcaagtacccgctcctc

SEQ ID NO: 171478 - DNA, 675 bp, Zea Mays
cagcatcatatggcaatattgtagatggtatgttgctttacaactttgatgcagattttgagttgagttgtcattcaaaattaagagaaaaccatgcttcaaaaggctctgtcaggctgtctgacgaacactagccatggtacagtgacctaatgtggatcagaccgccagcgtcaaaaatctcaccgccgacgacctcttcgccggatttcgtgccgcgggcgtggggtgttcgctcaccatgaaaagatctagtcacggatgtgtatgaactattgtggcctcgctgttccctgcccttcgcaccggcgacgtggccgtatggccgtcatcggagttgccgtgcttcaccgcggttgtgccacgctccaagtttctcaccacgtcgtcactagccgcaccagctcaccgatagccgccgtagctcctcaaccggtgatcaccggaggaagcgccacggtgaaagccacccatcccttgctccagtgtccatgttccctccggccgccagcacgaccttgcaaaattggacaccaccgtcgatgggaactataaattgagcccccctcggtttcgccatgtattctaccagctattgcacctacctgtatccccaaacccccaccagtaagcactaattttgtattcttcccaaatccaccaagaacaccgtgc

SEQ ID NO: 171479 - DNA, 361 bp, Zea Mays
taaccggcggagttaagcacttcccacaagatggaaggaaagccatcgcgagaaaggaagtcggaactgaaacgagtgtctcctccactgatgggggtgggtgaattcatctgcggaagggaatcaaaggtaaagattatggtggaaggaaaaagaaaaagagagagcccggatggttttatagaaagtgggttagctcaagttttgaattcctctttgtgtttatgatgcatgcatgctgaaagtaacgttgcctctccaacaatagggtgctcttagggcatccttaaaaatataagtactggcccacgtggcctaattaatgagccacctatttctccctctatgcctaaggcctttc

SEQ ID NO: 171480 - DNA, 649 bp, Zea Mays
aaaggacagggattattttgtaagaggcgcggctgaagggggtatgagacgatcgagaccgtcagatctgacccagatggtctagattagatccccacttcaattaaaccggtatgcattccagtccacgagatcagagatcaacggtgggcacttaatcacgagcgattccatcccgagccgcaggatcacgatccaggggctgcgaattatccgcccaaccggtcatccccccattgatctaacccgctcaaacctaatcaaacggccataaggccatcttccacctggcaacacccaagcagcggcgcccacatccccgcagcggcaagaagcccgccggagatcgcccaccaccgcaccacatgccccaaccaccatttcgatcgtcgataaacgcagaggagaaccacgtgaacacatgagggggtacctttctggcagaaacggcaggaacactgtcattcacggcagggagcggacagcgtcgagggaagaggcccagtgagcgatttggtgagccggtgtacaacttcgtgcaggtgttgccacaacgagcttcaacatgccccggaaacaaaccaggaccacacaaggctctgtaaatagcgatgaaggccaaggatagcggcagcggcgtcctcttctc

SEQ ID NO: 171481 - DNA, 434 bp, Zea Mays
cttttatgtgactatagtttttgccgctaatttttgacacaaaatgcgtggtgaatgttagaaccctagcaggagcaccgaggtgagggaagtttaaagtctagggcacacatgtacactagagtagggaatcatgttgagagggtggtagaatgaggttagcactggctccctctccatgaggatagaagaggggacgatagagcaatagtagggttggtggcatcgcgaagctcaaagggctaccgacaggacatcgacatcaggacgaggacggtgggaggtctgtagtgccatgatgttatggctttgtcaattgtcgtcttgcactcaaggttgcggtggccgaagccgtgacaaatgctataattaacaggatcacaatagtcacacacttggtagtcaaagatccgcatcagttccttctatatcat

SEQ ID NO: 171482 - DNA, 636 bp, Zea Mays
ggagaaatggttaagaaaaactaattaacctgcttcaacccatgtttcgagttacaatgtctaaaatggttggctaagccatatacggcattagccaactcatgttaagtaagagtcgatggcgtaagagattgcgatatatatacatgtgttgtctcggactgcgttaataataggcaagccgacgtgtatgtcgtatggcgggctatgccatccctttggttaattgactagttagatggctttggttaagctcgtagttacgatgaattacttgttgtagtctaaatgcgtatggttatgatcgcgggtaaaaagtagtagtgctcatgtgatgtctaatttaaaacgcaaattgttgagtgatcatcgtgaagaatgcattgttaattggttatagtaattttagtgcactaactgacttgaataaaaatttgaaagttgacttgttggttctaattgattgtcttaactcgaataaatagtaaagcgttagagtaattcaagtctctcgaacgcggcgattcttgaattatagaggagccgaaatttattgattgctgttttggactgcacgcacagttttagttgtgctgtatgtttgatgaactaaattgtgttttctgtagatatgtg

SEQ ID NO: 171483 - DNA, 472 bp, Zea Mays
aaaaaaagggttttggtgacatttggagtgattgggttatgaaaactgtcagaggtggtaaagtggctatcaggacaaatgatttaattggtccttattttgcaactcataaaggtgttcgccagggtgatcctttttcacccctgttgtttaatctggtggcagatggtttggctagcatcattcatcaagctcaggaaaaaagtctggtttgtggtttgattcctcacatcattccaaatggctgttgttgtttacaatatgctgatgatactattttcatgattcaagattgtttagaaggagcaagaaatcttaaattcattctttgtctttttgaacatatgtctgggctgaaaatcaattttcacaaaagcgaaattttctgtttgggtgaggctaaagaatatactgatttatatgctgacattttcacttgtcctattggtagccttccaatgaaataccttgg

SEQ ID NO: 171484 - DNA, 563 bp, Zea Mays
cctggacctgctgcatggaaggcactggaccctgtgcctagcgagcggacctccgggacagatcccagacccttccaaatgtggttcgggcagttcaccatcgggtcccagatcctaggggcagaaaatacctgggccctgccctggaaggtgtccggggcttgcaccgcgcccccccccgccaaggcggaaacccgctactaccacatggctagtggcccatgacgtgagccaacggaaggagtctgacgttgggccactggagtcgcgcagccactgcatttattgcagtagggacgcgacgcctgcgctaagccaacgaaagatgtgccccctcggcatttaatgcgtccagtcctctctgctggcagacggtgtcagacggcgcgcctgtccaatctatcatcaaacagcgcgcctgtgccatgcggcggactgtgctcgttgtcccttccgcaagaaagcttccccagcacgccaaggacacgcagatctccagcgtcagggcgtgggaagattgccctggcagcgaacattagaagcttcaagtattatatatacat

SEQ ID NO: 171485 - DNA, 900 bp, Zea Mays
acggtgataatccacgcctttggatttcccgttgcgagaaatattttgatatgtactcggtggagttggagtcctgggttaaggttgctactatgcacctatccccgccagtggcttgttggtttcagtctgttgagatgcagtatcagtatgtgagttggccattattttgtgaactattacatgggcgttatggccgtgaccaacatcaatcgctgttgcggttgttgtttcgcattcgtcaggatggaacagttgcagagtatattgaaaaattttctacgttggtagatcagttatcttcctatgaacgtgtctcagatccattgtattttgctacacgttttgtggaaggcttacgacctgatattcgtgctattgtacttattcaaagacctgccgacctggatactgcgtgttccttggctcttttgcaggaagaggtgtccgagccgctgaaacgatgggagttttcgaagtcggattatggtgctcggccaagttaccggggtgttcctgcggtttctgatagggtggtgccgtcacatattcctgagatcaagtcggcaccagccttgcatcagtcggctgaggataaattcaaggctcttcgggcgtatcggcgggcaaaaggattatgtgaccggtgcgctgagaagtggtccaagggtcatacctgttccacaacagtccatctgcacgccatgcaagaggttctggagctcttttcagtcaaggacatacctgatggtgatctagctgctgaaatcgttgaagagtccacttgtttggctctgtcatctgaagctctgaaagggggtatggtgaaacgtgctttacaattgtgtggtgtgatgcagcacaataatattactattctagttgattctggcagcacca

SEQ ID NO: 171486 - DNA, 567 bp, Zea Mays
cccagatctaatcctatccgctggagctaaaaccaacggcctacgtgcatcatccccactcggcgctcggccctggcagcatacagtaccggcgcggcggcggccatggccgggacactgagcctcgacgcccgacaaccccgaactaccaacgcttggatgatcgatgctacacgcgtggtgatttgatagggaaggacataccagcgaatcgtggcgcgagaacccccacccacggtgaagtgtgaaccgcggcaaacacttcaacgccggtgcaaaattcagccacccccgaggaccgcttctttgctctagtgccacggacttgctccttgcgcctccaccagtccttccgagccactatcgcagacacacagctccaattgccacgatgcctcgcgccggcgcaatttcacatgacggtggggcgacggaccataagacagtggcgaaatattccgccaacgagcctatatatgagggcgagactcggactgcgggcgtcaacaactcccaacaaccaaccaagcgcgacctacggccactgacgatctcggcgctcggttc

SEQ ID NO: 171487 - DNA, 933 bp, Zea Mays
cggagtgcagtgaggaatattatagcatgttacgatctttagcctttgttcttggaagaagcaaggctcttccctatccagtttgcaaggcaaatccggcgtggggatttctttatccgcatcttaactttcgattaggtcgggactctaggcacctgacttacctaagtgtatgtatgctaatgacgagacacacatgcatgaactagacccacaatgcatggcctgagtttagcatacagatatacaaacagacgccagctaacttatctgtgatgcaagggctgatttcgaatacatgtatataccgacccatgatggctaactgatttacaatgcatcatggcattagatgtggcagttgctagctttgtgcagaagacgctaactagctatcaaaacccacgacgaatatgcatggactggataagcagcatgcaaatttatatttagacataagaatgacacgggcatagcatttggcataggatttggagttcctcctgtgcatctcacggcaggtgcccttgttgatttgaacacaggcgtggagtacagcgaggaatatttccggcatgttgatcttagctctcgttcttgggaacaagactcttccctatccggcttgtatgacaagtccggcgtggggccttgagacatctcacagcgacttcctcgagggagcgaagccacaaatgaggccttgatcatggaggtgatggtggacatagctcttgttcataagaacaatgctcttccctgtctggtttgcaaggcaaatccggcgtggggccttgatcatggagatgttgataaagatttgcttgctgccgagcgccgtggagccacgaagatgaagagaggaaggggatcaagagagcgccatgctgtttttttttctcaccttcacaggaactccgacgtgcaacgacg

SEQ ID NO: 171488 - DNA, 607 bp, Zea Mays
ctccgcggcggtgaagttgccggagttgaggctggcgcaagctagggtggctctggggttgccggagttgggtagaggggaagagggcgccacggcgaactcaatggcggggaagaggccatgaatccacgggcagagaggggagaacggcggtgagagagtctcgggcggggcggagtaactctggtgagcgattctagccacggggaggggacttaaggcatgctaaggccttggctggcttcagtggagacagggtgacccatggacctactccggtgaactagactggtctaaatcggcccggccaccgcacgagcacggtggaccgccgcggccgagcatcgacgaaggtgaaattggccgaacacagggcgcaataggggaaattgggcacggggacgggtgtctcacctcggggcggagctcggggaggcttggagcggtctccggcgagctggatggccgggaacgcgggcgcgggtctccggcggtggctggtggcgtgggcagagcgcaagagagggtgaagtcgagagaaatgaggcgaggggtgtgcgcggggcactagcggggctctaagaagggagctgggcgcgtgggtggg

SEQ ID NO: 171489 - DNA, 547 bp, Zea Mays
gccttcgagtcgctcaaatgatacttgacatagttgacaatgttggtgagcccagacgtgaaggccacactcttcctctatgtagtagcttcacacaacaccattagcgcgaccatcattcaagaaaaggaagttgacattgaagcacaacaattccctgtccaattcatctctaaagtcctcatcgaatcaaagttcaacatgttggagatggaaaaatagcacaagcaatcgtaatggactctcgcaagcttcatcactactttgaggcaaacaaaataatggtcctcatgggccaaagtctgaatgacatattaaacaatcctgaggcctccacaagaatcaacaaatgggccatggaattgttagagtacatcataaacttcaaaccagaattgcaataaagtctcaactcctcgttaacttcattgtaaactagataggaccaaaaagcctccacatccagcacccaaaacaatatggacagtccactacgacgatgcatagggatactttggagcagacaccaccgaagtcctcaccttgc

SEQ ID NO: 171490 - DNA, 1197 bp, Zea Mays
gccgacactaggagcacccctatgattgatgagagaacgttcattcaagcgtgcatgtattgtagaacatgaataattaaatgttgaagaaaatgcattgaatcatgacccctaacaacattagttatgaatgagtagcaggaaaatgagttgactaacctcctttgacttaagcatgcttatcttcttaccacgaccttagcacttacacttacccctctttcacagatgacttcaccacccccactgatggaggagacacccgcttcagctttgactacctttcttgagagggctttccctctatcttgtgggaggtgctctactccgctggataccccacaccccctatgtacatggtgaagttgtacgaggagcatcaggtgccacattgtagggtttggctaaccctggagtcttaccctctacagcctgggtggcgttgacttgattccgaaactatagggttcagggcggacgacaccactgaggtcgcaacactaaaagctttgacgaccttctacggataccatccactggagatgatgatgcacccacttggactcttccccgccgagaagagggatgacctgatatggtgtacaagagtgagccacgtaaaggatttgtgggccatgcatcccgaccaggttgggagaatcaccgtccagtgcatgagtgcactgtaccacctgcaggccttgcaaagcgacgccatgacacacctcactgggctcgctcaaactgcaaagatcaccctcgacgatagggagcacttcgtggttgacctttctttagaattggtggagaaggatctataggtggaacaaatgagcaaccgcatccaagcattggagcagtaggtggaaacccgggacaacaccattgagatcctagaaaactagctccatgatgtgcaagaggagcttgcggaggccaaggctcacctagaaatgcatcaccaagaaatgaacgctaatgaggcagacaatgaggaggagcaggatcccgaggaaatagagctagcttccagtccaaacacgacctactccggagtgtcccctacacctgcggccagtgttgcctctaccaataagggttagacaggttagaattaaacatgttaggagaaagggaagaccacgtaagcttagcttttggtaccaacttttggactaggctttagggtggatctcc

SEQ ID NO: 171491 - DNA, 428 bp, Zea Mays
cactagattgggtagaggaatgcaatactctgagccaaccagagtcaggttctgatgactggagagatgatcatcaggtacataaaaaataaggaggaaccagatgacaaaaatgcagcagaacgcattgcaaggaagtcagctcattatactctcattggggaaacactatacagaaggggcgcattaggagtcctcatgaaatgcattctctcagctacagggaagcagctgctagaagaggtccatgctgggcaatgcgggatacacgcagcatccaggaccctggttgggaaggtcttcaggtcgggtttctactggccaacagcaaagagtgatgcagccgagttagtccagaggtgcgaagcctgccagtacttgtcaaaacaacaacatctaccagcacagcaactgcaaaccatacctat

SEQ ID NO: 171492 - DNA, 485 bp, Zea Mays
ttccatagcttggaggttgggccgctgctcgcctcgccgagccactgcttcaccagcttggggattgggccatcgcacgcctcaccgactcgttgcttcaccgaatcagggggctgcaccattgtgcatcccgctatctcgttgcttcgtcagatcgagggctgggttgttcctcgccttgccaactcatcactacttcatcgcttcatcacctcgagggctgggttgttccccaccttgccggctcatcactagttcacttcttcgttacctcaagggctgggcgctgcccacctcgccgacccgctgcttcaacagctcgggggtcatcacccacctcaccgactcgctgcttcaccggctcgagggctacactactatatacctcgtcgactcgctacttcactggctcaagggctgcaccgctgtgcgcatcaccgactcgctgcttcgacagcttaggggctgcacgactgcccgcctcg

SEQ ID NO: 171493 - DNA, 558 bp, Zea Mays
ggaaaatgcaaattttagatttgaccaaattacaaagttttagttcatcaaataactaacaaatcatagtaagagagtttggccatttggtttctttaaaattcccaaattagcccttgaaccatgatcccttggagaaattcagatttctgaattctgaatttcagacccctttccaaggatcaactgcgttctctgtttttcaaaactcaaaaccaggagatccaaatatcaaagttgtgccaaatacccttgaacacgccctagaaaagtttgaactcaaaccaaattcatttgacacagttttggtgcagtttgacctcgggaccagacattctgacactggcacattggtgacgctacaactccctgtccctagcctgaaaccacgtgacgtccatacacaaaagacaaagcaaggtcaggtgaacaaatccttcacagtgatcttgcccaaattcgcgaagatttgcacccaatcagcgctagaacttgggcagaggcaacagttccacgtgttcgaccgtggctgacacctccggttcacgcccgttcgcg

SEQ ID NO: 171494 - DNA, 321 bp, Zea Mays
tgtccctggcaaactttgatcagactcttgaagatatggttccagaagacctgttatcagagccagcggatgatggtgtgatggaggtttgtgctgatgtgctcaacaccgggttggggtcatcccgggcagcgtcccgcgcctcatcgaccttagagcacggtcttgagggtcaggaaactgacttggatcgtcttgctcccatggaagtaattgagggaccctcagccttagaggcggctattgcagagaacttggtcctcaaggatggtgctgacacctacccagcccccgaggatgttgccggggatgattcggctc

SEQ ID NO: 171495 - DNA, 761 bp, Zea Mays
gtgcttgttgttgcgtctccaacacagcaagtctgtcgacgatctgggacaatcgtcgatccagcctctcgtaagtcctgccaaggtccatgttaataaaggcatcatgcactgacttgtggaccttctcctccatttgctccttcaggagcttgttgtttgcctcaagatcttggcagctaacacattcatcgaagtctgtagggatccttgcttcttcgtcgtcgtctgccatcgaaacacaaaaacagggaacaaacggtgaaggttatccctaataatctcactacacgctcctctcgggtggaacacaggaacacgctctaatgtatcttaccaaggtcttacaagtgtctgacgaaatacaagcaaagaatggtacaatcggaggctggtccgtgatacttaccaagaggtagtgaaaccgcgattgcaaggtcaaatctgtattggtcagaagatatagtatgtggagctgtaggacaggcacaatatgtatgtgaatgtggaacaaaatcgagtgcagattagcgaagttcaataagtgtccaaagcacaagtcacaattgctggctaagatgtgtcctatcgaagcacaacaagataaaagtaacaaaatagcagaatggcagttctgtaaatagcgcagatttttcagcactagtagaaatcaaaggcgcgtttccaaaggagtaccagcaaacgagctcgacatattctgaatttttttatcactgatccaaaatcacaattgatggaag

SEQ ID NO: 171496 - DNA, 560 bp, Zea Mays
ggattgctgcgtagctgccgcccaaagcggagttggcattgctgcttgaagagcccccacgacaaggttcatcgtgctgaagcttggtgtaccatgttcgggcaatccctatcatgtgcgctgaccttcaaagaattgttcacatcgattgagccattggagggagtcttccttgtcatcaaataaggcaaatttgaggcgatggaagtgaggaactcctgcagttgaaggatgggggtgacactgatatatggttggggaggtggtggataatatggaatgggtgaaggtgaatgtggcatgggtagatgatggattgggaactgggtgctgatggctggtggcatgatggaggtgtaggcagcgacaaatgatgaggagatgggtggtgggatgggcacatcggttggcatcgaggtggggggtatgcctccataccctggcaagccataggagcagcttgccggaagggacgatgtcgatgatgcaggcggagtctccactgctgcaatgggtgaggacatggaggacatctgcgttgggaaagccccaagttggcg

SEQ ID NO: 171497 - DNA, 1579 bp, Zea Mays
gtcccttccccctcggtcggggaggcagccagatgtccgtactccaagctaggtagaatcttcgaccccttcggagataacagaggcaaaagtgttgcttactgaggtttgcttgttgaaagacagaggtttgactgctgaagctgtggtcgctgatttcgcctttaagaatattcagcctttgaagcacacggtgtacccaacttatccgtacaatggtatcaatgactctacccgggtcgcaaacaagagaatccccactgaagatctggtgagtcgactggatatgattctgaggggcaaagtgtcaaatgttggtgctcctgttgcctattctgcctggaatctaccacctcataggtcattttctgaatttgtgtccaaccctcctgctagtgatggtagtctgggtcttagagtgcgaccctctcccgaggacattgaggctctgattgcccctcttcggaatcttcccaatgatgagaagcaaactcattttgagatgccagctagcacagatgatgcatagataaatgatgtgcttagtatgctagctggggaatcttctgactcgacccatgctgagccgatggctatcacggctggacaagaacttggcaaagcagtggagactcggaagcctgaaggtgctcacccaaagtgtccccaccgagttagccgcccgactgcacctgttgaggaaaagaagaagaggcggcttcggtggctgtcatgattggaccagggtgtaggtccttctgctctggctcgtgatgaagtgccagcagaggtccttcctgaggttgatgccaagggttgtgaccgtgcaccgactgatgtctgtatatttgatgaagatgatgatgaagaagaagaagaagtcccgttgatccgtaagaacagtcggcattacagaggtagtgagggggggtgatatttcttctctagctctgtcggctcttgtcagtcttcagggattatcaatatcggatttggatcaggcccttgaggaggtcgtccctgaggatatgctgtcagagccaactgccgatgacgtgatggttgtttgttcaaaaattccagacgttggattggaggtatcccgagcagtgtctcgtgcatcgtcaactttggaaggcagtcttcaatgccaagacgttggttcgagttgcccgactcccatggaggtgacaggggagccctcagccttagaggtgactactgcagaaagcccagcccccgagggtggttgtggcagttacccagcccccgaaggtgttgccggtagtgatccagcattggtgggtagcgcaagctgcaacccagcccccgagggtgttcaggtgagctctccttcccacacctccatggacgtccatgttgggtcatctccacctcgatccgatggggtgacggcgatgcatgcttccacggctttgaacaaacaagtcgccttggaggtcagtgagctagatgcgagaagtctattatctgctggcggggctgggctcgcctctgacaacgttcttcaaattgttcatgttgatctttctccgtcaagccatgacatagctccccc

SEQ ID NO: 171498 - DNA, 762 bp, Zea Mays
gatagcttcagctttcacggcccagcccctcgagcctagtatatgtgtctggattctagaaacatgttgttcattgtgcgtgcttcggatgtttcccttatgtcctattattgcaggttttgtattgggatctgaggatgtcccatagacacttgatcatataggggaggacctagaatgaatgacgagggaggcacccaatggcatgagggactggttgacacaatagatcttgaaggttgcggcttcggttcctaatgttggatatattgaggggtatatcgtgaataatttgacgatgtgttgaatactttattcgactgagctatttgggtaacggctgcaaattccttttgattatgcatatttatgtgataggtcttcgtagtgtggcctttgttttccccacaaaatacacagtacaattttcttggttatgagctgaaccttcctccaaagcttcggcctcctctccctcctcttggagctgacgcacgaaagttgctttatgaggattggtgatgcgttcctgattcttatggatgactctgttgccctagagcttgattagatttgtcatcattctaacctggattatggatgcttcgaatatgccttggatgaaatcttcctccaaagcccatggcgactttcatatatctatgtttgctctgatgtattcatctaatttgtagcagcttttccaacaaatgaggatgcttccttgcaaaatattgtgctactgggcctgcacgaagtccc

SEQ ID NO: 171499 - DNA, 1211 bp, Zea Mays
tgctgatagatgacaaagttgtaatgcaaaaattggaaaaaaaaatggctctgaagtcgctctgtcaggcggactgaataccaaccaccatggtacagtaacgtttggggatcagaccgccagcgcggctgtcctcaccgccgacggatccctccgccgcgattcgtgtcgccggtgtttggattcgtgcaccggacttgtggataacctctcggggtaaaagatcctcactgtcgtcaagctggaagctaccccggtcggccgcggtgctcctcccctggctcaccgctcgcgggtaaagtgctcaccgtcgtcgtgccatcgccgttggccaccgcgtgtcctaaccgtgccatcgcatcgccgtgactccctaccactgtcttatcaacgccggtgaggttgccacagcgttagccacgaattcaccgcgcccgccttcttcttcatttccggccgccgcgcgtcctccccaaattcaccggccaccatcgaagccttctataaattgagccctcgggcagttgcgctaggtcataccgaagccttagcacccactcccacccgtaatcgttcacccgagctctggaatttccatctccccccaaatcaagtttccgccaccatgaactagccttaccgcggccagtgcaattcaagccaactcacgccctttgatccctcaattgagtatcctcaggtacccgtgatgctccatgacccctttaattggcctataccgccatgaatcgcttggaacacgcgactcctttaagtttttccattgtcactgtgggcagagagttgtagagctccaattctgaaattgaatgaggggaaatgcctctctggggtagattttgggataaaccgaagactagcgccggtcttggtcccctccggccggtttagctcgccggagttaagcttcccgtgcggagcgccgtcgtggaccgtggtctgcaaaggaatagaagtctaagggccttaatgtaaaccgtcagcgactcactgaaacaatagaagaacctgtctccagatagataaaaccccgaggcccttttttgcaaagccgccagggcgcgggcgcgcgcgcgtgcgctttctcctttgcacgggccgcttgggccgaaaccagcccaatactattcagccttttcctttttctttttcagcagagctttggaaatctgttaaaaattgtagaaaaa

SEQ ID NO: 171500 - DNA, 554 bp, Zea Mays
ttcgcttattaaaattgtctgatttggaattgaagtgtccaaagggacatttttggcttcttcattgctctgaatctgagctttgggtgctattgttttttcgtggcgctggctgatggagccttcatcctcagtggtgaggcaatggacatcgcgctatcctgagacgaagtctctttcaatgttacaagtggtttggtggttcccatagattgttattgctctgagggggcttaggatttttatgcatagatagaagtcatgaatggctgcttcgagtttgtttatggatcctcttctcattatgtacaggtagaccatatcgactatgtcagcggtcacctattctgatctcgtattggggcttgtgccgaaggagagggggagccctatcttgctaagtgggaatgttcctttccctccaaagtcatacaatgtgttgtcggttggctgaacaaagttgtggttgatgcccatctgattgaatgcatgcagaaagacgatgtctggatgactcccattgtcgacgaggaccttgtgtagtaacaagccta

SEQ ID NO: 171501 - DNA, 1528 bp, Zea Mays
aaaaaagtgcccagccctaggagccatgcggtatggtctcttcgcgatgggcgttgttccagggatcagatctatgtagaattccacttctctttctagtggcattcctggcaactcttccgggaacacatccatgaattcttccactactgacatgctttctgttgctaaattaaacatcataggatcattggcgggtgactgagcctaacaagagaatgactttccttggtggtctgtgagaaggactgtcttgtttgcgcaactgatgatacctttgtgcttggtcaaccaatccattcctaagatcacatcaatcccttgggatggtaagacggttaagtctgccaagaacactaccccacttaaaagaattctgacttaggagcatttgagctgacatagaaggtctgaccctggggttcgggtgaccaagggaatctctagaggggtagaggggatgccatgcttttccacaaaactagtggctataaaagaatgggatgctcctgaatcgaaaagtacagtagcgggagtaaattcaacaaggaactcaccgagcactactcccggagcttgctgagcctcctgagcatcgacgtgatttactcgtgcccttccttgatactgggtcttgttctgctggctgatggaggagggcgccttgggggcgggtgctgaggtattcttggggccattcactgagttggagtaagcaggtcctgatggcttcagctggggacagctgttcttgaagtgattgggatctccgcagtgccaacacgcattcgctggtggttggttgcttgcaactgagggggcttgaaaggagctctgactctgctgactgaaccgtgacggagtgggtccagctggtctaatgaagcttggtcccttgggtggaaatccaaatgatcgagttttctggtgccggtcttgctgctgtgctcggaggacatggaatttcctcttgagatggcctttttcttcttcctttgccctttccacttgcatggctttgttcgagaggtgcgagaaactgaggaagtcttggctggctaggatggtcttgagttctggtctaagccccttcaggaagcgggccatcttcttgacttcggtgctgacgtcatccggcgcgtagcgggccaactctgtgaatttgtgcacgtactcactgacagatcttctgtcttgagtcagttcccggaattcatcttccttgagctgaacgatcccttggggcacatggtgctcccgaaaagccgtttcaaactctgcccaggtagcatctctgatggtaacattgaaggtatcccaccaggctaaagccattccggaaagttgatgagcagccagttgaacacgctaattttccgggcatccgatggcttccagcttcctcttaatcgtgcgcagccaatcgtcagcatcgaggggattgctagatccggcaaacgtgggaggcttgagcctcaggaaatctcccatcctgtcttgtggtcttccaccattcgggcgttgattt

SEQ ID NO: 171502 - DNA, 662 bp, Zea Mays
gtcggatttctcggccacgacgcccgcccacgcgcctagctccctacttagagccccgccagtgccctgcactcgcccctcgcctcatttcgcacaccctcgccctctctcgcgctctgccctcgccgctagccgccgctggagacccgcgctcacgttcccgaccgtccagctcgtcgaagaccacgcgaagcctccccgagctccgccccgaggtgagacatccgatcccatgcccaatttcctttatttgcgccctgtgttcatccaattttgccttcgccggtgctcaaccgcggcggtccgccgtgctcgcgtgatggccagccgatttagcccggtatagttcaccgaagtagttccctgtgtcacccctgtctctgctgaagccagcctaggccttagcgtgccttaagccccctccccgtgcccggaatcactcaccggagtttctccggcccgcccgagactctctcaccgccgttctcccctctctgcccgtggattcatggcctcttccccgccattgagttcgccgtggtgccctcttcccctctacccaactccgacgaccccggagccccctagctcgcgcttgcctcaactccggcgacctcaccgtcgtggagaggagcagtgccgcccgcagccgtctgtttctc

SEQ ID NO: 171503 - DNA, 1468 bp, Zea Mays
ctctccattcttaagttttacaatttgggtattacatcaacgggccatcgccaaggaataatgtagaagggccagcatcttgttccaggcatgataactgtcggagtcgacttttcttcttcttctcctcgataggtgcagctgggtggttcactctgcgtgaacgcttctggcgagcaccttcgggtttgtagatttccacatcctcaccgaactcttgtccagtcacaatggccatcgactcggcacgagtagagtcagatgattcctcgtccagcaggctaagtacgacatccatctcagcatcattggtactggatggcatctcgaaatgagtttgcctctcagcctcgggaagattccgaaggggagcaatcaaggcttcaatatcctcgagggagggtcgcactctatggcccgggctaccatctcgagtaggaggattggagacaaattcagagaagagattactctgaggcagattccacgtagaataagctaagggagcaccatcattcgaaaccctgcccctcaatatcatatccagaaggcttagcaagtcctcattgggaatctgcctgtttgtgtcctgggtggaatcattgatgccagtatacaagtaagcaggtaaactctgtccttcaaaggttgaatattcttgaagacaaagtcggcgaccacgacctcaacagtcagacccctatccttcaatgagcagatttcagcaagcagcactttggctttggctacctctgaataagtgggagactccacccagttaggcgtacgaacgtctggttgccttcctgatcgaggggggagggatttgccatgattctccatggtgaaccactcaaggcgccatcccttaatgctatcctttaggggatgtcgaggtattccactttcctctgccggagaagttctaaacttgcgccgatgagctgatgctgccctccaaccatgtcgggccgacagtgatagaggtacctctagagtccgaaatgggggagaattcgaagaaaagcctcgcacagatgtacaaaaatggaaacttgaagaatggagttagggtttaagtgtgtcagattcaaatcgtagaaattgaggagaccgtggaaaaaaggacagatgggaagagcaagttcgcggatgagaaatggcacgtaaacaacagattcgtgggtgtcctctgtcagaacagtgaacaagcgccagatccgccaagaacatagttcttttggcggtaaaaccccagtctcaacaaggtgaaaaagatcagattcagagatgatggatgtatgattaccagcaaacggaagctaactgttgggatcgatgggtgggatgaccggagcgacgacgctttgtctctttcgcttaggagccattgcaatctctcgggcggaacaagcgggctcgagaattcagaaagcgggaagcgacagaggaaaaagtgaagctagag

SEQ ID NO: 171504 - DNA, 402 bp, Zea Mays
cgtatatgatttccagagagatcggggcttaatctgaaaattccagggcacagttgtaattatttaacactgtgtgcgaacgacgggttgaatactggaaaccagggggtttcttttgtaaatctgctcggctgaaaaggtatgaagtatccagggccaccagatcgagtctggatggtcgagattagattcccatcaatccaaacgggtacgcaatgaaaggcgtcaaatccgaaatggacggcccagatcatattagggttcaactccaacccaaccgcccgaccctagatctatggtcccgattcgatcgcgcgacgagcaccgtccgatgaagcgatctacgaccacgttttaacacgccgaagggtaggctttacttctaatcctaaccgcccaaag

SEQ ID NO: 171505 - DNA, 714 bp, Zea Mays
ttcccgttgtgaccgaaccggtaagtgacccgagacgtccgatcgatgatcgacggttacggattaaaattcatgggatccgattctggacttggatgcgctacgtggatcaacgacaaccattaaatgaggccaaaggggtatgtcgatctaatcatagccgtccatcaaccgttcgacggctaacacgcgactttatccctagtcgaactcctgcggtgcttacgcctacgcggcagtgatcttcaccgaagacaggaatccaaggaccctaggccctaatctcagggcgcagagatgcacacgatgccgagactctagcaaaaccaaccagggccctattactaagagtaggaacatgggataacctcacccacacacttagcgactccacggtggcgccaatattttggtgagcaattcacgtgactaggacgatcacctacctataatacccagtgctatgcaacataggaagtcaggtgaaggatatgatgatttctcaccagcggtgatgtagtggtgaggtcgaatcgtgtggtggacgaatcctcgacagagatttgcttcatgagcaatctgccatgagtagggcgactccagcctcgagtagtcaccaaaccgactttaatggctctagacgatgaccttcaggcgctttctcaaagctgactttgtcgacaagctaggaatggcttacgatggattttgtcc

SEQ ID NO: 171506 - DNA, 733 bp, Zea Mays
gactctccatgcaaaagtcgcccaagggtgcagccggaataacaagcacgaaaaatcaaagtcttttccaaaagactccacgcaaaagtcgcctacgggtgcagccggagtaacatatacgaaaaatcgaagtcttctctaaagaactccgtacagaagcctacgggagcggcctaatcaacgaaagcgcgcagcttcatcacacaaaattatggttacatacttacagcgagggcatcacacattacattggctcaacctttaggatgatacccatctccctatagttgaacaacattatcctcaattcctcacccgcaaacagacttcgtagctccccctcacccacactcgccccagccggcgaggacaacaattcccgtttgccagtcccgtccacacgaagacgaccaccctccatttcaccacgatgacgcctatcacttcacaacaactcacccactctccatttcgccaccgcccttcgccgtctacgcccagcactcgcacccggaagatcctcagcacccatcacacgaggagaagtcttcgctgcagccacatccaacgctgcaaaataatccaagtcctcctccgaagactcctctgtccacacaatcgaactcccagaatcatcagactcaaaacacttagacacagaatcatcagaatcgtcttcagcaaccacagtcgaagccaccacaaaattagcattgttagtagtggttgcgtg

SEQ ID NO: 171507 - DNA, 526 bp, Zea Mays
gtcatattgagtttgtaagatccaccgtaacagcaggggatttggttgtgatgaagaagctgggctattttggggggaaatgatgatgaactgatccgttttgctaaggaagaagtagttccagagccaaaggaagatgaggttgttgtgtttaaaagcttcttcagggcagggcttcagttcccctatacgatatgataagggaggttttgaaaagatttgaaatatgtctccatcaactgacaccgaatgccattgttaggctcagcatttgcatatgggctctccgaagccagggtaaaagtgtgaatgccaaagggttctgccaagtgcacgagctgcactatcagacgaagactagagccgatggtctacataagaacttcgggtgctataattttgcataccggaaggataccaaggccccagtgattggctaccgtactaaatggccaactaggtggactagtgaatggttttacgtgaaggctgacgagaagaagagggagaagctcatgactatggt

SEQ ID NO: 171508 - DNA, 689 bp, Zea Mays
ccctcgccgcactccggcgagcccattccggccagatgacgccacggctggagctcccaagcgacagggacacaattagatccaccccgaccatttcccctccatcaatttcacctaggggacactgaatcaatcagttcacggtgaccgagcggatggacaagaggatgaacatgttccgatcaaacagcgacgaggatggccaaattgaggctgggtaaaggttcacgggttcaccagggtccatggacatactttggtttgggcagaacaagacccgaagagcgggtcgacggtgaggggggtcacagcggcgttttacaaggaaagggcgcgttccggcgatgggcttcggccaaactccaaattgccgcatccaggagcaataagagatcaaagactaactaaaacagggagtaatttggtaattactgaccagaggagcgctggccacggatgttccttctcggcggagctaagaacagaagagggagaaattgtgggcttcgtgggttttccggtgagctcgagtcaattgcttagttgcggaatgcggtgatgaagcagcgcccacaccctatttatagacggctggccggcgacggatgaggctcggggagctcgggatcgcgctggcgagcataccacgcggcggattccggtgacagcgcggtggtcgccgtttaacc

SEQ ID NO: 171509 - DNA, 488 bp, Zea Mays
caaaatcttcaccggcgacagggtgtgtttggaaactacatgggaaatggcatgagaattagtggtgtgagttgacattaatatgtgattgcaggtgcaccggtgttcagcactttgcgctactcttgattgtcctctcctacagttctggttctagataccacttgcataggttgtatcctaaagactatagttctgcattgatataaaaagcttgattacttgcttcggatgattcacacgatcacaaccaagacgacaccttacctagagattgtggtaacttccaattcacctgttctttttggattggtgctgaatttatttcttgcaaagtaagtttatttctcctagaacataagccatttaattttacctttttgcaaagaacaatctaaaacacacacctctgaatttactgaacaacagtctaaattgggtaccaaatttgaggcgccaaatctgaggcaccaaatttacattttcca

SEQ ID NO: 171510 - DNA, 677 bp, Zea Mays
tttaacatagattcacagattgttgttttttcagttttgacagcaaaatatcaacttaccaacaggtagcttgcacagatttacttgtacacagatttgaaacagcaacataccaacgggttcatacatccagttcaacataataatgttgtcagtttgattggtcgttctctgctatgaattggttgctgtcaggatttgaagtttgaactacattttcatccaactgacacaattattgggtgctactttgaactccattgtcaccaaaaaaagatagcagaccactcaggcttcggtctcatcagaagcagtagcactcagtagtattcttcctagccgatcgattgagcaaactaggttccctactaccctataatcaagcatcgcagtccacttgttgcatgttgttgaatagtcttatttttcttccttgattgctcttcattctgtataaattactaattacggatggatgagtattgactgcatggtctctattttctcgatgactaaatctattgcctttgcttttctaaacaaaattaagaacaactaatctagcagactgcttatatatttttctaagttgcttgaaaaaagtcgagattctatacaattgctccctttataatattccgtatcagaattccatgtctatgtttcttacctttggt

SEQ ID NO: 171511 - DNA, 1023 bp, Zea Mays
gctcaggcggcccaactctacagagaaacggggcgcgcccacgcccgcgatggcggctttgcagaagggtcctcggtgttctggctaatctaaaatgagcataagcactattttcgggagtcgctgacacttcgcagaaaggccctcgatcttctatctcttcacaggggaaggtcctcgacaacggcgcgcgttgtggagctccggcgagcaccaagaccggccaaacggaacaagggctggttccaagctttggccgaaaccgaatccatgccccaaccattgattcccctaagttaattgcacaaatggctacccaaatgtccctggccacggacgcagcggaagtaatcaatagaaccgtgtgttcccagtgatctacggcggtttagttcaaactaaagggccaaggagtttgaggagagcttagggatgttagaacaagactagagacaacatgatcggacctgatttgcactgaccacggcgaagtgttcttgcggcttgtttgaaccgatttggggaaattgtaaaattcgcgctcgttggggatcaactgagggtaattcttggtggcggggttcttgactaccctacggagctagtggcgcactcaatttataggcgcatcgagtgacggtgaagaattggccgaggggtgctggcggccggagaggggaggcgagctcagtacggggaaaagtggctttcaccgtggcagtggctccggtgatcgtcgggcatgcaaccggtgagtcacggcgatgtggtggcgaggtttggacacgcggcggacatagagacgacacaatggcggtgagcaaggggaggagtaccgcggctgaccggggtggcttccagctcgacggcgacgaagatctttctaccccaaagcgttatccggttaccagcgagcgtgaatcttaacggcggcggcgcgaatcttcgcgcaggaaggtcaccggcggtgaggtcgtcgtgctggcgatctgatctatagcagatcactgtaccatcggaggc

SEQ ID NO: 171512 - DNA, 692 bp, Zea Mays
gtagatgaagcatacagagcagaagcaggctatcctccattggtcctctcgagtgagagtatcgatcaaccatggcccaaggtactaagatggggagtttgtattccattaccatgcccaggagtaccaggtctagaccaccccttggccattcacttggacttgagaactactagtgcctctcgagcaaaggagttgaggtttgtaccacttgagtagtggttcctatagagaggggtcccaaggacatatagtttctatacagtgcagcatgaggattttcactctgttatgactcccaacgggatcacccttaggccacacatggtttaccagttagaggatatagtgtctactagaggagagcacatatgtccccacctcaactacctgcttgagttgacagatgttttaggacaatctagaatttatgttgatgcttaggctaaagagttctatgcttcattgtagagcccgaccttgagtacttttagtcatgttcataggcaggcttcacatactctacgcgactgtagtcagagagcatctcgagtttatagagtccaccactagacttcacagattgtctatatgccactatgaacccacttagacaccctcatggcacagagtcacctagtacaacacacattgcagtttacttctagacatcgtttgacgatggctctcga

SEQ ID NO: 171513 - DNA, 360 bp, Zea Mays
tctctcatcttcccctagattttatagttgcggcgatattttctttagatttttctggtgtgcactgaagtgcttaagtccgactgaaaccctttgtttagccccacttttttcactattccaaataagggtagctcaagcctttctaaacaaacttgttgcccaaccatcgctctttaggtttattgtgaaagtccaagacccaaaatgtatagaccacaagatatgcgactctgaagttggctatagatcactggaaaccaagttccgttctctgaattttacagaatcagccaatgttgcctccttgcatacctccctatttagctgcctggatcacccaatttcacttaataacag

SEQ ID NO: 171514 - DNA, 453 bp, Zea Mays
agacaactcacaacatcttttccacggctcagctaaaccaaacgcaccttgaagacgacggtagatagcaaaggtgaaggtcatatgggtctatgatgatggatcaggagcggtgaaagacgagcatcgaggcttgactaaagaactagagaagttgggtgattagctatggtagatggcacctagggacaccgacagatgtgaagacatgttggaacgaatcattctatggtgatgtcggggattggtgggatacatgtccagggtgtggaggacgcatatagagtgtgctacctgtggtggtttagtgattaagccttagaaccaactagcgatgatttcacaggtttggccttaaaaccacccaacgacggtttacaaatttggcctcaaaactcagggtgtggttctagagggaaccagagatgacatttgcatcgaggtgaagcaaat

SEQ ID NO: 171515 - DNA, 655 bp, Zea Mays
gttctttagtaaagttgaggccgcgaaggggtatcgggtcaccagagccgaccgatccagacccaagggcccagattagaattccagccactacgaaccggtaagaaacttaatccgtccgatgcaagatcgacgacccagatccaatgactgaagggttacgaccccggtctaatctcgtccctctatcctgtgatccatggtcccaaacgatccagctgaatcgcgacacagcaattgatcacagccgttcattttaatccaacggccacctgttgtcatcaacctcccgacggcgagccacggcgagcagagctctccgcgtgatggtggtgccgtcggagtacgccctaacgccgccccggtgagtttcctaccctaccgataaccgctacacatggagagagcaaaagcgaactggacaggggtcgccataccatagattttgcccccggattgtccaatttcgtcgaggcgcggctttcgtggcggcggtacctttctccctcacatacggtcatggtggcgctcggcgacggtgcttccgtctcggatgggatgaggagtaggggtcgcggtccgtgctttatagccagaggaacgcggatttcgaagaccagatcctgccggcaagttcggaatccgttgtggtggg

SEQ ID NO: 171516 - DNA, 401 bp, Zea Mays
gggggagtgttaagaattaattcaacggtgatctcatctttatgaaaagacacccgttcaggaaaaggtacaaccgttcgtcgccaggatgcatgaagcaaaggactccgggaaatagagatagttagtgattaggtgtctgttagaaaaggtgtctgttagtgaaaagttgtaactctttctctctctgtaatccacgaaggggtacaaagacaccccttcactgtgtataaatatgtactagatcaatggaaagggactacgagttctcattctctcttcacacaaccgtttacttttaacagcgacgaccgagccgccgggaactagctagcttgcccgtcgccgtcgtcgatctcggtcgatgcgcgcgttgtcatcacgtgggcgcgggggccgcg

SEQ ID NO: 171517 - DNA, 476 bp, Zea Mays
gggttttcctgggccagacgccatttctaaaaagcgcccagtcatcacccggcgattacttctaaaacactggcgtgccatgtcatcacccggttgttatttctaaaacgctggcgtgccatgtcatcacccggctgttatttctaaaacgctggcgtgccatgtcatcactcgaccgttatttcaaaagcggccgatgtggcccgttatcacttggctgttacttctaaaacgccaacgtcgccagcagtcactcggttgttattcctaaaacagtgacgtggctccagaggattcagctgttacctccaaaacgctaacatcgccagtaaccgctcggtcgttatttctaaaacaccgacatggcccgctatcactcggctatcacttctaaaagcctcaacatcgctgataatcactcggccgccactactaaagcgctggcatcgcgaagaaggcagtctgaagcgcgactc

SEQ ID NO: 171518 - DNA, 283 bp, Zea Mays
gtaccctgagacatttcttcagctgagatacatgaaagacatcatgaacatccgcgagatgatctggtaactccaattaatatgccacctctcccactcgctttaagattaagaagggtccaataaagcgagggacaactttcctttgactttaaaatcttctcatacccctgagtggtgacactttcaaatagacataatcaccctccttaaactctagcagtcttctccgggtatcagcatagcttttctgccttgactgcagttctcaaattctaattta

SEQ ID NO: 171519 - DNA, 929 bp, Zea Mays
cgcgaaagtgcgtcgacagcgagatcgagccagacgtgcgagcatgacttctgaccaaattgaaagtagacgagcccgtgctagagaacggtatgcgaatatgacgccagaacaaaggagacgtaaaagagaccaaccgttaggcgatacaccacctcatggcgaaaccaaacaatggtaaatcttatcagattacacttgtatacaaggttcaagcataacttacattcaattgatttaataataatttgacttggtattattactagatgttagtgcaaccaacaatagttgcttacttgaaccttcacactttgctccaacatatctcgtccaagcaaacataactggtatgccatattatatgttacttaccattcctttcttaatgattcccataccaattaaaatgattattaatgcatcagtagaccgtgcagaagcatgtcgacaacaatatcgagtaagacgtgtgagtatgacagctgaacaactcaagaatacacgtgcacgcgctcgagagtgatatgccagaagaagagatcaacgtaaccttgataatcttgagggagtaaacattacctatcagaattcggtcgtggcctcagatgattttggtagcatcgatgttgtatatagaaacctacctggcgccacacaaatgttgcaatctcagtcagattgtccacattgtggagcaaaaaggttccagtacgagtctcctggtttctgttgcaaacagggaaaggtcaaacttgtgatgccacagccacccgaagagcttcacttgttgtacacaactagggacgctgattcacaacattttttggataacactaggttttttaatggtcacttttcattcaccacattcaactgcgagtatgaccaaaatcttgcaagttcaagagatggtgtttatacattca

SEQ ID NO: 171520 - DNA, 451 bp, Zea Mays
tcgcacccccgaaaggatatgattctatatgggtgattgtggatagattgactaaagtagcccacttcattcctgtcaagactacttataaaggctcacaactggcagagttatatatggctcggattgtgtgtttacatggagtaccaaagaaaatcgtgtttgatcgaggttcacagtttacctcaagattctagagaagctttcatgataatatgaatacaaagttgaactttagtatagcttatcaccctcagactgatggatagactgaaggactaatcaggtgttggaagacatgttgagagcttgtgcccttcagcgtggaggaagttgggataaaagtctaccatatgctgagttctcatataataatagttatcaggccagtctgaagatgtcaccattcgaggctttgtatggcaggaagtgcaggactcctctatactgg

SEQ ID NO: 171521 - DNA, 563 bp, Zea Mays
cggtgtgggcacgggtcgacggcggtggagctgtgactgggcagagagtggatcggtgagcgtggaccgagagaaatagagggggagggagcaaaccgaggggtgtcccgggtcgcgggtgatgaggcgaagctcatcgaggcaacatacacggcgagggctcgacagcgaccgtagaacgggcacgagacaacggcgaacggtggcagagctccctgggtgtgcacgcagggcaaggcgagtgctgggggttgcgagtgcgcgagtgagggggaaggagaccgagtggggcactgggcatctagaaaagggctggagtggggacaggcacagcctcggtgtgtgtcgtgggcgtggagtccacggtgacgcgcggatcgtgcatgcgggtagttcgagagggacatgtccgacagatgggacccacgagtcagcgagagcgggcgagcgaatgggtggcctggctgacgagcgggtctcgcgggacagagagagccgggctcgaggggagttggcgctgacagctcagtcccaccggccagggagagagagcggggatgcgc

SEQ ID NO: 171522 - DNA, 1050 bp, Zea Mays
ccacggatctcacgggtcgttgcaaccgaaccgcgcaatgacctctccgaacctccgtgattctgtgccaacctcctaccgacaactgtggcacggactcgtcccctccgacacaacgaacacacccgagatccgtgcttgacgccttggtcgcggactcgcccaactgggggggggtcgttggggcatgtcgtggcgccgctccctggagattataaaactgggcagcaccatcggtttgccatgaaccactagaaagagagggagagggaaaacgagatcttgcatcaagccgccccgcgccgccgcgaatcccttcccccacggtcgcccagaacctaaggtcgggtctggatcttgcaccgagccattgggaatccgtccgtggcgctggcatgcaggatcgatgaccgaaccgtcgttgattgctcaccgatccgcctaaccccgggcgcaaggcttctgcgtgccccatccgcggtgagtttttccctaattgcttcgccatgatgtctgcatcgatttgcaccccacccctggctaatcatcctcgtgaatgctgggtcggtgtgctccggcgtgctctgccaccgtgggcagggagcgccgcctctgcgcaggtcctatgggaagaagacgggtctcctgccgttgatcgatggatggacgcgtgggattaaatctacgtataccggttcgatgtttcactctggaccgtcgatcgtggattcgagggctctgatctgataagtggcgtggatagatatcaggcgtggatctcggatccatcggcccatgtgccgtaccggttcgcggggatttgagatttaatctgggcccttgatcagtgatcgggcggccaatcttcaccgatacctcttcgttctggttcttttgcataagagcccctcgtctttcacaaaattgaacccgccatccatatagggttaacctgagtctggggagatttgcgagcttgcccctgatctcttgagaaataatgcgcccagtccagtgagtagtggaattagataataaattttggaaaat

SEQ ID NO: 171523 - DNA, 727 bp, Zea Mays
caaaaactaagtatagacctgtcagacgcccaagcacttttgaaggaaaactctaatcaattcgaacaggaacacaaagctttgaaagcaagacttaaggttgaatctgagaaaaattcgaagcttagtgaggcggtgaaggctttgaaagagagatgcttcgagtttgcaagccaatgcatcgcccgattaaggaatgtatttaattcagttggagctgcatccgaagaaaccagcctctcagccaaagatatacccagggcactcgaatgtattgaaaaggaggttgatgtccttgacgaagtcataaccggccacaaagacttctatgggctgatagcttcttgtggtacagttgtcgccttcataaaagctggatgtaatcacgcgaaagctgtcaacaggctgaattttaatctttcatcatcggatctggttgacattccaactgaagcccgaagcatagggaatagatttattactcagatttgggctaagggcagatgtgaattggctggagacaaagcccgaaagctgcttaacacagtacagaattttacctttgatttttaccttgatcttctcttgccaaatttctgattaccttgtactttgctaatctgcagaatgatggcaccgaaggtcgataagccgaagctaattctgaaatgccgaagaagaccttaggatctgcttttgtagtcatctgtaggaacacttgaaaatc

SEQ ID NO: 171524 - DNA, 701 bp, Zea Mays
ccttaccacctcatgctgtgccaaaagttggggcgccagagaagaagtctgatcactcttcttcggttgacagtaagctgggtgctctaaaggcttatcggcgtgctaggggattatgtgaccgttgtgccgaaaaatggcatcggggtcatacttgcaacactacagtacaattgcatgctattcaagaagtgtgggacttgttatctaacgtgtccgttgaggatactacggtttatgggggttctcctgaggactctatgctcatgtccatatcttcggaagctattgctggagtagttgccaagaggtcaatcaggttcatgggtcttatgcaagcagtggacatattaattttggtggattcaggtagcactaattcttttatcaatcagtctactgtgctgaaattgggttggaaatctgtaccaggttgtcctctgcaagtgcaagtggctgatggaacaattttatcctgcacaaacatgatatctcaggctgtctggagtattcagggttgcagctttgtccaggacttgcatgtgttgaatttgcctacatttgaccttattttaggtatggattggctggaacgttatagtcctatgaaggtgcactggcaacacaagtggctctgtataccctatcatggtgaacaagtaatgttgtatggatgttctgctgttatggcgacagacttg

SEQ ID NO: 171525 - DNA, 955 bp, Zea Mays
gaattgtaaaagaaaatcagtgttgtgcgcagttgggccaacttcacccatttcggcccaccagaagcaacccgcacgccagcccagctatcccttccgccacgagacgctagctggtggaccccaccggtcagttactcacgcatacacacggccacgaatgactgacactctgggcctacatgtcgggcggtactgtgtttcttcctgaggcgctggcgcaaccaccctccccgcagtccgcgcgagcacctccgctcctctcgccagctacgcctgtacgacccgtccgcccatataatccgcctgcagcctcgccacctcaaccccacgaagtcaaagccgccacgggatcgggtagaaaccactagtgcgctgtgaatttgagggtcagtggagaggggtcgcaccgtgagctttcaccgccgtgcgcccggattgagcctgggaccctcgccgcgccgcgctgtggataccggcggttctgcaaacgatgtcgggtgtcctcggcgccgtggatttcgcggctacatcagacaccgcgacctccgccgtactcgcgttcttccgtggaccggctcgagcatcctcgcaaccactggtaaggcgccatgccctagtctgttatcccctcggcaatacgatactagtggtggcggtgcgattagggcgctgggtcatggagtcgtgttctcaccggcgtacgcgggtctgctgggtgtgtctatgactctatggcaccgacggctggaggaggaagacggcacctggtgccgttgatctgcgaggtaacgaccggagtagaacacagaaccgtggccgttagatttccagttgacgatcatgattgaatctagcgcatcctttcgaccgggcgatcgtagccgtggatccgagaacgaacgtatgagatcggattaaatatatcccgtcgcgctattagataggagtcgtg

SEQ ID NO: 171526 - DNA, 545 bp, Zea Mays
tcatccggtgatcgccggtgagcttgccatggtaattgccaccaatcacttgcgccagtgcacctccttctctccgactgccaccacgcgagctcaaattcactggccaccgctcaagggccctataaattgagcacaccctcggctctgctaggtattcaagcacccagcacaccaactcgtgcctccaattgtccacctaagcccccgaattgcttacttcccccaaatcgggtttccgccaccataaaaaggtcctcgccgtggctagctcgtttcaggtccgatcgtgtcctctactctcttgtttcagcacccttacatgcccctgatgctcctcgactcgtttgattaagctagactgccctagatcatcgggaacacttctgctcatccgttgttcgcactgtctccgtggacagggtgatttagagctcgaactatgcaattgatcgtggggaaacgtttgttaggtgttgaattaagtctgagccaagttagagcaccggtcattgagtgtcgtggccggtacaggtttgccggag

SEQ ID NO: 171527 - DNA, 2013 bp, Zea Mays
ccaagagagggggggtggagggaaaaggggtggccacctagggttttgtgggagaaaagaaccgacgccctagatgacttctgtctttgcatccaacggcccacaaccctttcccatatccacgcaccgaagatcaacttttggtcaactttttttgggatattacaaagatgatcctcccatctacccttccaagacagaacacaagcaagcaacatgtcttccatggtttggatagttcgccccaactgaccatcagtctgagggtgaaaatcaacactaagagaaagcttggtacccaaagcactatgaagactctcccagaaattggatacaaatttggagtctcgatctgaaacaatggacttaggcaccccatgaagcttgattacttctttcatatacaagggaactaactctgaagctgaatttgtggtcttcatgggaataaaatgcgcagaattagttaagcgatccactaaaacccatatagcatccctgccctgaggagaacgaggtaagccaaccatgaaatccgtagtgatatgctcccacttccaatctggaatttccaacggcttcaataaacctgcaggcctcttatgttcggccttcacacactgacacacctcataggctaccacgtacttagaaacgtcaaccttcattctcttccaccagaagttttgcttcaaatcccggtacattttggtttcgctagagtggatggtgtaaggcgttttatgagcttctctcgagatatccttcttcacctctgatttctgtggcacacaaaggcggcccctgaaactaaccaaatcattctcatcaatggtaaactcacggggtttaccatcgccgatcctctttcgagcttcctgcaacaaacgatcctgctgctgtgccacacgcactctctccagaagggaggattggatgagcatctgagtctcctctctagcgatgccgacatagcacaaagcaacacccatgcggtccagatctgcaatcaaaggcatggccacttttggaacaccggtcctgctaagggcatcaaccaccacatttgccttccctgggtgatattgaattgatagatcataatcctttatcaactcaagccaccgacgctgcctcaatttcagctctttctgagtgaaaatatacttgagactcttatgatgggtgtaaatgtctcaagattcaccatagagataatgcctccacgaatttagggcaaagacaacagcggccaactcgaggtcatgagtaggataattcccctcatgcttcttcaactgcctcgagccataagcaatcactctgccttcctgcatcaacacacaaccaaggccaatacgagaaacatccatataaactgtgaaacgcttaccactctcaggcaaggctaagataggagcattcaccaacttgttcttcaatgcctgataactgacctcgcaatcgttggaccagacgaaaagaacacccttctccaagagtctagtcaatggcttagtaatgctggaaaaatttggcacgaaacgccgataatatccggcaagccccaagaaacttcggatttctgagacactagagggtctcttccactccacacaacattggcattcttggggtcaaccataatgccatgctgattaatcacatgacccaagaaagcaacttcagacaaccaaaaggcacacttcttcaatttgccatagaattgattcttcctaagagcacccagaacgagacagagatgtcgctcatgctcttcctccattttcgagtaaatcagaatatcatccagaaacaccaccacaaagtcatccaagaactcatgtaacatcctattcattgcttccataaaagcagcagaggcattagttaagccaaaagacatgacgataaactcgaaatgcccatacctggtgctaaaaggtgtcttctcaatatccccctcgcgaatcctcaactgatgatacccagagttcaaatcaattttagaga

SEQ ID NO: 171528 - DNA, 1155 bp, Zea Mays
caacatcaagcccaagtttatgcctgatctactggccttttgtgacaacaccatatagcaaagatgtagttggtataatgctctccaagtttgctgcaatgcttgacttgtgttgtcacaatgaattaagagaaaatctcgctccaagttgggctgtcaggcgactgaatcaagttttagccatggtacagtgctctgttgaagatcagaccgccagcgtcaaaaatctcaccgccgatgacctcttcgccgggattcgtgccgcgggcgtgtggagttcgctcaccatgaaaagatctagtcacggatgtgtatgaactactgtggcctcgctgttccctgcccttcgcgccggcgacgtggccgtatggccgtcatcggagttgtcgtgcttcaccacggttgtgccacgctccgagcttttcaccacgtcgtcactagccgcaccagctcaccggtaaccgccgtagctcctcaaccggtgatcaccggaggaagcgccacggtgaaagccacccatcccttgctccagtgtccatattccctccgcacgccagcacgacccttgcgaaattggacaccaccgtcgatgggatctataaattgagcccccctcagtttcgccatgtattctaccagctattgcacccacctgcatcccaaaccccccaccagagaactcgaatttgggattttccccaaaacggttgaagaacaccatgaacccaacctcaccgtgggaagctctcctcaggtccgatcctgttgtctttagtcttgttctagcatcctcatgtgcccttgatgctcaccaaaccgtccaattaaactagaagcccaccaatcgctgggaacacgaactaatatccatggttttcgctgtcctcgtgggcagaacgaaataggtcaccaatcatgcaattgacttaggggaaatactccttaggggtagaatcaggtgtgaaccaaagattagcgtcggtcttcgccctctccggccggtatagctcaccggatttcggcttcccgtgcggagcttcgtcgaggacctgacgcggtgaaggaatagaacgtgaagggtttttctgcaatctgttagtgactcgcataaacagtgcatgtgcccacttgcggttatccaaaaaggactgggtc

SEQ ID NO: 171529 - DNA, 487 bp, Zea Mays
atttgaattgtctcaatttgacggcgtgccaactgatctcatcagcggcggacctaggtatagtggagtgagggcttgacctaggtatagtggagtgagggtacaagccctcgctcatttctttggtgcaagtagtagagactagattttcactataaggtcccctgctcagttcaacttagatgcccctgttctggtgttttgatgcatgtcttcataagtgtgccctcactctcattttgctctagttccgcagagggtgccagagatcgggttcatacgagtgacctcaccagactataaccgattatgattagactgagtatacgaggccagacccctaccagattgttcctgatgtgaacgcctccaaccgtgtttatcagattccctttccttttcccctcttcctggagctttggcaactttggaggttcgaggtcttcataaagccaaggaccatctagaacatggtccgggaccagcg

SEQ ID NO: 171530 - DNA, 469 bp, Zea Mays
gttctgtattcggatggtgtggccagcgggcacaatatttatactggttcagatagaatgtccctactttcagtcttcggtagcttacgctaccggcaccttgttgctcgtagtaggggtcacaagcggatgagagggataagctcccaagtctcttaagggttgcgcggattgggtgttcgctatcggctaagtcgtcaagtattgtttctctctcacacacacttcgtccggccaaccttccgccttttatagaccaaggcggaggttggttacatatggcttctcttggaagggatcgctgtggagtggttctccctcggtaaacgccttcacgtatgttgttatctgttccgcataactccctatcgactgttggagtgctggtaaagtgtgtccacgacgggagtctaagtgtcatcattactccgcatgtctatctatgcctgtgtcagcccctagctttcat

SEQ ID NO: 171531 - DNA, 918 bp, Zea Mays
gcgggttattttcaagcttcctcgaggactctttagcaaaaagacccggccgaaggggtatccaacgatcctggccgttggatcagagatccatgacccagatcaaaagttatcgtggctgattcttaacggtctagatctagatcgagggtctggattcaatctcgaagggtgcccacgattcgatcccagccgtacactctacatcctacggctcgcgcgaatttcccccaaccctctcttcttccccaatcagcagggcggcgacgaagcagagctccaccctgggagctcactggatttcctccgcccagcgcactggcgtcaaaatccaaacgcgaacggtgctaaacattgggggaagaaaggtgaagtgatggatagtatccttaccggcgatcggagcgatggtagcatctctgcatctacccacggcgacacaccagcgcccgcggaggcgccgcacggtggaggccatgactgaccttggatctggcaccgagtcggccatcaagcagccggatccaatcccgacagagtcaatgacaagcagtaaacgaaggggaggcgagtggagattcccccaccatggcgtagactggagctaagcacagaggcggcacaggttctagcttcctagcgcactggacaagggatgaagagaaggggcgccaagcacagagcgatgaacggggaaggcgtcgcggcccccgcatttataccctggagcgcaactaggatcccggcagaaatcccttgattcacggatgctgatgcgcggcgacggagctctctctctcccctgcggtagtggtgagactcggagctacgcccaaaacggctcggaacctagggaatgggtctcgatatatactcgttgcagcgtacggtttccgggcagaagaacggcggccgcgg

SEQ ID NO: 171532 - DNA, 806 bp, Zea Mays
gcgccggctagtgcgcaaagggagccatccagtggtcgaagtgagagtggtttggtctaatctctgctactctataagactctaacgtagaccgtgcaccatgttctgccatacccctctcggacgcgatgctcgcctcgtgatgtccgctgcacctccgcgtcctcagcacccgccttggatacacatacaccccttcctacctctgcccgttgcgcccacatcggaggcaggcatgccaccgcacccctagtcccctccctcgtgctccccgccgacggatgctacgcccacgccaatccctcgccatccgtaccctcacctcggccatctgcacgtcgtgcacgccctacgcccctctcccatgccttccacgccttctcccccaacacagctttagcttcatctgcccgtccacacccacgcgtccctcctcgtcaatgcgcagccgccaatttctcctcctcctcccccgtgtgcggtggatcctccacgaatttggtgcctcaagcacatggtagcgggcccatacctttgcagcgtcctcgcagctgacattgaccccatcatcccaaacctcctctttttcggcgcctcctcgcccacgatcaccgtcattgtgcttcacgctatactcccccgacatctcgcatatggattgactatctcaggcccccttcctccctctcaccaaaaaccctagcccacgcctggccgccgccaccctcacgtggttgttgcatgtgtgcaacgcaccaccgctcctcaggcgatcgaagccaacacgatggcgaggtcggtgagca

SEQ ID NO: 171533 - DNA, 477 bp, Zea Mays
gaggttcgaagcaagagcagggtcactggcaggaggggcagtaggggtagcactagaactcccagcctcatgatcatgtgagcgtggaggcataggaggcggaggtggaaccccaaagacatcataatcatcatcaccatcatcatgggctgctgcgccctgagtctcaaacaaatgaaggtggtgtcctcggcctgagtatcaatcactggagcagatgctggcacaggatcctctggagctagacggtacgacccaaagatgaggcgagaggcctcaagagtaccctggaactgtggaggcctaatcagctgagcaaagatgtgacatagatagtgaccataaggcagctgtcgacgagcacatagaccatccagtactgtgtcctcgatctcacaaatgagaaaatccacaacatcaaactctgaatgagaatctagggcatcaaggagccaaagctgaatatgagtggcagcc

SEQ ID NO: 171534 - DNA, 868 bp, Zea Mays
atcctccgcctttttggcccagcagacttcttcgctgccgaaggctccttcttcttctgtaaaagcttcgtcagatgcggccctagtggactttgcttgataggtaaggattcggtcattacgtttagaattccttctacgtcagcagcagaaggagatggagaagtctcttcctctatctcaattgtctttggcttcggagccacaaccttcctcttctttggagtagccaccttcagctcagggctggattttctctttttagaatttcttcatcttctttcaccattctagaagtgtgcctgcttagaacactaacaaccctctttctcttttggccttcggcacctttgttcaatcgctcatagtcaggatattcaaaattcaatgcatccatcacccgattcaaccttcgcttcggtcgggtgccgaaggccgcagtcatcagctgatcttctttttagtgtaattacccaaaatttcattgcacatggtttctatcatttctaaccattcttggcatggccctttaaaccgtttctcaaatttgaacctataaggcagtcgcacaagttcattcttctcctttgtccccttagcttcggcatgttccattcactcagcgtcaggaacaccttataggccagatattcttggactagatctcttgtgctgatctgctcggctaccacccagaattctgccacagcttcgtggcacggtgaccccgttgacatgcggcacaggggactagtcaacccgaagcttaagctcagcgggctcagtactagcgtcttgagcttctccctcttcttctcatcggctttaacataaaaccactcgtttttccaaccggttggcctcttgg

SEQ ID NO: 171535 - DNA, 547 bp, Zea Mays
gttggcacagtgcaatgcactcaatctattaagttgtcatcagttttgtatgtgccaacttttcatgtcaacttgatatcgctgagtgccttggttgatcaattggattgtcgcattatccttgaccgagataattgtttaattcaagagaggcaaacagggaagaaacttggaacagctaccaggcgtagtagattgtggtatatggatcatgaggggactaatgatacaatatgcactatattagcaacaagaatggaagagaaggaggttgcagtgatgcttttgcattatagattggggcatatttcttttgataagatatgcaaagcttttcctgatgcaatgtgtggggtggataaaagcaagctattgtgtcgtgcctgtgagcttgcaaaacgcacaaggacatcttatattagtcgaggtatcaggagtatatctccttttgtgctagttcattctgatgtttggacgtgtcctgtgacttctattaatgggatgaagtgctttgttacttttatcgattgcttttcttggatgactt

SEQ ID NO: 171536 - DNA, 1623 bp, Zea Mays
ggcagccgccgcagtggcatctagagacgaggcgccctattggtggctggacagtggactactggactccacgaccaactcctcccaactcaaacgacacggagggagagctctactcctaataattccacgggccgcttcctcctcctgccggccgctccgtctattggtgacctcgcccatggcgtgtgggtggcttcatcctgtccctgcaggggccgccacggtcgccgccctgtggccgtgcttcctttccccggttcgtcagagcttcaccaaggaggtactggcttctatatacatttacctgtttcgtggttgggcaattcgtcgaacaggttgtaggtggtgtctggtaagagctgctgcgattgtgattcggttcttctactcaagagttagagtggatggcgtggaattgtggcatcgccttgttgaacttcggaaagtttgagccactatcaaactggggctcaaatgatttggataacctgcgtgattcaggatatgcttttaaccaatgcggtacataggtcaaatttttgttgtcgttggagtgaattcatggatttcggccgtccaaaaaggatgatggatgcatttttcatcttgctaatgaattggcattgtgtaggatccattggttggaactttggaacacctaaaatcactcaaatgccagttgcagcttgtgactacttatatcctagctgttcctatttgcccattgcaaattcacaatgataaaccatgtccttgtcctagttgcgaacaatcctttttatttgtgctcctcgtaactgtgttcccttgtactgctctgcatatggaaccgaacaatccttttggtttgtgtgttactctcattgcgtttgcttgtactgttccgtgtatgccgtagctccttatcagcatatcttgcaatacatatataaccaaaagtttcctttcgtttctgtgttcatcgcatcttgtttccttgtacggttgtgcatatgccactcgcagcatgttatcagcatctcctgtaatagaacactgaatcatgttcctgttattttcaaaggctaccgtactgttatttcctatgtctgaattctcaacttctgcctctgatgagcagctaaaccaattccaacgttggaagctacctttgaacggtaaggcagttcattctccagtcatcacaagctagaaacatcagtgtcagggtggttgttctaactcaaaccttggagctcacatcagcatctcttaaaatgaacttgtgcttgcagctgccaagtcgcagagggagtcatggaaccttgctgatcgctcaagttcaggatcttctgaaggagttgctgctgctagcagacccgcagacgctcccactgctcagagtgctctgcccatgacacgtagcgtggatgcggtcccaggtgcgcctattgttatttctggatactggactggccccggtgtagatgatggctgtggtagtgttgaggccgtgctccagaggattgcataatgttttcgcttgcggttaactagggcaattgtaacctgtgtcaaagcaacaactggaccatataaggttatatttttctttattcagagctctattttcccttgggg

SEQ ID NO: 171537 - DNA, 606 bp, Zea Mays
taatggaaataaattagtatcaaaaatgggaagagaagagtcaaaggaggacatctagaaattatgccaataaataagtaataattattttaaaaggaaatagtatcattcataataatgttttattagccacatgatagtatgaagtgcaatttaccaattcaaatgcaattgaacatttggaatttggaaaaatagaaagaagacaaaaacaaaagaaaaaaaagaaaagagtgtcctacctgtgcttaggccgaacaagactcggcccattacctcactccattgtgcggcccactttgccagcgttctcgcacgcgccgctggcgctgacagacagggcctagtggccggtcacacactggcgtgtgctcgtataccgtgtctcgctgacgtgcgggctcgcgtggcagttccactttcttcgcgttgtgactgacgcgtggggtcgcaatgtcagctccatctccaacggaatcggccatgctccccagggtccgtgcgggatctcgacacaatcgtccgggtcctagatctccgccctgtgtataagttggagacgtcacctaacctccgtggccctcttcccatcaagtcgaaactcgg

SEQ ID NO: 171538 - DNA, 862 bp, Zea Mays
gtctagttttgttgaaaaaaatctcaggaatacaaacatgaaattagtttgatgattcaatcttttaattagaagatataataaaaaacacaataaaaagatgtctcgtattccatgtcgttgcatggggctgcctgcccgtagcctgcatcccgctgtacgtatcccacgggcgtctctgcgcagcctgaccggacacccctttttgaatctggtgagcctggcttcgtagagaaatgaaccaaacaaaccctgctttaaagatccgtggatgcagtttctcatctcatgcaaccaaccaatcatgcggaatgtctctctaaatcctgtcaacatcgactcttcgtcttcccaaaattggcaaaatttcacatcccgttcttatcctccgatcagtcacctcctccaaatctcatcaccaccagcacccactccccctccaaatcccgttagtccaaatgcccctcttcaaatatgacagtttcttcacactgcctctccaaatcatgtcaacattgactctccgtcttcccaaaattagcaaaatctcacgttctgttctcatcctccgatcactcagctcctccgatcctcccaaaatcccgcttgcctctaatgatccccaaatatcatcaccatcaacacccactctaccctccgaatctcatcagcccaaacacccatccgaatctcataaaccctaagccctaaactctagaccttagattgggttgactattcctttgcagcagcaagttagaaaattctttaagtcttctgtggtatcactatcgtatggttctgtttttgcaagctatgtggccatcttctcttcccaaaaagacccaaaattcgtatagta

SEQ ID NO: 171539 - DNA, 532 bp, Zea Mays
ttcctgtggagttgggtcctttgatcgacgccagagttcatgaagaaattgttccatgtatggcgtcacctcttcaaggttggtcaatacatatagcatgatatgccgccactcttcatgttgtgtggaaggagcaggtcgtcataataggggagccaagtcaagcctgacttatgtgttcacatatgctgctcaccatatcccacaaaaccaccttctgtattggccacgagcccatctatctgttgacgaatttcggcaccagtcatcgttgcaggtgggcggtctgtcactacaacacctttcgtaaagttcttgatgtctaggcggaatggatggtcaggagggagaaattgtcaatgtttatcgaaggacgaatattttccaccctttttcaaccaaatgaacctaagagctttcttgcaaactaggcatgagaacttactgtgaacacaccaggcgcagaatagcccgctcggcagcatcttcagctctttttgcttcttctgaaacgtcatgagattccttctca

SEQ ID NO: 171540 - DNA, 404 bp, Zea Mays
tttacattcaggctgaaaactttgtgatgaaaatgtagtttatattggattcttaaaactgaatttgatttagtttggatttgtaaattgaatagaaatctgaaaataagaaaaataagaaaaatagaggagccctaactgcgcttgggccgaattccacggccaggcccaaaacctcactccaccgcagcccaccactcctctccctttatcctttttcatttctcgagaagccgctgccatgtgggcctcctgtgtcagctctgtcctcttcgttttctctgaaccagccgccgttatcaggttggatcggtggagatcccccgcatcgatcgcacgaccctgccaaccactgacgtgcgggcccgggtcgccggacctctccttccttcgccactcgattc

SEQ ID NO: 171541 - DNA, 365 bp, Zea Mays
agacattctaaacggctggtctcggtaaccctgagcatcctggtcgtgtaagaggaatctcatctaagtaaggatggaaggaaggattcggaccacaatgggaaggtctgtacaagaaacgtgatcgatacaagaaagagatggcgaattattttaaggaggaggccaagaaagagttcaaaggcctgatgtctgaaatgctatcgaatcctcctctagaattgatgcaacaattggcgagtgcgatgtctgttcaacagatgaccactccacagatgcaaataattccagcagctcaaccgccggcttccaccgagggtacgaccatcccaagctctatcgcgtcaacgggaaataaggtccgc

SEQ ID NO: 171542 - DNA, 723 bp, Zea Mays
cgtctcccccgtttcccggtttccaaaactgtcttcgtgcaatcaatcgagataaacccgcgcgagtccataggggtttctagcttctgcatccgccaaacaggaaagaaaccccttaatcccggcggccgaggcgacttgcaaggcgacttctgcctcttccatccatctccgctccttcaatctgtgaactttggagccccgattgaagagccattgctttcccgtgaagttccaggttatcgctccaacttgaaacacatctcgaggtttccgtcgccgtttgaggtatttttgtcgatttgaagtcggtttgattgtttcccttagttataagttgtgtgtgatttgaatccgtttctatatttctccaatcgggtgcgttatcttacaaaaaacccctcattgcatatctctttggttctagaaccccgattgaagagcctttgcagttcttttagatccgcggtatcgcttggccttcaaagacttcggcaacgttgtcagttcaggtatttcttcccgagtacgcagagattatttttacatactcttagtaatatatatgcatatcagttctgatatatatgcacattggcaatgttgtttatgcacatcggtacagctatatatgaacatcggtcatgatagttatgcacataggtatttttcccgctatctgaaacattattttacacacccgttgtattatatatttatgca

SEQ ID NO: 171543 - DNA, 596 bp, Zea Mays
tttgtcctctggactgggcctcgaattccagaaagctcaggggtctctgcgcaagaaatcctatgactcagatcacccctaatatggacggcgggttaattgtttaagaacctgaggactcatatgcaaaacttacaggccgaaggggtatcgggtaactagagccgtccgatcctatacctgtggcgcagattagatcggcgccatcgtgaacgggtactggatcgcagccgctggatcacccatcggcggcccagatctaaatacccccaaattcaatcctatcctaccaattcgatcggacggccagggactcatcactccccagattctatccccgccatcggacacagatcccatggcccatatttcatcttctaccccagacagctgagcgcggcggaatacattccctacagcggcgcccaaaaaccggcgaccggattgacgcccaagagccccaacaactaccccggatggcgctacacgtattcgagacaaagacgaaacgatggaagcagttcttaccaagcttggcggcgtggaattcctcggccacagagaaggcggatctgcggcagagttacagctccggc

SEQ ID NO: 171544 - DNA, 1119 bp, Zea Mays
tctgaaaaagaaaaggagaaagagtgaatagtattgggctgatttcagcccaatcggcccagacccaggcagaaacgtgcccgcgcgcgcccgcgctggccgttttgcacagaggaccctgtgtttttggttaactggaaataagttcttttactattcctacgtgtcgctgacggtttacacaggggtcccccaacttctgtttcttcaccagataaacccctgacgacgaacggcgctgcacagagctccggcgagctcgcacactggccaaatagctccaagaccggcgcccagcttcggcctaaaccagattcagggcctagggaacgtttcccctaggttaatttgaggaacgacacacagagacgccctgaccatggtgaccgcgggtgaggcggatgaccataagcgttcttggcgatgggtggcgatctggttcaattaaaggagtcgtgcagcttgaggaggacctaaggacgctagaacaatcgaccagagtgtatgaacgaacctagaataatctggccgcggggaggatgattatgcggcggcggaaacttagtttggggaaaaaccaaaattctagctcactggtgatcggctgggggcgatactgggtggctgggtgtgtgatgaccttacggagcttacggcggcttcaatttatagggagcggtcgcgagcacaacgaatttgagcggcggatcgtgatttgtaaaacagggtgagtcactggtggccgcacaacgtggcttttaccgtggcggcaccgccggcgatcaccggacatgcgaagcacggttagccgcgacgtggtaaagcgtctggacacgtggcggacgacggtgatggctcaacggcggtgagaatcttatctgagggatcggtgagcaagggggggaggcacgacagctagccggaatagtttactgaccggagcttatccatggcggcgatatttacgtgaccccgagcgttatccaagcactggtgagcacgaatcacctcaccggctggaatcgtggcgcgagggtcggcggcggcgaggggataaacctgagattcttcttcagtcactgtaccatggcgtcccatttcagttaacctgacagagca

SEQ ID NO: 171545 - DNA, 857 bp, Zea Mays
cgtctatgttacttttcttatctgcggccttgctctccctgtttctcccttcttctgtggcctccttgatttctacgatcagaacttgacccacttgaaccctaattctatcttgcaagtttccatttttattcatctgtgtgaagcctatctcgggattttcccccatttcggcctctggaagtatctgtatcattgtcggcctgggatggctgggagacagcaccagctcgttggcggcacaaatctagagctgcgtcgcgggaggaaaacagagtacctcgacatccccttcaaggatagcatcaagggatggtgcctcaagtggttcattgtggagaaccactgcaagtcccttcccccggtcggggaggcagccagatgttcgtactctaagctgggtagaatcttcaaccccttcggagataatggaggcaaaagtattgcttgccgaggtctgcttgttgaaagacaaaggtctgactgttgaagctgtcaagctgtggtcgttgatttcgtcttcaagaatattcagcctttgaaggacagggcgtacccggcttatctgtaccatggcgccaatgactctacccgggtcacaaacaaaagaatccccactgaagatctggtgaaccgactggatatgattctgaggggcagagtgtcaaatgatggtgctcctgttgcttattctgtctggcctcgctaatcccacggaggccgttgcaacagcgccgctgacctcgccctcggctatatatgcctcagccgtcgtaatcttcgccttaacccaaacttggcgtgtataagccacaccgttgaggggagatcgagagagagacaaagaggagaacggg

SEQ ID NO: 171546 - DNA, 1082 bp, Zea Mays
ggagaaccgagctccggcgagctcataccggccggatcacttgatgaccggtattctactttggctaagaccaaagtcaagccctaacaagagtttcccctcaactaatttcactaacggagctctagcgcgctctgtccacggtgaccgtgtgatcaacggtcaatccaacgcgttcccagcgatctaagggttcctagcttaattggcggggtcggggagcatcagggacatacaagtacactgaaaggaaagagtagagggtatgagtggacctgagatgagctagccaccacgaggtttctttcacggtggcgcaaagcatatttggggaaatttggaattggcgagctctggtgaacaattgagggcacgacttggtggcttggtgcttgactaccctacggacccgttggtgtgctcaatttatagtgtgcttatttatagtgtgcttgagcggtggtgttcaatttggacgaaatgcgctggcggtcgagaggggaactgagtcactggcgcggtgattcgtggccttcactgtggcagacccaccgacgacgagctaggactaaggagcggtttatggtgactcaccgcgatctggtaaagcgtcgaggctcttagcctggccggataacggtgaacgccggtgatgccagcgtgatcgtccgcggcgggacacgatggctagagtgaataggagctcaagttcatccacacgacgatctttaccaccctgagccacatccggtattttgctgagcccgaatcgcaacggcgacgagaatcccgacgcaagatcaccagcggcaaggggggtgaatctgcgatctctttcagtcactgtacaatggaatccctattcagtgcgcctgacagcctaatttgcatggcctagatctcaaatctttacataacaacttgctaatctgcctgtaacaaagttgttgcccaatgatccagctacaatcttgctatagcaaccatagccaaacactcactagatcatggtcgaattccagtccaaagattgcccaatcttactgttagtctgaattcagacctagggcagtctgacaacc

SEQ ID NO: 171547 - DNA, 272 bp, Zea Mays
ggggcaagcttctttagcttcttatcgtaatccatcttcagggttcggtaggcttcacgagtgttggcctcttcgccttctgctatttcgagattctcttggagggacgccttctcctttttaagttccttgacctgttgctctaagctttccacctgggagtttaggtgggtgcagtgggaggaaaggtcatcatagtggttatcgagggtgtggagatatccggccatgtagacgatggtggggtcatcctcagtgggatctcttcctga

SEQ ID NO: 171548 - DNA, 646 bp, Zea Mays
ctggatgcaccattgttcgcagaaatcaaagaattcagagctagtgaaattggaccctagatcggttatgatgttatttggtatcccaaatctgaatattatgtcttgtatgaattacactgccttggctgaagttagagaagcaatgggtttgtactctatccatttagtgaatttgtcgatggcaaccaatacgtgagtataacctccctgagctttcttgaagggtctaatcatgtccaatccccagcatgcaaatggccatgtcactggtatggtttgcagctgctgtgctggtaaatgctgctgctttgataggaattggcaggcttcacatttctgaactaactcggctgcatcaccctttgctatcggccaatagaaaccggacctgaagaccttcccaaccagtgttctagacgctgcatatcccgcactgtccggcatggatttcatctaacagttgtttcccagtgactgaaggtatgcacttcataaggattcctgttgcgcctcttctgtacagtgcatccccaatgagggtgtagtgggctgactgcctggcgatgcgttccactgcagttttgtcatctggctcctcttcgttctttatatacttaatgataggctccctccagtcattaga

SEQ ID NO: 171549 - DNA, 927 bp, Zea Mays
cggatgtgtcgcacgcgagggtagtcgaggctaccaattgtgggtgactgttttgtgcgtcgaatgtcgaaggctgttgtcgcggtctttttcaacacccgtggctgtggtgccagtttgactgcttttgtttggtggctttgcggtattatattacatggctccgccttgttaaaaaactcaccccctgggaggaaaagagtgcgggcctaattgacattgtttcaagaattacaatggcactcgggccttgggacttagacgaagaatttgcgcaggttatctatcttccacgaatgctctaggtcttcgccggatggtgaggtgagcctataagcattcggcgatgtcttggttttgatgatgtagggcccctcccacttgggttcaagcttgccccgagactctgttctgatggttcttgtgagtactaagtctccttctttgaactctatttggatgtctgtgttgtcgcgccatgccttagtatgtgcttgatatttgttcagtgtttccagagcgaggagacgatctccgtcgataaggtctttggaggttagctcatcgacgtcaggggtggctgttgggcttgttcgtggggatccttgctttagctcttgtggtgtcattgcttcggatccgtacatcaagcggaatggtgtgaatcccgttgctctggtttttgtcgtgttcaatgcccatatgactttgggtagttggtccgcccattttccctttttgtcatgaagtagtctcttcttgatagagctaaagatcttgccgttggcgcgctctactacgccgttggactgtgggtggtagatagaggcgaacactgccttcgtgccgatggaattgcataattctcgaaagtattggttgtcgaactgcttgtcgttatcgactgtcaattcagatgggactccg

SEQ ID NO: 171550 - DNA, 745 bp, Zea Mays
agttaccgtagttggccagaaaaaccatgctggtaggctttttcaactagtgttttagcccatgcatgaattgcacatatgcctgaatggatttcactgagcagtgctcttccttcttcggtggggacacatctcatcaagattcctgaagcgcttttttgatataacttgtcgtttgttaatacacaagctttagattttcgctgcacttagggttagcgttttgacttcagaaaggaccctgtctagcaaatatttgacgaaaggtgcatgccaatccaatttaatgaccattaccctgagatctccaccatcaagcatctccgagcctagctgtttagctaactcggccgaaggagactcaaccatcttaccaatggttggggaagttgattttgccaaaaaggctcctggtcgcacaagggatcttgatgatcctattattgccaatgtgtctacctctttatttttagcccacaagatatgcgtaaattcgatcccggcaaacttttcttcgagcttccaaatttcttggtagtaactcatcattttgtcatcactacatgtccactctttgttgacttgatttattacaagtaacgagtcacctagaactcagatccgacgaatgtcgagagcgaagtaattcgcagactgagtagcatagcctcatagtcagcaacattgtttaatactagaaattgtatttaatgaatgtacttaaaattctcacctttcggagaag

SEQ ID NO: 171551 - DNA, 588 bp, Zea Mays
agaatacgtcgaggaattccgacacaattctaattgcctcaatcggattggactctttgccaactactgataaatggtgacgggctccttcttctagttcaggcaagtacaacttagttactacttcctttccggatggggacaccaacttaactgttctcttgtcacaactgacagtggcttgatttctgtgtagccagttcatccctaggatgaaatctaacccttgagttcccattactactaggctagcggggaagtctatcccccttatttcaatccttagattcggacaaatcctatcggactaaacttttcccccaactgaattaactcttaaaggcgggatcattggttctatggggatgttatgtgattctacccaagatgcagaaacaaaagaatgcgtggcaccagtatcaaatagtacttttgctaggtaggattcgactggaaacatacctactaccacgtcctgagcatcctagattgcctcggcctccaggtggttcacctttccacagttgtaggcctgaccacgaacttctagggcgagaaactcctccttcctcactatcatcagtccct

SEQ ID NO: 171552 - DNA, 444 bp, Zea Mays
agacggcatgagggggtctagcagagcaaacgtggacttacggagtcacagacaatgtctacagggcggcgggcagcaggagcagaccacacgctgccatgacgacggtgggtgcccaaaccaaagtggcgaacaactacaaagacgggctagagaagctatcggttccaggacctaataaggcaaacttggattgaggagagagggaagaaaatattaaaggggaggaaagtactcaccgtcgtgcagcacagagcgcagtgctgttttcagccatgcctatcactggtgaggcatgggagcgagggagatgactactggtacggtgatgacggctacgcgcccacccgctctttccttattatattacaggctgcacgtggacccgcacggggtcacggaccacataagcagcgtcatccgacgacgaggcgatgacgaccg

SEQ ID NO: 171553 - DNA, 410 bp, Zea Mays
tgatttgcagtcctacaagcaggagaagaagtctgtcacagagtatgaagtgggcttcaacaagatggtccgctttgttcctcatgtggcttacaatgagatggagaaggcgagccagttccgtcagggcctaaaaccttctatcaggcatgccttgggagcctttccgttggtggatttccgtactacagtggagcaggcattgggtgtggagatgcaacaccagtacaccatggagtcacagaagtcttcgggtgttgatcagccgcgtggctaggacgcgaggaggggcaacactggaggtccagcccacaagaggggcaagtctcagcaccagcgccaccacccctaccatggcaaatcttctgaattgggtacttcgaaaggaagtactcagaggtatcgggctg

SEQ ID NO: 171554 - DNA, 514 bp, Zea Mays
ttgtagtatgcagggcaatgggtgaccagcttgagggcgatgaggaagagcacatgaagtaccgagatatggttgtggattacattgtggtatgtgggataactttttgtaattggtgaactgtagttgtcctcatgatgtcatgaattagaggagggctttagattttaattcaacatgctaaaattgttggtgctccatgaaggcattggactatctatgcttttctaatccttcttgtgcacatctgcagaaacaccgtgaggagtttgagccatttatcgaggatgaagttccgtttgaagaatattgcaactctatgctaaaggatgggacttgggctggccacatggagctgcaagccgcttctctgctgacaagaagaaatatatgcattcacatggtgagttagcgatgcaagcctagattttttgtttatttgatttatttgtactagcacacttcatgcagttaagaacaccatgtcttgtatggattatgttgctaacagaac

SEQ ID NO: 171555 - DNA, 1149 bp, Zea Mays
gtattaatttattcaatttcctatgtctctggactgggcgtcaaatgctggaaaagacagggtcttctgcgcaagaattcccaagacacagagtactgctacacagactgcgtgttagttaagtaaaagtccagggtttcttatgtaagaaagcaaggccgaaggggtattcctggtttctggccgcccgatctgcaatctaggttccagatttaattattgattcactcacttcagaccgcccgatcaaacagggacggctaggattaaaatctcgcacgcccgaaccgttacgccacgccaatcgttagatctagatcctagggtttatcacctatccatgccccggcccaacacctgccatctgatgcgatcgaacggcccagattaagtccccacaaaaacgaaccggtactaaatcctaaccctcgactagacgatcaacgactatagggtcttcttcttccctctgactccagacggcgccacaccacaccgagatggtgcaatctctcggtgagccggtgggcaacagccccagcatgtggatcaaggcgtgaaccgcgacagcgcatagcgaagataatggagaactacaggaatgtgctcttactggcgattgaggcgtagttcggccgcgtgacgtgacggtgcttcttcatcaccgccggtgaggttctgcttctttgtctccgtgatgttgcggacgattcccccactctgaatcagggagacgtcgtgggccatcccccatgctttgacgtcgaagaacccatgccctcctctcggtttcctgcgctcacccgcgatcaaacccactcccttctcccttggtttctctctcttaatggctgcaatccaggcggcgcacacctgccatttttttctgctccaggtcaaccgcgacggccaacaactaggaccatccgacttatgggcgagcagagcggtagcaccggagaacccgttctccgtttgaccaacgcccacatccagaagaatacgcgtatgcgaatacatcatggtcccagccgtcagtggtggtggaggtataggggtgatgtcacccatgacgcctggctaacgccatcctcactgaagaccatttttttattcagcggcgcacaggcttggctattgggccgcgtg

SEQ ID NO: 171556 - DNA, 707 bp, Zea Mays
tatttgttaagtgcctctagggcaaggacacggtctccgtcgatgatgtccttagaggttggctcatcgatgtcaggagtggctatggggcttgctcatggagatccgtgctttagctcttgcggcgtcattgctttggatccgtacatcaagcggaaaggtgtgaacccggtcgctctagattatgttgtgttcagtgcccatacgactttgggaagttggaccgcccatttgcctttcttgtcgtcgagtagccttttcttaattgcattgaaaatcttgccgttggtgcgctaaactactccgttggattgcggatggtagacggaggcgaacactgccttcatgccaatagagttgcaaaattcccggaagtcttggttatcgaagcttgccgttatcgactattagctcggatgcgactccgtactgacatacgatattctaccagaaaagttttttgcaccgtcttggaaattattgtggatacagctctggcctcgatccacttggtgaaatattcaatagcgacgaaggtgaatttgaggttgccttgggctatgggcagtggtccgagaatatctagtccccaccgctggagtggccagatatgcgtggtgagctttgtgagttgcaaaggggcgcctgttcgaggcgagaatttttggaatgcttcacacgatcgggttactcagttagccgtgcat

SEQ ID NO: 171557 - DNA, 951 bp, Zea Mays
ccctacccttcctatctgtccatgcatctgtcatgattgtacatcctgtttgctcccatgattccttgtggttcttgaaaccatccaataccttttgtttccttttctgcaagaatggtccactcatctcataaggactaggccctctcaaacctttaccaaattgcccaatggcctcaagcataagtgcaaagctaggaagggtgactgtgttgtgtgcaatactagcttcatagaaaaactgacatatgtactcacaagccttatcccttctctcttctcttttctgagttgacaatgttgtttgaaccttgttgctaaggttaattcctttatgcatcatttgaacaaattcttcaatagtagaaggtttataaaatctgtcaatagtgccaccacgtaccactgttctacagctaaggctactagaaccttttgttggcttttgcttcaccacaaggacttcattcccaagatcaatatccacttgctcacaactttcatcttctcagatgtctaagttaatttcatctctctctttccttttcttttgctttatggtccttttcttctgtattctttgtaagcaaagcaatcatatcttctttcacatcacttggaaccttcaaacactttgtaacattattccctttaataccagcaaggtgccacttaattcttgtaatcccagctttgcatagcttgtcacagtacttgcacttcagccaatgcttcttgtttgcatctgggcaaaaacaatgagcccaagctacatcatctgagttgataatagcttgtggtgctgctgcatttgatacagaggcagaggcgacacttgatggaataactacacaatttgaagacacataatgcataatattaggaaaatgaaaagctttaaacagatgaacatctattgaagaatgtgttgcggcctaccgcctacatcaa

SEQ ID NO: 171558 - DNA, 398 bp, Zea Mays
gccaccatagcgccataatttctttcttcccccaattcggttctccgcgccgccgtgagccgtcgcgtcgtggaccgccatttccaggtctgttcataccctctttgctctcgtttcagcaccttggtgggctatggaagcttatcggcctagccaattgaactagaccatgctagattgtcgggaacacctcgagtcgtcctcagttattgtcgtcgtcatggacagagtgattccgacctagattcgtgaaattagttgagggattaaggccgctaagggtagtatttggtgtcaaccaagtaagaagcttagcctctgcgtattccggccggtataggctcgccggagagcgcgctcgtcgccgtccaccgtcgtggacctgacgctgcgaagaa

SEQ ID NO: 171559 - DNA, 455 bp, Zea Mays
gaatttaaatcccattgaactaatgctgctcactgctccccatttattctccaccgaaatcagtccagaatcaaccctctgctccccaccctactctcccgctggaatcactataatcacttcactaaagaatcaatgtgctagggttcgaaaagaaaaaggtattatgcaatactataagaatagccatgattattgctcagaaaataatgatcaaacaatctgtcaatattctagaaagaaaaatcagaattgtcatatgcaatgaattgcgtttcaacatattacttgtacaacaacgaatgcattgaaacaaaattgggtaaggccagccaatacaatcacaccatggtttcatcatacatagttttacaggacaacaaagacatgtcagtgttagtctgatcacatacacaagaaaactgctaatacttaacaaaataatttacattttg

SEQ ID NO: 171560 - DNA, 753 bp, Zea Mays
gcagggaaccttttctctgtcattcacctctgctcttctctgtctctggtgattcctcccctccgacgactctcccctcgccggcggccgtgctccgatggctctactctagctggtgcttagccctctcctctctggtaagaagcctcagtgagcacccctctcccctcttctctcttctctctctgttcaaagcctagtgagcacacctcttccccacctttgattccctatatcaaatctgtgaattttctgtgaatcaaagtgttggatgtggttacattatatcccattgaaccccctgcaggttcctagctccttcgggagggtttccctacctccaatagccatttcattcaaaacctaaatccccgcacatcacatgttcgatgaaatgcccaaactaaccaaaaatgctccaatagatcccaaatttttcaggcaccttcacaacaccttcagtaacatattcacgcaatttcacgccaatccgatattctaggcttcaatttcacacatttccctgtttcaagcgatcgttttcgagccgagtgcccaaattccattttcttcgcctcaaatcaaaccaagtgcacacttcactcatatttacctatataaacctattcgtgaagtatcggctcaattccccgtcatttcatgcctcaattcgaattccaaacctcctatggcactatttcccgttcaaacatcgttttcgcgtcgtttgacctctcgatcgccatatctctc

SEQ ID NO: 171561 - DNA, 543 bp, Zea Mays
gcccgtcaccagtcaccagtagtcacaatcgaccagaattcaccaatgcaaactaatgcagggtgtgccagcgtcaggcgacttttgctgcgcgcggcagcagaagatagcccagaaggattatgtggctgaaaacagaaaccgtcaagggtcagaggttgaagtgatggagtaaacaaaaacgacaactttttctttcaaaccaaaccaaaaaagaagaagaagaagaagaagaagaagatgcaaacttctttgcgtaccttgtaaccggttgtttcattgagctttgaaaaaggatgcacgatatcaagttcacttccatccaaatgcacgatatcaagttcgttcccaccgtaccagccacactgctgcttctgacacactgatccacgataccaaattctctgttctgctcaagtggcttagcataattctcactagatattggaccttccttacgcccgcgataggtaaatggtttcccagggccacgggcgagcagcactgaagtacttctccacagattgatctgatgaatctccc

SEQ ID NO: 171562 - DNA, 301 bp, Zea Mays
cacagtctagacctgctaagctaggggatgcgaagaggacaaggttcataagggatatacacccacaacaatcgctccgacaggcctcggtgtccttgagaccttgctcccccttcaaaccctaatccccaatcttcatccaccctcgcctctctcatggcgccgctctcacgtttctcattattgtctgccactgtttttgtttcgctcgttgtactcctcgtctccattgacctctccaccattgaatacctcctcgcaattgctcctgctcctatatgccccatgatcacgcgccctt

SEQ ID NO: 171563 - DNA, 896 bp, Zea Mays
attgttgcttaacatgcacgtttaagttctgcccttcaatttttctgcatgttggttgggccggtttcgaaatttagcctgaggaaaaagaacccgccgattttcggttctgatctaccattttaattttttaatagatttaactgcaggggaccggctctagagggcatgcatggtgcgtgagcacgtgcaccagctggtgctcccaactcccaaggaccaaggtcaagcgggggaacgtacggtacctgatccatccacggcagcggcagctgcagcagcagcatgcatggcatagagaatattcataactgctacagcctgcaacggcgcgtgcaatgcatggatgcgtggcggcaccaaaagcgtacacgtacggtaccacgtacatgggaatatgtgcatgcatgcatgggagtagaggggagcgagggacgagtgcgtgtccgtacgtgcctggcctagtgccctactagtgcatgcaagtaaaaattatacgtttgctgtcgtggatggatcaggtacgagcccagctgcatgactttgatagcatcatccaccacgcatgcccactacagccagtcctgcgcatcatcgcgtcgcataaagatgatagtaagatagtcatcaaattaaagattcgtggtcaatagcgtaggcatcatgttccgtagagtcaaatttgtgggtgactggtaaaatggagctagcatgacagagactaaccatcaattgctcatgtcatgatttgagagcaataaacacagaggaatctgttgaaaggaaccaaaatgctggatctgaaccttaaatcggtgggttttttttgtcgggctgaatcagaatccggtccaataacctccatggagagagagaggcgccgaagagaaatgcgg

SEQ ID NO: 171564 - DNA, 1032 bp, Zea Mays
atggcgctaatcggagccgctactggcaatgcagacgtcgcctgctagctaagggataccatagaggcacgaaaggacacgagcgggaacaccattatcccatatgcgttcctagtgctagggtgtcatttgatgctaccggaattgggcttcgtcgagttcgtaagtttcaattctcccatcctccctttttctattttgtttttatctatcctttctaaattggtggtgtctcctttccctctcagcgatccaccatggtgctacgagagtgtcatgcccctctgctcaggagcatggcggagaagggggtcgctcgtgcggtcgtgccaaggcagagcaatagaggaggtacaagcaggattgtgtcatcaaaaagtggcaccaggcccagcgctagatgcggagggaccacgataacaagacccgacaccatagacaaggaggatgacgatgaggaacgcacagggtcgacacattcaggtgcaatccttgggggactgtaatatcccaaaaaatgttgaccaaaagttgatcttcggtgcgtggatgtgggaaaatggttgtgggacgttggaagttcggagtccgcgaatgtgaagatctcatttaaacgatatcatttgagtatttatttgtctgaatcggggcatggatggaggatttggttgtgagctgtcggtttcgcatcaagggcatcgaaggcatcgctccctcctcttctcaaaaaccctagccgcccctccccatccctcatagcagcagccgcccccctccttccctcatttttgcagcagccgccccccttcttccccattgcatgcagccgctcctctcctccccaaggtgttgcacccacctccctctaaaccctagcggccccctgttcctcctttggtgtgctgcattctccattggtggattggtgggaggaagaagaaagaaagaaaatgagtccaaggtgatattgttttccttttggtaattgtgctgcaatttcgttggattggatgtgggggttagattttgatc

SEQ ID NO: 171565 - DNA, 823 bp, Zea Mays
acattctttccatggcctttggatattcatccacaccgaatttctgcaacactattctagagaaatttggccaatctcccaagtctcccctcaacttcagaatctgcagccatctagctgcatttccctccatgttcatcgacgccgcaggtaccttcattgcatctgggacctgatacatgttgaagtagtcctcacatcgattcaaccaaatcgccggttccttgcctccaaacttggggaaaagcatcttaggtacatgttgttgcaactcccttcctcccggatcctggttcggcatggctcctcttctacctcctgtatccgatgactctggtcccgtgccaacatcctccatctctctcgccatagcttccaacctcatcctggccaacgccttcccattctcctccacgcgcctggatagaagtgtcctctcatctgcagcctgtttcaccgagtcggcagtcaattctgactgtcccaatagttggtgatgcaccttctccatagcctcaactttccctgtcaacctctccatcatcaccatcatcttgtcccaccttgcttccccttgtttagcttctgtcgccatggcttccaacaccagcctggactgcgccgaaaggtttgacagagggcgccgtggtgatcacctcctcttcttcctacagccaacctagcccccttgtgatcaccaacccacaccaaggaaggagagctttgataccaggtgtaaggatcgacgtcccgtggctgacagcgagctcccgcagcgtgagaagtcgaccaactggagaagaagacttcccagacacgctca

SEQ ID NO: 171566 - DNA, 468 bp, Zea Mays
cggacaacgggtatggatgaagtaaattcactttctccaaccaatcgttggttgtccacatttttctctccaggtaacagtagaatccaaggctacacaatatatgcatgcgtaccggcagcgaggtaaatatgcgaaggactctcgttccacgaccattgatttacccaaccaaaccaacgcttgctcccgtttacacgataattatactccctgcgatctttaaaaatccggtttcgtgctaggccgtgcatgtcagtgtgcagcagctgcagggccatgcaggaagatgttccatagtgctggaggtgaagagctcagcgatcgaccatctctctctctcgcaacgacattgtaggcatcgtcgtcgcacagcatctgaagccaaccttttggcaacggatttcgagcactcactaacctacgtagcatcatttccgttcagatcattccagttttggtcccggc

SEQ ID NO: 171567 - DNA, 451 bp, Zea Mays
ctaggatacaacttggagtacaagtaagatacaaacacatatgtagactatatatctctaatacacatccgcagtcacaacaggagggaattggatgcagagaatgggtcggaagccactaaacacctgtacatacagtccctttgtcatgatgtctgcaaatgatgtgcagaggggacatgtaacactcgaacctgccccaaagtaactttcttatggacgaagtggatgttaatctcagtgtgcttcgtgtgacgatgatgaaccaaattgttagtcatatagatagactgcactataactgtcgcaatagacaatggtcactgaaggaatcgagacatgaagcttctgaagcagctgtagcaaccaacaacactcgccaactgtatgtgcaacaattcaatacttagcctctgcacttagggatggcaattttacccgcgggttcggg

SEQ ID NO: 171568 - DNA, 771 bp, Zea Mays
attcgaaaaaataaaagaattttgaaatcaaatagaaaaaaacaaaaacaaaaaaacgcacgcacacacactcagccaacaggccattcggccaaccaggccagcagcccattctccctcaagccaacaacccttctctcacagccactacacgttaggacccacctgtcatttttctttggttcttctagttctatcctgttcgtttttctcatggaagaacactgaaacatcgctcgcttgccagttgcagccgccgcaccctgcgacccgcgtaagagcaccacgcagcctcgacgccgacgccgccagggagctgtcaccacgcccgaagacccgcctcaagccgcaacgtgctgcagagccgagcgacccgcgccatgcccagccgccctccagcctgcgccagccgaggagccgaccgaagccccgcgcaagaaaccgacacacgcacatccgttttcctgcgtttttggagtttactgcgtccgtttctccctccattcaagctccttgaacgccattgatggccatgaaacaccccgatgacctctgctctctctcccccactcacgaatgccgttttttctccccgtaactgccgctaccaccattaatagccttgcaccttctcctctccacagctccctccctcgcactataagtcgaagctgcagccacgccagagttcgggtccctcctcaatttctcctcccagctctccatgcgtgctggccgcgtgaagacgtcgtgccgcccctgtctgctcgc

SEQ ID NO: 171569 - DNA, 848 bp, Zea Mays
atttattttctcattaaaaatcattttctaattacttttactggattttctattctctggactgggcgcataaatatcagaaacaacaggggccatctcgcaaaagatcataagactcaggattccccccgcacaggacggcgggtttattataacaaaatcgaggggctctttagaaagaaagccagggcgaaggggtatcactcaatctaggccgttggatcaacagctgagggcacggattagatcgggtctttaggtgaaacggtattcaacccgggccgcacgatccgagatcgacggccgacgtagatgaatcagcttgattcgttccacgatcccccaagttagcttcagtctacgtgtgatctagtccccacgataccgatctaacggccaattgctcaccctcccctggatttaatcctggccctacatctagatccgacgtcgcagagcactccttcaacacccggtcaccagagcagcggcgcacaacctacacggcggaggacatggctgaccgagagccccacccccacacggacgcgaaaactcccatcccgttgatgctacgaattgcggagaccaaggcaaactctatagaaccatacacttaccggcgacgaagtccgagcggcccgaccatgatgaggcgtcgcccacggcgaactctctatgacggcgatgaaattagcccgcccaggatgccttcctacgtccgagagtatcttcgcttccctccagaggcccccatcgaagcgccgtggcccgaggaccagctccaacagcgcgcacgaccggaacggctgtgcagtcactccctcccatggtttctttccgctcgg

SEQ ID NO: 171570 - DNA, 547 bp, Zea Mays
tttggggcaccaaggttaatctttgaaaacatagcagaagctgaggctactagactggaggatgttgatgtactagaagaggaacgattgaatacagtgattcagtcggcccggtatcagcaaactctgaggcgctatcatgacaaggccatacgacatcgatccttcgcagtgggagacctcatcctccgctgaattctaacgggggagggacggcacaaattatcaccactatgggaaggaccattcatagtagcagaagtcactcggcctggatcatatcgtcttactcaaatggacggcagaaattgggaactcatggaacatagaacatctcaggaagttttacccctagctatatttcaaaagctattgggacggcattgtattctataaactgggaaatatatcatcaataaaaagacttcaaaggcactcaaattgtttactgtcaacctgcatgcttacttaactcagggtgaccactataccctactaacggagcaattgacttaagtcggcaacgacttaaggcggtgtgacatgc

SEQ ID NO: 171571 - DNA, 616 bp, Zea Mays
cacagccgttggggaagggcgccattggtggggagaaaacaacgcgtggggaggaatttgtggtgcggctgtcggtgttgaaggcgggcgaggatttggggcgagggtggcagccgcagcgtgtgcatctcggcagccgttggggaagggcgccgttggtggggagaaagcagcacatggggaggaatttggggtgcggtcgccggcgttgaaagcagcatgtggggggaggaagccgcgcgtggggagacaggcgggggcacggtgatgcctaggtgtggacgcccccgctgtgaacttaaggtgtagtagagattggacttttaaacgaaaggtgggaatagaaagcctagtgatcttcgccttacctaggctttgtccatggtgtctgtttgccaacaaaatcaagcgttctcgttttttcttatttggattttctgcattgcataagttgtacaacacatttatagttacaaaagaacttggtagggcgaacgaatctcatgagcgttgttatctgctttcgctaaaccttttgagcaatggagcaaaaataattgtgctcatcttgtgctaaggtgatgcctttatgcaagtggaatttgatcaaatctag

SEQ ID NO: 171572 - DNA, 640 bp, Zea Mays
tttcctattcccttggtcttggtacactcgtaccattggaatcttgcatactaatatttctatatatgcttaccttcatatcccaatgattattcaaaacctttctgttaatatgcccttgatcacccttgcttcttgatggtccatgagcgaccattctatttcacacatccttgataatctcactgtttcctcataacttccctcggtaataatttatgttacttcaacccttctgttggaaccttacctatcttacccttgattgttttctccaccttgtcgttttgcgagtcttgccttaactatatcctttgtcatgcttttaattattatcagatgcacccttgacacctctatatcctacattgatgtttgtctcatacctgccctttaaaaatcgcccctcttccgcctcataccttccttctcttggttgtatcctcttctttggctcgcgagtttgtaacctcatcctttgttgtgcttttgtttcttattgcctttacccttctcatctctcaatcttaccttggcaattacgctatgttcgttatctaaaacctccaatctcccaccttagttcaagcatggtctcttacttatctcacccttgactatatcctcttctttaccgcgt

SEQ ID NO: 171573 - DNA, 949 bp, Zea Mays
gctcggcatccaccaacgcatgcaggtcgttgtgggtgatggaggagaccgaccataggtcgcggggaggaagcacgttcactttctcggccatcagagcaggggaagaagaccgggggagagcacgaaagcttttttgaggctaggagaaagggtggctagggcaggaaaacaggagcagaaggtaaggagccgaagtgtccatctcggacgaatttatagggcaggcggagtcaccgagtcttgggccaagccacctagagacaaaccaagaacgggccgggacgcttcgaattccttgcatgcgtacgacaacggtcggcctgcgggcatacgcgtctcgtcgcatttaatgcccgcccctcctgtcagctgacgtcaggcagcaagcgccgctttgtattacgcatcgaaaggtgtgtcgttccctcttcccaccttttccatctccttgcatgtaacgagaaaaagtgtctcccgcctcgggcatccttcctcaaggaaaagggtgagaagaataatactgttcgggggttcgaaggtcaggccctcataagggttcgggagatcgcctcaggacgactgggttccgggccctttactggttaggggttcgaaggttggcccctcggaagggtatcacgattgtcctagaacgtagagccagaaatgactatgggtatgtccatgcatggccaaaggctcgggctacgatcctgagatacccttagacatgtctaagacccccgagagtgattcataacggtatcccattggagggaggcaatcgagccctcgaaccccatcgaacgggaccgggaccgggaccaggcgaatcacccgcatgaacttttggggtgcgtctccggaccactagctgactcctatcaaacaaagctcgggcctccgcttagattacccattaacagctcaacgaaaatggcatgct

SEQ ID NO: 171574 - DNA, 837 bp, Zea Mays
ccgccagcaccaccctcgggggctaggttttctgcaacagccacctctaaggctgaaggatcctcagtcacctccatgggagtcgggcaatcctgaccaacttcttgacaccgaagactgccttccaaagtcgacgatgcgcgagatactgctcgggatacctctaatcccacgtctagaatttcagagcaaacatccatcatgtcgccagcagtcggctccgatagcatatcttcaggaacgacatcctcaagggcctgatcaaaatctgttatggacaattcttgaaggctgacaagagcagacagagctggagaaggaatatcactatccccctactacctctgtaacgctggctattcttacaaattagcggaacttcttcttcctcttcttcgtcttcatcaaaaatacggacaatagccagtgcacagtcacacccattggggtcagcttctacacggtcacacccattgggatcagtttctgcacggtcacacccattggggttagcttctgcacggtcacacctattggggtcagcttctgcatggtcacacccattggggtcagcttctgcacggtcacacccattgggatcagcttcaacaaggtcacacccattggggtcagcttcaacatgtacgccaccattgggatcaacctcaggaaggacttctgccggtacttcttcacaaacaggagcagaagggccagcatcctgatccaagcatgacagtcaccaaagccgcctctttttcttcttcttctcctcaacaggcgcagttgggtgactaacttggcgaggacgctttgggcgagtaccctcaggctttc

SEQ ID NO: 171575 - DNA, 906 bp, Zea Mays
ctgagtcctagcggcaagaggcaaaacacctctaggcctcccaggacgtctctaaacaggctgagcatgaacaccatgagaggggcggttcatgtccttcctgctcgactcagaaacccaccgctcatctctcttcctcctaaagcaaaaataagctagatgcccatccctctcacaatattcacaatggtacctcacctctctcttgggtggattttgtttgtggaagggggctttcttttcggatggctgaggggctctaggaaggggatcgctagagatgtcgggaaaggtgtcaagggtgttcctaagatggttaggttttggaagccacacttgtttctgaggaggatctctcataggttcatcaatcacaccatctctcacatgggtgacaggcttagcagaggtggttttgataagcttgggagtggatgaaggtttctctgaaggtgtcaaaccactgcactcaccaaccttcccaaagtgagcgacactcccatccttagtagcaaagcctaaccccggtccgccagttcccctcttgaactgactgaccatcatgcccaactagggctcactgcacgacacctaactcaatatagatcaaaggtatgtgttttcttcctcgattcttgtcttttcgtgtctacaggactcaagggcagattgcaaacgctcacaaagtgcacactgcgcaggtgcaggcactcactgagctagccttctgaagcaaagctatcccagcgtctctctctgctagctcagactgcaagccaggacaaacggtacacgcacccaacaggatagacttagatctcaacttgtcgcgctcatctagcaaggtggagtacttggtctgcaaagtggtgatgttcgacatgtgtagagcgcactcatcacatt

SEQ ID NO: 171576 - DNA, 1837 bp, Zea Mays
tgatcgagtcttctgttgccggtcctgctgctgtgcccaaagaacctggaacttccttttgagatgccctttttcttcctcctttgccctttcaacttgcatggccttgttggaaaggtgagagaagttgaggaagtcttggctagccagaattgtcttgagttctggcctgagtcccttcaggaaatgggccatcttcttgctctcggtactgacatcatctggcgcgtagtgggctaactctgtgaacttgtgcacatattcgctgacagaccttccgtcttgagtcaattctcggaactcgtcctccttaagctgtaccagtccttggggcacatggtgctcccggaaggccgcttcaaattctgcccaggtagcatctctgatggtgacgttgaaggtgtcccaccaggctaaggccatcccagaaagctggtgggcagccagttgaacacgctgattttctgggcaaccaatggcttccagtttccttttgatcgtgcgcatccaatcgtctgcatcgagggggttgcttgatccggcgaacgtgggaggtttgagtctcaggaagtcccccattctgtcttgtggtcttccaccattcggccgttgattttccagatttcgagtgaggacctcgatgagtcgggtttgattggctagaacttgggctaggtctaagggtagtggtggaggtgcggggaggtgggtttcactttcttctctaacgacttccccttcagctctcaggggaaaccccgctccaatcccagaggcggtaggcgtggttttatccgaagccatctgccagggaagagagtcactattatgcacatgcaaattgttttcaaccaagttattttattcattacaccatcacattacaagcataagactactacaggtggaactacacgagagcgttccccgaggtactaacgaattccttatctaaggtgtccccaaatgccttgagaagatcatcgaggcttgctagggataaatcctcgtcgtcggaccaatcatctattctgggggaggtagggctagaggggccttcttcttcttcttctctgtctggcatccttggttggtggtcttcttctggattttctttttgggggcgagtttctttagcttcttgtcatagtccatcttcaaggtccgataggcctcacgggtgttggtttccttgccttctgctatgtcgagactctcctggagggatgccttctcttgcttaagctctttgacttgctgctctaggctttccactcgggagtttaggtgggtgcaatgggaggagagctcgtcgtagtggttgtcgagggtgtggaggtatctggccatgtagacgatagtggggtcatcttctgtgggatttcctcctgacagagcctggagtcttttcctccaggtgggggtgttttcgttgctgggtgggaaatatcggagggggtctcagagatctctcggctatagttttggcacagttgtttgagggcttttcgagcaacgctctggcaagtgtctgggaagcggtgcccgatgaaggtaatttggaagggagggtggtttgggtagttccggctttctcccaagtagaccgccatagagcacttttctattccattttcacggtactccttccagacatattcgggcttcttgcggatccccaagcgtagcgcgcaactccgaagaaggtgagggaagccttcctcctctgagcaataggaggtcctaatcacccaggggttttccatctggtagacgaaaagaaaggtctattaatatcgggggaaaaggggaaagagtgtttcttggggggtaagag

SEQ ID NO: 171577 - DNA, 596 bp, Zea Mays
ggccggccggccgccgggtggttgatcaagctcctcgctcgccctttacagccagcccagccgagaaatgatggcaagggccctgaaggcggcgatttttttcgctgtaggtagtagtgtgagtgcgtgcgataagcagcgtcagtggattccaccacgcaacgcctgtctgtcaacatgtggtggtgggactgggacgtagcttcctcggtttgcattggcggcgcttaaagatctgaggagcactcatctgcgatggtgcgccgccgctagggttcagcacggctagctgtctagttaattagctttggttggcttactgtggggggtggtgacgagactggaccggactgcttctcgtcatcaactttggcttgccaatgctctgtggccggacctccagattcgatcggccgatacgctagttgacctcccgcccgacccctgttcccttgttccagtatcggcctgccggtgcttctaactgaccgcttccacggctgactcgacttctgctggacacgaaaaaggtacattatggtcactgtttaggggtcggactgagccattatttttatacctcgggctggcaccat

SEQ ID NO: 171578 - DNA, 769 bp, Zea Mays
ggcgtgcagagatggaagggagagagaggaattggcctgccactcaaatcgttcgctgccggtgtgtcttcggcctcgaggtacggacccactgtagttctccatctgttgtggttgctcatgtgatcgacggggtggggtttcgccggagctgtaccatacgcgcatcaggccgccatggggggaaagacattcctgcatggttgttctggtgtcagcactcagcaggggaccttggggcatcgctgatcctcggggcaggtgctcacgggagtagctagtcgtgggagtccttggcgccgtcacaattcctcactggggccggattgcactactccggcaacttctgccatggggaactgtggcgccaccgccgtggtgggcgcatgccttcgcgatggtgactggggaagggataaagtgtgatggctgttcatcacggaaccatcagctcagaataagtgacagataccctttcgcacgttaagtaacgaccgtggatttctggtcctatggcaatcatcatgtaccggttcataaagaggtttgtgtaatatgcaccgttgatcctgcatccaacggtgctcgttggccgataccccttcggttgatgaatttgcataagagcccctgccctttacactaatcaacccgcagtacacctctgcgttgttctgagtctggggaaaacttctggttctgcccccgttgttctctgtaattagtactcagccccgagaacaaagaaattggataaataaatttagaa

SEQ ID NO: 171579 - DNA, 741 bp, Zea Mays
ccccacatccaatccaacgaaattgcagcacaattaccaaaaggaaaacaatatcaccttagactccttttctttctttcttcttcctcccaccaatccacaatggagaatgcagcacaccaaaggaggaaccagggggtggctagggtttagagggaggtgggtgcagtaccttggggaggagaggagcgactgcaatggggaagaagggggggggggctgctgcaaaaatgagggaaggaagggggtggctgctgctatgagggaaggggaggggcggctagggtttttgagaagaggagggagcgatgcccccaatgcccttgatgcgaaaccgacggctcacaaccaaatcccccatccatgcccgattcagacaaatgaatactcaaatgatatcgtttaaatgagatcttcacatctacggactccgaacttccaacggcctacaaccattttcccacatccacgcatcgaagatcaacttttggtcaatgtttttttgggatattacaagagtagtaatacccggtgggtatttacccattgccatctctatcggaggagttcatcaccgaaggaagcccgaactgttgtacagatcgccaaacctcgcagcccgcagctcgcgcgaccgtcgtcgccaccgaagccacccatgcctcactagagacgactgtgcctcgcgtgaccactggaggcgaccatcaatgtcgtgcacgcatggggaaccaccgccgc

SEQ ID NO: 171580 - DNA, 759 bp, Zea Mays
cacatcagcaagttggcatggggaccccagctgcatattgcacagaggccgagtcatgccgaagttcagtttcaagagactcattaccatgctcatgagcttctcccttttcttctcatcgtccttcacataaaaccactcatttgtccacccggtcggccatttggtgtggtagccaatcgcgggggcctttgtgtccttccggtatgcaaagttgtagcattcgaagttcttgtgcaggctatcgactcttgcctttgtctgataatgaagctcgtgcaccagacagaatccttcaatgttggcactttttccttggctttgaagagcctagatatacacgctgagcctaacaatggtgttggggtcatctggtgtaggtaatttcaaactttttcaaaacttcacaaatcatctcataaagggggaaccgaagccctgtcctgaagaagctcttgaagactacaacttcatcgtctttcagctctcgaatcgtctcctctccagcaaaacgaaccagttcatcatcattttctccaaaatatcctagtttcttcattataactaaatcctcagctttaattgtggatctcccgaattcaatatggctgagcttagtcggacatagaatactatcatcatcctcactttcattttcactttcagcttcagccacggtctgttcagcttcagcattagtaataccttcgtcaatagtttcttcttgcgcaaccaacccagaacgcctcatcatttctg

SEQ ID NO: 171581 - DNA, 1049 bp, Zea Mays
ggaagttaggccccgacaggtgggcccagggatacaataatatgaagcgcggagcgtttcatagagctagtgggctaaggtctttatccatggtgggaaggaatcctctcttggtcaccgtgtaggctcctctagccaaactcgttttcgccacgtcttgtcagcgtgtgggagaaggctctaacataggttgcggcgtaggctggctcgtcgacttatgtaggggagtaggtgggtggtgtcatcctgtcccatctgtctatcattgcatctggtgctgtatcgggaataacaagagtcgttatgggagttacccacgtgcggcgcactggttcaatggtcttcgcctcagtaacgtgcgggttattggcacaccccaggccttgtggactacacacgctacttgcaattaatatggggcatacgctacctaccactggtgtggacaggtgcacatcctgcctttatttaatgcgggtggccctcacgtccgaggccatcgtcaagaagtgtctggcagcttccgtgataagcctcaagccacaaggcagcactgcacctccgccttgacggagagtagtggttgggaatgcacgtagacatggcagctctagacctcccctgactaggggttcgaaatgcgattgttgaggtccaagtcccatttgtgatggctcagacttgtggtggcactagaaatcccctggtcggaggttcaaatagcacacataggggttcaggaccatcccacagggatacagcccaaaatgtagatgccgagcaatctcactgtcgaagtgcgtgatggcactggtggcccagaggctagtggtcccgccaagcccaaactctaagttggagtagactgctcatcatcccaaggcttgggtggccacaggggtctcgcctagacccagcaggagtgtgtacccatatttggggtgacaacagaggccctaggcccaccttgggtgaggtggcaaacccacatgtggggccatacctgcaccttcctctagacacatgttggtcataagcagcagcttcgc

SEQ ID NO: 171582 - DNA, 356 bp, Zea Mays
actgattcatacatattggagatcattgggggggaggaggtcagaaaagaagtaactttgtgtccttaaaaaaatccagatccagtggagtagttaaggcctagcagtcacattgaacaatacaatatattgtaatcaacagtctgatcaaatcattagcaaacttactctgcataaagggtcatggtggattgaattttacagaactacaaatgcttccagagcttgtgatagctaattgtatccatcataaaaaaatgaaggctttagacctgtcattggataccctaacccattccccaaattcacactcgtgatttgggtcgggtatgggtaactgggtaacttgctaccct

SEQ ID NO: 171583 - DNA, 757 bp, Zea Mays
ccgaagtcctccgacgaaggactcggttcacgcttccgtttgtcgccggagcgacgcggcgagccctgacctttcttgtccttgccgatggctagatggaagagaagagagggttgagaaagaaacaatggatgatcagaggatgtgtgataacaacaacggagcaaacaagctatttatagaggccgatagcaactgttcatctcctaccacgcccaccgaacagtcgcaagtattcaataagcaattcaaatcgcctgaaggcgagtgaggcagcagacgatgcttcgcgtaacacgacaccatttggactaaggtcaactgcttgggcaatatgattacacccagcggtcacgtcaagttaccactccaggacaatgtgctaaacgctttgcgtaccaagacgtcccttggtcacacccattggaaaacacccattgggtgggggacatccaggaattttctatacgagagaaataagaagttgtgaacaaagtcgagccaagtcgcgcttgcgcctatgagccaagtgcaaagcagcgttgtgcgtgggcctgcatgcgcttatccagccgaccgataaaattgccatgcgtaagcaatccagactggctcgcactgatgcgtgttgcggtcggttcacacgtaattttttccctagccgtggcccgtgggactgtgggaggaccaaagacgagctctactgactgctgagacctacgagcaggtgcccgtcatgtgaggcaagcataggttt

SEQ ID NO: 171584 - DNA, 596 bp, Zea Mays
agtaatattaaaataatttgagttaaaacaaatagaaacaaaaattctgtttgtgagtttcaagaaatgaataagatccttatatgagttaagatattcacaagtgttctctaaaagattgagtttaaaatgtctcttaatagagattattccttagaaagtaccttcaattaaaataaataagtaatgaatattagtgcacttttgattgaaccacacacgcaaagtggtattttatttgcatatattgtttgtgtgtatgaattatatatttaaaagcatttagataagtgaataagataaataaataatcagtactaaattctaattacatactcggtctttattggacgatgcattttattgaaactaaaaaaacataaattaaaaaaaacaaaagaaaaagaagaacgtcatatctgttgtcggccaaccaaaaaaaaaacaaaacatctagctaattacgtctagcagccgaagttatctccaacctaaagattgacttcagataaaatagcaacaacccttcgtgaaatcttctcggacaccgagcagctcgccaacaaactctttgctatggaggcatataaatcccg

SEQ ID NO: 171585 - DNA, 848 bp, Zea Mays
cttggttggcctgtgcaagcgcgcatttttcattagcttcagccaattgccttcgaagatcttcaatctcggttttttgggcttcgatctgagcatggtagttggtttcatcttctttcactttatctaccaatgaaatcaaaattttatctttttccaagccttcgtttctcaactcaatcacctctgaacgaaggttgttgagtgctatggtataactctcgtcttcagcattcttttgtgccctcaaggcattactaagaatcaagacctgtagagaagaagaaagaattgagtatgacaataaaatacttcgtttccaacttcaaagttaacttttatacctttatgctattgtacgcgaggctatcagcaagttcatctttcgacagaatcgaaagaccttcttcaagtttcggaaatcccatactcttagctatctcccggcaaacggatatttctttgttgtccgggagacagtataggaagtcgtcatcgttagtgccgttaaacactaaagctcccttcgaatatttcaattttcacgcatagtatctggcttccagaacttcttcttcgaacaactttttccccgaagcatgacgataaatataatcagcatcctcgacagcggcttcggcgacaggagattttgccctttatgccgcgtcttgcccttctaccatgccagcatcagaagcctattgatcagttttatcttcaggcgcgacgaccttcgtctcaataggcgttgcaggctcagcttcggcctcggcttggactttagcagcttcagcaattttcttaataggaccagggctcaaggactttgcggtctccaagacaac

SEQ ID NO: 171586 - DNA, 544 bp, Zea Mays
tgagccagccagagtcagattctgatgactggagggagccaatcatcagatatataaagaatgaagaggagccagatgacaaaactgcagcagaacgcatcgtaaggcagtgtactcactacactcttattggggaagcactgtacagaaggggcacaacaggagtcctcataaagtgcattctttcggctactgggaagcaactactagatgagatccacaccgggcaatgcgggatacacgcagcatccaggactctggttgggaaggtcttcaggtctggtttctactggccaacagcaaagagtgatgcagtcgagttagtccagaggtgtgaagcttgccaatacttatcaaagcagcagcatttaccagcacagcaactgcaaaccatacccgtaacatggccatttgcgtgctggagactggacatgattggacccttcaagaaagctcaaggaggatacactcacgtgctggttgtcattgacaaattcactaaatggatagagtgcaaacctattgcttctctgacctcagctaa

SEQ ID NO: 171587 - DNA, 813 bp, Zea Mays
cccaaacatactttgccaacgccaccatagcgttcggcgtcaactgatggatctgaatttcgaatttccgcagtacttccactatgtatcgatgtgccggcaagcaaagtctagcaacgaaaaaggcctcgaacacaactaactcaccctccagttcgaggacatcttcaacccccggtgcttgcccaactccattcccaaaataacccaaacgctgcatctcatgcacgtggcccgagtaaatcctcgatgtcccaaactccacagtgtggttaggttgtagctccataaccgctgtcggatcactaatcgccttcttcgaggatggcgcgttcgaggatgtcgttgcagcggacgatgatgaagaacaagatggcagcatcacataccgtcgacggtggcgagctgtctgcttgacgcgggctagatcaccggtggcgcaagaggaagaaggcaacaaacaaaaagcaagaggcctaaggtttttttcgcacgaagatgggtaaaaaccccgcagcgacacgcgtgcggctttttataggccaggaaaaatgcctcaagaactcaatagttccacagtaaaacatcacctttcaacggtcacatttcaaaaacccccacgggaccacttcaaccgagcgagggcagcgtctcgaccatctccggaaaacgacttcggtaccagctcactaagttgaactggccccttgaaaggcaagtgttggggcgaaggtgcaccgcccccaacgctcggttgattcataacaaggataaaacatgacggagaaaaagcgaaggcagacgaagactgac

SEQ ID NO: 171588 - DNA, 693 bp, Zea Mays
tccgacgtacccgattctatcacccaattcgttatctgatcccttaatctgagctctccattttggattcgatgacccccacatctccttcctctcgaccgaggccgagcagagcacccaaccctaagctagcgagctcaccggagaacaccaacccggcatgcttggcccgattaaccatgcacacgcggtgtaaagaatggcgaacttgttagcagtgcccttaccgcggatttagggtgacaatgcccccgcccacgcgtggagcggctcggcggctgagaagaactttggtgagcaatccatgcgactccggcgatccctaggtttggcagcaccttcgatgaagccccatagaccctggtgatcccatatgcgccacttgccgaggtcatgaggtcttggacaccgatggcatcaacggcggggcaaggataccttgcgatggccgcaaccttggtctctactccctccgacgatggtagattttggttcctcgagtttcctcgatttgggtggccaggagggattcatggggccctgatttatagcctcgaccatggaagtgttggccaggcgaatgtgaccatcggaggtggccaatgaaccggaccgtagagaattcgctgcgtttgttaggattcggagaagatgagtccgacagctaggccccacgcatcaccaagtgtagga

SEQ ID NO: 171589 - DNA, 336 bp, Zea Mays
ttagccacggatttacttatgccagtgcttccttccatctccggccaccgggcgtcttactcaaaattcgcggccaccgcccgttagtactataaattgagtgcaccatcagcttcgttatgtattcgagcatctagcgcacccttctgcacctcaaatcctccaccagaaagcttcaatttgggatttcccccaaaacactcaggaactccgcacagctagacctcgccgtggtcagcccgattcaggtccaatctcaccctcggtttccttgtttcaacatccttgtttgctcttgatgctcaccgacccgttaaatcgaactagaccacccca

SEQ ID NO: 171590 - DNA, 512 bp, Zea Mays
ggcatttctccggcgatgtcgccgccgcgatttggtgggtggcgccgccggtggcggtcgggtgagaccggcttgtgctgggtcatcgatagcgcaatctgcggttcagattagaaggcatccactggtttaggtcagagtagcgtgggtcgtccgattcggatcggacgggcgagggatgaatcagggttcattaaatctgtgcgctcggttctggattgaacggatcggtgcacggacgagatcggcaccgtcggtttcggatccaatggttattaacgcgtaccggttcatccgcggtaggatctaatcctagtcgctggatttagatctgacggccaaaatagcgctacaccccttcgcgagtgtagttttccacataggcccctcggttttcaaggaaacaacccgcaatcctcggcgggatagttctgagtcttaggagttttatacagcagcccctgaacccgttggaaattgatgtgcagtctagacagttaataaaacctata

SEQ ID NO: 171591 - DNA, 632 bp, Zea Mays
gagaattacaacaaatccctccccctcgatcaggaaggcaacccgacgtttgcatgcccagctgggtagagtcccccacttattcagaggtagccgaagccaaagtgctgcttgctgaaggacagaggcctgactgctgaagccgtggttgctgattttgtcttcaagaacatccaacctctgaagggcagagtctaccctgcttacttgtacactggcatcaacgattctacccaagtcactaacaggcaaattcccaatgaggacctgctaagccgacttgatatgatactgaggggtagggtttcgaatgttggtgcccccttatcttattctgcatggaacctgcctccgcatagtcccttctctgattttgtctccaatcctcccgcgctcaagatggtagcccgggccatagagtgcgaccctcctcagaggacattgaggccttaattgctcccctctgaaatcttcccgaggctgagaaataaactcacttcgagatgccgtccaacacccatgatgttgagatggatgttgttcttagcttgctggctggagaatcatttgactctacctgcactgagccgatggcaattgcaattgggcaagagtttggcgaagatgaggaa

SEQ ID NO: 171592 - DNA, 682 bp, Zea Mays
gcgttggaagtgattatattccaacgcttgttatgtgttgcaacttatatctgttgaattacaatggttctagcaacatttaacatgcgttgcaaactgtatgcgtagagtaaatacgatcatagcaacgattaccatgtgttgcagccgtatgcgtagagtaactagaatgcttgtaacgtttacatgcgttgcaaaccgtatctgtagattaattgtggtactttagcaattttgcaattgtggcttttatttttaactaaagcattgtagttggggatgctaaattgcgcaaaaaaatgtgtaaagtggggggaattgataacaatacaaagtcttttagtccactttgtatcgttttatttattagaatatttattttatcttattgtcattgtgtttcacttattaaaacatttgtcatatctctaattattgcaaaaaacatgcaaaaaacatgtcttcaagagaaatcaaactcacaacctacaccttccaccaaagtaatactcactaaccaaatggaccttattgatgtgtacgtttagttgttacactcaatttttgttatagaatcctgcgaaacgctaaatctctctaaatctctacaagcaagcctctcaagattgatgtacgtgtgcccaccgccgccccaggtccgccctcagtctgcgcgccaaac

SEQ ID NO: 171593 - DNA, 569 bp, Zea Mays
gtgggatccaaaccctaagagtgcaagaaaccctaattggaaccttggaaaaccctaaacctaaaccctagggggctaagtgcaaaattagtgcacttttgggctaaagtgcaaaaactatgaagttaagatgtcttaagtcatatggttcacaattatgaagatttgcaacctaaaccctgagttttggacttatttgcaaaagagccacatttgaactcttttgactaagtctgaatttcagtgtaatgggttcatctttggggccttgtaacttccaaacaaaagggattctgccctaggtcaccacatcaatattgtagacctatggaaggagaataactttgctatagaaatcatgccttgctaccgtgaagaattctgagacaaatgagcctgaagttggactgtcacattgcttgaaatctgaaattcagattaacagtggaatggcatggagttagggctcgaattcaagcatgatccagcaagaatttggctaggggtgctataacaaagatgaagatggtttaatggtttacaactttgatgcagggccttggatgtgt

SEQ ID NO: 171594 - DNA, 924 bp, Zea Mays
atcagagttcgagtgcaatgaaaaacatgcaatggtcgtcacatcatcaatgtgttggaatggtaaggaagatagttgacctaattaggattcttgtatgtagttggaatgtagggccgcttacaggtgggttccgatagttagttgagacaatgaccagaagacatgtaaatatgttatgtgtacaggagactaaatgaaagaatcaaaagggaaataatgtggatataatatcgactttaaactctgtatgacgagtgaagtcggctatccaaaagtagacaatgaaggtgcaaggatggatagcaagagccgctaaatttaaagagtatatgtatagaataaattggagacgttttcccttctaataacctagttacatttacgaaacctgactaagtctgttggagttgatcattcaaacgagctcttcaaaacactcacctacgttagcacatgcggttgttataaagatttagtccgtccgctgatgttcccgtttgtccatcctagacgtaacaagtttcgtgcgccatgatgcttgagatagacggaagatcgccgacgttacctaaacacataatagccgacgaccagtcaaccacagatacactatccctgtctgtttgatccagagtcaatccgtgggtctatctatgcaggattgcacgaactgtatgcacacaagcgctctcgttcaacccccgcacggcacaattcaggtcctcttatccgccagccaatggtattttacttttcgtagccgatccaagaaagatgatagcgcgaggaaccgcaattcgaagctccttaccttatccccttctgcgtgataggtgtgtatgtttcatcctcgcacgggcaaacgaacgccacgcatattttcccctacccctccctcgcccatccacaggaaaaaaaaac

SEQ ID NO: 171595 - DNA, 738 bp, Zea Mays
ttcgtgttcatcatatagttatagtgttgaacattatcattaatttagttgttttccgagtggtcgaaatattgaacaagaaagatatttgtgtgacatataagataagaggtaaagcatgtgaagtgttaacgtattatatatatctttactacctattaagcaagtagtgtagaccatatgtcgtgccctcatctctcccaccgcgtacgcgtaaaccatggtttgtctcacacaacaagccccccgcacccgccgcaacaaaccccctgcatccgccgtatttgcttgcagtcagccaccaacgacctccccgacattcgtggaatcgccataacaaaccccccaccctcgccgcatctgccagccgtattctttcactgtgcacttgtctccttactgttcctaccatcatcatcattgccttcctcgctcactagccttgaaccctagtgtgacttcctccttgctttcttggctccccgcgacacccgccgcggcaccctcataccttcgtgctccctccacctctcgctccacgaggccaccgcccgagtcgtgctgggcctgccgtcctccacacactcgtgaccactacctcctctaacgccaccccgccgagacacattcaaaaacaaagcatgcatgatcatcatcgacgctctcatcggaggaaaacacgcaattgtctaagcgacccgatgaggcagattgtggctacaatctccacactagtgc

SEQ ID NO: 171596 - DNA, 529 bp, Zea Mays
ctctgacatttctgcggaggtcacatgccactatgagccaacatactctgacatttctgtgataatgctatccatagtgggttttcctaaatttctcatatatatttaatttttacatcacatagttaacattttattcatacttttcttcctctcacatcagttcccattaaattattcccttttatcccactttaaccataaaatatcattttctatacctatccattatcattatctatttttctccaactaacaacttttaacgtgcacgtagatccacgctagggggcgtgctgctgctctcctgcttctggcggtgtcctgcggtttccatcaccactgtagcgtgtagaggatgatttggcggctatcattgcagcaaaaaaaagtctcctaaacagctacagacaaggggaggaagtggcaggcgagaactgttgcaggtgggtgcttttggttataataatagaacgagatattataagacgatcctataaataaggttgtttggtaaaggttagaggtt

SEQ ID NO: 171597 - DNA, 503 bp, Zea Mays
taaaaagaccatgaaaaacatggaatcatggcttaggccaattattaaagttgaaatacactaactaaactacaacaattgttataaaagtttggccaaaatagtttattaaaaaccccaaaaaggccctccaagtgaaagcaccctagggggaatctgaaaatcagatttctgaatttcagctttcacctagaacttgagcgcgttcaccttgatccctttctcaaattcttaagtccccattgacaattttgttctaaactaacccctctgtaatgtgtgtgaagatggcaacgatatgcgtgccctagacacgtcaaacccaggattttctctcagagttcagcagtgagacaaacccaacttcacccctccatatctcttgatccagtcagcgaaacccataagcctccacacacaaatgacaaaggaatgtcaggggaagagatctctcaacgggatcatggccataatctcaaagatttggggctaatccatgcttg

SEQ ID NO: 171598 - DNA, 1222 bp, Zea Mays
ccagattgccaccgcatttcttctgccgtgccccagccgggacgttaggatgtctctgttggaatgtgaaaaataggagaagcagaactgtagactacactctttgtagagagatgtttgaaataaatgatgtgatagaaaacaagattgacggaacgtgaaaaataggagacacaaaactgtaaatgacactctttgtagagaaatgtttgaaataaatgatgtgatagaaaataggattgacgatatgctcgagatggttggccttagtagtttctatcatcctcatccctacaccctacccagatttaaagcttataaagctatttaagagtgctcttttagcatacaacgtaacatggttggatttaaagcctaaagctatttaagagtgctcttttagcataaaacgtaaaatggttggctgggattaaatgtctctccatattagaccgtctttagctgttcatccatggtcatcatccaaatcattgtttttgccctagatcatactctgtttctccacaacttaacagtaaaaagaatctaatgtgcttcctccacaccatcttcttgacccgtcgtctccatcccttgtgctaacttgacactttcgggctaccattgtgatgtcccgtctttaccctggccatggaggccttgcctttttttccacgctcatgactcaccaccaccaccaccaccaagcctatctgctgccgccaactttccagattatcgtgttcttcacatggacctttaaggatctgttaatggtctgtttgaaagagctttaagtctgaaaatcagattgcgctgaaaaaacatgtttgagagagtttcatggtatatctactaggtcggcccaatatataattgcagcccatgagtcagcgtggacccacgcgtcaatctcctcgtctctccctcgtccttcccgtctctctcacgtctccctcgtccttcccgtctctctcacgtcgagatggagatggtcagatggagttgatggccatggaggagaagagcgcaaggcgctgagccggtgggtggcacgtcgaccacgaacgcagcgcaatgggagcgacgcgccgtgtccgcgagcttagccgccgtgcaggcaagggcacaacggccacgagcacataatgctcgtgaggtgtgacgtcacacaattggaacaacacggagacccaatgacaagtcattgaacatttcccat

SEQ ID NO: 171599 - DNA, 426 bp, Zea Mays
cagctgcaaatcttcaatgaaattttctatcttgccctagtggtcggctaagcatgtctgaatggctctctggtaagtcgctgcagcgtttttgaggccaaacgacatggaggtatagcagaaagctccaaacggggtgatgaatgttgttttttcctcgtcttcttttgccaagctgatctgatgatacccggagtagcaatctaagaaggacaacatataacacccagcaatcgagtctaccacctggtctattctaggaagtccgaagggatccttcagacagtgtttgttgagatccgtatagtcgacgcacatgcgccaatccactttattctttttgagtacaagaacaggatttgctaaccactcgggatgtagtacttctctaatgaatcctgccgcgaccaagcgagccagctcagc

SEQ ID NO: 171600 - DNA, 576 bp, Zea Mays
gttcagggcggtctggcggactcggccatgggcatcacgttggtgcgagagcaccagagggcgctgcacacgacgaggtgggctaacggcagcgcagatcaactcaggcgagcaatcacgcgggcaaaagggcagtaacggccgaattaagggcgcaggcaggttgctcaccttgagtgtgaactccggagcgcgtggacgacgatgaaggtgcggtggaacctcgggtcgatggcggcggggctccggctgcgtaagaactgctccggtgagcgcggagcgggcaaaccagagagggggagggcacatcgaagggtgtcccgagcagctaacgatgaggcagatctcacctaggcaacagacggggcgcgggcgcgacggtgatcgcagaacgtacaacggtcgacggtgagcggtggcagagttctctggtcgcgcgcgtagagcgagagagagagagagcgagggggctcggctgagagcgcaaatgagcgaggggaggtgggcgagcagggcgcggggctcaaaaggggcgcatgcgcaaggacgtggccggagaacacgcggacgtgggcg

SEQ ID NO: 171601 - DNA, 655 bp, Zea Mays
ccctaagtacatatgatgaccttctttctgtctatgcttgtagcatgtaacctatgtgttttcatctgatttctggtgctgcagcgtatagattttgactgtagtgtttgtcaccctaaaaaaggtcaacttgctagctcatatgaacttaagaaaaaaaaagatagaaattgagtagcctaaagctagtatcaatgagaaatttcatgacataatttctaaggttgccatgccatatagaatgaaataaaatctggatgaaactcaaactctcactctcaatggaaaatttcattctatgatttcataaacatttaattttcatggctcatagagatttggtaatcgagagtttccttctctccttaaaaacatcgacatgtcataaaaaccacttatgtggcagcttattaaatgtagatgaaactcacataaaattcttattgagactggcctaacatgctggcatagaaaaatgtgtaagcataaagacacgagtcataggaaagggtgtgagcttagctgttcatgaagagatagcttatcattctttcttcttattgaataaaacatcatatgagctagcttctttaacactattggagctgctcttatatgtgtgaatttttggtactccctctatgtgttttcagat

SEQ ID NO: 171602 - DNA, 561 bp, Zea Mays
atgtatggagtactggtaccaaacatgcattttgaagtttgtcttcctagctcggtcatacgtccatacctcttcctcccaagcacggaccaattcatcaatcaaaggctccatgtacacgcccattttattccctagatgtccaggaattatcaacgacacgaatatgttttatctttgaaagcatacgccggggggagattgatgggaataacaaacatgggccaacatgtgtacggggcagcagtcattccttacggattgaacccatctgtgaccagcgcaacacgtacattacgagcctcttcggctttctcacggtgaatgacatcaaagtgtttccatgcttcaccatcagatgtgtgcaccatcttgttaggattgtatcatttgccatttttgtgccatgtcatctgtttcgcggcatcctcggtcatgtatagacgctggatcctcggtatgaatgggaggtggcgtaggattgtcacggggatgtcgagctgcctcttccgtccataagtagagtctacctccatgagcctagatgatttacacttcgag

SEQ ID NO: 171603 - DNA, 406 bp, Zea Mays
gaaaagcacaggggcgcaggtgcaaaagactccaagactcagcttcctacgcactggacggtgggtttatttttcaaaaccccgaggactcttatgcaaatgaccctgggtgaaggggtatcggacgacaacagtcgtcggatctgagatggaaggctcatattagatcaccgctctatgcaaaccggtacgtaatacagatcgcgggatcacgatccaatggctgaaacgccatcgacccccagacctaaccagatccacacgatccccgactgaaggcttggatttaatcactacgaagggttatcctaggatctaatctgggtcgtccgagagtcgatcgacggcatttgagctgtcttcttccctggtggctgagctcggtggtgcccaaagtccgtgcggc

SEQ ID NO: 171604 - DNA, 386 bp, Zea Mays
tatccgacccggctgcgtgcctcaaagccttaccacgtcgcagtgagtcactgtaagccgctctatatcattggctcatcgccggtaagtctgccacgatgaaagacacgcagctcttgcgccagtacatctccttctctccgaccgccaccgcgccaactccaattcatgcgccaccgcccccagagtctataaattgagcatgcagtcgggtccataaggtagtcaagtacccaagccaccaaaccgtgcctcctattgctcaccagagctcgccaatttcggatttctcccaagttggtccgaaacaccgcgccttgtgacctcgccgtggtcagcgtgctctagttccgctcatgccccctgctcttttgttatagtttcct

SEQ ID NO: 171605 - DNA, 569 bp, Zea Mays
ctcaattgttgggcgacgaataggggcttctgtgtttcagtacaccggatcagtccgaatttttgctccatgacccgtacccattcatccacttccaaaggctcttcttctttgataaaaagtggtggacgagtttcagaaaactccaagtacgtggtgtctcgtggcccttggggttgacctcctccatgttgctgaaactgattccccgccaactcacgcagaaaacgtgtgttgtcagcggtagcattaactaaggcagtgatagcctcagccaatgtaggaggtacatgtggcgggttttgagtttcctccccaccgcgggaagttccccgccccgtcttgagcacgcgttcttgatgacatttgaggaagaaaaatatgctgaattattacatgccgaaaatacatcacctttattgcattatgccaaactagtactaattatgcatactcattagtacaactcaacttccttatttaatttacataaggacactacttatactacactactctaattatcttcgttcttggccgctcttgctccactgccaacttcgggagaa

SEQ ID NO: 171606 - DNA, 513 bp, Zea Mays
catcttctaaaaatacaaaacgacaaacttactattatctctttgatctttctagatagccaatgaaatgacagctttctgtgttagactccaacttttcaatatttaagttaaatatcttagctttcgttggacaacctcccacatacattcagaaacttgccataaaggtatgtttgccgtagtattcaccaccacggccggccggcaatactgtttggaaaacactacataactagtaccactcagctcagttgctccaatggatcataatataattagcaactttaaatgcaaccaggtaagtctatcagtcacaattacaaacactagtcactggagaacatggagtttcataaagctatgccgattgaatagatcgatagaaagaagcatctgtcgaccttcagaatatttgcaaaagcatgcgatgggaggcaaggagggaacagatatgtgaaactgatcattaaacagtatcaagactaaccattaaacagtacgcacacaaat

SEQ ID NO: 171607 - DNA, 725 bp, Zea Mays
ggacttgatcgttcgcttgcctctcatacttgctcggcagaggcctggacgctccccttgcatcgcaggctttctcgttggggacttggtagtttgtgccgcctcacagatttgctcggcgggggcttggtcattcgccccgccttgcagacttgctcaacaaatgggtcagagaggttttgggccttactatcggtaccccatttctgggtactcaatagcagcccccgagccttgtgcgacttcttggagtcgagcggaggctttcttgcttgggagcgaagccctgagtgcgtgcaagagcatcagtatgatttagcccccgagccccgagtaatctatgtggattgcttggggtttactttgttcttggtgaagccttgggcctgtcattggcctacctcttctgattctaaccgtattatatacgcgcccattttgtgtcgtggcttttgattcggcccttcgccggagcggagcttagtctcggacccatacagagttgcctggaggtggtgcccgccagagcatgacttgaatgcgtgcaagcgcatcagtatgatgtagccctgatacccccgagtgatccgtgaggattgctcggaggtttactttttcctaggcgaagattgggacttgcctcttgttaacctttcctgatctggccctctaagttgatcgttgacacctgctggttctttgttgtgcacacatctcccttctcg

SEQ ID NO: 171608 - DNA, 277 bp, Zea Mays
cgactgtggtgacggagagggggtcagccacgacgattggcggcacccaagctacgacgagcaattcaccgagacttggttacgccccgagttccgatgtccactgtgtagtcaccacgaagctcggggatgttcctaaacccgaaagcgagaacacaatgaccgagtaggcttgattatcctacggcggatctatggtggcggcggcgctctcgagggttgatggaggatggctcaggtcaagtcgatgggtcgaggtggctacggggcgcccata

SEQ ID NO: 171609 - DNA, 949 bp, Zea Mays
ctggcctacgcacgctgatgctgtcgtggtaaagcggtgcggcggcgtcgctgctctgccgccttgctacaccagcatccaggcagccttggatgacacacaacaagaagccgaggaggacaagtacatcgtgcatgtgctctctagcgtctatgacgagaccgtcaacataacaagaaggaacgtgatgctgatcagcgatggggtcagtgccaccgtcatcatagggaacaagagcaatgcaactggcgtccccatgaacatgacggtgacagtgagtgagtaactctggcgatcgatatttcactccagttgagttgtcatgcatgcatactgtaaatcagaactattaatttgttgctgctgctgcagatgccttgggtcacggcttcatagcatagaacctgacaatcagaaacatggcagggccagaaaggaggtaggacatggcgctaaggtcaaattcgaacaagtcggtcgtctaccggtgcagcatggaaggtcatgaggacaccttgtatgtggagaacgggatctagttctacctacagaccttgatctggggcaccgtgaacttaatttgtgtttggcaatgcccaggccatgttccagagctgcccgctgctggtgcgccgcccaccgaaaggcaagcacaatgtgttgacggcgtaaggctgcaacaacgccagccgtgagtccaacttctcgttccacatgtgcaccgtagaagcggcaccgggcgtggacctcgacggcgtggagacctaccttggccgcccctataggaacttctctcatgtcaccttcatcaagaagtctctcagtcgcgtggtcagccccaacggctgggtagcgtggaacatgaacaaggtcgtcgaggataccacccggaccgtcgtctacctagaatacgacaacgacagcaccgttgccgacacgtctagccacg

SEQ ID NO: 171610 - DNA, 548 bp, Zea Mays
ggccggagggcagcaccagcttgtggggggcacgagtttggagatgcgccgtgggaggaaggccgactacctcgacatcccactcaaggatagcatcaaaggatggcgcctagaatggtttatcgtggagaaccacgggaattccctccccccacggttagggagacagctagatgttcgcactctgagttggaccgaatcccccatagacctggaggtggctgaggcaggggctctgcttgctgaggttggattgttgaaagagaggggtctgactacagaagctgtggtcgccgatttcattttcaagaacattcagccattaaaggacagagcatacccggcttatctgtaccgaggcctcgctgattcgacccgggttaccaacagaagaattcctgctgtggatttggtcagccggctcgagatgatactcagaggcaaggtgtcgaacatcggtgctcctgttgcatactcagcctggaatatgcctcctttcaaggcttttaccagttttgtgtcaaatcctcctgctggtgatagcggtt

SEQ ID NO: 171611 - DNA, 577 bp, Zea Mays
cctaggagaggcaacactatagtgaagagagcagtaggggctactaatctatcaaaaagggaataattattggtgtgcagggatgtgtgtgctcgtcgatgagcagattgatgctggtgagcacatggggcaactcgtagggtggagtagtggatgttggtgcatgtggaacggtgtgagcataaagagcaatggagctgacatagcatggcgtggtagagggcacgagtgtagggcgtggatgcacgcagtgctatagccgtgggggctgatggagttacaacgacatccaagggtatcacagatgcgagagaagagtaggtgacgaatagagtgaacatggcaccactacacaaattagatggggaagagtgtatctaagccctaatctggatgttgggtcgtcaaacgcagcactgtcgggccaacgagtatggtccgacacatgtgcaaaaagtgctagagagcttctataggccatcggtctgatgagtatcgttggatggtacgatggaactatgtagttggcatggtgcattgtacatcaccgtaagactagttcgatccccaattgccc

SEQ ID NO: 171612 - DNA, 514 bp, Zea Mays
caaggcaggccagggttctaggggtgttggggtggtctgggtaggccaaggaggttagggagggccttgcgagcattatggcgaagcttgggtcgtgaggacggggccgatgcgggcagacgacggaggagggtctcgggtggactgaagaacactacggcgagccatacccaccgtgatgggggacaatccagtgcaccaaggccggcatgagcttcggtgaggggggtaggagtactctacgcctaggtttgggcactgggagggactgtactggccgaacaccgtgaaggcacgacggcccgacgaggagtggctccgacgagaccaaattcctcacgaggagacaaaattaacgcacaagaagggcagggggaggttccttacctagaggcggcgctcgggtcagcttggcacgacgcgtggggacttcggttggccggacgaagaggaatcgtggcgacggtgaactctggcctgcgtaggggagaggttaggtgcggaccaggtagag

SEQ ID NO: 171613 - DNA, 1112 bp, Zea Mays
cccgtgggtcccgcgtgcagcctcaccgcttcacgctgcgcgctaccggcacccgctgacgcgagggtctcacattgtcatcccccacctccaccgagttcggaatcgcgccgccacgaccgcgtctgcggcaatccggggacccaacgacccttccgtgattcgctcgaagatacccgactgagcttcaccttaaatagctcggtcaacccctcttgccttttccccttcatcccatctgcaccgtagccatctatcgccgaagccgccgtagccatatacaaccaccgtcgtccgtcgtgctcggcgccatttggaaccttgcgtgaggctagagaacttcgcccgtgtcccaggttcgcattggtggcgatagcgggacaggtgggtgaccggagtgcgcccaattgatcttcaccgtcacacatccgcagttcgccatggactgaccgagccaacgccggagttagtgtaaggacccgctccccatgttcgcctccttcccaatttcatttcgcacctagtatacctagcaatcgtgcaccgtgggttaaagtgagaattccggccatggcgtgccgccgtgcgggtgttctcgtcgccggcgaggactcgtgtcgggcagatctgcgtgcgccgtcgatttgggcaggaacgactaggattaggtgtggcgtaccgcttcggtacgttaaatcagggtcgttagatttgatcagagggttcagtagagatgtgcgcgtgatcgaatctcggatccaacggtagagagtgaatggcgggtgtgaccaggttaggtagcaccaggaacgtcagattaggttccggcggctatgaccttagggtttggctgatctaatcgacatctcagattttagatcaaacgatccacattgatggataccccttcggccttacactctttctaaagagaccacgagtaaatctgaaataaacccgccgtccagggaccctgttctctgtgtcttggatatcttgcgcatagccccctaggtttctctgtatttgaggcccagttcagtactggtttaaattgattaaatgaaatggaaaatggatttttaatatgaaaacaatcactagaatttgat

SEQ ID NO: 171614 - DNA, 587 bp, Zea Mays
tgacgacatctagcacgctggccattcttctcctcttgggagttgtggcgggagctttcgcaaccttcggcaattctgcttctaccggtgggctcagaacttctggcaacactattgttttttctaactctggcttcttggccgccccatcttcggctttgactggctcaactataggcaccttcggcgcgatagttgattcctcaacgctccgagcggcgggagcagcttgttctgcttcggcagcggaagatgtctattcaccaaattttggcactgtggccgtctcaatatacctcggccgatgcatcagaaccttgatctttttgcccttcggcacagcagagatggccgaagcgacaattttcctctttttcccctgccttcgcgaggggtagcagtaatcagggtatatgaaaccaattgcatcgaaaaccctgttcaatcttttcttgccccgacccccgaaggctgaggataaaacatcatcttcggctctgctatatgccccaagtaactaatcactagtagcctcaatacatttcagccagtcatcatttggttcgtcaatccggtctctgtatttg

SEQ ID NO: 171615 - DNA, 855 bp, Zea Mays
cagaagaggtgcatcaggcgtcctcatgaagtgcattctctcatctactgggaagcaacttctaaaggaggtccatgctgggcaatgtggaatacatgcagcgttcaagacactagtcgggaaggtcttcaggccaggattctattggccaacagcgaagagtgatgcaaccgatttagttcagaggtgcgaagcttgccagtacttgtcgaagcaacaacatctaccggcacagcaactgcagaccataccagtgacttggcccttcgcatgctggggactcgatatgattggacctttcaagaaggctcaaggaggatacactcatgtactggtagcaatcgacaaattcaccaaatggatagaattcaaacccattgcttccttaacctcagctaaagccgtggaattcatacaagacataatattcagattcgggataccaaacagcatcataactgacctaggatccaacttcaccagttcagaattcttcgatttctgcgagcaaaaaagcattcagatcaagtatgcttctgtagcacacccaagagccaacgggcaggttgagcgagccaacgggatgatactggaggcactcaggaaaaaggtcttcgataagaatgaaaagttcacaggaaagtggataagggaattgccctacgtcgtttggagcctaagaacccaacctagccgagctctacatggaaacactcctttcttcatggtctatgggtcggaagcagtgttacccgctgatctcaagttcggggcgccaaggctgatcttcgaaagcataacagaagccgaagccactaggatggaagacattgatgtactcgaggaagaacggct

SEQ ID NO: 171616 - DNA, 746 bp, Zea Mays
acttcgactggattgctcaccgggtgtctctgctccgccgcgggtcccctcatcgacgtggtcaggactcccctcgctgccatacgcggtaagaattcctcggaccgactcgcccatgcgcctgcgtcgtgttgcgcccggtcgatttgggaatcgtgtactcgtgcgccgtgatagggtagctcgccggcgtgtgctccactgtgtggcacgcggcgccgccgcgcctggcagccagggggagaagaacaagccttcgccgttggattgcaaatgaacggtcgtgatttgacctagtggacaccgattgggaccctttgatccacacccttgatccatgatctgagggttggggccaacacatgtcgtgggcaaatatggggccatcagatctcgatccgatggtctgtatcacatgcgggttcggcttaatgttgatctaatcccgaccattgaaattagatcgggcggtcaggatgtcctgataccccttcgttgtggcgtgttaacatatgagccctcgggttttttatatatcaacccgccatcctctcccgcattgaggatataacaaataggtccacgaatttatgaaatgaaccccgaggacttaagaaattatacccgcagtgcatagggtaattagattaatatggaaaatgagtttaagtattaaattaatcctaaaaccttagataattcataatttgatcgttttaactccgatttgacccattcaaatcgcg

SEQ ID NO: 171617 - DNA, 623 bp, Zea Mays
cttgaaaaacttcttggtcgaagtccagactacactgctcaaatctcttgaaatgttggtagcctttgtggaatagagcattgacatcgtcctcgtaggtaacgagggaagcataggccatcagccccgtcacaatgtctggaagacttgcaagctcctcttgtaaccagccaaggaagcaggtgcctagctcttcctagacctatcgaagggcgtcgttacacccagttcacgataggcctcaacaaacaatgaatgggcttgatccatgctagcccgcgtcttagtttctagcttttcgcgataagtcttcgcaactgataattccaactctagcacggcaacacggtcctgcacgccttgcgcatccaaacacatttgaaccactgtttcctttatctcgcccagctaacggttgaggtcatccttctctttttcaagcttcttgtccttctccgccaagaaaatcaaaacaagcacatgtgcataaaggtacgaataacgacacttacccccagccacctagccagtgtgagcatcgaactcgatgacaccctcgaacaggtagtcctcaacagaaagttcgaggactgccccatcggtcatgccgacatccgtcatct

SEQ ID NO: 171618 - DNA, 846 bp, Zea Mays
gttacttaacagttacacatgtttgattacctcgcctacatatttatcacatggttctctcacaccagattaaatcgttatctataatccattttttcagacaatgcgagctcaaatgttatttgcaacggaggaaggaaatgttttctagatgatggcattattggggtgttttgaaaggtgaaccgaagtgggaatccttactggctggcagcaacacacacctaagagcaggagaaaatgatgttagtatgagtggatcggccataagcattaatgaaaatgatagttgttctccaggttctagaagcaagaggccactgggaagggactccacaaaaactgaaaggaaaatgatagtcgtcgtagtttgtgtcaaggctgaatgagatgactatcgaacgagttaatgccgttaaagatttaccaaaacatcttcgaccaattttatgaacttcatgagtctataggaaaagaagtttgaattggaaaaggagaaagtacagatttagaagcagatggctaaggatatgaaaggagaaaggcaacaaaacaaactggaacgccttatgaacaaagacttgtcccaaatgcctgaccatgcctgaccagttcgtgtcattttttcgtcgatgcttcagacaaataagtcggtagtttgcttattgtggcgtacatagtttgtttgaacttattgtgagtgctgtttgagacaacttagctatgggtttccttattccgtcaaacaatttgcaagagttctttaacatgacaactgttgaacaccaaaagtggtggacggtccggccctagggttcggacgatccgcgcccctgcgatcagatt

SEQ ID NO: 171619 - DNA, 1096 bp, Zea Mays
tctacaagaatatcccaagttagtgctaacaatattatggcagtgctcgacacctaggtggcacttgatgttctagtagatctgaaccgtaaatcataaatctgagtgtgatttacggccaatccctaaactccccaactgctatgcctgacttgggataaatcagaatttggatagggaaagaccaatctctcaatatcaggactgaacgcaaggttacaattcaaacaaacatggatcagagacaatgggcctgtgtcaggatgatggtggcgaaacagaggacagggacgacaatgcgaagttgtaggcactggcatctgccactgcgtcactgacgtcctcgtcggtgtggccgtcggacggaaaatgagagacatggagggtgagaggcacgtacccttctccgcgtgacgtggggaacaggctggggggagagcgtcgcctgacgaggggacgggctgggtggagagcttcgccaaggtccaggtgcttccgccgttggagccctatgtgtgttggaacgacgctggagacctaggtcttccaccagtggagccggacgcgggcttgatcggcgcctgggtcgaggaggtttcactgatggagctcggctaaggcttggacgacattccagagagcaacagaggcatggcaatggggaagagatgatgctagtggcggcgacaagcgcgagagcagcgacgcgttgtgcgcagggaggggtggtggcgaagcttccgttgatggaggagggcggggatcctcggcatcttccatgctgatatcgcgtacggttcctcggacacctccgcagatggaggcgggcgttgatggcggggatcttggatcagcgtggggagatggaggcgggcagtggattgaggcggggaaggcggcgcgatgaatgccatcgccgccagttatggaatggggatcggcgtggggaggagggtggggatcctcggcaaccttcgatatcgcgtacagtccttggccgcgggcgttgatggcggagcagaggggtaggagatcctcgccatcgccattttccttcgacggcgtggggaggaggaaggggcggatcgacgtggga

SEQ ID NO: 171620 - DNA, 567 bp, Zea Mays
gccgcggtgggccgccgtgctcacgcggtggccggccgatttagcccagtctagttcctcggagtaggtccctgtgtcacccctgcctctgctaaagctagcccaggccttagcgcccctcaagccccttccccgtggcctaaatggctcaccggagttactccggcccgtccgagaccttctcaccgtcgttctcccttctctgcccatggattcatggcctcttccccgccattgagttcgtcgtggcattctctctctctgcccaactctagcgacccggagccaccctagcttgcaccagcctcaactccggcaaccccaccgccacggagaggaacaaagccgctcgaagtcgtccgttccccctagtctgatcccctccgtccgattcagattgcacggctcagatcacggataatgcttcgcacacgcacgcctgacgccctggcccgcctgttagcgcccaagccctctagcgctaggcccgctcggtcagcgcgctctccccctctgtcgctgacactgcttggcccgcctgtaagcgcttgcccacgcgccctcggc

SEQ ID NO: 171621 - DNA, 485 bp, Zea Mays
atctatttgttgcagttgcgtggaagaattatgtgcattcatctcctagcttagcccatctttctgtgtatctttgtttccaataaacattctgaaatttcaagaacttggcaactgatttttataaggatcctcatattgttttttttgaagaaagagagctctttgttcctctaatttgtcccgcacaagaatgacttcattgcaattatcaatgatacttttaaggttggagatagacttgctccatttctcaagattatatctgagatttttaaacttcgccaccatacgtgcaacgctagaggttgcaggcacatgcttgttccaagcatccaatacacccgggtgatccacccaatagttctcaaactgaaaaatcctggctttgggaatggaggtaccaatctgggccacacaggggatatggttgttggggaggagaccgaacacaacctcgatcgtagagcgaagaccgttgagcg

SEQ ID NO: 171622 - DNA, 417 bp, Zea Mays
gacactatctcaaagtttttagtggaaaatttcaggtgtagcctattcaccccctctaggctactttcaataggccaactggccaacaacttatggaaacaaactcctattttctggaaaccaactcctattttctgggaataacaaactcctatttctgggaacaaactcctaattcctgggccctaatctctcctagccgctaagatcagacctgccctcttgggtcgcggtgatcgcggctgctgctgcgcgcacgctcctctcgctctgcgatcgtcaggcgccctgcggcgtctcgtgtacgtcgtgccctacatgacatctctcccctcctcgtgaagcagctcatcctcgagctagaagagtggaaactgcttgcagaaagcggcgagatcttcacaagttgcagactct

SEQ ID NO: 171623 - DNA, 719 bp, Zea Mays
actacacaaagttgctgtcccctagtctgcaacactagagagtagagatgctatcctgttgtcctttagatgttaaaggaggacaaccaaaagactcctgctgtcctctagatgctaaaggagtagatgttaaaggaggacagtcaaaagactgttgtccttcacaaggctgaaaagagatgctgctgtccctacaacgaagactaagatgctctaaggaatgagatgccatgcaacaaaagattgagatgctgctgtccctgcagtcctccacaagaccatgctgctgtctctgcagtcctccacaagaccacatgacctattatgtcatccccccccctaagtcttctgcgtcgttttgtggaaaagttgggccatcctgaacctgaaacaaagctcaatgaacttgatcctcccaaggggcttggtgagtaggtccgcaaactgatccttggtgttgacgtagcgcgccttgatgctcccttctgccaagcaataactgatgaagtggtacctcacccgaatgtgcttgctccgttcatgaaatacggagttcttggccaacgccagagcgaactggctatccatcctgagttccatcgctccagtgtctctcccgaggagatcattgagcagctgagcatgccaaagtgcctgagttgaagccgtggatgccctatgtactcggcctcgtagctagccatgaccatcacctgctg

SEQ ID NO: 171624 - DNA, 530 bp, Zea Mays
cggattcacgttgttgtccatacggtgtagacctatttagttgggtggatattccactgggggcctcggatcgcttggctccggtgatgggcgccgccgtgcgaggggctacgccaccgccgtagaggtagctgagtcgggtgttggtcagggccgttgatcgggaaacgaacggctaggattagaacttggcgtaccgcttgggttgaataggcgtaaccctctgatcgtgatccagtgactgtgattcaatctccgaaaataagatcgagaccgttgatatacccatcaacggtctatttgcatatgagaccatcggggtgtccggaccgtgggatcaaaatcatgcggtcagttttgcatactggttcgacgtaatatagttttaatctgtgcccttcaaatctaatcggtcggctctagattcggattactcgttcgctctggtgcatatgcgtaagaccccctctgttatttagtattcgacccgccatccgcatggactgtgcgctgggtcttggacatcttac

SEQ ID NO: 171625 - DNA, 442 bp, Zea Mays
agacacttaagctgacacattgttttacactttgtggtaatatataataatctcacaacagccacttgtttcatttctcttccatgaacaaagcctataaatacagactcgtgctttaagccttgtgggaataataaactaatatgttttgttgctcttaacagaaattaccatcactaccagaatcgaagagattaacgactgaccaaaaaaccctgcaagcacaactaagtgtttcttacagggcacctgcccaaacatcgtaggctgcaaccagctataagcagacgatttggttcgttgacatctcaaaatctggtaatactaggtttttaaagtagtgcttctatcttcaatcaatgtagtattttggcatatggacacttattttctattttaagtcgcaggtgctaatgtctccgatccttttttgtttctattt

SEQ ID NO: 171626 - DNA, 520 bp, Zea Mays
aaaacgcgtatcgcgaccaaataatgttactaacatgtagggatgtggttacggagttaaagcgacttaaacggcatgaaatggatttaaatcacatctgataacgtgcatttaataatttgtgagttaattttgacgtggcacgttatgattggccagagacatagccacacattgggccacactgagcgcatgcatagaggatccaatttggtgtgggggcagacggttccttgctgcacgacgtgcgtcccgtgggaatcgcatgcatggaaaaagcgcatgcaggtttcgtttctctctctcctctattcacggcgcttggagagatgactggctgggcgactcttcaccaggcggcggtccagcgatgcaggagagggagagggtgggagccgcgggcgctaggtaaaggggctgcaggggcatgctcgcccagccaaggcagccacgagactgcagcggtgccctggtgagactgcacgacggcgcggaaaggacatagctgcttgggctcgcc

SEQ ID NO: 171627 - DNA, 597 bp, Zea Mays
gagttttctggaaccctggtacatgctgtcactgtcgcccagcaaagatgtcaagtacacgattgttggtcgaagtggcagctgttctctaccggcaatgtagccgtattactttctaccatgtaccatcggcgcatgccttgcgcccttgcctggacgacctcagcttttcgtatgctgtagtgtgtagactgtcgtgagtgtacactgtatggcagtctgccgccggtgatgaacactactgtttgccccagcactggctggctagtgccgggtctacatgatcagtttcgttctgcgacagtcccagacaaatgtccggaccagctcgcaactactgctgttgctatagatccagcaccctggcccccggtcatgctgccgacaagctcctgcttggcatttgctggacgaaggcaaaatccaaaccaaatccaggcagaagctctgcacatgagagagaccttttagcttgcttagcgttctttcttccttcacacctcattcatttacaataaaaggtaactttacctcatatacggcgttcgtttttaaaaaaatcaactaaacgaggaaggataagtgataaaatggttg

SEQ ID NO: 171628 - DNA, 695 bp, Zea Mays
gcaaaaagtagcctaagggtgcagccggaacagcacaacaagagcgctaatcgtagtcttttattcaaaagacgcagcgcaacagctacttaagggcgtagccggaataacgttaagcgaagtctatcattacaaaaatacttcgcacaaagtcgccacatcaccatacaaattacaattgcacacacggcgaaggcattgcccattacatacacatgacgagggcaccgcctatcacatcggctcaaccttcggaataatacccatcttcctataattaaacaacattatcctcaattcctcaccctcaaaaagctcccaaagatccccctcgcctatgcccgccccaatcggtgaggacaacaattctcgcttaccaatcccgcctactcgaagtcggccacgctccatccccatgcgacggcgcctgccgctccgcgaaaattcacccacacactgttttcccaacacccttcgccgcctacacccagtactcataccaggaagatcctcagcaccctcaacacgcggcgaaatctccaccgcagccacatctaacgcaacaaaataatccaagccttcatccgaggactcctccgtccaaggaaacaaactcccagactcaccgttggactcaaaacattcagacatagagccaagcacactatcatcggcgggcactacaattgaagtct

SEQ ID NO: 171629 - DNA, 308 bp, Zea Mays
ctcacgcttacttaactcggggtgaccactataccctactaacgaagcaatcggcttaagtcggcaacggcttaaggcggtgcgacatgctcacgcttacttaactcggggtgaccactataccctactaacggagcaatcagcttaagtcggcaacggcttaaggcggtgcgacatgctcacgcttacttgactcggggtgatcactataccctactaacggagcgatcggtttaagttggtaacgacttaaatcggcacggcacactcgcacctacttaatccaacacaagcacgtttgcgattac

SEQ ID NO: 171630 - DNA, 417 bp, Zea Mays
ctggattcgaggatgtcccggagaacagcgagatcagcctgctgaaagcgctggcccatcagcctgtcagcgtcggcatagctgcagggagcagggacttccagttctacagaggggtaagtatcaactgacttgcctgtagtatggttggtttcagatggtgtcatcactagctgtcacagaagggaagtaacatgtgcgtgtatacctcgtctggctggctgcactgctgcagggggtgtttgacggggcctgcagcgtcgagctcgaccatgcgctgacggccgtcgggtacggctcatcgtacggccagaactacatcaccatgaagaactcgtggggcaagaactggggggagcaaggctacgtcaggataaagatgggcaccgggaagccggagggtgtctgcggaatcta

SEQ ID NO: 171631 - DNA, 616 bp, Zea Mays
cccctcacatagtgggtcacaaacaaagtttcatccaactccgaattatgcaaggtagctgcatatctgatatcattgaaagcctgagagtattcttctaccccatgctattgtttcacattgactaacgctctcatggcatgagggtactcttccaccccaaacttctccgtcaccgcatgggtgaactgctcctagtctcccaaaccatgttttagtttatacacctgcagccacttcgacgcatttccctccatgtgcatcgaggcagtgcttgcccagatccactcgggcacctaataaactgtgaaatattccattgcagttggtttggaaacgaccacttcggtagagaactgggcctgaactcccttccttcaccccattgctccctccgttctctacctccttccctgccaaatcctcagcccctctcatcccagcgatgaacatgattttctcgcttagagttggattcgttaccttccaaatccttcgccagcaactcgagtcgaagacgcgagacaactttctcagtttcctgcagttgatgagccatgagcgcccgatcctcatcagccttccatcttgccagtcagacgctccaccgccgtca

SEQ ID NO: 171632 - DNA, 411 bp, Zea Mays
gcagtggagggcaagttctcctactgatctagtggtgtcgaggttgttatgaaaaggctaatgagctatgaggtggtgatgggatgtgacaagatgagatgttttgtagggggtaccccctaggccttatgtagatgaccagagggttatccctttaaaagtcgtgatcacaatctaactctacctgaatcatatttgttggggtgaacgctgactgcccctcgcccggttcttttataacgagaacgggataaatcatgatggagggaaagtgaagtctactccaaacaagcaaaggccctaagacgggggagtgtataggacaggtgaatactttgtcggttcctggtgtgatcaggaatggcgaaagcctcgctgactttcgaaaaccctacgcacgcaacacgaagg

SEQ ID NO: 171633 - DNA, 484 bp, Zea Mays
cccggatggcgtgcgaggtggacgcaagagttatactagtttggactaaatattcctactccagtcttcggtggcttgcgctactagtatcaagttgctcgtagtagggggtcacaagtgggcgagagagggaagtgttcccaagtctctagtgtgagtgtgtgtaggtcgggttcgtgtgttgtgagatagaatcctctaggtttgagtgcctcgaggctccaaaggtctcttactcctcatgtatctccttttcgttgttgagagtgaccctttcttttagatcttaaggaaggagcctcttacattgagggggactgttgtcaagatctttcatagtgctagtcctgtgctacttgccaacgtactttggttgaaaatgcttcgtgtcggttatgcgggcacaatgctttgtacccttgaaggtacccgacgttgacttggagtaccctagagttagtagtatagtgccattcgcaattgc

SEQ ID NO: 171634 - DNA, 734 bp, Zea Mays
ggagaatttaggggagataaaagggggggttaggagattagggttccaaacctcgggttgaatttttgggatgttacaaacctaccccacttaaaggaatctcgcccttgagattcagacggggctcgtgaaaaggtaagggtattccctcctcaaggagtcctcactttcccaggtagcttcctcttctccttctcagctccactggactttacagagtttcacttctgagttgcgggtctttcggactgctgagtcaagaatctttattggcttttctcggtactgaagatctttctgaatctagattgtctcttcttcgatgtgactttctggtacttgctggcatttgcggagctaggacacatgaaacacgttgtggatatcacacatggattctggtaattcaagatggtatgctctgggtcccactcagccaatgatgggataggggccgacgaatcacggtgctagctttcctttaacttggaaccttttgacaccacacatcggggagaccttgaggtagacgaaatctccttcctcaaatctgagttctctccgcctgttgtccgcataacttttctgccgactctgagcttcaagtaatcgtttgcggatcagggcaactttctcttcagcctctttaacaaaggcaggtccttccagtgtcttttcccctacgttggaccacatgagagggatctggcactttcgtccatacaatgcttcga

SEQ ID NO: 171635 - DNA, 765 bp, Zea Mays
atttaggggcttcagaggaaggtttcatcctaggcatgtccaaagcatcaaggacaacaaagccaccaacaatattcatcgtaaatgccaggaacacaacaacaaccattgcatggcaacttttgcccactagcccgagagaggagggagtggaggcctaagcttcgatggaagattcaacaacaatgctcagccaaagaagttgtattgcgttttctgtggagaaaacaaaggccacaccatgaagacttgtcaaataaccatatagaaatagaaatagcttgttgttgcatagacaagtcaactgaaggaggtctttcatagatcttcatacaactccccatactccaacaagaaacttagcaccaagggccgaagccacaaccttcaggctccattgcttcaactagcccctcacctagtcactaggaaattccactaccattcaccctagggcccccaccatatgagcaagtgcctgcaggccactcttagtttccaatacaaaacatgctttagtgggacagaagggagccttctcaagctcgtatggtgaacaatgatgttcctgagtccaagcacatatattagggctcgaggggcgggtctaaggagccaaagtagtgcaaaagagccaaaaatattttgttttttcttgtttctctacctgtttttagtttaccttcattgcaatgaaaaatatgggcatactcccttcgcaactttgtaaatgtaactctaaggttacacctttgagtgtaacga

SEQ ID NO: 171636 - DNA, 473 bp, Zea Mays
ccctcatgttccttctcagataggtgtgcatctcctttgaaaccagttctggtactctagcacacttcatggtgtcaccaaacccaccagcaagatgctgcttaaacctcttgattccagatagcacaatcttcttacagaagacacactgaacaaaatccttctttattgtgtctggccaccacccaaactgccatcctgggtcatgtgaccttgcctttctcttggggtcattttcttgtgcactaagctcaggagggagtgctataattgccttttcaacaagagttttacaatctgtagcagctgataaagcagacacaggaccagtgctatctgcatttaaggccacagggggaacagaagcacttccacttgcactgccgaccacatttgactcagggaataagacctcaacattattagcaagtccacagccaccattaaactctgaacagacaacacaaacacag

SEQ ID NO: 171637 - DNA, 406 bp, Zea Mays
ggcaggctctgtctcggtgggcactgaaggcccagcttcggtttcagcttgaacttgtgtagcttcggcttctgcttgcttagtttcaattttggcctgcgatttggcttcagttggagcgactttctttgcaggagcagggcttagtgcctttgtagtctccagtacagcatctagaacgttagccattctcctcctcttaggagttgcggcagaagttttttgcaccttcggaaaacctgccgctcccggtagactaaggatttctggcatttttgtcactctttccacctgtggctctttggccttattatcttcagccttggctggcccaactgtagttatcttcggtactacactcggctctacagtactctgcataattgaaacaatttctcttgccttg

SEQ ID NO: 171638 - DNA, 753 bp, Zea Mays
ggtggctagcgctgcccctcgcggtgactttgtattggtcgaatgtcgaagaccgtcgacgcggtcttttttcgacgtagatttttgcgggggatttttcacttgtatattacatgactccgcctcgttaaaaacctcaccccccgggaggaaaagagtgcgggccagaataaaattgtttttgcgaattacaagggcgagctggccctgaggagtcaaacaaaaaacttgcggagattatcaatgttccaggaatgctccaagtcctcgtcggatggcgttgcgagcctgtatgcgctgggggacgccttcgtcttgacgatgaaagggccctcccacttgggctccagcttgcccctggactctgtccgaggtgtccggacgagtacgaggtctccttcgctaaattccctcgggatgactacgtggttgcgccatgcttttgtctgggcttggtatttgtttagggcctgtagggcgaagacgcggtctccatcgatgaggtccttcgaagtgggctcgtccacgtcggggacagctgacgggactgtccatggggacccaagttttatttcttgtggggtcatggcctccgatccatataggaggcggaaaggggtgaacccagtcgccctgcactcagtcgtgtttaatgcccagactgcttcaggtaacaactcggcccacttgccttttttattgtcgagcagcatcttcttgacagctgtgaaaattttgccgtttgcgcgttcc

SEQ ID NO: 171639 - DNA, 436 bp, Zea Mays
accaaaatttggaatctggggagtaactgttgcccatatttgattccaatatggtatgagagctagggttaagggggagcgagatcgctggccaggggcctttgcccacgggtgagcaagaagaaggatttttttgttaactcctgcttaattcaatcaataacaacataatacacctggcattacatagcctggccctcgtacatgatgaactaacaaaccaagcaggaaactagcaatcttgtctaactaacctgatctgccaacttagcagttaagaaactaaacaaactaatgcaggtagatgggttatcctggaaccctggatgccaagctagcagcacccatgcctgcgtccataacacttcatcccgccttgataagcagcttgccctcatcaagaggcagcaacttaccagcatggcaacaagaggca

SEQ ID NO: 171640 - DNA, 889 bp, Zea Mays
tcaggcggtaagacaagtacgtatagtgtcggcaagtccgacagctccaacgtcgcgcgaaggggatcacattcttctctgttgtcttgctggtggtggtctcctactccgtccccgccccttagcgtcggtgaccaccacggccatgcccatcgctagctagtggaggcgcagggtcagtggatacaccaccacgcggaagcgcttctcgtgcgcgacgatggatggtcgcgtcagctaggagctcaaggtgcgcgagggtcatgaggtgtgggccgggggggagcttgctaccgtcgatgggcaccataagccccacgccgtcagcttcccctcccacgtgtcggcttaacaaagaagggtttatttcggtcataacaggtctatttcgatccgttaggacgtaaatgagacccgaacaacaattgaacctttaagaggcatacttcaaaagttatggatcgggatgacacatctcgacaactttaaggaccgaaattgtatttttaccattttcttttaaaaagcaatgagttctgctctgattatttattttatttctctcatgtcatctacacctttcgttataaattatagtttattctaactaatatgtgtatatagcttttactatacacatattttatatttaaatactgtagtaaaatgtttgtaggtttgaaagacttgtgtttggaataaacagattaaccaataattgagaccatatttgttgatggttgtattaatgaactctttgtgcctagtacaacaatttatggaattatcttacatcaaaatgttttagtttgatcatgtgaacatgtgattgatatgtggccacgatgtttaagtatgatgagtggctgtcaagaagatgatcggtttt

SEQ ID NO: 171641 - DNA, 532 bp, Zea Mays
cgggggcctatggcggccggtccgcggcgcggtggcgagtgtccgcggtggcgaagccgccggtgaggtttccggccataattgagtgggggaagtggcgtgtcgtgaacgtgagagtgtggcggagctcttggcacaacttaattgaacggaagatcgccagagagggagaggggagctcaccggggcaaggtaggcagcacggctgcgctagctcgattggctcgggggaaagcagaggagatggtcggagctggtgtggtgaagacggggctcgggtgggtccttttataggcgctcggggagggagggggatgggggagacggcgaacactggtgagctcgccatgatggcgggaatggcgctaacgccgattgggatggctcgggcaggctgaggggggtgagaggtcggctcaagcacagtggcggggttgtcgtggaggctggcgagcattaatggcgaggcgacgaggcgagagggtgctcggcggcgatcgcgctagtgagggatgggcgagtgggacgaagc

SEQ ID NO: 171642 - DNA, 629 bp, Zea Mays
ctttttagaaatagtgcccgacccgggaaaccccatttatactcgcgccgacatgcagttttgattttcgagccctaacttcacatttccgcctcgaaccactcctccgcttccctgagatctcgctcttgttcgttccactgcaagattatgatggtgccgaaatggaagagacaaagctccattgcggcaatcatcccgcccatcgaccccaacagctagttgccattcgcggataaccacatgtctgttattttagaatctgaccttcttcaccttgtcaatgttggggttttacttccaaaagagctctactcttggtgaatttgccgcggggtcactgttccgacagaggatacccacaaatctgtcgtttacgttccctttcttattcatggccttgctcttcccgtttctccctttttctgcgccctccttgatttctacaaactgaacttgacccatctaaaccctaattccatcttgcaagtttccatttttgtacatctgtgtgaggcctatctcggtattctcccccatttcggtctctggaagtacctgtatcattgtcggccgaggatggctgggggacaacaccagctcattggcggcgcgagtctggagcttca

SEQ ID NO: 171643 - DNA, 677 bp, Zea Mays
aggcgaggcggcagtggcgggagcaggagcccagaagccccgagatggccgcgccaccgccaaggtcgaccatgccgcggccggcgagggcggcggcggtcgtctactacctggccaggaacgggcacctcgagcacccgcacttcatggaggtcgcgctttcctgccccgacggcctccacctccgaggtacttttcgctttccttgcgccagcagcttcacgatcacgccgcattttgccttccgctgtaatggcgctgagcgttctgatgccgttgcttttgtgcgcgtattaattagatgtgatggatcggctcgacgcgctgagaggcaaagggatggcgcgcatgtactcgtgggcgtccaagaggttgttggggctttggaagaacgccttctctctcgttctggtcaatgctgcaaactagtgcggtgcaacacgtacgccgtgaaagatgacatgcgtgttcctcgcgatcgatttcgccgcgatgcaggagctaccggaacggcttcgtgtggcacgacctggcggaggacgattacatccacccggtggtcgcccgggagtacgtgctcaagggcaccgagcgcctgcacccggcgctgctcgacgcggcggccgcgtcctcctcgtcctccgccggctcgcaggagacgcccaccacgtcgtcct

SEQ ID NO: 171644 - DNA, 401 bp, Zea Mays
ggcccatgctctttttgactctggcgctagctattcgtttgttttggagaattttgtgtcgcgggctggtctttcgatgcagaggttggttcacccaattttggttagttctgctaatggctccactagtagctgtttagtttgtcaggggtgttccgtcattcttgctgaggaggtctttttggccaatcttgttgtgatttccttgggggcattcgatgttatcttgggtatggattggttatccgagtatcgcgcagttataccctgtttttggaagacagtgttattgcaggcgccgtcgggtagggaggtgatattcttgggaagttctccaaagttcacgttatccttgttgtcgcaattgcttccagattgtcggtcaaggaagtcgggaattc

SEQ ID NO: 171645 - DNA, 696 bp, Zea Mays
gtccttcgcgacaaaccatcgaggctcacacttgtgacaacagacacgcttggaccatccgactacacgcgcggaccgtctgaatatgttaccaaaccatccggatattacattggaccgtcagcgacgggatatgtagaacaaaacgcagattgttactagcaaccctcccaccaacctcaaactagcttctctctagcaccaacgacacctcaaggtcgtggaatgaacccacccacatatgggtacgaacccttttcgaccccagaagaccgaaaagatctaaacatgcaatatggccacctagagctagcattaatgccccacagaacccaaacccttgggcaaaatagcgacataatgatactctaacaccaacacatgtggactgccatttacatagtaagagaggaggtagctggagcattccgagacaaactcgaagtcaacatgacccatggagagcagtcatattggaaaccatatgagagccaatttggctatgactcataccctcatgggactagaatatccgaatttttaaaattttcaagtgactagggcaagagcacgcatgaacacatagaccaatttctagcacaactaggggaattgatcgacaaagaggcattccgcatgcgtttattttcattatccctaactggtgctgccttcgcatggtatgccaccctacca

SEQ ID NO: 171646 - DNA, 696 bp, Zea Mays
agtaaacccgacccgaagaggcccgagcaaggcccaactaacctccaaagcgcgagcggaccactatcacctctagagggtgacatacgcctttagccccggcatgaagcaggagtgcctatgggtcgagcgaaccactatcacctctgttgggtgacaactaaccgaacccgatgccggtcctatggccgggtgaatcgcatcccgcctgagaggtcggtcgaatcggacacgagcggatgaacaaactcatcgatttgctagcccatcccagaagtgagaatcaccgccagaggcggcactatactaccaactctggcatgggacctccacttgaactagtgacagacactggtctgaaccaccgcgctcccacgagctccatgctacccctttgatcaagatgagtcaacaaggtcatggctataagggaatggacgaggaggaggaatgacgtcaacggagcgagcatgatcatcctttcaatacatttcatctattcttcgtcttcacgtttataactgatccctctcttggcatataaaagaaggacaaccgacacactctcgatcttggactctcactctctcactcgaattcaatccgaccgatctaaggagaatagactcgatccaacccgacataatcaggacataacaccatgcatgaaacacacgctcatgaagcaaacacaac

SEQ ID NO: 171647 - DNA, 425 bp, Zea Mays
gacatttccagacgtacaagatctagcagctcagctcaccaagatgataatccacataatcagaagcagaatgagccacaaccagctccagtccatcgttttcacagaaaggctttagcttgtcgtgtaaaaagaaaacctcctgctccatccacactgtccgacgacgatttcatggatgctccatcgttgaagcgccaattcagatctgcctcaccttcccctttagaaaacaatagtgcaaagaagataaaagtcccttctccacaagttccgagtgtgaaaagaagtctaaagtctaatatcattacaaaaaaagctctcctaaacagaagacttctagaaaatcccaggtactatgtatatatttctgtttattcatgtgttaattttggtgcccaatcaattttgtattttcccccact

SEQ ID NO: 171648 - DNA, 859 bp, Zea Mays
ctaaagtagagtacaatacccaggtttgatcatggaataaggttgaaaaggttaggtgtatttgaataagtaacccaccaaactatgcatatcatgaatttaaacttagttatcatatgttgattaggttcaaacaaaatatgcagggggagaagtccacttgccttgctgatagaaaacatgaggctcatccatgtaatagatcttgattctcaactactggatcaatctctaaacatcacataacaaacaagaagaaacaaacaccacccaataacatacaacattcaccatagacaaagttaaaataaagcataacgaaaagagcattcgcttttcaaaaacatcaaatctagggttataatatacattgtccccggccatagacaaagttaaaagaaagcttggaacattcaccatagacaaagttaaaagaaagctaggaacatagaaagagactccgtccccgaccaacgtaatgtacattatctcgcaacagaatgcgaagacagcagcaaccctcgcacaaacaaaggcaaagatattaatgcacaactacagagtaatgagggaatcaaaacagtccccctcgaccctgtgacccccaagcaaacggttctagtcagcgaagacctcctgccagcagaagaagaaagacttctctcttgtctcaaccgcaacaaggacgtcttcgcatggtctgccctagacctcgtcagtgtcagccgcaccatcattgaacacagcttgggcattgatcccaccgtgcgccccaagaaacaaaagctacggaaaatgtctaatgaaaaaacagaagccgcgaaggcagaagtccaccgcttactagaagcaaaattca

SEQ ID NO: 171649 - DNA, 555 bp, Zea Mays
agatatgcgagatcgaaaggtcaacatcacaaaagaatgtcgatgagcttcgtgcttccaaagaaagatgttatgaaatatccttggaatgcgccaagaaattaaaggacaacttcgctagggttggggcatattcctctgagcagagattcatccgcggtgaccctgatggagttgtctagtggatcagcggggaagccaaagcttttgacgaaattctaagtgaccaaggagatttctgtgcctttgctagtgcgtggggggccacgtccatattggagaaggctggttgcaaacatactaaggttgtggctcagtcaaacttcgccttctcagttgatgacatcaagaatccttcatccaaagctgctacccttggtgggaaattttactcctagatatggctgaagcgcagtcgagaagtcaatgatgaagccattaaaaagaacgaaaaggagtcacatgatgcttcagaagtggcgagaagggctgaagaggctaccgagcgggctaggcttataggtacatctgttatattttagcttcataatatgt

SEQ ID NO: 171650 - DNA, 494 bp, Zea Mays
ttgcacggcatgtcagtgcatgcccggcataccccgtggatccgccactgatttgtgatatacatcttgtattcaatgacaccaactagttttacgaagaaactctcatgccagaggagagagggaaatgagatttttataaaatttatgctactgttggatatatgagacggatgttctaaattaaaatgtgcatgtgagcatcgtataagtatatgatatgttgcattgcaacagatcatgtttatctattgttcatagagtatagtttaaaagagtttgctagcaccgctttgggtgatatttttcattctcatgctttgaaggttaattacgattttatttcctttaacttgattccattcttgctaaggtcaacacacattgttttttcaagaaaagagagctttattaattacttctctatatttcagctgtctaaattttagaatgattttagttgacactcttaccaccaatcaatgtatgtaaat

SEQ ID NO: 171651 - DNA, 319 bp, Zea Mays
cgagtgtcgtccacgacgtgaagaacagtggcttcactcttgtgacgcggttgtcgcacacgggcacagggggagcttcaggaagtgtaagccataatcagcaacctcacattgactgagttaacagactcgagaatatgtagcctggccaacagaaatgggaagttcaggatgtctctgcgctatacgacctcctgaaacgccctgacaggaaggaagtcgttgtggcctctttcatctggaagaatagaatgccaccgcgagtgcaattctttgcctcgttgctcgtaatatttatccatctcttcctctctcttcc

SEQ ID NO: 171652 - DNA, 1143 bp, Zea Mays
gtcaaattcagaaaggttaggggctaagctataaatttttccagacacagctttaacccgcggtggacggcgggtttatttttcaaaaaccagagtgctctttagcaattaggccacgacgaaggggtatcttcgatcgccagccatccgatcccgatccagaggctcagaatagatcgtgaagcgatacacggcaggcaccacaggatccaagatccacggtccaaaatctctcccttgcattaaaccgttctagcctttggattttcaatctacggccgatacaacccctcttacctcaatccttcatcgcggatccaacggtcctccaccatcttcttcacgcgaggcactaggcaactgcgttgtggctgttcctagcccgcgacggtgtccaccggccaggagcccgagcagccccggtgatctccaccctgcccgatccgcagccgccccctggctctacagcgaagtctccgctggcgagcaacaaaccgaggccattcctccctacttcatgcgcctgaggaagatctgcacagggtgttcttactctctctccctcacctctctgctcaatggaggtgctcgggtctgatggagggggaaggaggggtggaggcgcatatatactcctatagaacccagcgatggccgaggaaatcggagtccgttgtggagtttgctgtggactttgttggccgagagctcgggtgtcaatggagtctttcagccgcgccgttgaatccgcagtattcggccagaggagatctcggccctctttgttgctgcagattccgaaccgaacgggtcccacctgcagaccataatggacgtgcgcgcacgagcgagatcgcagatcggcctggtgtggagggatcccagtgcttaggattgggggaaaagaaatccgagctagaggaaggacctgtcgtgcaggccccacatggtggtgacacagaagccaacccctggcgcgcctggtgtgatcccgaccagtgggccccacgcgcaagcgacccaggaaatatagaaaaagaaagggagttgagtgggccgcgcgggatgagatgtggagatgggccagaaacgagggtcgcggcccagattagttttttccattttctttttcctgttctattt

SEQ ID NO: 171653 - DNA, 1452 bp, Zea Mays
gacgcggagctccaaactgagacggcataggagtagtcggtgtaggagtaggtgcagccagatacttaggaaaaccctgcatcggcatgaaatgagtagtcccaggcacataaaactactgcggaggaagtggaactgaaaattgctcctcagcgcttgacatcatgtgtgagagtgccctgagaagaggaggaagtcactggctcccatctgagcttcctattgggattcctcctacacaccacatccttgtggtcttgactgcagattgaacacctgccattccactggcactctgcacgacgatgcgcatcaccacaaccgaaacacactagccccagcccgggcttaggaacagcccaaaacctctgagtacttcctcccgaagtacccgagtcagaagatttgccacgatagggatggtggcgctgattctgagactttcccctcttgtgggctgaacctccagtgttgcccctcctcgcgtcctggccacgaggctgatcaacacccgaagacttctgcaactccatggtatactggtgttccatctccacacccagtgcctgctccactgtagtacggaagtccaccaatggaaaggctcccagtgcatgcctgatagaaggtttcagaccttgatggaactggctcaccttctccatctcattataagcctcatgagggacaaaacggaccatcttgttgaagcccacttcatactctgtgaccgacttcttctcttgcttgtaggactgcaaatcaatcttcattttctccaggaaggtgaccgggtagaacctcctctcaaactgcctgataaaaacatcccaggacaggactcctcgtgaagaggagtgagctgcctgaacgccccaccaccaaatctgagcttctcccttcagcagctgtgtgccaaagcgaacacgatcaccatacacaatctcgaagacattcatcttatcctccacgtaagttagccaatccgccgcctcgaccggagtaccactgccatcaaaagtatccaacttcatgccatccactgcatcagagaaagaccactgactggaagaggcacctcggccccgccacctggagcagcatccatagggacagtgccccgagcactcctccaccaccagcaccctgagcagcacccgcaggggcaacaggaatagcttgcctcagaatggccaactcctgctgcatggcctgcatcgctgctaacattgccgccggactcatcgagtccccactaggaacttgcggactgccccgagccctacgaggcaacatagctgcagccataggggtgcgaataataagtaaataagattggcataacacctctttagataatgtcaaactagcacagacaataacataacatatcaatagtaaagcagaaaacccatcctacatgtgcagtgtgtcaatttattattattccac

SEQ ID NO: 171654 - DNA, 823 bp, Zea Mays
ctccgaatcggcagacaatgttttgccagaagaacttttgggcggtcttcgacgttattgtggatactgctctggcctcgatccacttggtgaagtactcgacggcaacaaaggtgaatttgaggttctcttgagccgtaggcagtggtccgacaatatccagcccccagcgttgaagtggccatgtgtgggcgattagcttggtgaattgcgaagggttgctcgagcgaggggaaaacttttggcatgcttcgcaagacctcatgactcgattcacagtacagattatcgcgggccagtaaaatccttgacggatcaccttgacagcaagggccctgggtcctgagtgggagccacaagttccgttgcagactttgcgaaggatttgaatgccttcggttttggtcacacactttagcatcggctgactgatcccctttttgtacagctggcccccgactagtgcgaagtcccggcttcggtgcttgaggcgtttggcctcattggtatcacttgggtggtaatgtcctagcagatacaaagttattagtgcccgccaatcttcagtcatgatgaggttgacaatgcgatggccttcgacgtcattagttacctgtaagccttctgggttgcggacagctggtgtgctgatgacgtggtagaacacgtcgaagggcaaggcctcgcctttggccactgccttagccaacgcgtcggcctctttgttcctggcgtggtccacatggtgtagggtgaagcccatgaattgtttctcgagactgcgaacaactgtgagatactgcatgagcgcggggccttttgc

SEQ ID NO: 171655 - DNA, 504 bp, Zea Mays
gccacggtactcagcctctgcactagaccgagagaccgtcagctgtcgcttgctggaccaggagatgagacagtcaccgaggaacacgacgtaccctgacgtggagcgatgagtgtccgggctctcgacccagtcgacatctgtgtagatagtcagcgagtgtggagaggaagcacgagctacgaacagctcgaggtcgacggtgccgtgcagatagcgaaggatgcgcttgacggcggtgagatgcggctcccgaggatcatgcatgtagaggcagacttgtactgcataagtgatgttcggacgggtgaatgtgagatattgcaagacaccgaccaagttgcggttcaacgtcgactctggaaccggtgagccatcggaggagagcttggcctgagtgttcaccggggtactgcaaggcttgcacgcagtcatgccagcgcgctccagaatctcgaaagtgtactgtcgttgagagagaacgagggacgcgcacaatataac

SEQ ID NO: 171656 - DNA, 922 bp, Zea Mays
ggaccatctcctgcgtggcagatgtagagggaactctgcaccacatagcaactccacccaagaagaaattctcctcaggagcaccaaagggagctgcagtgaaaccgcgagccatgcccccgctaacaaggcgatagggcgtggtcccgcgcaagtctggtctcagaagtccccggagggtagaaggccagtcaaccacgacctctccaacccgacgaactccattgtccacctcacccactaaggagtggacacagatcacccggcgaaggaagatgaacattccgaacggggatggaaaagcgtagcgggcgatcaccccgataccatcgccctcaaaggaggacgagaagaagcacactgctacacctactcctttcttccctgacatcctcttcattcaagggagactggagtcgttgcccatctctgacgatgaacccatcgtgatgggggaagagcctccccagcgcgacacacgacgacggaggaactgacgccgaaacgtgcgacgacaccataaagccggagaatgggacccggctcaacctgtctcttgggacgaagcctcacagatgggggagacccctgatgaaagagcacatcgagaatggtgcaactcccgccgccgagaccgtcgtcaagctcaggaacgcgagcgggagctagctgaacaagatgttagactccgacgagagaatccactcctcgcccgaaacctgtatcccgactttgcctaagcattgaacacgctaagcaaagttggaggggtcctagcgcagatagccgatggcctcccgcgaaccctagacgcggagggctatcgacgagcacttactcaggcgaccaatcatcttctacctctcgcccacccacctaacaatctgcgtcatgccatcaacagccggcgggacacacgaag

SEQ ID NO: 171657 - DNA, 845 bp, Zea Mays
aaatgagaaataaaaaaaagagaagacctatgcctacctggtgggccaaaagaatcaccatgcggcccaactcccctccacacgcgcaccacacttcaacagccacgtattgacggcagggccccacacgctagtcactcattccgttgcgcattgtgccttgttgcgctgtatggcgggccccaataccctggtccgttcactagcgcttgctctctgttcgctgactcacagacccggcttgtcagcagctgctagcgcaccgggattggattcctcctttgctggcaggtggggccaggtggtaggactcatatccatcccctgcgacgctaatcgctagcgccttggaaatcggatcacaccggaaaaatcggcccgcagttgcggatctcttccccacccctcggatttataaatcgcgcccttccttacccattaaacctggtgaggtcacgcaaatcgaggtgatgagaggccgccattgatgagttcgtggagatgtgaaggaaccactggcgccaatggatttggggcgtgtgcttcgtctcggtatcctggatgcagacggatggtgctggccattgtgtggcggtctggaatggggaatgtcgcggtggggcgcgtggattccacgatggcgtgctgtcaccgtggttgaggaccgcagacacgcgcaggcgctatcagcggggccttcaagaccggctcgggagcttcacctggaatccgggagggcgtccgaggtctcgcctggcgcgtgtggtgcgcggaacagtcggcgatttttcaccggagttggggaaagccgggtgccgtggacactacttcgaccgtcgttgagg

SEQ ID NO: 171658 - DNA, 636 bp, Zea Mays
ccgaactgtatgtgtagggatcactgatcccccaaacatactccaatgatttatcatagaaacaccctacacatgaagggaatatagatttcttcgcatatgtgcggggatggaaacacatcacaaacgttgtgcaccaaccgacgacgcacgtgaatcttccacgagggcaagggaggtgaggttggtgaccaagttcttcagcgcgtgcgacatgggcctagatgaagaagaggattgacttggttttcacaatgttggggaggcccagaagtgagtcgtcgtaccgattgctggtggcacaggagaggagatgcggagcaaacaaatgacgtcctcaagcactgtcacggctcaaagtaacccaccagtggcctaaagtgtaaagaggttgtgcaggcgtgggtcccctcgagcgcaccagggggtgacgaggatggaggatctacggtgcctaggtggcgctggccaagccgcgggcgatggggaagtatgccacaacagcattgccaactagcatctccttcacccctcccccatctcccctccccaatcaaagaatctaataaaccagcgcactacttgggcttcatattacacgattttggagctatacttgtgaaaatggagttctaa

SEQ ID NO: 171659 - DNA, 547 bp, Zea Mays
gggtgaggctgccttgcgggtgcaggacatccgggtggtgtgtgactttgccgacgtatttctagcagagcttctaggccttccaccggatcgcgatgcagctttcgaaatcaaattgattccgggtacgcagcctattcataaggccccgtatcggatggctccaaaggagcaggttgaattgaagcgacaattggatgatctgctggctaagggtttcattaggcctagcaggtcgccttaggcttccccagtgctgtttgttgagaagaaggataaaagcaagaggttatgtgtggattattgagctttgaatcaagtgacaatcaagaataaatatctgctaccccgtattgaggttctctttgaacagttgaggggtgcccaggtgttctccaaaattgatttgaactctggttatcatcaattgatgattcatgaggaggacattgagaagacgaccttttgcactaggtatgggcattacgagttcatagtcatgtcctttggctgaactaatgcccctgctgcttttatggaagcaatg

SEQ ID NO: 171660 - DNA, 557 bp, Zea Mays
ggggcatcattaagtgaaatgagcatactagaacatacaagtgcatagcagggcaagtgagtatcagtaggtcatcaaaatctccacgtgtagcaagtaaaacaggagcgtgcaacttgatttcagcattaacaggagtggatggcgtaggtgcatgttgctttgcagtttttgtagcccgagcaagatcatcttttataatttggtcaggggtcatgggatggataattattttctgacccttaaacatgaaagaataatgattcaaacgaccatgatgtaaactatcagtatcatattgccagggtctaccaagtaacaaagagcatgcttccataggaataacatcgcaatcagcataatcagaataagagcccaaggaaaagggaacacgtaccgaacgtgtaactttgattttgccaccatcattaaaccattgaatgtgatatgggtttgggtgcttacgagtgggcaaggataacttctctaccaaagttgtactcgccaaattgttgcagctgccactgtcgatgatgatgcgaatcgaccgttcttgt

SEQ ID NO: 171661 - DNA, 538 bp, Zea Mays
attttgtagtataggagtgggagttctctaacgcccagtctaccgaatctctaccttgagtgaaaatatatgtctgaatttcatcataaagatccccccacatggaaaacaatttagtgctaagagggcgcactaactcaaagtttcaatcatcttcatatagataatctgccaacaggaacaccatgtttttcgatgtaagctacagattatgttttaatattctccatcaatgttacgactatttggtgcacggattctataagtttctaattgaattttcgggggcgtttctgcctgccacagattaacttgagaggtcttgatggtgtttgcaatggtattactggtatgattgggacccctcttgctggttacctctctaatttgtctggatctgcaagctcgctggtctctttatttgtaaacatgtgcaatcaagtaagaaatcattggaccctgtggctcctcttaatgaagcgtaggtaaacagctagcaatttggcaatggtgtaacacttaaatatgcattccctta

SEQ ID NO: 171662 - DNA, 513 bp, Zea Mays
gcctgacctcagatctatctttgagaacacactggctcctctcaactgatcgcataaatattcaattctgggcagggggtacttgttcttgatagtaacttttcaaggctcgataatcgatgcacatcctcttcgtgccatccttcttctccacaaacagcactggggctacccaaggcgaggtactcggtttgatgtagcctttctccaacaactcatcaatctgcttcttgagttccaccaattctggtccggacactcgatggtctctcttggaaataggggcggtgtctggtataagctctatggcaaattcaaccttcctttcaggtggcatacccggtaactcctcgagaaacacatctgggaattctgatactacattgatagcctctgatggtttaatctcttcaatatgggcggtgacttggtgacaacttccttttcttggtccagacaagaccaactccactaacacttcttctcctgatagggacactaacttcatcgttc

SEQ ID NO: 171663 - DNA, 408 bp, Zea Mays
aggacagcatgcacttttggcacattgaaaatagggcaccgttgcttgatgtgtgaatcgacgtcacacacttcacaatacaacttcgccacacagtcgttcatcacatggccctttgcgtaacatctatgacagtgtgcctttctctgaattttcataccttcctcatgaacgacgtccttgtttttcatctcaccttcccgggctgcgctctccacttggttctacggccccttgaggccctcagtaccctacgccgatccactgctaccacccttgtccgcctttaattcttggatcgccgctaaagcctgctgcaaaattgcctcagccttggccggttgatcctgtgcgattgcaggtccagcggatggtaccaccacgttagcattggtggctgtagtagtc

SEQ ID NO: 171664 - DNA, 384 bp, Zea Mays
tggatatgggtccttgggacaagccttattaaggctagtgtagtcgatgcacatcctaagcttcccgtttgcctttggaacgatgactgggttggccagccacactgggtgatgaacctcttcgatgaagccagcgtgtagcagcttccggacctcctcacggatgaagtcctgccactcaacggactatctccgaggcttctgactcaccgggtttggcgtcagggtggatcttcatatggtgctcaatcacctccctggggatcccaggcatctatgacggttcccatgcgaaaatgtcgacatttgcccggaggaaggcgacgagcgtgagttcctatttctcctctagattgcccgcgatgcgggtggtttgggaagaat

SEQ ID NO: 171665 - DNA, 732 bp, Zea Mays
tgtcgacgttggagaccttgatattaggaggccaatggatggcccggaggcgaggggtaagcgcggagatcacgcacgtatcctcttgtcgatgatcatgtcgtcgatcctagggaggggagtgagtattaggtcgcctcgaccgtccccagaccggactgttggttgaggctgctgctgactcaattcgggttgcgtggttgtgtaccggtacaccatgatctcggtcgtattcctctcggcgccttatctcattctcgtgccgatgatcgcgtgaagcgctgatgttgctccgcatgtctcgtcggctgttgatggcatgacgcaggtcattcggcgggtggtcgacaggtagaagatgattggctacctaagtaagcaccgttgataatcctccacgtctggggtccacgggaggccattggctatctgctccagtactcctccaacttcagtcggcgtgttcaatgctcgggcgaagtcagggtacaagtttcgggcgagaagcatattctcccgttggagcctagcatcttgttcagctagttcccactctcgttcttaagcctgacgacgatcgcgggggcgggagttgcgtcgttctcgatgtgttctttcgtcgggggtttcccccatctctgaggcttcgtcgcgagagacaggttgtgtcgggtcccgttctccggcttcgtgatgtcgtcgcacgttttggcacctatttctccatcgccg

SEQ ID NO: 171666 - DNA, 573 bp, Zea Mays
aaaacgagggatggtatagggttagcctgtagagatgcaagaacactagaacacacaaggatttagagtggttcggaccacctgagcgtgataccctacgttcactaagttgtattgctgagagcttgagtgtgagtgaagatgagtctgagtgaggatgtccccttgtatcttatgtgccttcccttttatagttcaaaggtgtcacgtacaagggtgctgagcagccccgacaagtgggccccaacgatctagtattaaatatatacaacattgagcagtaaatgttgcggcggacaaagatcttctcctcggtcgccgtgtggatcctctgactatgtgtgtcttctgccatgtttgtcagctcgagccagccgcggagtaaccttgtatgctgatgtatgtagggaccgcccctgctgacgtgcgtggagttaatgcgatggatgtcgcacgctctgctcgagctaacaaccgctcatgatggcggcgccaacacgcgcggcgtagtgacacaactgccagtctcggtatcacacagtgcattgtgttagccctacacgtgacactaac

SEQ ID NO: 171667 - DNA, 592 bp, Zea Mays
cgaagtcatatctttcacgtgggcgagaggctgtacgctgtccagacaccggttagcacctgccacgcgccacgatgccagacgacagagagacacgtgcaacgcaagcgtgaaagaatttgaaacaaagtttaggaaccagatccgatttcaagaattagagtttgggcaagacgtcgagggctcaacccaaacgatactggattcgatgttccgaagattaccaaaggctgaattttaaaagaaatagatttggaaaaatttagacagacggaggcagacacgatatcaaaatcgtgataaacgaggttgattaaaaattagtgacctttacattcatagctatcacgtgttaacgtccgcactagtggtcgagcagacgataaacacctgggtgttacaattggaatattggagaagatcggcataggcggccacagtatcagaggacgccggacgctagcaccaccgtgatctttgtggttgctacttctccgctgatgtgctactacattcgctccatctagtattcttaggtgaaggactgaaggtatgatccgctgcctaactttttgcctcccatgtgatcttg

SEQ ID NO: 171668 - DNA, 855 bp, Zea Mays
cacgacctcagctgggcagacattccatcaaccaaagcctgtggtcgaagacaaataagcataagaaagataatttaccaataagaacaataaaaggcaagtaattgactcacctgaagattggagaggaacgatggtagacccaaggcagggggagctatgtcatggcttgacgggggaagatcagtaggaacaatttgaagggcattgtcaggagtgatctcagccccaccagcacataacatacttctcgcatctagctcgccaacctctaaggcgacttgtttgttcaaagctgtggaagcatgcatcgctgtcgccccatcggatcgaggtggagacgacccaacatggacgtccatggaggtgtgggaaggagagcccacctgaacaccctcgggggctgggttgcagcttgcgctacccaccaaagccggatcactaccggcaacaccctcagggctgggtaactaccagcaccaccctcgggggctgggtcttctgcagtagacacctctaaggatgagggctcctctgtcacctccatgggagtcgggcgactcgaaccaacgtcttggcattgaagagtgccctccaaagtcgacgatgcatgagacactgctcgagatacctccagtccaacgtctggaacctctgaacaaacagccatcacatcatcggcagttggctctgacagcatatccttagggacgacttcctcaagggcctgatcaaaatcttatattgacagtccctgaagactgacaagagccaacagagctggagaaggaatatcactcccccctcactacctctgtaatgctggctgttcttacggattagcgggacttcttc

SEQ ID NO: 171669 - DNA, 322 bp, Zea Mays
cacctgcttcctgaacatgggcgagtcatcgagcctgctgaaaaacatggctgcctccaccagtcccgccgccgctgccagttgttcgctccacacgaccacacagccactacctcctcaaaggccgccgcggcatctgataatctcgctccgtggagacccaccacctcaacctcctccacctcctctccggagaaccgacactccctccaccttctgccgccgcgcgcgacactgggaacgcgacccacaggcacaaccctccgaccgcgctggcaccaaaaccctaggcagcagccgggaatcggcgaaatggcggcga

SEQ ID NO: 171670 - DNA, 388 bp, Zea Mays
atccccgtggatatactccggccactaaattactccgaccaccgtaccgagctagtcacggatgcttcggatgtgttcgccggagacagttgcttcacggccttgcgccacgtgcctgggcacatttaccacatcgccgtgactcgcttaagccatctgatcatcgccggggagcccgccacggtattttccacgaatccactacgccagtgacctcccattcctccgaccgctgcacgtctcaatccaaattcaccggccaccgctcttgcctactataaattgagcccgtcgtgagctccatagggtaatcacgcatctaagccgccaagtcttgtctttaattgtccactaacgcccgtgaattgctcagtttccccaatctgtg

SEQ ID NO: 171671 - DNA, 513 bp, Zea Mays
gatcgccctaagatgagtattcgtaagcatgttatactaggtcgagcaggcgtgagcatgttgcaccgtcttaagtcattgccgacttaagctgattgctccgttagtagggtatagtggtcaccctaagtcgagtaagcgtgagcatgttgcaccgtcttaagtcactgccgacttaagccgattgctccgttaggagagtatagtggtcatcctaagttgagtaagcgtgagcatgttgcaccgtcttaagtcactgccgacttaagccgattgctccattcgtagggtatagtggtcaccctaggttgagtaagcgtgagcatgttgcaccatcttaagtcattgccgacttaagccgattgctccgttagcagggtatagtggtcaccctaagtcgagtaagtgtgagcatgttgcaccgtcttaagtcactacctacttaagccgattgctctgttagcagggtatagtggtcaccctaagttgagtaagcgtgagcatgttgcaccg

SEQ ID NO: 171672 - DNA, 833 bp, Zea Mays
agagtgcgaccctctgccgaagaagttagtgctttggttgcttcgcttgaagaaattcctgatgatgaacggcaggttcactttgaggtgcctttggatcccagtgatgcagaaataagtgccatgcttgatatgttagccgaggattcttctgatgccgctcctgccggaacattggtggtgacgcctctcccagaagctagtaaaaccttggatattcagaggtctgacagtgttcgcccgaagcgcccttgccgagccaatcagcctgctcctcctgctgatgggcagaaaaagaagaagagacgtcttcgccgagtgtctagcttggatcgggatgctggtccttctgctcctgctgctgaggaagtgcccgtgcctgaatttactgaagctaatcccaatgggtgtgacccgtcttacgctgaccccaatgggtgtgactcatctgacgctgatgccaatgggtgtgctgtccgttttgttgatgaggatgatgaagaagaggatgaaatctctctgattcagaagaacagccggcgttacgtagctagtggggaaagtagtggtgttccttctcctgccttgtctgccctcattggtctgcaagaattatctctggcgaactttgatcaaactcttgaagacatggttccagaggatctgttatcagaaccgacagatggtggcgcgatggatgtttgtgttgatgtactcgacgccgggttggggtcatctcgggcagcatcccgtgcctcatcgaccttggagcacggtcttgagggtcaggaagctgatttggattgccctgctcccatggaagtgactgaggg

SEQ ID NO: 171673 - DNA, 652 bp, Zea Mays
ttctatcatttctaaccattcttggcatggccctttgaattgtttctcaaatttgaatcgataaggcagtcgcacaagttcattcttttcctttgtcccctttagcttcggcatattccattcactcagcgtcgggaacaccttataggctagatattcttggactagatctctggtgctgatccgctcggcttccaccctgaattctgccacaacttcttagcacggtgaccctgacgtcatgcggcacaggggcctagccaacccgaagcttatgctcagcgggctcagtactagcgtctttagcttctctctcttcttttcatcggccttaacatagaaccactcatttttccaaccggttggccacttggtgcgatagctaaccatcggagccttcatatctttgcggtaagcgaagttgtaacaaccaaaattctcatgaagcccatcttctctggccttcgtctgataatgaagctcatgcactcggcaaaaagcttcggcattcgggtctattccttggcttcagagtgcccagatgaagacgctgagcctaacgatagcgttaggagtcagctgatgaagatagatttcataatttttccaaaacttccctaatcatctcgttcaaaggaaacctcaattcccc

SEQ ID NO: 171674 - DNA, 713 bp, Zea Mays
ctatagtagtgatgactgacagccaccaaagtgtgaaaagggtggccctaccccaccatcatggcctgaagaaaagctgagccgccatcaaaaccaacggcacggcacctgcgagtgatgcctgaagtctgatggaggaggagaaaagacacagagaagagagagagagagcgctagctcagcagctgagctcagagatccatcagaggccgtgccaatggagcgctcgcctttccctgcactgccaccacccagcacctgcagtgtacgcacgctgctcgtctacttcattcggctggccggccggcggtcagatggggatggggtctctctcgcgccgatggttaaacacaaaaaaaagtctcgttattcacaatagattaattaatcactagtagtggtgccccttgctaataatcctttgtcgtaagcgcaattatgttatgtcgtgggggacaggggctttgcagccagagacctgtgacctgttttttattgaacgctaggttggacggtagcggagggacatggacatggacaggctgtactggcctgcccgctgctcttcccaattcccatgttgctgctgtgttcacctcctactatattctattcttttatcagttctcgagggaaggatggatgcaagcaaacagtcactatcgaaaactgcttctttatcgattcggtatagcctaaaaacagtcgacaaa

SEQ ID NO: 171675 - DNA, 875 bp, Zea Mays
taactcttcatctctaagactcgcatagtagataacttcactccctacttaagttagctgcatacacatcaaggaagaataacatcttgattcactctagcacttccttcctttaggccttgctcaggacgaaatcggccttaggccttctccatgtctttccactactaggtaacttcatctcttcgtttcgtctatcacataacgctgctagatccactctttcctttacgttaccctttgaattatcaggaatgtccatgattgttgcccaatgttcctcgacgatattattttcagtgtgcatcatgtcaatattgtgtggaaggagaaggtcatcgtaatagaggacctgagtcaagctcgacttatgggtccagatatgcttctcaccatatcccacaaaaccaccttctagattaaccacgagaccatctatctgttgatgaacttcggcaccagtcatcattgttggtgggcggtctatcactacgacacctttcgtaaagttcttgatgtctagtcagaatgcatggtcaggagggagaaattgtcgatgtttatcgaacgatgaatatttgccaccgttcttcaaccaaatgaacctaagatcttccttgcaaactgcgcatgggaacttaccgtgaactcactaggcacaaaatatcccatacatcggatagtcatgcatggagtactggtaccaaacatgtattttgaagtttgtctttgtagctcggttgtatgtccataccccttcctcctaagcacgaaccaattcatcattcacaggctccatgtacacgcctgttggggaggagaccaaacacaacctcgattgtagcgaagaccatgttgggcgtactctaaactcg

SEQ ID NO: 171676 - DNA, 338 bp, Zea Mays
agtctgaaatcagggttataggcccaactttagagctgtgtagctttcaaaatagtgagaattcatattaggtcaccacatcaaaattgtagcctaatcataggagaacaactttgcttaagggtgtgagcatagttgttaagaaaaaactggagataattgagcctgaagttggactgtcagactgcttgaggtctgaaattcagagtaacaatgtgatgggatgaactttgagctcgattttgaatgggattcagtgactatttgatggtaagcattgtggcaaagttgaagattaactttagctctacaactttggtacagaggtttgatgaagt

SEQ ID NO: 171677 - DNA, 674 bp, Zea Mays
cgggggctactgtcgggggtgataattaggggtacctagattatccctctgaaagacacactcaggagaagtaaagtcaaaacccctgaggggaagcagtcgagatacctcctaacccgaggcctctcccagtgagtctcccacctcagacagaactccgcctcgcccgaagtcaccatcactccatctgtctcgcccgagttgatcccaggcagataagacaaaggcgcccaaaaacaggtggggaacactcgcatttaatgcacatacctaccccacgccgtagcagcaggagcaaagtggctaacaagacagcaaccatatccgggcgcaacaacatgattacacccccgctacagtacgcgcaggccgcctgccatcccccgatgggacatctaatacaacaggtgaagcagaccagccctcgggcgcaaatctccgcctcgctcgatgctgagtccagacctcgagcacaaactttcgccttgcccaacactgagttcagcctcgggtgcaatctccgtctcgcccgatgctgggtttggcctcggctacctgctccacctcgaatcctgcggacggccactccaccgactgtggcacatgtcacgggatggctcaagcaacgcctcgaaaagacttccccttcgcccgagcagggctttgatctcgat

SEQ ID NO: 171678 - DNA, 566 bp, Zea Mays
cagccatacaccacatctgtctctctgtagccactgaggcgaggatagattgcatttgaggcctaaaaccatcaaacacaagcatttctatgcttccaaatctctcaagtgactaggatgactagagagttgaaacccttccgaagatccttaggcaggcgattgacagcttcagatcatcaagaacgaaaacggcttgtagaattaggtggtaagatcgacatttaagttcagcccctgcagaattcgagtccacgcttcctgcaccagcacacaggaggagagaatgtggttgatcgtttcctcatcctggtcagaaaaaggacaggtcggctgatggggcagcccttgcttggctaggcgatcagaagtccaacatcggttattaattgccaaccatataaagaattcacaattggccggggcccagctcttccaaatcttcttccagtgagaaaacttgatggtcccaatgaacattgagttataggttgatttgcagctgtacataccggaggccgagaatttccaaagatgctgatccgagtcgtcaggctgcagcacca

SEQ ID NO: 171679 - DNA, 296 bp, Zea Mays
acgcgacctggtccgttgatctgggacgaacggataggattagatctaggataacggttcggtttagggttgctgtagacgttcgatctgtatcgtgtgggcgagattcggtttggggcttttaaatcaggagcgccagatttagatcgtgcggtggtcgatcggtaccgattcgaccgggggtaagtctaatcctagcggtcgaattctaatcggacggcttgaagtgatccataccccttcggagtgcgcagtttgcagaaaggaccttataattttaacgaatcaacccgccg

SEQ ID NO: 171680 - DNA, 540 bp, Zea Mays
ttggtgaggagttaccatagcatttattgccattgcactgttgcgctattcaaaaatttaaccatagccaaagctttctgcattgcgctctcgagcaaacgcttcatcatttgagattagcttcgtcaaaaagtgaaaacattgaaatggctagagtgcgatcgactgctagagtgtctcgcgagggaggcgaggtcgaagtaactgagatgacaccaatatcagaggtgatgaggcagtcgggtcttgttctattagaagagcccattgccgaaggtacttcgactgctgaagctgagggaatcacagttggagagggaagtggtaatgaagacgaagaagattacaccatcttgatcccagaaaaacctagtcaccttgactttggtagatctactgtgacggcagatgatatggttataatgaaaaaattgggttactttggagaaaccgagagtaggcttgtttgttttgctggcgaagaagtggttccagagccgaaggatgatgaagttattgtgtttaaaagcttcttcagag

SEQ ID NO: 171681 - DNA, 497 bp, Zea Mays
cagcaccactagcagagtgggctacgacaaggtcccttttagaggtcccccactaacgactccaaatggaccaaagaattaatcggccaaagtgaaggactgagctccccatgtaccctaaaataggaatcctcaggctcgagtagggtcttagtgttgagtaaaacaagcaaacccagcagagcaaacccaaggaaaatgcttgtattgtatccctcgaggacgatttccagaagattcccctaccgagaggtgctcatccctcaatgatctaccttgacccatggccaagaacgaaagacaagggaggtcagaagtcgcaagagcaactcatctatttaagaagacggacacataaaaattctacatctttcaagaaagcaattgacgcctcatggaagacttaacaaagtgggcctaccgacaaaaacccattggaagccaacgtaagaacctcggtatcacgaaaacatgacccctcccaataaacatgtact

SEQ ID NO: 171682 - DNA, 372 bp, Zea Mays
agtttgtgtcgtccttctcctaccaatacgcggcggagtaccaggtttcttactgcaaaggatcgatgccgcactgctttgtcatggtagcgactcagagtttgctgatacctggccgattggatgacgacattcaaacattcttcttccaatacgtcaacatcctctagtatggttgcttccgcttcagctatgctttcaaatgttaacctgggtgctccaaatatcaagtctgttggcaacacggcttctgatccgtataccatgaagaatggagtgtttccaagcaaggcctggctaggttgggttcgtagactccagactacatacggtagttctctgatccattttcctacaaacttttcactcttg

SEQ ID NO: 171683 - DNA, 634 bp, Zea Mays
cggtacttctaaccgctcgcaaactccgccactactttgacgaccacaaagtcatagtagtcactgggtttccaataggggatatccttcacaacaaagaagccatcagaagaatagccaagtgggcctacaagctgggagctcatgacatagagttccggccttgcacagcagtaaagacccaagcactagttgacttcgtatccgagtggactgagcaacaagtccctgaccatccgaaggctactgaagtatggcgaatgtattttgatggctcactaaagctgcagggagtaggcgcagggatcctcttcattgccccaggaggtgaacaactcaagtacgctcttcagctattattcccagcatcaaataatgcagcagaatatgaggcactgatccatgggttgaacatcgccatatcactgggcgttaagaggttgatggtatacggagattcactagtggtcataagccagataaataaagattaggattgctcgactgattctatgggcaagtactgtacagccgtccgaaaattagaagacaagtttgaagggttggaattccatcacgtggaaagagaccgcaacacagcagcagacgcgttgttgaagctaggatccagtcg

SEQ ID NO: 171684 - DNA, 1013 bp, Zea Mays
gaagtgcattgacatatctcgaggtagaaacctgtgggtgaaaatccatgttgggcagtgtggcattcacgtcgcgtcaagaacactagtcgggaatgcttttagagctggattctactggctaacagctaatcaagatgtagtagatcttgttcggaagtgtgaagcatgccaatactttgccaagcagcaacatctctcggcacagcagttacaggctatcctggtttcatggccctttgcatgatggaggctagacatgatcaggccaattcaccagatagtgaaacaggcctataactcccttattagatgaaggcgtgccttttcaattgggcaactatttttttacatccttaattatgtgtgaatcgaatcgattatcaatagtcaggaagacaagacaacgcaatcaaaaaaaggaagacaaaacatctagcatccacgtgttcaaaataatccatgaaccacaaaggataagaaaaagaaaagaaaactcaacggactagagagtcaagatctcgaccttcttctccatgacacggacgccaatcgtgatcttactggcgccgccactaccctccatcaccaccattgcagcatgcccctatcctggcctccttcgtccccaatctgtcccacagtccgcgcatgtgaatccgaggccatttcccacatttttatgttaggaggataagaggcgtttggttgttgacgatggctacatcgatggagcaaccggccactagcccgaccatgattttgagcttgatcatgtcgtcaactaatgccaggtacaatcgtatctccctcggtgccgacactctaaccaccggcatatgcaccccacacggcaagagaggcttctagccatcgcgtccagcatggcgtccaagtcggtgcattagtagttggtactgaatgggtccacatggctgaaaaagggggttggctccgaagacgtcagcgttggtgcccctaaggttcagcatgatttccgatgcaaaccaacc

SEQ ID NO: 171685 - DNA, 298 bp, Zea Mays
gggagggcggcaggcatgggcccgcgacgaatctgtggagtgtggtagggcacaagcagggggtgaagaggttgccagatcctggatccgtgttggacgcacgacgcgaagggtgctagcagtccggctgtcgagctcgtcgccacgggcaccggtgaccagccatcgagctcaaccaccgccaggcagcagcataagacaggagggagcatcaaccgccgctagggattgtgggggcgtgatggctgcaaaaccatgccgtcggggattgaggggcgagggtttcgggggaggggcg

SEQ ID NO: 171686 - DNA, 376 bp, Zea Mays
ggaaggtgcacgtcgggatccattgccgcgggtgggtccaaatcaatggcaattcctcgtcgaagttgctcaccgtcgcggagccgcatcgcgccgtgggcagactcgtcttcactttaatcgcgggtgagaatctccttcccggatccgccatcgtctcggcttcaattagcgcttagcgtacttagggatcatgcaccgagggctaggcatgccctacgccggtgacgccgccgtcagagtgccctgttcacgatgcctggatggctggaggagagagatgagccggtaaccgtcgatccccgattcaatggctaagattaacacaaccctacctctttgttcgtgtgcaccgtagccgttgatctagatatcc

SEQ ID NO: 171687 - DNA, 805 bp, Zea Mays
cggcgatctaaaaaaaatatgagaaagaaaaacaaaaaaacaaaatctctcatgctcaaccattggccgatcggccttggcctactgcagcccgacgcctataccggtatcttctctctcgctcactctctctttatgccatgtggggtccgtttgtaaggtcttcttctcccaacaccagaagttggacgctcgctcgtacgtctctatgtgccgtcggttctgttgccaccacgttgctgtcagcacagctcttggtgttgcgcctcctccccttcccgccactcgcatgctaagggtactgacgcgcactactgttgtcaccggaaactgttcgtctcctaataaaacgtcgacgccatcaatagacagtaacgtcgctggatctgtgtataaccttcccagcatcgccttggctcccctcgctcggttataaaacgtgccacactatgagctctccctcatttccctgctcgctcacctcgcggcttgttgctgctcatggtagcacacgtcgtgcactgctgcttcttgccatcgtcaccaggctctagtgccgcagctcaccggagtagtcgccctgctcgcgccgtcgccgacgttgtgcctgatctctgtcccagcgccagcccctgctctgcaactgcttcgccatggttatgcgcctcatcagaacccgttgtgcctcatcgtcaaaacctcgctactcgtggccgcgccatcgcaccagcagctgcgccgtcatcgcaccacgtcaagcaccgtcatcaaagcgtcatcgtgcccccgtagatctcgtgttctg

SEQ ID NO: 171688 - DNA, 669 bp, Zea Mays
ccaatcccggtctcacgatgatggcgttgtatctgcagttgaaacgcgccacctcgaagcgcaagaactcggtctgatagttctctggggttcaaaaagtgatggacatgtaaatgtgacccagcgggtactctccctcggtcggcacgataccaaagaagggggtatacgactaggtgaggtcggcaatggagattcccagagcttgaagtgttcgaggaaaggtgacattgatgctgcttccaccatccactaacacctttttaacccgactctcttggatcacagggtcgacaagttgggggtacttgcctgggtgattgaagttgagccactgatcggcccgactgaatgatatcgtgtgttcctgtcatcagtacggggtcgaagcgttgtttgtggccactagaacatgtgggttagtgagtttctgttgccttctgtttatttgtgccctgtgtccttcgaatatggtgttaacttcccgattgatgcatgggaaagccccgcctccacctcctccctgtgttgaggttggcctgtcttggcaagctctcctcgtggagggggaggcgacagtggctgaaacggtcggtcattcccgatagagttcttgaaatctcaacagttccgcagggtgtgccacatatccttgtggtatggccactg

SEQ ID NO: 171689 - DNA, 413 bp, Zea Mays
gatcgactggcttaggcccgaggccaagcgactgaacaaacttggcacacaagacaaggactctattgtaatctaaaccgtctaggagatatataagaaaactaacttgtaacccaagccacgccggattatataaggcgagctagggatccctcccaaggcagatcttaggggacctgatctcatacacgccccactctctcatcaagcatacaaaccctagccctcattgtaacctccagatatcaaagcaatacaacccaccgcaaacaggatgtagggtattacgcatctcgcgggcagcggcggaccagaggttttagaggcctggggcaaatttaaaatagaggcccatcaaactattgttatataaaaatggtaccaatatataaactcaagacatatctaaaaat

SEQ ID NO: 171690 - DNA, 454 bp, Zea Mays
gcggcgagatccagacccgcggagtgtgtggcggtgaaatcgcgttctgtttgaggtaggggaacgagctgacgactgggcccacatggaagtgaaacgggagcgtgcaatgaggatggtaaggaaaagactttatccaaaatgtttaagtcctgattcatctcaagattcgctttgactgttaaacccttgttagtgttgatcttttcttctccagttttggtctcattaattcgagtttaatgtatatcagcagagttgggcatatggttgaagtggttatgggtgagatggactacatgatgtaggtcaaaatctagtttgatgttaggtggggacagataattaatcaattcatcatgacaccatgggttgggttagctcttatcctcatggttgagttggtctaatgtgctaggttaggttaacaccgggctagtaatgtctaatctct

SEQ ID NO: 171691 - DNA, 396 bp, Zea Mays
ccccgatagcttttgaaatctagctaagggtaaaacttcctgagatgctctatattccatgaattccctatttccgtgccatccatttgagtaagtcgatatgatcctggccgagtgacttctgctaccatgaatggcccttcccatagtggcgacaatttgtgccatccttcccccgttagaattcggcgaaggaccaagtctcccactgcgaaggatcgatgccgtatggccttatcatgatatcgcctcagggtttgctggtacctagctgactgaattactgtattcaatcgttcttcttccaatatatcaatatcctccagtatggtagcttctgcctcagctatgttttcgaagatcagccttggtgccccaaacctaagatcggcaggt

SEQ ID NO: 171692 - DNA, 607 bp, Zea Mays
gcagaaagggatatatttgcatggaaaccttcagacatgttgggtatcccaagggaagtcgttgtgcactccttatggattattaaaccagggtccaagccagtgaagaaatggctacgctgtttcaacgtagagaagcacaaggccataagcaaggaagttgggaagctcctgactatcgggttcatcaaagaggtgtatcacccgtagtggttagccactaaataaagcatgcccgaaagactagttcctgctgccacgcatcaactaggtgttctactccaccttagggtgtgaggtgttgagttttattgatgcctactctggctaccattagatcacgatgagggagtctgattagcccaccacttccttcatcaccccgttcagtttgtattgcttagtgaccatgccctttggcctaaaaaatgttggggtcacttaacagggatgcataatcaagtgtttcggcgacctcatcggtggggtcatggaggtgtacgtcgacaaaattgtggttaggtctaagcaagcctcgtggctgacctcaggaagaccttcaataggctaaaagtaaacaacataaggctcaaccccaaaaaatgca

SEQ ID NO: 171693 - DNA, 708 bp, Zea Mays
aaaataagtacaagaccataccacaaggcatacccacatgggtacaaaaacatctcctcacagtacgcgaccaacttccgtcctctaggaatagggtagcctacaacttcagaaggcaggcgaactcttcacaagtttactcctccacacggtattggcacttgcctcaatcaactctagggtagcctacagcttcagaaggcaggcaaactcttcacaagttttctcctccacacggtattggcacttgcctcaatcaactctagggacttaggatccttccctctcccgctctgcttgtactccctactgcaagcaactagttgcgagtaatataagtctcatccccctctaatggaattagggcctctcctagcccaaaccaggataaaagacttgtgtcaacttgcatcaccatctgggtcagaggcacacgacattatttcactagttggttaggtccacggatccaaacaccgaaagcctccaaagcttcccatccttttctacattggaagtcggcttcgacaaagtcaacttaggcagtttccagtccactcaaattgctaggattcggaccaccgcaaaaatgatcacacttacctcttcggaggcatatcatgcccatctcaaagctatgagggcttcgtcatcgtcaaattctgctccagagctacccaaggacatgccttcaaagccaagctacat

SEQ ID NO: 171694 - DNA, 599 bp, Zea Mays
cattgataactgaattaaggtcaccagtgacattggcaagacttttgggtcaaattggaataggatctagtgctcgattgaggatagttactatagtcgatttgtagctggttggttgagctacaactttgttaaagacggattagtaagtattcacatgaaaatttgagatctaggctctacaaagtggtctgtcaagatgactaaatgagaaactgatggtacagtatcgaaaatatcccaggttcagatcatctcaccgccggagaccacgtgcaaggattcgcgcctgacgctacgattagtgctcaacggagtacagatagttgctcgggtagtaaatatcgccttgtggatgaacttgagccacttttcactccggccgccgtgtccgcctgactcacggccgattcagatgaaatcaccggagttagccacctatcgaccatgcgccacgtgccttggtaccttaccacgtcgcagtagctcgtattactcatgtccggtgatcgccggtgagctcgccacggtgaaagccaccaatttcttgcgacagtgctctcctctctctccgactgccaccgcaccaccacccccgg

SEQ ID NO: 171695 - DNA, 527 bp, Zea Mays
tgctgatcattttcgcacaatacaaactaagctgtgtatattgcatccaatacctccatttgcaacagagtgtgagtagactcataaaattgaaatgagtgaaattgtgaagaagctaatacctcccattgcatgttagatgttctaaacatcggataggcaactataaggactattccatccttcacatcactccaaaatctttccatggcggatagataatttttttgctactgcagaaacaatcaactgcatgtagcaagcttgagagacgactctagtgtagccctgtccaatccaacgaaaacaccgctaaaatgggatggtgggtttagaaggaacaaacctggttagcgagtgagatggagtgatattgcatctgtgggctttgcctgatgtcacctagttttgggtgctagaaatgaactttttggatgcaagcatcaacattgtttgcattgcagccatcactcccatcaagcattctagctcagactaatgagattgttctatagaaacatcacctt

SEQ ID NO: 171696 - DNA, 686 bp, Zea Mays
ggggttaatgatccttctcgagttactgataagcatatatttgaggagaacgtaccgagtcgagttgatttgatgctgaggggtaaaacttcgaacgttggtgcttctccttcatactctgcctggaatcttcccccaatggtaagtgtcggtatgtaagagtttttgtattgccacatgtagtgcttttagcgtttcatcttgttattgcagaggcccatttcaaagttcgtgtccaacccacctgctcaagacgggagcccaggccatagagtgcgaccttcttcagatgagattgaggccctcatgcgcataggggttttcctaaataggagaaatagactcacttccggatgcagccagttgccgatgatgttgaggtgaacgtcgttctaaatgtattggctggagagttgtccgagtccgctcaagatgagtcggtagttctattatcaagcgtgtgtgtggtggggaaaaagaacctacaaccctagtagtgctcgtcgcaagcgaacacgccaggtaggctcccctgtcgtgtccaccgatatgaagaggtggaaaataaaactttggtgctcatccggcttagagctggatgctgactccactgctctagattctggtgatgaaccgacgagcgtcgatcttgaagatgacattgaaagttgcggtggcaccagagc

SEQ ID NO: 171697 - DNA, 547 bp, Zea Mays
aagcatatgtgtgcatacaagtgcataacagggcatatgagcctcatgtaaatcatcaaaatctgcatgtgtagcaagtaaaacaggagcattcaactttatttcagatgtaacaggtgcggctgatggagatttgacttgttgtgcagttttagcagccctactaagatcatctttcagaatttggtcaggggtcattggatgtataactattttctggcctttaaacatgaaagaataatgattcgaatgaccatgatgtaaactatcagtatcatattgccaagatcgacccaataacaaagaccatgcttccatagggataacattacaatcagcataatcagaataagaccctagcaaaaaggagatacgcatcgagcgtgttacctttattttacctttattttaccaccattattaagccattgaatatgatacggatgtgggtgtgtgcgagtgggtaaggataatttctctaccaaagatgtacttgccaaattattgcagctgccactgtcgatgatgatacgaatcgatcattctt

SEQ ID NO: 171698 - DNA, 576 bp, Zea Mays
tagtacctcttcacaaagaggcggtgctggcgcagggtgtcgaggacggcgcggagatgcctcaggtggttcgcccaagagttattatctatcaaaatgttgtcaaagaaggcaagcacaaactggtgaaggtaggggcgcaatacgtcgttcattagagcctagaattttgctggggcgttgcacagcccgaacgacatcaccaggaacttgtagaggccgtcgtgggtacggaacgcctttttttggacgtcctccggccgcatccgtacttggtgataccccgaccgtaggtccagtttggtgaagaggcgcgccccaaggagctcgtcgacgaccgggatcggaaatgcatccttgaccgtgagcgcgttcaacgcgcgttagtcgacgtagaagcgccacgactcgtccggcttcttgacgaggatgactggagatgagaatgccgagtcgctgtggcggacgatgccctgcacaatcatggaggtacactgtcgctcaagttcgtccttgtgagctgcagggtacctgtacggtcgtaccaccaccgggaatgagccaggcttgaggacg

SEQ ID NO: 171699 - DNA, 712 bp, Zea Mays
cgactagacacccctcgggtgcaaaaaacgcctcggggcgacgtcagattaaaataaaatattggcaaagacaccccctggtgcctaaaatgcctcaaggcgacgctagattaaaacaaaatcttggcgaagacacccggtgggtgcaaaaatgccttagggcaacgccagattaaaatcagatcttggtaaaaatgcttcgagaaatcaaaagtcatagtgaaacgtcacacatcccaacggtcacattacaaaacccccggaaccacttcaacctatgatcaagggtagctttcgacaatcttccaaaaaagacattgggaccatctcaccaagttgaatcaatccctcagggggctagtgttggagcgaaggccgagcgcatcctcgatcaaactaattcgactacaatcaaacaagtgtttggtgcaggtacaagctacgaaggttacctcgactcgcactagcatcgaggtcttcgatcgcggccttcagaggggacgaagcgaagggctacactagtcaagggggctcaccacagccccgcatacgcatcccaaaggaccaaactctttccccgacaagcgaagtccaaatcctgatgatgtcaagggcacgactcgtggagtcaagggtgcaacacataagtgaaggccacgccatatcatagtgggacccaagctgcgccctgtcaccatctaggcccatttgt

SEQ ID NO: 171700 - DNA, 751 bp, Zea Mays
ctgacgtcttgacattcggagagattcctagctcgtcatagggaaagtgattaaggactcagaatgtcgcgaccctaggatggcagtgtactatcggcaggcacgatgacttgaagagagatttgatgaccttgagctaaaccatgtccccaacaggataacgaaacggcggacgccctcatgaagatggcatcaggacgaatgattatcccaccaggggttttcgctaccgacctcttcgaaccaattgttcgttatgatgaaacccgtcgagaggtcaggcaagcctcggacattagtccaccgaccaatgagtgtgtcgttgtcatagaatgtggagacccctgacaggtcccgcaagcaattatagaacatcatacctcaacttcttgtccaatgtcttgctcctcgaggatgaaacggaggtgcgaaggctccatcgatgagccaagtcctttgtcctgattggggaagacctgcacaaaaagaaacacaccagaataaagcaacggtgcataccaatgaacaagggaggcagctcctagaggacaccataatgggacctgcgaacaccatgctgtcccgtgaagcctcatgggaaacgccttacggcagggtttctaccagcttaaagcggtgtccaaagcgcactagatggtgcgaacatgtgaagggtgccagtactacgcttggcaaacccacctacccacaggcgctccaaacaatccccatcacctggtcgttcgtggtc

SEQ ID NO: 171701 - DNA, 463 bp, Zea Mays
ccaccaacaatcgttagcaactgtgcatccgagagcttgaattttggtttctccccaattcgggtttccgccgccgcagaatcatcctcaccgcggccagattattctaggttcgttcatacactctggtcgattgttctagcgtccttaggtcctcctcaagcttcactactcctttaattgagctagaccaccctgggttgccgtgaacgcccgtgttcttccccgatgcccgcggtcaccgtggccagagcaaaccgagtagccattcttggaattaggggaggggaaacgctcactagatcttgaatttgggttcggccaaagaagggcgccattatttgagcaatttgtccggtgcgcgtgctcgtcggagctctgcgcgacgccgtccgccgtcgagggtgtcggcgtgtaaaagaatagaaacgcaggggctcttctgaaactgtcagtgactccc

SEQ ID NO: 171702 - DNA, 757 bp, Zea Mays
cgacagaccaccataatattccagacaacagtagtatgatatacggaggagggcaggttcacagaatgcggcagttccgggccaaccagaagcatttggagtgggcaacggctatacggatcagcagctccgaaacagacaaggacctatcacctatatgtgttggaactgctgcaaaatcatgcgcataaaacaaaggaagaaagccttgcagtagttagaacttcgtaaccttgtgcttgtgcatcgtttgaacgaatctcgatcccctcgcaagttgctccaggctttgtacttttctgggggcgccgcgcaccgctggagcctgccgccgacgcgcgaccatacgcgctggcacatgagtatatatcccactgccgcaacgccaacgccgcccgtcgagcggcggagcggttatccaattgcaacatgtaattgtctttccaaatgtcttggctctccacgcaaaattttagtccctccacgtccccactcgtcgaaaccctagtttttagcaagttgctcgccaatctgcaagtttggtggcgggaacaagtggcagcaactaatcgaggtcgtctcatggcgataccacgcgaaaaaaagaagaagaggacatgggggaagaaaataggatttactgctaggagcgttagtgtggaactcacttacgcgcgcccagagatttccagaagcagtgggtggagtaccacgcgacggagggaacgccggcggcttggcgcgctctggttctccg

SEQ ID NO: 171703 - DNA, 669 bp, Zea Mays
atcagactttggccccacctgcaagctcgtatcctcccctgaggcgggcccgaggccactgttggtaccctgaaccaggggtaccccctactacagtataaggaagcggtgcccgtatggcgttccctagccacacggtgagcaacacccgaccccaccacgtgggtggctcaaggggtaccacgtggcgagaaaagatgacacatcccaggatatatcagttgaaccggaccaccacgaaggagcaccgaacccctgtacgcacaacccggacccccgattacgtctcgggactcccaagtaagcatgccgagccccttagatggggtccagatccctttgagtaaggtccggaccacaacgaggtcctgggacaggggagaccctggcataagcaagggtctggtactgacacgtgttagggccttatcatgtgcgcttgcgctccccgctcaggcggagacccgctgctgccacgtggcttgttgcccgtgacataagccaacgggcggagcctaacgtaaggcctctaggccacgcggtctctgcatttattgcggaggagacgcgccgcctgtccaccttgctgacaggcgatgtgcccctcagcatttaatgcgtcctgtccactccacaggtaggcggcactagggccatcctgtagtcggc

SEQ ID NO: 171704 - DNA, 401 bp, Zea Mays
gacatattacaacaatcgatggaataaacgctggaataacaactccatgcccatctcctcatacctaggaaccaacatttctggacgtggctacaataccatcattgtggcaatatggacgatgtacttagcatcaaccatatgtcctatgatggcttggtcagatacacatcaccataccacattcccgagactttcgggacgtacgcctcgacctcgacgtatacgaccctctgacagttaggacatgctcgcagcctcccaaatatcctatagcagcatggaaggtgaacattcccaccgaccacatctccaagtacaggtacagattgtacgagttgcaccagccggctccaacatctctagccccatctgcaggagttttgagtgacgtcaaataa

SEQ ID NO: 171705 - DNA, 368 bp, Zea Mays
ggaaaaggagagggcaggggaggttccttacctcaaggcataccccaggaacctctcggtggcggtgaaggcgcgacgatggctcgggtcaacggtggcagcaccgggactgcgcagaggacggtgggtgagtgcgggcataggaaatcagtgagggagaggagaaattggagcgtgtcctgcggatgtcgaggtagagctcaccatggcagagggcacgaccgggctccgacgtcgacggggaaacgggctcgggacggcagcggacaacggtggctcctccctggcgtgtacgcagcgcggggggttgaaatgaggctctgcgggtgtgaaaatgagggagggggagagtgagtggggctctgggg

SEQ ID NO: 171706 - DNA, 1072 bp, Zea Mays
ctactaaggaatttgaattcaatttttggatttgaaaaggaaaaggaaaagaaattacaaagaaaagaaaataaaaagaaaaatggaaaacctaacagggcccaatctgcttcggcccatctttcgtcacgcgcatcgccagcctcactcccccaccgcacgcgcgcactgcccgatgggacccacggctcatcctctcactggccattgcgcgcaacaacccgttatccccgcaggccatatccccaccgcactcttgcgacttgtacgcgctgcgcgatcgtgagtctgcggatgggccgtcctcaacaaccatcggctcactgctgcttcaaatcgccgcgaactcgacctccgtcaaccccgcggtttattcggtcacagttgttgcgcctcaccacgggctacaaaaccaggcacagccgagtcgtgcgccaccccccttcctctattcctctctttttaccgcgaatgacgagatagagacacggtgggaggagacaggagggtccacttgcgccattgccgtcaaccacgccgtggccaagctcgtcgccctcaccctgacctctggtaagtgcacaggcctgttctttacatccgtagggtcgtgtgacaccggtagggtggtagttgggtcggtggttggccggtaattgctcatcgggcttcaaccgcgccgtagagccgccgtgggagttagaccaacgccgtctcgggatgattcaactcatgtgatggttgtccaggttgggcgtagtcgtagctttgtctagagtatatttgattggaatttgggggctcaatgtgtagaatggggcttccccggtgaggtcaccaccaccttggggtttgccggtgtgaattggtgggcggcgccgccgggtcgcgacacagataggttaggcagatcgtgtccgttggttgtgcggtctacggctctgattagaaatgggagatacccccttcacgatattaaatctaggccattgatcaccgatctgacgaatagaattagatctaggaatcctcgttgttggatcctaatccctcagttctggttacaccctga

SEQ ID NO: 171707 - DNA, 481 bp, Zea Mays
gtccactattctgtcaagctctggtataactgcaacaaccattgttttagcaggggccgagtcagaagactctccagccaacatatcgagcacaacattcatctctgcatcatccggactcgttggcgtctcaaaatgaacttgcctctcatcattgggaagatcacaaagagaagcaacaaaggcctcaatatcttcgggagagggtcgcactctaagacccagaccactatcactagcaggaggattagacacgaaattgaaaaaggacttaggatatggcagattccaagcagagtaggcaacaagagcaccaacatttgatactttgcctctcaagatcatgtctagccggctcaccaaatccttagtaggaattctcctattagtaacccgagtggagtcggtaacaccactgtacaagtaagccgggtatgctctgtccttcaggggctggatgttcttaaaaacaaaatcagca

SEQ ID NO: 171708 - DNA, 682 bp, Zea Mays
agccgaactgtcctacgcgacagtcttcgattactcctctacgcaatcgaacggtataatttttcgtcgataaattacctagaaagtaaatcggcgacgactctcctggtcgcacgttgcgcgcctctctcctccactggtccacctctgcccgtagcagtgaagatccggctcgcccgctctaggtcttcagcgtgagcgcagggcacgacgcttcctttacgcgcgatcgtgtcgattttgccccccgctctaccgaacggatgcgccgctcgctactgaatggatctcgcatacagaaatatgtgcattgccctggggccgcgttgtgcacccgtgctagaggccgagcacaccaggacctcaccgcccgccggaagtcacatctgcgcagaggcacttgcctgttgcacatgcacctgggcggcggtcccctttctcctgccgcgtcctgttgaccagccagtaccacggccaaagaaaaaaatcatcgtactccatgcacttaacgcggtcaaatagcgctgaggcagcaagtggattgactgccgctttgcacatgtgctgtttgcatgtccgtttgtaggtgcggaagaaaaatgtagtggagggctgcatgcatgcaagtgctcccggtcaaagcggcttgcagctgagagggttgtgcaacttaaaaaaaaaa

SEQ ID NO: 171709 - DNA, 958 bp, Zea Mays
gtttaatagtatcatagaccatcatggtctagtggaatttgagttgaaaatagactatatacgtggtctaacaaccgcagcgatcctacttttgaaaaacttgacagatttttggccagtcctgactgggatcttgcttacaacaatatcagtgttcttgggttaaatagatccttctcggatcatgctcctctttgccttcaaactgatactctccccgtggtgcgtaaggactttagatatgagctgtgctggaaagttagaccggattttcacaacttagtgaaaagtatttggtctctccctgttggtgtgaccaatagtcttgatgtgtggaagttgaaattgaaacgtctgaggcaaaaacttaaaggttggaacagcaatattgtggggcactacaaaaaactgaagaaaaatttgactgaaaaaattgatatccttgacaaagctagtgagacttcaggcttatcagatgctgacagatttttgaaactggatctggaatctaacctcaagaagattgtcaatgaggaaaacattagtctcagacagaaagctagggataaattcttattagagggtgatgagaattctaaatattttcatttgcttgccaaacacaaaaagagaaaacttaagattttaactctttctcatggtgatatcgtggcccatgatgatcacgacattaatcagttggagacttctttctatagagatctcttcggcccttcccaaggttcgaatatttctttgactgatttggacatgaaacagcttgaggagcgcgatagaaaccttcttaccagtcctttttccttggaagagatcaaagatgtggtgtttgccctgaaacacaacagtgctccgggccccgatggcttcccttctgaattttatcaggagttctgggaagttatcaaaggtgatttgtttaatctctttaaatcctttc

SEQ ID NO: 171710 - DNA, 818 bp, Zea Mays
gcaaatacaaatgttgaatatgtgactttgtgatttagatttttctgtatttatacttaatttcttatgaagttataaacaagcgtgcatggcgcgctcaatatactagtaaaatttaaaaagaccttggaactcgctacggctatacatcgagattattttttcttttcttatgatcttaaagaatttctccctattccctggagggagaattcataaaatagcactggtctgtgaggtgattcagtaaacaacactgcaaatccgagtattcacgaaatagcactgcaggcagcgggagcagtcaggaaaacacatgcctcatcctttatcatctcttcaaaaaaaatcattcgtttgccaggccaaatacactacccgctgataatatttttctaggaagtattctcggaagaaggattttttttgttaaaggaagaccaagagtatgttgcaggaccatctactgccactacccaatcaaacgcctctttgttctatctgaggaagaaagggttgcatcatcagttgggaaaaatgatgctgtagaaacatcatcagcaatttggtataattgtgtgtgaagaaggaactagtgttaaacatagtgtcattttataaattcccttggcaaaacccgtgctattttgtgaatacctatttttcagtgctgttttctgaatcgtgcgtgagatgaatgctgttttctgaatttccccattccctggaccttctactcttctagtctgggtccccaggatgaaaaaaatacaataatccattcttatccacagtttgtaaaccctgttaaaccctcc

SEQ ID NO: 171711 - DNA, 548 bp, Zea Mays
ggtctgaagaacgccttaccaacatttgtacgggcgatgagtaagaccttcggggacctgattagggacaggatagagatatacgttgatgacatcgtgggcaagactcagagagggtcgactctagtggaagacttgaccctggtctttgacaagctgtgggcaacgcgcacgaagctgaacccggacaagtgcgtctttggtgtctctgctgggaagttgctgggattcctggtttcgcaccggggcattgaagcaaacccggagaagatcagggcaattgaggcaatgaggcctccagcccggatcaaggatgtccagaagcttacggggtccctggccgcccttagccacttcatctcacggctggctgagagggcgctacccttcttcaagctcttacagaagttcggctcattctcttggaccgaggaggcagagcgagccttccaagagttgaagcagcaccttgtgtccctaccgatattggtagctccagagccaagggagccgctgtacttatatattgcagcggctgcagatgtggt

SEQ ID NO: 171712 - DNA, 359 bp, Zea Mays
gctcatgccaccaatttaagatatcaaaatcatcctcataggcagccacattgtcactgtcaagataaacagttagctcacaaatacccacaccatgtccactactacctgaagaacctgatgcagttgaggatctagaagcacatgttcctccaaaaattttaccccaagtctgttttcttttacctgtcatacctgattgatgtgtggttctagatggcctagcagcaccaaacttagtttcatacttggcatatagcttatacaactcagtcttaacatcagcaaaataagtactgtaattataattgttagattgagaaagcagttcaagaacattatacaaacccctcatttta

SEQ ID NO: 171713 - DNA, 791 bp, Zea Mays
cccagttgtgtctaggaataggacgcatgcaaacaagtggaggatccatgctcaacagtaggactgaactgtgtcctcgtcagcatattgtggacacactccgaaggactgtctcaaccaactaatacggaccccgacagtacggtctgcaccaccctcgttaaggatagctgggaggtccctaccaaggaaagcctcaactctagccctccaatcactcaactcgcatgagccagtgactaggttgccggagacacgcaatcccaatattttctgtgcatcctcgagggtgattgtcatctctccaaaaggaaggtggaagatgtgagtctatggcctccacctaaatgaaacaaataaccaaataagaatcagaactatggtgaagcaacagaagaaattatgtaaggctcaaaaaatacttgtcaatgagtgcactgattgtcgatgatttgaaggtgggcaatccttggcgaacctggtacgagatgacgtctagttgggctctctcgaggtatagagtgtacctctcatcgtacatcatgtctaagaaaccatggtgagttctagaacatagtgtgggaaggtgatgcaagcaatagacattttgttagttccaaacactttgctactaccactatgtatacaaagctggttccataagtagtcaagtatttgtacctgccccccacaagaaaacgtgcatggtgcctctcgtcatagaataggtcgaggaggtggaactgcgccatcctacaaaaaatcaaattagagtaagcacgaatataaaa

SEQ ID NO: 171714 - DNA, 552 bp, Zea Mays
cggggtactgtggcatcccaaatgggtatggtggcatgccccgcatttgatttgggacatatggtggaggtatgtatgtgtatggatatggcatacgtggatatggtggtggaggtgtccatgcaggtacgttaggtcttaactgaacattatgacctcccgtcctttccgattggtgtggaggtccaatcggcctaacctgccatcgcacctgggtgggtaagagaggtcgctttggtggccggtcgctggggccagccttctttttcacatatttagacaataattgatcaaaggtcgggctagattttaccaaccgaccagttgccttgaacatgttagttttccacgtacctatttctggtcgtcgtggtttgaaggtatgtggtcgccttggttcttcggcgttgccggatcgtccgctggaacgctccagaccgtctggcgatgtcacggaccatccgcgatgcgtagtatgggttcttgcgcatgtccccttgtctgcacttgccctccagtgccggagtttgtgatggtcaccttcagtgtctc

SEQ ID NO: 171715 - DNA, 874 bp, Zea Mays
cgccctccaaggtcgacgaagcatgagaaactacccatgttatctcttgcccagcaggatcatgcggcagaagaccttcatctaggacctctgaacagatagtgggattgtcagcttcaggaggctctgatagaaggtccttagggatgatctcttccagcgcttggtcaaaatcagatattgacaacccctagaggctgacaaggcttatgtgggaatgtcgctgaccctatggcgacggctattcttacggattagcggaatttcttcttcctcatcaagcacaccgccaacaacctgagcatcatcacaacctccaacattgtcctcggggatggtgctcatcgggccatcaccaaggaataatgtggaggggccagcgtcttgctccaagcatgacaaccactagagtcgccttttctttttcttctcctcgacaggtgcagctggatggttcgctcggcgggagtgcttgtgacgagcaccttctggtttctgaatctcctcgtcttcaccaaagtcttgcccaatcgcaactgccatcggctcagtgcgggcagagtcagatgattctccagccagcaagctaagaacatcattcatcttagcgtcatcagtactggacgacatatcgaagtgagtctacttctcagcctcgggaagattttggaggggagcaattaaggcctcaatgtcctctgaggagggttgcactctatggcccgggctgccatctcgaataggaggattggagacaaaatcagagaagggactctgcggaggtaggttccatgcatagtaatataagggggcaccaacattcgcaaacctgccccttagcatcatatcaagtcggcttagaaggtcctcattg

SEQ ID NO: 171716 - DNA, 364 bp, Zea Mays
agagaaggttcaacaaataattcataatttgaagaaagctcaagctcatcagaagagttatgcagacacccaccggatacccttgtactttccagttggagattatgtctacctgaaagtttcaccaatgaagggtatatcacttttcggggtaaaagggaagcttgcaccccggtatattggtccttttcctatccttgaaagatatggaccagtggcataccgacttcagttacccgaaaccttgtctgcattacataatgtgttccacgtgtctcaattgaagaagtgtcttcgggttcccgatcgaaccattgaagtaacagatgttgccctagaaccagacttgacatattcagagcac

SEQ ID NO: 171717 - DNA, 727 bp, Zea Mays
caaggtctttggaaggtgcttcgggagcaggagcgacaacttttttaggcaaagtctgttctatagcctcttcctccgctgccttctcttcaatttccgagggttttttcttagcaggctctgaaggcccggcttcggcactagcctggctcattgcagcttcggtttcggtcaattttgttttagcttcgatttgcattttcgtagtcttggcaattttccctggagtagagcttgaagcctttaccatttctagcacatctagtacacttgccatccttcttcttttgggagtggccgcaagacctttttgtatcttcggcattagtacttctgccgaagggctgaaaacttctaacatttttattccctcagtctctggcttttcggccttatctttaccagtctttgccttagcctgctcggctgagggtgtcttcggcatggtagccggttcttcagctttctgtgtaggaggaattggctctttcggatcagcagctgaagaagtcttcccaccaaactcaggcaccacggccggctcaatataacggggccagtgggtgaggactttcaactttttactcttcggcgcaggctcgctcggagcagccgaagcagcaatcttcttagaggttgcaccctttcttttctgcccccgtggcgggtagcgatagtcagggtacaaaaatccaatagcatcaaaaaccctatttaatcttatctt

SEQ ID NO: 171718 - DNA, 335 bp, Zea Mays
cgatgaagcgcggagattacgacggtggaagaggtgggggcggtcgtcgatggcgatcgcaggagcgaatgacggcgacggggaggaactgattattttagggtttgggtggacccgagctgaattaattgaaaggggtatgatttgtctggctcgttgaccatattagctcggttggcccgcgggggagcggcgagggactgtgggtccactagtcagcgcacagtcagtgtgaaggtttggttactgcgtgttcataataagcataaatagctgtgcaaagtatcgtaaacagtttacaaaaaagaattaatcaagacccacgccaaagtacg

SEQ ID NO: 171719 - DNA, 524 bp, Zea Mays
ggggaacctgtgtcgttggtccatgccgtaccgcgctgtgttccggcggatgcaacagtgcgccagttggacgcggcgttgcgttacggtccatgccattggtagcagcgctcagctccaggtccatctcactcacactggtcatctgatctgatcactaacaccggcgtacgtagaacggtagaatgggagacggtagatgagcaagttctctcagcttcctcctcgcatcactgttcaccaacacgattattgattcaagtgactgcattcgagaatgcgcgtggcagcctggaagatgtatcgagtgcgaaatgtggttgtgcgcattacgctcgccacaacctagaagggcaactcaggtgttgctggatacttcgtcgagacaagctagtcgctgggagatgaggtagcagcgaaaggatatgatgtctcgatgatgaagaaccggtagagtacaccaccgggctcggtgaagacttcgtgttgttgataactgccgaagtagaaccgatcacagtcat

SEQ ID NO: 171720 - DNA, 583 bp, Zea Mays
aagtagattcaacacacacataaaatataggaaaaataacttttctcctcttttattatctattacaaattgggtattacaaatcctacccccttaacaagaatctcgtccttgagatttaggaggaacgagggaaaagatggggaaaatctatgcgaagctcttcttctctctcccaagtagcttcatcttcgccatggtgactccattgcactttgcacatctttatcaccttatttcttgtaactctagtcaaagtatcaagaatcttgatcgggtattccgtataagtcaaatctccctgaacactgagttcttccattggtaactgttcctcagggacacagagacacttcttaagttgagacacatgaaatacattatgcacatcagatagattatcaggtagctcgagttggtatgccatctccccaactcgcctaaagatcatgaatggtccaataaagcgaggggacaacttgcccttaactttgaatctcctcattccacgaagtggtgacaccttgaggtacacatgatctccttcctcaaattctagtggtcttcttctattatcagcata

SEQ ID NO: 171721 - DNA, 798 bp, Zea Mays
ctggatttcaaaacctcacttgaaattgaatttgaaaactgaaaataggatagaagataaaaaaataaaaggggaagattcacttgcgttgcagcccactcccagccagcccacatccctattttgtatttttttattccccttgccgcgcatgacatcacacattacatcatcatgcaaatccctcacgtagtgcacgaactcgcttccagtagctgttctgtaagctaagctggacagaatcatcttgtcaacggagtctgcgtccctgagaaatagaatttgtaaaaaaaaacaaactcagctacgttcgtgattcttcagaatcttccgtaaccaccaaatcgcgcaagctaagtatctccataacagaaccgcgccggactcgcccacgatgcgcggagtccgttcatggtgctcggcacctcctggacggaagtccttcgccgcctgggctataaaaccgcatgttgggcagagaggttcagagcttatttccgtcgtgcgtcgtgatcggttgagtcaacagcgactgcttgcccaatttgtcttacatcgttgccgatccatggctcgtggagggtagcttgactgacacccagggtcgtggtaagatttctatctcgaagtttgctttgccctcctattcaggtagtgacggtcggatcgaagctcttgcgctgggtcgccggatctctgcgtaccggtgatctgcgccgccttggagctctttgctctgagccgcatgggtgtttggaggaagacggcaccagagccgtggattttggtgatgaccgg

SEQ ID NO: 171722 - DNA, 647 bp, Zea Mays
caaccaaaatactgctgggccctcgaagtacattattgcaaatctaatccacatatctctagccacaacatagaaatcaaaataagtctcacatctatgtttccacagttttggattggaaccatcaaaattaggaaaactcatattaggcaccaatgatcctgatccctgagaccaattacccactgattggttcagcaccgatccccaattgcaaggtgcatgggggttctaggattcgtacctccaaatgacgagaacagacgtgatccttccatgttcgccccggcttctgatgggaatgtcccactgaatgtagggagccttagggcaacgaaatctcaagaggtggaatctcctgcagcaccgctccaccaagccctccttgctcctccacgggttggttgatcatcgacctcttgctgagatactccacctgaccctgaatccttcagctcccccgcaatcaggttcatcttcgcttccacctccggcttccacttctgaatttccccttgctcaacaatcacacccttcatcgttgactccatactcctgatcaaactctgcaccaactccatacgcctgtgagtctctcgattcccttcctcaatcttcactaataaccgtgccatcggatcatccgc

SEQ ID NO: 171723 - DNA, 548 bp, Zea Mays
gttgggaccagctgacacatggatagaggggcccaatcactcggggaatgagagagctcaggtgcacaacaagacaagaggtagggactatagcgtcttattattcgtgtcccatccatgtacaaaagcgggggtatttataggtaaccgggcgggtaggtgggtcccaagtacagttatacccgtggttacctgctacattcccggaatattcccctcaacagggtcattacagtgtagtaaggtacagtaacctagacatactctaggatgtaccccacgaaggggcttacaggtgggcccagattgcgacagggtggggcctgggcaccacggtaatctggcgtggcctttgcttgcgagttggacccttgactttgtcggggcttagacttcgctagcgagggagaagttgagcctttgggacatgtggggggagaggcagcgaccccctcttcttgtgtggccctttgctccgcttactccgaaggtcgtagtcgaggacctcgacgctggtgtaggttgaagtcccccttcgctgttgaccc

SEQ ID NO: 171724 - DNA, 640 bp, Zea Mays
catgatatacatactaagtctccaaattcctcacagtccttcggacttctcacttccctctcggggcccaaactttattggtgcttttcatgagtcggtgtctcgacccgagggtcttgccaaccaatgaattaatcatgcgtgccctgacccagatgggtgatgcaagatgacacaagtcgtttatcctggttcgggcgagagaaagccctacttccagcagtgggaggatgatacttatattactcgcacctaagtgcttgtagtagggagtacaagctgattgggagagggaaggatcccaagtccatgggattgattgaggcaagtgccaatatcgtggtgagggtgaaaattgtgaagtgttcgccctcctccttgaagccatggattgtcctatttatagcctcaaggagggatgctaggagtaccggagttggccgcgtatggtgaggaggcgtagccgagccccaatagacggtatggcctggagcatgggtcttgtacttgctgttgacttatgcccacccaatttctgctgagagccaaggccaaggtccggtcacatacccgagcccacctgacaaggaggctgtccatgccatagtggttaacacaacactgagtatggcaaaaagcc

SEQ ID NO: 171725 - DNA, 501 bp, Zea Mays
ccaaaataatgagatcttcactagtttaatctagtcatattccgtctaatctagatcctatctaagcttatatgatccaatctagtgtaagttacttaatgctggtacaaaggaaaaagccatacttcaaatccacttaagcttaaactggtgacctagatcatctcggccatacccaacaacttgacctacataacaaatctatcttagcctcttgtcccgaacccggatggagacaccaaagagcaagaccgaagaagatgatcaacttcatcaagaaaggatgagcaccaactcaagtcttcaaggatctagtgaggtcaccaagatgagtcaagatccacaatcctggatggagtcttttcttaccccactccttcttacccaaaactacatatgctttaaagatatcatttcatcctgcataataaagtggctatacccatatatacccaggccttcctaatcacccactattgtcaaaaaaaaaggaaactccgg

SEQ ID NO: 171726 - DNA, 777 bp, Zea Mays
ggagaagtggtgacaggtacagtcttagtcgattcgtttgtggcccaagctcttttggactctggcgctagctatttgtttgtttcagagaattttgtgtcgcgggctggtcttttggtgcagaggttgagtcacccaattttggttagttctgctaatggctccattagtagctattcagtttgtcaggggtgctctgtcattcttgctgatgaggtcttttcggccaatcttgtggtgatttccttgggggcattcgatgttatcttgggtatggattggttatctcagtataacgcagttatatcctgtttttggaagacaatgttattgcaggcactatcgggtagggaggtggtattcttgggaagttccccaaagttcacgttatccttgttggcgcaattgcttccggatcgccggtcaaggaagtcgggaatttttttcctccatggtggtggagggtgtgactgccttgcgggtgcaggacatccgagtggtgtgtgactttgccaatgttttcccagcaaagcttctaggccttccactgaatcgcgatgcaactttcgaaatcaagctgattccgggtacgcaggctattcataaggccccgtatcggatggctccgaaggagcaggttgaattgaagcggcaattggatgatctgctggctaagggtttcattgggcctagcaggtcgcgttgggcttccctagtgctgtttgttgagaagaaggataagagcaaatggttatgtgtggattaccggtctttgaa

SEQ ID NO: 171727 - DNA, 2610 bp, Zea Mays
ctataacgcgagcatttttaagaatagaatcttcataggccttcttttccatcttattcaggttctcatattttttaatctcactctccacgttagattcatcattttttggtggagacaaggcatcagacaaatcgatgcctacggatataggatgtgcagagtttgaattcccaacatagctatttttcctaaccgaaactggactttcctcaatgttcatgctgcggccagaagacaagcactctgtgtctttctgtgcaactattgcactgttacaaacttcaatttcatctttcacatgagaaatattactggcttcaggtcgtacaagatcagaactttccttcaaagaagcaggcctgctgaaatctatcgatgtgccacttaccttgagaatcatgttagaatgtctactactatctaggtcttcatgagaatcaatcttccctgcaacagtattgatgtccccatctgcatgttcatcaacaatattcacagtgccttcacaagatgggcccactacatcattgtgtgaagtagaagcttctacaacacaaggaagtgtcctgctgtgaccaagttccccttcacggatatgggccatacattcatccaggtgtccatcatcagccttttcgtgaacagcacatgactctttctcatcatatgtagatgcactagaataacatggctttataacaacttttaaattggcatcaggggtttccgcagatgaaacttcagcagctatctcaccacacccaacaaggaaacgatcatgatttgtgtcatttgatgacaactgtttagctttgttattattgccagctttgtttactttgtcgttcaccacacattcactttcgagaattgtttgaatgccatccagctccattgctgcatggtcatcagaagctatactctttggtgcaatgtcacggttaggtccagactgttttatactagaaacggacaatacaccatgatcgtctgcattgtttttctgtgctgtaaccttttcatcatttggctcatagactttagcagggatcatagaagatctaatagatgtgacattcccgctctccctacttggctttgacctgttgcgccgaacatatgcctggcttttgacaccgaggtgtgacaaaccagaagcagcaggcttttttgtgtttttgtgaccgtcactgggcaatgaatgtttgggttgtgctgcatttaatcttttggttcctctttttacaaccttttcttctgcaatgtcatttttacctccacccaaaagcataagattgtctgctgtgttggtttcgcggcacatggaacctcctggtttgtcggtactctcgaccgaatctccaagaggtgatgcagaaaaactacctttcgcgtcactgcaaatgaaggcaaacaaatgactccagagtggcattatggttttgatcgatgcaaggaagcaaccattaccttatcacagtttgtgcttctacttgatttgtgagagaagcagagtgtacaccgaccgtttccagatgtgcaaaattgaaatccaatgggttgcctccctgcaataaataggagtaagtaggtacagtgaaggcagaaatataatctaagagataacctggtgcgggcatactttctctagaaattccaattctctcctccattcatcgcgaacatcagactcctgcctgagctcctcctgagctttctcaatggccatactgcgtggtgaagatttggtgcccacaccaacaccgtaatccataattccacccatcgagcatggctcagcattcaccattgaagaaaagcaaaagcatgcatcgcatgcatgtcactgaaagcggcagttcattctgatggcaccagcaaacagatgtatccttccagcgcgaaggactgaaagcaaaatcccaaagaaacaacacggaaaaacagcataaatgaacggtaatataaggcacattcaaaaggctgcgttttggcagtacacctgagcgtgctaaagggagtgctgcttgcagtaggccattgccaatttgacatagggcagcattacagtgaatgtatggaggttacatacagtacatttaggcacgtggtcatcaccgtgcaaacgcacttacccgcagctgagagatggagcatcccatggacaccgaagagactaaaaatgaagcacggggtcatcacctccagcctaagccagaggttcccctgccaggagtggccgagtcagtggggcacgctccagcctcgtacaaccattgcccacagaggccaacaacgcctcaggcgagaccctggggcgccgaattgggcctaaaaaaggcgtgtgaaggaggatgacacgtacctcaccggcgcgcggacctagggttagggtttgggtagaggagggcgagcagccgcggaggtgtgcagacgggtcgcaggggcactggggaagtcttccggaggattgtgcagcggagaaccgcgaggtggacgccggaggtgggcgtggcaacggtggggttgggctgggcgcggaggcgggaaggtgcgcgtggagagggaagcaattcacaggcctgcgcgctgttgtccggggcgggt

SEQ ID NO: 171728 - DNA, 679 bp, Zea Mays
gtttttaaaaaacagatattcaaacttcaagttgcgtatttgtggtcggtgcatgactttatggcatatgctatttttaccggttggagtacacatggtagattgacatgtccatattgcggttcagatacagattgcttccatcttgttcatggtggaaagatcacttactttgattgtcatcgacgctggttgcccaagaaacacccctttaggagcgataagaactttataaagaacatcgtggtcaccaaaggaccacctaaacgtcttaacacagtagaaatatatgctcagctgaacaatcttgtcctaaatgaaaagggggacaagtacaaaggattcagagtggatcacaactggacacatatatgtggtctctgggagctcccttatatgtcgtcattgattcttgtgcacaacattgatgtcatgcaccaagaaagtaatattgttgaagccctcatacacacctgcacgcattttgaaaaaacaaaggataatctgaaagctcgaagagatctagcaatgctttgtgaccgaccaacccaagtgctcaatgacaacggcaagccgccacgtgccttgttctgtcttacctctaaagacaagatcgaggtaatgagatggatgaaaaaaattaaatttctcgatggttatgctgcgggcttgaaaagag

SEQ ID NO: 171729 - DNA, 893 bp, Zea Mays
gtgacctccaacatgcataggtactataggtaccttaactctttgtctaggataaccgttctttcaaagggcggagaacgtccttgcggagagtcggattctccttcttctccttgctcccaacagccttgcccgcatcaacgtgtttgacatgatctaggaagagatccttcatgctttctggtctccactcaaagggtgtctccatgcaccctttatcatgaagatgatcgaagtagtcacccagactcgcttcgagaagccgatcaaacactcccgctacatgtcgtactgggttgactccaacaacccagctgcacgtactaagcgggctccagcagggtctggaggccctgcttcttctgatgagccgcctcctcagcctcctcatcatgagtcctctcgtgccaccactgcttcgcgaacgatggaccacagcgggagaggtagaggtcagggccggggactgtttgtgcgtctaaccaagggcatcgctggcgtcttcaccatgtgtcacagccgggcgatcgaggagtccgtgcacaggcgccggactgaggcactgcgtgaggactttcatcattacatcgcctccatgggtcatcccttgcctccaggctctcctccgcctccaacccccacctaccccgagaacctcaacgagtggcaccaacaggagtatggtgtgccattcgttacccctgaggatgaggccgaggagttcgatgaatccttctatacctcggctcctcctcctccctacccgggtcagggacccatttccggtgaccccaggctgcccggctccggtcactttcctcctcctccctattcgggtctaggacccattcctagtgacccgaggccttctggctctggttaccatcatcatc

SEQ ID NO: 171730 - DNA, 368 bp, Zea Mays
tgaaaaggtggtggctagtagtggcatcaaagtggggacttgggagtggagtgtggattgtggacaacaatggatcttgagatcggttgtgtcgtcctacaccccaaactatagaggtcatcgtgacagagcgcaatgaagaaatcatcgatttccttggtgtataggtggcatcagcgacctcatagtcgagacttggggagtggagggttgtggattgcgggcaacgtgaatgaattttcatgccaaccgcaggaagcaactagccgacttatgggtgtgggtatgggtaatctgttggacgccatcactatttgtgtatccatgtcgactaacgtgggcttaccctgtggggtgtaaggaaaatg

SEQ ID NO: 171731 - DNA, 613 bp, Zea Mays
cgagatttaattacctgagatccgatcgtgcccctcggatccagatctaacgccccaggtgtaatgcactgaagcggtatacctaatctaatccatgccattggcgtaagatccaacggttgatctacgactaagattgataacgcgaataagtacgctacttttaacccgagccgaccatcaagggatgaacggctccctgctttcttcacccagggccaagcacgacggagccgcccagaattccggtgagctcacgcggccgcaaggtgattctccgcccaagtatgcagtatcccacccagaccggcgttacacgatgcagggaggaaggcgagtcgatctggaggattctcacatgcgtttacactgagtagacccctggccacgacggagatgcggcccgacggtggaggatcgagtccggcgagcaattctgggctgaccagaacgtagtctgcccaagcaaagtcacggtcgtgacccgtgagacttggtgaagccccagacccaaaatcgaggccctgacaatggtgagactgtggatctacgtcggcggcgctctctccctcccacgatggtgtgaggcaggatttacaagggtggagctgtg

SEQ ID NO: 171732 - DNA, 962 bp, Zea Mays
ttcaacttgggtataaaataaactgatgtgagtaccttgtgacccttgttcctggtctggagcagcaacgatcccatgcccttgatctcgaccaatgatccatcaccaaagcggactgtaccacccacagatgtgtccagtgacttgagcaccgcacggcaccccgtcatgttattgctcgcacccatgtcgagcacccacgtgtcgtcatcgtgatccgctagaaacgccctctcctcattgagatgcaccacttgaagtggaacgtgcaccccaactagttcggcctcgcgccatggcgtgacagtgcacaccgtatcgaccgtggcgagcatgagcatcggttgttcatcatcagccttcacatgatgagcctcctcacgtcgctccttcctaggacgcttgcagttctgcttccagtgcccatagattccacaattatggcaccttcctttgcgtcgcggtgtgccctgcgatgtcaatttgacaacgggctccttcttttcaccttgagacatgttcttcggcttggccagggagaacccaccttgacgatctcctcgagtcccggatgaggatccctctggagtgaggcggtggcggtacttggcgagccactgatcctcggataggaacagcttctctgtcttctcagcgacaatgtcgacgtcgagacgatcttcagcggcgtgcagacgccccaccaattcttccaccatcagcatgttgatgttcaacaatgtctcaatcgacacgacgatttggttgtactgcttgggcagaacatggaggattttcttgacgacgcgagtttcgtccacgacttcgccgagaccacgcaacttctcagccagcgagttgattcacatgccaaactcatcaatgagctcgccattcttgaactgaatgttctcgaattctttcatcagcttgtgtgcatatgattctttgacacaatctgc

SEQ ID NO: 171733 - DNA, 1652 bp, Zea Mays
ttggtgagcttatcaatggcaaccagcacgtgggtatagcctctctgagctttcttgaagggtccaatcatgtccagcccccagcacgcaaatggccatgttacaggtatggtctgcagctgttgtgccggtaaatgttgttgcgttgacaagaactggcaagcttcacatctctggactaactcagcggcaacactctttgctattggccaatagaaaccagacttgaaaactttcccaaccagagttctggatgctgcatgtattccacattgtccggcgtggatttcatccaatagctgcttcccagtagttgaggaaatacacttcatgaggactcctgtcgcaccccttctgtacagtgcaccccctatgagggtgtagtgggccgactgtctcgcgatgcattctgctgcagccttatcatccggttcttcttcattctttatgtacctgatgataggctctctccagtcattagggtccgattctggttggctcaaggtgttgcattttttcgcctgatctgagagaatacttgggcgtgatacttcctggagactccgggtgggacctgggcccgactggatcctagctttgacaacgcgtctgctgctatgttgcagtctctttccatgtgatggaattccaacccttcaaacttgtcttctaattttcagacggttgtacagtacttgcccatagaatcaaccgagcaatcccaatctttatttatctagcttatgaccactagtgaatctccgtataccatcaacctcttaacgcccagtgatatggcgatgttcaacccatggatcagtgcctcgtattttgctgcattatttgatgctgggaataatagctgaaacgcgtacttgagttgttcacctccaggggcaatgaagaggatccctgcgcctgctccctacagcttcagcgagccatcgaaatgcattcgccatacttcagtagcctctggattgttaggaacttgttgctttgtccactctgatacgaagtcaacaagtgcttgagtcaaagtagtgaaggatatcccctattggaaacccggtgactactatgactttgtggtcgtcaaagtagtgacggagcttgcgagcggttagaagtaccgcatacagtagtttttgaacttagggatacttctttttagagggtcccagaacttcgctgatgaagtagaccggatgttgtactggatatgtgtgcccttcctctgcccgttcgactaataacgcggtgctcaccacgtgagtcgtgcaggagatgtataacaatagatcttctgttggttgatttggtgtggctcggcgtggcggcttgagtgctggtggcgtggtcaggaactttttcaatgcttcaagagcttcctgtgcttctgtggtccactaaaaattgtccaccttcttaagcaatttgtagaacggtaggccctttttgcctagccttgatatgaacctgcccaatgttgtcatgcatccagtaagcctctgtactttcttctgtgatcgcggtgcttccattctcatgctggcctcgatttttctgggttggcttcgagtcctcggtggttgacaatgaatccgagtaacttccctgctggtactctgaaaacacatttctctgggtag

SEQ ID NO: 171734 - DNA, 1749 bp, Zea Mays
aaaacttttagttctctatataattttagttaaacttaagtaattttttaaatagatagtattatcttataagttggaaggaaggggagtactataaaagcatcaccgagacacatacagtatgccagctgactaactgggttggagcctagcttcgagctgagcatacccaccaccagttggagctttcttgagagagcatttgagagttcgagcactagctagcttgtaggggatgaagcaagcaaggcgtgggagtaacaagctgaagcaatggagcagagcggcgccggcgctgtggctcctgctgcctcttctagttttgatggtgctcaagacaaatctcctgccagtgcttgcacgatgtaagtctcaccgcatcatatcaaggttggacagaaaagatgtgtcagtttttgcttaatttgttacttgtttcactcccgtcgttaccatttcttttcaagaacacgcagttcattggaaacgcaccgtaagttgcgcttatatatatatagttaaagctagcgcagaccatctggttctgatatatgatcacagtgacacgcaattagaagcaactgtgtatatatactaggaatgatcaatttaattttgtccactttattttctcatacaaagcaaatagaatagtgatgttagcttcgcaaataagctaagagaccagatttcccaaagtcgtcataaatatccattcctcaatttgccgagctaagtttgtacacacagaacacttttgcatacttaatctcaattttgacacgactaatgtaatagttcacgtctttattcatggtatcaaaagcagccacttgcatagcgagttagaagcagctgtagaataatgtcaaaagatctggagagaagatggcaattatagcactgtagaataatgtatcaaaagcagctgtagaataatgtatcatcaaaagcagccatatataatcgtttaaaacgttattaccgtcctcaatgcaaaaactaaaatagattgataggaccggtacctatttgacctagtatgtaaaatggatcgattcactcatcaggtaataacgttttaaatcattatatatggttatcatcatacttattgagtgttcggtgtttaggatcatagcagtatagcactgtagaaggcagctaaccatgcaggtgcatgcatgctgactacggccggcattcttctagaaaagagtagcatttgcatggatcgaatattgttattaacatcagatctgaatatttaagataagtacttctgtgtcacaaaaactaaggcaggcctgcccgccacgggccacggtccaaaaggctaaggccggatgggcccatttctatccattactataattgcctcagtatctgctttataaaaaatgttattcttttatgttctatttggaaacaaagttttttttttgaaaaaccacagttttttaaataatacattataatttagtcatgacaataccacagtttaaaataatataattcgaaaactagggtcgagacctaagtttagaataccttaacacaaattcagtatgacagagattttagctacactatttgagaatactagagtatttttccacaatttcacccacaagcacccccttagtgatgtttaacttgtcttcctcgatacatgtattattaacaaacatatgtaccatgtggctttccattgaaatccagattcagtagtcgggtctccacatatcg

SEQ ID NO: 171735 - DNA, 379 bp, Zea Mays
ggggtgattccatagtgttctccacttggggctgatttaggggtcctttaggggtctttttgtaaagttcctttgctgtcttttgtaaacattttggtactcttaaactttggttaagggtttaaatcatggaatgtgcatttgcctaatctttctctcaactaaaggcttcaagagagagggcccaaggttcaatcctcccttgccctaggtgatcattgcctaaaggcttgggtaataccttggtccctggcatttcttaactcactcatgcttccaaggtcttaagtgctccctctcctccaagttttaaccacatgtgataataggtataggtgtcattaggaagccagcccctgggtaacagctggggtgttac

SEQ ID NO: 171736 - DNA, 550 bp, Zea Mays
gcaaggtgggtgactcctccagaagccttgtggaggatatacgactttgagcttagttagatatctccacctgtgatgcagctgcaactccatcttccaaacatgcacatggtggcgtttcacgagcggcaaatggtcgagcgagtcgtcaaccgtctaggtgttgataggtcgatgctcacaacatattttgaggcgaataggctacacgaggaggttcgtggcatcctataccgtgacttccctgagtggtacacttggcagagtgataagggcaaagtatggcaacggagggaacgagatacaggtggacaagtcggtagaatagtctctgctcatctggccaagggggagcgctactatctttgtgttctcctaaaccacgtgactggagcttcctcctatgtggatctaaggatagttgatggtgtcacccaaccgacttttcgtgaggcagtagagagaaggggactgcttgagtcgaacaacacactggatgagtgtctcactaaacgtgctcttttccatatgccattggcgctgcgacggc

SEQ ID NO: 171737 - DNA, 1100 bp, Zea Mays
cagactcactgtgtgtcaccgcgacgtgggccccacgcaccagccggaagacccgctcacctccgtcttctccgcgcgccaccagctcctccacgctcgccgcctcgtgtcgtatgctacggagtccgttgacgccgtcgcgcctacaaatattggagcccacgacctcgcccactcgtgctcctattcctccgccgccagttcccacacctttcactgggccgccgcgtcccatgcgaagaaattgagcccgccgccggtgattctcctacgtacctgtgcttgggtccgcacgtgtggtcgagggcgttctccggaacccatgaagctgcaggagccctcattttgggctaagaaccttgggggactagggaatttctcgccggagtcgtgtcaccgccgtacgccgcgactgtgctcacccgtcgtccgtctccggtgagtaagccctgcgtcgtttttactctagccccgtgatagtgtaacacctagtggattagggttttgggcacgggagctcggggttcaccttctccggtgatggcaccgccgtgatggctgtccgccgccgtactcgggtcagacggaggagagggaaggatctggggccattgatgcggatatgctcgactgagattagatcgggggaggaacgcaatttagtcgttggatggggtatgtatggctgggatcaaacgggtcatagcgattcatggggagcaagttgagccgtccgatctgattagacgaatcgagatgactcatgggtaaataaaatccccaccattaatcgctattggacgataaccagtggataccagttcgggtgcggatcaatctaatctgggcactcggtttctaatccaacggcctggattcacctatacctcttcgttgggcttatttgttaaagagtctttagctaagttaaaaatcaacccgccgtcctcggcgacagtgatatgagtcttgggaatatttctatgttagtccccgagctttttgagatttgacgcccagtccagaggagaataaaaatagagaaataaatatagaaattggtttttaatacaaaataaattctagaaacttggaaaatt

SEQ ID NO: 171738 - DNA, 585 bp, Zea Mays
cacgcctgcacctttaaaagccaccccggatgcgcaacacttcactccacgcttgccctcactgtcccggcctaggccttagctccgacgagctctgcgccgcccgcaaagacatccgagcactcggccactgtggctcggccacttccatccatccccgctcaatctcgtgcctcgactagtttccccagagccctatagagctccccgaagcaagaaaccgagcgctgtcttaccggagaagccgttccaccctcgcaagagttgttctcccagccggcgcacgtggccacgcctgaccggtaagccgccgctcgattactcgcacccatgccctccctaacacccagtgaagcttgctgactggtttgatcggagcctgtcgtcctggttaggccggagtcctcgccgccgacgaacttccccgcctgcgcatgtggacccgccaactccggtcacatccaacgatgatccacacatcgacgtgaccgccgcgacctcccctatgccatcgaccaccttgccggagctatctcgccgccgataagtccctctgcccttttctccaccgcaggtactgttccg

SEQ ID NO: 171739 - DNA, 1019 bp, Zea Mays
cacaatatgattggaggataaaaaaaatctgcacaatgttcaaattcaaaatccaaattcaaactaaaccttagaaatgaaggaaataggaagaaaaataaaagaaaaaggataaaaagcctcatgggccggcctctactcgttttggcccagcagaacaacacaccgcactagcccatcgggggagcgctcgaccgcgccgacaagtggggcccctcgatcagcctcgcccgctacttgctcgcgcggccgcctccttcgctccatcgctgacacgcgggaccgcgctgtcgggttcttctcctccgcggatttcgcgtgcgagagcaacagcgccatcgccgcatccccgtcatcctcgccatgattaccgcgatagtcgttgagctagtcgagggagataaaagccgggcgcgcccacgatctcctcctcccctgctctatcccatcacccagaccgcgccgcatcgtccacaaaaggctgacgccaccattgggcgaaggttccgccgccggtgaatctcgccaacccgccttgtataccctctgcgataggttggggcgatccgcctgggcctgtggatcgtgaccgtggcggattggggccggaaagcctcggtccttgacggaattactcgccggagttgatagagtaccgccgagccgccccaacgcgagaacaacccgtctgcgcgcccgatttccggtattcctcacctccttcatgttctccttgatcttaggacagtgtagcgcaagttaatttctggatggcggcgggattggtgtgggcgctactccggtcatggcgtctccgccgtggggctgtgctgcgccgccgccctagtggtcgtagggtgggagaagaatctgtgccgttggatgaggtaggagcgggcacgatcagattgagcatagcgtttcggccgattgatcgtgcatcgttggattcggatcgggtggctgggacttgatttttcctctgccgttgatgctcgatcgagcggtcaccgggatgg

SEQ ID NO: 171740 - DNA, 293 bp, Zea Mays
gtcacattgtctttaaaccttgagtttgtcccctcgcttctacctgtgctttgcaagaatgggaagaagtcatttttgaaatatactggtatgaacctggcacttgtttcccacattttgctgaaatacttgttgttttctaggtggtagtcttcaaccatttgcttccagtccctctcaaattcagaaacagttagtgaatagttaactatgtcctcaaagtcctctggcattcctatatttcttgcaaagcaatttccatttttctggtagcatttgctttttatgtggaa

SEQ ID NO: 171741 - DNA, 817 bp, Zea Mays
atttttttccccaaaagactcctcaccgtggccggttctgctggcgcctgacggttgcggggcggcggcggtcatccgagggccgaatccgcctttatgacaccgccgcagcgacgtcagcgtatccagcagtaaaccaccaacggcttcgccgtcccctagctccgcacgggaatgcgaagaatgtgagacttgagagatccaacaggggagatgcaccgcagcgacggcatggaggtggcgggagggtggaggccgcctgctaccgctagctactgagacagctccgagtcttcgagctctggttccggcctgcgcatatggtacggatgccctccccttggataccttcttgctaaatctgtgaaatgcttggtcgcaagccgcacctgtcgccgattcctttgtgcagctagagagttgcaatttgcaaatacctgtggacagttataaggcaattaaggtttatattaacagttttaaaatcttgtgctgcctgagccacttctgggttcagatacgcgtgtggtcatgcttgctcttttcttcttaatgaaatacgctcgttcgcaaaaaaaagtacttaagattacacatctgacactgcgcaacacctgaagaatgcatagagacaaaatactgtagcaagccgtaacgaacaagcctgggcaatatgaaatctggacgtttctgagttctgcctgatctgggctgcgttggcacaccgtttcagaacgagagcacacgttgtgggctgggaaagggagatatatcatagtactttattatacgccctattctaatccacccaaatatg

SEQ ID NO: 171742 - DNA, 924 bp, Zea Mays
cgtggtttgcgcagacggccagttgatagcggagcccatggtccaagccagccattctggtagcgcgagctggatgcatgagcagagtcaaccattctaacagattcggtagctcgcacaatttgactgaccaattcaaccaatgacgttcggggcactgaccttcccggcaaccgacgccctcggcgaagccgtcgccctccgagcccttggggcagtcgcaccggaacgcctcctgccctgcgaccggcgtggtgacctgggtgcagttagcgtggctcgagcatcggcacggccccagcatccaccactccagctccatcgtggctagcagcagcgccggcgccggcgcgtccaagtagctcaccgccgacaccagcccggtgcattccgcggcgagcgcttgcatcctggttctgttgaggaaacggtcggggacgctggtcggccgtgtcagcacggggcagcggatggagtccgcagcggcgcggccgcactgggacgagttgtcgaggtaagcgctaggggggacgctgcagttacggatgtggtcggcctgggaggcggagctgcacgagctcacgacgagcccgttctggctgccgggcgcgtacgccttggtgaagagcgcctcgacggaggcgttgagccggcgcgagcagttcgggcgcagggtgaggaagagcgcgcgcgccgtgacgttggacacgagcaggcccagctcgcgcgtcttcccgagccacgcggtgccgtccgccgggtcgcacccgagccgtatctcgcagccgggggagaagccgaacgggtactgcaccgtcaagcccccgcagctccgcgcgcagctcccgttgcccgcggctgcagcatgcagcagccacggcaggagcagcagtgccgccgccgccgccgagccccgcaccatcg

SEQ ID NO: 171743 - DNA, 707 bp, Zea Mays
agaaaacagaaccttgtattttcaggcacttcagtcagtatttcgcttcgaagttctgcaactctgaaaattccaccgtgctgaatactcaatcaattcttcaacacttctgccaggactcgagagaaggaaacccctgattgcccacgcaaacttcggcagccaccatgttctttttccagtttattatgagcatttagagcacctgccagcacaaattggactatgtaccaacaacaaaaggtaatagaactgtcgaagagatttccactaggccgccgcaaaaacaaaaagaaaagattgcacatcacatcagacacaacagagcacaagacaacaaatcggtggataaatttaggtgtccacatcactgcaaactgccttgagaagtctgatcacatcgccatccgcgtgcattgagcatgtgagaaaattgctggaccaaacatggaaaacatctacaaaaaacagtttggagacaagacaagatgaggtaggaacacagtacacgagataggaacacgagaccaattcaacgacccagtggggagaaaatttgtggaaaaaaggggttacagctaggatgcaaatgcaaatcacattcgagatacctttccttgtctacttgctgttccgcatggcaatactatccacttgtcaaattccttttccgcacaacatacacatcgatatgggtagtaatcaaa

SEQ ID NO: 171744 - DNA, 727 bp, Zea Mays
gcctcacacagtgagtcagacctggtggtctcttctaccacctcaccctcattctcagccgattcgtctaagacttctccaccttgagcaagctgctgcagtaacccttcatgcgtgtgagattcaaattgcatctcctcgtcccatgccactttaagacctatctcactgaacattggttgtgtgcttgcttgctgtgacattccaacaaacatccatggggcatcagacacaacatcctgcttgcaatcgttgtgcatctggttccccaccccatgggccagccgctgccaaaaatcaagtgaatcggagccaagtaacacttcttcatcccaaaccaccttctcagcagacgtttcatcgaacatgtcatgtgcagcagtatctgaccttgccatcgtgaggaactctctctcatgtaccttcaaatcgcaccacctctcacgcagccaactccattgtctccaccgaagttctacctccatcctcacttagaaacctcagaaaaaaacagtacagcccgatgcagagggaaatcgtggaaaccttacgtcaaataggtgaagtgcaggtggtctgcagccaccacacgccatcggaattccaccgccgccaacaccacccagccaaatgtccatggacatcgacgaacatcgagaaaaccctcgccaaagaccctggtcgccgatatggagatgtcgttgaggaagatacgacccgctctccc

SEQ ID NO: 171745 - DNA, 731 bp, Zea Mays
agggctccttcgtcctcatcttcctccgccaccttgaacggcgggaatgccacataacagtgagagcacatgatggcggcagggagcccagggagatcttcaacttccccgccaaagacataaaaccaaaaatcccaccagttgccccacttgttccgagcacaagggactatttccacaacttccaccaaagtcttcccagtcctcggtgtgaaggtgcacgatccaaattgtgcaatcttatttcctattttcttcttttgccagtgcagacaatagttcttggcaaagacttccacagacatccgaccgccgtatgacgcaaccgcccaaacatacttcgccagggcaaccacgacgttaggtgtcaactggtggacctgcacgtcaaatctccgcaaaacctccaccacgaaacgatgcgccgggaggcgaaggccagcaatgaaaaacgcctcgaacaaaaccaattcgccctcaggctcggggatcttctcggcgcccagaacccgcccaacaccgtcaccaaagtatccaagatgctgcatctactgcacgcgaaccgaggaaaccctcgaagtgccgaactccacggtgtggcccggatgcaactccgtcgccaccaaatcacttagggtatcctcggacgacggaccagccgacgacgcactcgcagcagatgaggaagaagtacattgctatgtaccgtcggcggcagcgcgcggtctgct

SEQ ID NO: 171746 - DNA, 762 bp, Zea Mays
tttctatccctcaaatagggaggcatgtcagtaagtgaatacataaacaaattcatcagctatctcgctatgctcctcgggaagttgttgatgacgagaaaaagcaagaactatttctggagggattgatcgagccactccgataccaactgatctcccactcattcccgtccttcaagaaactgttggacaagtctatagctctggagcacaagcgagttgagctaggcaagatgaataggaaggctacaaaccagggacaggcggcaagtagtactcgtcctcgttatgcttcatcacaaggtactccagctcaaggtagtctcggacaacaacctcaacagatccaatctactcctcaagcaagcaccccagtgggacctgtcgctcctaatgcatcaacaaacaggtcatgctttaaatgtggataggctggacattatgcgaactacttccccaataaggccgcttacactactccagctccgatgaagcaaggtcaagactcaagaggtaaaagacatgacttatcagtcaatcgaggtcaagttaaccatgcggaagcatagcctgagccagaaggacatgaagacctagaagaggtaccaagagaagttgaggaagccaatgaagatgaaaatgagcaacaaaactagagtcttttatctctatactaatcttgtggacgagattctctttaatgggggtaggatttgtaaaccattaaaacaagatttaaagttgtttcggggcctgcttctt

SEQ ID NO: 171747 - DNA, 546 bp, Zea Mays
aagctactgcggctacctccttctccgcaaccacgtctgatataagtctatcaatttcggacagagtggttgtaagattttcgtcttcggctgcagcggtagcttcgacatcagtcgatttagcagctttgtctgctgaggctgagggggggggtctattcaatggattctaatatatttatcatgcgatgtttcttctagccctcgtctctcccatcagcagccgcagagatttcctttttctgtaagaggctagtcagttccaaccccagaggacttagcggagcgaacgagaaagactcagtcattaccttcaatatttccgagacctccacaggagaagacgaagggctcgtagtttgcttcggcatatcttgcatgttcgtcttctcaaaggatttctcagcaagcttccattttttgggagccgatactttctgctctggcacattttttctcttctttgaagtctcttggtcttctttgacagaccggacaccttgcccactcagaatactgacaacccttttcctcttgactcctctg

SEQ ID NO: 171748 - DNA, 728 bp, Zea Mays
tgcttgcaggtgcaagttggcaagtagtgtaatctgtcagtcaagaatagttctcaacaaccttcatcaagttccagtcttaacgaccgagcaacgactgcgacagttcagctaattgacagccttgcattgcttctcataggcttatcttcgccaactgggcgaaatgtcagcttttgacttatttatatgacttgccttctcatttcccctagccttccactgcaaactcacattcatcacacactctcgtcgctggacagcgttcatccaccaattcaacgtttgcgccatctcagccttctgtcgtttccatcatggcttgaagctgcagataaggtatggtttctcctcggtcctcacacgttcgtcaagtcctgcaagcagcagatgagaccccacgtccgagtccagcagcagttctgcttggatacttgagattcatgtcaccaaatcaactcggcttaatatccgatttcatctgtgcagagaaagctatgatatgtgtttgctcgttttctgaacatgtgtgttttttactctgtttctccaattatttctttttttagaaaggacggtaaaagctttgccgcaaattttattggatgaaagaaaggaaaataaactgtacaaggaattacagaggaacaaccacaatcacgcgtcacgccccactctactgaacaactcaaaaggcctaaacaaaagaagtcaggcgtgcgctccat

SEQ ID NO: 171749 - DNA, 446 bp, Zea Mays
cccggcggtgagatcaccaagggggtagcaccggcccggatcctccaggcgtgcgacggtgcactccatccgagcaggcggcgcaccttgtcgagcctcctctcggtctggtaacgctcgggatgaaccagtgaagccatggcgactacaagtggcgaaaagcagaaaaatgcgagtgcaacagaggcgtagaggactcggaggagaaaggacgcagcagttgaagaaagtgcaaaagcgtaactgctggccgcgggatgagtccccttttcaaagaaggctctcccgctcgtgtcccaatcccatccgacgcgcacctagtgctcgtagtgacccagtccccgacatgagggcccaggtccacatgtcacgcacctggagaaccagcctccgagtgcgtagaagacggaccatcctcccggaagcaaaccgtcacgcacgaccgc

SEQ ID NO: 171750 - DNA, 427 bp, Zea Mays
ctggggaagaggttggagatctacgtcaggcttatatggacgattctaaagatctcaacagggcttctccaaatagcagcataaggccgattaatttatcggtcgctgagcataaaagattaaaagatgacatgaagaaaatagacgatgaggtccagcgacaaaaagatcaggtgctcaaggtggcggataagtggttcctctcgcacttcagggtggattgccaccagaagaccgtccaagagagggagataaacgccgagtacatgacggtcgtgctgcaacaactccccacgataggtgatgtcaggtcagccgatgatattccatcaattcaaatttcttttgataatcggattaaaagtatcacagaggatatagagaggatggcgcatgcattaggaaaaactcacatgcctaatttttt

SEQ ID NO: 171751 - DNA, 732 bp, Zea Mays
ttgaattgaaaaccctagagaaaataaatagaaaaggcaatagaaattccaggaaaataggaaaagccaattcggcccaaggcagcccattaagcccagcccacgcgcgcacccacgcccgcgcgtccctgtgcctgacaggcggaccccgcctgttggcgcaaacccgagcaccctctctccctcgctctctcgctactccgtgggaccgacctgtcgacaccgttgctcttgcccacgcccgctttccctgtctctgccccaccgaccccaccgaccccacctgtcagcgcgtccctaatctctcgcccacgatctccccgccgtggacgcgcccacgaccgcgtgttctccggccacgaccgagccctcgcgccccttttgaaccccatgccctgctcgcccagctcccctcttccatttgcaccctctacctagctctctcgtcctctctctcgctctgcccacgcgaaccgagaacctccaccaccgcccccgacatccattgtctgtttcgtggccgccgttgtgcccgtgtcccgtccagtgccatggtaagcttcgccttgccgtcagctactcgggacacccttcgatgttccctccccctctcgggtctgtccggtccacgctcaccggagcaattcttgcacagccggagctccgccattgtcgccctatcgcgtccttgtgcctccgccgttgccctgtgcctccaacgcttcccttcaa

SEQ ID NO: 171752 - DNA, 541 bp, Zea Mays
ctaacgggggagggatggcacaagttgtcgccctcatgggaaggaccattcatagtagcagaagtcactcgaccgggatcatatcgtctcactcaaatggatggcacagaaattgggaactcctggaatatagaacacctcaggaagttttacccctagctgtatttcaaaagctatcgggacgataatgtactctgtaaaaggggaaatatgtcatcaataaaaaagggcttcaagaatactcagtttgttcatgattgaccggcattcttacttaactcgaggtgaccactatgccctgctaacggagcaatcggcttaagttggcaacgacttaagacagtgcaacatgcttgcgcttacttaattcggggtgaccactatacccagctaacggagcaatcggcttaagtcggcaacgacttaagacggtgcaacatgctcgcgcttacttaactcggggtgaccactatgccctgctaacgaagcaatcggcttaagtcggcaacgacttaagacggtgcaacatgctcgcgcttac

SEQ ID NO: 171753 - DNA, 506 bp, Zea Mays
tttaggcgcattcttctgtgacgaaagatgtcacttctggtgtaaaaatcagggcattgccattgccttgtagaggagcccaaaacaatttcttattacgtggttgatttgagatatttacaacggtaacaactccaactcttgcaatgacatagtggccattcttgtggagggcccaacaaattttcgtttccaaatcttacaattttttatttagataggtccatatttggtgccacaattataaagatgaaatactgatgtgaacttgtgaagtatgtggtgctacattacgtttttttagaaaacaaccttggtttgctaaaaagaacatcattggggacctatgattgactattcccacatttgatgtcagtactctgttttttctttttctttttgaagaaacatgattactgcatgccgcatggatttagatactgtctcaatcaagacatttttttgaagaaacattttgggtatgtttcaagtcaaggcatgtgcct

SEQ ID NO: 171754 - DNA, 431 bp, Zea Mays
ctgctgttaccatgagcgactactggatattatttcggaagtttggtcaatcctaggaacattattaggaagcacgggttgaagggcttggagcatctaattaaccgtagaaaaaaaaagatacaacaggaagcagtactgtggatcggcacttgcaacgtgcaacacgttgctccatggtgcttagctaggtcgggtgttttcagacgtcagtagcccatcatgcgcaactagcaaacgctgagatcgctctcactcacatgacccggacacgatcgagtgagctagtttctcctctggcatcatgtcccccaggaacctcacacacacacgtacgggtacggctgtgctcccagccgtgtgcgcctcgagggaaccgcaaccgctcccattcgtccgtcgtccgcctccctcccgtgctaatcctcctc

SEQ ID NO: 171755 - DNA, 751 bp, Zea Mays
agttttgattgctacttattataggtgtgctccttagatcttttttaaagtaggtttcatcgggcttgttgtgaaagctctccttggccgctttgagtagcatatcatcttctgcttcgctcggccaagccatatacaagcggttgtagatgtcaacgaataaggtgaccttgagcgtgcttgtcgaccatcgattcttcaaattatgtcaaattcataaatatacatatatacttatgagtccttcgtcttccttctttgtctagtttttcattgttgcaattgagtagcagactagttcaaagatgcatcactgtggctgcttggggtgctattgtgcttgtagggggacgagcaccatatgggaggaggagcaccaaatgaaggagtgaacacaggaggagcaccatatatagcatcatatggaggagtatccaagatccataaggaggagcaccatatgaatacccatacatgcatggaggagtgtatgaataagccaaaggttgaggagtgtcgctgataggtgctttagtgataggagaagtgtcaaagatagaattttcattggcaggatgaggagcatccacaaatggtttatatggatacaaagaggatgatatggatatgacaaaataggttacaggaaaataagatgagtaggaacattctccgacaagatagatagcagaaagcattgaagaagacttgccccacaactgcaggtgtcccaagacattgtgaagattgc

SEQ ID NO: 171756 - DNA, 877 bp, Zea Mays
tttctctatcccctgggtcacgcgcactattacagaagaactcaaggtctaatttgcaaatctcgcccagactcagattaacccgctggtggacggtgagttgataacacaaaactccagggattcatatgaaaactactagggcgaaagggtacggtgaggtttgggccatccgatccacacctaacacactagattagatctatgctagctatttaaccacagtcgctcttggtcgtcggatctgacatccgcgttccacgacgcacgatcccttcactctctctcagtcacacgatcgttgatctacagtcgtgattgaatgggctgaagcgttatgctgattctaatcatggccatccaaaaccaatcgacggcacacgagcgtcgtctccactaccgtcatgcggagcggccgggtgcgcgtttgccagctgcgactcccccgcgtaccacgaccctgagttccagtgggctaaccccaagcccctaagcgcaatacaacctatacttccttgcgaatgcgatagggctaacttaccggtgtttaacgtagcacggctccgaccacggcgaagaactgctccgcgatgatgaagaggtctggcgagaaattcagccaaggtcgacggcaaatcccccacaatgtggtcacgtccacccgtccgaaagcccaggaagcccaaggtcaccaccccggtgccccagtcgacggcaacccgaagtttaagtgcggcggcgccctgcgcacacacccgcttttcttgctctggcgcaacggctcaatgagagtcacggaggtaggaggaagggttggccagggttcttaataccccatataggcgcaaggtggccagggtggggcaacaaacttccc

SEQ ID NO: 171757 - DNA, 549 bp, Zea Mays
ctgagcttcctgggcatcgacgtgatttactcgtgcccttccttggtacagagccttgttctgctggctgacggtggagggcgccttgggggcggatgccgaggtattcttggggccattcaccgagttggagtaggcgggtcctggtggcttcagctgcggacagttgttctcgaagtgactgggatcaccacagtgccaacatgcatttgccgggggttgcttgcttgccactgagggggaatggaaagagctctgactctgttggctgaatcgtgacagagtgggtccagctggtctattgaagtttggtcccttgggtggaaacccaaatgatcgagtcttctggtgctagtcctgttgctgtgcccggagaacctggaatttccttttgagatgccccttttcttcctcctttgccctttcaacttgcatggccttgttggaaaggtgagagaaattgaggaagtcttggctagctagaattgtcttgagttctggcctgagtcccttcaggaaacaggccatcttcttgccctcggtactgac

SEQ ID NO: 171758 - DNA, 390 bp, Zea Mays
ctccgtcaatgagatcctttgaagttggttcgtccacgtcggggatggctgacggaactgttcgcggagacccatgctttatttcttgcggggtcatggcctccgatccgtacagaaggcggaagggagtgaacccggtcgccctgcactcagtcgtgtttagtgcccagactgcctcaggtaacaaatcggtccatctgcccttttttcatcaaggagcatcttcttgacagctgtgaagatttttccgttggcgcgttccacgaccccgttggactgcgggtgatagactgaggcgaaggcaagcttggtgccaatggagaaacaaaaatccttgaagtcttggttgtcgaactgcttgccgttgtcaactgttagttcggacggtac

SEQ ID NO: 171759 - DNA, 802 bp, Zea Mays
tgacaaggcccttgtgccacatgcaacttggctccccgtgccagctgcccgaagttgaatttagagtggtagctgtcgagattagtactagggacctagtgcaagaatatttggcaaatagaacatttccaacttctattagttgggggattccaatgaaaaaggaaggggtaaaaagtatgagcttgtttggctcccctatcgcttcaaatttgagaaacagttcaagaaaccatgcaatgaatggctggaaatgattgaaaccatgtgcaatgagattcttggcaattatacgaagaaggaggaccagctaatgactgctgccttcggtacctggccgaaacgaaggctgaaccgggtaatggatgctttgaacttcgactacccagattatgagaggtttgacgaaggggccgggggtgtgaaaagaaaaatagttgttaacatcctaagtaggcaagctgcccgctcagtaaaagaagatgaaaaggccttgaagaaaacaaaaacagcgccagagccaaaggcaacaatttctaagaagcagaagcttgaccaaaaaccctctactgaaccgaaggtcgacgaagcagcagagaaaacccctctgttgccgactgctgccgaagtggttgaaattttgaaggtaatgactgattctccgccattcaagctgctaagtcctctgggattggaactgacaaaacttttacagaggaaggaaatgcccccggctacagaagagaaggttgaagggcaaaagaaacgacgaattgtgaatataatgcaagcaattgaacaa

SEQ ID NO: 171760 - DNA, 640 bp, Zea Mays
caagttcgagccgtgactgccgcgacagcagcttcaccgccgccagcccgccactagcagtaggtcgcctgcgggctgcggggcctaaccgaatgcacgttttcttctgggccggtattctatctaggctgggtgcatctccgtggatcggcccacaaatccaggctgtggtgagcaccgtggcatcctcagcagccgctagaccactgcttcatatttcagcatcctcgagtaattgatttattatttactccaattagggatgctggatccggtagtatatacgagttcatttggtctcagtttggcagttaagtgtatgatgcgggagaactcaagattttatctaggttgccttggtgtgtgattatgcaccctcaaattcaacacctatcaatttggctaagatggtctcactgggaaattttatctaggttgccacggccgagcgtgcgaggggaccaggccagggcaagcacgagcggctgaccaggggaggatgcacaactgaccaagggtggcgcaggctaggccggcagggccacaacgacgtacacggggtttgacaaggggcagtggacgatgttccttcgccgctgctcgatcgctaggagagagagagaagaatcatgagaaagaa

SEQ ID NO: 171761 - DNA, 1671 bp, Zea Mays
attccatgtccgccgtggaaacggaaccgggtacctgaatctgaccggctagatgcaatgtgatatgatcttctccggatttttatgtctgcgcatatatacatataactatgcgttgttaacgatatactattacagttgcagccatatcgtcgtcgtaataatcttgacaagatgacaggcaataatcaagtccggcgcgcgttcagaataatggagtatacgtaaaatgatcaggtctgcaagaacaagggcctattttgtacatatttttttttctaaagagcatttctaagaatccagattcctagataatctagttgtcacgagaatctggacatcatgaggcttacatgtagaggcagataaggaggtccgtatggtttagagtttaggaggtggtggactcctctcgtcgcgaagactcgttggattctatatttacgtcgatttaggtgttattcacgttctcacatgggcgtactgagaatcgaaacgttttgctaccagaagtcgattctcacggccagaatctcagaatctggctagaagccgaaacaaataggcccaatatcatgcgaaccaaaaactagtgccaatgaatcacatttaacaacatatatatattaacgatcatcctatcaacatgtatacaaaggctaaatcgagcatccttcctctttgcaatggaacttaaaatcaacaaggtacctgtaaaatcatcatgagaagaaacacaacaattttaggaaattgaagttaaggggggacgcagatgtactcactgataggggttgtctggaagagatcgttgatggagaaagcagggaaatatgtgtggttaattttgtactagcctacctgtcggttttactgtaatcattatatataaaataacgattttttctattccttttgtactttcacagtatattagatactatatatagcaatcgttttcacgttgagattcagcatatttgcttagatttaatttgtaccgatttctactgtttttataggatttttatttctatagattaccgttgcagcagtctaaacagccggttttataaaacacatacattaaatactgtatgaatctattaaaatattaagatgactaatatcttaggatagagagtaaaaaacaaggacaaaacagaattgcagccttgagcaggggcaaccatgtacgcagtacatgtttggaggaaccagttggatttttggaaaaacatcgagtttgatagctgaaatggattatcatgcaaatcgacgctgagagccattttagattatggagcatgtcagcatggagacttcacccgacacgagagccattccaaaacgtgctcagaccatcttctatggtaccacgtaaccctccctccaccccatagtggattatggggtgacaactgacaaacacctccaaccccccactacaccataccccacatggatggatgagagaggcaacttccccatgccttgttcgtttggggcctagaatggtctggattgggatcaaaaccatatggatcaaactcacttggatgaaaacctaacccacaaaataactgtgttcatttacgccaactcaggtcttaaccccagcagttcccacctcatcccagcatagaaaaaatcctcgtctcgatggcttgg

SEQ ID NO: 171762 - DNA, 1192 bp, Zea Mays
ggttcagaacctttggttatttccaaaataaagactcgcatgtatggctataacaatttatacttttaaaaatggatacttattgagacttgataaccacatttagctagcttaacaggagggagcatgctaactcataatgccttgtaattactgaatactgatgaaccagcggagccatacctcatcgacatcctcaagtagctctgacaaacaaattagggggacatgacaaataaattaggggacactacctctgcgtatctgcacaagggcccaagagaggtggggcccggccataggaacggagctctcagctcccacaccgtgcaccagtgaatgcgagcagctggtctagccttccagtaatctgatctgcatgcagtgtgatccaggattcacgtggataaggatgaaatcaagagagcgctagctaggatcacacgccaatagcacaaggaaggaatgagcgagcgaaccttgaggaaaacatcgccgacgagcttctttgtgtggctctccgtcgttggtcgcaaccctcgccactgccctcactcgtcgcacatcgcgctgtggtcacggtcggggctgcccttccgtccggtcgaccggtcgagcatggggcgatcaagcaggactcgaggaggaggtagcggatttatggcgacggatcggggtagcagggccgagtgtgggttgttggcttgttgcgcccgtgggcgtggcaggcggggggtgggggcgggcggagggatcatgagctagagggggagatcgtggagggagtgggcagtttggagggagatcgtgggggattcctttgtgcgggcgtctgggagtgagcgggtgctcctgagatggctgagatcgacgatgaacaggagagcacgggacagagacggtgctagcaggaagagctagagggcgagggctcgctgggtagagaaagcaagggagattgaccctaaagccaagctgggtcagggtaagaagcgtgcggcctcttggtagctacttgtgccgcaccaaagaaacacagcccacgcgacctatgtcatcatcatggcttgcacatttttatgaccataccggccagccaacatagcttctaccggcttataagccttccttctttagagaaagcaatcatggtcaaatgctcctgctagtgtcaaattgaggcaactttttg

SEQ ID NO: 171763 - DNA, 748 bp, Zea Mays
tgacaaattgcaccggggtccctgaggttctatttctccacaggtgaggtccctgacgtcggcagcgcgcggaggagctccggcgagcgtgcagaccggccgattggggctacggctgggttctccgagcggcgaccatgaaattggggtcggcctgaccatttcccctaacttaattgcgcaaatagtgatctatcaagctctgtccacgtgaaccgaatgggtggcggacagttgatcgtgttcccagtgattggtgagctcgcagttcaaattggtgggttagcaagcatcgtaggtatgtgagaaagcttaaacgaggaagcaggggacgggggctaaccgggaaagggctggcgacggtgaagctcgtttcacggtggcggaagcttgaattgggggaaattggaaattggggctcactgggggatgatagctaacgattcttcgtgtctgggttcgcgataatctaacgcagctaagggagggctcaatttataggcgtcgcaagcggtggccaggaattttacgatggacgcgcggcggccggaggtggagaagatactggcgcacgtgaattcgtggcatctaccgtggcagttactccgacgagccacgaagaggcacaagggttcacggcgatgcggtggaggggctgagccacgcggcacaaggccgggaggcggctgtcgccggcgagcatatccacacccgccgtggtaagtgcggtacggcgaccggaattgtt

SEQ ID NO: 171764 - DNA, 488 bp, Zea Mays
ccgtcgcgctgtcgcccatgcttcgatttcccttactttgcatttcctctacgtggtagtcatgcgcttaccatgctatctgcggccgccgatcattagccgactcgccgtggctataaatggcaccatggtccatgacgaggtgttttcatctccaccagtgaagctcagtcgaagtccaaattcgcgaaattccctccatcgttcccaaaattgacagtgcatggtgaaactatagtcctttacggacgtgtagccttaatctcgcctcccaattccacccgagaccgttgcggcttcgtttttacccttttctgttacccgcgagccaggatcctccgcgccccatggtcagatcgtcctaggtctgctcctgcttgttttaatcatgttccagtatctatatgcgctagtgatgctcatcggccctgccctttttgcttagtcacaatcaatcacccggaacacatgaactcacatcggtattt

SEQ ID NO: 171765 - DNA, 341 bp, Zea Mays
gcgcactcttgcgctttggcacggtgtcttgcacgaaacagcgcagagagaggtcatgttcaagcgcggattggctccaaatctttgcgattatggtcatgatcccattgagagatctcttcccctgacattcctttgtcgtttgtgtgtggaggcttatgggtttcgctgactggatcaagagatatggagggatgaagttgggtttgtctcactgaggaactccaagaggaaatcccagatttgacgtgtctagggcacgaatctcgatgccatattcacacacattgcagaggggtttgtttagaacaaatttgtcaatggggacttaaggatttgag

SEQ ID NO: 171766 - DNA, 588 bp, Zea Mays
cgaccataatccagtcagtaattggctatggttgctgtagtaagattgtacctggatcattaggctacaactttgctacagaatgatggccttgttgccatgtaaaatcaggagaaaatccagcccaaatttgatctgtcaggctgaccgaatagaggttccaatggtacagtagcagaaaaaaatctcaggtaccgcgcatctcgccgccggcaccgatccgcgccgtgatttgtgccgtgatccggttaagcgctcgacgagcatctcctcacgacgatattcttgatccgggtaagatcaccgtggtggagggtaattgtgacaccctagtgtcacctaattaagcatgaagcatcaaattaagcatgaagcatcaaattaacttaagaataaaagatctactaagggtatatctaaagaatcatgctccaaacaaataagattttcaaaaagagcaaaatgttgaaaccctaataccaaccctaattgagctctttaagtagaattgaagaaaaggggcaaaagactatgaaaaatataaaatcaaggcttaggccaaatataaacattgaagtatactaaata

SEQ ID NO: 171767 - DNA, 1569 bp, Zea Mays
gctgacttaagccgattgctccgttagtagggtataatggtcacccctaagctgagtaagcgtgagcatgttgcaccgtcttaagtcgtcgccgacttaagtcgattgctccgttagtagggtatagtggtcaccctaagccgagtaagcgtgagcatgtcgcaccgtcttaagtcatcgccgacttaagccggttactccgttagtagggtatagtggtcaccctaagccgagtaagcgtgagcatgtcgcaccatcttaagtcgtcgctgacttaagctgattgctccgttagtagggtatagtggtcaccctaagtcgagtaagcgtgagcatgtcgcaccatcttaagtcgtcgttgacttaagttgattgctccgttagtagggtatagtggtcaccctaagccgagtaagcgtgagcatgtcgcaccgtcttaagtcgtcgctgaattaaaccgattgctctgttagtagggtatagtggtcaccctaagccgagtaagcgtgccgatttcaagtccaaccaaatcgaagtcagctgatagtcaatgagtctgaatgcctttgaaaatgaaaactttattgatgatgaagtcccccgattacagagtacaatgttgctttgagagcttttgaggctttgctaagggtaaaactttctaagatgctctatgttccatgcgttacccacttccatgccatccatttgagtaagtcggtatgatcctggccgagtaacctctaatacaatgaacgacccctcccatagtggtgacaacttgtgacgtccttcccccattagaattcggcgaaggaccaagtcccccactgtaaaggaccagtgctgcacgactttatcatgatagcgcctcaaggtctgctggtacctgaccgactaaattactatgttcagtcgctcttcctctagcacatcaatatcctctagcctggtagcttcagctttagctatgctttcgaaggtcaacctcggcgccccgaatattaggtcgacgggtagcactgcttctgaaccataaaccatgaagaacggggtatttccatgcagagctcgactaggttgagttctcaagctccaaaccacatatggtagctctctgatccattttcctgcaagtcattcttgtcaaacactttcttcctgagcgcctccagtatcatctcgtggccctttctacttggtcgttggctcttggatgcgctgctgatgcatacttaatttggatgctgcgttgctcgtagaagtcgaagaattcggagatggtgaagttggatcctaggtcggtaatgatgctattcggtataccaaacctgaatattatgtcttgcataaattctactgccttggctgaggttaaagaggcaacagatttatactctatccattttgtgaacttgtcaatggcaacaaacacgtgagtatagcctccctgagctttcttgaaaggtccaatcagatccagcccccaacatgcaaatggccatgttacaggaatagtctacagctgctgtgcgagtaaatgttgttgctttgataagaactggcaag

SEQ ID NO: 171768 - DNA, 1172 bp, Zea Mays
cgactggaggaggccgatcatcaggtatataaaaaatgaggaggagccagatgacaagaatgcagccgagcgcatcgcaagacaatcggctcactatacactcattggggaaacactgtacagaaggggtgcatcaggtttcctcatgaaatgcattctttcaactactggaaagcaacttctggacgaggtccatgctgggcagtgtgaagtgcatgcagcgtccggaaccctggttgggaaggtcttctggtcaggtttctattggccaacagcaaagaatgacgcagccgagttagtccagaggtgtgaagcctgccagtacttgtcaaaacagcagcatctaccagcacaacaactacaaacgatactcataacttggccgttcgcgtgttggggactggacatgattggacctttcaagaaagctcagggaggatacactcatgtgctggtggctatcgacaaattcactaaatggatagagttcaaacccattgcttccttaacttcagccaaggcggtggagttcatacaagacataatattcagatttggaataccgaatagtatcataactgacttgggatccaacttcacaagttcagagttctttgatttctgcgagcagaaaagcattcagatcaaatacgctttggtggcgcacccaagagccaacgggcaggttgaaagagctaacgggatgatattggaggccctcaggaaaaaggtcttcgataaaaatgaaaagtttgcaggaaaatggataagggagttgccctacgtcgtttggagcttgagaactcaacccagtcgagccctgcatggaaatacccctttcttcatggtctatggttcagaggctgtgttacctgctgatctcaagtttggggcgccaaggttgatcttcgaaaacatagcagaggctgaggctactaagctggaggacattgatgtactcgaagaagaatggctgaacatggtaattcaatcagcacggtaccagcaaaccctgaggcgctatcacaataagaccatgagacatcgatccttcgcagtgggagatctcatcctccgccgaattctaacgggggagggacggcacaagttgtcacctctatgggaaggaccattcatagtagcagaagtcactcggccgggatcatatcgtc

SEQ ID NO: 171769 - DNA, 773 bp, Zea Mays
ggacgacgggttgataactaaataagacagggactcttttgcattttggcgcggtcaaaggggtacgaggggttttctggccgttagatcgactgcccgcggcatagattagatcggcccatttatcaaccggaattcgctcgcagacgtaggatactgagatcatccctcaaccaccggatcaaaatcggacgcaccagagcgatctggacgaaacggacgaaaccacataccccgagatctacggttcacatgtcaccaccctttggttaaatctcgacggcacatccactgatcaaaggtgcagatctcatggatcaaaccatttactagagatctgatcctagcctttgaccaggggatcaacggtccagagagaccctccagctcccgacgccggcggcgagagcccaccaattccccccacggcggcgccattacagcacatggtccaatgccgccctagcgctccacctccaccgaaaaccttaaatacttaatgtggaaggtaaagcggattgggtcttgtggttatacctgagtgaggcggcgactgatccggttcacggtgctacccttcgccaccagcgagcacgcgaggtccctctacagtgatggtcacgaggagaagcaaggagtagggagggaaggatctggggtcgtggtttcctaaataggcgtggattaggcctgggcgcaataacagtccgtgcggcattggcgcgaccccaccatgcacggtgcgttcgttgagggggaaggaactgacctac

SEQ ID NO: 171770 - DNA, 424 bp, Zea Mays
ccatgaatagcgcccccacgatgatggatatgtgcatgggaaaaggaaagaatccaacgtttctagaaaagttagacaacaagaattgtgcgttagggtgcgactggcagaaggaagtaaccggagctagaaaatggcggcgccatggggtaaagagcccatcagagagtacacaacgccggcaagtgttcatcgatcaaatccatgcttggagatcgtatcaatggtgcaagaagatcaacaaggaggaaaccagtttggctcgtatgtagatgcacatgggcaaacagaaactaccggaggggcaattactccaccagcagcattgaggacgccgggggttgatgatcacagcacaccagatgcgtcgaggatggccataaatcaaggaggacagaagctgactactatgcaaactattggt

SEQ ID NO: 171771 - DNA, 581 bp, Zea Mays
gggttgaggagcatcaagggtacatcagagtactgaaacaagggaacagagggtgggaatggacctgtaatgcgttggccacgttgagagtctttcacggcggcggaaaaccgatttgggggaagaatgaaattcttcggctatagtggctaatcgagggcaggagtgggtgctctggcttggtgataacatggcgcagcagactgggccatcaatttataggggcgttgagcggtagcacctgatttgaaggaatcgtgttggcggccgagaagggtgggggatgagtcactgcggcgatctaccgtggcgatcgcagagcaatgagctatagtgctcactgggcagtcaccacggctcgcgacgacacgataaaggtcctaaggcatggcgccaccacggtgaatggcgtacatgccagtgacggccactcggccacgtcgccggcgcgagtggatgagtgacagagcgcatagtgcctccaagttcatccgcagcaagatcttttacccgaggatcgttatccgtgtttaacaaggcacgtatcacggcgctggcgcgaatccgggcagaaggtcgtc

SEQ ID NO: 171772 - DNA, 858 bp, Zea Mays
ggggatggctcaaggaggtcaggggaagtgcgaggaacgtgaaggtgaggataacatcggggtaggggcaccagagggtggtggcccgcgttgaggcggctcggcggcggcggtgccactcaacttcggtgaagaattgcgcgcaacagagagcaaggaagggaaaaggagagggcagggtggttttttacctcaagggaacatcagggacctctagatggcagtaggggcccggcgacggcaccatcgctgcatggaggagggcgggtgagcgcgtgtaggggatatcagaggggcagagaacgaattggggtgtgttccgagctacggatatcaaggcgaaacttaccgtggcaaagggcatggcggggcctcaacattagcggtggaacgagcttgggtcggcggtgaaaggtggcagaacgagctcgggtcggcggtgaacggtggcggctcctctctggcgtgcgcacgacgctggctgggggttctcacggatgtgcgaatgagggagggagagtgagtggggttctaggagcttcaagtgaccgagggcggggtgattgcgggctcgacgcgcgatgtgggcacgtagtccccggcgtgggttaagggcatgcgagcgaaggggacagggctgacaggcggggcccacgggttagcgggaggggacacgcgtgcgagcgatcgcgccgagaagctggactgggctggcagagagagagaagaggaaaacggacgcacgagcgagtaagacagtgccgacaggtgtgacccaccgtgtagagagagatagggcaaggcgcgagggcacgcgcgggtgggcatttgggccgaaaggctgaaggagagggggtt

SEQ ID NO: 171773 - DNA, 729 bp, Zea Mays
gctacttttaagtgcctagtcagtaccgtcaagtaacttttggcaagtagctagtcgatttaatgttggccctttgatcaaaccctttacttttcatcaagtgtcggtgtgcactgtggcagatactgctggtaatgatgccttgtcttgtgttgaagggacctaccccacctgcttcgacttttgtcctgttcgtcattcgtggcatgctacactggagattcttaaccaatttctaccatgagttagcccccaattttttttctctcaaatatatcatctgtcggtgagacccctgctctgctgggggtgtcagtgcttgttcacggtccagagcacattgtgcactgagtataccttaactccctgctagtattgtgtcttaatttcatttccagggtttcctgttttccattactattttctgtattctttctcaatccttgtgtagctatcatagatacactaatttacgtttggttgggcttgcttgcattcctttcttttgtatcttgacttgtgagcaattgtttgcccgcccttgtccttgatgtcgacttcctactttccctacttctagtatgcgctctcctctctttcattgattctgacatgctacctgaacactacgtgatgctgcatcgagggtcttccacagtgccacattgcgacatcatttggtcatcatgaagagtgcagcttattatgaatctttttacttgcctttgt

SEQ ID NO: 171774 - DNA, 1055 bp, Zea Mays
tgcaaataaaaatattatctcgactggtaaacgatcgagtggcaggttggcagcaaaacaaaaattaaagattgggggcagccggatgccatctccaaagcgcaggaaattctcattgcaaagttaaataattctgcagccatacaatacaaatgttcaagtgcttccacctccaataatcatgtaaatttgactgaacagattgaaagcctcttcgcaaaacccctcaataaggagcagatggaggcaattatggagctggcaaatcaaggcaaggggaagaaaggaagtaggtccaggggcagcaaggtgtcgccactcaaagcccccatcatcgaggttgttccagaaatatgagctgagcgtcctgttcagctaccagtggttctagtctttttttatgtatcccaagttaactctcccttgctcgtgccagggggcagagcaagatgtcctgaaggttcttttgcttcactgttggtcgtcgcatggtagttggtggtcctggaggtggttttcgaatcattggatcattgtacctctgtatcttactattttcagtttggaacttttgtgtgcctcatgggacatatgtatcttactgttggtgaacaagcttgccagtctgcatcaaatgttagctatgttatattctttatgtggcaatgtctgttcgagtagaggagggttcatcttttaatgaatacaaactgttgtattttatcttggaatgtgagaggtttgaatgctcgtgctaagcgtgaaagtgtgaggcaaacaattctttctaccagcgcaactattatttgtctccaagagacaaaaattatgagttggactaaagatttattaaaggaaactgtgggttgcaagcttgcaaagcagactgtacacttaccctctttaggagcatcgggtggaattcttattgcttgtgacgaagactattttgatattgctccaattacttacacttcaatctactcaatatcagttagggtcaattccagattggaggacgtggtgtgggacttaacagctgtttatggccccca

SEQ ID NO: 171775 - DNA, 522 bp, Zea Mays
ggaaattcgtcagaatattttggccgctcagagccgtcagaagagttatgctgatgtgaggaggcgggatttggaatttgcagtgggtgaccaagtccttctcagggtatcacccactaaaggagttgttcggttcagtgtctccggaaaagcttagcccaagatatattggaccgttcactatcttggcccaggtgggcagcttggcttatcgcttgcaattgccggattccatggtagggggtacacccagtttttcatgtctctatgctgaggaagttcttgcgggatccggaccatcagattgagatggaaccaattgcggtgcagcaggatctgaccttggagtgtcgtccggtgcgtatcttggaatccttagagcgtgttttgaggaagagatcaattaagtatgtcaaggtcttatggactaatcagtctgagtgcgaggctacatgggaacttgaggagctgatgcggcagaaatatccggaactttttgttgtgggtaagtgttgttgattc

SEQ ID NO: 171776 - DNA, 791 bp, Zea Mays
tccattcatccagtgccggtgatttgtgaatgaatggctgttagaaagccgtgtgaccgcgggcatttggttggactaaaatttagcactatgtcatattaaatgtttgaatgcctattataaatattaaatataatttaatctctatctctactacttattaaggttgtaaggggtagcctaccgttctgacgttatgcaatctcagacgttcgttatgtcgttttgcaatctcagtcgttcgatctacgcaccagtcgtcttatcccacgtcctggcccaaattcattgcgaccccagaagttctgaaagctatacgcccgcccccgtcctcccacaactaacaaaacccggctgccgaccaatcaggctagatatacgaccgaacgcgccgccccaccaacgaagaaatctctcctcacggcggaggaaccagcgttcgacagcgatctgcagcactcctgttctccccatgatcccgacacgcttcgtctacaggccacaggtgatgacggatgtgatgttgggttctagctcgttgtgggagacgggcgcgccgccacacgacatgctcgcagagtcagccgtgatgtacgcgacgatgctgtcatcgcagcagcagcagatgacgcgatcggaccggcaggcgatgtacgacgctcctgttctccccgaaatcccgacgcgcttcgtctacaggccacaaacggcgacggaggtgatgtcgggttctagctcgttgtgggagacgaccgttgtgggggacagatatcccccaagttcactagaag

SEQ ID NO: 171777 - DNA, 355 bp, Zea Mays
gccgggaacacctcggtttatcgccggttctcaccatcgtcatgaacagacgaattcagggctggatttgtgcaattaacggagggcttagggtcgccgaggttgggattaggtgtcggccgagttagggctttggtcattaagtatctcggccggtacgggttcgccgaagggcgtgctcaccagcgttcgccatcgggaacctgtcgttgcgaagaaacagaagtcagagggtctttgtgcaaatgtcagagagacagtgaataggggccaagggttcttcatcggttatttgaaagaccgagggccttttcgcaaagttgacatcgccggcgcgcgcacgggcgcgtttccc

SEQ ID NO: 171778 - DNA, 1222 bp, Zea Mays
gtgagcatctcgcaccgtcttaagtcactgtcgacttaagccgattgctccattagtacggtatagtggtcaccctaagttaagtaagcgtgcagatcgagcataaaaagacttaaggtataatgctaagtggtcacagcagagtatgaagtctttttattgatgacgtacttttccaattacaaaatataatgctgccccaatagcttttgaaatctagctaggggtaaaacttcctgagatgctctatattccatgaattccctatttccgtgccatccatttgagtaagccgatatgatcctggccaagtgacttctgctaccatgaatggcccttcccaaagtggcgacaatttgtgtcgtccttcccccgttagaattcggcggaggaccatatcttccactgcgaaggatcgatgtcatatggccttatcatgatagcgccttagagcttgctggtacctggctgactgaattattgtattcaatcgttcttcctccagcatatcaatattctccagtcttgtagcttcagcttcagctatgttttcgaagatcagccttggtgccccaaacctgagatcagcagatagtactgcctccgaaccatagaccatgaagaagggagtatttccatgcaaagctcggctaggttgagttcttaagctccagaccacatacggcaattctctgatccacttctctgcgaacttttcattcttgtcgaagactttcttccttagtgcttccaatatcattccattagccctttctacctgaccgttggctcttgggtgtgctactgatgcatatttgatctggatatttctctgttcgcagaaatcaaagaatttcgagctagtgaaattggatcccaggtcagttataatgctattcggtattccaaacctgaatattatatcttgtatgaattccactgccttagctaaagtaagagaagcgatgggtttgtactctatccatttagtgaatatgtcaatggcaactagcacgtgagtgtatcctccttgagctttcttgaatggtccaatcatgtccagtccccagcacgcaaatggccatgttacgggtatggtctgcagttgctgtgctggtaaatgctgctgctttgataagtattggcaagcttcacacctctggactagctcgactgcatcactctttgttgttggccagtagaaaccagacctgaaaacctt

SEQ ID NO: 171779 - DNA, 313 bp, Zea Mays
cagcaaccccagcagcaagcgcagcagacagcagtgcatctgcgccgcgaaccgccgctccagtccaatcaatggacggacacttcccatgatctcgtcgcccacctcctcttccgccgccgccgccgcggcaatgccgactccctcccgcctcctcttccccgtcctggtcctcctcgccgcgtcggccggggcggccacggccgccaccgtgagcgacgacgtgctcgcgctggtcgtcctcaagtcgggcctcttcgacccggcgggccgcctcgcgccctggtccgaggacgccgaccgcgcctgcgcc

SEQ ID NO: 171780 - DNA, 667 bp, Zea Mays
cgaccgtggtcgctagaaatgaaacggatgagtctacgtctaagttttctgagtttgatgactctgggagttcggtagtgtggacggaagagtcttcggatgaggacttggattactttgtggctttggatgtggctgtggcggaggcttctccgcgtgttacggatgctgaagttttgcctggtccgagtgctgggcgtaggcggcgaagagcggtggcgaagcgtagagtgagtgaagtggatggtggtcggcttcgtgtgggcagggctggcaagcgggaattgttgtcctcgccggctggggcgagcatgggtgagggggagttgcgaagtcttttttagggtgaggagctgaggataatgctgtttaactatagggagatgggaatcattctgaaggttgaaccaatgtaaggtgtgatgccctcgctgtacgtgtgtaactatagtttgtatgatgaggttgtgtgacttcgcgcactcggctatgttcataggggcgttgcgcacttggtctagcacgtttaatatgtcggtccagctgcgcctgtagtcggtctttgcgtggacagtttctcgatgtagacttttgcacggatgtaatgtgccttcgattttgcgcactcgttgtgctagtctggctgcacccttaggcgacttttgct

SEQ ID NO: 171781 - DNA, 863 bp, Zea Mays
aattatttagggactaagggagtatcgttctatgttatgtcaatcgtcgccggttgggaaatattatccagtgtctttgagttggttgcatgatttctttgtcagtcagttccgtggttttggttgaaaatagagttggcagcagtaagccgtccttcattttttaacagctcgtactagccttgttgagtagttgtgcagaaggggatgtaggtaaaccactagggatctccaggttcaaggatcccgtccctcccccggtcccaccccacccaacccaacaaaaatattgcggtaggaagatagcttaggagagctttttgaggctggtcaagtgggaagtgggatagtgtgtctggccgaaaacaagaagcaacaggcaggtgaatggtgccttgaactagaggtagccacctggttgttgtccatgtgtgagcctgctttctcgaatgttgccttgaccctcgaactagagacaaccaggttgtatccatgtgtgcacaagaacacaatctgaatgagcatttgttgttatgtctaacaaagtttaaatttcaccccaacacatatgaacgagtgaatgcaaatgtgagctttgagagatttcaaggagcccttaattttggtcacagaagctctgttcgacaccccttcatccttcctcaatttgagttttcaggcttcgaccagacaacaccgagccaagtaaaaagaatttgattgccaggataagatagctcccgccccccgaacatttaagaagaagaagatcttctcatatcgagaaaaccatcaaaccctccacgagaaatcaaacttaagacaactcaactagagaccctttcgcaggcaagaaaaaagcg

SEQ ID NO: 171782 - DNA, 396 bp, Zea Mays
gggaggagggcatggctggtatcgtcagcccaactatgagggagagtgtgaagtcgtgtgcaagtgaactcgaatcggagggtcaaacctgtttatgtgatcagtaatcatgcatgccgcacgccaaattttaaaatgacaattacacctgccaaatttaaatggacagatcaaagatccaccaggtcaacgcactgcgcctgcacggctgtaccggttgatatattttgacaaggtaacggagaaacgaaacgcgccgccatgggcggtggatccgtggccgaagatgccgcctccattgctccgattttttcgctccgttcaaacgtgacggatgtccactgttcaggccaagcatattctcttcgtatggattggatagagtgggaccattcg

SEQ ID NO: 171783 - DNA, 1010 bp, Zea Mays
ttaccatggtacagtgaccagaaaagatctccggtgccgtgagctcaacatcggtgatccgccgccacaattcgcgcccgcctgggagattcatgtcgcgggaggagtagataacgtcagggccgggtaaaaacatccggtaggggggtgaatccagtcgctggccggaccggccgtcttgtcccaccgtggacaaagcgctggcataataaccacgcctccacgtcatatgggtcgtggtaagcaaccagttattgaccgcagaccagttcccttttgtgcgccacagtgatcaagccactgtgaaatatcctagccggataaccgtgatcataatcctaaaattcttgtccagttcgatcgggacctataaattgaggatgccctctgctccgcttcttagtaacgcgtccaacccatccccaactagctcctatcgtgcaccaccgcgccccaatttcgcatttcccccaactcgcttctccgcgccaccgtgaaccatcgcgccgtggaccgcccattctaggtctgttcttgttctctttgttcatgtttcaacacctctattcactggtgatgctcgtcggttcaacccattaagctcgaccctgctcaattatcttgaacacctcgatttgtccgtgaagttcgccatcgtcacgggtgggagaacctagggctggattggtgcaattaaggcagggcttggattcgtatagggtcggagacgctagttcggcacttaattgggtcagtcgatgccactcatggccaatcttagcaaagagatggtcgacggtgagcacgctgttgtcaaggttcggtttggagaagaaacatgaatcagagggtctctatgcaaatgtcagagagacagtgaatagtggctaggggttcttcaccgattatttgaaagaccaagggccttttcgcaaagttgacagagcggtcgcaggcgcgcccgcgtcctgcatgaacctgggctggctgggctggtttcggcctagtac

SEQ ID NO: 171784 - DNA, 682 bp, Zea Mays
tacatcaagcaccagagcaacgagaccctccgctcattccttaggcattttcagacaatgaggaaccacatcctcgatgtcacgaatacagccatgatcgatgacttctaccgtggatccaatgactcggccttcatccaggctatcctccagaaggcacccaccacctcagaacaactattctgggaggcggacatctacatcaccaccgacgagcgagccaaagacctcatcaggaacatgaaaccagcacctccaacaccgaggaaatatgtgaaccaacagcaggacaagagctaggagaagaggccttgagaagaagtgcacgccgctgggccaccggctacccggtcccgcggcgcgccatgcgatggtgtgcggacgctggacgaaatccttgactcctagtgttcgtaccacaaggagatatgccacaccctacggaattgtcgggacttgaagaactccatcgagcatggccaaccattccagcctctaccgcctccaccaccgcgaggagaacctgtcgagtagggtcaaccgcagcagcaaggtgggggcggtggcggggctttcccatgcattgacagggaggtcaatgttatcttcggaggccattgggcccaagagaacaagagacagcagaagctcatcgatcggtaggtcctagtggcaaccaaca

SEQ ID NO: 171785 - DNA, 464 bp, Zea Mays
ccagattgtaatggacagatgaactgaaagctttgtggaaggagacaatacctagtcaaaagttctagaaggaagtagtcgtttctaaactccacatagaacaaaacatacataagccagagaactgaagatgtgtgccatgtgtggaatgtggattacagttcttgaatccgatgttaaattatgtgtgaaaaacagaaacaacctgttgttctcatgccaaactgcaagagtgcaagctcaacaaaaatcaaaataatgcataattagttattgacctcagtttcattcttggctctggtaggttctgcaaaaaagtcagctgttggatccatcggccatccaagttttttgaagcatttttttgacctgaaaatggggaaggctcgtcaataaagtaaactggcaacaaaagcttgtttgctttattttttttcctgaacttgctaataaaccgtcctttt

SEQ ID NO: 171786 - DNA, 680 bp, Zea Mays
tttctaggtagagctcgaaggggataaatcgggtagcgtcgccgcgccaccgctgctaaggtgtgcgtgtggtggtcgcgggtagtgccagcaagcgggaacgcacacgagtgagatctagcatcgaaagacaccggtggcgggtgaattgcccaacggaatcaaagaagaaggtcgtggacgcaggattcaccgtcggggtcgatctaccactccctctgcggtaaaacttctttccccaccatgttcatttggtccgtagtaccgatttgcgcccacatatgaccgtgttggggctatggagggttggattcgtgccgacgtaattgctccggtgtggtcggaccaagccattgcgaagaactagtgtgcatagggccacatccacggaattgagcttagggtcaggttcgccatgcgttaggcaacaggttgtgcccaagggagagtcgcgattggactttgtcaccagaattgggcagggggatcatcgcggtcggcggcgccgccgtggtcgcgctgggaggtaggcgatgtcctcctggccgttggatcggttaggggcgtccaggattagatcgggatggaggtagaatattgaccgcagatccgcgaagcaatgactgtgattagtcgcacataccatcgcgccttcgttaaatagtggacgtcgatttttg

SEQ ID NO: 171787 - DNA, 454 bp, Zea Mays
ggtggaatgatgagtctattaatctgggtaaaagggcttcggttgatagacaaggttttggtgacctctctcttggtaaatctgttaaaaaggccataagtggtgatgatgactctggtagggatgttaagggaaaatcccccttaaaagtatcttccagtcatgtcaatgttgctggttccttgtctgaacaatctaaaagtatgaaattggggaaaggttctgaaggaaccaaaggttaccttgatagtcagggtaatgatgatgaagagtacaatgaaagtgaggatgatttgttggattctcaggagttggatgaattcatcaaggatgatgaatttattccttcccccgctcaagagaaaaagaaatcgaatataaatgttcctgatgatgctagcaagaatgctggagttaaaaaaggaggtcctatggaaggtgatgtggcagaagg

SEQ ID NO: 171788 - DNA, 649 bp, Zea Mays
gctgacgccgcctctatccgtgtcgttgctgcctccgactttagctcctcacagagcagccggaggtccactgccttggcgctctgttgggcgaggcgctcgttggcctcggtaagcgtgaccccctggagccacagcgattcccaaacgctactctcacgatggaggaacaacgacttagcggtgctcatgtccgcgagctcctgaaaagaaaaatagaatatcacaaagaatgctctgaccacacgaggagtgcatctaaatccttacctggaagaccctaggaacgtcttgagaaaggacttctgtggccatccgaagcgacctcattgctgcctcgctatagtcacggaaagctttccgcaacctttgctctccctcatcattaagggcaaggagaggctctgaggtatcgcggccccagaacacaagcggttgccctccccactcattgggattgagctgcgtggggatgaggccgctgctccccatgacgggccagggatctacacgcaccatgaccaaggcttcgggtccctctgcagccgacgcatcgggcctctcctcggtcaaggcgacaggcctctgctcaccaacctcagcaacaacggccgccccctccccatggtcgaaaacgggggaatcgggg

SEQ ID NO: 171789 - DNA, 370 bp, Zea Mays
cggccagcaacttatcccgcctttggaacatttcctccctgaaggcgagatccttctcccaccaggcgagatccacctcccgcctatccagggatgcatccttctccttgaggttctcctcggctagggcaatgttgctggccttgtcctccagctcccgctcccatttttggatcctctccacagccgcggtctgctggatccggtgctcttccaggatttcattcatggcactcagcttggcccggagctctatgacgacctcctccctctggttcaaggcctcctccctcttggccagcctcttctcctttcggctcgcctccagctcccgggcatacaccttctggaggtcctttttgtaatcctt

SEQ ID NO: 171790 - DNA, 351 bp, Zea Mays
ttccaggcgtggccggctatggtgagtgcgtcgtctcaacaactcctaattctctactccctaatctatggccttcctatggcctgttcagtctgggtccaaggattcttggtctgggaaggggtttctcgcttaggatttggtggcggacgtggaagacctgtctaagactgctaagctttaggtagtaggggctacttctactgcatttttctatcacaggatgtgtaccgtgtgtaggctctactgctgataggatcaggatcatgctctcagtgtccttccatcagaaatttgtctcagagactgtctttggttcaattaaaccgaaggaagatttaactatttaga

SEQ ID NO: 171791 - DNA, 2143 bp, Zea Mays
tcttttttccctgacttgttggagccaacacagccaggcgggttcttctttttcttcagggctttgtcagccaactcctcttctgatagattgcaaaagcgctcacctaagcgcctgatagttttagctgaaagagaggggggaccctcaaacttgtgctgacacatcaaacagttcttcttttggcaggagccctgcctgaatccagcccgggcgtcacggagcctcttgcttctcctcaggtcagattccactacaacaaattttggtgtggaggaggccaggtccgagggaacagaagtgtcgtcagcagattcctcagaaaggaccgaatcaagaaacttgtcatcaggacacttcctggggatgacaaaaggatgtgtctcagtctctggctccaacagagcggaaggaatatatgaagacaggaaagtttttgaccaactaaaggaatcttcttgcatcaagttggataagaaaaaggacgcccatttcttgggaacctgcaccgaggtcaccgagctatcagcctgggccaaatagttagcccagatcctaaagaactgggcattccttttcctttccaagtgactcagcaaaacaggatccggttgccagtcttgcgaaaacataaagttcaacctcacgttgttgtgtccattaacgttaggttccgccggctgggcatcaggaataacaatatccccaggcacatgaagaacaccctgaattggtgggccgtcaacctcctggggcccaatcatagggaggtcacccaaggcaaggggggcaggggcattaaagttgggcaccggccccacagccaccagatcctcagggatctgcccattctgaagcaaggcaccatgaatgtgaccagaagaactatctgaggacaggtccgaataggggttgctgatttgttgctcgtcaggtggcaggtccagatgaggctgctgaacaggtggaacattaacaatccattggtcccaatctccttgaatgttgtctgctggctgagcttggaaattgtcttctggcgggaaaataagatcccagcccaccgccggcacaagttgacccaaaccaaaaaaactcaaaagggagctgctgaccatcctccgggaccactggcaccgggtccttatcttgaggctgacccccagcaaagtttgttggatgatctcacactgcaccgtccacgagtcaccaataaagccatcagcttctgaaaaaacaatgaactgcgggacctcctccagagacgtgacccgcaccctgagcagagtcctgtaaacattgcgtctgtcctcttcccacaagatcaatctgccaaaagagccaatagccgcctgcaagtattctgatgaacgataatccagagggaatcccaacaacataagccagcattcccgattaaagtaaagggctctatgattccaagcatcattatgtcgctgagcagtgaaggaagcatcgaggtactgttgcgggccgagcagaacaagattgtctctttcaagaacgctgctaaactgaaccaaaacctgacccaggtgcgaccgctggatatctcgcaccccaagccgtctgtgctccacaaggtattctctaaccacatccctcaccgccgagaaagtaatctcatggtcaggtaaaggttgaatgctgataatagcccagtcctcaagcaatggcgggaggcaccgagtaactgacctggccataatctcccggtgaaggaccaccgaagcgctgaagcccggcgggagacagggttcaggatcaacgcgcctaaacgccatcggagcaggaaccgaggatcgccagctagcagacgaagacggagcaggttggggttttggtgaggtgacgcccaaagaaagcgtcagggactgaaggggtgtcgattcaaaattttttaatacctcccgggcgaactcctcgaagcaactgaatatgggcggtccactgatcagagacgcaaccggtgtgcgaaaccaggtactgtgatcaggagaattttggtttcccaccaagaaggcccgactcccaaaggcagggaacgaagtcagagaagaaccgaaggaagtatacttgctgggacaaaaaaaatccaagtgtccccggcccttacagaaat

SEQ ID NO: 171792 - DNA, 706 bp, Zea Mays
ctaaaaccaaccaggggcctagatgctttcagcctccttccgcgacgtggtgctgctctctgggccttcttctccggctagtcggactcccaagtctctgtgcagggagcttccagccgtgggtctccagccgtcggtcgtagggggacccgcgaagtgcgccacttttgctgatggttggtagacagtggagtcccggcgttctaagcggctgcgtctgaaggctggccagttctagcgtcctgcacctgccaatctttccggcaggtgcttcaactgtctctccccaagtcacctagtccgagactgtcgttcaaagacaaggtgtttcaagtgttgtgggcttggtcatagggcgtccctctgcccagtgggtccagttcgtgctcaagtttcctcatctgttcccaagcgaacggtgtggtcccgtcttggcggtgtcattccaggcaaagcttctatttggtcccatcttcagaatcagcaacctcctgggaccttgcggtctgtctggagcagactttctcctccgttgtctagtggtttgtgccagatgaggcacattgatcatcctgccgcgcctctgaaggtgtggcggaggaagactttggtggtttcagtcacaggcagccagtatatgattcaagggatggctactgaccatgcagtgggcacggatgccatcactattaggggccgctctcgc

SEQ ID NO: 171793 - DNA, 666 bp, Zea Mays
caaactcaaggcgaggaacagttgttcttgactctttcaactgctgcattgttgggcctttcgggatccaaatccttacagtttgatggcctccttaatgggtgacatatttagctgttggtgcattttgggagtactaattctttcatcagtaacactttggctgctcaattacctggtcttctgcccttacctgtgccagcgaccgtcaaagttgctaatggggccatgttactgtgcacgtcttatataccagattgatcttggttggttgcttcattcacctttcaacatgatttgaaggtgttggatctacctgttgttgacattgttttaggcatggactggttggaacttcacagcccaatgaaaatcaattggggacacaagtggatgtctttccctaacaaaggtcaaatcatttccttacatggagttgatacagtacccacaagcaacgtgtttgtgaagttaattactctctatcgagcacactgttgtttccccatatgctcaatctgaacaccctcctgacattgcttccttgtctaaatttgcacacttgtttcaggggcctagtgtccttcctccttctaggccttgttaccacaccattccaatagttcctggtgcccatccagtcaatatacgttcgtaccactatcc

SEQ ID NO: 171794 - DNA, 1460 bp, Zea Mays
tgagtacgaccacaaattcacagaattggtacaatatgcgcctgacgatgtcagcacggaagccaagaagatggcccgtttcttgaaagaggtaagaccaggactcaagactatcctcgtcagccaagacttcctcagcttctcgcacctctcaaacaagaccatacaagtggaaagggctagggaagaagaaaagggtcacctcaagaggaagtttcaagtcctccgagctcaacagcaggacaggcaccagagaattcgatcttttgggtttccacccaagggaccaagcttcaacaagccagttagatccactccgtcacgtttcagtcagcagggtcaaagttccctctaggccccctccgttgcaagcaaccaacctccagccaatgcctgttggcattgcggagaccccagtcactacaagaataattgtcctcagttgaagacatttgtgcctacctactccaactcggtgaatggccccaagagtgccccagcacccgcctccaaggcaccctcctccaacagccagctaagcaagacccagtatcatggcagggcacgagtaaaccacgtcgacgctcaagaggctcagcaagccctaggagtagtgctcgatgagttcctagttgaatgtactcccgtctctgtactttttgatttaggaccatctcattcattcataaccactggttttgtggaaaagcatggcattcccactgcatatctagaaattcccttggtcacccgaaccctaggggcagaccttctatgccacctcaaatgctcccaagtcaggattcttttaagtggggtagtgttcttggtagacttagccatcttgccatcccacgaaattgatgtgatcttaggaatggattggttaaccaagcataatggcgtcataagttgcacagataagaccgttcttctcactggccaccaaggaaagtcaatttcatgtaaggcttagccacccgcccaagatccaatggtgtttaatctagcagcagaaagcatatctgtagtagaagaattcatggatgtaatcccaggagaattgccaggaatgccgctagaaagagaagtggagttctaaattgacctaattcccggcaccacaccaattgcaaaaagaccatatcgcatggctcccaccgaattggcagaactaaaactccatatcgcagaacttcaacagaaagggtacattcgtcccagttcatctccttggggagcaccagtcctgttcgtcaccaaaaaggatggaagtatgaggatgcgtattgattaccgatccttgaacgaagttacaatcaaaaacaagtacccactacctcggattgatgacctcttcgactagcttcaaggggtcaagtatttctccaagatagatctaaggtcaggatatcaccagctaagaatcaaggaagcagacgttcagaagatggcttttg

SEQ ID NO: 171795 - DNA, 546 bp, Zea Mays
cgtgctggcggccggagagaggggaggtcactagcgcgagtgattcgtggctttcaccgcggcatgaccaccggcgttgaacggacatgctaaggcgattcactgcgacgtggtagagcacctaggcacgtggcatccgagcggcaggcggccaactctgacgaggttatctggaccggcagtaaggcaagtgggtatgacgactagggcgaaacattgtcccaagctcatccccagtgctagatttttcatccgatgatcgttatttgtgtttaactgggcatgaatcgcgacgccgtagtgaatccgggcgcgagatcaccgacgacgggggggctgaacctgagatcttattcagtttactgtactatcagactttcatcagagcgtctgacagactgatttgcagggcccagatctcagttttttatgtagtaatgacttaatccatctgtatcaaagttgtagctctataaaccagctacaattcggctatagagaccttgctcatttacttactcccttgagcttgaatcgagtccaaag

SEQ ID NO: 171796 - DNA, 859 bp, Zea Mays
gacgaataaagacagactgcttgtatggatatgaaggtgggcgaggcgaataacgattttgattaaaaggtcggatcaccaaccttgttctcttttcaggcccttgatttgacctttcacctgcaaaccctgttgattttccatgtcccgcatttttggcttccacttccagtgccgtactgatagccttactgtaggtaaggtccaagcatgttgccattttccgctgaagcctgtcattgagtcccctcataaaataattcttctttttcagatctgtattcacctggtcaatggcatactgggagagatggttgaacttattgagatactgcatcacagtatctcctccttgcttgaaccggataaactcttcttgtttcatatggagcactccccctggaacataatgctcccggaacgctagcttgaattcctcccaggtaatctgatgcccaacaagttggattgctgaaaattttgtccaccaggtgctggcaggccctcttagctgttgtgcggcaaacagtggcttttgtgtctctgtgcatcgaattatcctaaacttctgttccataactctcacccattcatcggcttataaaggttcttcttctttgatgaagagtggtggtcgagtcttagagaattctaaatatgtagtatcacgcggtccttgtgggggaactctgcctccgtgcggttggaactggttgcccgccatttcgcgcaagaagcgcgtattatcagcggtggcattgaccagggcagcgatagcctcggccaaagtcggtggtactggtggcgggttgggagtatcctccctaccgcgggatgtccccgcaccatcatgtgcacg

SEQ ID NO: 171797 - DNA, 451 bp, Zea Mays
cgtatgtagacaatcccaaatttgtggctcccaaagctttactcacaaatgccaaaggatggttatcttgctgaagaacagcaccaatgcccttgcctgaagcgtcagtctccaccaaaaaaggtttgttaaaatttggaaatgccaatactggagctgaagggagtgcttgcttaagggcttgaaaagttgtgtcatgaatagaagtccacacaaatactgtgttcttttttaacagctcagtgagtggcttggcaattactccaaagtttcttacaaacttccagtaatatccagcaagcccaagaaaacctcgcaactccttggaagtttgaggcacaggccaagataccactgtttcaaccttggaagggtcagtggataccccagcttggctgataatgtgacccaaatatgcaatctgttgtcggccaaaagaacatttagacaa

SEQ ID NO: 171798 - DNA, 518 bp, Zea Mays
tgtgcctagccccagatgggtgatgcaaggaaacacaagtctttatcctggttcaggcaagagaatgccctacttccagcagagaggggatgagacttatattacttgcacctaagtgcttgtagtaggggctacaagctagtcgggagagggagaggatcctaagtccctggggatgattgaggcaagtgcaaatatcagtgtggaggtgaaaaccgtgaagtgttctctcctccttgaagccttgggctcctctacttatagcctcaaggagggctaccaggagcgccatggtttatcgtgtatgggagaggagacgtgtccggacccctatagccggtatggtcgtcagtatggccttcatacccgttgttgacttgaactgggaggaggacgttcagtccctatatttgcatctcgatcgagctgagtagagagtcgaggctagggtctagggctcggtcgcgtacccaagcctgcctgatgggggtgttgtctgagtcatagttgttgacaca

SEQ ID NO: 171799 - DNA, 622 bp, Zea Mays
gagaaaatttggtggatgaggtttatggtattttttccattctgtgcgaccagtggggtgttacagtcatcacggggaacaagagcaatgtaacaggcgtccccatgaacatgacggcgacagtgactgagtaactctggtgatcgatatttcactgtagttgagttgtcatgcatgcatactgtaaatctaaactattaatttgttgctgctgctacagatgccttgggtcacggcttcatagcatagaacctgacaatcagaaacatggcatggctagaaaggagataggacgtggcgctaaggtcaaattcaaacaagtccgtcgtctaccagtgcagcatggaaggtcatgaggacaccttgtacgcggagaacgggatccagttctacctgcagaccttgatctggggcactgtggacttaatttgtgtttggcaatgcctaggccatgttccagagctacctgctgctggtgcaccgcccaccgaaaggcaagcacaatgtgctgacggcatttggctgcaacaacgctagccgcgagtccgacttctcgttccacatgtgcaccgtggaagcggcaccgggcgtggacctcgacggcgtggagacctacctcggc

SEQ ID NO: 171800 - DNA, 652 bp, Zea Mays
cgtggtaaatatatagcagaactattagaatgcatgtgaaggctatattgtactgcatgtacatactcaaatcgctctaaatatttattttgcgttgaccttcggactcacggcgagcgattaaatggtatagtgggtacacagatgtgtcgagcagattacattattaatcgactgagttaaaacattggctaagtattggctgcgccctggtaacacgacgcaatatttatgtcgtacgatcttggctgcgtcatttgattgctatgtcacactctcgcttaatcggaccaatcctgttgagtcggacgtcattatcgagtcacgtatttttcgtatgccctgtaggcattgtttgtctgtctgccgcgagccacaattgcgcttgttgcgcacgttgcgtggatttatcatgtaccccaattaccgagccataattgtgcatgttgcgcttattacgaaggcttgctatactgtcgtagccctgatggccacacacgcgttgacgccagatacgctagagcttgtacccgcgtggattgtggtgggttgttcaaggtcctgaagtcacattatgtgcaaccttcgtaaacaattttgttttcactttatattttgtttgattgtgttgtgtggcatcgtatatttatat

SEQ ID NO: 171801 - DNA, 549 bp, Zea Mays
atagatcacaggtgcaagtacaattatgagctttttcccttaagactttatgtggcataatggtagcaaaaacagtaaatcggatccacagctgggataggaggtatggcaggtgacagctcaaccaaggaatgaaatgtgtacatgttttatttaagaaacccatactgaatttacaacaagatgaatagttcatacactttgtaaccaagaaaatcaatgagcatggtcccttcagaggtagtgtgatgaggcctgctaaatgccaagggattgacaaaccaggaaggttgatttgcaagagcttgaactaattctcaaaaggccaggccactcacgtggtggatatgcatgcataacacctctcttgcgtgttctcactttatccaaaatgatatgacctattgtaactcaagttacacaagcaatgtggtatccgctaatgcccaaaatcgtgcccctagagtgagaaggtgaaactgaagtataacttacgacacattagtaacaagatgtgttaattacataactcacaattgctttcagcag

SEQ ID NO: 171802 - DNA, 931 bp, Zea Mays
gaaaaacttgcgttgggccgaatccctcagttttggcccaacccgccacttagctcagccgcgctcccggcccaaaaccccaacccagcgcctcacctgcatgctcttcgcccacacaactatgtcactgccgtttggggcccgcctgtcagggtcatcttcaacatcgccacaatagacttggtgtttgttcatcttgatccgtagatctcgggccgagcttacgggtcaccgcctcctttttcgctcggaccttgcccctatcctctggtataaatactggccacgactcccccacatccagttgtcgctcccgtggtcagccacatcaacggcgtagtgggcaatggggggagagtgggtccgccgccatgaccccggcaccgcgcctcctttggtgcacaaccgaccatattgtcgccgccgcgagactctactggtggccatcatcgtcctccgcgtatgccgtcaaggctcatgctgcgtattctggtatgtgatcctctgaacctccgcctttaccacaagtagcatgtgccatcaggcttggagcaggatcaacgcaggggaagagggcagccaaaatcatggtagtcaagtactcgatccctttgctggcagtacaattgggcccgtgggcgcggacgcagcgatcgggcgcgccggcggtgttgaacgccactgccagggtgctcgctaggccgcgacgtgactcaaagaagacaagcgcgatcgttggatcgacgttgagcggctacgattagatcgcctgtgaaccaaagcggggcggttggatcgtgatcatgcgatccagatttaatacagcgtacccattcgcttggatgtgttgcggccatccaaatctaatccaatggccaatatcgcgtaccggttcgcgggacttgggatctaatctagggcgttgaaaaat

SEQ ID NO: 171803 - DNA, 402 bp, Zea Mays
attttctatatatgaaacgcggacgcaaagctcgcatcccgtttgtccacgtcggctcttcatgtttttgccgcacgatgcccctccaacggccagcaacacacgtcagtaagtgcagcggtcttcttcacggtttatctgctccaagcgtctggcggtttctagacggggcatgaagtggcgcttcaagaaggaaaaactcccttgtcgctgctagaaagcggacgccaccgtcacagccgacgaaagctactccaggtacggtccctcttcaccgactccctccccatgcgctgtcaggagcagacaggaggcacccatcggagatctccacggccatggagacgctggccaactttgcacatgttgcaacttttaccggatcagaaatgatctcccaga

SEQ ID NO: 171804 - DNA, 433 bp, Zea Mays
gaagaaatggccgggctcttggatgcaggagtggttttatgtgaagaacgacctggatcagagggaagatataaggggcatcattcaacgtcctatatggtcacgcctcggcatcagaagaccttcagccgcactcaggaatgacgtgcaagcgtgccagacgactttcaatactatatgcacctatatcggcatgagggatttgatccaggagcatatttcttacagagtatggccccttgcaagtggatgggaaatgccgaaggaggctgtagctggctccagccaaagtggcctgatttatctgaagtacacatttcggtttaggggtcggtttgacgagccgaatgatgattggttggatgctatagaggcaacaagtgatgagctgcttggagcctactcgagggctgaagacgaagctatgacagtc

SEQ ID NO: 171805 - DNA, 520 bp, Zea Mays
aaggcgttaccacgtcgtagtaaaccactgaagcatgtccagtcatcgccggtgaccttgccacggtgaaagccacgagtcctttgcgcaagtgctcttccctctctctggccgccagcacgccatgcccaaattaggagccaccgcccttggtccctataaattaagcgtgccatcagctcccctaggtaatcacacacccaacgcaacagcccatgcctcagattatccaccagagcactccaattttgaatttcccccaaatctgtcaagaacaccgtagtgtgtgagctcgtcgtggccagctctccacaggtccgatcatgccctcctcactcttgtttcagctctcttatatgctcttgatgcttctcgacctggccaattgaattagaccgtgctagatcgccgggaacgcctcgggttatcctcagtttgcgccatcaccgtggacaacacgatttagagttagaactctgcaattgatggaggggaaatggtcgttaagggtagaattagg

SEQ ID NO: 171806 - DNA, 599 bp, Zea Mays
tggggcgccggtgttgacctcgcccacggctggcgtccgggagtccgtggtgtgccgcggtgcttcgggtgcttgccggtggatcacacgttgacggattggggggaaatcaatccagtggcggccagaattcgtcatcgcgccattcatccgccgtgggaagtctagcgccaattcgacctccgcgttcggtgagctctcgattctttaccctcgctgtgttcccttacctagctaatgtcgcgtcgtagttaatcgtgggtgaattgggaacgaatttggcctttgtgcggggaatgtcgttcgggcgccgcccgtatcatggtcgggggtgttcggctgcgtggaggtcggcgaaatcattcccctgtgttctccttgagttccgtttagggctagactagtttgatttgggcaggcctcgtcggccatatggcgcggccgtgggcattccctgccagagggtgctcggctcaccgggagagcggaagaaaggagaaagcaccagatccgttgatctcaggatgaacggcccggggtcagatagggtttcgaccgtgggatggttgttgtgcggctcagatcaaacggtagtatac

SEQ ID NO: 171807 - DNA, 1028 bp, Zea Mays
agggtacggggtgatataggccgtccgattagaaatccaaggtccatatcagatccagacataaagtgaaccggtatgccacccaagccgttggatcagagatccacggtttacattttaaatacacacggtcgccctggatccgtccgagttgagatcgacggcccgaacgaagggggtatccccgatctaatcagaaccgttcgtcaatagatcaatggcccaggcgctaacccagctgcacatgcccaacaccggccgccggggtagctctacgcggcggcaccattgccggtgttcaggcgatctggggagccgggctcgatactagttatttcttcgcaaaaggtggagaggaggtccaggcgaaccttacgggagggttccacattggtgacgaatgcggtgacagtccgtccacagcgcctcgcggcaccgcgacggtgagcaggagagctggacgaacgagggggcagaatcgagcatggatgggttctacacgtggagcgggttgaggcgaactcggaggtggtttgcttaccggtgaaaaatggctggcgcctgttgactatggtgtgggtacacccggcgacggacgaagcggacctcggtgagcaatccgccatggacccaagcatccatgcccccaaaatccaccagtaagcacgaaccgtgacttcacaagcttgcaacctgacggtggccgacactctctctacgacggagctctcctgggcggcgtgaaaacctcagatcctggtggctgggttgaggagcggatgaggcggtcaagtacccacgatttatacacccagatgcgctacgatcggggaaattgggtaaaacgacagcgcgatatcagagccaaggcggaatcggaaatccccaaccaaatcgcacgcgcacgcggcttccgcggatcttgttgctagcagtgagtccgatttgaggaggaagacggctgacgatgtggacccaccggtcagtggctcgggtaggagacacgcacacgcgttgtgaagaatgag

SEQ ID NO: 171808 - DNA, 570 bp, Zea Mays
catacttcacaaaatgcaaatgtacaaacaagcaaatggttccgctcgcatgcacaaccaaccaaaagagtgtttttcacacacacacatgcgtcagaagccatcattacattggccttactccaaaagtcatgttcctactcctaggaacactatccaaatgggttagcctatcctctagtgacagctaacaactacacctgcacgctaccggtctcggagactacacctccatcattggctgcgacggtgtctgcttcttctggtcctggcgggttgattggattgagctgggcatgaagctggtgaacctcctcatgcatattagcatttcaagcttctgcattgttcagctggtgcattaggttgacctgtgttgccctgagatgtgctacctcagtcaaagctacattccttttctctaatgatttccaccagtaaggtctggagtcttggcattcgccaatacacaacacattatccaaaacagccacatctctgacctagacttcttcatctttctcaagtgtaatttgggccaactcttcctgcacctaggctaactctgca

SEQ ID NO: 171809 - DNA, 981 bp, Zea Mays
cctagcccgttaatgttttctaaagtataaatataaagtgaggaaccggaatgaaaggtttctacggctctgacacggacacggtgatacctctggtttctgtgggctggctggtgtttggttggctgctgtctgggggggttagttctggcctatttcattgtttcctgtttggacgaattattggcatagtctatgtacatacgcggtcatgggcattgggtatataccttttattatgatagtcaatagtcagttctcagtatcctatgtatgtcctccactcagaagcgcaaagctgaaggctgaagtcgtgtgtttacttgaccttgccgtcaagtgcttctcatctaaagccagccatcgctaaacgaatggctccatatgaactgaggtaacctacggtggactggacaaactgattagacgcctttttgtttccctgtgttcaaagaatcagctgcatccatcattgtaaaccctactccagctatgggtggggacatcagacatgcagatgcagagtaacggatggcccaccaaaacacctgatcgtgtcgtagcccagcactcatggcgcgatttcgcaacaaagtgtgcttattagacatggcctatatccttcgacttggatagaattttggggaaggcgcccctgggtgtccgtccacatctactatttttcttggctgctggtcgaaaaccaaaatcttaggccacatcgtgcacgctgttccttttgttccgttctgacttatgtacccactaaaatgtcattacctctttgattgatctccagtcactacttaagatactcaggtgtgttcgtccctggccttgcaaagatcgctctcgcatgggagcctcggacgtgtccgccttcttgtttctgccgtggaggcgcgcgcttatctgcttgactgcttgtgcatttgctgctttcatggtatagctgccgccggcgccggcgtatccagtata

SEQ ID NO: 171810 - DNA, 563 bp, Zea Mays
ttctccccactcgagcaacccttcgcagttcaccaagctgatcgcccacacatggccacttcaacgctggggctggatattgtcgggccactacctacagctcaagggaacctcaagttcacaccttcgtcgccgtcgaatacttcaccaagtggattgaggccagggcagtatccacaataacgtcgaagaccacccagaagttcttctggcaaaacattgtttgccgattcggagtcccatctgagctcacagtcgacaacagcaaacagttcgatagccaggacttctgcctccccatcggcaccaagcctgccttcgcctcgatataccacccacaatccaacagcgtcgtcgagcgtgccaacggcaagattttcactgccatcaaaaaaagacttctcgacgaccagaagggtaaatgggccgaccaactacctgaagtggtctgagccttaaacacgaccgaatgctgggcaaccggattcacaccttttcgtctactatattgatcggaggccatgacgctgcaggagataaagcatgggtcaccccgaacaagc

SEQ ID NO: 171811 - DNA, 501 bp, Zea Mays
ggagtcgaggatctcatccagtgtccttaccccaccgcggggtgtgccgcgggctcgagctgcgggtggcccagaggtgtgtacttcctcccggggcttcttttcctagtgtttgtctggttgttggttgtctttccaaggaaccagaggtgtgggctttgtgcctccaatgaggtcttgagcccgctcatccacggtgatgtaaatgaccgcctccctgaacagttgttcaaagatggcaggtgtttttttggagtatagctcagacgaaaaccgggtaattagatccccgatagaagtcttcgatcacagctgctttggcatcctcggggatgtagttcctcattgtttgaaatcttctgaggaaagagaggagggtttcatcgttttgacgcttgatggatttgagatcttatggctgcgccggtttgtcggagagtgattggaagttcatgacaaaccagcggctgaaatctccccaatcatcgatgtagtgtcgag

SEQ ID NO: 171812 - DNA, 672 bp, Zea Mays
accagcaaactttgaggcgttatcatgataagaccatgcgatgtcgatccttcgcagtgggagacctcgtcctccgccgaattctaacgggggagggacgacacaagttgtcacctctatgggaaggaccattcatagtagcagaggtccctcggccgggatcatatcgtctcactcaaatggacggcacggaaattgggaactcatggaacatagaacaccttaggaagttttacccctagatgtatttcaaaagctatcgggacgacaatgtactctgtaaactggaaatatatcatcaataaagagacctcaagaatacccatattgttcatggtcgacctgcattcttacttaactcggggtgaccactatgccctgctaacggagcaatcgacttaagtcagcaacaacttaagacggtgcaacatgctcgcgcttacttaactcggggtgaccactatgccctgctaacggagcaatcagcttaagtcgacaacgacttaagacggtgcaacatgctcgcgcttacttaactcggggtgaccactatgctctgctaacgaagcaatcgacttaagtcggcaatgacttaagacggtgcaacatgctcgctcttacttaattcgaggtgaccactataccctgctaacggagcaatcggcttaagtc

SEQ ID NO: 171813 - DNA, 532 bp, Zea Mays
gctcaatgtctacatatgggctctctgtagccaaggtaaaagtgcgaataccgaaggattctaccgggtgcatgagctgcactatcagacgaaggctagagccgatggtctacacaaaaatttttggtgttataactttgcataccggaaggacaccaagcccccgatgatcacctaccgcattaaatggccgactaggtggactagcgaatggttctatgtgaaggctaatgagtagaagagagaaaatctcatgactatggtaatgagtcctctgagattaagcttcggcatgacgaggccactgtgcaacatgcaactcggctcccgatgccagctggctgaagtggaatttagggtggtagctggtcatattagcactagggactgagtgcaagaatatgttgcaaacaaaacttttccaacctctagaggttgggggatgccgaagaaggaagcagggaaaaatatgaacttgttcgactcccctgtcgtttcaaatttgaaaagctattcaaaaaaccatgttctg

SEQ ID NO: 171814 - DNA, 411 bp, Zea Mays
atccaacctaataagttaatctaacctaacgaagtctaaccttaagttgagctaacctaaggacagtcactcaacaagttaacactagtgaaataaaccggatccaactcctatgaacattgttatcccctcatgcacttaaacctaaattagtgcattagaccaactcaaccgtgagcataagagctaacccaaccaatagtgtcatgatagattgcataatctgtctaccctcacctaacatcaaacaagattttgacctacatcatgtagactatctcatccatatctatcttaaccatattccccaatcccgataatatacactaaccccgaaatcaatgagaccaagaccagagaaggacaagaacaacctcgtcaagtaaagagagaagttaaacttgatcttta

SEQ ID NO: 171815 - DNA, 330 bp, Zea Mays
atttatttttgcataaaaatcattttctaattccttttatctgatttcttaactccttggactgggcgcacaaaaccagaggactgcagggggctctgcgcaatgcttcctagactcaaagaacagcacccgaggattgtgggttgtttttaaataaacagaggggctcgtttgcaaaagatacccgcgaaggggtatccagggtttcaggccgtccgattacagtcctacagatcggattgacttatgaccttttatgaaccggtacctaatcctagccaccaaatcgccatccgacggtacgcaccaacttcaatccggaccatcgat

SEQ ID NO: 171816 - DNA, 662 bp, Zea Mays
gccaaattctcttctattggcccaaacctctgcacagcccaaactaagagaatcacgtgcactcgtgtatgacgcatggggccgcctaatcagccgcatgcggggaggatagcttgggggatcaagtcagtgacacattgggcccactcgtcgttccccgctccgtccgctcttctcaactaaatcagccgcaccactggagaaacgagcaatccgcagctcaacgcgattcttgcgctagaccccaaccgaccctaggggataaatggacgcccccgtgactcgttcctccctctgttgtcttctcgcgtgaaccctttccccggggcagccgctccctgctcgccgagcggctcttccatggtgccttggtctggcgactccgctactccctccagccatctcctccctcacggctccccgcagaccggaccccagtaccctcctttgaaccagtcctccaagtgctccgtgtctatggactcgccaccgccaccgagggagcgaggtaacgccgcaaccatggcccggcatctccgcctcctttcggtgtccatggtggggtctaggagaatctccagggcgagtggattgtgaccaggcatgtgcttagccgtggtggcattcggtgtccagtgaatcgctcgccgcagctccaaggc

SEQ ID NO: 171817 - DNA, 1015 bp, Zea Mays
ccatgtaatatacacgcgaaaaatcccccgcaaaaactacgtcgaaaaagaccgcatcaacggtcttcgacattcgactgacacaaaagtcaccgcgaggggcagcgatggctaccctcgcgtgcgacagtccgcgcaaaagtcgcctaagggtgcagccggactagcacaacaagtacgtaaattcgaagtcttctcgaaaaaattatctatgcaaaagtcgcccaagggtgcagccggactagcacaacaagtgcgtaaattcgaagtcttctcaaaaagactatccgtgcaaaagtcgcctaagggtgcagccggactagcacaacaagtgcgtaaatacgaagtcttctccaaaagacaattcgcgcaaaagtctcctaagggtgcagccggactagcacagcaagtgcgcaaattccaagtcttctccaaaagactacccgtgcaaaagtcgcctaagggtgcagccggactagcataacgagtgtaaaaatcgaaggcgcattacatcagtccgaaagcctacaggcgcagccggaccgacacaataatgtaccagaccgggtgcgcaacaccttacgaacacacccagacgcgcgaaggcagtcaaccttatcatacaaactacagttacatgcgtacagcgagggcgccacaccttacataggctcaatcttcggaatgatccccatctccatatagttaaatagcattatcctcagctcctcaccctcaaaaagccttcgcaactccccttcacccacactcgccccaaccggcgaggacaacaattcttgcctaccagccctgcccacacgaagccgaccaccatcaaacccgctcactctacgcttcgccaccgcccttcgccgcctgcgcccaacactcggaccaggcaaaatttcagcatccgtaacacgcggagaagcctccacctcagccacatccaaggccgcaaaataatctaagccttcatccgaagactcttccgtccacaaaaccgaactcccag

SEQ ID NO: 171818 - DNA, 657 bp, Zea Mays
cggtgtctcaccctgctgaacacccgtacggcaccagacttcggcacaatatttgcaagcccaagcaacacacagatggcacttttacatactctgtggtacggtcctctgattcagctcctacttctcacatttttgctcttaatgatcctctttggagacgggctatggatgatgagtattgtgctcttgttaaaatgctacttggcaccttattcctcctcgacctgggttgaatgtggtcgattgcaaatgggtcttcaaaataaagcagaaacatgatggctcggttgatcgctctaaggctctactggttgctagaggattcaagtagcaatatggtgtggattatgatgacaccttcagtccagttgtaaagcccactatgattcgacttcttctatcattggttgcctcttgtggctaggttatttggcaaatcgatattcaaaatgccttccttcattttttttgatgaagacgtctatatgaaacaaccacttggttttgaggattccgcttgtccagattatatttgcaagcttgataagtcattgtatggcctcaaacaagctcctcgtgcatagttccctcgccgaagcactacattacttgccctgggtttttcggcctcaaaagcagatatatctttgtttc

SEQ ID NO: 171819 - DNA, 738 bp, Zea Mays
tagtgatttggcggcagtagtggagttgttaccggggcatattgtggagtttgggacatcaaggatctactcgggccacgtgcaggagacgcatcgtttggggtattttagggatggtgtggggcacgctcctggagccgaagtggtcccggagccggaggggaagttggttgtttttgtggtgtctttcactgcaggacttcgcttgcccgtgtatcggtttgtcgtccaagtgttgcaacgcttcgaagtttagattcatcagcttacatcgaatgccatggtggcattagcgaaatttgtgtgggcagcgacttcgtatggcggggagccctaggtcgaggtttcaactagaattattggctccattggcagaagaaagttattggttgcaagattgcacagtttatacatgcactttcatgccaaggactgggaagacttcgggtgaggttgtggagctcgtgccatgcgccaagaataaatggggaaactggtggtacttttggttttacgtgacgttggaggacaccgagggggttcctgggctgcctccatctattttgtgctcgcacttctacatcgcattcccgtagtttaagctgaaaaagtggtataaaagcaaagatgcccttcgacgcatggctaggatgagctgtggtcacgacttggtggaagagttcattgcatgtggggtatggccacttgcgcatggctgggatctgggtgcggtaaagc

SEQ ID NO: 171820 - DNA, 862 bp, Zea Mays
ctaacatccatggtagcatagtttttctaagggacatatagcgtatggtttgtttggtgaagctacaaattcaacttgagcccaatagatgtgtacacatgttagatactactggtgataccatacaattgcattgtcaagtaataaaaacataaagccaatagaatgtgcacggcagtgcagaataaaatgtcagaaagtatacaaaagtgcttgccagctcaatctccgacagagataattaatacccagaaacaaattaaactgcaagtatgcagtatcatgtagttctcagaaacaaatttcagcagcacaagcagtggtgcattctattttgttgaaattggttttctctttgaaaataaagctctggtttactaatagaaaaatactggccccagagataggacatgcatagcctcagtagccccaaatggcatccaaattgtagacagtgcatcagcgtctatggataagataaagctcatcaacgaatgagtgcaaaatttagatcaagagcacccgcaagctgatggctcagggcatggtcttacactacctaccagcataaccactgcactaaacgggtactataaaatctcagaattgcaagtgccccatatttcgccgcaatatgagaacgacagtcaggagtcttccccagatccaaccataatgtagcaaccaacaacaagccatctcaaccaggatttcaagtgttgaatcgatccatcaaatgctaacatgtatgtacatgaattgaagtgttgaagcaaagtgaccgaattaagggatctgactactgacttactgagagcacgagtagggggcactcgctggtgctggtgcggttccacttgat

SEQ ID NO: 171821 - DNA, 582 bp, Zea Mays
actgtcgaatactggaatgtaataagtttggtgcaaagtatggttaaaatggactgcagttaattcaccattttggctcctaggatagaaagtattagaacatttttccgtagtatttctttacaaatgctacaaagcattttgacatagaattatgaaaataatatttggttaagctcattcatttggaatataattcagagtgaaaagaatatagtcctgtttgtttccattagttctgagttctgactatgccaaaacaggagaggtttgtggcactagaatttgctttggcaatgatgattcacatgtttattatagcattctggtcccgtatcttggttgtggcaaattgtgctaatgtgcacagaagtaaatatgcggattagaagtagaggtaaattatctgcgtttgaacgaccttttgttcgagaaaaaaaggtaaattatctgctgtgtttcaaagcagaatcaatatggtacagttttacctttattattgtttacctgaactaagttacttattattccctcggtctgaaaaaagaatgcaattctaggtttggaacaagtcgaactttc

SEQ ID NO: 171822 - DNA, 672 bp, Zea Mays
ttaacatagtacaggggatacagtgctaaatgaagcaattgagttaacaaaaaaagaagggaaaaggtggtgttgctcctgctgatgtataatttaagggttatgtcatttggcttagctaaattgttaacagatttggttagggctttctggtgggttcctttccttgtgactagtcaagactcaagaataaaccaatatcaatatgaatttatttcctgcattgcaatattcccaaataaagctagtccaatttggttccgaagaaaagaggttcgctttagaattaacaactatggttttaagtcgtacaactaatggggcatggccatgtgcatgaaaaggctggcataaggtgactgattgttggatttttcacaaatgcaatgagaccaataatgctgataaggaccattagcactaaaagcaattttagagaagcctaaccacttgaaatctaccaattagccaataagaaaaactataaataaaagatacattatactagcaaatagcttgatttcataccatgatgtgttcaacttatgtccatatgcactttaattatctttatttagaagaatcttgtatctgctctgacatatgcgctgcagtattggacgtatctgcatgtttcgaaaatgaatacaacagttcaaaggaaagcaaaaa

SEQ ID NO: 171823 - DNA, 799 bp, Zea Mays
gattaatttacaatgaacaagaaattatgcatcaattgtaacaactacccaaaaatcatgcatcaaattttaactaacaaactaattctaataatatgcatcaaagaaagaagaaaaataccttcacggagaccgtcaaggtggtgacggtcgaggagacgcgggcagacctgtagttagagtggagagagagaccggagactagagtcaaatgggcctacaattagatggaaacacggctttaggtttcataaaaaatgcaacagtcaatgcaaggaggtggggtgttgcttgctgcttgtgttaaattttatgcgtttattaaaattcaaaaataagaagctggcctcacattgagtccacttgatgtctggcaaccagtgcaaggaaacaaggatatatcaaatttagtatgacactaactaccttagaaatttggagaaactttgcatagaacaaaacatagttcaaaaattcgatgggagtttgcttctaaagctatatccaacaacttacacatctacatctgctattttaaactctactctataaacaatgcaaaacattgttttacacgaccatatgtacaatctgttacttcaacaagagtacaagatactaaccctgtctgaagcaagtccccttgtaaatgatgttattggctcaccgccctgctacccagtacccagccacccaaaaaaataactatacgcagctgcaagttttttcttcctattcttactttaggacatctgcaacttctgaattcaaatgaagaaacaacacccatgcaacaaag

SEQ ID NO: 171824 - DNA, 821 bp, Zea Mays
tcaggaaagattcagattaccacaggtttttttcaacattcctattttattttggccagcccatacgagtttagcagatccacacttgtagtttcacctacgttcttcatcctccgatttagcccccttgtgcaacaaactttgtctgtaccattacagttgtaatacacagcaacagtcagtactcgtgctttcggaacaactttgaacccttctttgtgcgtcatgtttctacgataggctgacggcccctacaagtaatcagttcacccgtacatgctaatggaacaaaggttttcaaactcgtagcctaacattacccatgacaccaaatctatttccccactgatgttgattcgactgaaccagctgtttattaagtgaaccaattctatttctgccgattctgtggaatgttaccatttcgtagttatttagtcttctccaatataaggcatttcactgacacactgattgttcaatacatttcatcacatgttcatttacttttgactatgattttttgcctgatcatgtgtctgcctcaacatgtgtttgactatgattacatgtctgattatgtaatgttcaagacttgaaccatgtctttctgtcatgacaatagttgtaacatttctatctgcatgttctactttccttttctagttgtgtgccatacacttcccttacgtttaattgtgtgtataatgttattgctttatgtacaatttcatgtacctgccaacaaacatctaactgatattgacaaatttattgttttccagtgtctgtttggtttatgattctaactgtacaaggca

SEQ ID NO: 171825 - DNA, 646 bp, Zea Mays
aacaaccgacaaagtacaccccgcgttcagtttttggacagcaacctagctgagttcaaaatgtgatatctcctagaatataccaccgaatcgaacgcataagtactctataaaaagatatgacaaagctccacatgattttcacagcgattacagctacttacccccacaaaaatcccagaaactacccacactactgctgtcctcccgccaggacagcactactaccaattcgcctaggtgaatggataatcaaatgtaattgcagcacaaatacaaaataaacacaagatcaccttgagttcttccttcacccctttcttcttcatcccaccaattctccaattagaggcttgcaccaactcgatggagatccaagggagaagaggtggctgcaccttggggaggaggagatggtgagggcggctagggttgggtgtgatggggggcggctgcagcaatgggggaagggaggaagagagggagaggggtgggtgcaagaatggaaaagagaggaagagagggagggggcggccataagggtgtgaggagagtgagagagggggcggctagggttagggaggagagggggcctcccgtccattggatgcgaatcaacgacccaaaactcactctctcaacagag

SEQ ID NO: 171826 - DNA, 1100 bp, Zea Mays
ttagactatatttaatactcgtaattgacatttaaacacccaatatgacacggactaaacttttagttagttgaaccaaacatagtcaaatccttgttcacaaaccgtggtcagtgcccaatgaatttgtttgtgctaaagttgtgggcttacaagttttgaacacctgtattggccatagggcctgtttgtttcggtttatggccaaattttggctgttaaacgcttcgtttctcagtccgcttctgtgaaaattgctcaaattaacgtgaatacatcatggttatcaaaaagttgcttaagcaccttttaaacgccttttaagcgccaaaacactctaagtgcctaaagcgctagaacgtttcacgaacagcgtaaaacactcgttttaggcgctacaacactaattttaagcgctagttttagacgtttaaacgctatgggccgtgaaaagtgacactttaacactttagggaggtccagctccacccccagcccacgagagaatcatcgtgcaccctaaaatgagcctgccaggggtcatccaccatccgctcgccgcccctgcgcctgtgatctaccgcggcaaggaagggagattgaaatgttggttactaatattcatgatttggatgatggttcctgagagatcatgatggaagggagattgagagtgatgcttgtgtcattgtggttgtgggcatgtcgttttagttgattgtgtgcatgtggttgttagatgtcattttagaagttgccgttttagttgattgtgtgcttgtgattatggatatgtcatcttagaacttgttttatgggagattggtatttcccttgatattattatgtgagcttatgttatgttgacattttggtcatgtttaaaaagacgttttaaagcttacttaaatgttttaaagtaaaaaagcaatcatgattgcttcaacgttttatcgctttaataaccatggaatacagaatccatcgagtcatcgcgatggtaggaatctgctgtttcctaaaccgtgtagaccccgctcccatattccttcgctcgcaagttccgcgatattcagattctgatgacaattggattacac

SEQ ID NO: 171827 - DNA, 414 bp, Zea Mays
gcactatgggggctgcttcaatcctgatgaggactgaagcctgagcccaccaccattatggccttgggtctttagccgccgcatccattgagcaccagtgccacagcgatacagggcacccatcgacattgtgaagtattcaggagaatcaaacaccaacctctagcttggagactactgactggcgtgccttgcgggaggggcagaccacgatgatttcataatacacaacctcccctgtatttggcggagtcaccacatgcatggctcgagaacctaaggccaggttgtatccaaaactggaccaacctcgaggatttttttgtcgaaaatttccagggcatgtacgtttgcctaggcaacccatgggatctcaagaattgccgacaaaagccagacaagaccctgagggac

SEQ ID NO: 171828 - DNA, 707 bp, Zea Mays
gtttgtctttgctctgttctaacttgagcttgactcattgtatgtacaaaccagtgcgaggaaagtgcatagtcccattatgtggaacgaggttctatcttcgaatcagcctatgcatcatgttcctgaggaatagaaaatcgcttacatcagagatctgcacccatttgagaataaggtatgttccatgtttcattcacttagtcactattgccttaccaactgtcatcaactgtcatggtcttctgttactgttttcctgcagtcgtgccatagttggttggatctgggaatatagcatgagcgtatatttacatgtttgtgcaggatagggaattcttggtgacagtcactgtaaaaaagattggtgataggtggtggtacaatgcatgcaaaaaatgcacccgcacaactgtggctcatggggattcctacaagtgcagcgatcaagtttgcgctaccattggcacgcccaaccaaaggttaggagacatctcttcacttcaattgccaccattatacctttgcctcccaacaactctcgctattttgactcccactcacatctaatatgcagaagctacttccctatgcatcaccctgattgaacgtttccatttcctatacacacggcctacccattttcaccgtgttgactcggtatcgccatgtgtttcaggtacaaactgcttctcactgcaggggat

SEQ ID NO: 171829 - DNA, 313 bp, Zea Mays
tggggatgaagcacacgtgaagcaagcaacggcggcgccaggattttaacggcgtgagcacagagagaattaaacggtggccccagacgcaaatcactgtctcatgtccatatcagcaatagtcggacgggtgcgtctccaaaacatataagccatccccaacgcctccatttcatcgaaaccgcgtctcttttgtttcataatggcaattgtctctcgagagggaggctagtaggcgacggcttcacgagagtggatacggggaaacccttcctgaccctttgaggtcaggggcgaaaatgtcgtgctcccc

SEQ ID NO: 171830 - DNA, 308 bp, Zea Mays
cttgcttcttgatggtccatgagcgaccattctattttgcacatccttgatgatctcaccgtttcctcataacttccctcagtaataatttctgttacttcaaccattctgtggggaccttacctatctcaccttgattgtcttatccacttcgccacttcgagagtcttgcctcaactctatccttggttatgctttcacaatcatcatctttacccttgtcgcctctatatcttaatgtgatgcttatattatacctatcctctaaaaccttctctcctccatctcaattttagagttttatttta

SEQ ID NO: 171831 - DNA, 589 bp, Zea Mays
gctttgtgtatgatactgaagatcaattgttgtgcaggttccggcgtctgggcctgcacaagcaaatcgtgatgataacacgaatgatgatattttgatggatggaaatgtggtgtttcttagtagtgacacgtcttgcgaatctgatgttgggttgtggtcttcggaaggtgaaaagttggggagcccatttgcttggatagatgacgaatccgtggaagatgatttagattattttgtgacgctagatttagctgcggcggagtctctgttgagggccgccccccttgaagcgccgacgactttggtcggggtagcccctggtgaactgtgggggtgaaaaatatgggggtatcaaaagaaagtgtcagagagtcttcgcaaggtattagaatacatcgccgaatgggcatggagaggttgcgtcttcggatcggaccgcgattggatcaagttagccatcgtgacttactggcaccgacgactgggtcatgcttcttggagagggatctacgggacctttctgatggtgaagagttgaggttgatgttgtttaattttcgaaaagatggtcttattccgaaacaag

SEQ ID NO: 171832 - DNA, 785 bp, Zea Mays
tcaaaactctagaaaatattacaggaactatggggtttatcatttttgcctgatagtttatatttcacaaagtctagcaaaattggtttgactaattttggatgattattcttcaagttacgcatttattaagttctctgcaatatttaaaagaaaagtaaatttgaaatggaaaagaaatacagatttgcgttgaagtccctgggttttcttcccccttttctctcacaaaacagccctcggtctactattcacatgagtcactaaccttacacaaaaccccctggacttaacctaaatctaacccgcgatccttggcttgctgaaacagtaactggggcaaagatcacggcggtgaggcttaccggcggcagtagagctccggtggggtggtcggtaacgtcggggcggtcacggcggtcacgtcgatgtgctggtcggcgtcagaggtggctagagctgctttggccacgagcacaggcggcggaggtcgtcggcggctcctgctctggccaaaccacggcggtggggttcaattaaagtgcacgaggagctccactgggtgatgtagaggccatctgctcaaggaattgagaaatggtgcagagggttactcggtccacgcgctccggcggggttacgaactccggcgagcgtgagcgcactgttccggtggggctggtcctcggctcaagctcgggaaagcttcacggcctctcgaggaagctattcgagggctcggatggagcggaggtgggcgggaaagggttggtccatggcgggcg

SEQ ID NO: 171833 - DNA, 1856 bp, Zea Mays
ggacgctttagcatctcttgctagagacagccttagggttagggtttagggttcgaggttagggttagagttagggttagggattacggtttgggttaggcttcaaggtacgcacccagtctaagaagggtatcctattcctgtggagttggatcccttgatcgatgcaatgattcatcaagaaattgttgcatgtatggtgttacctcgtcaaggttggtcaaatgatatagcatgacatggtgccattcttcatgtctcatggtcttggtggtcgaaccacttgctcttctgagttaccgtcgaaaaatgctaaggtttgattcattttcgccatcattgtaatgagggggtggattatgcacactcaggagtttgtaactatagtaagttgttgtgaagtttgacacctcctctaatatgtatgcctctacaatggaagcctcgattttgcatttatttcctcatttccttcgaatagtctttagacatctctcgattggatagcaccagcgtccttgcacgggccccccatccgtgcctcatacgggacatgcagaatcaaatgctgcatcggattgaaaaagccaggtggaaagatattctccaacttacacagttacatgggtgcaattctttccaagtctgcaatcacagttcgtgataattcctttgcacaaatctagcggaataagttactcaattctgcaagaactagacagacatgcttagggacatagcctcgaaccatcaccagaagaattcgtccaatccatatgtggtagtcatggatcttcatccccaagactcgcatagtagataagttcatcaccctactcaggttagttgcatatccatcagggatcattaacatcttgatccactctagtacttccctcttatgggccttgctcaggacgaaatcggccttaggccttctccataacattccactactaggcgacttcatttcttggtttggtctatcacataacattgctagatacactcttgcctttacgttatcctttgacttatcaggaatgttcatgattgttccccagattgcctcggcgacattcttttcagtgtgcatcacatcaatgttgtgcggaaggagaaggtcatcataataggggagccaagtcgcccaacttatgggtccacatatgttgcttaccataccccacaaaaccaccttctggattgaccatgagaccatctatctattgatgaactttagcactagtcatcgttgtaggtggacggtctgtcactacgacacctttcgtaaagatcttcatgtctagtctgaatgcatgttcaggagggagaaattgtcgatgtttatcgaacaatgaatatttatcacccttcttcaaccaaatgaacctaagacttcctagcaaactaggcatgggaacttactgtgaacacaccaggcaaagaatagcccatatgccagaaagtcatgcatggagtactagtaccaaacatgcattttgaagtttttctttgtagctcggttgtatgtccataccccttcctcccaagaacggaccaattcatcaatcacaagatccatgtacacacttattgtattcacctggtgtctaggaattatcaatgacaaggacacatctgtcattgaaatcatacaccgggggaagattgagggggataacgaacacgggccaacatgtgtatggggcagccaacagtccataaggatttaacccatctatggccaatgcaacacatacattacgagcctcatcgacttttgcatggtgaatggcatatgaaatcatgaaataatgacctcatgaaacttctatggaggccgactaggtctg

SEQ ID NO: 171834 - DNA, 1095 bp, Zea Mays
cccctcctcgcgcccgtgtcctccccctggcccatctccgacccacccctcgccctctccctctccgccaacccggccccgcttgtcagcaccatcgtctccctcctcctcaggaactcaaagtgctcgcacccttgccatcgatcgccatcctcctcccccttgctgatagacacagttgagctgggcaccgttttttccctcgcccgctgtgcgcatgtacctacacgccaccatcgtccttcaccgtcatggcatcacatcgccacccatgtgcgccaccctttttcacttcctgccggcatccagctggcaaccaagctccctccccgaccgcctataaaaggaccgcccaaagcccctattcacctcgcaccactcaccatccctcctccctgagctcaatctgtgcccacgcggccaccctcccccaactttggtgagatctccatatcctcctccagccgtccagagctcaatcaagctagcgcacaagcttcactgcttcctcatgaccacaatgcacctctcctcacccccaatcaaccaccaccacctcgtcagcagcattaccatcacggtgaccctccaccccaccgtggctggccctccctagcttgcctccggccaaattgagtctggccccatgatcacccacctctccttgtgctagcacacctccccattgcccgggaaccagagcaacgacggagaaccgtcatgaacctcaccggcggccggttcgccctccccccatcaataactgctaagcgccgtttccctccccctccttctaacacgtgggcctagccccttcacgcaatcgcccattgttcccttccccgtgggcaagctaggccttgtgctcgcaccgcacctcgcccagctggcccgaattgctcccgccaggcccactagccaagaaactccttttctttttctaatttctattttctctatatacatatgtatgtatatatgtatttttggcacaaatacacaaatagtagtaaaagcacattagaggtcgcataaaataatgatcacaatattataacacaccttttcatagcaagtctttggttgatgtattgt

SEQ ID NO: 171835 - DNA, 824 bp, Zea Mays
tgttctttcttgttcttgcttgtgtcttcgattctcaggcaggaattagccctcatggcgaggtcaatcgcgcagcgcacggttgataaccagaggagaagtggtgctgcgattgcgggattctagtcgtgttgattggaagccggatcgtctgtgtgacatctccaccaaatcgatagttatcttcaccggacggaagatcgggcacccctgttcctatcaagtggtattcaaagactcgggtattactgtcaggcttaccctagtttagtttaggttttttcatcctataactccagataattgccatacaaaaagaattccgctgtcctataaccctgtttagccttgcaatttcatttcagattgctttgttgaatttgtgtccgtgttcgagtcttgttgctggtttaggtcgtgtcgtaatcgtagttcaaccgctccgtcgctgttatttgtttccgccgctatcccatccacctttcccggattacaagtcgagacaccacattactcgatttgccctcgctagccgccttgtgtgaactctcgccacgctagccctagattaggttgcaagccgcattgcattgtagcccctccttgtttcataatctagcgattacctattgcttatacctaggaggtttgtgcccctgtgctctatagccgcctctagccgccgctacggttcctaccaatttgtgcccttgaaaaccataacttgaggtaccttccataaaacgggcataacttttcgctcggtgctccgtttgagctcaattgtttatagcagattcctgactccattatggggtgacccc

SEQ ID NO: 171836 - DNA, 482 bp, Zea Mays
ccaaagggaagctcttcgcactgttgatgaggaattggcctctgctgaaaagcagcgggcagaaaccatgacgacaattgagaaacttaatcaaattttaatggaggtagagcaaaagagagcgcgacttgaggaaatgtgttctacttcagatttggaggtgaggaaattagagcaggacttgtgtgatgcaattgcagacgcgagcaagaaggctattgatgtttttcagaaggaaacaacagaactgaatcagcaggctgagcaacttcttattgatttaaatagttgttgatctagcagtaactagggtcccgactgtttgggacgatctatgaatgttatttctctttatcattatcaaacgtttgtttgttttcttcatttaatcatgaacgtgttagaccttttattatatatctttttttgtagaaataaaaatattctatatggcgtcttttttttgtaatatactctgtggc

SEQ ID NO: 171837 - DNA, 509 bp, Zea Mays
aaagaatcaaaggaggcattggtgagcaaggtatgtcgtgcttgttagcaataacggtttgcatataattatgtaaataatttgtttaattatgataataatgtgttataggcaccaaggacaacaaatacattatatgggttcgaagtgagagtctctagagcatacaccagagctgttatgaatagattcgaggaatcaatgaaatacgccactgcatacaaaatattaaaggacctagacggatgtgataatgaatggatcgtacagcatacaaaacggtctaataaaattgtgtggggacaacatcaattcaagatatcagcagacatagaagctggggagtatacatgcgagtgcaaacagtgggaacatacaggtttgtacgtattatgttggttagcataaaaaatttgcatactagagaatttgatgattgtagtacaattaatgtatatttttgaaataatggttcgttttcatgttttcaggtctattgtgtgttcatc

SEQ ID NO: 171838 - DNA, 535 bp, Zea Mays
gtgaaggtctcggcgatcgtcgagtcgcccaactacgagactctcacagtggatgagctcttcagcaagctcaagtacactgaaattgaccaccagactcgagccaagattgagaaccctggttcacccaccatggccctagtctttggaggtggttctgcttctaactcctcacctgctatgtttgctctatcttctttgttgtctattacagaggagcaggtggagagccttggggatgaggagctggcacttgtggccagccggttcacgcagttccacaacaaacgtatgagccggcagcgtggcgggtccaaggacagatgctacaactgtgacgatcccgaccacttcgttgccagctgccccaagaagggaaaatcggagtctagcccacgtgaccatcactctggtcggtgcaagggaaagtactcctccgacaagtacaagtccaagggaggattcgacaaggaggcgctcaagaagaagtaccttcagaaggcaaagatcaaggagtgtgccttcctagcctccc

SEQ ID NO: 171839 - DNA, 703 bp, Zea Mays
tcaagactttccctatcatctcattcagaggaagtcggagtcctgctctaaaaaaactcttgaaaaccactacttcatcatccttcagcgctggggtggtctcttctccggcaaatcggacaagtttcctttcagcttccccaaagtagcccaacttcatcatcatgggcatgtcagctttagacacagtagatttatcaaaatctagatggctagggtttgatgggatcaaaatactaaaatcttcttcatcctcttcaatatcttcttcttcaacaacattctgatcagcttcggcaacagcagtaccttcgtcagtttttccctccatcacaactatacctgattgtttcataactttggaaattggcactgtctcggtggcctcggtctcttctccttcacgagtcacccttgcagtcgaatgtactctggccatctgatggattttttgtggttcttacgaagtttgacatttcttttttgcagttttgacgaagaatactcttttgacgaagttaactctaaatgatgaagtgttcacttgagagtgcagtgaaaaagcttcggctatggttaaattttttaacagcacaatagtgcaacgacaatgaatgttgtggtaactctgcaccaacctgtctgtttatatagtgctgtaggtgggaatgtgaaccgccaaatcgcccgcacccgctgaacg

SEQ ID NO: 171840 - DNA, 283 bp, Zea Mays
catctcccttctctgattcgtggtttcatttgtttgacattattggttcatgagcctagtttagtaggtgtggatttagcaatacatatagcactagtcttattatagaaaagtgcaacattattgaaattgtcacatatcataccctttttaagtgtagctatcgtccaaataatttgggaccaacaacaaacaaccaactaaataatcgataacagtgcaaggaggtaagggtgttggagcatccctagcctccacgctagatccgtccttactaaactag

SEQ ID NO: 171841 - DNA, 789 bp, Zea Mays
acgccttagtagctgttacaaacagctgttacaaaataccaagcaaccaaaccagggaaagcaggggaagatgaacatcatttttgggtgttgacacctgagagaaagcaggggaggaggaagcaggggaggacctaccagtgaggggcgccagggaaggggagcagccggccagccgcgcgcccagcgagcagcagccgcgagcggcgagcagctttggcgtgccgcgtgcagggcgcgctcagggaggagcagccgcgtgcagggcgcgcgcagtgaggagcagccacgtgcagggcgcgcgcagggaggaagagccgcgcgcacaggaagaaaggggagagaatagccgcgcgcacaagaagagccgcgcccacaggaacagccgctagccgcgcgcaaaggagaacgcgcgccaatttacaggcgggcgccaaaatccagcgccaaaaaaaccctaggttaagcgtcgcccagacgcctaccgcgcctaggcggacgccatactcgatcttccctgggcggcgcggacgcctagcaacaattgacgcctggacgcctaggcgtcgcctaggggacgccttataaacaatgatctagagtatcccgctaaagcaacctaagatgaaaaaatactaacaacagcatcagatatcttaatatttcttatgcattgaaatcttggctttcaacatatattcatgccatgattgcttgaagaggctggtcaacagctagacaatgaaaaacagcagcatcttttgttctttattatgccaacaaatctga

SEQ ID NO: 171842 - DNA, 445 bp, Zea Mays
gtggtggacccactgaacccaagaggctcttgcactgcactcgcgtggagcctgtgaggcctgcctctgaaggtgaactaaaagtactcatggttaggttctattcatagtgaaacataaaactctctgaccaagcctcaacatagagaccagaccatctcaaaaggtctactagcttgaaagggtaaatgaggtggggacagatctactcttctctagtagccactatgtcctctagcggatagaccatgtgtggactgagggtgctcttgttgcatgtaattattgtatgaaagtcctcatgcaacactttatataatccatatgaagcgtagggaaccactctacaaggaaccacaactctagcagcacaaacctcaactcatgtacccttggggcgctagcagtcctcaaaatccaaatcaacaactagaaggtggtttgg

SEQ ID NO: 171843 - DNA, 425 bp, Zea Mays
gttgttgtacttaatctcagatgttagtcaatttcttttatcaccccgcctaaactagttgatcatcttagcttcaagtggtttgacaattcatattttctctgcgcaaggattgcttgcttgtcattatggatgtttctagagtctcggctgctcatgtggcgcttgcttgtcactatggatgtttctagactctcgactactcatgtggcgccggcctatgatgccaggttgcctcttgcattggctagtgcctggctgcgtatggcactttacgatgcatcttttgtgtggaaccatggtttggggcttttctcgaccagcagagttaaggttctactacctacatgaaatgtcctagggaagcttttactggctggtcaattgtaatttagagatggataaacggtgctacttttatgccc

SEQ ID NO: 171844 - DNA, 473 bp, Zea Mays
cactggaaattagggcgatggacctaggggaaactgtggaacggagagaggcaatggatcgtggccacagatataggggtgggctgagccgcagctgcaacgacgtcggcgagatccccggaaggtgctctccgcggatcacgcgaccgctgttgacgcagccgtgcgaaggaagggggtgacaggtggggtcccgagttcagtgaccgagcgcaacacgcgctgagccgcggacaacgagtggctgatgtatggggcccgcagagcagcgagggaaagagatcacaaccgagcacgttagactgcccggtgggcccagcgtgtcggcgcacgcctgcggagcaagatgggctgcgcagaggggttttccctggtgggccaaaatggtagccgaagcccaggtaaggttgttcactgttttctttattctttttattttatgtttccctttctctccttttcaaatttagatt

SEQ ID NO: 171845 - DNA, 723 bp, Zea Mays
tttacatagtgtgaataactgaatgtttccaggcatgatgaggaagacccacctcaggaatcttgcagtagtcccgtgcactgagctgtagcgacatgacgttgtcacgcagaatggagcaagcgagtgcagagtggccacttgacgtcgtcacgcagaagactgttgcagtcctctggagccattttccaggcgagcagagcagtggttttctcgtactgattgtctgagaaagaagtggatacgccaaaagcgcagttgctcaacttactcgaattactgaagtgggctaactaatcgacgtcggctatagaaagagaggggagggggggaggggaaagaaaggctaatcgacttccccagtcaggctttgtttagcggatcctgtgggttggagcctgaattgctatcacctttgttttcagcgcaggctgccctgccccgcccgtcccatcgcggagatctctgtggatatatacgatacgatgatgtcgtccgtgccatgattcaccttggcaatcgcacggtgcggcggtcgtgatccaggagaaaaaaggcaaaggcgttgttttaaagacaagagacacgaggcactggtactaacgatagggttccgattggatttccggaggtaatggaatggctgtgccgcttgtgcgcctcacactcgccccacctttgttaaagacagaagaagacggttgggcgctcacctctctctct

SEQ ID NO: 171846 - DNA, 424 bp, Zea Mays
gctcgacggggagcacatcagctgttcggccatggcgttgggaggagagatctacggtctcgggtgaaggaagtactcaaacagagaatgcatgatgaaaaactcaccagagatgaagaagatggttgaggagcgaggcgtagcgcagtagggacggctccaactcctcctgctgctgcgcagtgttgggcatgatgagacgtggggaagttgggcgagagaagagcacttgagtagagcatggtagcgggcaggatttggactagcgcgtcgtgggtaagacatgacaggtcaagcggagggagggagtggttaagaggaaggaggagggtctgaccggtgggtccggtggcacagagcactgggcgcgctggctagtggggcagagtgggccacgcgcgaggtcaggcgcggccaactgtgg

SEQ ID NO: 171847 - DNA, 393 bp, Zea Mays
ggcctcgagccatttgtcatttggctcaccgaattgacttctgtagcggtatgtatatttcaaataaactagacaaccttcgcttgagatgttagtggtctccttcggcatttcccattcattgacaaggggccatactttgaaagctatatgctcttggaccaagtctctggtgccaatgtagctgcacacaatgttgaaggctaccaggcaggcttgagctttgtcactattcacgatcgagggccttcagacaccaaagtgagatcgtattggacgttgaattatatcttttacatcctccctctcaaccaaatcattcttaacatagaaccattgcttcattcaagacctgggccattttttgcgaagcgtgggaatagccttgcatta

SEQ ID NO: 171848 - DNA, 1201 bp, Zea Mays
gcagaagcaaaagagttgaggattgccttgaggaagaaaagttgcttcgggcatgcttctaaaatcaaaagagtgtcgtctgcatactgaacaatcgggaaatcctggtcaccaatatccggtagagggagcttaagaagattccgcagcctagccttattgatgatgctttgaagaaggtcagctgccaggacaaacaacagaggcgaaaggggatcaccctgcctaacacctctcctgcaatgaaagggcttaccaggaactccattaagtaacaccgaagacgtgccagagtgaaggatgctccgaatccagttgatccacttaggaccgaagcctttgtggatcagaacctggataatcaactcatgctcaaccgtgtcaaaggttttttcgaagtccagcttgagcacaacgatctctttttttgaggagtgacataagtgaatgtattcaaaagcccaggccaagcagtcttgaatagacctccccttgatgaaaccatactgattcttgtgaattaaccggggcatgaacggttgcagacggtttgccaacagcttcgttaagattttcatactattgtttagtagagaaattggcctgaaatcccccaccttctgagggctctctatcttcggtatcaaaacaatgaaggacccgttgatacttctaaggcagacctgaccatgatagaatttatcacacagatcatagaaatccggggcaatgacatgccaacacttcttgataaaatttgtattgaaaccatctgggcccggggatttatctgaaggtaagagttttataatgctatcgatttccagtttagaaaacggagaatctaacccctgaagttgcccattgctggttaaaagttctgagagatcaaaaccaatgtctgagaagtcagacgaacccagtctgcgtttgaaagcttcccatagaagatcagacttatgctcatgctcaaggaacgtgatcccattgtcatcagtcaaagtagggattgaatttttcctgtgcttaatggtggcatgggcgtggaagaagcgagagcaaatgtctccatcagtaacccacctaatagccgcacgctgcttccaatatattttctgaatattaagcaaatctgccaccttttgttgcagaatttccctgaaattccattcctcaatagatagatcccggtgctcttcca

SEQ ID NO: 171849 - DNA, 429 bp, Zea Mays
ggccatctctggttctggatgtccaacaggggcggagccacgttggtccaagtgatgtccatggacagcaatgcttgtaacagaagtccataatatttattagtattcaccatagatgacagcagcccatagtgtacttgacatcaatccggcccctttcagtccaggcccacatgccatttttttactaccccatccgtaaaggcgtaaagttcaagcctgctgcgtttcaaacactaaagagactagcccattgcccatcggtgacgcttgagcagccagacctgcccgccgcctgccgtttcattttctttctcctatatctcacaccagcaaggcaacaactatagatgggactgtttaaactcagttattgacttgctactcattgagttcaatgaattggtgaaacaaattctaatttgctaa

SEQ ID NO: 171850 - DNA, 700 bp, Zea Mays
taaaaaaacaaaaaggagtaagcctggcagcctcggcttgggccaaatttcttcttcggcccatttagctccaccgcgcgcctgatgccgctgaccagccggccccgcgattcttcctccccaccgcgcgcgcccgggcgggcatcctcgtcactggcactgggaccggggtgtcagccctgtcttcgtcctcctgagctcctcggtcgcgtaggctttgcctcggtgtcgcgcaaatctggtcgcgggcccgccccgtcagccgctccctctgccacgccattacactgaaccgcggacctcgcgcggcagcgaacgctgggctcgctgggtcttcgtcctcgttcgtcgctggcggagctcaacaaaccagggagtaaaatccgcgcggagatctcgctgacccgggcaacggagtccgcgacccgacctccaaggctccaaccccgccgagattttcgcaagaccagctataagactcgatcacctcccattgtccaaagcatcgtgcaaaaaaaccaccgaattcgcggagagggagagctccagccgccgccctttggccctgttatttcaccgcgttttggttccggggaagtgctcgattggtgtagcctgcgcgtctggaaatcttccgtgacctttctgggtgcgattggaggccggcgacgtcggaatcgctcgccgtagctcaagcgcc

SEQ ID NO: 171851 - DNA, 367 bp, Zea Mays
ccaaaatctaaggagtgcgacacatagaggataaagaagtgaatatgtggagagatacttagcgcagatgatggcgtaggggtctctgtccatgacgaggggtgaatccgcggcgatgctctgactttcggcgagaaattttggggcccttagttgctcatcccgtccagcgaggccacgaataccttcatcgtggcacagtgaagcacccaagcccagctccgaggactcgacgatgatgagctcgtgggtcgacttctgtggcgattttaccctcttctccagatttcggtgatatgctctttgtgctccggccgaccgtacgtgccctcaaacactacacccagcatctgcatgccctagcgat

SEQ ID NO: 171852 - DNA, 591 bp, Zea Mays
tactctctccgctctctctgctttttggcgatgatgctcacggcctcccgtaaaactaacttaggcaggattggagtgagagccaatgtttatgcgcagcatgtaggcgagtccgcgagatcccgagatggcggtagaggatattacggagattcggttgtcacagacttgaccaaaactcggaccttgaagaagatttcgaccgaagtgccccacatgctagcaattccgacgtccatgcgataggaggagcttctgggccatgtgtgtgagtttgttgcagctgcaatgtgagtctgttacagtgcagaatagaaaattccgttgaattcagatccacaagcagcgacccaagtggcttagagctcagtcgtgagaatcctggtggcttgcatgctgacctcatctctgatgtcatgctgagataagctccggccaaatgaataaaaaaagatttaaaaccgtatggcaagtgcatgtgagctatctaggtgaaattgtcccaacctacagattttttttcttttgtttcctcttttctctctttttttagtctaaatttccaatcagtttcaaataggttttaaactt

SEQ ID NO: 171853 - DNA, 285 bp, Zea Mays
tcattaataagcttaaaaagccatttgcttagcaagcatttattctgaacatctatgttctcaattcctaaccctccttgatccttaggttggcataggatatcccatctggcaagtctgtatttcttcttatgattcccaccttgccaaaagaacctagaacgaaagaagtctattctctcgagaactcctctgggtatctcgaagaaagatagcataaacataactaagctgataagcattgaatttattaggatgtcacacccggatttaagggacaaagtc

SEQ ID NO: 171854 - DNA, 323 bp, Zea Mays
atgatgaggttgtgtgccttcgcacactcggttatgttcgcgaaggcgttacgtacgtggtctggtgtatttgttatgttggtctggtgcgcatgtagtcggtttttgtgcggacagtttggtgtagtcgttttcgcacttgttaagctttgtccggctgtacccttaagcaattgttgcacggatagtctttgcggaagacttcgattcgtcgcacttgttgcgctatccctgttgcacccttagtcgacttctgcgcggatagtctttgcggaagactacgatttttcgcacttattgtgctattccggctgcacccatag

SEQ ID NO: 171855 - DNA, 372 bp, Zea Mays
cgacagctctagaatgtactagtgggtaggctagtggcgattgtgatccggtcgttcctatcgattgaggtggtggttcattttatagcccatgcaaatagccgggtgctgctgcgtctgcgtgggccatccctctctcgtttgataggggacgcagcgcagggcagagcagagcaacacatagcagagcacctagctagcatccctctcatcactagtagtactatcgtacaaccagcccagcagcagcagactctcatcattatcgtaccactactagccctgcagcagcgctgcctgccggctacgctgctgctgcattcccgcatgcttgagcaagttgtagctgtagggagggggaatcgcatcaca

SEQ ID NO: 171856 - DNA, 1199 bp, Zea Mays
atcaacctaaagcaaggacagatggcttgcataaaaacttcggatgctacaatttcgcataccggaaagacacaaaggcttcagggatcggctatcacaccaagtggcctaccggttggacaaatgaatggttttatgtaaaagctgatgagaagaaaagggaaaaacttatgagcatgataatgagtcctttgaaattaagattcggcatgacgaggccattgtgtaacatacagctcggctccccatgccaattagccgaagtggaattcagagtcatggcagagcacattagtactcgagatttggtgcaagaatatctagctaacaaaacctttctaacatctggtgggtgggggatgccaaagaagaaggaagaagcgaaaaaatttgagcttgtttggttgccataccggttcaagtttcagaaactttcaacggcccctgtgtcgaatggttggaaatgatagagtcaatgggcaatgagatcctagagaactatacgaaaaaagaggatcaattgatgacagctgccttcagtacttagaaaaaatgaaggctgaaccgggtgatggatgcccttaacttcgagtatctagactacgaaaggcttgacgaagaagctgggggagcgaagaaaaagagaattataagcgttttgaagaggcaagcaatgcgatccattgaaaaatacaaacagagggctgctccaaggaacaaaaagtttcagcggagccgaagcttttggctcccaaaaacgaaagtcctcgactttggcccctatcgaggcaaaggtacaagatccactggagaagattgctagcgcctcttcgtcctcttctatcggcgttacagaaatcctaaaggtaatggctgaacccttcccatttgctatgctaagtcccctggggtcagatctgactaacttattgcagccaaaggagaaaggagttgaaaaaggtgcgaaagaagagaagaagactacttcggcgactggggaaatgagggtgatcagaagaaacgacacatgatggctatgatgagggctatccataagaccccaccctcagtctcgacagaaaaattgctgtcgcccccgatgccgaagatgctgaagcgaccactgaagttgagaatagcggaggccctcttggaaccacaatgtcggagattgacaggattatagctgatgtggttcc

SEQ ID NO: 171857 - DNA, 655 bp, Zea Mays
ctgtccttgcacttgtctcgtcactataggttctagcacaagctatttgcttccatcacaaggttcctgggctttggatctatgcggcagcatgggaattcgattaaaacctgaacgtcgttgtagcacgtgcactgatgcagagcggtcttaggttctgccctcagtcagaggatatgtggatcgagtatcttcacatggagcttacctaccttaacaagctgaaggctcggaaggttgatcttggagaagatgtcaagacactacaaaagaacgataatgacgcaggccagtggaaagagaaaaaacaaggaactattaatgccattgaatgaccaggacgaagatcacaaggagctgggcttggctggagatgctatggagaaggaagacctgtttggcgtcaaggattgtcaatcattcagaccatatatgatggcgtggtggaagctcttccatcaagcttaaccttgcagaagaaatttttaaagatattaaacagtgttgacctggcacattctgatgagttgaaactggaggtcctcgatgatcttaagagagatttctctcatatcgaggactactgagattggttttctaggcttcagcttagcaacttgaacagttccaatatttcaaatagaaaggatgctat

SEQ ID NO: 171858 - DNA, 999 bp, Zea Mays
atcacgataaaaccatgcgatgtcgatccttcgcagtgggagacctcgtcctccaccgaattctaacgggggagggacggcacaagttgtcacctctatgggaaggaccattcatagtagcagaggtcactcagccgggatcatatcatctcactcaaatggacgacacggaaattgggaactcatggaacatagaacacctcaggaagttttacccctagctgtatttcaaaagctatcgggacgacaatgtactctataaactggaaatatatcatcaataaagagacctcaagaatactcaaattgttcatggtcgacctgcattcttacttgactcggggtgaccactatgccctgctaacggagcaatcggcttaagtcggcaacgacttaagacggtgcaacatgctcgcgcttacttgactcggggcgaccactatgccctgctaacggagcaatcggcttaagtcggcaacgacttaagacggtgccacatgctcgcgcttacttaactcggggcgaccactatgccctgctaacggagcaatcggcttaagtcggcaacgacttaagacggtgccacatgctcgcgcttacttaactcggggtgaccactatgccccgctaacggagcaatcggcttaggtcggcaatgacttaagacggtgccacatgctcgcgcttacttaactcggggtgaccactatgccctgctaacggagcaatcgacttaagtcagcaatgacttaagacggtgccacatgcttacagttactcatctaggggcggcctctatatcccatgaagaattctcaaaatcatcacacaacattttacttctgcaaatttagatactgctgaattctaaacaataggagaataatagtagcattcagtatcaagcaggtgtcctctaacaaaatatctgagcgcgttaaccgcgtgctcaaagcaggcaatgtttttctattttgcaactttcttctcaggagcaac

SEQ ID NO: 171859 - DNA, 584 bp, Zea Mays
acgatgagcacatactgaaaaggaaaataaactacaaagataatctgctttttaacaagttaaaatgttcccaccttcagactgttataggcaaggctatctgcgagctggtccttcgtcattgcagacaaacctaactcaagctccggatatcctatattatctgccatctcccgacaaacatcaatttctttattgtcaggaagacaataaaggaagtcatcctcatcatccccaccatacaccaatgaccctcgagggtactgcagatccctggagtaatgttgccttcgtcgatttgttctttcgataatttcttccctgaagcatgacgcactataaattctaattcctcagtagatgctccaggggtagcgagctcagattccttggtagcaccctcttttcttaacaataatggtccatcagcagcctccaaaagccttgcttcagcaccctcctcagtggcccccgaaagtcttgcttcggcgggggttgagggcctagcctcaatcgcagtctgcgctgtgccagcatcggcagatccctttacaatcttctcctctgcagtaggcactgaggca

SEQ ID NO: 171860 - DNA, 553 bp, Zea Mays
ctgaaaggagcacctgctgggtcaaaatagcgaccttcgtctcttgcaaacaaacaatatcagcattactggagaggatgacatccctgacagcattacggcgatcaatcttattaaggccacgcacgttccaaaaaagaatagccgaaggattcatgaggacacaagaagtagaacgaccaatctgacaaaaacaaatcttacagagttgtaaggacctccgcaggcctcacctgctctccatctccaaattcccagccaaagatggcagccatggcacacacatgagaaccagagggcgaaggcttgaacagcttacaatatttatcttgagcattaggagaggaaatctccttatcatcaaagccaagatgacgcatcacccttttctgagcagcagagagcaccggccctggagaacaaggcgcagcaccagcaacacgtcggctgcggcgaggcagagagcgaggcagaggagccttccttctactccttcgaatcacgggctgaggaaggagagcgtccaccggcttgcagacccggtccaatgcca

SEQ ID NO: 171861 - DNA, 660 bp, Zea Mays
gcatcatatctcgccctcttacaaatttgttgaataaaggagacctttacatctggcattcagatcatgaccaagcttttctgatgctcaaacaagcttttgtgaccaccctagtcgaccttgccctgcccaactttactcaaacatttgagattgaaactgatgcttgtgatcgtggagtctgtgcagttttacaccaagttgtacaccctgttgcttttatcagcaaagccttggggcctcgtcatagggggtctttccacttatgaaaaagagtgtatagccttatggtagtggatcagttgcgatcatatctgattggcaatgaattcattattcggactgaccaccgtagcttagttcatttggatgatcaacgcctaataacattgtggcaacagaaggccttgaccaagatgcttgtcttaggtacaaatttgttacaaacaaggacaaaccaatcaagtagctgatggtctatcgagattaccatccgatcaactactatcagtgacggtggttcagtcggattggcttcatagtttatctgcaagctatcctcaacactcggacactgcctctctgttgcagaacctcttagtacagtctccttcgggtccttacaccatcaaagatgggctcattatctacaaaaaatgg

SEQ ID NO: 171862 - DNA, 433 bp, Zea Mays
caatgacatataacacatttccctttcagctacctggtgtgcatgggcagtagcgggcgagcgatggagcatgtcacggtggtaggggcgggcacagtgcaacgcgcggcggtgatcagctcgacgagtgtgcaccgtgtggtagctgggaaccaaatgataatgagcgggcacatgggatggccatctagagggggaggagttgcggcgtgacgtcacgattccatggcatggaggcagggcaacacaacaagggctagagatgggatggcacgaccggggtgagggaggaggcgaggttgcagcattggtgactgggtggcaaggtggcagcgttagcaacatggggagtgaggctgggattggaggaagcgctagcagcattggaaagatgcgagtagtcacgaacaaaaaatgttatatatgctttatt

SEQ ID NO: 171863 - DNA, 448 bp, Zea Mays
ctcgtgctcagattcgcgccggcgtcacgattagtgccctctgtggtgtggctcggggatgaacttggggcactgttttgccctgtcgccgtacccacttgcaccggcaatgtggttgtgcgatcgtcgccgtcgtgccgccgtctggctcgattgtgacacgccttaagtcatcccaccactcgtcgcaagccgttaagactcgacagtgaccgccgtagaccgtgaaccagtgaacgccacgttagcgaactccggtgtctcttcccccttctcaccgtgagcgcttctctattcaaattcacccttctcgcggccgtccactataaattggtgcctcgacctgttccgctagattgttacgaagccagagcacccaccctctccctcgattagccaccatagccgaagaatttcattcttcccccaaatctgttgtctgtgccac

SEQ ID NO: 171864 - DNA, 537 bp, Zea Mays
caagaaagacggaactctcgccaacgtgatcgctgacaagctcaagaccgagagcaggagcaagtcgagcaaggtgcaaggctgcaccaagagaaccctctctttgctcagaacctataacccgacttggcttgtgcaatgaacacgccgagtgaagtcggaggggtgctggcccagaaacaaaatacatcggacgtctaatgcaaaagttatcgcgtacttaataaactgtggaatttaactgacataattctacaggttggaacacgaacacacaaagggccatacgttcatgggcacagaatatctgaccggataatggcattgaaaaaaagaaaaagaaacactttgtgcaggggcagtttccatttttttgctacaagacgatcggacgtggtggtattgccatgcatgcatggggcccacaagacattttctaaccatacggaacacacgatctctggatggtttctttctccttgcgcacgatggtgaccatactgaagctcacgcagagagcagggacagagctcacgc

SEQ ID NO: 171865 - DNA, 609 bp, Zea Mays
ctttttatagttgcgatcaatacatctttatcaagggttgtccagtttgaccccaaagtaagactgtcaattgaaaacgaagttgttgttcgacttgttgactcattcatgaacccggtggagtcttccaagtcaaaattgaaatttcggctgacatctgcaagtaccacaacccctgtaactacgactacgagttttgtggcaaaagaatttgtcaacaacagcgatggatcatatactggtcattatgcggcagggggccttggttcatatggcatatgcgttctttttgaggacaaacagctgcctccatgtccattcgaggtcactgttcatgcaggtaatttttcagtcagtacagaaaaaggctcggcacatagaagaaaaggaaatggtcacacgagatagataattaagctctagtttgtgactgtctcgttatgtaccgaaatatttccaccattcccagtttctctgcatgtttgtcgagtactgatgaactgtatctctttgcagatgagtacttttcagatgttaagaatgacactgtttcggtgtgggaggatgaatccgtttccttcgacgtattgtcaaatgaccgcattgcag

SEQ ID NO: 171866 - DNA, 355 bp, Zea Mays
ttgcaactcagcttccaacatttccattaatatttatccttaagctctcaccagacatatgagaagagcattttagcttcctattttgcttcacagttgtggtctgtttgcagttgctggaatatattattattgctaggacccctgtatagcgtagcatgcctatatggctagaatagatagaccgatctctattaggcaaggatctctattaattggttctgtttctataaaccctcggctatccttgtctatatatgtgcaacaccatatccccaacaattattcatgtgtaacaccatatctcctacaattattcatgtgtaacaccatatctcctacaattatccatagg

SEQ ID NO: 171867 - DNA, 661 bp, Zea Mays
gtgcggagtgtcttggacaaagactttgatttttcgcacttgtgctgctccggctgcaccattaggcgacttttgcgcggagagtcgcacgcgagggtagccagcgctgcccctcgcggtgactttggtgaggtcgaatgccaatgaccgtcgatgcggtcctttttgacatgttgtgtcttagtttttgcgggggatatttgcgggtatattacatggctccgcctcattaaaaacctcaccccccgggaggaaaagagtgcaggctagaatgatactgtttggtgaattacaagggcgtgttagccctgaggattcaaacaaaaaatttgcggagattatcgatattccaagagtgctctaggtcctcgccagatggcgttgttagcctgtacgcgctgggggacgccttcgtcttgacgatgaaaggaccctcccactttggctccagtttgccccatgactctgtccgagttgtccgaacgagtacgaggtctccttcattgaattctcttgggatgactgcgtggtcgcgccaggccttcgtttgagcttggtatttgttgagagcctgcagggcgaagacacggtctccgtctgtaacacccctggtattactataactaaaacttgagcatggcatcatgagcattggcattgc

SEQ ID NO: 171868 - DNA, 321 bp, Zea Mays
tgtcaggggaaagcaacgggtggtaacatatataacgtcaaattagtttaaccaaatctaccttaaaaaatgtttgtttgatactgtagatgtcaattgataaaatatataggggcagtgcattttggaccagcagaaccaccttcatattaaagcaacatatatgtgcctttaaaacttactagaataggtggcgcccctattggcgccctatcttccttgtgcacatgccttattccaatagccccagcctcaacggagtactgaaatatgtgccatgacacaataacaaagtgattcagtggcagtcatcaagatgag

SEQ ID NO: 171869 - DNA, 549 bp, Zea Mays
tgctaggtggaaatagttatgtgaggtgcttctaacaaacgtcattcatgcacatgagtaaagttttcaaaaataaatgccatgatgcttagggtttaagggggtcaggcaactaggttttctaacatgtggagtaaaaaccggggtgttacaacacaggtcccgagcatcttgtaattcagcatgtgcgtgtgggacctggctctcggacccacctgtactcacccggtataaaaagaaggtaggtactattgacccacgtcagccacgacaggccacgtcgtcaccaaactccatccggaccaatggcgcatcatacccaggcgggtgctgagaaatctccatcaacatgacaacgcatgaccacatacggtctttggcactccctgtctctgccttgtgggaccaaccaaccctagtcctagaggatctaagcatcggagtcgctacagtaacccacatattggataggacggggcaatacaccataccgagtgtatgcttacacactctagaagggtgacatagggtttttcgcaaagaggcatg

SEQ ID NO: 171870 - DNA, 589 bp, Zea Mays
gtttgggcaaaaggaggtggtagattagtgaagttaggtcagatgaataaaggggggacaagaaggaagactgaggtgaagggagtagtggagcagggacactggagtaaggagagacaagtgaaggagtatagaagggtaaatggattgtgctacacttgtggagagaaatttgagccaggtcatcaagctaaatgccctaagagggtgcctcaacagctgaatgtgattaccaaagaagatttggagatggtgctttctgaggaaatgttggaaagggtagagcaagagaaagggcaggaggaagagttgcataaactgtccttacatgtcgtgagtggagctgacacttcagagtgcatcatattcagagccttgatccagaatcagttgatgcttatgctggtagactctggaagttccactagtttcatcagtcaaactatggtggacaagttgcgtttaaattctgaaccatgtgctgcagtcactgtcaaggtagccaatggggaagtcttgaggagtgataagaaggttagagaagtgacttggtggactgggggacataattttgtgtcatctatgaggg

SEQ ID NO: 171871 - DNA, 1438 bp, Zea Mays
accccgagttaagtaagtgtgagcatgtcgcaccgccttaagtcattgccgacttaagccgattgcttcgttagcaggtcatagtggtcaccctgagttaagtaagcgtgagcatgtcgcaccgccttaagttgttgccgacttaagccgattgctccgttagcagggcatagtggtcaccccgagttaagtaagcgtgccaattgacagtgaacaatctgagtgcctttgaaaccttttttattgatgatatttttctcgatttacagaatacatcgttgttccgagagcctccgtgatgtagctatgggtagaacttcctgagatgttctatgttccatgagttcccaatttccgttccgtccatctgagtgaggcgatatgatcccggtcgagtgacttctgctactatgaatggtccttcccatagaggtgacaatttatgccgtccctcccccgttagaattcggcggaggacgagatctcccactgcgaaggatcgacgtcgtatggccttatcatgatagcgcctcagagtttgctggtatcgcgctgattgaatcaccgtattcagtcgctcttcttcgagtacgtcaacgtcttctagcctagtagcttcagcttctgctatgtcatcaaagattaaccttggtgccccgaacttgagatcggcaggtagcactgcctccgaaccataaaccataaagaagggggtatttccatgcagagctcgaatgggttgagttctcaggatccagactacgtatggtagttctctgatccattttcctgcgaatttctcgttcttgtcgaagactttctttctgagtgcttctaatatcatcccgttagctctttctacttgcccgttggcccttggatgtgccaccgaggtatatttgatctgaatgctcttttgctcacagaaatcgaagaattccgaactggtgaagttggatcctaggtcggttatgatgctatttggtatcccgaacctaaatattatatcttgtatgaattccactgccttagctgaagttagagaagcaatgggtttgaactctatccatttagtgaatttatcgatagccaccagtacatgagtgtatcctccttgagcttttttgaaaggtccaatcatatccaatccccagcacgcgaacggccaagttatgggtacagtctgcagctgctgtgctggtagatgctgctgttttgacagctactggcaagcttcacacctctggactaactcggctgcgtcactcttcgctgttggccaatagaaacctaacctgaaaactttcccaactagggttctggatgctgcgtgtactccacattgcccagcatggacttcatccagaagttgctttccagtggctgagagaatgcatttcatgaggactcctgatgcaccccttctgtatagtgtttc

SEQ ID NO: 171872 - DNA, 1363 bp, Zea Mays
tttgataaccaaataaacaaaaggcaaaaattaaagtgtcgtttaggatggcagggcagagaagcggcggtgcagggaattgagaagaagaggatgagtcagttgctattcgcctgtgacctccgactgaaggacgtctgccctttatagacgggttgccataatcccttgattcgatttgctaaattctaggaaccggcccctgtaatatctctacgtgcaaccgtccggagatctcgcacgttgtccattactcctagttgatgtgacagtctaggtgtgatatttgataaccaaataaacaaaaggcaaaaattaaagtgccgtttaggatggcagggcagagaagcgacagtgcagggaattgagaagaagaggatgagtcagttgctgttcgcctgtgacctccgactgaaggacgtctgccctttatagacgggtcgccataatcccttgattcgatctgctaaattctaggaaccggcccctggaatatctctacgtgcaaccgtccggagatctcgcacgttgtccattactcctagttgatgtgacagtctaggtgtgatatttgataaccaaataaacaaaaggcaaaaattaaagtgccgtttaggatggcagggcagagaagcgacagtgcagggaattgagaagaagaggatgagtcagttgctgttcgcctgtgacctccgactgaaggacgtctgccctttatagacgggtcgccataatcccttgattcgatctgctaaattctaggaaccggcccctggaatatctctacgtgcaaccgtccggagatctcgcacgttgtccattactcctagttgatgtgacagtctaggtgtgatatttgataaccaaataaacaaaaggaaaaaaattaaagtgccatttaggatggcagagcaaagaagcggcggtgcagggaattgagaagaagaggatgagtcagtttctgttcgcctgtgacctccgactgaaggacgtctgccctttatagacgggtcgccataatcccttgattcgatctgctaaattctaggaaccagtccctggaatatctctacgtgcaaccatccggagatctcgcacgttgtccattactcctagttgatgtgacagtctaggtgtgatatttgataaccaaataaacaaaaggcaaaaattaaagtgccgtttaggatggcagggcagagaagcggcggtgcagggaattgagaagaagaggatgagtcaattgatgttcgcctgtgacctccgactgaaggacgtctgccctttatagacgggtcaccatagtcctttgattcgatctgctaaattctaggaaccggcccctggtatatctctacgtgca

SEQ ID NO: 171873 - DNA, 284 bp, Zea Mays
ctccattgaatcccctgcaggttcttagctccttcgggagggtttcaccacctcaaatagccttttcaccgaaaccctaaacctctgcacaccacatgctcggcaaaatgcccaaaccagccaaaaatgctccgattgaacccaaatttttcaggcaccttcacaacacctccagtaacatatttgccaaatttcacgccaatctgatataccaggcttcaatttcacttaattccccgtttcgagcgatcgtttctgagccgagtgcccaaattccattttct

SEQ ID NO: 171874 - DNA, 523 bp, Zea Mays
gaaagttgatgagcagccaattgaacacgttgattttcggggcatccgatggcttccagtttcctcttgatcgtgcgtagccagtcgtctgcatcgaggggattgctagatccagcgaacatgggaggcttgagtctcagaaattctcccatcctgtcctgtggtctcccaccacctgggcgctggttttccagacttctagtgaggacttcaatgagtcgggtctgattggctagaacttgggccaaatctagtggtagttctggaggtgcggggaggtgggtctcactcccttctccgccagcttctccttctgctcctaggggaaatcctgctccaatcctggaggcggtaggcgtggttttatccgaagccatctgccaggggaaaagagttactaccatgcacatgccacattttttttcaacaagttactttattcattacaccagttcattacagcacacaactaccataagttcattacacgcgagtgctatctagggtactcccgaactccttc

SEQ ID NO: 171875 - DNA, 540 bp, Zea Mays
tgcacctctgcatgctctaaatggttggccacacgtgctagccacaacttgatgatagaagccttcttcaaacgaactgaaaacatatattgaaactctgctcgcaacgacatgaccaaaggggtgatcaattaccgaaggttcaaaggtgtcaaggcaagggaggcacaacgacagctatgacaaacaggatcgtcgtccttatcatggaaactgatgggttgagaagccgacagaggattgtaatgtccttgcgatggagacttggcgacgacatcggtgacggtgtcagctgacaatgtacttggtgaaggcttggccactacctcagcccaagtcctcgattgttgaggatgatcacattgcacggatgagttaactcaacagacaggagaggaagaccgaaagcaacaatgctgctctagatgaccaggacgacgacagtggatacaacagaaagagcttttgcatgagctgacttggtgatcatgtgcgagacagcaataacacctgcaccgatccaacctcttgaaggaaaag

SEQ ID NO: 171876 - DNA, 633 bp, Zea Mays
tgtctcgacccgagggtctcaccaactagtgaaatgatgctacgtgccctagcccagatgggtgatgcaaagtgacacgagtcatttatcctggttcaagcgagagaaagccctacttccagcaacaggaggatgagacttatattacttgcacctaagtgcttgcagcggggagtacaagctgatcgggagagggaatgatcccaagtccctggggttgattgaggcaattaccaatatcgtggtggaggtgagaatgtgaagtgtttgcatgcctccttgaagtcgtggactcccctatgtgtagcctcaaagaggctgccaggagtgtcaaggttggtcgtgtacggtgaggaggcgaagtcgagcccctgtagatggtatgacttgtggtatggggcttgtacttgctgttgactgcgtgtgcctggtggagttgtccggttcctatagagagccgaggcaggggctgagggctcggtcatgtgctcgagcctacctgatggggaagctgcccatgtcatagtggttggtgtagtgctgagtatggcaaaaagcccatgggtaataaaccatctccgctgttttcggtggcgtcgggtgcccttccgttgctaatattgaggcgaaggc

SEQ ID NO: 171877 - DNA, 488 bp, Zea Mays
ccgggtgattgagagatttctttgaattgaacatgttacagatagaagctcatcccacttaaacaagcattagatggtatgctctctaaacatagtctctctataaataacttacgagggcaaggatatgatggagcatcaaacatgagaggggaattccatgggttacagagaaggatattggatgaggacccctatgctttttatattcattgttttgcccatcaattacaattggtagttgtgtctgtggccaagtgttgctcctcagttatgatttcttcaactatatcaatttgattttcaacatagttaatgtttcttgtaagggacatgatcaactttcccaatgtcaccatgataatcttgttcaaaggctagagaatgatgacatgttaagggggagagggagaaaccaagcaactaatttaacaagagttggggatactagatggggatcacatcataaaaccttatgtcgtcttcaa

SEQ ID NO: 171878 - DNA, 772 bp, Zea Mays
cgggagcgttgacgtgtctgtcttaacgatggagacgttataccggatctggttggtgtaaggtctggtaccgtatacgtagccactttcgaggtgccgtggtgtgtaataatcatgggaggtgaaccgcttgccgttgatgttgatgttgaactggcgaacaacgccggcgcccgcctgcagcacctcggagaagtggaagaccggtatgtacccaagcgacgagcccttggagttccaatagaagttgatgctgctggtagcgtcacgcggcgtgatcgccgtctgcatcaccttcgacggcacctcgaagaggtcatcatatatgttccgcaccttttccgtcgtggatagcaccagccagtcgatggcgtcaataatcataggtgtccataatctgtcgtattgatcgtcagggtacctgctggccgttcaatttttttcacgggcaacacttgctcagtttaattaaattgctggatgactttgatttgagatacaagaaaagactcaggccgagccgagatttttttttaaaaaaaagacgtttcgccggatatatatgactagtctgaagcctaacccggtcggatatgattaatctagagaaactatatataggtgaaatctggccaaattatagaaaagagtattaccatatacatcacattaaaatatataaattatgaaaacatatttgataatatatccgatggccataaacttttcccatatttttttttgtcaaaacatactttgaattagaacaaac

SEQ ID NO: 171879 - DNA, 861 bp, Zea Mays
atttttgtacgagacgaaggccaccagcaaggagcagtatcataacaacttcggttgttacggattcattgctcgctctaatgcaagctatcagttccaacatactggaaaagatggcccgaggcctggatggaggaatgattttatgttaagaataatctgattgagagggaggatattaaggaaattatccagcgccccatctggtctcgctacggccttcgaaggccgaaggtggctattgaaagtgatgtcgaagcatgtcagaaggcttttagcaatgtctgtgctttcattggcacaagagacataattcaagaacacatagcctacagagtatgaccacttgtggacagctaggagatgccgaaggagactactgctgaatccagtgaagctggactagttcgattgaaatataccttcagattcagggaccggtttgacgaaccaaatgatgactggttgaaatgcatcgaggctactagcgacgagttgcttggggcatataccagagtcgaggatgatgccttgtcctcagccttcgggggtcggggcaagaaaagattgaatagggtttttgatgcaattggcttcatatatcctgattactgataccccttgagaaggcaaggaaaaaagaggaaaattgccgcttcggccaccactgctgtgccgaagggcaagaaaataaaggttttgacccagtgacctcgatatattgaaacagccgtagtgcctaaatttggtgaagggacctcctccgctgccgaagcaaaacaagctgcttctgccactcagagcgttgaaggatcgattgtagtgccgaaggtgcctatagtcgggccagccaaagccaaa

SEQ ID NO: 171880 - DNA, 461 bp, Zea Mays
cttcccgactgaataagcaatggatagtgtcaccacacttctgtcgtgttagttgcaatgatggtcctggttgcctctccatgaacatgctctctctcatattgttaagattgtagggttgagactgaaataaattgcagaccatctaatgcaaaaatgcaagcaatagagacatctgaacatatgtagaactgaatagtgcacaaaggcttctttcggctcccctattcctggctgcaaaccttccctgcaagctatggtcaaaagccagggataactggacaaccaatttacccgtgaaaactccagggataactggacaaccatgcaagtgtgcactaaaatggcaatgtgactcacattcagaaccatctgtgcaccaacaattagtactcaactgtaatttacccaacctgggtaactcaatccaaccgctgatctgaacaatcatgtactccatt

SEQ ID NO: 171881 - DNA, 567 bp, Zea Mays
agcgcgtgaggtttctggctgtggcactgcagtgagatgtttttaaatatattatttgtactattaattaactaacatttgagctgccaattgatttgattctcccggatcacaagaaatcccacgccgtattccagcatcacacgacgtgctgatactttgcaaactgaatcaagcacgcatgcatggggcagagaaatcaacaaaggaatcgtcgtattgatctgtaaaaaaatggccactgacaaccgcagtagttttctttcgaaaacatgacatgacactagtttcgccgtggcttcccgtacacgcaggtgcccaaagtcttgggccagccaagctcgtgacatacatgcgagcagagcaacacttccctgcaccggctgaccggcggcaagccggcaaggcatgttcagtgttcctttgtccatggaccacatgtccggcgcgtcgggaggctagctcctggtacctgggcacgtgccaactcaatctccatcgagtcacagcgcacggcccagatcatccgccatggtcatctgatgccatgggcgcgtggaccggctc

SEQ ID NO: 171882 - DNA, 636 bp, Zea Mays
tctgggtcttgcaccgagccattgggaagccgtccatggcgctggcatgcgggatcgatgatcgaacagtcgttaatcgctcgccggacttgggaatcaccgcggggccacgctccaccgtgggtgggtgatttagtgttacgattcacaggtaagatgcactccactaagtctgccttctcctccactttgtgtagcgtcttttgtatggagctttgggtgcagaatcctagggtggggtggttcagcaatggcgccaccgtagacctttggtcgttgccatcatagcctagggtctggggaagaagacaactcgggtggccatgtgatcgacatcggacggctaggttttaatctggatatcgattcactgcgattgaatcatgtccgttgatcaacgtgttggtggctaggggtggagttcatctgtggtaaatcgtcaccatgggatctggatcctatggccatgatggcatgccagtttcagttttgggttttaatctcgactgcagatcaggatctaatggccctgatgcgctgatgccccttcgttgtggaaactttctaaaagaaaccctgtggttacgcataaacagcccaccatccttgtcagcctaaaaaccattactactaggc

SEQ ID NO: 171883 - DNA, 552 bp, Zea Mays
accgccctctgatttgaccaagtaaatcttctaccattcaaaggaatctccttcagatccaaggagccaataagacctctgaaattgcccaataaagacctattaatgttagaattattcttgtcttctgacttgtacatttgattaaaatcaccagcaactatccacggacccacacatgtattcctgatatctcttaattcttgaaggcagatttcaaactgtcttgatgaggtccatacacccccgcgaaccaccaaagaggaccattttcactttgcaactgaaccgaaacagaattgtccttgattactgaggtagctgagacaaaggaaccatcacgccaagcgactaaaatacctcctctggacccatgggcaggactaaatacaaaattactgaacccggacccaagaatagaaagaatgttgaagtctgagatagagtccaatttggtttcctgaagacaaacaacagcaggtttgaggcttacaaccacagacttaatagagtctctcttagcacgactgttgaggcccctgacattccaaa

SEQ ID NO: 171884 - DNA, 769 bp, Zea Mays
gtttttaccctaaaaatcattttctcataattattttacttaattcgagtacagtggactggggacactatttcagaagagttcagggtttaatttgtaaataataggactgtcttgcgatactttctatatggctctggacggcgggttgaattctatattctctaagggctctttacaaaatatgccacgcgaaggggtatcagcccaagagcaccgttgaatgcgagatcaatggcgtagattagaatcgaatcgctaggtgatattagccatcggatctctgatcaatggctatgcttttaagttaatgtgatctgctctggatcactggatccaaatctaacggtctgagttcaatacaggtgaaggggtacacggttctaatcttgaccgctaaaaacataatcaacggcccacaccgttcttcttcctccagcagccagcacggacacagcagcgcccaggctagcgcggcggtggctgtggcttctccggaggcgcgcacgtacgcagacaggtgacctatcttctacttatccggtcgctacacgattaaaagtgatgaggcacatggcatggaggtgaccttaccatggagggcgacaccgagatgcatgcctacgatgagcgaccactccggtgtctgcgagatcccccccccttggcggcccaggcgaggacgatgatggccggcagcggagccccgcggcggcggcaatatggatggacgcgcaccgaaggaggcgtggtgtcgaggtcacgacgt

SEQ ID NO: 171885 - DNA, 883 bp, Zea Mays
caacatcctctagtctagtagcctcagcttcagctatgttttcgaagattaatcttggtgccccaaacttgagatcagcaggtagcactgcttccgacccatagaccataaagaagggagtgtttccatgtaaagctcggctaggttgagttcttaggctccagaccacatgcggcaactccctgatccattttcctgcaaacttctcattcttatcgaagattttctttctgagtgcttccaatatcattctgttggctctttctacctgcccgttggctcttgggtgcaccatcgaggcatatttgatctgaatgcttttttgttcatagaaatcgaataactctgaactagtgaaattagatcccaggtcagttatgatgctattcggtattccgaacctgaatattatgccttgtatgaattccactgccttggctgaagttagagaagcaatgggcttgtactctatccacttagtgaatttatcaatagcaaccaatacatgagtgtatcctccttgagctttcttgaagggtccaatcatttctagtccccagcatgcaaatggccatgttacaggtatggtttgcagttgttgtgctggtagatgctgctgttttgacaagtattgacaagcttcacatctctggactaactcggtggtgtcactctttgtcgttggccagtagaaaccagacctaaagaccttcccaaccagagtcctggatgccgcgtgtattccacattgcccagcatggatttcctctagtagttgcttcccagtagccaaaagaatgcacttcatgagaactcctgttgcgccccttctgtatagtgtttccccgatgagagtatagtgagctgactgccttgcaatgcg

SEQ ID NO: 171886 - DNA, 865 bp, Zea Mays
gtcaacggtggcttatgttaccggcaccattgataatcaaactcgtagtagggttacaagcagtcaagagagggaggagaggctctcatatatcttattggggaggacgtggagcttagaagctgcaagatggagacctagctaagtcttggcttggcggggctctggcctcctggtcctcgttggtgctcctcctcttgttcgttcttgttggttcgtctccgtctaaaggtgtttggtcgcctccctgtgtgatccctctccattcatccctctgacctgaggcgaccctctcccttttataggttggaagaggggtcggccagcggtagcttctctaggaaggagccgtaaggcagtggtaaaactagtgttttacctcgggtaagtctacgcgtactcgtggggtccggggctgtctggctgtcgcgtatttatcgtagcggatgacgtagggacaacgatggtcccaggcgccatcattttggctatgatgaaccctggctttcatagcctggggctcggcacagcccatcgtgtagttccctgtgggaggtcttcgcactcaggcctagtccgataggccataagtgcaccgcgggccgaggggcgcgcgggctattaatgtgccgcagtccgagggctcgtaggttaggcctgaggggtccgtaggtcttgagtgggaagcggacaggcgcccacgctgtggctcggtgctaggcgtggttaatatggccagtcatttatggcaggtcagttcagggccgggtgaggatccactcgagtggtacccttccaacacgcccgtcctcccatgtcaggctccgccatgcccagccctaggctcggtgccacgggattcgac

SEQ ID NO: 171887 - DNA, 412 bp, Zea Mays
cccgatacctaaatcgatgcatttcatgaagactactatggcccctctcttgtacagtacttctcctatgattgcgtagtgggctgactgccatgcaatacgctcgacagtgaccttattgtatggttcctcttcgttcttgatgtatctgataatttgcaccctctagtcatttgggtcaggttctgtctgctccactgccttgcattccttcgccggtcctgatgcgatactcggttgttgtatttcctggacaaagatgtctggtggagcttgggcctgggttgatcctagctttgatagagtatctgttgttgcattgtgatccttttctatgtgatgaaactccaagccttcgaatttatcttcagtcttcctgaccgcggcgcagtagttgcccattgaatcagtg

SEQ ID NO: 171888 - DNA, 996 bp, Zea Mays
cttgtatataaaactcaccctattaagtgacaggcagagctcctgccatttgcgttagaaaaataatatatagtgatgcttatgcatcatcaacacatgcaaaatctgatcatagagtagcgatataccacgaacgttatctgtgattactagttgattcagattgacctgtactagtccggaaataggcaaatcaattgaacacaaatgtgttgtgggcaggcatcaatcagatactagaattaagcaagttctctcacctgtcctccaaagttgaaaatgaccaccttaacatcatttgcgatccctagttcctttctcacctgaaacatgaaaattatggaacttagaaagcaagtgtgtcaaatttcaaagacgccactctgaaacagaatgttgttcagacctcagttctagatctgtgcaatcttctgaccaccagaggaacatcaatgacatcacggaaagcaggcactgcagaaaatagaattgacaacttgttcatgacaactgcacgctgagatcgttagaaagcaattattcgggcttagtgacatactagggcagtatccggggagtctgagcaagaattcacaatgggagtaatcctctgctatctacaattgttgtcaagatgcacacatggctaattaacagacggcacaattactagattgcaaataaacataaagaatgtgacattattgaacaaccagatgctaaacaagaactatctgcaattctttcttccaaaaaaacttgtatgttcatgactgttggaatttagcaaggttaggcaattgcagccagcaatcttgctttaactataaaaaaaacctacggagggagaaaacagcttcagctgcattgcactaagaagatgcttctcacacacaggccgtgtaacaccggaaggccggcggccactgagcacccagccagatgggcagaacacatgtctgtgaccatgtgcatctcgcggaaagcgcattaggt

SEQ ID NO: 171889 - DNA, 402 bp, Zea Mays
actaaactcagccgatttgactacaatatcatcaatgtagacttccacagtgtttcccaatagctcgtgaaagatcaaattcatagccctctgataagtagcaccaacattcttcagaccaaatgtcatgacaacccactcaaataaaccaatgaagcctatacatataaaggtcgttttagacgcatcttcttcggccatgaaaatctgattatatccgacattaccgtcaagaaagctaacaattctattttctgacgcattattgatcaatgtgtcggctatgggcatgagatattcatctttaggagttgctctattcaaattgcgaaaatcaatgcatactctgagcttacctgattatttcttctccaccggcgcaatattagggacccactctgc

SEQ ID NO: 171890 - DNA, 1155 bp, Zea Mays
ctagagttttgtgtcaaaccacattgtcctacaccaccaagtgttgtgcatagctcattcaacagaccatgaggaaatctaaaagatgttggatcgcctacattcagagttgtacattatgggcgaccacatgctggtgtaggattgggtttgctcatggaccgcctaaggtggggggcaagtccttcatcctcaccatggtcgaccgcttctccaaatatgcacaattcatcatgctcgaccacccctacacaatagccttagtcgcccgcaccttcttcgatgacatcgtccgactctaggggttcccctcctccatcatcagtgacatggatcccgtgttcaccggccatgtctagaatgacctattagagatggtcggtgtcatgctacgcatgagcacgacattccatcttcggatggacgaccaatccaaagtggttaataaggtgatcgcgacgtttctatgatgcgtgacaggtgacaggccccgagcatgggtagactagattccttggtcagagtattgctacaacacttccttccacattgtctgcatgccacgcctttgaggtggtttatggccacccgcccccgcgcatcctaccctacaaatcagggttggctcagacgaagaccactgccgccctcctgaacaaccgcgatgaaaacctagtggaggtccgccaacgcttcttccaagctcaacaagtcgctaggaagtaccacgacgccttgcatcgcgacttcaagctgccgatgggcgactaggtttggttgcgtctactacataggatgacatagtccctagacactcgagctaaaggcaagctcgacccacgctacgctaggccattcagcgtgctggagcacatcggtaatgccgccttccacctgtagctaccaacaggcgctcacctccttgacgtctccgatgtcgggctcctgaagcgccataagggcgatccaccgaccgagccaccacccctgccttcggttgttagatgggcgcctccaatcggttttggacagggccttgcgggctcaactttagcgcagcgtctggcatggtttgatgcagttttagggggtctcctgaaaggatgcaacgtgagaggtccccgacgagttccgtagcctctaccccgactttca

SEQ ID NO: 171891 - DNA, 795 bp, Zea Mays
ctcagctttcccaaaaggcaggggcatgtgttaagcaccatatgtgtcacctgggagaggccggacagttcgggccgtggacggtccattctaagcgtggatggtccgcgattaggcgataagccccttttttagtgcttgtttatctatctaaatccacgtgttttgtttgggaacgcctaataacggtccagaccccccttatatatataccaacaatcgaaccaaatcaatatatcttccattctttaacttttttgccctagtagtagctagtatcgtagccttcttcatctcaatcttcacatcttttcgactctacatcgtctataggtatcttgggtggcttacccatcctaagacaaaccctaggatcgctcctccctgacggggtccctcctggggggcaagatctagatgctgttggcgaaggtcgttgtcccaatgcacacgcggaccatccaactagcaggcacgaaccgtccggctcgacgtagtgaaacccgctccttccgctaggtcacggaccgtccgacactaggccacggaccgtccgcaccgtcgcagaaagcctaccaagcagaacaactctcggtgattggcaaccagatccgcctcaatagagttgatacccatcgtctttggttggcttttcaacgcccaacgaaacagatgaagctttattccgagcatctactacagtcacaagcggcaaggggcgacaaacaagcttttggcatgaatcttggttagcacgtaaaaatccaatggatctctaccctttggcctggtgga

SEQ ID NO: 171892 - DNA, 1129 bp, Zea Mays
ggtcggactctaaacgccgacagtctcttcctcaaacagacctcgaaatcgggtcggtcgacagatcgtgggttgctaggatgtcgtgctacatgggtctcgagctgaggtaggtttctttctctgagttttcctgaccctaggcataatgtttttctcccttctccttccattgcaggatggtcaccgtcaatcaagaggtcgcatcacctcttgtcgggtctctatagtcaggctccttgtcccctctcccttagttgtctcaagatagtttcgacgtctttcgcacaacgcaagaggatgccgaggccgaagttgagctgcttcgcacgtagctctctaaagccgatggtcgtgtcgttgataaggcagttgtccttcgttcatcccttggcttccctgcctcttttctcaccttgtttgtttcttctggtagccttggggtcgagctagagaagttgtgctaccgcctgggccagcttctagactatgttggggcccatggcacttccctggtggagcacctagacaatgccccgtgccgcatttgggatattgctgacttcgatgtccaccggggagcagcagtggcgctgcttatggggaagatatgcttcgactgtagcctccaggatatcgtcgtccctttcggatgaagggctagaagacctgcttgagggtttggactaggtggctattcgtgtcatgttagggtgtcggctcatgacgtcgtgcatggcgtgtattgatcgcgatgtatcgcgcctcggtgccgcttctaggtagtaataaaataatattttcttctcggtttttcatgtcgtagggcccttgggtcttttcttcgtgagctttttcgtgtgcatccctctttaaaagcaagagggggtagtgcgagcgaccttgttcgcaaacttccttattagtcgatgtctcccttcgcccatggatcgaggcagacctcctaggggggattgttcgaggaaatggtacgaccaacctgcccttatctcggggtttcttcttatccctcttctggttaatccttggttcgctttttagggtagtgatcgcctcttccgaggcgtgaaggcgtcacgaccccatgtcttagccgtccaccttgtcg

SEQ ID NO: 171893 - DNA, 568 bp, Zea Mays
cggcactctcaggcagaggcggctgatggttgcgagagtggaaggacgaggagatcgtgacccaagctcccatataacagtctggcgagtcgattggggcgcggattcacgagattgggggaaagagaagtcgcccacgatccccgacgaaggcggcgactcccgcgcgagctgttgcgaagatggggcgtgcccaggcgtatgggccccacaactcagtgatagcacgttcacgaactacggctagcacgcaagtccgcattccagggacagggtgaggtgcgagcgcgcgcgacaattacgcgcggtcgttacggtggagaagagggagctgacaagtgggctccacccaccagcgagtatgctatcgcgcggatggctgaccaggctagtccacccgtcagagagacagcgagcgtggggaggagaatcccaggccgcgcagtagtaacttgcttggtgggccagattctgtctcgcgacccatgagtggattttttattcttttcttattttccctttttctctatttccaaattccaatttggtttcaaacttgaatgcaaac

SEQ ID NO: 171894 - DNA, 294 bp, Zea Mays
agagaactaatgctatgagatacaagaaggaatgtgacgaggctccaaaggtcattcctccacctatccaaagtgctcaacaagttccatggtccttagatacatgcaatggcgaataatgagacatcgttgtcatcgtcatcttctactgtcactttttctctctaagtgcatacaatcccagatccactccttcacatatatccaccgtcatagttgttcacagatgaatatgtcatgcgtgcccctagcaatgaacgcaatgggtaagacatgccataaggagagtcttgc

SEQ ID NO: 171895 - DNA, 798 bp, Zea Mays
gggtggtgcaagtctggagatgcgccgcgggaggaaaacagaataccttgacattcctctcaaggacaacattaaagggtggtgccttgagtggtttattgtggaaaaccatggcaagtccctcccccctcggtcggggagacagccagatgtgcgcactccgagttgggttgagtctcctactgccttggaggtaacaaaagctatggttctgcttgctgaaatctgtctgctgaaggagagaggtatgactgccgaggctgtggttgctgactttgtttttaagaatatttgacccttgaaggacagagcatacctagcttacttgtacagtggcattactgactcaactcgggttaccaacaggaaaattcctactgagggtctggtgagccgactagatatgatcttgaggggcaaagtatcaaatgttggtgctcctgttgcctactctgcttggaatttgccatctcctatgtcctttttcaatttcgtgtccaactctcctgctggtgatagtggtctgggtcttagagtgcgaccctctcctgaagacattgaggctttggttgctcctctttgtgatcttcccaatgatgagaggcaagttcattttgagatgccggcgagtctagatgatgcagaaatagatgttgtactcaatatgttggctggagaatcttctgactcggcccctgctgaagcaatggctgttacggttatacaagatcttgacaaaacagtggacacccgaaagcctgagggtattcgcccaaagcgtcctcgccaagtcagccg

SEQ ID NO: 171896 - DNA, 664 bp, Zea Mays
gtcagagctccgtctccgctgccatgccgctgctcatcgaggacattgctaccgacgcccaaatcctcggtaagaaattactcactgttgtctgctatacgtgtagaatccttcggtattcgatataggagcctcgggcggccgaaccatggcacaccggcgagagcgcgaccacgggggtgcccgacgcaactgtgtttgtggtcgggaagtgagaagtgtcgtgggcctttgatcggtgaacccacggtgggtattagatcccaacctctttaagccctgtgtgttgatcactagattgacgaccacgattaaaaataggtacttgttcggtgggttggatggcaaccgttggatctggatccaacgatccagaatagattaagtcaaggtgtgatctgggccatcgattggtcaagttgcgggcccgatttgggcaagtggtaccgtttcgtgaaggtagatctggaccgttgaatgtataatgtgcggtttgggttagatcgtgcactcataagaaatctaaatcgtgtatcctggatcctacgacagtcgttacataccggttcgagggatgggtaatctaatcctgaccatagagatagattcgatggttgtggtcgtcttaccccttcgcgtggcatattttctaaagagcccctcg

SEQ ID NO: 171897 - DNA, 591 bp, Zea Mays
ctcaaacaaggccatccaggtggaaagagcacgaaaagaggaaaaaggtcacctcaagagaaagtttcaaattctctgagctcaacagcaggataggcaccagagggttcgatcttttgggttcccttccaaggggtcaaacctcaacaagccagcaggatccgctctgtcacgtttcaaccagcctagtcaaagttccttccacacccagtccattgcaagcagccaacctccagctaatgcttgttggcactatggagaccccgatcacttcaagaataattgtccgcacctgaagacatccgtacctgcctactccagcttgacaaatggccccaagaatgttacgacacctgcctccaaggcaccatccaccaacaaccagttaagcaagactcagttccacggcagggctcgagtgaaccacgccgacgcccaagaagctcagcaagcccctggagtagtactcggcgagtttctagtcaaatttacccctgctgctgtgctttttgattctggagcatctcattctttcatcaccaataattttgtgggaaaacctggcatcccgactacaccattagaagtccc

SEQ ID NO: 171898 - DNA, 864 bp, Zea Mays
ggctagaacactaagcaattgggtatgttctaacctgaggagcgcgggccacggagaggcggctgttatggtggcggaaattaatttggggagaatccgaaattggtgaacgctggagaacgattgagggtgggagtggggctctggtttcgcgacgatgtagcgcagctgcccgggccatccatttataggaggcttcagcggtggcgcacaatttggccgggcaaagctggcggccggaatcagagaagaacacggcgtcagacataggtggcttttaccgtggcagtcgcaccggtgatcaccggacatacacccagtgagtcactacgacgaggaccagcgcacaaacacgtggcacgtaacggcgacagctcgacggcggtgagagttatccgtgcggccggcgagggaggggtacggcaagcttagccgcaaaacagaaaggagatggtgacggtgagtcaccggagtgacctccagcccaccgacgacaaagatctttcctctcgcaatgttatccacccaaccgagcacgaatcctaacgccggcgacacgtattgcggtggaggagtgatcgacggcggtgaagtgctctgaacccaagcaggttactgtaccatcgactaaaccattcagttggcctgacagtcaacgtttgaactcgattttctctcaaatctttgtggcatcctgtccaaagatctgcatcaaagttatagagccacaatccagctataactttgctacataggattcctacaaaaagtcattggatcctatttagaattaagcttgaagttcatggcatctgtctgtcagtctgaatttcagacataacaagtctgacagccaacctcgag

SEQ ID NO: 171899 - DNA, 716 bp, Zea Mays
gaatcaattagaagcaatagcttgtagtcaaacttgagaaagacaagttgcaggatgatgatggtgattgtcaccccaagccattcttctatcgctgatacacaccccgttaatagagacattccaccaaagcacgccacactgaaaactaatagccagatcacctgaagagcaatgaatgttgtagatcggggtagaacttgatgtggtaggcaaattcgctttgcgcttgaacgatgcacacgggatcaacaagagtggcggtggtctccacctgcgaaccaaacttagagaaactcagtgtaagccattctgggtggtgcatcccaaaaaatagttcttagcaaaaggtacaaacctaggagacaacagtgtttacggggatgcaggacgaaaagaaggtggcgagcggcatgttagctgtaccttggagccgaacttgaaatctaataaattactaacaatagaaagaaacgccttgatcaaacaaagttggacataaagagggagatgtaaaaaaaatagtaggagagaacttgtttgcgttagttgtacccataggtgctatgaggtcgataccaatcttggactaacaccactgcgacatgagccaagaataataggttatcctaggtacacatcaacaagaatatgagtatcaattcaattcaatcagcttcaatatccttctagcgtaaggtgataatacaaacttg

SEQ ID NO: 171900 - DNA, 497 bp, Zea Mays
cggacctgtagagtgttgaccacggtgagcccacacacggcggcgcggagaaccaaattgggggaagagagaaattgggaggctctagtggataatccgaggtaaggaccagtgcgatggatgcgtaattacctagcgaagccgcgtgtgcgctcaatttataggctcccggggtggtggcgcgtgaatttgtgttgccgcggtggtggtcggagaagaaaggggttactggcgcacgagattagtggctttcaccatggcggctctccggcgatcaccgggcatgcatgacgtgattcactgcgacgtggtactgcgcttaagcacgtggcgcacaggcggcaagcgaccaacgacggcgaggtttatcccgactgatcgacaagcaagtgggtacggtgaacctagccgtgaccaagccccagtcgatccggccgtgaagatctttactctcctcagttatccactcgtacagtgcacgaatcgtagcggccggc

SEQ ID NO: 171901 - DNA, 597 bp, Zea Mays
cgcgtcttgcatgcacggtgatcgccggtgtgctgccacggtgaaagccactaacccaagcaccagtgacctcccacccctccgaccgccacgcatctcaaacccaaattcaccggccaccgcttagcgatcctataaattgatggtcgggtctgttgcgccatgttatcacgaagccaacgcacccacacttgcctccagttgtccaccagagaccacgaattgctcacttcccccaaactgagtttccgccaccgtgaaagaatcctcaccgcggccagctcgattcaggtctgctcatgacctttgccctctcgttttagtgttcttgtgtgcccctgatgctccccgaccaacttgattgaactaggatcccttagatcaccaggaacgcggttgtctatccgcgatggccgctgtcaccgtggccagaacaaattgggtagttgttcgtgaaattgagtgaggggaaacgctcattagatcttgaattcggtctcggctaaggtagggcaccggtatttgagtgaattggccggtacacaagctcgacggagctctgcgcgacaccgcccgccgtcagggactcgattcgtg

SEQ ID NO: 171902 - DNA, 455 bp, Zea Mays
gtggcagccgtcgaagggaagtactaaaggagccttatccattcgttgttcgcgcgaaggacacgatggaggctagcttctctccatctgatgtcgatcgtgcgtcgagggaaaaacgacgatgcagacatgttgttgtgtgattaaaaagaagaagaataaatgtcatccgttggaaaggaatctgatggatggcattaaaaaaggcgacgtagcctatttggatgagcttgtagctgcacaacttctactatacgctgaaggatgcgaaggttctggaagtcagctccttcatcacgtgcaaatgtcagtagtccaaagctctcagcttcgtttatacaactatgacaactactcaccgtccctagacgaaggtgtcctttggtatctgtcctgctacacttgaaacacgctaaaaaataactggttagttaatgttttgaggacctttggct

SEQ ID NO: 171903 - DNA, 281 bp, Zea Mays
agcgatgactactttggcatgtcaccacctctctatttaaaccaagacaatttctacctacaacgaccaaacattcatgtcgagcacaccttattttaccatgtctcgcatacaaccatattgtggcgtgcactcgagacacttcgatcatcgtagcgtaaccactaatatatgaactccgacactcatgtcttaacaatacatcctccacgcaaactagcattttctaaactactcgtcacatcaacaaatatatcccctatataaccacgaatctcatc

SEQ ID NO: 171904 - DNA, 300 bp, Zea Mays
tgcctggatcttacttacaacagagctgtcagcacggcgctggcagtagaagccaagaacacatgccagggaaaatcaaagggatttggaggtgataggtctaatcagggacctaagaagcgaacaaggttggtaatccgaccttttaatcagaatcgttcttcgcctcgtccaccctcatatctgttcaaacagcctattttcattcgtcctaccactgcccccacttctacaaaccagccgagtgcccctggtgctcgtttccccactctccctagttcttctactagctgcttcaac

SEQ ID NO: 171905 - DNA, 720 bp, Zea Mays
aagccttaaccttcatttctccacgaaaggactctgactcgaatctcgggacgagattcctttaagggggatggctgtgacaccccagtatcacctagggtttcttctcagagctaactcataaccattatcatatgtggaccaaattgagtaaaggacttcaaaaattaggaacaaaggtttaattaagactttttcattttaagaattatgccttaaaccatgtcatgcacctcagggtgagaagaattcacaaaccctaaataaccctaaataggccattttagtgcaagagggaaaaacttgtaaaaagactttgaaaaacacagaatcatgatgagaaccaaataacaaagttaaagtgcactaaatgaactacaaaacatagtcagaaagtttgatcaccaaagctttgcaaaattctcaaaaaggcccttcaagctaaacttcaaaaaggaaatttagaaaattcagaactgaatttttagccctttgtaaagttcagttgtgttctctgttttccaaaactcaaatctacaaaacccaaatatgaaagtggcgccaaattacctttgaacacaccctggagaaatttgggagcaaaattcagccgtttgacatgatcttggcagggatttgcctcgggactccaccctatgacactgccacattgccgaagcgacaactctctgcccttgacccgaaatcgctcggctccac

SEQ ID NO: 171906 - DNA, 418 bp, Zea Mays
gcaggtgtgaggtgaccatgactgtgcactcatgactgaggcaggaggatttgagctaggttttgaggaatcaagcatgggagtgcggcggaagaggcgctctcaaatgttgcgatgacgatggaggagaaggttgctcgagagttagggtttgagtaacccttaaagctagtagatcgagtatttataacctttcgaaggaatgtgaaacatcacgtgaaactggagatagaaacaaagggcgaaagccaaagcggtatgttggagttgacgtgatacacagattctaaagcgctagttcgataatttttggctgagttgtatgtgggagctgaaccggcacacagattctaaaccgcaagttcggtattttttggctgagttgtgaacagtaaaaggctgagtcctaggactcagg

SEQ ID NO: 171907 - DNA, 820 bp, Zea Mays
ggagaacgtgggggacaccatgttgaatggttgcccggagagggtggctactggctagggcaggtcgttggccgaagtagggagacacacggtggctacttgcgggagtagaggcatcgacggctcaccggtcgagtgactcgcgtcgactgccaaagcgctggttggggcggacgcatgcgcagcggccggtgcccacacagttgtggagcgtggtcaccaggaggccgataaggtggctaatagcgacgtccagagcacttatcaagatagacacgcacgcagtggttagggtgcccacgcgttcgtgatggaggcctgtggtggcgtcccggtcagaatgggctaggggagcatcggtgctcgatagagttgggacgacaagggtgagcataggacgaacaccaccgaaccctagaggtcccaaaatgatgcgcaggggaagggaggagtgggagcgaagagggacatggcagggaaggtcgttgccgatggtcgagggtggtcgtccatggctagcaacaggcgatggctggcgacaccagagggaggatagggtcggtggctagggaagagcaacaatggaggagagaaaagaaaacatatgctctgattaccataagttggaaaccctaacactaaccagggttgggagaggtatattaataaaggagttacatgggccaaggcccaatacaacaggggcctaacccctaaacaacacacatcatctacattccaacatagaggtgtaccatgcatctcttagggggtgtttgggaacacaattttttgcagtattggaacaaaactgtagtat

SEQ ID NO: 171908 - DNA, 661 bp, Zea Mays
attggaaagcgacttggataggtcctagggtgacagtgatcagaaacacctttttgtttggggaggaaaggagggacacggaggcgggccttgaggcgccgccatcgccttcaccaccgccggcagatggggaggccgccggcggcggcgtccgggtacagctagggtttgggctcgatttcttttgaatcaccttttctccaagttcccttattgatggaaccagtatatcagactaacagtatatcctcggtcgacccccttattgatgaaaccagctatgcactaggtacctactaggatggatgtgttatgcaccggtgcatctaacagagttgatgaagatgcgaccaaacttgaatggcagacaacgagtagctccggtgaagggagcggggaggatagttctagtgacgacaatccttttcctcctatacctccaaggaagaaaaaaacatcagatgagcttgatgccgactatattcccaacgatgaagaggtaaatagaaatatgtcgactatattctaaaataatgttcatatatgaaacaccattaattgtttcaatatctagatttcaaatgaagagaagaaagaggatgcatgttctacacgaaacacggaggatgctccgatgcctgaatcatatgtttcacataag

SEQ ID NO: 171909 - DNA, 677 bp, Zea Mays
ctctccacctactcctctgtgatagtcaacaaagaagacaaagcaaacatagtaggtgaggggttagaggaagaacacctctagagaccagggtcatggtgggtgcactagggttctcgatcttggcctgggtcttgttgtcaatctcagtagacttgagcttgctgaatagctcatccatggtgagagtctcatagttgtacaactcgataatcgttgagaccttcacctcccaaaccatctgatctagagcatgtatcaacttcagtgctctcccatgatcatcatagggaagctatgccttattggcacacatcttgttgacaatcgactggaattcagataacatcatgtcgatcgtctctctagccaactgcacaaagttctcatactcttgtcggtacgtctcaaatagtctagtctttacatgatcattgccctcattgaatctctcgagggtggaccagatctggttagtcgtagccaaatgtccaactcgctcaaactcaggaagcgagagacacgagaataaagtgtttcaagcttttttgttcgaatcatggaactccatctgaatcggagtgatccgagcactcgcatcatcgaacgcagcatcgagataaatctcctagatgtgatacccaatactctgaagatatctcaaaatgtggatcttc

SEQ ID NO: 171910 - DNA, 781 bp, Zea Mays
accgtcttaagtcgttgctgacttgagccgattgctccgttagggtatgttagtagggtatagtggtcaccctaagtcgaataagcgcgagcatgttgcaccgtcttaagtcattgccgacttaagccgattgttctattagtagggtatagtggtcaccctaggttgagtaagtgttttgattccaagtttaaccaagtcgaagtcgatggataaccaatagtttgaatgcttttgagagtgaaatcttttcttgatgacatattttccttgctccgatagttcttgctaagggtaaaacttcctgaggtgctctatattctatgaattccctacttccgtgccatccatttgagtaagccgatatgatcctggccgagtgatctccgacaccatgaattgcccttcccatagcggcgataatttgtgccgtccttctcccgttagaattcagcgaaggaccaagtctcccactacgaaggatcgatgttgtatagtcttatcatgatagcgcctcagggtctgctggtatctagctgactgaattactgtattcaatcgctcttcttccagtacgtcaatatcttctagcctggtagcttccgcttcagctatgttttcgaagaccacccttggtgccccaaaccgaaggtcagcaggtagcactgcctccgaaccatagaccatgaagaagggggtgtttccatgcagagctcgactgggttgagttcttaggctccaaaccacataaggtaattctttgatccacttccctgcgaac

SEQ ID NO: 171911 - DNA, 647 bp, Zea Mays
cgtgaagtggattggcgaaatttctcttatgcgctcgagtatcgtaaacacgtaggtgaattagagaaaagggtgagtcatgttgtttgatgtgatgagcggaattagaaacaccgctttatgcaaagttgtatatatattggtgaacaggtgtgtgccggagtgtgttatattaatggtcgtgcaaggatttattgaagtgttttgaatgcatgtcgtgatgtggttgtattcgtgacaaggacggtgtgctcgataagaaggttcggtcagtataattattattttggcttgtatagagaggtggtgacatgccaaggaagtcatcgcttcctctatgtttataagttaagtcaatgcacattatgcgtttgttgaattatgcttcacatataatgtatggttgtgttcatgacgtccagtagacgcttcaagtaatcgagtaggttcaaaatgcaagttgtgtgatagagttagtttgttttagggtgcttgttgaaatgcttcattcatgtgataaacatgtatggttagtattattgaatcaagtatatgttgtgtaatggtgatatttgtgatgaaagtaggtgtcctatatttgtgtagtaaagcttaggttgaagatgcaagcgatgcgagaaatgttt

SEQ ID NO: 171912 - DNA, 546 bp, Zea Mays
tattttctactgcgagtagtcgaaggctccctcgcggaagtacagtctcaaaattccaaactaagcaaggaacttgttaatactcaaacaattttgaagaaaaaatcagaacgcttcgagcaggaaacaaaagaattgcaagcaaaagctgaagtcgaagttgagaaaagtacaaagctacaagagtcattataagaccttcgggataaatgcaaagatttcgccacctgttgggtgaaccgactaaaaggaatattcaactcggttagggatagttctgaagaaattgctccttcggctgaagatatccccaaagccttcgagcatattgaaaatgaagttgaagcactcgatgaagttataactaggcacgggaatttctgggctctgttagcttctcgtggcacaactgttgcattttggaaggccagatgtactcatgctaaaatcgttaacaaaccaacctttagcctctcatcattagacttagttgatattcctggtgaagcctgtagcattggaaacagatttatcactcaaatttgg

SEQ ID NO: 171913 - DNA, 517 bp, Zea Mays
gtgggctagtgcggccaggggtagggggtcatggtggcggggttaatttggccgataagcgcttgggatggccggcccacggcgaggtggcggctctcgcggcggtgaggtcgctggtgaggccacggagtgcgacgggggaggcgaaagtggtgcctcgtgatcctggagaggtggtgaagctcatgagctaacttaattgaaccttaggctactagagagaggagggagaactcaccggagcggagggagagcgcaacggcgctggctcgattgagctcgggggaggggtgagggatggccgaggctggtgtgtggagctgggggagctcggggcagcccttttataggcggccagggaggggggaggaggaggtggcgtgcaccggcgaggcgcgctggcgacgacgatgatggcgcacaatggtggcgacgggatggctcgggcaggcggtggtgacgggatggctcagcacaggcgcggggacgcaaggcgccaatttggctagtgggcgag

SEQ ID NO: 171914 - DNA, 803 bp, Zea Mays
ttcaccttatcgtaatagtatttgatggaacccgacccttaagccaagaatataaaaccaggaggcctcggacagttcatatagaagctcatcaataatgggcacatgatatttggatttcatcgtcacagcattcaaatgtctgtaatcaacacaaaagcgccaagtcccatccttctttactagcaacactagggaggagaaatcactgacactgtgttgaatcaacccattgtgcaacatttcagcaacctcagcttctatctcattcttcattgcaggagcaaatcggtatggtctaatagacataggtctagcaccctctatgagtgggatagaatggtcacatgcacgactaggtggcaatgttatggaggttaaaatagatcatcgaaggactgaagtaactgacgaacaacatctcgcaaggacaaatcatccactgaaaacagttggactatgtttgtcaaggtggtatccacctgtcttatttccaaaatagttcccacatgaatctctggttgcactccttttagtaccactgtctaccccaagtaaggaattgatagccacttatgtttctgatccacaaacattggactaaattgctctaaccagcccatccccaaaaatatatcataatagggtagaggaaggaacttaaaggttgtggaaaatgtcaagtcctatattgaccattgtgcattgggaagtttagaagtgtattgcaaggtactaccattggccactctaacagatatgggacgttccattagcatgagaccggatagagaaataacatg

SEQ ID NO: 171915 - DNA, 474 bp, Zea Mays
gggcacggtcgctgccgatgcgggtcgcagcgatggcgtcccaggcctccttggcagtccgcttctgggaaagcgaaaactgcatctcggacgggactgcagcaatgagggcatccagcgcccaccgatcctcgtggtagtcgacgttgccgtaccgaactgctttccacatttggcgaacctggagccgtatcctcatcaccgcggcccactcgacgtagttggtcttggtgagggtaggccacccaccgccgggaccgatgtccctgacaatggcctgggccatgcggcgaccatggtaccgatccggggagggagagtcgcgccgcctgtagaggccgcgatctccgtcgacccagtcgccgccgccgggagcaccgccggtgcgtctacgcccgtctgggctgccgccgcgtgcgccctcgcccggagcgccgtcagcgcgttggcgcctatctgggctgccgccacgcg

SEQ ID NO: 171916 - DNA, 343 bp, Zea Mays
ttttttttttctaacacacatctctgacattctagatttttctataggaagtaattggacataaatgttactgaacagagctaatggacagagtttctgaaacattgtgaacagagctactgcagttggtgtagtttacgtttagcatatctaggatagattacaacaattttatttcttctttgtcctcctcatcagattttcttccatgaacaagcattttatcagttggtagcatctttctattcatttatcaatcgtatctatcttatcactagccgtgcagagtacaaggctgagcacaccacagctcatgatctaatcatttcatgtgaagattaaa

SEQ ID NO: 171917 - DNA, 623 bp, Zea Mays
acctgttcaatctcctctttcctcgggcaccaaaggtagaattcatagtttcatcttcagctttggtatatgcccctaacagttcatcactcgttgctttaatggcatcaatccagtcatcgtcaagctcaccaaattgatttctgtaccgacaagaatacttcaaatgaaccaaactgctctttccaacattctgacttgtataagccccaacatcctttgacatttcccactcggcagctaggggccataccatgaaagctatgtgctcttgcactaagtctctagtgtcgatgtagttgcacacaatgttgaacgcgactaggcaggattgagatttttttgtattcacaacagtcggtcttttcaacccgaagttggatcgaatgggccattggatcacatccttcacatcattcctctgactcaggtcatttttcatgtaaaaccattgcttcatccacaaacctgaccatttcttcctaaaagttagcacatggtatcagatatctaaccggtacacgaaggtgtagcatccaaagttgtagtgatattgctcttttccagtggccttcgtctgataggacatttcatgaatgttacaaaaataatcggcatctggt

SEQ ID NO: 171918 - DNA, 689 bp, Zea Mays
tttagaaagtgcgcgcagcgaaggggtatcttactatcgtagttgtccgattagccttggacggtcacgatttaatcctatatctgccaaaccggtacgccatagggaccattggattatcaatcaacgccctagattttatgaagctcggaccattcctaacccacggattcagatccaatggctgacgcgcaccggtaggaacgcatcaatcggagccgttcattcgtagatcgacggctcccgtgtcgtcatctccaatccgcaacaggccacggcggcgcgactctgcccgcgatgcaccctcaccggcgaggtacccgacaggcggacaagagcacaaaacccccaatccgaaagccccaacgcgatgaagagaactaggcgaatcctatggttagtggctcacctccaatcgatagtcaaggcgggctggccacggtatgcggcggcgccacggcagtgacggtgctctggcaagaaattgccagtacaccggcggtccaaccttagcgcaggagccacggacaccatcgccgcaccacgacgaagcccacggatccaacttcaggaccgcaacgatgctaaacttgccaagcccaaatggcgaccaactccacctcacgattcggttcctgatttgatttggggctagatacaatttggaggagagatggggtaaacgcgcc

SEQ ID NO: 171919 - DNA, 831 bp, Zea Mays
ttgtttggcgcccttggttgtcttgtcataaccgaagcaccatgtctccttcttggaacccccaaggtcgaacacgcctcacatggtagcgtcggagtgattgttggtacctggtcgagtggaggagtgttatgtcctgagcctcttccagctggccaagcgagtcttcacggttgacctggttgctgctttcgttgtatgctcatactcagggagccatgctctaagtctatgggtaagacgacctctaccccataggctagaaaaaatggcgtgaaccacgtggcccagctcgaggttgtccttaaactctgaatcaccgaggagagctcggtaagccatcttattccaaacttgtttagttcattgaagactcttggcttaaggccttgtaagatcaagtcattggcacgctctacttgcccatttgtcctaggatgagccacggttgaccagtctacgtggatgtggtggtcaatgcagaagcttaggaatatcttccttgtggactgtgtgctgttgtttgtgatgatggagatggggacctcgaagtgatggatgatgtctgtgaagaacgctaccgcctgctcggatttgatgcactccccatgccacgcgcgcaccggaaacctttgccccgcgactctgttacactgcaacgcaggacccacccgtcagctcggtcatcttctccgtaacgaacgccgccgccgtcgcgagcttcatcgcttctgatgccgccttttgcacgtgggtagttgtggaccgagtcccttggggataaataggatttccgcgtcccgtttcgctcctcacgcccagctgtgtgat

SEQ ID NO: 171920 - DNA, 576 bp, Zea Mays
ggggtacgggccgattctgaccattgtatgcttacccaagagcctagattagatcaggttggctcccaaccggaagccaccctagccacccgatcaaataacaacgctcaggatttaaaatgctgagatggaaacccgtacacccgatctttatccaatggactagccttaatccactcaaccggtatcccctttttgatattatccgctcaaacctaatcaaatgatcataagaccatcttccacctgtgggtgacctgggcgacgcggcccgaggcacacgtggtggcggtcactggcgcgcgcgccattgagcgcgagaaccggttttccccataaagaccatcgctacacgttgcgagtgcataatcgaacgccctaattgtattcttacctaggattagagtgccggtgagggccacccacgggaggtagcggtttgtgaagtccggcgaggaattctcctcagctcgcaccgtcattgagcacagagagctcacgtacaccatattcatgccctggcgaagctacctaactcgcaccagagggcccgacgatggtgaatcggagtccccc

SEQ ID NO: 171921 - DNA, 687 bp, Zea Mays
ggcacatgagtgccatcagttgcaccgatgcagttctgcaaaaaaaactatatgtgaatttctaaaatctagaagaaaatggatatatattgggcaagaatagaagtgccatcaccttgaagtaaggatagaacctaggattcctttcaatttttggatgcacttgaattggagaaggaggcttcaaaaatcgtttggcgagggaagggacaactatgtcaaaaaattgctttatatgatggtggaaagtgtcaccactatgcccgaactcttcttgcaggtcctcaaacaacgcattatggcttatcatgtatagaaagaacccgagcttttcctcaacttttatccttgtgtcacgtaccaacctttccttcctaagatagttggctagggctctaaaaattccaggttccattctaaatgctactcggcagttcttgacatgcccttcaagcaactccgaaacatgctccttgccacttagcttggatgtgtgtcgccgcttcttaaccctcctccctctaggagagctagaacgcaacaagtgtaatgcgggaaggaagaacataaccatatcatcatcatcctcttgtctcctcctaatgtggtccattaaccctgtactcattacaaaaagataggggccaccaggtcccacaaagtacctctcgaggatggtaccgagtc

SEQ ID NO: 171922 - DNA, 508 bp, Zea Mays
gtttcggtatgcaaagttgtagcacccgaagttcttgtgcagaccatcgacccttgccttcgtctgataatgaagctaatgcactcgacagaacccttcggcattggcactctttccttggctttgaagcgcccaaatatacacgctgaacctaacaatagcattgtgggttagctggtgtaggtagatttcgaacttcttcaaaacctcactgatcatatcgtaaagggggaaccaaagtccagccctgaagaagctcttgaatactacgactttatcctcttttggctcgggaatcatctcctctctagcgaaacgaaccagttcatcatcattttttcccaaagtatcctagtttcttcatcaaaactagatcctctgcctttactatggattttccgaactcgacatggttgggttttctcgggcttaggatactgtcgtcatcctcacttacattttcactttcagctttggcaacggtttgttcagcttcggcatcaaaaac

SEQ ID NO: 171923 - DNA, 615 bp, Zea Mays
ggggaagttacagcagtcacttcgaggtacgtgtcggcgtcggagatggctagagttggtcggtcctcgtgcgtaggtgggggagttcgtcggtggtgagtgattcggcctgctcatggcgggatggttcaatcggttggctcagaaagctttaccaagtgacgcagaggtggtctacgcgaggaattggaaaatggcgcagtgacttacccggtccatgatcgcctgtgagcggaagaagtccggcgagggtgattcgggttttccgttgaggcagggtctcagttctccttggagaagcttcacggctccacggggaagctatccaggggctcgggcgagactaggtgcctacggaaatggctggccacggtggccggtgatcgggtggctcgggcgggcggcgtagagctcgccggagctaagagctgggtctagacagtgagggcaagtgtggagtggagtgttgcgcgtctggggtggctttataggcgtgggcgcgttgcacggtcgggcgtggaccagcgcgggcgcgcgggctggcgtgcaccggcgcgtcagccgcggtcgagcacgtggcacattgcttctgctcctgttctaacgccgataggc

SEQ ID NO: 171924 - DNA, 729 bp, Zea Mays
agtaattatactttgtggacacaacgtgactctaagacagtttcaaacaactttcttatcttaccttctattaaatcttctatttcaattataatataaaataatattttgcacctactggagatgacctaaccctccctgtctttgggactcgggtactcgagcagccgcagccgactcgtatagcctgaatacctgatcatgtatattaggagggccggagacagagatgagaaatccgacttaagggtctgtttgaaagcatattattttttaagaaattgatttctatctctagtttctagaagttggtttatgaaaaaaaaactaggtgggcatgtttgaaacccggtttataagaaatcagtttctagttttttggatacataatgactaacttacccttcctttattttaaaaagccgtgtcaatagacatagacgtaaatttcacaaaatcgacaagggcatgacgtaattaagagacaaaaaatggttgtaactagagaaagctagctttttggtttttaataaagtaggaatctagtttccataaactggagcataaatagatatatttggaaccacctagtttttataaatcagattcttaaaaactaggtgcttctaaatagaacctaagaccatatttgcttcgttctaggattatataatccatataatccagcttattgattatcaagctgttcacttggctttaatacgaaat

SEQ ID NO: 171925 - DNA, 376 bp, Zea Mays
tgaacttctttggccagcactacaacttgctcgacgacgatgtcgatgatgctttgctgctagctatgctgcaaaactctaggataacactgacaatcacgagggcgctcgagccgcattctgaggagcctcattccaagagaccacgatgttggagaatgactcatccttatgcactacttcggctcgaactcgatgtatccttctcacattttctgccagaggtgacaatacctactccactttaagttctacataactttgttcatattaatcgagtctcatttttatgcttcgtatgtttaggatgcgtcgtcacgtattcctctgcattcttcaatccaatcataacgttgatgactacttcacgcagcga

SEQ ID NO: 171926 - DNA, 381 bp, Zea Mays
ggcacaaagcgaactattctttcgccttttactaaagaataccgtgtgtccgctgcaataagcagcatacgccaacaagtcaatttaggttttgtttgaattaaatttgtgttacgtttaaatcaaacgttgatcagaaatattttcatatggtttgtttaaaggttaacataaaagtgttgtttgaattaaatttgagttatgtttaaatcaaacgttgatcagaaagattttcatatggtttgtttaaaggttaacattaaagtgttttggctttaatcagtttaatccaacatatttttttttgatgttactgagccaagggcttcccccatcccgtgggggataaattcctaagatccccatccatgtagtttatat

SEQ ID NO: 171927 - DNA, 445 bp, Zea Mays
ctgtatagtacttgcccataaaatcattcgagaaatcccattctttatttatctgacttatgaccaccagtgaatcttcgtataccatcaacctcttaatacccagtgatatggcaatgttcaatccatggatcagagcttcatattctgctgcattgttggatgctgaaaataataactgaagagcatatttgagttgttcacctctaggggcaatgaagaggatccctgcgcctgctccctgcagtttcagcgaaccatcgaagtacatccgtcacacttttgcagcctccaggttatctggtacttgttgttcggtccactctgatacgaagtcaactagcgcttgagtctttatcgcaatgcgaggccaaaactcaatgtcgtgagctcccagctcgcaggcccacttggctattcttccaatggcttctttgttgtggag

SEQ ID NO: 171928 - DNA, 2556 bp, Zea Mays
gatagatctcgcggcgctcgatggcacctggaggctgtgttacacatcggcatcagacgtgcttgtgctgttcgaggcggctgagaggcttccactcctgcaggttaaacaacatgtattcagcgatctgtcctaatttgtcgtttcaattgtatgcctacttatagccaccacctagcaatcaattacagattccagcaaatttgagatcgactgaaaatgtcaataacttgccaatcttcacgtttttaaatgttcatactaagattttttttctcgaacatgtaggagagttacgtatctcatacaacccaaggggcaaacaccgcactaggacctgccacacacactaatacatgaccaataccaaggagggggaatcatgaccataaactagggagctatttagctcccactgtacaccaaagtttagcttcctcttttgtgacaccatcattcagtaaagatgttgtcccttaaccctggagcatacttctgcagcccaaccaactttaggacagagtaccacacagtccttgcaaagatacatgaggtgagcaaatgttgtatgttctccttttcttgatcacacatttgatagctctcaggatgctcaagcccccagcgagctaacctatctgcagttcaacactaattcagagcagctagccgaatgaaaaacttgcatcggggtggagcccaagtcttccacatttctttccacgggtcaaaaccaacagccccaacaaagaaactatgataagcagatttggttgagaattctccggtagaggatggtgaccaaatgtgccggtcttctattctagggtgaagttcaacttctgccatgatatcccatggatggaggtattccatcaaggctgcagctgacagccacccccttgatgtccctcacccaagcattattgtccaaagtatcctgcaacattcatcatactagaaaattattgctaaaaatgcaatacatgtttgttgtgtttgttaggttgagcacttgagacattagagatgatgagtttaagagttttacttttggtacatcaacaagatgctttcagtgtagtggatagttcattttcctcttactgtttataattggtgtgtttgagccatggtatttgagaaatttagggagaagggttggagccttgtgataagggtgtttttttggatatatgcaggtgggccaaatataccagaaatttgagtgcaaagatcgatcagatggtggaattgtgaggaatgttgtaaggtggagcatcgagaacttgctggaggtaaccattctatggccgttgtacctattgggggtgtccattttcctgatgcctgaagactctcatttctttcctttcatatctcccatattaattagaagggtgaggctcctgattgcttctcacggatgtcaatcgtgttggtgatcttgctccaccaaccgagtaccaaatcgcttgcttgccatttttctggtttcaagttcggttgggccatccaggagggcaggaggttgcaaggcaccagacccttttggtgtatctgcattcagtctcaagatgatgcccggttatatttagatgtctgtgtaccgagagggcacattgactatgcggccagctgtgctgcaccagtctgttctaagtccaaatgcaattttggataatgagctagcgtagaatttgcacttgagtagagcccaggtttgccagattgagcagatttccagtgctttggggcagccaatgaattgagcttgatagttgccgatagctggtgttcagttgatctgaaataatactagagctgcattgcaactactgtatttttctgaagtatgaatgttactattcgctttgcacaaatcacatccaaaagagtccttccatttttaactgtgcttttatattgagccgaccaacttgacatgcttgattattcaagctacaccttgaatacttacatttaatttaaaatacaaaaagtgacctacgtataaatggagtatcttctttatattgacagcacaactgctggtacttaaatgcatggaccttggaatatataaagagtatgacagttggaggcgtgctttttgctccatatattcatgaaatgctcaccagtttcatattttcattgataatgtcatttgttttcttccagtatccatatttttttcatgtttttaagtacatcataattgtatttcatagaagaaaattaactccttacattgacatttcgcatcttctgagcttagcttcctattctttgctttctatgatgtatcatatttattatccagcctttagtcctcatgttttcaattctttcatgtttgattcttaagtgatctctataggagcaagaaggtgcaacactgatggtctctgcgaagtttgttgtcctgtctaaatgaaatatatttcttcaatttgaggaggtaattctaaatatgactatttgattaaagaaatgcaaagcgaagagttgctaatttcatgctgaaacatttaatttccagtgttagcagaa

SEQ ID NO: 171929 - DNA, 744 bp, Zea Mays
gcgaaaaccaggagaagctccagcccattctctgtgctctgcagaagttacacactgagggccttaccgccacgggggtcgtcaccgctatccaccgctggagggtgctcccattggtagagtggcggttgcggctttcggagatgaagccgggggttgatttggagggttcacggatgtcctcgacctccctctccaccgacgacctcctcagacgggtagcgggcacggtagggaggctggacgcttgcatccttagccaacccccgatgcgtcccgaccatgggtatgtgtccctggtaagtgtccaaccctccttctgttttgtgccgtgtttcttacatctttagttcttactgttgggattttcgttcgtccccaggggttgaggaattttaaactctcccggccaccggtcccggaggacgcagcgggtcgggccgcgtgtaggctcgccgcggagaaggacaaggagaagaaggacgcggaaaaggcctgagctcgcgagaggatgcgagctcgggaagctttggagaaacgccgtcggaggcaagcaagggacgggctcccgttggagccgtcgccggacacacctgacgacgatgatgatgacgatgatgatgatgacgaagatgatgacatggcggcccggcttggcctcagtccggatccgaggctaggccagaggtcgtcgagccagcatctaggtgggctggcgtcaccaacgttcggggccgggacgcc

SEQ ID NO: 171930 - DNA, 975 bp, Zea Mays
caaaggtgtgtgtagctagctgcctggacgttgcagcgctggaggaggcggcggcaagcgcacgggggggcccacatgccatccagcgttcagagaagcttcacatgcaaaagggcccctccgaagaatccaaacgttacgaaaaggcccgtgcccccgtgagatgacaaagcggcaaacggcgtgcctccacccacccacacacacacactgacaaacgacccccctcggtattctccaatccccaaaccctcgtcgacgccgtcgtcttcactgttcagtcccccccacagccccactcccttcactctcctcccctccaccgtcgccgtcattccattcgtggggggcgcattacttctgcggttctgcgccccgtcccgaatccctgtagcgtccaccttctccctcccaccgcccggattccgcaagactgagagcagcgctcgctcgcctcctcccaatctccgcatcgtttctgtccaggtcggcggcccgatttgttgccgggcgtcgtcctcgcccccgccctgcctgccactcctcgtaggactcggtcctgtccggactcccgctccacctgtcccctcctcgcttccatcgccattgccgccctcattttgcccccctcccgctcgaagccgcctgctgctttggaccgtgccgagcggggcggcgtaaatgcccgcccgtgcagaggatcccagacagccttctccgcccccaaaccccgtccttgtttcccaccaattaggagcaggggaaggttctcgcacgcgtgcccatcctaccaacggccaattccagatgcggagggcgtcctgactccacctgccaagctccggcctctgctctgctccgccccgcaccccacccgccgacatgggcttcttgatctgccgcgtctgcctcctccaactgctgctcctcctcctcctcgccttcacctcctcaccagcgtcagcgcagccggcg

SEQ ID NO: 171931 - DNA, 422 bp, Zea Mays
atctaacctaacgaaggctaacctcaagttgagctaatctaatgtaagttgcttaagcaagttggataatgctggtggcataaattagaccctactcctataaacatgattaacctaaaccggttccctataccagctcagccatatacaagtacttgacttatgcgttgggttgcaaaatctgtataaatcaacataaaattataagcacccaagattttcaactatcataacttatcctactcacatctacctgcttgtccctaattcggataacaacaccaaggatgaagaccaaagatgatcaacctcatcaagaaaggataagcaccaattcaagtcttcaaggaccaagcgggatcaccagatgagtcaggatccactacccatgatgaagtcttttccttgctataatctttctc

SEQ ID NO: 171932 - DNA, 376 bp, Zea Mays
aggcataaataatgtgtggtaggtttagctttgtggcccaccaattcatgcatggcaatataacaattgtaggctgatatttattagcttaggtgtggaccgaaccatctaaaagcgtaaatatgaatcacatttatctagtgcatgctggcttaccctccggtgggtgggcatgttgggcacaacaagatgggaccatatcctggaattctctgatggcaacaaggatataaatgaccttttcccctgatattggttgaccattaagtcagatcactgcagcatatctatgactgagcagaactttggctgcattctctggtagccttgtccttcccagttctcttttgcaaaattcccaaactcagaacattct

SEQ ID NO: 171933 - DNA, 387 bp, Zea Mays
ggagtatttaggggaaaccactgcgggagatgaaaaagtaggggatacactattgatgatgtgacccagaaaagtgatataggaggaaaaatttagagggaaccgctgcggatagcctaagaagacggattggttggttggggcagggaggtggtggatccctgtgaagcttgcatcgtgtccctgttaggccaggacatcgacgtgcatgcatgcattgatgcatgccctgtgaagcttgcttggtgtcggcaggacactagctatggcagcaatgcaacctgaagcagctagctgttcttgtgcgtggtgtggtgtaggtatgcgcggcagaagtagggtcgctttcagcactccatcagtattcagtagtgccaacgacaaatt

SEQ ID NO: 171934 - DNA, 697 bp, Zea Mays
gtgatatagtataaatggaggcgataaaagtttcatgtgatgaaatgagtttcatggggatgaaactttgcactatttccaacatatcttgagtcttggaaacagggacatgaactccctatcgagactagccttacttcgattttttccttgtaattagtactgtcttgggtaatgtgcatgatgtgttatggacataataaaatggtgggagtataaacaattggcaggacgcaaggataaaaatttgttcatgccctcagagaatcagagttaatttgttgttacctgttcattctccagggaattctggtatttgttgttaaggaaatttggtctgcattctttggctcctcaaccggatgttggctcatatctgggctggtcgaaatcggcagggaatattgctaatggactcaccaaaaatgtacttgattcccttatcattctaggagcctggatcttgtggaaacatagaaacaaatgcgtctttgatggctgcagccctagtgttaccgtgagtcttagagctgtggatgaggaaagggcaaaatgggagattgctggtgccaaggggctttcccatttagcagcaccattagctgagaattaagaagggtctgatggattcatttatgtatgcttgcttctgtcctccttgcggaggccttttgtattggtctttttagaccacccc

SEQ ID NO: 171935 - DNA, 349 bp, Zea Mays
cccttggcactacaccagtgtcgtccgccgcatcatcgttcctgcttcgccgcatactcgccgcgccgtcgccgacaaggaccatccgggctgaggcctgctaaaatctccaccacttctctgactacttcgtcatctcctccacgttcgacatagatacaaatgtcttttcccccatcggagctgagtacatccgagtgtcctcactgatagggtttgcaaatacatatgccttttctcaattggaactccgtacacctgctcgcacttgattatttctcattgcagctatcagtcgtccgttcatttcacgtaggaccttcctgtgcttccagattgttaatggcgt

SEQ ID NO: 171936 - DNA, 620 bp, Zea Mays
gagaatctgcagccacagccagacaccagcaggaggcccactgggcacagagagctgctcctggtggtttgaactgtcctcctacgtctcgtacctatccaagcgatggggaccagggccaagcgcaagcagccaagccgtcatatcatataatatactaataacagcttagcaacccccaggaaccacccaatccagattatcctgaatcccacggggaattatttgcacgcaggcaggcagatggtgcagtcccccttcttccatgtcatgtcatgcagtcagttcagtgcaggcctcagcgttatctgatagtgcagccgcagccattgctctccgagtatattattagccgccccgcccatgatgttattttagtgcatgacacggtgctccaccatgaggcgctaatccgctaataaaagacatcgttgttagtgttgatgcgtgatgaggtgggatcgatcggctcctggacaatcctcatctcctcgtccctccaagctggacagcactagtttatcctcaaccaccggtcccggatgccggctgcccccaggccccaccagcagcccagctaccacaccacactggattgctgcagaacctaggcaggagcg

SEQ ID NO: 171937 - DNA, 460 bp, Zea Mays
tgggagacgagtatgtcggcctaactgacaagcatgacagaggccctcaaaatgtccctactacaagaagaatctagattactggaaagcttggtcatgacgtcaggtcctgggtggccgagacgacgatgccaagtggtggaggtagtggtggagaccatgacgggaggtggagacgcgccggtggaagaaggtcggagcgtgtagaggggcccaacgctgtcacaacgggcaagaggggtcctggtggccagatccttcacagaaaaaccagaggggtcaaactcaatagaacaagaattgtcggtggtgaaccgatggacagaaaggagattgttggtgatgtggggggctacgagaacgtcgttgaaatagaacggtccagggagaaccgatgcacagactaaggtgacaggcagagtggaaccgtttccaacgacgatcgaggcggggcgggagg

SEQ ID NO: 171938 - DNA, 473 bp, Zea Mays
atagagtcctgactactgaagttgtggtcactgacttcgtcttcaagaacattcagtctctaaaagacagagtctaccctgcttatctgtacactggggtcaacgaccctaccggaattaccaacagacaaattcccaatgaggacctgctgagtcgacttgacttgatgctaaggggcagggtgtcaaatgctggtgccccctcatcttattctgcttggaatctgcccccgtagagtcccttttccaatttcgtttccaatcctcctgttcgtgatggcagtccgggccatagagtgcaaccctccttagaggacattgaggctttcattgctcccttccggaatcttcccgaggctgagaggcagacccattttgagatgccgaccagtacggacgatgctgagatgaacgctgtccttagcatgctagctagggaatcatctgactctgcccgtactgagccaatggcg

SEQ ID NO: 171939 - DNA, 820 bp, Zea Mays
ctgcattgctgatcggactgtccagatcctgatgctgcggacggtccgcggtctatggacggacggtccgcggcctgatacttaattttccaatgtctgtccactttctgattttgaatttcaaatccgaattggtgctcatatatggacatttcgaccaatccaagggttagtatgcatgcatatacatattatgtaattgagtaatgcaaatttttgtattaaactatctagatcaatttagaataaaaaaatgcatcaaaaataccaaataaatagcatagagtgcatatttagaaccgaattgcaacactacacatgcgtgatcaacttcaagccacatttgagagatcgatcacattcatttcacttcttagagaataaaatcttgtttcatccaaaggctttgtaaaaatgtctgctaattaatcatccgtgtcaatggaataaatagagatatctcactttctaacatgatcccttaagaagtgatgttgtatatcaatatgcttagttcttgagtgttggaccggattggtagccaattttaccgcactctcattatcacatatgagaggcacattcttgaaaataatcccataattcaataaagtttgtttcatccataatagttgagtacaacaatttctggccgatatatattccgcttcggcggtagagagagcaaccgaattttgttttttagaagaccatgaaacaagagatctaccaataaattgacaacaaccgaaggtgctttttctatcaactttgcaccccgcatagtctgaatccgaatatccaattaattcaaattgag

SEQ ID NO: 171940 - DNA, 989 bp, Zea Mays
gttcaatttgttcatttaatctgagtacaagttcacaaccaaatttgaattcaaatttaaactctaaaaataaaaaaggaaaagaaaacagaaaaggaaaaaaggaacgcctgggccgatttacgccagcccaccaacgaactctcgtgcggaccacctttcttcgcgcccgcgcactgataaccgggggccactggtcagtagccacctcttccttccatcgcgcgccgacatgtgggccaactcgtcagccttggtgtcgtcagcgcgccgcgcccgctgctagtgggactgcgctgccagcgtcagtcgcacgcgcaacacctacctaagacctcctcgccgagatccacggaggtggccggcacaacagccttccccgggtctcccggtcccaactagccgtccccgactccgcgtgttagtatattgaggcatgggcgccctagtcgtgccctctacctcccgaattctcgtgaaaccgccatcattcgtgaagccatgtgagcagtggagtcgcgccaccggtgaaccccctctgcaccggtgtcccatctcttgtgcgtggccgcgaaggtgcgccaacgtctaggaagtccgtttgtgccctcgggttgtgctgggtgaccccgaatcaaggggaattcctcaccggagtgcgaaacaggggcggaacgaccccttcccatggacaactcgcctgcgtggacaattcctagtaaggaccccttgcccggacccgtcttcattccggtagcatttggaccagccaaattaggttttcatgcgcgtagaccatggattagcctcaccgacgaaaaacctcgtcgtggcagcgtgtgtgccgtggtgatgggctgtccatgggagaagacgagtccaccgccgtccgatcctcttcggagggctaagattagatgtgcgtaccccattgcgcataattaaatcttgaccgctaactctagatcgtgcggaggatattaggttgc

SEQ ID NO: 171941 - DNA, 451 bp, Zea Mays
cctttaactcttcattgtctttgccgattctgaaagtgtggctttcctcacatatcagtattgggttcagataccaaatccttttacctccacaatcctcacatatatgtggaaatatgagcgacacttacaatgcaaacagagtcacaagttgcacgtcgagtttctgaaggttcatcattaaccacatatcctcgaatgcaagaaaggccttttggtatatgcacacatgtatatgcacactaatggcgtcaatgccaactgatgatgcacgcatgtaccagtcatgcaaccttttaataccagcagggaccttcctcagtttctcaaaagttagtagaggtctggccagcacatattgtttaggcacatttttataatctgccttagttgggatctttatctttgcagccattgtcttagccttttctacaaactcctcatgctcggc

SEQ ID NO: 171942 - DNA, 366 bp, Zea Mays
ttcatcttccttgagctgaacgatcccttggggcacatgatgttctcggaaagcagtttcaaattctgcccaggtagcatctctgacggcagtgctgaaggtatcccaccatgatagggccatctcggaaagttgatgagcaaccaattgaacacgctgattctcagggcatccaatggcttctaacttcctttttatcgtgtgcaaccagtcattagcatcgaggggattgctggatccagcgaatgtgggaggcttgagccttagaaaatctcccatcctgtcttgtggtcttccaccattcgggcgctgattctccagacttctagtgaggacttcaatcagtcgggtttggttggctagaac

SEQ ID NO: 171943 - DNA, 829 bp, Zea Mays
ccgccacgccgctgtcgtcgaggatcggcaacgtggccaagatcgccgtccttaggcctgggtcatcacagagcaccgggatgtcctgggggagtatcagggattcagggacaaaagtctcccagtaatcccccccagcaggagttccagctcgtcccaggacagatcggtacgcgacccacgctagatcctaccgatgtcgttcgggctggtgaactaacaggacaagcgcggcctcctctgcagtggcgcgttccggcgcttcatgagatcgctgaccacgtgcattgatgtcaggccacccgtagccaagaccttgatcctgtccaatatgggcaggaactcttgcgagagggatggcttcgtcctccattgcttgcggtcgagcactggcccatcgctcggcaggatgaggcggtcgttggcctcggtgctggtaatcacccagtcattgcgccagttttcccacctcgcaccgccaaaggtggggatgtagactacggccggatctagcctcgtctggaagtagttggcacttatgtggtccctagtcttcccggacttgagcagcacaaagaagtagcggaagagggaagtgcagggggccacacctacgaacatctcgcagaagtggacgaagattgctgcttggaggatggagtggggcatgaggtgttgaagctgaagcccgaactcctccagcagcagcaggaagaagggcgaaattggcagcgccaacccgcaagagatgtaggaggtgaacagcacaaactccccagcggcgagatcgccaaggggggcagcgccgacacggattcttccggcgagc

SEQ ID NO: 171944 - DNA, 524 bp, Zea Mays
tttccctctaaacatgtgcggcccaaactcatcagaccgatgcaggtaggtagggcaggtctgtcagccacatgcgcgcgtgaacatttggggcgctggggaaccgggtccactcgccagtcgtagatcctctgtcgccgcgcatccgcgccctgccagagaccgcgcttgagttgccgaccccacctgtcaggcgaagttttccctcttctgtttctctctgccgcatgggacccacgttccctgttcctcttcctcgccgcacatctcgggcgagtggttgaacgcgtggcacctccgctaaccacgtccgcacctcggctcggtttcaaaagcgggccaaagaccctcctcactttttcccctcgactcctcccactgcgccatcaccagaaaaagaaatcgctgccgctagggcagctatccccgtcgagctctgcttggatgctgccgagcgaagacatcgccgtgactcgaatcggaagtaggagcgatagcttcggttgagttggtggactccgctc

SEQ ID NO: 171945 - DNA, 720 bp, Zea Mays
gattgttctttctccattatcactagcatattggaggaatgtttcatcttcaaatagatcttccggttcatcttccccttgtctctgaaggtcttcaactatacttgcgtgaacagtaaaagaattttcaccgaccaacgcgtcaatgtccatgttgacatcataatcttgaatctgaaaatcaacacactcatcatcttggtatgacagctccacaccctttgatatttcattgcttgaaatttcagccacattccacaaatgcctatgtgagaatttttgaacaactcgccagtctccacgatatttggtgtcttccaattaaaatacctttgtcgcctgtgtggatagaataaaaggatcatccttgtagcaaatacatgcttggttgatgcttctaaaaaatctgtcatctttcatccttgccctgttactacatgtatcaatccaatcacaacgaaatagaaccactgaccgatgtcgctagagtctgcattgtactgcagctgaattatttctttcaaacggccataaaattcaatatcttctccattatgtgtgccatcaaccataactccactattctgtgtccttctatttttctcacgctcgatagtgtggaaccttacaccaccaacaatacatgctgaaaatattcttactcgcagatctggttgacatgacaaagcatataggtcaccacttacatcttcaccattc

SEQ ID NO: 171946 - DNA, 914 bp, Zea Mays
cactcaccaatgaagtctgatattggtctgatagtgagttttgatgaactttggactccattcaagctcgatggagtaagtaaatgatcaaggtttctatagtcgaattgtatctggtttatagagctacaactttggtgtagatggatcaatagctcaccacatgaaaaatggagaatgaagcttctcaactcgctctaacaggcacactgatgaaggtggccattgtatagtaactaaagaagatctgaggtgcgttgcacctcgccaccggtgacctcgcgcctggattcgtgctggccgctgcgattcgtgcccagcgcaaagtggataactaatgggagtaaaagatcttagcgcccggattggctcggagtcggtcactgttgagttcaccgtacccaattggtctgcgaccgaccggaatgatcttcgccggcgttggccgcttaccgatcatgcgccacgtgcctgggaggtttaacacgtcgcagtgaacccttttagcaagcccgtccatcgccggaggccttgccatggtgatagccacgatcacccgcatcactacatttcccctctctccggccgccagcacacttccttcaaattggacgccaccgctaatggacactataaatcaatgccccagtgagctccgttaggttgtcacgaagccagagcacccacccttgcctctgattagccaccacagcacccaaatttccttttttccccaattcagttctccgcgccgccgtgaatgagctcaccgtggccaaccttctgcaggtcagttcaagcttccttaattggtgttctagcctccctcgtgtccccggtagctcacagacctattcgattgaactagaccgcactggattgccctgaacaccatagtttcctctcggttttcg

SEQ ID NO: 171947 - DNA, 480 bp, Zea Mays
tgttctgccctgtttggagttactagcttgtacccctcttacctgtttttagccatgacacaggtcttatggaaagtccacaattttctgtctcctcagtcctcactaaagctgtcacttattactactactacctccattgcaaggagcttgccagttttgaccaattttacattctaattagacagcctttctgggtgcatcattttctgattttgctcttatgattaatggagatgtgtagctgtgccagtgttaatcacctgtagtccagagtatgacagtcctttttagagggaaaaaacctaaatctgcagtaatattggcaccaacgagatgggttgtgcgcttgcacatttcatgagaacagaagaaatattttcagctatcacctgctgttagtttgggctgctgtcatgaagtttacagagcactccatgctataattttcaaatgttggtatgtagtgttctgttccaa

SEQ ID NO: 171948 - DNA, 854 bp, Zea Mays
acatgtttgacccttacattggtactctcatgattgcatcgctaataaagcatctgccaaattatcacggaacaaattcatattatgatcttcgtcacctaactggtcgcttctacctctactatgagatgaaattggcgcttccattggcatgtagttgtcatcatgatcacagatgtcgaagtccatatcaggcatcgcactttctcagataaagttatgaagagccatgcatgcaagtactattttgctttgcttctccaaaggatatgacggtaggtgcaacaagatcctccatttcattttgagaacgccaaatgctcgctcaataacattgcgaagagacgaatgcacatatttgaatacctccttctttccgcaagggttacatccttgtcgaaactcggccaagtggtactttgtgcccatgttcttggttgttaaggtaaaaaagatgtcacgataggctgatttcgcaaacagctggctcgccatgaaatgctctgcactcccctctggtgctccgcactctacaaccaaggacatggctttcttgatcgaatctgactgcacatcaccgtccactgccttctgtgtggccgttgcgttcttttgcattgtctcccatattcccttcatgatcctcaccatagggctctttgttttcttctgcggactggtagcacatatgctgctttgcccaactctttttctgccatcgacatctttttgtcaccacaaccacctttattgaaaatctgctctccaggaatacatgcagatgatccatcaacaaccacatgctgaaacatgatttcaaattgatcgatccattcaggggggcgtacctaagc

SEQ ID NO: 171949 - DNA, 915 bp, Zea Mays
gtctacatgatatgacaaatataaaaactatggcatagtttattggttaggactcaagccatggatacaagtccactttagattttgtatgtatccaactcaattcataagtgttatggtggatttgtgtgaaatttagtttaaattgcacataaatttgcatcacatgtttagatttacgtggatacataaacatccaaacaaaaccttagctttggacgcagatgatccaataatactaatacggtccacataaatgttccaagttgcaaacatctccataagctttgtgttgctcatgtatttttccttttatttttcactatcaaacaatgcaaattacaaacagactaaatcaaaagatggcaggagagctaggtagcacacaattgtgaggcaatcctaaggttgtggctaggagatcgtgcatatggccatgcgaaacactattttgcagtgtagatttcaccattcacaaagtgaagtttaaaatagaaggtaggatagataaggttgcaagatatagcgtaaaaggaaccatagtcatacctgtttttcttgaacatgcttgcatgctttcgctatcaacgctatcttggattccataatgggctcgtcaagtcaaagaaacaacaactcaaaacaaccatgctagcgtcaagttcaactactattagtttcatgctgcccgctagccatatgtatagtgtttacatgtgtgtcctatcgtgacctttcctcaaaacatgtattgtgttgtgtgttccggcattgctacactactcacatgactcctcactcctggtatgtgtgtccatggatacatggatcatttggttctttatttgtttgtcatttcttgttgtatagtcaaaatggttcacgaaagatcacaggcttatattttcatgttcg

SEQ ID NO: 171950 - DNA, 650 bp, Zea Mays
ggtttatatgctcagatatggcttgctgtctgtacagtgtggtactagtcttgctagcgaatgtggcggagtaatactatgtgtcaccactcaccaccgtgctttatacttattcatcacaacttgttatacccttgttaattaatcttgatggcacgatttatatgctcagatagggcttgttgtctggacggtgtggtactagtctagctagtgaatgtggcaaagtgatactgtatctgtgtgtcaccactcgctagagcttattgaaatgactatgaaatttagttaaaaaaagagaacaagctaaatttagttaccaaaaatgtggcaaagtgatattgtgtctgtgtgtcaccactcgccagagcttattgaaatgactttgaaatttagttaccaaaaaaaagagaacaaggtagatttagttaccaaataaaaaagagaacaagctcagagtagcgagtgtcatctccacaaatttcagaagatcccaccggacctaccagtggtattgcattcatcacaacttgttataccctggttagttaatcttgatggcacggtttatatgctcagatagggcttgctgtctgtacggtgtggtactagtcttgctagcgaatgtggcagagtaatactatgtgtca

SEQ ID NO: 171951 - DNA, 724 bp, Zea Mays
acggggccgctcgaggcgttggagatggaggcgccctggagcgccgcgcagtggactgtgccgctgagctcggcgaccccgcagacggtcggggaggcggaggacgccgagacggcgagcgtggacgcggcgcaggcggctggcacggcaatggcgaggaggagggcgaggggctggagcagcgggaggaggaggaggaggaggcgcggccgcggggtcatcgggtggagcaggaggaggagaagcgcgccccggcggcgaccgccgacatccgcgtggcgtggcgtggagacggggcagggagggtgagggaaatggagcaaaagcgcgcggaagaaaaaggtggagcggatgcggatgcgtggcgagtgctgttgaattgaagaaggacgcgggcgggtgagggagctggacgccgtctccgcctctactccattccaagttccaaccgcgatccggcgggcatctagtgccagtggtacgcgcgtttctcttcgtagtttacggctgtcgtcttctcccgccaacaagtatctacattgcagttgcagccaacattgttgttggtaacgaatgtatagtctactactattatctcattcaaacgcgtgttcctagatttgtcgatacttgctacatcttaaaatataaaatataagttattctaagattcttaaagaatcaaagttttaaaagtataaccaaaattatggcgagaatcata

SEQ ID NO: 171952 - DNA, 443 bp, Zea Mays
agttcttcgatttctgcgagcaaaaaagcattcagatcaagtatgcttctgtagcacacccaagagccaacgggcaggttgagcgagccaacgggatgatactggaggcactcaggaaaaaggtcttcgataagaatgaaaagtttgcaggaaagtggataagggaattgccctacgtcgtttggatcctaagaacccagcctagccaagctctgcgtggaaacactcctttcttcatggtctatgggtcagaggcagtgttacccgccgatctcaagttcggggcgccaaggctgatcttcgaaagcatagcagaagccgaagccactaggatggagggcattgatatactcgaggaagaatggctgaacgcagtaatccaatcagcacgataccagcagactctaaggcgctatcacgacaaggccgtacgacagcgatcc

SEQ ID NO: 171953 - DNA, 563 bp, Zea Mays
gagaaaattatgcgcctcctaaataaaatcagtcggggcatctccggcgaggagctgaatggtctccaggttctccacgttttcaggaacagtccaaccaaataaagctaccaaagccttgatgtgggactccgatagtggattggagaagaaacgtccatacttatcatgagcttcagtgctaacaacctcatttccactagcaatacccaaccttctaatgagatcttgctggatatgtctgataggcgcatctttgctggatttagaacccttgcttgccaggcggctgctatgacgaggaacaaaatccggaggcagctgcgcagaccttctcttctgtgggggcggatggggaagaatgcaagagattggttttgtaacactagcaacaaacgattgcaccggtgtgataccttgctgaaccaaagcttgagagttgttgctgtaatctgatctaggatcaaattcatcttgcacctgatgctggctcctgatccgccttctagaataatacttcagtgggggagcctgaccatggaccagctccagcgaccctgcag

SEQ ID NO: 171954 - DNA, 1859 bp, Zea Mays
aatccaaaagatcgaactctctggtgcctgtcctgctgctaagctcggagaacttgaaacttcctcttgtggtgacccttttcttcttctctagccctttccacctgtatggccttctttgagaggtgcgagaaactgagaaaatcttggctagcgaggatagttttgagttctggtctcagccccttcaagaaacgagccatcttcttggcttccgtgctcacatcatcaggcgcatagcgagccaattctgtgaatttgtgaacgtattcactgacagatctccctccttgggttaactcttgaaattcttcttctttgagctggacgatccctaggggtacatgattctctcggaaagctccttcaaattctgcccaggtagcatctatgatggccgcgctgaaggtatcccaccaggatagggccatcccggagagttgatgggcagcaagatgaacacgttggttttcagggcatctgatggcctctaacttcctttttactgtgcgcagccagtcatcagcatcgagcaggttgctggattcagcaaatgtgggaggcttgagccttagaaactttcacattctttcctgaggtcttcctccattcgggcgctggttctcgaggcttctggtgaggacctcaatgagtcaggtttggttggccagaacttgggctaggtctaatggcagttccggaggtgcggggaggtgggtttcactcccttctccaccgacttctccttcaccaccgaggggagaccttgctccaatccctgaggcggtaggcgtggttttatccgaggccatctgccagaggggagaaagattactaccatgcatatgccatattttttcaaacacgttattttattcagcactcaagttcattacaagcatacaattgccacagttcacactacgcgcgagcgttttctagggtgtccccaaactccctgagaagatcgtcaaggctagccaggacacctcctcaacgtcggaaaagttttctatccctgagggaggcagtgttggtggggcttcctcatttcagtcggtttggcatccttggctcttgaactgtttttggatcttcttggcaggggcgagcttctttaatttctcagcatagtccatcttcagagtccagtatgcttcacgagtgttggcttcttcgcctttcgccatctcgagactgtcttgaagggacaccttttcttcctttagttccttgatttgttgctctaggctttctactcgggaatttaggtggatgcagtgggagaaaaggtcgtcatagtggttgtcaagggtatggagatatccggccatgtagactatggtagggtcatcttcattaggatctctccctaacaaggcctgaagtcttttcctccaggcaggagtatttttgttgctgggtggaaagtagcgaaggggtgtctcagagacttccctattgtagttttggcataactggcggagggctctttgggcatcattctggcaagtatctgggaagcggtgtccagtggcggtgatttggaagggagggtgatttgggtagtttcggctttctcccagttagactgtcacagagcatttcttaatcccgttctcgcggtattctttccagacgtacttcggcttcttatggatccccatgcgaagcgcacaactccacagaaggtgagggaatccttccacctccgagaagtaggacgtcctaatgacaaaggagccttccatctggtagcaagagaagtagggttcgttaatatcggggaaagaagagaaggttcctttagaggttaagaggtcttttcttttaagggaaacttttaaggtcagggctgc

SEQ ID NO: 171955 - DNA, 828 bp, Zea Mays
tattgtaacctctcaaataataacatgcctttttgaggtaaatattaaactatctatttgaaatacattttcccagggggcaacaagtgacatacctatttgattggaatgtttgcagtggcacaggtaaattgtgtggtttaacaaaacaagcagcttatttgattggaaatctcaactttgcccaaagaccaaacatgtttttccctttcaaaaagaaaaatcatagcattttacgacatgatttggagttcacttttagctaacttttgttgcatatttactcagaccttgcactgcttcggacaaacatagtgaaggaacaggtaaatattttccattatacagtgtctcctgtttttttgcatttgatcatagattcatagtacaagaggtccttgtcatgcaatactactacaacatagcctaggcttacaacaaattaaggcattaaaaatccagtgccgggcaaatagaaaccatgtgattggcctgtctcctgtgaaattgctgatgggtggaacaaaacaccaaaccagatccctctccagtgagtagtgaaatgacacctgttctaatttgtaaagctgggccgaatgctcccactaaagccttgacactcgtcaattgccaagaaccaggcgagagttttatgggatttgggaacacaagacacctgcccaacctaggcctcagtttttaaggcagccacatttcattgtctgggaccacaacagtgtttttaaggcgtcgcctaggcctccaagcgattggataaatctaggcaccttgcccgcctaggcgttaagatggtggtcatgtttactt

SEQ ID NO: 171956 - DNA, 598 bp, Zea Mays
atactctattaccttagtagatccacctaacttaaactagtctaatctagtcatatccaacctaatctagattttatctaatctattatgatctaatctagagtaagttacctaatattggtacaaaagataaggccatacccctcatgcacttaaaaactaaactagtgccttaaaccaactcagccacgcgcatgagatctaacccaaccaatagagtcttgatgaattgcataatctgtctatacccacctgacataaaacaagatcttgatctacctcatgtagtctatctcatccatgtctgttttaaccatattccctgaccccgatgatatacactaacctcaaatcaataagaccaagactggagaaggaaagatcaaccccatcaaggaaggagagaagtcaaactcaatcttcagatgcattaccactcaacacggaattctttccaatcataaacttgcttaccctaggctattcttgctctaacctacccatcttttataataaaatgactatacatatatatacccatgccttcctaatcacgtactcgtttgtagcaaagactaaaaaaaacttcttaattttg

SEQ ID NO: 171957 - DNA, 390 bp, Zea Mays
atagttaatgcatcaaatacgaattcgaagttgtggcagcacgttgtcctccttaaattatgcacgaacatgcgccttcttggcccctccttggaagaaaacgatcgtaacgacctcatatcttttggtaaatgggttctatctgtaggtgatggtacacttcctgccgaaaaaaggactggtgatcgtgaacccacatggatcacaattcccgatgacttgcttgtccaaactaataatgataaaatagccacgattgtatctgaagtatacccagatttctttatgaattacgataaaccaacatatctagcctcgcgtgccattatatgcccaaacaatgctacagtcgatgatattaataactatgttgtttcgcttgtgcctggg

SEQ ID NO: 171958 - DNA, 559 bp, Zea Mays
gaaattcaaatagaataaaagaaaaggataattaacctagctgggcctttggtttgcatttcggcccacctgtgctcctacgtgcggcacaactctgggggatactggcactggccagtgggggcccctagcgcagccgcgctcccagcccaaaacccctgcccagatccactcacccgcacacactcctgcgcgtggggcccatctgtcgggtcgtctctgtcttcctcacgtggtcagcttcggctctcctctccagatatcttctccacatttagcgctaacagaaacgacggaagactccgggagattcggtccatactccaaccgcatgtgcgtcgtccccaggtggatttatatgccggtccttccctgggttgttagctcgacgcaggccccctcggttgcccatggcgtgctccctccgccgcgcccctactccctcgcctcatcacctacaacagacctcgtgggggcgccaccatagccatgtgtgaggcgaagttccgccgacctcggtcccggtttcgtagacacccgggagcagaacttcggctcc

SEQ ID NO: 171959 - DNA, 1203 bp, Zea Mays
caagtgttcaggttgaagcatggtttaggagattggagaagcctagctagagctgtgatggagaaatttggtacataagaataaccaagggctatgtggaagctgatgactatgaggcagaaaggtgttgtagaggagtatgtgcaggagtttgaagaggctaggtatgctactcgatgagactttctttgtgacatagtttatcatggggctgaagagtgagattcaagggcttgtcttgtcacaagtcccttctactatggacagagctatgttattgacccaagtccagtaggatattgtggataaggggaagttcaaactcagtaaataagtaggttctagcaagttgactataggaagtaaaactgaggcaagaggtgtggtagaaacgggagaataaagtaaggagacaatattgaagtagtttaggagaataaatggtctatgctatacttatggggagaaatttgagcctagacaccaggttaaatgtttgaaggggaatgtgcctcagttacatgccttgaccactgaggatatggggatggtgttacaacctaaaatgctagaacaagtggaacaggaagagaagctagaagaggaagttcagcaactatctatggatgccattagtggagctcatgaccctcattgtgtcagaattagggcattgattcaaaaccaactcatgttgatgttagtgcactcaggaagttctattagttttattggccaacacatggttgataagatgggactagaagttgagccttgtgatcctgtgagagttagctagggcaactaatggtggaatgacgactagtgatcaggtggtgaaggaagttagatggtgtagtcccatgagggtgttggacattggagtttatgactccattttagggtttgattagttgaaggtccataatcccatgaactatgattggaacaagaagaccctcaatttctattacctggaacatcaaattcaggtgcaacagaattgcccaattatcactgaaattccataagtccaagctctgtaggtgtagaaatggctaaaggggaatgaggtttgggcatttgtgtcattgcaaaagctaactctagaagaggagaaaagtggaggaagttagctgacatacccaattacataatttcaagatatgttttcccaacctactgctgaaagtcgcctagagg

SEQ ID NO: 171960 - DNA, 479 bp, Zea Mays
tttaggcgaagcctgtcttctctcatgttctaaaatgttttggcaaggtctgttaggtggtcttctttgcttttgctagcaaccactatgttgtcggcgtatgtgaacatgttgcgccctgtctacctttcaagaatggcctttgttagcctagagaatgctgacccgacatttttaggcctttgggcacgcatacaaagaagtacattctgaagggagttataaaatttatgtggggcttgtcttcttctttcatatagatttggtggtacctggagaagtaatctaggagagacatgacctcacaacctgctacataatcgatgattttgtcgatcctgggtagggggaatgtccttggggcaagctttattgagagtatcaatgcacatcctctatatgccatttttcttccttagcattaccatgttggcaagccatgttgagctattttgcatttgatgaccatggcatcggtg

SEQ ID NO: 171961 - DNA, 862 bp, Zea Mays
gcagaaaggaatacggcttccaggtgcctccacgtcggcactttctgttttagccgcatgatccaaatccaacggtcataatcacatctcacgcatcccagtggtctctaacacacgctctttctcctccaagcgaaggaccattctagatgatgcacgaaggagccgttatgcgaccggttccgtacaaccccagctacccctatccggcatctccatttgtcgtgaaggttctagatagtccactccccgccctcaaacgccgttacctaggtgcttcgtcctcccctccaccccgtcaagagctctcccaagtcccaagcgccggcacacaccgccacctcgccgcgctctacagggttgccgtgcctccgccccggtatggtcgaccgcgccgcggcgagcaactcaactagaaaatactttgccacagcggtgatgaatttccacccagtggttcgtgtcggagtcatgagctgatgtttttagattagtttctcgaagaagtcttggctcagaaagattaacagctaacaacttaatggctgatgtcgtcaggtttctggctgtcaatatgcacgacctccttgcgcacatcgccagctttgattaccggcccgggatgatagatgagctcgacgcgcagatggggttcgtcgtgggcggaaccattctcatgctactcactgtcgtcttctatgaaattcaggtcagtctcttctccttccctgaatcgggagtgttaagcgcagcctgtacaaatccattcaaattgcgtgaaactatgttgttagctgattatggtgtttaccttttctccacatacagtttggatttagttaccaacatgagatatcttgga

SEQ ID NO: 171962 - DNA, 530 bp, Zea Mays
gcgtcagccatccctttgaacttgcggcagtagtcgaagatggagagatcgccttggcgaaaattgcgaaattccgcgtcgaggaagagtgcccgagtctcgcggttcccgaggaaccgagactcaattgcaagccaggcggtacgggcaatagcatcgcggatgaggacagcatcagcgagatcagtggtgatggtgccaacaatccacgacttgacgcagtccattcgaacccagtcaggggaagtgggcgcgaaggtgtcggtgagtacatggtccgccagagtgtacttgccgacgacgaggaggaaggagtcgcgccatctggtgtagagggtagagatgtccagaaccacagggacaagagcccggatgttctggacggcgaccgcctgggcgtgaaggttgatgagcgcggctgcctcgtggatgagaagggcagcgcgagcatcagggactgcaggattggtgtcgaggtcgtgctggtctgcgtcgaggtcggactggtgagatccgacgtcgtcgtcgag

SEQ ID NO: 171963 - DNA, 616 bp, Zea Mays
gtcagccgctccctctaccactctcttgctctctttggctaatggacccgggttgtcagccttcacagacatgtggacccggcttgccagattgatctccctccccgcgcggcgctggattcggaacagaggaattagtagcttcgcgcagatctcaccgtgctgttgctccttggggctacctgtctcccctaacctaggtgtttaaacactgaatcctcgcccactgttgtgctaaatcctagcatttgtgagccgccatacgaaacagaggaatagaaatcggtgccgcccactatcggctcatcgccagcctcagcggcaacccaggatcgggtcaggggggaatgaccatcagcctcagcggcgacctaggatcgggtcgctaggccgtgtggtggtcgttcgttggcacgacgggggaaatgaccatcaggctcggtgaattagcctttggtgtgtgtttggcgccacgtttctacctttttccccctcgtcatggatggtgcgactgcgcgcatgattctcggtaatagtcgcttgcccaaactcgtttttatcactgtgtcgtgtagggcctacttggttgaggtttggggcaccggagccgtagttg

SEQ ID NO: 171964 - DNA, 523 bp, Zea Mays
taggcggtagaacaccaatttcaacaagatacaaaaggttagcttctagatcgatcggagggatgtccagcgtagcagcactctattttctcttcctgggcaccatcatgatttttcaaatagcccggttctgggacaaaacgcgaaaagatgtgggaacttagaaagctggaaagcagtggagcaaaaaataggaactagggtacaggggccaagatgacatcgacaaaagtacaggttggtacactgagtggggagtagaaggatgggccgatggcttaggagagttttggtcgaagcaaagtaacaggactcggtcgttatttctagaaagctaaaatacagtttgacaaaacaacagaatatgcaacagcaaagtggcatgaaaacaggcttcattcatcattccatcagttggggatcattacaaaaggaagaccgactcattatgagtcagccaactgcccctcgatcaaacactatattacactactagttaaactacattatactactactaaac

SEQ ID NO: 171965 - DNA, 1523 bp, Zea Mays
cccgacgtgaacatccatggaagtatgagaaggagaacccgctcggacaccctcgggggctgggtcatagctcgcgctgcccacccgagccggatcattaccggcaacaccctcgggggctgggtaaacacaagtgccatccctagggatcgagttctctgcagcagccacctctaaggctgaaggaatttcagccacttccatgggaacggaacaatctagattagcctcttgactcttaaaacagcgctccaaggtcgatgaggcatgagacgctgctcgggataactctaatccgacagcaggcacatcagcacaaatttccatcatcccaccatctgccagctccgacaacagatcttcagggaccatatcttcgagagtctgatcaaaatttgccagagacaattcttgcagaccaacgagagcagacaaagctggagaaggaacaccactactctccccactagctatgtagcgtcggctgttcttccgaattaaggggatttccttctcctcttcctcatcctcatcaataatatggatagtacacccgttggggtctgcatcatcaaggctacacccattggggtcagcatcatcaaggctacacccattggggtcagcatcagtcgggtcacacccattgagttcagcttcagtaaaaattggcactggcacttccccagcagcaggagcagaagggccggcatcctgattcaagcatgacactcgccgaagacgtctctttttctgtttcttcccctcagcaggagaagttggatgattggttcggcgaggacgctttgggcgaatactatcagatctctgaatgcccaaagtttttctagactctgggatgggtgctacagctagtgtttcagcagggaccgaatcagaggaatcctcagccaacatgtccagcatggcacttatttctgcgtcgctcggattcaaaggcatctcaaaatgaacctgcctctcgtcattggggatttcaccaagcgaaacaaccaaagcctcaacctcttcaggagaaggtcgcactctaaggccgaagccactgtcaccagcaggaggatttgacacaaaactgatgaaaccttggaaggaggcagattccaggctgagtatgcaacaggagcaccgatattcgacaccttgcctctgagtatcatctcaagccggcttaccagatccacagcaggaatccttctgttggtaacccgggtcgaatcagtgaggccacgatacaggtaagctgggtatgctctgtctttcagtggctgaatgttcttaaaaacaaaatcggcgaccacagcctcggcagtcagacccttctccttcaacaatccaacctaggcatgtagagccccggcctcagctacctccaggtctgtggaggattcagtccaacttggagtgcgaacatctggctatctccctgaccgaggggggagagaattcccgtgattctccacgataaaccattccaggcgccatcctttgatgatgtccttgag

SEQ ID NO: 171966 - DNA, 578 bp, Zea Mays
gccgtcggcgccgagaagacagcgagcgcgcgggttggccacctcaccgaaggcaataacaagctgctcatggagcttgccaacaccagagaagagagggacaaggcgaagaaggccatcgaggatttggcggccgcgctacgtgaagtgtcgtcagaggcaagcgaggccaaggaaagggtccttgcgaagcaggcagagctagacagtgcccagcttcagatgtcagaactgaaggcggcgatgaagaacgcagaggaaatgtaccagttaaggataggcgaaccgaactacgagactgaatgcctcaggaagacgatcgagaggatgggttcggaggccaagatttcgaaggatgattgggtatcgaaagaggccgggtttgttgatatgctcaagagatctgatgatggaattagctctgtccagctggaaatgaacaggcttacagagtctctgagagctgcagagaaccaagtgcaggagctcggggcacataagacccagctgctcagtaagctgcaggaattcgaagtccaggcaacgaatactgaagaagaagcgaaggcagagagcgc

SEQ ID NO: 171967 - DNA, 480 bp, Zea Mays
gttcgcttcagcatgcatgctgtacgtgcaaacagaacggtggttttcagagacaatcattgcaaaatgctttgtggatctgtgatttgacaacgcatttggcggcacgtgtagggtgcccacaagcccacaacactgacgtgaaaaaacacacactgtttgtaccacgatggtatgtactctattacttttctactcgtacgatatggcacttggaatggaatgtagtgttaaattgctggtaaccagaggttacggttttctgtaatgactagtagtgtgcccgtgctttgctacggtttcatttatacagcgtaaactacaaagatgtgtgcatcctatttattaaagccaacaaccatgtttcaaatatacatttgtgcaaaaatttattataggaagcgatcgggtggtggtgcttggtagttgagatatacacgagacatttattaagaaaaataaagaatggtctttttatct

SEQ ID NO: 171968 - DNA, 901 bp, Zea Mays
accctgcctgtcggtctccatgagctccacctggcgagccaggctcatcgcggcggcgagcgtctcggggttgtggatgcgcaccgcatgactcaggggcggaaggaggccccccccgtgtagagctggactcgctggatctcgtcaagtcgaccggcgcggggaaggagggcttggaaccgattggagtactcctccaccgtcccggtatgccagcattccgagagctcgaagaggggagccgatcggagaggagggccaaaccgtaaatggagaagttccttgaaccgtccccagcgcggagtgccttcatcctcctggagctggatgtaccatagctgggccacgtcttcgagattgaatgaggccatccagaccttctcttccggcatgatgcgttgttggtggaagtatgactcgcacctgttgatgaagatcagcggatcggacctgccgtcgaagcgtgggaagtccatcttctggaaccgcggcggccggtcattgtgatggttgccgtcggtgttcccggtacctgccgacgaagagctcgacttgtccttcacggccgccatgtcggctttcatggttgccatatccgcggacagggccatgatcatcttggtgaggtcggcaatggcctgctcccccatggttggctgggcagcgtcggacgcgatggagggggatgggactggtggtgaggcgggaggtggtgcggcggcggtagaggggctggcggagcgggcgcgaggcgtcgaagatcgccggactcgcgataccaggttgtcaaggacgtcgatcccctgactggccagaccgcggctacgtaactcgtagccgccgtccgtcacgccggcgaggttatgcccctcggccgtcggcttgagagagagagagagag

SEQ ID NO: 171969 - DNA, 336 bp, Zea Mays
gttgggcatgatggtcagttagttcaagaggggaactagcggatcgggattaggccttgctgctcatgatggaagtgtcacttgctttgataaggttggtgagtgcagtggcttgaaaccatcagtcacccacaaccttgtcaagcttactccacctaaatctaccacccatattgagagagatggagtgcatgtggagcatgtgagatttccacctcagaaacaagtgtggtgtccaaaacctaaccatctcaggaaccacttgacaccctgccagataccactagtgccccccctccaaaagatcctcagtcacccaaaaagcctaaatcccac

SEQ ID NO: 171970 - DNA, 635 bp, Zea Mays
gctcgcgcgccccgtgaccgaactccgcgcaacagtcggcggggtcccgacccccttttgtcagatccaatctcgcgaggttgttgggatgtttcggcctccatcggggatataaaagtctgggcctcgccccttgaatcccatgccgcagccatggtcccgtacgggtagagcgaaccgagagagcgagagaagagagaagagagaaattgatcgctggctgtcgaacaggactgggcgggatttgttgaccttcacgtggcaccaggcgcatagcagaaggcgtgcccaggcggctgagtgacctgggagggcgagatttctcgccggggttagatttccgccgagcggtcgctgcgcgatgcgggcagctccaccaacgcatcgaccttgggtaagtgctcctccagctgattccttttacccctggaacctgtaggaccttgcggtagtgtgtgagcatcgtgtgtctgccgaccattgctcaccagagatcctttattagtagaccgccgtaactcgagtattgccttgttctcctcaacgttgcgagcaatatgcacgtactgggtttcgcatgatccctcccatcgattaggaccgatagtagattggttgaagcaccaccctgaggt

SEQ ID NO: 171971 - DNA, 982 bp, Zea Mays
gttgacaatgaacaattcgagtgcctttgaagtctttttattgatgatatattttccagtttacagagtacattgtcgtcccaatagcttttgagatatagctaggggtaaaacttcctgagatgttctatgttccatgagttcccaatttccatgccgtccatctgagtgagacgatatgatccaggccgagtgacttctgctactatgaatggtccttcccatagtggcgacagtttatgtcgtccctcccccgttagaattcggcggaggacgaggtctcccactgcaaaggatcgatgtcgtatggccttgtcatgatagcgccttagagtttgctgatatcgggccgactgaatcactgtattcaatcgttcttcttctagtacatcgacatcctccagtctagtagcttcagcttctgctatgttttcaatgattaaccttggtgcctcgaacttgagatcagcaggtagcactgcttccgaaccatggaccataaagaaaggtgtgtttccatgcaaagctcgactaggttgagttctcaggctccaaacaacatacggcagctctctgatccactttcctgtgaacttttcattcttgtcgaagactttctttctgagcgcatccaatatcatcccgttggctctttctacctgcccattggctcttgggtgtgccaccgaggcatatttgatctgaatgctcttttgctcgcagaaatcgaagaactctgagcttgtgaagttggaccctaggtcggttatgatgttattcggtattccaaacctgaatattatgtcttgtatgaattccattgccttagctgaagttagagaagcaatgggtttgaactctatccatttagtgaatttgtcgatagcaaccagtacatgagtgtatcctccttgagccttcttgaaaggtccaatcatatccaatccccagcatgcgaacgaccaagttacgggtatggttt

SEQ ID NO: 171972 - DNA, 938 bp, Zea Mays
agaagaggtgctagtagtgaccacctctctggcatcttcaattttgccgccagaagcttcggcagaagtaggaggcggcgtgttcatagattctaaaacaacatccaaaacactagccgtccaccttttcctcggagctcctgtgtagtaactgacagcttcggtagtgctatcaccatcatcttaggctgttctggcaccttttctgctacctttttccgattctggctctttggccgggtctgcaatagcttcaataggcatagcaagagcagtctctgtggctagaggggtagtttccaccttttcaatcaacttcgacacattggtcgtctcgatgctcctcggtctacgagtcaagaccttgattttctttgtcttcggtgcaccagtagatgtcgaagcaacgactttcctttttctgccttgcttttgaacgggatagcagtagtctaggtaaacaaacccaataacgtcagacactctattcaacctctttttgctgcgagcgccgaaggcagttgtcatagcttagtcttctgccctcgagtatgctccgagtagttcatcacttgttgcctctatagcgtccaaccaatcatcatttggctcatcaagttagtttctaaaccgaaaagtatacttaagataaaccaagccaccctggctagagccaacagcggcttactttgggatttcccattctcttgcaagaggccatactttttaagcaatatgctcttgaactaaatctcttgtgccaatataggtgcatacggtgttgaaagcaattcgacatgcttgcacttcatttccaagtgcgatggatggccttctaatgccgaagcgtggccatataggagttggataacgcctttcacatctttcctctaatttaggtcattcttcacgtaaaaccattccttcatccaagaact

SEQ ID NO: 171973 - DNA, 462 bp, Zea Mays
tatccttccgtaaatgtaaccacactaaatcacccggttcaagttttactgcctttctaccttgactaccagcaagtttatatttctcggtcatcttttctatgttctctttagttgaagcatgcaatttcaaaataaaatcagcacgctccttagcatcactatgtacatgctccatagtaggtagaggcaaaagatcaataggcgcacgagggttaaagccatacactacctgaaaaggacttaccttggtggttgaatgttccgccctattatatgagaactccacatgtggcagacactcttcccacatcttaaaattgtgcttcaatatcgctcacaacattgtagacaatgtgcgattcacaacctctgtttgtccatccgtttgggggtggcaagtagtagaaaacatcaactttgtccccaatttgttccatagtgtacgccaaaagtgactca

SEQ ID NO: 171974 - DNA, 635 bp, Zea Mays
gcggggtcccttcggagtccagagtttacggcgaaatcgctataggctggggtatgggtcgccgccccacttgccggtgagtgtctccccctctgcttctctacttttgttccgtttgggcatattaggtgtgggtccagcgctctggtgtgtctggcgtcgtggtggtgccggctggtcagtgcaccatggtggcttcggtcgccctgggctggctggcgaggagcgagaatagggggcgagaggttgaagatggcgtattggtcgtccgatcgtggacgtatgtgtgtgcctgggtcgccggcgggctgggcgttggtgtgctcgccgcggcggggaagaaacagccagggccctggatccatgagtcaacggttgtgattgaatccatccatatctatgcgtcgaacaaaatcatgccgtcagtttccagatcggtggcctagatatagtctagtgtatccccttcgccgatgagtcctgagtcgtagatctcggtgtgggtggctaggattagaacactcgtaccggtttggctgaaccaatctggttcgtctgatctagatctagcgcttgcgatcgatgtaggtaactttaaatcaggactgttagaaatcaatccagtggctggcgcg

SEQ ID NO: 171975 - DNA, 592 bp, Zea Mays
cagctaccatgttacggtccctttccacatggtggaactccaggccttcaaacttgtattctacttttctgacaacagcacaatatttcccattgattcagtcaaacaatcctagtttttgtttatctggcttatcactaccggtgaatcaccatataccatcagatgcttaattccgagtgaaacatagatgtgcaacccatgtaccagtgcttcatactctgcaacattgttttgatactagcaaaataagttgtaacacatacttgaggtgctccccttaggagcgatgaagaggatcctagctccagccccttgcagctttagtgacccatcaaaatacatcttccagacttcatttggctcaggatttcctagaacttggttttctatggacgaagaaatctaccaaatcttgcatcttgatggtcgtgcgagggcggaactcgatgtcttgcgctcccagcccataggcccacttgacggttctcccccctgcttcccagttgtgaaggatgtccccgatcgggaaacccatcactactatgaccttgtgatcgtcaaagtaatatgcagcatgcacgcagtgagg

SEQ ID NO: 171976 - DNA, 409 bp, Zea Mays
gagggcataatcaaacgattccccagccaggaagctaagtatagcgtccatctctgcgtcatcagtgctggttggaatttcaaaatgagtctgcctctcattctctaggagactccggagcggggcaatcagagcctcaatgtcctcagaggagggtcacactctaagacccaggacaccatcacgagtaggaggattggacacaaactcgaaaaaggacctatgtggcggcaggttccaggcagagtaggcaacaggagcaccagcgttcgagactttgccccttaggatcatatctagtcggctcattagatctacagtgggaatcctctcgtttgttactcgggtagaatcgttgatgccactgtacagataagcagggtataccatatccttcaaagactggata

SEQ ID NO: 171977 - DNA, 414 bp, Zea Mays
tgcaccttcacaaatatttgttgggaagtcaaaagccttctgcattgccaaaagctcttttcctgaacacaaatatgccctttcaattttaatcccacgactctcccattgccatattcccctcctcctctcccagtcaattgtttcaggtcttctcctcaaagctcccccttgtccactctgtcctccgatctctctctttggggcatttcccatctctatccctcgatttactcgccctgctacgccattctggatgtatgaccctcgatagctactccctcaacattgctttctatgccactgcccgcctcccatctgtttctgttggtgcccagcttcattccctttctgtcaaacttggcttggtttcagatacatttgtccttaattctcttatcaacatgtactcgt

SEQ ID NO: 171978 - DNA, 624 bp, Zea Mays
aaaccaagccaaataaatttcttaagtcccttggttcacaaatgtgtggacttgaaagccaaatgttgagttttggactcaaatgcaaaaaggacccccaactgagatttctctaagtctgaatttcagattggtaagctcaactttggagcattggatcttccaaagtattgagaatttgccctaggtcaccacatcaatattgtagatctatggaaggagaacaactttgtttaagggttcaagccatggtcttatgagaaatttggagaaaaacccaataaaagatgggctgtcagactgcttgaggtttgaatttcagtgtaacagtgttatgagatgaactttgagctcgattttgaatgggatccagtgaccttttgtgagagcaccttgtagcaaagttatagagggattataattctacaactttactacagaaagttggcttaggtttcacatgaaaatttgagaaaactgggctccaatttgatctgtcagtcaagccttttactgaatccaaagcactgttcatcggttttcagtaaaatcgccgtggataaggttttggacctcgccggcgataaggacgccacggcggtcggaatggactggaggccgcgg

SEQ ID NO: 171979 - DNA, 582 bp, Zea Mays
cgaggataatggaaggggatttggttaaccagtttgcgctcttggtgttttgaggaagtcgattcggcgtcggatgttgaaggcgatgaagagtcgatctcatagtacaccaccttcttcatcttcttattcttgacgctttcttcttgtgcgtcttggaggagccttgagtttctgatttcttctccttgtgcttctcccccgaaggcgctttgatttctctcgacgataacttgtctttgggcttggttgatgaagattttgatctttcctctaaagttattttctcttcgggcttctctcccgagggtgccttcccgttcttggtgacttttcccccatgtcactttgacttgctagactctaatgaagtgtcgggttccgataccaattgaaagttgcctggtgggggtgaataggtgaaacccaaaatttataacttcaagcacagcttctaaccctggattatcatcagaacaagaataagaataattagagtaagggagaggtgttcttcttgcttagagttgctcaaaacgaatgcgaaattacttgggagcaacttaatttgatatagaatca

SEQ ID NO: 171980 - DNA, 1140 bp, Zea Mays
aaattattttctttatatgtgccatctctattcaccatctcatgtgaacaccacatttaaaaacaaaggattaataaaagtcataccattaaattgtgcatcatgctggattttatttggtgtgtattctgtgacaatagaaaaataaggaaaaaagaaatatgttgatacccaaattggaatttgaattctaatggaaattctataatctaagaaaagagggaaaatactatacaaataggataaaataaaaatataaatgagtcaaaaattcagttcatatggttatgtaaatgtagacaatcaacctgagtttgaacttcacacaaaagtatattcaaatttgaaatctaaatttgaaaagggagaaaagagaaagaaaagaaaaagaaaataaactaaacccctacctgggcctcggtccctcattttggcccacctgaagaagtcacccacgcagcccacctaacaaatctctccccacgcagaccatccgcatctgtgtgccgacaggtgggatccacctggtcagccactcttttcttgcgcgtactcattccctgtcaatgtcccgtgggcccaatccatcagcctcatcatcaccattttctttgtcgtaacaaaaacttcacgcgagctcgggcgaccttatcgcaaccgactcggtgtccaccacaacgaactccacgagctccgcgcgatttccccgatcccatcctcctttggactcgcgacttcggggcacaaaaccatggcaccgccctcctctctcctctcatcttcttgcgccaccgtcgcacatacagggagagaaagggagaggtcagtcgccgccggtgtcgacatcgatctaccttgtcgtttggtcctctgtgtccaggcctgggcatctcaggggtctgctattgctttccgtgcgactaattgggggtgtggttggtcggtgaccacttaattcctcgtcggagccgggcgggtacgcggatcctctgtagggctcttacacaaattccccctccgttctcggtgagttctcggtttctcaccctcgacctgttcctttccttagttaatgtcgcgtcgttgccaattgcgtgcggattggggcgaattcgacctcttgggtcgggaatttgccct

SEQ ID NO: 171981 - DNA, 688 bp, Zea Mays
caaggcttcaatatcttcgggggagggtcgcactctatggcccgggctaccatcacgagcaggagggttggagacaaattcagagaatagcctaattggaggcaggttccacgcagagtaagctaagggagcaccagcattcgagaccctgcccctcagaatcatatccaatcgactcagcaagtcctcattgggaatctatctgtttgtgacccgggtggaatcattgatgccgacatacaaatatgcaagataaactctatccttcaagggttgaatgttcttgaagacaaagtcagcgaccacgacctcagcagtcagaccctatccttcaacaagcagatttcagcaagtagcactttggcctcggttatctctgaacaagtgggagactctacccagctgggcgtacgaacgcctggttgcctccctgaccaagggggagggatttgccgtgattttccatgatgaaccactcaagacgccatcccttaatgttgtcctgaaaaaatggaaacttgaagaatagagttagggtttaagtgtgtcagatttaagtcgtaaaaataaaggagaccacagaaaaaaggagagatgggaagagcaagtccgcggatgagaaacgacacgtagacaacatattcatgggtgtcctctgtcagaacagtgaccccgcgacagatccgcc

SEQ ID NO: 171982 - DNA, 419 bp, Zea Mays
ctcttgtactcaggcttctttgttgaaataaactcttcttcctgcaaagaggcgagcacacaagcagtatccaggtctagaggctgttgcatcaaaatagaagaacggatgctgggatgtaaaccatcaataaaacgagtagtgtagtaaagtgggtcggtgacagactcgtaagcatgcaactgatcgactaattcagtgaactatgaaatatagtgagggacggatccagactgtttaatgtggaagaatctatgaatcaacacctcgtgcttatcgcgatcaaaacgatccataaggagtgtgcaaaatgtatcccatggcgcatgagtgagcctacactccatgaattgaaaccatcgtgcagccggaccttctaagtacatagtagccaccttaacccacacatcgcgatcgac

SEQ ID NO: 171983 - DNA, 571 bp, Zea Mays
ctactacaacagcgactccaaggaagagaagaatggctagcgttttaaatgctgttttagaatccatgaaagcgccaactcccgcttctgccgaagcatctggcaaaaaatctgaagatgcaagggaggcgattactgcaagcatggctactattcttgccgaagccagaccttcgaaagctgcgccaataaggctggtggaagagagtgttcctgaaaaatctacatctcctgctcctgaagcacctccccatggtgacttggaatacattgttcgacacgcttcgggaaagcagttatcattagaacaaattgccgaagtgcaacactatgccaaggacttgaaatacccccgagggtccttggtatatggagggaatgacgaagacgacttcctctactgcctggccaacagtaaggaggttaatttttgccgtgagatgatgaacaacatgggatttccgaagcttgagcttggtttgtccgctatgatgaaggatcagcttgtggacaacctcgcttaccatagcttgaaggttgcacattttggcttcgtatttggtacttttcg

SEQ ID NO: 171984 - DNA, 566 bp, Zea Mays
atttgatgccaaaaacaaatacatgtacaaaattacaatggcacagtagtatgcttgcctccccataggaggcatgtcctcaactgatgctgatggttccctcctcattgccacacccagtttagtatttcctgtcccaaaacattgtgcaaaatcattaactaattccttcggtgactacacaaagctacttgttacaataaaagaataatttactttaaccctatagtccataaattaacatctaccaaacacatcataggatggatagattgttataactacaaaaggtataaaaaataatgaaaaaaacactataacaatgttggttagtgtcatttcaaacgccacttcagtagacctaccagaccataattaaaccctatgatgagagacacacacaaattctacttctaaagtacccctgcaccagatcacatgttgagttcattagaaatacatgggacccacaatacatccacacatgatctggagatcttgcaaccaaaccataagcatgtcagcaggacatagctcatcccttgcatctgcacgccaagccaagc

SEQ ID NO: 171985 - DNA, 287 bp, Zea Mays
gtcaatgtagatctctgcatacttctctgtccggtgggtggtgtgcactggtaagaaatgagcagtctttgtcaatctgtccacaataacccaaatagaatcatggtgcctggaggtattgggcaatcccaccacgaagtccatgcaaatgtcctcccatttccaagacggtatgggaaggggttgcaaagtgcatgctgccttcaaatgactagctttgattctctgacaggtgtcgcactcgaatatgtacttggcaatttccctcttcattctggtccaccaat

SEQ ID NO: 171986 - DNA, 554 bp, Zea Mays
ctgctccacaccagcagtggcggagcaccactatctccttcggggcatccgactgccccgagaacatggtaggggccggcatactgccgctcatcatcgcccctgtcattgccaacatcaagctgcatcatgttctgatcgacggtggggctgggctcaacatcatcagccacgctgcgtttaggcagctgtagatctcagggtcccgactgggaccctcttgtccattctccggagtgggcgctcaaccggtgtatccctttgggagcatcacgctctcggttacattcgggacaaaggaaaacttccgcacagagaacgtccagttcgacgttgcggaggttaacctcccgttcaatgccatcattggcaggccgaccctataccggttcatggccattgcccattacgggtatttggtcctcaagatgtcgtccccagccggggtcctcactgtgcagggcgaccgtgccgctgcgcttgcggccgttgagaagctgcatgccctggcggcagaaactgctcgccctgacgacggagggagggacccctcg

SEQ ID NO: 171987 - DNA, 647 bp, Zea Mays
gccattcttggcatggtttcttgaactctttctcaaacttgaaccggtagaggagccgaacaagttcgtgcttcttgcccacattcttcttcttgggcatcccccagccactagaggtcgggaatactctgtttgccaagaattcctgcaccaaatccctagtactgacctcggccgctaccactctaaactccacttcggctacatggcatggggagccaagctgcatgtggcacaagggcctcgtcattccgaagcttaaagtcaatggactcataaccatactcatcagcttctctatctttttctcgtctgctttcatgtaaaaccattcactcttccaaccagttggccacttggtgcagtagctaagaactggtgcctttgtatcctttcgatacgcaaaattgtagcagccaaaattttcatgaaggccatctgccctagccttcgtctggtaatgcagcttgtgcacccagcagaaagcttcggcattaggactcatcccctggcttcggagggcccagatgtagacactaagtctaacaattgcattgggtgtcaattgatgaaggtatatttcaaaattcttcaaaacctctcctatcatatcatagagagggaaccgaagccccgccctgaagaag

SEQ ID NO: 171988 - DNA, 1263 bp, Zea Mays
gctacgcattggcttcgcttctaggctcaattacaacttagacaggatgatcaagaactaataatcaaggcatgttgtagattggaggagttggtgatgcagatttttagacatcatggatggggatctccatttagactttgtctttaatctcgttttgtcgcactatgttttgcttttctccgagttttcagatagtgatgttcctatctgagtctgtaataactcgtctatggtatctttgagacaaaggccaggaactttcaattcccattatctaaaaaatgtaaaatagagagtaaaatgccttataagttgccccgtcaggatgtgaggatgggatcaaattcagttaactgaattttgggtccagtgaaatgtgctccactttggggtaccataacttgtaatccatgcatgtttggctctggagtgttgtagaaaggtgaaagatccatacttaataaacaagtttggaatggtgagtatggtctgcccttctacaaaattgggagaaaaagggtggtgaacttggccctgtagttgaactaaagaagttcagaacggtgcaaaatccctgaaaatatctcaacccacttgtttctctaggtggttctggcatgcaacagatatggagagattgtgttgaaagggggaagtgcatgacatgagtttatcaccacatggatgagtttgaggaggtgtaaaacctatctatttgatgactcagttgctggttgtttgccttgctgtcacacatacagcaagggtgaacttggcttttcccctatgcttggtctaacgtggtgaccatgtagagaagttgggggacatattattgccagtttggctctatgttaagttccagtgaaactacaacaatccttttagcttgtatgccttgccatggttggttgcagcacaaattgagtttctctgtgctcctgtcgacctcctgccctgctcaccgcgccacctcattcacctacatctagataaagtcctcaaatcttctccacccctctggttcactgtgaaaactagaactcgtggtgagccatagcagtggtgaccacaccagcttctctcctcggttcacaatggacaaggtttctcggcatcgtttcatgcctcggtcttggtgttcgggctcttcttacttatggtgaagctcacagacctgtttgtttaaactctattgtgctagattgaccagaacgtggccgcggcgccatcagtcgacactatgaactaccctcagcg

SEQ ID NO: 171989 - DNA, 490 bp, Zea Mays
acttttggaaggaaactccagccgattcaatcgtgaatccaaagctttgaaaataacacttaatgttgaggctgagaagaacatgaagatcagtgaagtgctgagagctcttaaagagagatgctttaactttgcaagccaatgcaccgctcgattgaaaagcatattcaattcagttggagctgcatccgaggaaaccagcctctctaccgaagatgtccccggggcactcgaatgcgtcgagaaagaggttgacgtcctcgacgaagttataaccggccatggagacttctgtgcacttgtggcttctcgtggtacgaccgccgctttcataaaagctgggtgcaatcacgcaagggtcgtcaacaggctgaatttcagcctttcatcatcggacctggttgatgttccagccgaagcccgaagcatagggaacaggttcatcactcaaatttgggctaagggcggccgcgagttggctggaaacgaa

SEQ ID NO: 171990 - DNA, 481 bp, Zea Mays
gaaggtctagctttgacaggagcttctgaaggtctaacttcagcaggagcgttggctacgctcgtgacaacagtttcccttgcatccttaatctgtgcgctgagagcttcagtagaggcaggagctgatgtctttacggattccaaaacagtgtctagcacgctagccattctcctttttcttggagtaactgcgggaacgcttgatggcttcgacaatcctattgtaccgggtaggctcaacaccatcaactgatctgctgccttctctaatttcggctcttcggtcgggtttgtactagccttgactggcacaacatgacctggttctatggcagaaggggcaactcctacacgttcaataagctccggcacatcggccgtctcaatgcgtcgtggtctacgtgtcaagaccttcactttctttgtcttcgacgcactagaagatgccgaagcaacagttttccttttccccttttgtt

SEQ ID NO: 171991 - DNA, 555 bp, Zea Mays
ggcacgaagctgtagaagccaaaacttttgtggtattgtactttcccagtcgccttcgtctgatatgataattcgcgaatattgtagaaacacctggcgtctagctctaacccttggctcctcatggcccatataaaaacccctactttgataaaagcttcaggggtaagttgatgaagaaaaatttcaaaagtttttagaacttcaaccaacatcttgtccaggggaaccgaagtccagctttcatgaagcttctgaaaattaccacttcatcagctttgggaagaggaacagtactctcccctccagccctcacgatggaaatatcacgaaagtatctccctttcatcgcttcgatctgcccttgcttgatagtcgactttccaaaaacaacatggcttggcctccatggccggtcttcggtatcttcatttccactttgtacatcaaaactctcgctatcgctggagttttcagataacccagctagcatttcattggtgattttctttgtgttggtcctctccatagattcgtaaaatcgaccaatgcgtg

SEQ ID NO: 171992 - DNA, 742 bp, Zea Mays
aattttttgcgcgagctcccctttgtcttccccatgcctagctatgcttcgacctacgcacgtatggcgatgtccatggcgtcagtcgaagtgccccccttgccaacaagttccatggaaacgagctcctagggatcgtccagcgtcgaagagaactcacatttagcttgctcgcaagtgtacatggtcttgatagaagaggaagtcgtattgatcctgcgtggtccgggcatcttcatcttcaagtatgtgtagttgggcgcaaccatgaatttggcatagcatggccatccaagtatgacgttgtaggaccctagaaagtccaccacctcgaactttattcgtttggtgcgaaagttggaggggttgccgaacgtgaagggcagagtgatctgcccgagcaggtaggcctagtggctggggatgacgtcgtggaaaggcgcagtgcttggtcgcagcgtagagcgtgtgatccctagtccatcaaaggtctcaatgtacatgatgttaaggtcgccacccatccatcagcaccttggtgatgcgcttcgagcctacgactagctcgacgacaaggggataagccctaggatgtgggattctatttgggtggtcgtggtggtcaaagacgaccaagaattctgaccaccggaggtatcgtgggatgggacgttctacgacatggacctcccagtgggtggccttgaggcgatgctcgttgtcgtatgccttagctcaaccg

SEQ ID NO: 171993 - DNA, 615 bp, Zea Mays
cctcctccagccctcgtgcgcgttgccatcgttgatccagtcagccgtcgttccgtgtgagagagggtggtgcggtccgccgccggtgaaactcgtcactgagggtcgtctgtccttggcaaggtggctgggggcttcgtcgcgttcgccgttgtctgcgtgtggtcacccagggcgcttgcgtggtcgggcgagtggctaatttcacgccggtgctcaaccagtcccgccgctccactgtgcgccgtggacaggatcgttcgccctgcgattgtcgatatgcacccttctccaatgttcgccgacgtgccaattccattttgcgggtgtcagcaatagagatagggcgctgtagtggcggaattgcccggcgccggtacctgcgccgccgctgggtgcgcgcgccgccgcgcgtgtgctcgtgcgtcgctctagttgagggagaaatcgtgagaccgttggatgcgtcgtggacggttgggattagagcgcggatagcgtttcgggttgggtgatgcgcgactgtcggatcgcgatcgggcgaatcaggcacaagtaggatttgggcagtagatttgagatcttacggtcggcgatgcgtaccgtttcatttat

SEQ ID NO: 171994 - DNA, 897 bp, Zea Mays
gcccgagatagccgccgccgtgcagccccccgcccgagatacccgccgccctcttcatcagtgcgccaaaacctcctcttcgtacctgcccacctcaaaccctaaccccaagccaccgcgggagagggcgacgaagcaaaacaagcagccgcctcccgacacggccaccctccgcccgcatcggcacagccactccagcgccaagcttgtgcacggcctcccgcaccggggacacgacgagggcctctaccgcgcgcgcgcgacaatgactgccgtgttcaagtccatcttcggctgggaccccacctccctgcacacctctctggccatggcgttgatgtacaacatgtcgctcgtcgcctcatctcatcccatcgaccctacgagagcccgtcccaactccaccagaccaccacctctcttctcggtggcgtgagcgagaggactccgacgatcgtggcgtcagcgggaacctaggcttcgttgcatctcctctcctcactctccccatctctctggtacgcattctctctccttcccaagccgctccggtctagcacgtgaagtcaccaggttattagtcgagatctaatttcgtttctgagatagatccgtagtgtttgaagtcgccagggtatcagtcgagatctaattttgtttctgatatagatgcgtagtgtttctaggtagatctggcgtagatctggatggatgaagtgatttcaatttctattaccggtaagcacaactaaacatactctatattttggaatatccttttgcaggcatagaagtagtatatgccaagaagcctgttaatatagaacctagccttttgtgttccaatacaaatacaagttttacttcttacatgttggtctaaaaatacaattgttt

SEQ ID NO: 171995 - DNA, 797 bp, Zea Mays
cgaagtccggcgagggcgattctactcctccggtgaggcaatgcctcggctcaagcttgggaaagcttcaccgcttcacggggaagtagtccaggggctacggagaggcttggggtcatcgggaagggctggccacggtggtcgtgctcgggcagtgatggcgggtggtggagagcttgctggagttggagtttttgctcggggcatgaggcggagtgaagagcaaaccgttgtgcacatgaggtacttataggcgtcctcggacatggctggacgcaggcatgggggacaagagccgaccttgcgcagcgtgcgcgtagagggcagccagtgcatggccgagcgcttgagcacatgatcgaacacgtggaagtgtgattctgcccgagttcaaacgcctgttggccgacctaaacgtgcatatcttgccaaggatcttgtgtagcgtctcttcactatgccaaggtcttcctgtcgtgtgtgagtcctgagtgaagatatggcctgggtgagaagatattgtggcgtgaagatagctctgtcagcactgtccaaacagagacaaaacctatgtcaaatcgtgtcaaacgattttggtttgatttcaaacttctccagagtgttcctagggtattttggcgccactttgatatttggactttatgcgttcgagctttggaagatagggaacacatctgaactttgggaaagggttctgaaattcagatttctgaatttctgaattttcccatagggccttagttcatgggctgatttggggattttggaaaattcaa

SEQ ID NO: 171996 - DNA, 574 bp, Zea Mays
gttatctttaattatattcatacttctgcactgtgcatatcattaggtacgctagatatacaaggcatgcttagacgatataagtcgggtgatttcctatcacctgcaaggtacttgtgcttaccttatgttgatttgggtgaagtcatcgggaacatcaatgataagtatgaatgttaatttgagaccggacgggatgcagataaagaaacataaggcatggaggtctttgttgtctacttttccccgtttgtgtcaattaaggaccgtactgttgtggtcccttgagtcatgttgaacgcatgcctaagcacttagcgggctggataactcgtcctggacacgaagccagagtactaatacagatgggttcgaccttggggtgcactcatcggtatgggtcaggagcgacggggacacgacgagttaacccatggttttggtggcgccctgaccctctgatagtcgggaggtccctaggtatggtggcttatgttgtacccgcgacatgcagctgggctgatattagaagagtatgatggtgatcgtatcccacgaagtattgtgggtgttg

SEQ ID NO: 171997 - DNA, 665 bp, Zea Mays
aaaatctatacgaagctcttcttctctttcccaagttgcttcgtcttcaccgtggtggctccattgcactttgcacatctttataaccttattcctcgtaactcgagtcaaagtatccaaaatcttgatggggtactcagcataagtcaggtcatcttgaacgctaaggtcttccattggtaactgttcttcaggcaccctgagacatttcttcagctgagatacatgaaagacatcataaacatccgtgagatgatctggtaactccaattgatatgcgacctctcccactcgctttaagattaagaagggtccaatgaagtgaggggacaactttcctttaactttaaatctcctcataccccggatcggtgacaccttcagatacacgtgatcaccctccttaaactccagtagtcttctctaggtatcagcatagctcttctgccttgattgtgcaattctcaaattttctcttatcattcgaacttgttcttctgcctcttgaataagttcatgtccaaagaattgtcttcctccagtctggtcctaatgtagaggagccctgcatttcctgccatgtagagcctcgaacggtgacatctttagactggactggtaactgttattatatgagaactcagcataaggtagactcttgtccc

SEQ ID NO: 171998 - DNA, 605 bp, Zea Mays
ctagaatatatcaaatagatccatcttaccttggaaggatctcccttatcctaatagatccatcttatcttaaaagattctttcttatcttaatagattcatcttatcttgaaaatattttatcttatcctaatagatctaactaatctcgacagaatctaccataatcttaaagactcatcttgtccaaacaagcatacttatcccaaccaatttgcttatctcataatagtgtaacaaacatgatctatttcaaaataaattaagtagatcttatctagtctaatatgattacaccaattttattctggtcccatctaatctgatcagatctaatctaatcgacaaacatgttagataatactggtaaaataagattggatcctactcttataaatatgttttaacctaaattggagtcttagtccaacctggccatatgcaactaccttaaccactcgatagttgcataacccctctgtttaaccgacagagattctgacttacctacaccatataatccctcctatcgcaaaagattctaacatatcctaataatatatattctaccctggtagatatatctaacttaaactagtctaatc

SEQ ID NO: 171999 - DNA, 704 bp, Zea Mays
ctccgggcaaaaatcgcctacggacgcggctggatcaacgaaggcgcgcaaccttatcatataaattacggttacatatacacagcgagggcatcatacaacacattggctcaaccttcgggatgatacccatctccctagagttgaacaacattatcctcaattcctcaccctcaaaaagatttcgtagctccccctcacctacactcaccccaatcggcgaggacaacaattctcgcttaccagtcccgtccacatgaagacacccactctccaactcaccacgttgccgtctaccactttgcgacaatccactcaccctccatttctccaccgcccgtcgccgcctatacccagtactcgcgcacgggggctcctcggaaccctccgcgcgcggggagggctccgttgcagccacatccaacgccgcaaaataatccaagtcctcatccgaagactcctccgtccatgcaatcgaactcccagaatcattatactcaacacacttagacacagagccaaacaaatcgtcatcagcagccacggtcaaagccgccacaaaaatatcattgtcagtagtggttgcgtgcgcaggccccaaccccagaacctgcgcagcaaccgaggttcagtatcacacaggcgaaatgtacaaactccccaacacctactcagccacctgcgaaggcccggctgcggctgtg

SEQ ID NO: 172000 - DNA, 974 bp, Zea Mays
gttgaccagctttgtctttaggcgcgacagccttcgtctcaatgagcacggcaggcccagcttcggcttcgacctggaccttagcaactttggcaacattcttaataggagcaagggtcaaggcctttgtggtctccataacagcgtccagcacgctggccatcctcctcctcttgggaaattcttaataggagcaggacctttttgcatcttcagcaaatttgcctttgccagtgggctcaaaatttctggcatttttactgtttcttccacctttggctcttcgaccgtatcatccttagcttcggctgacccgattgtaggcacctttggcaatacaatggactcttcaacgctctacacgatggaaacagcttgttttgcttcggcagttgaagaggtcccttcgctaaattcaggcactatggctggttcaatatatcgcggtcggtgggtcagaaccttcattttcttgcccttcggcacagcagtagtagccgaagcaacaatttttctcttcttcccttgccttcacaacgggtagtgataatcagggtatacgaagctgattgcatcgaataccctgttcaatcttttcttcccctggcccccgaaggctgcaaacaaggcatcatcttcggccttggaatatgtcccaagtagctcgtcgctggtagcttcaatgcatttcaaccagtcatcatttggttcatcaaacttctctctaaatctgaaggtatacttcaatcgaactaagccattttcactggattcggcagtagtctccttcggcatatcctagctctccacaagtggccacaccctataggctatgtgctcttggactatatctcttgtaccaatgaaggcgcaaacattgctaaatgccttctggcatgcttcaacgtcactttcaatagccaccttcggccttcgaaggctgaagcgagaccagatggggtgctggataattt

SEQ ID NO: 172001 - DNA, 317 bp, Zea Mays
ggccgagatcgtgcataccaatatacagtgagcacggcggcggtggcgcactggtgccgcggcggatagctcgccggcggcacgcaatccggctaatcactactccatacccaaaattggaccgctctacaccacgagacagacatggtgaaggtaggagtggagttctcacctgcgtttctggatcgcgtagacgtgaccacggtgcgcggcggatccgaggcggtggtgaagctccggtgaagaattcgccggtgtagatcgcccccaaaccgatgccggtgcacgcacaccttccctgggtcctggcgacgcta

SEQ ID NO: 172002 - DNA, 707 bp, Zea Mays
cggttatggaagttgaatctactttggaagaagagattcataaaggacaagagtctgatgagaaaatcaaagaaattaagacacaaattggtttggtaaggccccagatttcacagaagatgaacaaggcacactatggtttaaaaagagaatctgtgtaccggaaatcgaacacctacgccaagttattttgagagaagctcatgattcggcttactctattcaccctggaagtacaaagatgtaccaggatctaaaggaaaagtattggtggtacggtttgaaaagatatgttgctactcatgttgcattgtgtgacgtgtgtcaacgagttaaagccgaacaccaaagaccagcaggattactacaacctctcaaggtaccagaatggaaatgggaagaaatcggtatggatttcatagttggactaccccgtactcgggatggctatgattcaatatgtgtcatagtagacaggttgactaatgtggcacactttatacctatgaagacaacttattcaggagcccaattagcagaattatacatgtcgaggattgtttgtctgcatggagtaccgaagaagatcgtatcagatcaaggaacccagtttagctcgtgcttctggaaaagactacatgagtccatggataccaagctaaactttagttcagcttatcatccgcaaatggatgggcaaacagaaa

SEQ ID NO: 172003 - DNA, 536 bp, Zea Mays
tcttctgtcccattagtctcttggattctattgtgcgcatcacctctcctttgtcgtcgtaactctcccaactgcatttcctcgtctcctacaaaaaaaatagtaagtaccgctaaaacattacagctggtgcaaataaataaataaataccaacctcatcgtaatcgaccatatgtccacaaaaatatccaacaccaagctcggaaggaactaatccatacttagcttcaataccacatttgcagagtactggatcaaatttcaactcttccgcccactgatttttttcttttcctttacctctggctctggccaatgggacaaaggaccatacaaccactctctgaaacgacacttacgccacccgtatggctggaggagaaaaaattagtaatttattgtaaaaaataactagttcatacatttagcttatcgatatttagcgtatcgatgggctcacataatcaatgttcggacaacagaactgcttctcatggtcttcgtcgatgatagcacggtctccacaatcgcatcg

SEQ ID NO: 172004 - DNA, 410 bp, Zea Mays
tcctcgcctcgctcacctcctccgccggtccgaccactacacccggcccatcatgttgaagctcgcgctcgcggaacaagaaggggagcactagatggttatcatgtgcgctagggtcctcgtcgctgcgcccccagccgtcgtatcttgagagggagcggttcggcgccggctggccactagaggcctccttttgcttcacctcacctgccacctcctggcctagcctttcttccttcattcccttggcttgcctggtgtatctactacctctatttcttcttctattcctcatcgctgcttccctcctctgttgggcgtcttcctgctcccttcagccctcgcctcccaaaaacagacaagacctgacagcaggtcctaaaggtaaacacaactccttcctatccacc

SEQ ID NO: 172005 - DNA, 548 bp, Zea Mays
cgtagtggccacctctaaggctgagagctcctctgtaacctccatgggagtcagctgactcggactagcatctcggcatcaaagactgccttacaaagtcgatgatgcgcgagacactgcttgcgatacccccaatccatcgtctcgaacctctgaacaagcagccatcacatcatcgatgattgactctgacagcatgttctcggggatgacgtcctcaagtgcttgatcaaaatccaatattgacagtccctgaagaccgacaagagctgacagagctggagaaggaatatcacttcccccttcgctacctctatagtgcctgctgttctttcggatcagcgggacttcttcttcttcctcctcctcgccttcatcaaatatgaaagcagtggctagtgcacgatcacaacccttggcgtcaactttaggaagggtcttcgccagtatctcatctggaaccggagtagaaggattcgcgccctggtccaagcttgatagtcaccgaagccgccttttcttcctattttcttcaacgggtgcagtct

SEQ ID NO: 172006 - DNA, 768 bp, Zea Mays
ctagcttcgagatgtgctcccgaaaacatctttgagataatcgttccttttttcctcccgaagatgcttcgtgagcatcgcttctctcagaaagctgaacacgttttataatccatcggttaggtcatcgttgttctgttatgatatgatataatcgttcctttttattttttaatctcctctgtctcttttctccagcggtggtaaagcgttctacagcatcgagtgcaggtactaggaccaggagatggtcttcgacgaagcagcaggggacggtttgcgctaggcgatgaaggcagaggaggaggaggtgtgttagtggggaggagaaggcgacgacgatggtcatccccaaataataacctttgtttgcgagatcacatgtagtttttggtcatggaggaggaggggggaatgatccagtcttttttgcacatctgtaagaggttgaagaagatggatgagatgggcttgttgctcgtgcaactttcccagttagttagttagttagttccgagttacgatgctcctcccttatgcttcgatgcatcgtcactcactcgttcagagcatttctgttctaggggcggatgagcaaaggcacacacggatatggttgtcaagtctgagctttatatttagtgacgcgtcaaggtcttgtgattctgaagtaaactgaaagagaagatgaaaaaaccttagatcctttgccccatttctatttgcccatcgtcacattctgtgcttggtaatccatcagaatcagat

SEQ ID NO: 172007 - DNA, 431 bp, Zea Mays
tttttaaatagaaaagaaaacaaaagaaaaaaccgaaaaccctaaacctaaccggccatttcggcccatcacgcccatcacctgccgcttccctattccctcctccccatctctcacctaccagtggggcccacccacggcccctctcctttgtctccctcccgtgctcggccgagccgcgccgtgcgccacacccgcgcctcgacgtccgcgccagtccatttccccgaaccggaaactgcccgcgccgtttccatctctctccctcccccacttccctgtccttcaagcaggtaacggccgagttattggctgccaccattgatggcgttgatggccgaccgtctatctctctcccaccttggctctccctctcatcccctctctctataaaacccgcccgagctcccacctctctccctacccgagct

SEQ ID NO: 172008 - DNA, 718 bp, Zea Mays
tgttgacttcgacggcgcgatctggcaagtactgtcgtgagggaagaggactgcagcagcgtttggcggatcgtgtgagtcgctgacgcgattgtctgtggcctctagtgaagggtcgatggcaaataacgagcgacggcacaacgtgacgtgcgagcactgagcagacgtcggcgacgagcgagcaagcaatgcaaagaagtaagggcggtcttgggacggctgactcgaggttgggtgagtcgccggcacggaggctgtagaggagccggtggtgcaggcagcaggcagagcacgaacactgcaaacagcgcggcagcaggcaggcagaggcgagaggaaggcaagcgaagggctgatgcgtgttttatagaggaggttaggaaagggattaagctcggattaatgtgccataaaggctaaataacgttgtattaaccttcggagaaacggcaaccattaagctccaacaatagcggctgtaaatggagagagaaggggagaagaaatgctaggcgttgaaatggggaggagaagaggtactggctggccacggcaggtgcgggcgctctactgcactaaatcgagcaggcagggtgaatgcggatggtcggcggatgcacttccagcaacggctgtaatgcccaggagacgaacgaacaaagaatttggggagaagaggaataggccaggtgggtcccatgtgtcatagagaaag

SEQ ID NO: 172009 - DNA, 581 bp, Zea Mays
ctgggcgcataattatccaataccgcaggggctaactcgcaatatttcccagactcaggcttaccacgcactggacggcgagttttatttttaagaaagccaggggctcttatgcaaaacgcaccggccgaaggggtatcggccaacgagcaccgcgcgattaggattctacggtcaagattaggccgaagctcccgtaggtacctgagccataggattaaggatctgcggtgaggattcccatgatcggagtaattatttgaggatccaatcccgcacgctcgattcagattggacgaacagcatcagtcccagccgaaaggttttcgccgatcaagtcttcgccgtccataacgatccaatggctgacttcataatgatttaatctataccgtcaactaccagatcaatgacactgatccccagatcgagctgccaggactgagatcagatctcagccgttcaaaccgagatcgacgatctccccctgtcttcttctcacgatggttagcaggcggcggcgcttctatccccgcggtggaggacctgccggagtcggccaagccgccaccccagagcca

SEQ ID NO: 172010 - DNA, 917 bp, Zea Mays
tgctataaaaccctcctccaaaattgatgtagctgttggagagtgcaatgtctgttcaacagatgaccagtccacagatgcaaataattccagcagctcaaccgtcagcttcgaccgattgtacgaccttcccaagctctatcgcgtcaacgggaaataaggtccattatccagttgataacatcacaaggcctgtggcgtgcacactggttataagatatggtattaacaatcatcgtaagatgaaagtaggcataggcattgcgatcctaggacgcaagtttcatggaagcaacattccagatgataattgcagggtagaagtgacaacggtcgtccaaggatccgaggatgacatgctagacatccctggtcctgaaggtatcgagacacttggacaagccatcaaaaatttcatcctttcgcctcgaagggatgtcgaattggttgaaccaccaccgccgtcgtcgtcgcatccccaaccatctccgcctcctcaaactttagttcctattgtacatccatcatcacctcctcaatcttcacatgctactcctcatcctctttctgacccaccgtcttcgccacaagcattgccatttagggatccaccaccttctcctcctcatcctcttggagacccactgtctacaccaccagcaagggatccaccttctccacagccatcaagggattcacgaccatcaaagaaatctaaattccctataccaaaattggtgtccacgttcgagaaaaagaagagtaaagctactactgctggcaccgctcgatttttaaaagggattgcacgggacctcacgtcacatacagttcgtttggccgagcacgaggagtctgcaaaaaaggctgaggctatggccgcaaagataaagatcccaactaaggcagattataaa

SEQ ID NO: 172011 - DNA, 365 bp, Zea Mays
cgcatagcccaacaatgacattaagtacggaggtcacgggccagtcaaccatgggaataggcgtagtagtcggcatgaccataggcgggccggcagtaattgtgtcaataggcgcgcaggagcagcaggccaaccactaatcagactctggccccacctgcagactcgcatcctcccctaaggcgggcccgggggccactgtcggtaccctggatcaggggtaccctcttctacaatatgaagatgttgtacacgtacgacgtctccaggccacacggagaacggcacccgaccccaccacatgggcaggtctaagggcaccacgtggcaaggaaagataatgcaccccaggatgcatcattggg

SEQ ID NO: 172012 - DNA, 637 bp, Zea Mays
agcggccgtcaccgggatgtacaccattcaccgcgattgcgccatgccttaggacatcttaccacgtcgtcacaagtcgtagtgactgcccagtgaccgccatagctcattacccagtgacctccatggtagatcgccacgatgactcacccctctctctcggccaccagcgtgatttcttcaaattggacgccaccgccgtagaactctataaattgctgccctcgtgagttccgttaggtatttacgcatccaacgcaccagcccttgcctcggatcatccaccagagcgcctcaatttctcatttcccccaaatcggtcagaacgccgccatgagagagctcgccgtgaccagacgtctacaggtccgttcataccctccttgccctcgtttcagcacccttgtgtgctatggatgcttatcggtccagctaattgaactagaccacgttagatcgcagggaacacctcgggttgtcctcaatttgcgccatcaccatggacagagagattttgagctagaacttcgcaattggtagaggaattagggtcgcccttggtgaaattcgatgttgaccaagtaagaagcctagtcgttgtgttttccagccggtacaagctcgctggagccactgc

SEQ ID NO: 172013 - DNA, 1241 bp, Zea Mays
ttcttgatatcagtgttgacatgctctacagcataatgagagacatgattaaacttcccaatatactgtattacaatgtctaccccttgcctaagcctcagacactcttcaagcttcatttgcaaaatcccatgaggaatatggtgtgcttggaaggattctttgaattcagcccatgtaacctggtgatctggaggctgtatggcaacaaaattggaccaccaagtactggcagccccacaaagttgttgcgctgcgaacaaggacttctgcacctcggtgcactgaataaaaccaaatttctgctcgatcacatgtaaccattcatttgcttcaagtcgttctttcgcttttgcaaacacttgtgggcgagtctccataaactccatataggtcgcattcctttgctgattctggggaatacgaacctcagcctgattattctgatgatgggcgagttcccgtagaacccttgcattgtccacagtggcatttaccagcgcaacaatggcgtctaccagggtaggtggaattggcggtggtggaggattgaaattagcttctgcatcaccacacgatgttccatccccttccaaatcttaagtacgcataagcatctgaagtaaaacaaaattcatgaacatacattcataaccacgaaatatattatagagaattagtacatggagcattatttattacaataccaaaattggcatagtttacaaccctatgcctacaacagagatcgcgtcatcaatacacctgtcacactaaccctccgtatcagtagctacctccgaaacatcactaccacgtggggtctcaccactcagtacaagcataggagctgcttctatgtctaagtcggcgtcgggctcacccccatctgctaacaccacaccaccttctgcctccgcagctccaggcacatcattggggtgcagctagtagtagagctgatggacttcctcatgtagctcatgggaatagtcctctagatcattgtaggctaacaccaaatcctggaaacggcccaacaagtggttttcacgagcaaaagatgcctaccttgaccgcagtgttgctgctaagcattccttctgctcagctatatccttctgcaactgtttcttctttgcctgagctcaaggatatgggttgcatcgagacatcgctcattgaaggacatatccaggcgctgctgcagctgctccaccagcgacggaggtggacgactg

SEQ ID NO: 172014 - DNA, 1164 bp, Zea Mays
agtccagaagcatccccaaaaagttttaggatgtcaagggtggtagagatatcagcctgggtgggatgcaaaaacagggccacatcatcaacatagattgatattctgtgtaattttttcctgctgcataaatgttgtaacaaaccttcctcagctttgaaaaatagaaaactcagaacatccatagaaagaataaacagcattggagacaaatggtctccctgtctgaggcctcttctatgttggataattgtgcctggaccgccattcaaaagcacttgagtggtagatgatccaagaagctcacatatgatgtctctccatatcagaccaaaacccatctgtttcattacttcaatcaagaaaggacaagaaacagaatcaaatgcttttattatatctaacttgaagagcaatctggccttattctgtgaatgcagtaatctggatttctgttggaccaacatgaaattgtcttgaataaatcttcctttgatgacagcactttggtttggggagactatctcattcagtttttttgccagtcggttggcaagcaccttggtgactaatttggcaaaactatgtaccaaactaatgggtctgaaatccttgacctgatcagccccctccactttagggatcatagtaatatatgctgaattgagtctgctcatatttgtgaaatttctgtgccaaacagctcccactgcctttagcacatcttttttgataatattccagcatactttatagaaccttccagtgaaaccatcaggcccaggggccttgttagaaggcaaatttctaatagtgtcccaagtttcctgttctgaaaatgggagatccaattcagagagattatgcacaggtaacccaagagcctcaaggtttatagttctttccctccctgcagccagccctataaggttgtatagaagtgatctacaagagcttctttctcagtatggctagttaaagtattctccccatctctgagtttggtcaccaagttctttctctttctatgtctggcatgcatgtgaaaaaacttggtgtttgcatccccatccttcaaccaactgattcttgatcttaatcttgccatagtccttttgaatgaggtcaacaacaaggattgctttttaagcttatttttaagcc

SEQ ID NO: 172015 - DNA, 336 bp, Zea Mays
gggttgggatcgagagaggagtagcttcgcgtcttggcggatgaaagaaaaaacagtgacagcgaccgagcacgcacgtacggttggcgcgaaagactactctgtgtgcggtcctccaaagtccagatgagatcgatgacctcagctggagcgacttccagtttttggccggtcgacgagtacgtatagagtctttggggttctctcgtctcggctggtaggtaggttcctttctttctttcagaaatagttagcgagcagccagctgagagcacctttttccagccttttgaagccttcggtttgaacggcctgccgactggtgccggcttgcgt

SEQ ID NO: 172016 - DNA, 341 bp, Zea Mays
gcgatcaactgcaagggtgtctcgtgagggagaagagactgaggtcactgagacagcaccaatttcagaagtaatggaacgatcaggtctagttgtgacagagggagcaattgacgaaggtgctcctgatgccgaagctgaacaaactgttgtggaagaagaaaatgttgatgaaagtgaagattacagtattttgatcccaacaaagcccagtcatttagattttgagaaatctactgtgtccgaagacgacatgcccatgatgatgaaactgggttattttggggaagctgaaagcaaacttgtccagtttgccggagaagagactaccccaacaccaa

SEQ ID NO: 172017 - DNA, 312 bp, Zea Mays
aggaattctgactgctgggagggggaatcgggcctgctaaggctcggactagctccgacgagggaaggggaatgctatggaccaacgcaagggctcgggacggggtcaatttggctggacaccgcgcgggcgtggtgaactggcactgatgaactccagcgaggccaaattggctaagacccggcacgaataaggaaaaccaagcacatgaacaagttcgtcacctcgggatggagctcggaatggcttggcgcagcttctggtaggctggacggccggcacagcgggcacgggtctccggcaagcgagagc

SEQ ID NO: 172018 - DNA, 308 bp, Zea Mays
gtgctgaatcccgacaggggcaggagaaccaccatccagatagtggcatgctgcgcactcagcacgcaattccgcaacctccgcccgaaccttgcccaactcgtcaagggcgtggtccagctcggtgttgagcacggcggccaggttgaccatgttgttcagcctgggattgccttcaccaactgggaagacaatcacacctccaacactgccggtcgaacgacaagggtagtacttcaggtcaaggccatcagctacaacgctgaacaacgagcaatactgagaaagtgcatgtcgtgctgcatctt

SEQ ID NO: 172019 - DNA, 1214 bp, Zea Mays
gtcggcgcgagtcggcgcccacgtctctctctctctcccgctcgctgccagtgcggccgatctgtcagcgccgtttcttttcgcgcacgcgcacgtcccttctcgttgccccgtggaccccacccgtcagaccctgtccctaacctcccgcccgtgcactctcacagtggacgcacccacgtccccgcgtttcccagatacctccgcacgccccgatcccctttagagcccgcaccccgctcgcccacttccacctgctcatttgcgccctcagccgagcaccctcgccctctctctcgccctgcgcacgcatccaggcagctccgccaccgctcaccaaaacccgctgcccgttccacggccgtcgtcgagcccgcgccacgccagttgccttggtgagttccgccacattgtcagcaactcgggacacctctcggttcacccccaacccctctagtttgctcggtccgtgctcaccgaagtgttttcccgtgcagccggagtccgccgccgtcgacctgaggcttcaccgcatccccgccgcctcccaagcactcctgagttcgcactcaaggtgagcaacctccctatgcacttaattcatccgttactgccatagtgtccacgcaattcttcgctggagttgatccgcaccaccgtaagttcgtctcgctgtgttccatgccctctggtgcctccatgccgatattgcgccaggactgagttcgccaggtcaccttgatcgcgcctgagcttttccccgaacccctagagccctgccatgctcgttcctctcgtctctggcgatctcaccgccaaggggcaggagtggcgccgtccgtagccgtaaaacctttccgacgttgatctccaccgatcgatccagatcgcatggtcaagatcacagggtaccgattcgcgcccacgcgccctgtcctcgggcccaccagtcagcgcctgcgcccactggcgctaggcccggctggtcaacccgccttctcctctggtcgctggcgccctgtccccacttgtcagccacactcgcccttccgcgcctgtgcgctcatctgctggatctaatctaggccattgatcggaaatcgggcagtcagtttagccccgtgccccttcgcgtggcggttttgcttaagaaccactcgattttccgagaatcaacccgccgtcccgcaatttagcgtgcaggcccctgactt

SEQ ID NO: 172020 - DNA, 1023 bp, Zea Mays
gcatattcttctgagcaaaaattcatctgtggcgaccctgatggagttgtccagtggatcagcggagaggccgaagtgtttgacgaaattttaaatgatcgaggagatttctgtgccttcgctggtgcacaagggaccacgacgatcttagataaagctggttgcgaccatgccaaggctgtagttcggccatgatttgttttctcagcggaggatattaaaacccttcggtcgaagcttctgcgctaggcgggaaattttactctgaggtgtggatgaagggtggtcgtgagatatctgatgaagctattaagaagattgcaaacggatctcatgatgctcaagaagaagccaaacaagctgaagaagctgctgagcgtgcaaggcttataggtacccctactgaggtttagcttcgaaattcgttttcagcttcagaattaataaatattatcttatgatgtagctgaactttcaccccacaaccccgaagttgacccggtcttgaaggaagcattagatattattaaaattgctaatgaagctgttgacgaagctatcaagagactgctgaatgaagccgctgagaaagtgttgaaagaagattaaaactttgtatatttaagagtttaatgtttgtatatgaccttcgtctcttgtaagaaccaaacatcaagtatttgtatgtgtgttaatgtaatatatttctttgtgatgcatgaaacctttgtatgtactgtttttgagccgctcgtgaaaaaacacattcccttctttttatgcttcacgaagaaaagattcccttctgtctattcaatactgggtattgtgctacggttgctgtgtagtaatactgctgacgaagcttctcctcctgtgtgaaaatatatctaccgaaggcatatcttatgtatagtatgttcaatttttccttgtttctccacgactctttactgatgcaaaatgatgtatgatgcgatgttgtgcgctatgatatgatggtatgatgcaaaatgttatttg

SEQ ID NO: 172021 - DNA, 610 bp, Zea Mays
gccgattgctccgttagtagggtatagtggtcaccccgagttaagtaagcatgcaggttgacagtgaacaatttgagtgcttttgaagtctttttattgatgatatatgtcccagtttatagagtacattgtcgtcccaatagcttttgagatctagctaggggtaaaacttcctgagatgttctatgttccatgagttcccgatttccatgccgtccatttgagtgagacgatatgatccaggtcgagtgacttctgctactatgaatggtccttcctatagtggtgacagtttgtgtcgtccctcccccgttagaattcagcggaggacgaggtctcccactgcgaaggatcgatgccgtacgaccctatcatgatagcaccttagagtttgctgataccgggccgactgaatcaccgtattcaatcgttcttcttctagtacatcgacatcttccagcctagtagcctcagcttctgctatgttttcaaagattaaccttggtgccccaaacttgagatcagtaggtagcactgcttccgaaccatagaccataaagaaaggtgtgtttccatgcaaagctcgactaggttgagttctcaggctcca

SEQ ID NO: 172022 - DNA, 559 bp, Zea Mays
cttgaaatcccactcaaggatagtatcaaaggatggcgcttggaatggtttattgttgagaaccacggaaaatctctccccccacggtcagggagacagccggatgttcgcaccccaagttggaccgagtctcctacagaccaggaggtggctgaggcaggggctttgctggctgaggttgggctgctgaaggagaggggtttgactgcagaggctgtggttgctgattttgttttcaagaacatccagccgttgaaggatagggcatactcagcctacttgtaccaaggtttagctgactcaacccgggtcaccaatagaagaattcccgctgtagacttggtgaaccggcttgaaatgatacttagaggcaaggtgtccaatgttggtgcccctatcgcatactcggcctagaacctgcctccttccaaggcttttacccattttgtgtcgaatcctcctgttgctgactgcggtttggtccttagagtacgaccctctaccgaagaagttagtgccttggttgcttcgattggagaaattcccgatgatgaatggc

SEQ ID NO: 172023 - DNA, 730 bp, Zea Mays
gcagcggtgcatacacatcgtcatcatcgccgtcgtcgtcgtccacaggtgagtgagctggggctggagttggtggtgggggacgagcctccagtacgtccatgcatgtaacaagttcatcaactcgtcgatcaaactgctcataggatgtgccgcagagtcttggtactttttaaaagcttcagtcatcgcacacatcatctccttcaattccatctgagagacacactcatcgtcgttaagcttaggcccttgtccttgtccatttgattctttggtcctgtcattgttagcataaaacagagacaaaaaggcaacaaacaatgtgaaccctacaactatctctcaggttggtggtggaggtggtggaatacaaattatgaagagtcttaccccgctcttacaacgttcttaccagcactgcaggtggcaaacggtgaccggtgtgactgtccaacgagcgtgggtgtgattgcaaaggagtacctgttctgctcgagagaaagctggagttctaggaaggctgactaaatatatatatgtggcacacaagtcagtaacagatagcaatgctgaataagtgttccaagtactcgtcctagttgctggcctagaaaatataatagaacagttggaccaaagcacaagaaaagaggtacaagtatctagtgggaatgacagttctgtaaatagagcagatttttcagcactagtagaaatcaaaggcgcg

SEQ ID NO: 172024 - DNA, 600 bp, Zea Mays
gtctccatagtgccaacaatcattggttggaggttggctgcttgcaacaaactgggtgtggaaggaactttgactaggctggtcgagacttgatggagcggatcatgctgacttgctgaagtttgaccccttggaagggaacccaaaagatcgaaccctctggtgcctgtcctgttgttgagctcggagaacttgaaattttctcttgagatgacctttttcctcttctcgtgctctttccacctggatggccttgttcgagaggtgcgagaaactgaggaagtcttggctggcaaggatggtcttaaccctttcaagaaacgggccatcttcttggcttccgtgctaacgtcatcaggtgcatagtgagcaagttctgtgaatttatggatgtattcactggtggatcgccctccttgagttaactcccgaaattcctcctccttgagctggacgattcccaagggcacatgatgctctcggaaagcaacctcaaactctgcctaggtagcatctcttactgcagcgctgaaggtgtcccaccaggatagagccatcccaaagagctggtgggcagctaggtgaacacgctggtttcag

SEQ ID NO: 172025 - DNA, 1201 bp, Zea Mays
tgcacactgtttaataaagcacaccacatcagccttcaaacccttccaccagaatagccttctcactctgtggtatgtggcctggcctcctgaatgacccccacaacactgttatgtagggcatctataatttttgttctcagattagagttgcttgccacccaaacctgatcacccttcctgatcactctctgctgcaaggagaaacccttttcatctggactatgcactgctaactgagccaatagcacttgtgcttcttcatctgtaacataagaattaatcatctcttgattccacataggcttcacttcaacaactgactgcaaagccattaggtgtcccactctggataaagcatctgcagcctggttttgtttacccttcttatactcaattctgaactgcaaatccatcatctttgccatggccttcctttgcagtcaggggcggagctacctagaaactagggggtgcacatgcacccgcgaaaatttggaaatatagtggtttggaccaaattttcaccatatatgcaccacctataaattgttattatgcaccttaaaggtatatgcaccctcccctaatttactctagcttcgccactgtttgcagttctgagtgaagcacttggttctctagaaaactcaatgccttgtagtcagtccagtcctgattataaactcagccctctgcatatatgtcctccacttgtccactgtcatcaacagaaccaagaattccttgtcataaattgacagtcccctgttcttcacactcaatgctttgcttaagtaagcaataggtctattcttttgcatcagaacagccccaatgccatcttcacaagcatctgtctctactacaaagctctcatcaaaattaggtaaagccaacactggagtggacatcataaccttcttcaacacctgaaatgcattctcagcttggtctgtccactgaaatcccttatgctgcaacagattggtcaaaggctttgcaataatgccataccctttaacaaaccttctataatacccagtcagaccaagaaatcccctcaactcagaaatagaagtaggagatggccacttctccatggcaatagtcttggatggatcagtagctacaccattttgagagatcacatgccccagataaagttggattattattgtctaggtacaccttgcgcccc

SEQ ID NO: 172026 - DNA, 438 bp, Zea Mays
gggacatgctcagttgggcgaaccatcatgctaacgttgatgtcgatagaattcaccatagctcagttgacaaaagagacaaagtacaatcccagtcgagcatgtgagtcaactcgttagagaacattttgctgccagtgagtccattttgaggagtgactggtacactaaggctactggcacctccggtacgacgctgctggtaaaacttatttcaccctcctataggaaagggaagagacaacattctttcgcataagcagacgtagagccaacattctttcgcataaagttctgaaccgatagctatgaactattctaaaaaattgacttgctaatttgcatacggatatatatatttcattaagatgtgaaaataatttgcaagtatgtgtgatatgttactttactaaacggcttgaccaatctatatttttc

SEQ ID NO: 172027 - DNA, 1368 bp, Zea Mays
aaaaatccattttccaaattatttattcaatttcaaactgcactggattgggcctcaaattccagaaagcacaggggcttatctaagaaaactccccagactcagatgcaacccgagctggacagcgggttctaatccatgattcccgaggggttcatgtgtaaaacgaactagtgaaagggtttggatgattctcggccgcaggatcacacaccaacggtgtggattagatcgggcctcccaggtcccatcattgcactacgaccgttggatcaagtatccacagtccacggttcgtgacaccctattctccccatagccgttagatgaagaaactgtggatcggatttaacaacacccatagtcgactttcacccgtcagattccagatccatggtccacatctgatttcgcgaaaagtcatgccctggcctaatcacgaccgtcggttacttgatctacgatgccgaacccatcttcttcctcccctggctgtcaacacggcggcgcactatccccgcggtggtggttcaccggcgcccagacgatcaacgattgcgcacgctagtctccaatccaagcattgctacgcctactagggacaaagacgaaaccgagcaaggagtttataccgtaaatcgccgtgcagagatctctggcgccagagaatcgcggaccgacggtggcacagaatcgacggcgacgaaatcctaggattcccggtcaccaccgcgcccgcgagtacctctcccacgttcccgcgatgctccccaacccaatccgatgcgccggcgtcgcagcagacccaccaacggcgagttgtcgaggcggggtctttcagctcctgcccagagcccagtcgtcgagcgcgagggacgggagcgggttgcagacctgtgacgatcgggacgggggtcgcggccgccatataggccgcagggtccgagcgactgcaacggccctgagatcccggccaagccgtttgagcgccgtgcggattccgcgcagcagaattcgttgaggacgacgagtctgcggtccggccccacctggcggtggtagcaacagacgcaagagcgcccgggcgagtagctgttgggctgaccaccagggccccacacgtaagcgaagcgcgcgggtaagtgggattgagagctggctggcgtgcagtagagagggtgggatgggccgacgtgtgcaggtgtttagtgggccagaatcgagtgaatgagcccagttgggttcttttctttttcttttatgtttttattttctgttttcttccattttaacttctagaattcaaatttgaattccatcctaattatgagcttatactcattttaaatgtacacattgaacccaaaa

SEQ ID NO: 172028 - DNA, 388 bp, Zea Mays
atttggtgactaggcttttatatcatttttacgagtgccttatgtggaatctgcatgtcatcaagagggtagagctcaacctcattattgcatcatggaatgagaaggccatacaccactagtcgtggccccaccatggataccatggtggacatggttttgtgcttcaatattttgatacagagggacacttgggtggaggaggggatctccaacaacagatagaatcttgaggcaaaaaagaacttgggtggtggtggggaatttggatggtgaagggacactcgagaggtgcaaggaatcaagtgaaggtgggcttggaggcagagggaagagcaattttaagaatcttagtggtgagcgctaaaggtagactcagtcgcagatt

SEQ ID NO: 172029 - DNA, 646 bp, Zea Mays
atcttcgggttacttcaggtaaaactttatgcatgaggagagagcaaataattaacttatctgtgtttcattgtatttcaatttaatttcccagattattcaagcactatagagcttgatatagttgttatggccacttggcaatataaataaatatatgatgccacacaacacaagcaaataaaatatagagctaaacaaaattgtttacgaaggttgcacataatgtgacttcaggaccttgaacaacccaccataatccacgcgagtacaagctctagtgtatctggcgtcaacgcgtgtgcgaccatcagggctacgacaacacaacaagccttcgtaataagcgcaacaggcacaattatggctcggtaatcggggtacacgataagtccacgcaacatgcgcaacaggcgcaattgtggctcaatgatcacggcagacagacagtgcctacatggcatgcgaaaaatacgcgactcagcgatggcggttcgactcaaggggagctgtccgattaaacgagagtgctatatagcaatcacatgacgcagccaagttcgtacgacacaaatattgcgacgcgttgccaaggcgcagtcaatattcagctaatgtcataactcagccgataataacatagttt

SEQ ID NO: 172030 - DNA, 539 bp, Zea Mays
gcctaggaaattgttctgcttgttctgtggcgaggacaagggacacacaacaaggacgtgccaagtcacgatccagaagcagaaggaaattgctaaagtcgaagcacgacagaatcagccgaagcaggtcctgcatactgcttcgtgctactctccgtatatctcgcagtacgtaggcaatcaacagcctatgacttcttccacttcgacaagtcactcttaagcttgctgggctcagttaccaccaccaccactggcgcctgccccaagtcatgatcagcagccagaagggcatcttcgacctcagcaacaacatgaacttcgggagtagtctgaagctcgcatagttaacagtactgtactcgagtcaaggcatatctactgaaggtggcacaacgttttggccaaaagagagctccgattcattatatctttactctttttgcttttatatttcattctaaaaagacaatacaggaaggtttaacctttagcttgatgtaataaacctgtggttacatcatcgagtgtgacaagaa

SEQ ID NO: 172031 - DNA, 523 bp, Zea Mays
aaaggtcatgggtactatatactagggtttacaaatcctaccctcttaaaaagaatctcgaccccgagattaagaggaactaggaaagaggtggggaaattctactcgtagctctttttctctctaccaagtagcttcaacttcactatgatgactccattgcactttgcacatcttaatcactttatttctcgtaacacgagtcaaagtatcaagaatcttgatagggtactccatataagtcagatcatcttgaacactcagctcttccgtaggcagttgctcttctggtaccctatggtacttcttcaattgggatacatggaagacatcatgtacatccgtaagatggttgggtagttccagttggtaggcgacttcccccacgcgctttaggatcttgaagggtccaataaagtgaggggacaacttcccttttactttaaacctcctcataccccgagtcagtgacaccttcagatacacgtgaccaccgtccttaaactctaactgccttctgcct

SEQ ID NO: 172032 - DNA, 437 bp, Zea Mays
gaagaatgcgtcgatcagtgtcgtgcagtcatcggcgtccttcacgttctcgtgtggttcatcctagtgctccggatgcaacactctgaggtatccacatgtattaagaggaagcgcctcgtactgaactgctaggttcgtgacggcggcttgccgaggacgagaggggcgcgactgctggtttgttggtagtgagtttggttaattctaaccactgccatccctcattatataggctttctgggagcttctgacttcgaggcccaccagcaaccctaaacccagtctaatttagatcctatccgagttaggcttccttcccataaattgtaaccctataggttcgcgtacacataaacatggcccgagtactcttggcccaataattaacaacaggcactagcgagacatgtcaactcctatgcacatgtaaagat

SEQ ID NO: 172033 - DNA, 467 bp, Zea Mays
tcggtctagagctcaaaataagaattgaatggtcaagcaagtttatgtagtgaagaaggataatagaaaagccaaaagttcagatctgaattcatgcattacagagccggaggaagtattagatacttcgctagcagtacccaaacaatagagaaattagctagcgatattccaggtactaaatctgaacttaagaagcctaatgtgcccaaacaaccaagaagcccactcgattatcattctggcagaagaggatagaaaaactcgatgcacaagagtcgaaggagagaggcatgacatgggcccctaatgggagttctcaagatctaggtaaggatgatgcttttggaagaagtggagtaaagtcaaacaaaaggaagaaatcaagtacaagacatttgggtgaaaggtttgcctcagctcaacaaagctattagtcattgcatcgttcatatttttcagttgtg

SEQ ID NO: 172034 - DNA, 950 bp, Zea Mays
agggcgggctaattctttcagctatctcattaggctagttccattttagcacttagaaactctagtttccatttcctagcttagctgagatccatagatgttttaaactcatgtatgtgtttgtaatcttcactgcttgatccaaaggaagggtggtcggatccatccatagggctggtttgactcttgtactcagttttgtctccattgaagtttgagtcgattttgttctctcgttcttcccttttgtctcgctttgaatttgtggaagaatcttcgagttattgtgttgtgggggatgttggagattgattgatggggagatacacttttttgatcactgcatatgccctgttggtgcagttcttggtcgtgatccgaattgatctccattcaagtttgtttgagaaaatgcaaacaaaaccccaaccttctcggtaaatctgatctgcgctttgagttttgattttctcgggttgaaacttcacgaaacatcttcttacccctgcacacaaactttctgtgaactttgaggtgtttctgtgcagtttagcccgagcggcaccgctgcccctgtgagtggcattgtcgctcgccagcactgccgaacctctgagcgacactgtcgcgtgtccttatgtggcctgtttgttctaaattttgcatacagttgggcagttccatgtgtagcagtttgttatattcattcgacgatggactgagtattactgtattacgcagtttcagtcgtcctgtggggtttcgttgaagttgggatcaaagtcattgtgttgttctcgagagaaaatttttagtggctctcattcaaccgcccctctagtcgccttaccggtccttcaagtctcttgctcattttagcagctgaagaaactcattggagaatgaaaaagagtttttgcctagtgtgaaactttagagttgataatcat

SEQ ID NO: 172035 - DNA, 422 bp, Zea Mays
ggccgaggctatcgctgccttggtcaccgcgaccgctgacaacacccgcttcctacatgaaatggcgggacatcaacttcagcaacaaggcggaagggcttatccgcagggaccccgcgaaactttgtatctggatttctcggaaacccgtcccccacttttcgtcaaagctgaagatcccctcgaagctgacgaatgggtatgggtcattgagcagaagtttggactcatcagatgcacggatacccagaagccattatttgcggctcagcagttaagaggccctgccagtacctggtggggaaattatgtggccattcagcccgcaggacatcaagtcacatgggacaaatttaaattggcgtttcgtgagcactacattccagaagaagtgctgcaattgaagcacgaagaattcatga

SEQ ID NO: 172036 - DNA, 552 bp, Zea Mays
ggacttcatatgcattttctatgaattatataagttttacaattatttttatactcaaaatcaatttctaaatctcttttcctgttttctttaattcctagactgggcgcatgaataactggaagcacatgggcttatacgctaaatatacaatgactcagagcgccatcgcgcggactacaggttggtttcttataaagtcgggggttcatacacaaaaggtctaggcgaaggggtatctgttgacatgggccgtcagatctgtgatcaagggtcacgattagatggcgctataagtgaaccggtatcaaatcccggccacccgatcctaaatgaacgcttcggattaaatctttatcattccgaaccggacgcaattgcaaccgttggatcccgcatcaacgcacccgatataaaacacccagatctaatcctgtccgctcgtaggctgcccaatggttcggatttcatccccacaaatcagtatggccagacctgatcacggccgttgcgcccccatctaacggtcgagaccgtttcccccaaaatgac

SEQ ID NO: 172037 - DNA, 732 bp, Zea Mays
cacgagacgggacgatcgataagtcaaaagccgtgaaaacgacgtttgacagacaaatagagacataggatgattggaattcgaattgaggcacaaaacgatatgggattgagccgatacttcacgaataggtttagataggtcaatatgagtgaagtgtgtgcttggtttgaatttaggcgaagaaatagggttttgggcactcggctcggaaacgatcgcgcaaaacgggaattttggtgaaatttaagcctggggtctcggattggcgtgaaatttggcaagtaggttactggaagtgtggtgaaagtgcctgaaaaaattgggttcaattggagcaagtttggctggtttgggcatttcatcgaacacatggtgtgcgaggagttagggttttaggaatatggccatttgaggtgggaatgccctcccgaaggagccaaggacctgcaggggtgtgaaatagggacaggggaacacaatccaccaactggatgcaaaggatttcacagaaatttacagatttggaagaggtgtgagaaggaggggagaaggggcaaacttaacacagggaactgagagggagaagaaaggagatggggggaaaacctgctcaccgagggagggaaggagagagacgaggtcgccggagatggtggccggagatggtggccgtcggtgagatcgccggcgggggaggagaatcgccagagagcttgagggcgcaggcgc

SEQ ID NO: 172038 - DNA, 1098 bp, Zea Mays
ccctacttgagccctcgaaactaaatttgagggctagcttgagaaaaaaacaagatctaataaatctactactaaagcatgcttgggataggtaaaaacataaaaaaggtgaatctagatttagggttcacatgtatccaccttggagcagctagtggagctaaaggtgtttggtatagctccacctttctctctatctcacttagtcactttcacctaggccccatgtcttaccttttcattttttccttttgtcctcctcccttcttcctcccatgcatatgaacgaacatgacccctctaggtgcgcccacacccgagcgcaactacgaaggaggacacacattgtttgttgtcggtggctccagtgtgtccattgctatgaagtgatgtgcaaaggtgcacgcatgcatgggtagctcccatatggccccaaggaagcacacgactggcagcatgcggctcccgcacagtcgtggctctaacacaagggttggtagcggccatgagcctcagctagcgggcgtgatagtggccaagctcatgacatccatggaaccacatgcattgagaggtcacaatgaggaggaaaagggggaataaagaaataaaacgttaattttgtgtcatgagttgtaatggtgggtaatttttcctagctccgccaactcaagtttggacgatcaccacttgagatgctccaccgatttggttaatctggtgctagatccatggatttggtggagcagatccaccaatggagttagtggagttacatatgttgggtaaattttttaatccaaatctagtttagatgaatctagagctagcagagttgtccgaagtaggcccttagagcccccaaatccttcgacccctctaaccctcattcttgcgggctctagagggagtttatgctcaaccatttctagcattggtcccatgtgtcactttagattcaccccttgtatcgctcctcaatgcccatcctaggcccaataattcctcccaacaacacccgacgcgacttcctccccaaacactgctcccaagctttgcggttccacaatagtttaatcccaatcaatgtcccatcat

SEQ ID NO: 172039 - DNA, 674 bp, Zea Mays
ctacaatcttcgccccggcatggtcgcaaatgcatcccaagatttcttcattgatcccaccgaagagtatggatcccggttggtaaccacaagacatagcgaattcttttaactctgactcatcttcttcagaaagttcctagccacccagctgccgaaggtcaaaatctttctcttctgaaggggcacaattttctttccttgatcaggcactacgaccatgcttttctgcgcaaccacatctatcttctctgcaaccacatctgatataagtttgtcaatttctgacattgtggttgcgaattcttcagctttggctccaccagcatcttcagtgtcggcaggaatcgctgctctcaccatcgaagcttgaggcggcgtttgctcaatcacctgcgttaaattcacaatccgccgcttcatctgccctccaaccttctcctccgtggtcgaaggaatttccttcttctgtaaaaggttggtcagttccgatctcagaggacttatcaacttgaatggtggggattcagtcattaccttcaaaatttatgacacctcggcagtagaaggcaacaaagggctcaaggttttctccgacgcttcatctaccttcgattcggcagaagatatctcatcaagtttccttttcttaggggctcgtgccttcggctctg

SEQ ID NO: 172040 - DNA, 502 bp, Zea Mays
ataccaagctcaaacaaaagcatggcgcgaccacacagtcatcccgagggaattcagcgaaggagacctcgtcctcgtccggacagctcggacagagtcccggggcaagctagagccaaagtgggagggccctttcatcgtcaagacaaaggcgtcccccagcgcatacaggctcacaacgccgtccggcgaagacttagagcattcttggaacattgacaatcttcgcaagttttttgtttgactcctcagggccaactcgcccttgtaattcgcaaaacagctttattccggcccgcactcttttcctcccgggaggtgaggtttttaatgaggcggagccatgtaatatacacgcaaaaaatcccccgcaaaaaattaaaatgtcgaaaaagaccgcatcgacggtcttcggcattcgacaaacacgaagtcaccgcgaggggcagcgctggctaccctcgcatgcgacactccgcgcaaaagtagcctaagggtgcag

SEQ ID NO: 172041 - DNA, 700 bp, Zea Mays
tggccattttggcagcccgatgtgtgcagagaagaggaggttgaaggcggcaaatgagaagagagcacatgatgcaagagaatgggaggcggctagagccgagaaacagatgttggataatcttgctgattgtctcaagggaagtgagtgagaaaaatgatactataattttgttagtacagtttatttatcctgactttgcaaacttatttttcccattatatttgtagagattggatgtggcgtaaactatatcacagatgaggcacatgcaagacacgttcaggaaaaaatggcgacggtggagctgatggaggaggaggacgatgacacatttaggttgagtgagtttatcgctcttgcagaggcaggattacatggggaagaggaggacgacacattaaggttgagtgagctcaacgcactagctgaggcaggattacgtgctcaagagaaggaggacgagtttatgtctcacgccgtcgaagaggtagaggcggcttattacaagcagaagtgtgatggggctgaggctgagaatgagctattctctcaagctgcagatgaagcagaagccaattattacaagagaactgctgcaaagtgtgatgcaggacaatgcagcaagtggaacgaggttgtcgttgaggattgcgcgacagatgactctgaagatgagttacttatagattgtgattct

SEQ ID NO: 172042 - DNA, 431 bp, Zea Mays
cttgagtataaacgttctccctttcagatctagtgtgtactgatttgttcttccacaatgctgagaatatcggtcatattgccaaggtctttccagtagcaagtgacacacagacatgggtgcaacatcgcactccaccgtgtcaacatactctccaatcttgtacgaaactttcaccttataaccaatcttgatatctcctgattcgttcaaccattgggcatgatatgtatgagggtgtcgctgcaacttcagatcaagcttttcaaccatctcacgacttacaagattatgacaacttcttccatcaatgatcacctttactactttgtcttgcacttttgctctcatttgaaaaagattatgtcgctgtccaatttcagcttctttcatttgaacactcaatatttgtgtaaccacaagagcggtac

SEQ ID NO: 172043 - DNA, 491 bp, Zea Mays
acacaacacaatcaaacaaaatatagagtgaaaacaaaattgtttacgaaggttgcacataatgtgacttcaggaccttgaacaacccaccataatccacgcgagtacaagctctagcgtatctggcgtcaacgcgtgtgcggctatcagggctacgatagtatagtaagcctccgtaataagcgcaacaggcacaattatggctcggtaattggggtacacgataaatccacgcaacatgcgcaacagacacaattgtggctcgcgacagacagacattgcctacagggcatgcaaaaaatacgcggctcgacaatgatggtctgactcaactggagtggtccgattaagcgagagtgcgacatagcaatcacatgacgcaaccaagttcgaacgacacaaatattgcgtcgtgttgccaaggcgcagtcaatattcagctaatgccataactcagccgataataacatagtttgatcagtgtgtctgag

SEQ ID NO: 172044 - DNA, 549 bp, Zea Mays
cgttccgaaattaagactatgtaacagaaggtttctcgcatgaaaatccctgaataaagtcataagttcagtcttgattaggtcccaaaaggcttggaaaaactcggtcgggaagccatcagggcccggtgccttattatgctgcatttgggaaatcgctttcctaatttcatcttcactgaactcagaagtaaggtaagaattttcctccactgagacctgaggaatatcatgaaccaggctctcgtctagagtaatctcagaagtcggcgccggtccaaacaaccccttgtagtaagaagtgatatacctctttagttcggcatcaccttcaaccacgtcattcccgttcctgagctggaaaattctagactttctatgccttccacttgcgaccaaatgaaaatatcttgtgttagcatcaccctgaagcaaatgagtcgattttgctcgttgataccacttaatctcttcctccctcaacaactcagctaatctattttgaaggcactgctttaaatctaaatcgtgtgccaacaagttgtcatg

SEQ ID NO: 172045 - DNA, 1256 bp, Zea Mays
aaaaaggaaatggcatgcagcctcgtcttgggccaaattctcttatgttggcccaaacctctgcacagcccaaaataagagaattacgtgcactcgtgtatgacgcgtggggccgcctaatcagccgcatgcggggaggatagcttgggggatcaagtcagtgacacattgggcccactcgtcgttccccgctccgtccgctcttctcaactgaatcagccgcaccactggaggaccgagcaatctgcagctcaacgcgattcttgcgctagaccccaaccgaccccgtgactcattcctccctctgctgtcttctcgcgcgagccctttccccagggcagcagctccctgctcgccgagcggctcttccatggcgccttgatctggcgactccgctactccctccagccatctcctccctcacggctccccgcagaccggaccccagtaccctcctttgaaccagtcctccaagtgctccgtgtctatggactctccaccgccaccgggggagcgaggtaacgccgcaaccatggtccggcatctccgcctcctttcggtgtccatggtggggtctgggagaatctccagggcgagtggattgtgaccgggcatgtgcttagccgcggtggcattcggtgtccagtgaatcactcgccgcagctccaaggccgccgcggggtcacgcatctccgtgggcgtggtgaactgcttcacaaatcacggtaataatctctcccctgtctcctccaaacccttgatttgggatagcacccattccgcgatgcgtagggccgcgcttgtaccgagattggggagctcgccggcgagctccgccgtgatggcgagttctgtcgcctaccggccgcgtgggtagggaagaacaaacatgggtcgtcgattgttttagggacggtactgattagatcctaggttaccctttcgggatgagcggaccagatcaactcatagagtcatcaatcgcgtgaactgatcgtgaccgtagatccgtaggggaaagattgggatatggtgtgaacgtggcgctctgtggatcacaggatcgtgatccgagcgcatgcataacgtgtagcttgctataaaatccaggtcgttgattgtaatctgaacggctgtgcgcatccgataccccttcggcctagaattttgcataattatccccgagtctattaggaatgaacccgcggtccagggaccctgttcgccgagtcttggcgatcttgcgggttagcccc

SEQ ID NO: 172046 - DNA, 628 bp, Zea Mays
ccagaacgtcttcccctttccctcggctgttcaaccacgcatcggtggcggtgacgcctcgtcttccacactctcatttattcctgtctcactttctccaaaggcatatggcggcgaaaagtcacaacagtggttcgaggggcttgtcaatgggggaaggtgaaggtggcggcgtaggtgacagtggggtaccacggtagcggatgacaagtaagaggcgatggcctgctcgatgtcctctatggccacttgctcgacaagatatcctctattgccacgcgaaagaatacaaggtaaagaacacagagacaggaatagagatggaaagttaggggttaatatacgacgacaacgagaagttggaagcgctcgtgatgattgtatggttgtttacgcacacaaggaagcaatagataaaggcttaatgtatctttgttagacgaggaacaataaggaagaagcgctcatggtggttgcatggttggttacacatactcgtgttttataagaatctaggtgagggagatggtgacggaaaaagagatggaaagttgggggttaatatacgatgacaacaacgaggtcatggtggttgcatggttggttactcagactgtcgcgttataag

SEQ ID NO: 172047 - DNA, 806 bp, Zea Mays
caacacccaaagggtgcgaagtcttctacgacaagcatatttctacatatgcaaaagtcgcctaagggtgcagctggattcacactaggcgcatcacaaaaagcgaagtcatcacagaagactaccaacagatcaatataaacatattaacgacgcccaagcgcacgaagacgctaccaggtgcaattcagcgcaaacacaacaaatgaaagacacattatgttacaattataaggtgcgcactatgcataagatattcaccccacatagatgtccccatagccgtcctttagcgaagggggagagggcagcattttcacttatcgtcgccaaagaacggcgatggcaacactcattattacatcggttcttgtttcggaataagaccagcttctcggaaattaaacaacatcaacctcaactcttccccatcaaaaaggtcccgcagatccccctccctgatacacgacccggacatcggcgctaataagtcatgatgggtcccctgatccagtcgtggtccgatccgaagacgcgacctctccatgcccattcgacgatgccttctaacacctcgcgaagactctccgacactttgtttcgatacccccatcttcttttcgcccccgcgggtcaccagggactacaccgatcgaagtccgcgacgcatcacgggggcgaccctcaacagagactccattgcagctaaatctaacgccgcaaaataatctaaaccatcctccgaggattcgttatctatccaagaaaaagggctccccaactttccaccttccgaagacaacgac

SEQ ID NO: 172048 - DNA, 360 bp, Zea Mays
gtcgtcgagctgctaatgggttatccaagtgagatctgaccgccctcaggtagggtttggtatggctagtggtcccacttgggggctcgccccgttgggtgaatctcatacaatccttccttactcgaccctctatcggccctctggttcgacatgcgaccaaaggggggtcagtggcaccccatcagctggtttaacgcaagggactgtgaggtacgaccttagacacgttctcaaccccaaattaactatgagtataattacattggtgtggtcgtcgaccactccagattccacactcgtccttcaccactcacggtgtttttacacgaatccacatgatatttaccttcttcgtcg

SEQ ID NO: 172049 - DNA, 471 bp, Zea Mays
caaaccccaatgccacagaacatgaaagaaaagagaaaaagaagtttaacttcttttcagaaaattggggtatcacagttcactcgcctactcaggttagttgcataccgatcagggaacatcaacatcttgatccactgcagtacttccttcctttgggccctgctgaggacgaaatcggccttaggccttctccatgtctttccaccactaggcggctttcatctcttggtttggtctatcacataacgctgccagatccactcttgcctttacattatcctttgacttatcaggaatgtccataattgttttccaaagtgcctcggcgacattcttttcagtgtgcatcacgtcaatgttgtgtgaaaggagcaggtcgtcataataggggagccgagtctagcctgacttatgtgtccacatatgctgctcaccatatcccacaaaaccaccttctggattggccac

SEQ ID NO: 172050 - DNA, 1217 bp, Zea Mays
agccatgcaagtggaaagggcaaaggaagaagaaaaaggccatctcaagaggaaattccaagtcctccgagctcagcagcaagaccggcaccagaaaactcgatcctttgaatttccacccaagggaccaagcttcagtagaccagctagacccaccctgtcacggtttagtcagcagagtcagagctcctttcataccccctcagttgcaagcaaccaaccaccagcgaatgcgtgttggcactgcggagatcccagtcacttcaagaacaactgtcccagctgaagccatcaggacctgcttactccaactcggtgaatggccccaagaatacctcagcacccgcccccaaggcgccctcctccatcagccagcagaacaagacccagtatcaaggaagggcacgagtaaatcacgtcgatgttcaggaggctcagcaagctccgggagtagtgctcgatgagttccttgttgaatttactcccgctactgtactcttcgattcaggagcatcccattcttttatagccactagttttgtggaaaagcatggcatcccctctacccctctagagattcccttggtcacccgaaccccagggtcagaccttctatgccagctcaaatgctcccaagtcagaattcttttaagtggggtagtattcttggcagacttaaccgtcttgccatcccaagggattgatgtgatcttaggaatggattggttgaccaagcacaaaggtatcatcagttgtgcaaacaagacagtccttctcacagaccgccaaggaaagttagtctcttgtcaggctcagccacccgccaatgatccaatgatgtttaatgtagtaacggaaagcatatcagtggtatagaatttatggatgtgttcccggaagagttgccaggaatgccaccagaaagagaagtggaattctacatagatctgattcctggaacaacgcccatcgcaaagagaccataccgcatggctcctgccgagttagcagaattgaagctccaaatcgcagatcttcaacaaaaagggtacattcatcccagctcatccccttggggagcaccagtccttttcgtctctaagaaggatggaagtatgaggatgtgtattgattatctatcgttaaatgaagtcacaatcaaaaacaagtatccactccctcggatcgacgacctcttcgatcagcttcaaggggcc

SEQ ID NO: 172051 - DNA, 1196 bp, Zea Mays
aagaacataatcccctgtacttattacggtgtaatgtagataactcatttacttagaatccaaattcctatccttagctagattgtacttttgtcttgaggttatagtcaaatattcatcaatcggtattagccagaatgataaaaaatgaggcatacgagtttctaataacaagctttgttaaactaatttaataaaatatgcgttggccaaaataaaatgtacaacaactttcgccaaaattagtgaaaacaagtcatactttaattagataaaaaataggctaaaagatagaattatgatctacttatttcttaagtcttatttcctttatattaaagccggtccaaaactcagcctttcagcctatccatgtcggcccgaaaacattcagtcgtccgatcgcgcatctacggttccacacaagacctcgcagccttctcgcgtcgtgccgcgaagcttctaggagccccacccccgcgcggaggtccacttcctctctcgcctgggcgcgccgtcgcgcgcacgccccacccctcgtagcttcaacccccgccgccagctcggtaggtaaccgcccaaccctctcccccggcgccggctcgacaggtcacacccaacgctcagggcctcccaccagctgaccagcatcgcccatgggcggttccaaaccagtggccatcagcgcgccagctgctggggataccaggaggggggcaccgtcaccgttcctgtcgccattcagtcaggtcgttgaggacaaatctagcaacaaggcaacgacctaaccatccaaagcgtttttttccttttctttttgtcgtcggcgtcgacaatgaagagtaacagcaactgctagagccccagtggccagtgccatcctcttccccctcgtcgttgccgccgccacgaatcccatccccctcccccacaaacgccgtcgttgtgcccatgtcgaccatcctccgcctgcacgcgccgtctcctgcagcggagcgctggctctcctccagctgccctgaaccacgggctcagaaccgcgtcaccactcgacgcgtcttggtctctcgcccgtccgtatggtcacaacaataggtttttgcagttccgtctacctcaccatgtctacctcaccatgcagtcacagcagcaggctccagcagcttcaccagattggtcgcccacttgtctgcgct

SEQ ID NO: 172052 - DNA, 608 bp, Zea Mays
ggtcgatggcggatccacggttcggattcaatgcagcgaaaatcaatctaggttcgcccgatccatgatggacggctacgacacaactggacgaaccaatgcgcccagatttagtcatgaccacccatcggtaatccaacggccctaacgctctcttctaccccagtccgagctgggcgatgccttgccccaccgcggcggcgccctgaccgaagctgggtggcggatctcctccggtccctaatccacgtacaagatcggtgctataggtaccaagcaacagcccaaagcgactagagggtcttaccaacgtggccatgatgtcgaaggtatttgtctccacatacggcggcatgacgaattccggtgggtaaccagtcatcgatggcgatgatatagcatgcaacagtgccaggggtacactccctatgaattggagatgcccccgaacgatcccccaacagcatgagagcaaggaacacacagtattgcttccgcggtgactctgcccccatggtgccactgacttcatgcgcaacaccggagacctccccagtaacgcaagttcttttcacgtagatagggtcacgaggggcgcgagagcccaa

SEQ ID NO: 172053 - DNA, 613 bp, Zea Mays
tttagatgttgttgctggaggggtccgttggagccggtctaaatgtaagcggggcatacccctacagcaacaggacatttgagtagagctcgtttggtagagcttcactttataattctctaacccagttagctgattctctattagagtgattacgagtgattctctataagaattgaatctatttaacgaaaattgtttagtaaataggctgtgaagcgatttttgagggttggaaagaaggttgcaagcggtgggaagctggttttgttgtctcgtactttctagtacaaaatcgaaactagatttactttactcctgctataaagtaattcagatttttatcgtttacatctgcagaaatatttcgcaattcagatttttatcatttacatctgcagaaataattctcgctaatagcgcagccgtggagctctgccaaacgcccaactgcgttctcctgcacttggagacggatgtgggctttttcccatgctctaaatcacatgccaggtggtagggcaggattacctgtgtgtttttttccttgcccctaccgaccaaacatcgttggctccgccagatctgctacccaaattaaagaagaaacatg

SEQ ID NO: 172054 - DNA, 404 bp, Zea Mays
atccagtcggagttccaattctgtagaatgctggtttgggtgaagcatagtttgtaaatttgaccactcattgtagcttagctgtaatggagatttgcaacctggtacattgcctacttaccccgtagcgtcaaaccttttagttcattaagattttactctttgccgtaatgcaactgtggatacattactctctatagatctgtagtttgttcttggataactcaaattaaacagaaaatcaacagaattggatatctggaatttcatgggcctatgatttatcagcaagatcattaaccttactaaactcaaagagtataatgttgaacatttttgctatgcttattcatattgttcttgttagttccaactcttgatccttctgcacataagggcacagg

SEQ ID NO: 172055 - DNA, 914 bp, Zea Mays
gtacaccaccattgggatcaacttcagtaaagacctctgttggtacttcttcacaaacaggagcagaagggccagcatcctggtccaaacatgacagtcgccgaagccgtctctttttcttcttcttctcctcaacaggcgcagttgggcggctgacctggcgaggatgctttgggcgagtaccctcaggctttcgggtgtccactgtcttgtcaagctctggtataaccgtaatgaccattgtttcaaaagaggctgagtcataagattctccagccaacatatcgagtacaacatctatttctgcatcatctggactcgctggcatctcaaaatgaacttgcctctcatcattgggaagatcacaaagagaagcaaccaggacctcaatatcttcaggagagggtcacactctaagacccagaccactatcaccagcaggaggattggacacaaaattgaaaaaggacttaggaggtggcagattccaagcagagtatgcaacaggagcaccaacatttgatactttgcctctcaagatcatgtctagtcggctcaccagatcctcagcaggaattctcctattggtaacccgactcgagtcggtaacgccacggtacaagtaagttgggtatgctctgtccttcaagggctaaatattcttaaaaacaaagtcagcaaccacagcctcggcggtcagacctctctccttcagcagacagatttcagcaagcagaaccctagcttctgttacttccaaggcagtaggagactcaatccaactcggagtgcgcacatctggctgtctccccgaccgagggggagggacttgccatggttttccacaataaaccactcaaggcgccaacctttaatgctgtccttgagaggaatgtcaaggtattctgttttcc

SEQ ID NO: 172056 - DNA, 598 bp, Zea Mays
gccactgtagcatgctttcgcctagtaatgtagtaaagggaaggaaatctgcgctctagtgaaaaatcccctagccacttatcttcctagaatctaacgtttatccctctattggtcacaaaccgccccatgtgagagaaaaggctcttttattttcataagacccgaccaaaaatgagagtctccaggtttcacctgcacctctccaatagtcttgttacgaaagtattttctctttaagatttgttgccacattccctcttcgttggctagcttgaacaaaccacttaactaacaaacacttattctgggaatcaatattcttaatcccgatcccccctacctcttttggttggcagaggacgctccactttgccaacctatattttttcttttcatcctctgattgccagtaaaaacgagatctaaggaagtcaatcttttccagaaccttacggggtatttcaaagaaagataacatgtataacgggagactagaaagaaccgagttaataaggactaagcgtcctcccaccgagagatgctttcctttccagctactcagtttcttttctattctctctataacactattcca

SEQ ID NO: 172057 - DNA, 446 bp, Zea Mays
ggcgatctctctcgccggcggtgatcttccctcaccggcgacctccagtgcttgtgcctatcctcctctctagtgagcacctctccctctcctctctctctctctctctgtttcacagttctctaaagcctattccaccccttgagtgccaaactcaatttcctatcaaattctgtgaatccatgtggtgagagatgttcctatgtgtcccttgagtatccctgcaggtttctagctccctttgggagggtttcaatcctcaaatggccatttctcgcaaaccctaaatcctcgcacatcacgtgttcgaagaaatgcccaaaccagccaaaaatgccccgattgaacccaaacttttcaggcaccttcataacacctccagtaacatattcgccaaatttcacgccaatccgatataccaggcttcaatttcactcaattccccc

SEQ ID NO: 172058 - DNA, 677 bp, Zea Mays
ccgagatgaatcctccgaatcctccaaatcctccacccaccagaactgatccagcagttgcagcccagatgcggataatgcaacagatggctgatactatggcagatatgcacgggcagatacgataggagcgtcaggagatgcgccaagagagagaagagatgcgccaagagcgaagggtgcaacagcagcaagcaccactgccaccacctctaccaccacttccaccccggtacaagcaccgagaattcatgagccataagtcgcctaccttcgccagctctccagatcctctgcacgccgatgactggttgaagtcagtggagaagatgttgaatattgcacaatgttctgaccggaagaaggtttttatgctttgactggccctgctactgattggtgggattcctacactgctgcccacgatgctgctgatactatcacatgggcggaatttgctactcagttcagaaactatcatattactgttggactgatgaagatcaagaagaaggaatttctatcgctgaagcaggggagcatgtcagtcaacgagtaccacgacagattcattcagctctctagatatgcatcggatgaagtggctgaagatgagagaaagcaagaacacttcatcgaaggactcaatggacctccgcagtatgctttagtggctc

SEQ ID NO: 172059 - DNA, 1350 bp, Zea Mays
cccattttctacttacacttgacggagatttcttacaactttagcctaggcacacacacagctacttcatacccaccttggtgtaactaggcaggggtttggaaacttatggaacctttgaggcacctagagatcaagcactgcagaaataattaaggcatgcaatcaataacatgtattcaaagccttgtatccatttcatgcagtctattctaatttcgagataaactcaagcctcatacttgctacaattctaagatatgcatttgcattaaattaaccttataagaaagattgcataactttgaagagtctagaaaaaagccctaaacaacttacttcatttctgcttgggtgctggtgcagcgaatgttgttgctggcactgcaatactatttttcttgccctcagatgtgtgcttcctatgaaaccgtgtcgacaattgtggagaaatcgtcttggatggcacacgcattagtctgcgatgttgagtggttgcattttgaattttaaccaaaggagggcatgagatttccctggaagggtagatttttggcccctccggtattggaggccagggcatggatggcggtgatattggagagaagctaggagcactggatggaaggaaggcttgtaggagtggagacaacgtcaaacctataatctcgccgaaaattgaggtatttaggccaaggttccttgcactccagtttgttatgattctggctagctgttcgagcctgtagtttcctagatagatgctgtggtcaacgggggagatggaaacttgaactgtaactggtgttgcaaccgttgagccattcatattcgttaactcgacatataattcctgcatgtgcattcatacaatacataagcataagctgtgacttcatgtccattactacagaaaggaaaagaaaaatcaatgcacgggtgattctagtggatgagaggggatagagtcggtaacctcatctggtgtttgctctagtgtggatccaagctcaatcttcatctcctcaagaaccccccttatttcatgaatggtcgagttaaacgtgacattgaagagaggttctctcaagtcagcatgcggagcactatgcggaagcagtaccgtgatccctcctgggaaccctagaatctccaagcaaaacgtgtctccaaaaacagacggtgtcagagacagattcagctgctgtagcgtaagttttatcaaggacgctctcagtgcgtcgatggattctgtgctcatggaggtatttcttgggtctggaagaacaccaaacttcacataagtggtgtctgcatatacgtatggttgcatggaaactgaaacctgca

SEQ ID NO: 172060 - DNA, 322 bp, Zea Mays
caaagatatcagaaattacaagtccttcggcagaggtgacagtgccgaaggcacaaaaagatcttacagttacccctaagaggaaaaggatggtccacgtactagatgtactggaagaaataaagacttcaagctctactctagggaaaacagccgaagcttcaaaaatgcaaattgaaacaaagcaaactgaagccgaagctgcaaagagtcatgccaaacctgaagctgggccctcagagcccgccaaaaaggaatccctggaaattggagataaagaaacggaaagagaagcttcagaacaacttatgtctgaaccaac

SEQ ID NO: 172061 - DNA, 418 bp, Zea Mays
ggcagggacaccaggtgctgcttcaactccaggaagtcttgttccgcctctttgttccaagagaagggcccggacttccgcaacagcttgaagaaaggcagcgccctctcagccagcctcgaaatgaagcggctaagggcggctaatgaccccgtaagtttctggacgttcttgatacgggccggaggcctcattgcctcaatcgctttgatcttctccaggtttgcttcaatgccccggtacaaaaccaggaaccccagcaacttcccagtggagacaccaataacgcatttgtccgggtttagctttgtgcgggttgcccatagcttgtcgaagactagggttaagtcttccactagggttgaccctctcttagtcttgaccacgatgtcatcgatgtagacttccactttgtccc

SEQ ID NO: 172062 - DNA, 423 bp, Zea Mays
agaacattttttagtcaataacacattgtagttggatgtctggtaaaggcatattgtacggattagcactagtgagtgaacctcgttggcttcgggatggcggtggctggttgtacatcttctcgcctacgtctacaacgacttcgccgtgacgaccaccacaatcgacaacgacgtcccattggacgaggcatccatgcccaacaagaccttctcgctttcccctaattcagtaatcccactgttgttcatctgctcgaaaaggtatgtctgttcaagtgcagaacatctgtaggtctgtacaagcatttgttcttgaaccttccactgttatctgtcctcccctccacgtcctacttggggacatggccgaccggcgccggcatgggcatggccagcgcgtagcggtgtggtgtgcctccc

SEQ ID NO: 172063 - DNA, 324 bp, Zea Mays
ggacagaggagtctttgaatgaggatttgggttactttgtagcattggatgtggctgcggcggaggcttctccacgtgtgatgggtgatgaggatgtttcgggtgcgagtactgggcataggcggcgaagggcggtggcgaaacggagagtgagtgagttgtcgtgaggtgatagacgtcatcgtggtgaggtggagggtggtcgtcttcgtgtggatgggactggcaagcaggaattgctggccttgccggctggggcgagtgtaggtgagggagagctgcgaagtctgtttgagggcgatgaattgaggataatgatgttca

SEQ ID NO: 172064 - DNA, 408 bp, Zea Mays
gtcgtggtcggacctcgctgttaagacagtgagggtggacttgttccatacgagggtgttggagttggtgtccataagttggagtagcttccgctagatgggcggtgctgcaagagcgaagagtcccacccatgtgagatgagcgagtgcatcaatcaatggtagggcgcaaacaagatatgaaaatttgatttgaggatctaatacatgatagggtaaaatcgatgaataaagaactcaagatagaaagaaaaaacagaaaacgacaccttgagcgaagatccatggttgcttgtggatcgcgtcgagcaggcgggtggaagggattcggggggcagacgcctctataccgtgagccggttcatggagaggtccacctcccggagctgcgtggccacggaccacgac

SEQ ID NO: 172065 - DNA, 579 bp, Zea Mays
gcggggtggggatacagctatggcagggacttgggcttcaggtggattccttccttcaagctgagcttctatcaatgtaatcctcgcatgtgcgtctttgaactcttcatgtacccttaagaggtctaaggtagcactatccaggtcagtgttaagacctgccaccacacctacaagggtgttgaggcgaccttctccagcttcacctggaaccacgcttgtctggctctcaccactcgaacataggggaaggtgcctatacgccgtgtcatgtagctgttgccgataggtgtggctgagggaccacagagctctccgagcagcattgctgaccgaagcagcgtatgtggatagcggtgtcaaagactcatgagatgataaagtcctgaaacctctatctcctgcatccaacactctgatatgcacgctagtgatgtagtaacaagcccgaggggctcagacaccagccttatgtcatagagagatcgaacataggttcccagcgcatgcagcacatcttgcagcaagtttaggaagtgtcccacatcgaacattgaagtgtagtgttctgcgacaggc

SEQ ID NO: 172066 - DNA, 638 bp, Zea Mays
actacttattaaggctctacgggtagcctgccttttctcgttctgccatccgtgaatctggaccgttcgcttcatccagggcgatctgacctgttctgcctcccaaccgtggacgtactccccgcgccaaaaaatacatctaagtgcggcaccagaggaattagtctgagtaacaaacaatccacgccaacctttataagccacgtttggtctgtctcagtggccgatatggtactaatcaaataaatcccataacagtgcctacgtgcagcccagtggttcgtgtggcccaaccgttggtgcggcccattgtgcagcccagcctacagcgcctgttatcctcttcggcagccctaaaccctctacctccacgacggcgcgccgcacgcagagatgtgcccacatcctcaatctgcctccacgacggcgcgctgcaccacgacttcaatctcctcccccacgacctcaaccgctctgccagagtcaacaccgtccagctccgatcaccggttcatggcggcggcggcggtactccttcggcaggcaaaggagcaaagttggaggcgacgagggtccagatccggccgccggcggcctccatccggggtttggaagcgccgctggtccagatggcgctg

SEQ ID NO: 172067 - DNA, 521 bp, Zea Mays
ttgcacgatacttaaaatgagccaggctctgcaggcgcgagcaaattgaccgcatctctggagccaggctcccgccggcatggctcttgcagcccggctatcgagagaagcaaagcaaccaaacaggccgattcagattctgtgcacagtaggcacctaactattccagacgaaacaagttacagtgagtgcagtagttatatgcgctgccagtgttgttttagcactagcacgcatacggcgggcataccgacacgtactgtgacgagggggtactgctgctcgctcgcagtcgcagtgcaggcaggcactggcattgattcgaggaacaagtttcgctaagctcacgatagtacgtggcaggcaggcaggccatgttttggtcaacaatgtacacccggtacgtgcggcggcacggttcccctcgaccctgcatgcaatgcaggctccagcagtcccggctaggtaggtaggtaggtagacatttgaactcatcaagtcgtcgtcatcatcacccctgg

SEQ ID NO: 172068 - DNA, 493 bp, Zea Mays
ccgagacgagacgatgcgagtaaccaaacatacggatattgaattgcatgcatcaacattcttaatctaaaagtttaagctaggtaatggagaggtggacaattcacttggattataacagtctgaacttattattgatcagctatcactatcagcaactgcagctctctctgacaaccactgccaagacacttttatgtcacatagatctctagcatctcttcatcgacgccaaccaggaaaaattgtttatgatgccatcacttctaactgagtcaccatcgtctctggggtcagagccatccgctgaagatccgcgatgtgacttccttcaactccccatcagaatcaagaatacgatagcaagctatatatcactctttttcatgtgtgcacggtgtagacaatcttccaaaaaaaaacagtcacacatgctaaaagaaaaaaaacttatgtccatgatgccaaactttctagtatactagtcggttgc

SEQ ID NO: 172069 - DNA, 497 bp, Zea Mays
gaaatctagagcctcagtgcaggaacgattgactagcatccgaatgagcccaatctagtaaacatggttggcagaccagcccattagctttcttgtcgggcacaggtagcccgcgggtacccggtacccgggtgggcacgggtacgggcaaaaacttgtacccggctgcaggcatgagtttcttagcgggtatattttaatttcgcgggtacgggtttgggaacatagtacccagcgggtacgcgccggttgccatctctagtcgcagcgcaggtctctcaggagtcatcagctagtaggtagctcatcatcggtatacgcatatgctgttgactgtccaaatataatcaccggatggatgtgctttccacctgcatgcgctagctcttgacttccatgcgcatggggggcctgattaatgaagctcccttcttgttctacatactggatcactctgtgcgcggcctgtgggatcgatcggccggaacaggtcgctg

SEQ ID NO: 172070 - DNA, 739 bp, Zea Mays
ctttaggtctggtttctactggccgatggcaaagagtgatgcagccaagttagtccagagatgtgaagcttgccaattcttatcaaagcagcagcatttgccagcacagcaactacagaccatacccgtaacatggccatttgcgtgctggggactagacatgattggacccttcaagaaagctcagggaggctacactcacgtgttggtcgccattgacaaattcactaattggatataatacaaagccattgcttctctaacttcagccaaggcagtggaattcatacaagatataatattcaggtttgggataccgaatagcatcataaccgacctgggatccaatttcactagctctgaattctttgatttctgcgaacaacggagcatccagatcaaatatgtgtcagtagcacatccaagagccaacagtcaggtggaaagggctaatggaatgatactggaagcactcaggaagaaagtcttcaacaagaatgaaaagttcgcagggaagtggatcaaagaattaccttatgtggtttggagcctaagaactcaacccagtcgagatctgcatggaaacacccccttcttcatggtatatggtttggaggcagtgctacccgccgacctcaggtttggggctccaaggctgatattcgaaaacatagctgaagcagaagctaccaggctagaagatattgacatactggaagaagagcggttgaatgcagta

SEQ ID NO: 172071 - DNA, 627 bp, Zea Mays
gacatatctaagttaggcaggtcctcccaccaggtctggttgacatttggctctaccatcgacatccctaggcatgcctgcaacccaacaaaggcataaatctaggtgtccaccaatgctcccgtctggttgacatttggctctaccatcggcatccctaggcatgcctgcaacctaacaaaggcatagacctaggtgtccaccaatgctcccagttactagaggtccattgatatatatggagtctagtagtgtgagctagatcggagttggaagtaaatcatgtcaaagagggttttactgctggaggcctggaggataaagaaatggtgaaaaatagccactcagggcattaccaccacaaaagcttcagaaaggtagccaaaggtagagagaatgaatggagttgggtacggactgtgtaaggtgacttgcttggaggccatgaagtcaaggatgcggaggaggaacctcaccaaagagaaatttagactgactaccacatgtgagtagaaatttgttagttctaaactccatgccaattgcacatttcctattgtaagatgtttactgaagcagcaaaagtaattaatattttgtgtagtttctgaactccatggacctttt

SEQ ID NO: 172072 - DNA, 352 bp, Zea Mays
aaaattcattcggttgctgcaacaagaaatttagtcgaaaaaaatcctttgcgcttcaattgtaacttgtaagtgataccataccatcactttctaaaatgttcaggttgcataaggggccaataggaaattaaaaaggcatatgctgttctttattatcatgtaaatacactcactgactactggagctacacatttgaagaattatactgttcaagcgattacatttcatgactacaaatcattttagtttatgagatgtcttgcataatcaccataggttataacatcttctgaatcaatatatcttttaactgtatttgcccttgccttttctaaggttttaccattc

SEQ ID NO: 172073 - DNA, 471 bp, Zea Mays
ataaatatctcttactatttctgattgtattactattagtatgactattggcaacatgaatcaggtaccgatgcaacatggtatgataagctgtcgtaaaagaaacactacaaattttgtgtgcctcggtcagagactggaagttgttgcaagccgcaacggtctgttcgtactttccagggtgtttcaacgtcgaaaaatttaccattgttctatggttcagaggctatagaataaatcatggcacactgaaattcctggactagggtgtatacacgtttgttttcacttcctcttgtgccagtgctagcagtagtgttagctcagcagcagcaagtggtagtgagatgaagtctgttgctgtccatgtctggaaaagcgaaactaattgatgaattgccaatcaattagtacgagtaatattggtgttatgttagaagtttctctatgtttagctactgcaggctgcag

SEQ ID NO: 172074 - DNA, 525 bp, Zea Mays
cctgccgttcatcatcaggaatctccccgagcgaggcaaccaaggcactaacttcttcagcagagggccgcactctaaggcccaaactgccatcagtgactagaggattcgacacaaaaagagtgaaggctttaggaggaggcaaattccaggctgagaatgccactggggcaccaacatttgacactttgcctctaaggatcatctcaattcggttcaccaagtccatagagggaattcttctgttagtaacccgagttgagtcggctaggcctcgatacagataagccgggtatgccctgtctttcaacggctgaatattcttgaagacaaaatcagcaaccacagcttcagcagtcagacccctctccttcagcaatccaacttcagccagcaaagcacctgcctcagctacctcctgatctatgggggactcggtccagcttggggtgcgaacatccggctgtcttcccgaccgaggggggagagagtttccataattctcaactatgaaccactccaagc

SEQ ID NO: 172075 - DNA, 551 bp, Zea Mays
gctcagccccgactctggcgagcagacaccaccgccgtcagccccacccgccatagtgcatgccacgtcggcatcacgcccgctccggcgggccaatccgttttcctactatggccgttcgtgcagtatggaataggaaaaaaaaggaaaccaccccgtgtggccccacctgcatgctcattcgttgcctagcgccgcgacgcgatcttctcactgcacacacgatcgcagcacggaaaggagaaccgtcgtaggcccctgcatgttccttcctatacgatatcctcattgcacgtaatgtgtgtgggaaagaaaactgacagccacatattaatgcctggttggccatgtgcaacgtcgttccgtgtatggccacactagatccggtcggtttttctgtgtcttcaaacccgtggccatccgtgtggtaagttttaaccaatgaaaatacgaagcatcacattaaatgcgcaaaatattaattttttcaatatattttacgtcacaaacatgatttgactagtttcagtcgcgttaactttgtaacctcg

SEQ ID NO: 172076 - DNA, 731 bp, Zea Mays
cgcctgcagctccggcgacctccccacgacacgccagagccaccccgagggcaaccatcatggccaaaccctttcctgcccacctccgctcgatccgagccctcgaatagctcccccgggagggcgtgaagcttgcccgagcttgagctgaggaccagccccaccggaacagtgcaatcgcgctcgccggagttcatgaaaccgccggagcacgtggaccatgtaaccctctgcaccatttctcaattccttgcgcccatggcctctacatcacccggtggagctcctcgtgcactttaattgaaccctaccgtcgtggtttggccggagcaggagccgctgacgaccttcgctgcctgcgctcgtggccagggcagctctgaccacctcagacaccgacccgcacaccgatgtgaccgccgtgacctccccgacgtccctaaccaccccaccggagctctactgccgtcggtaagcctcgccgccatgatctttgctatggttactatttcagccagccagggatcgcgggttagatttagattaagtccaaggggttttgtgcaaggtcagtgacccatgcaaatagtagaccgagggctgttttgtgagagaaaagggggagaaaacccagggactttagcgcaaatctatatttcttttccatttcgaaatttcttttcttttaaatattgcagagaacttaataaatgcataacttgaagaataat

SEQ ID NO: 172077 - DNA, 649 bp, Zea Mays
caacatagctaggcctgctactccattttggcccagctaagccgcatattaccgcgcgctcggtggtgcccagcgctgtcaagctggcccgcacgccagtctttgcctgcgtgcgcgtttgctcccgggcactggatgacaggtggggcctctgggtcgacatcttcttccccgtctcctcagttcgcggccgccgttgtcgggtcgttgaagatctcctgggatcctcgctatcgccagttaaacaaccctccccacccaaatctggtgtatataactcgagcaccgcacgccctcatcccatcgactcggccctcgaccacagcgtgtgatcgaatcacagagggcggtagagcgtcaccgcgcctgtgatccagctccatcgtccttgggtctcgggggaggattggtcgggggtattcgtcgtgtggcgggccgtgtgcgaggtattcggggggagaatcgggagttgctcagactgaattactcgtcggagcaattgaaactccacggatccgcctcacgccccgagcagggtgttcaccgtttctgatttcggtaagaaacccacctgaaccgttcgccttcacctctacatcacatagcaccgcttgccataggatttggcgcactgggtcgctgcatcgcc

SEQ ID NO: 172078 - DNA, 685 bp, Zea Mays
ggcctacctaggcgacatcacgacagctgggggaccaacttcccgtacggccggcacgggcgcctgctcttgggggacaagcggttcggtctgacctgtcggagtcacctcaattatctcggccaaggggtcaagtaccccctcggcccacctccgctcttcggacgttggtgacgccagcccacatgggagctggctcgacgacctctggcccagcctcggatccggactgaggccaagtcgggccaccatgtcatcgtcttcgtcatcatcatcatcatcgtcgtcgttgccaggcgtgtccggcgacggctccaacgggagcccatcccttgcttgcctctgacgacgcttctccaaagcttcccgagctcacatcctctcgcgagctcgggccttttccgcgtccttcttctccttgtccttcttcgcggcgagcctacgcgcggtccggcccgccgcgtcctccgggaccggtggccaagagagtttaaaattcctcaacccctagggacgaacgaaaatcccaacagtaagaactaaagacgtaagaaacacggcgcaaaacagaaggagggtcagacacttaccagggaaacatacccatggtcgggacgcatcgggggttggctaaggacgccagcgtccagcctccctaccgtgcccgctacccgtctgaggaggt

SEQ ID NO: 172079 - DNA, 931 bp, Zea Mays
tcctcgcccagacacaaggggcacagagccgcgccccacggcggagatcctctcccccgccgacgccccgttcgtcgctcagtgagctaacccccgattggatacacgcaaaacaatgcggaagcgaaggtaaattaatgagccaagttttaccggctgaggcgctgcggtgaggtcggcccacggcatgaagcggcgacgcggcggtgctccagcgccggtgatcaatccaaggagcgacagagcaccattccatgcaggtaatccatgaacagctccctggcaacgtagagaagccccaagaaccaatcgaagctcgaatgacgacgaatcagtgaagacctcccccgcggcggaaccttcaatccgcctggtgcgcttatggtgccccggaagagacggtgattccctaattcgatggagggctaggttgaaaaccggggaagggggcactgcggcggcttttattggcgcgaggtgaggcttcggctttttgaagggggtgaccggtcgccggattccggtcatcgcgcgcgccagctgcgggaggccgtttcggtaggttggggacgcgcgtaaaggggagaccgcccggtgggtccgtggtgccagcggtaggatccaacgtatgagtgccgatgaagcgactgggcagtaggccccacaagtcagagcgatggtgtgcgcgtgcgactgacaagaagggcccaggtgtcggcgcgcactcgtgtcgaaggtgggctgcgcggatgggaagttggagcgggccgaaatggaggtatggcggcccatgaggctgattttgttttattctttttattttctattccttttcctctctattttcaactccaatttgaattcaaatttcgaatcaaccttaggccaaatttattcccaaatcatatggtgaagttaaaatacaagtttt

SEQ ID NO: 172080 - DNA, 1108 bp, Zea Mays
cacaaatctctggactgacaggggttaaactgttaaaaacagggcccatatgtaatgttctttgaactatagcggatggcgggttgattccacaaaacactagggactctttagcaaaataccttgcccgaaggggtatggctactcgtgagccgcccgatcagattctgaaggtccagatcagatcgcgcgaaggggtaaatccgggcctgatctacaccgtcgatttcgtcatccacgaacacggtttcttgaagggaaagggtatggctgttttaatctcgaccatccatctcgatccaacggcgagggcatgttcttcttcccttactcctccgaatcaacagccgacgatgcatcattttcccccaccacgctccccagccgtggcggcgcgttcacttcacacggcagagctcgcctgagaagcgctacccggcggtccagtgctcgattccccacatcaactgcatctacaagatcctgcgttcaaagctaatccacgggaagggtccttaccagatcttatcgcatggagaccaccgcccatggcggagtgcggcctgatggtggtgcccaagaaccgatgaacaattcgcctccccggcccgaccgcgtgcacagaacgacggcgcgagcgagtttgtagagcggcggcagtcccggcctacaacctcaccagaactcgttgaatcatcgtgcgattcccaatcggatggaggaacgaggcgaggtgccggtcttttatgcgcaagagggagaccgagcggttgcaacggcccgcggttttcggccaaacgtggccattcccccgccgaacaatgcggagcggcgggtttgttggagttcgtcctgatccggagctgggagaagactctggaaagtggggcccgcctggcggtgatagggagcaagcgtgcgagaaggcaagctgtgcgcggcagaggctggtgggtgactgaccgcgcgagccccacatgtcatacccgagcacgcgctgttatcacgaattgggccacggagagatgggccagagaacgtattcagcccaggatgggttttattcttttctattttctgtgttcttcccttttctatttcaaatccc

SEQ ID NO: 172081 - DNA, 287 bp, Zea Mays
tggcagtactggtaattgatgaacatctgagggagtgccattttgttttgtatagaatatagatgggacaaaggagttaccaattaagttgtaattgttccttggaggggcacatttgctctgttcttttcagtttagaatctaacacatgattcggttttgtccgccatggttgtgttccacattacacttcaggaaaacccactttacatttgcacaaacaaattgatgctttggagatactaggaagatgagtaagcattagttcaaagttattaagtccatgc

SEQ ID NO: 172082 - DNA, 887 bp, Zea Mays
ggagagctgaatttaacaggttttgatgttaagaaggctcttgaacttgccattcgccatgaagctgtcgttatgaagaaattactaaacgacatgccgttatttgttgcaaaagacgagagcctctggaaatgcgtgaacgtaacaaataccaaatcaaagaatcccatagaggagctaggaacagtttataactacatttcatctccagacggccgctctgcaatgatgaattctcagtcaaggtcaggattttgcaccttccctttgtgctaacgatttctgccattttaccgtggaatgccagctacatatctgcatttccttttttttgtcttgtaggtaccaagctgcaatgatcttgaagaggtcgtgcatgcagcagtgtgcactgggcgacattctccaggttctgcatatcgttgttgttcgaaagaaatggctcgtgcctcattcttcaggctggcagccgctgtccttaaaacgcaacagcggatcctgcaactactgatggtacaggaaaagttaaatcttcttttcctgtggccgtctaggattctgcaactactgatactactgaactactgatgagtggcagcaagaaaaaggtgaaatgattagtcataatattagtattaagttatcgagtaggtagtttgtgtgacagtgataggtcaatcaagggaggtatcaggtctgtgtatcaaaggacgtgaatggatttgcccccggtactaccggagcaacgcaggtcccagcatttttgctatctgcataggaagttctatattattttgagaagagcaagacagaaaagtaaagcttttttatgtgtctcctgagtggctctggcacagtggtgtctgaaattggattgaacttgggtc

SEQ ID NO: 172083 - DNA, 536 bp, Zea Mays
ttattaaattataggaactagattgggtcaatttggacaaaatatgaattttctaaggattaaataagttcctaggtttattttaatactaaaaaccaatttctaggattatttgtttattttctctgttccctggactttgcacaataatacagagaaacataggggggtttggtaaaaacatccctaagactcagggcgcccccaaatacggacggcgggttgatattcattaaatataggggctcttgtgaaaaagcgcgcggcgaaagggtatggttatatatgggtcgtgcgatcacagatggagggctaagattaaatcgttctcatccccaaccggtatggcaccaggaccgtaggatcagagatctgttgcctagatttcaaatatgctcgatcagtcaccaccattggactctgaatggacgacccagatcatgagcccgaagtggctacgggagatctgatctccagcgtccattgaggaaccgaccgccagggactctccttctacctccgtcggccagccatgg

SEQ ID NO: 172084 - DNA, 409 bp, Zea Mays
ccgacgaccaccgcaggtttccaagggcgcagactcgaacttgcgaactgatgctggggctagagctagattcgtccaaaatgtccctggccattgtatgagaaagagggtgcctaagccgaagaatcttctggatggatatcgtcctcaggtttctccaagtgataggactccctctgcctctaacgttcttcaatcaattgggtaaataaaattcagttaaagtaaatatacatgttgtccagatttagtatgttttatgtcggataaataaaattcagtttaagtaaatatacatgatgtctagatttagtatgtttttatgttggataaataaaatttagtttaagtaaaatttagtttaagtaatttacatgttgtaacgtcttcagtttaagtagatttttgc

SEQ ID NO: 172085 - DNA, 579 bp, Zea Mays
cgtagaccacagccctgaccttaaaagttgccttaacaagaaaacacctcttacccccaagaaacactcttccccttttcccgatattaatagacctttattttcgtctaccagatggaaaacccctggttgattaggatctcctattgctcagaggaggaaggcttccctcaccttcttcggagttgcgcgctacgcttggggatccgcaagaagcccgaatatgtctggaaggagtaccgtgaaaatggaatagaaaagtgctctatggcggtctacttaggagagagccagaactacccaaaccaccctcccttccaaattaccttcatcgggcacagtttcccagacacttgccagagcgttgctcgaaaagccctcaaacaactgtgccaaaactatagccgagagatctctgagacccccctccgatatttcccacccagcaacaaaaacacccccacctggaggaaaaggctccagtctctgtcaggaggagatcccacagaagatgaccccactatcgtatacatggccggatacctccacaccctcgacaaccactacgacgagctctcc

SEQ ID NO: 172086 - DNA, 583 bp, Zea Mays
aggttcagggcatcgaggttggtcttcgaaagcatagctgaagctgaagctaccatgctagaggatattgatgtgctggaggaagagcgattgaacacagtaattcagtcagccagataccagcagaccttgaggcgctatcatgataaagccatatgacaccgatcctttgtagtgggagacttgctccttcgccgaattctaatgggggaaggacggcacaagttgtcaccactataggaagggtcattcgttgtatcagaggtcactcggccgggatcataccggcttactcaaatagatggcacggaagtggggaattcatggaacatagagcatcttagaaagttttacccttagcaaggcctcaaaagctatcagagcaaccttgtactctgtaattggagagttcgttatcaataaagttttcgttttcaaaggcattcgcactattgactatcagctgacttcgatccaactggacttggaatcaacacgcttactcgacttagggtgaacactataccctactaacggagcaattggcttaagtcggcgacgacttaagacggtgcaacatgct

SEQ ID NO: 172087 - DNA, 303 bp, Zea Mays
gtgagaacatacaccattttagcatgtgaagcaacacatacacacattaatgtttaatggtccaatactaaatattagcaagattcagcaaataccacagtactacacgtgtctagaaatactgtaaaactcgactctaaaaccatgcctaccatctaaggcatcaccaggtaactaagagtaactaaggcgctcgcagctgggagcatgcttcccatttcccacataaaacgaactgtacaaacatgatcaccaactgcaatcaaaacgacctaaccgcgtaacagccaactctagaagatc

SEQ ID NO: 172088 - DNA, 663 bp, Zea Mays
tgggccgatgagcttcaagagcacacaggaatgctagaacaagagtgaggagaacatgatcgaacctgtgaagcgctgaccgcgatgagctcacacacgcagtgttctagaccgatttgggggaaatcccaaattggggctctctgatggataatcggaggcgcgagtgggtgcgttgagtgcttgactacatggcggagccgatggcgcgctcaatttataggattcgggggcggtggctcatgaatttggattggcgtgctagcggccagagagaggagatgagtcaccgcggtgatctaccgtggcgatcacagagcaatgagctatggcggtcactgggcagtcactacggctcacgacgacgcgataaatgtcctaaggcgtggcgccaccacggtgaatggcgtacatgccggtgacggccgctcggccacgtcgccagcgcgagtggatgagtgacagagcgcacagtgcctccaagttcatccacggcaagatctttttcccgggatcattatccgtgtttaactaggcacgaatcgcggtgctggcgtgaatctgagtgcaaggttgtcgacggcgaggtgcactgcacctgtgatcttaatcagtgtactgtaccatcacaattccattcagtcggtctgacagagcgttttg

SEQ ID NO: 172089 - DNA, 612 bp, Zea Mays
gtcacttgggaagagttcaagctggcatttagggaacattatgtttcggaaggagtgctacaaatgaaactggaagagttcatccgactgaagcaaggggagattctgtgatgcaatatctcaataaattcaatcacctctcccaatacgccattgatcaggtggacacagacttgaaaaaagaagaattgcttcatgaggggactaaatgatagactccagcgcaagatggcaacgtgtctggacctcacatgtagcagggctgttagtacaacactgtcagttgaagtcaaaaatgtgggacaaggaaagtcaaaaggatatgcgagtgaaagatcaactcaaggacctgtaaagaggacaaggttggtaatccgacctttcaattcaaatcgttcttctcctcgcccacccagatatcccttgagacaacttgtgttcattcgtcccactcctgcccccgtctcgaccaatcagtcgagtgcccctggtgctcgtttccctgcacttcccagttcctccagtggttgcttcaattgtggaaagtccggatatttcatcaaggcctgcccatatccgaagcactcacgagagatcccatgcgctagccac

SEQ ID NO: 172090 - DNA, 512 bp, Zea Mays
tttcaatggtacaatactgaaaaagatcagtagatacaccacacctcgcacccggtgacctccatgcctggattcgcgtcggcgcttcgatttgtgcgctctggggtgcggattatgaccgacagtgaaaagatcttaccgcagatgaggtcgtgtgctggctgtcgtacccacttgctctgcggccgaccgaaatgatcctcgtcggtgttggccgcttgccgctcgtgcgccacgtaatctgtggtgttaccacatcgtagtagaccaccgtaggtagcctatccatcctgcgatagtgccctggtgaatgccacgatagataactccggtgactcctcccctttctcattgccctcccttcctcgcctaaattcgtcgtattcgcaaccgctctctataaattgagcgctcagcatgttccgttaggttgttacgcgcatagtgcaccagccctcgcctccgattagccatcttagctcgcgaatttcaaatttcccccaaatcggtcg

SEQ ID NO: 172091 - DNA, 1259 bp, Zea Mays
cagggaaatagtcctcttagagctggttgtatgttgccctctggatcggtgcggcgccacggccgagatggaagtgacaattccaatggcatctgtattggatccaattaatgaatacaacaaaattatagtctcttaatttttgtagtatacaagtaaaaaagtctacctgtgtagtactccctgtggtcgacacacaaatggagctggtctatcggtgtgagtgagtaggtaagcacaggaaatgctggaggaacctcaacaacctcctccaattttgtccagtttgtaaaggtaatcatgttctcattgaaaacaggcttgtacaaattgttcgaggctctaacccagaagtatgtgatgttgtagacgactccttttatcagaggcttgaacttttgtatgactggtgggaatattgcagcatggataccggttccctgcacaaagcagcgatggaggaaacaacaacataataacaattaatctcataccaatgccagcttccctttaccaaatagataatcgtgcagatgttgtacctcttcgtcaagcagcaccatatcacaatggagcaactttgtttcatcctgaggatcacagaaatcccataaacgagaaacacgtgcgcatatggtcacataagtgttcccacgctagagctccgggatcaacacgtctcccatctacaaggtaaaacaggaagaaaaaacataagaccaaggacatcggaacccatgcatgaaacagcatatgcaaagtatgaccaaaaaaaactacggctctcgtaccaacctatacatagcacacatcagcagctgtaaacgtagcaacaaaagtataaagaaacaaacgcgtaggtacttgatgacattatttatttacaaacgccacacggggcgctacaacaaccaagtagaaaaagggctaagtggcagccgcatcagcggtagcaaggacttccttgtaaacaacattccgagtctgtgagccacacgaaccatcttcattttcaatcaggattataagtccatttctagacattgaacgggagacagccacataaagctggccatgtgtaaagacaggtctcttgaggtaaattccaactcttgataacgtttgcccttgacttttatttatcgtcattgcataacacaggcgtactggaaattggcgtcgttgaagtgtgaaaggccacttcacatctgtactgttgagggcaatccttggtattaagacttcttccccaacatttg

SEQ ID NO: 172092 - DNA, 913 bp, Zea Mays
aaattgttgcaactttgtgacctgaaataacctagaaagtagaaatggtaaatgaaaacataaaagaaaataaacaaaggaagcctcacctgacgcgtggatcaagtctcttcctgccggcccaactcaccggtcagcccatcttcgcacacctgctcgcgcgcgccatgctttctgtcgcgcggagactgacgaattgggcccatgacgcaacaagcaaccggtgctcgctcacttactccatttgacttatgtgtgggcccatatgtcgagtcttcaaccttgagcctgtgacgaacctaagctccgctttgacggggggttattacgatgtttgcgcggctgttgccggggacctcgagcaagcccggtctcgagatatatatagggtagcactgcgattcccttcctacctgtacctgcgccttgaacttcgtctgtgcaagaagcaccatgagagagaaaaatggcggggaggagcgtcgttgtcggcatgcgaccagggccccgctccgtccttggtagatggcttaggaggatcataggggcgtcctaatggtgccatggccttgctgcccccggagctagggctgtcgcaccacaatttctcgccgggagccagatctccagcgcggaccctctctcttccgtgggaagaaacacctacaccactggcctgggtaagtacatactcagttgcttcactctagtctgcacatcacatagcattaaaacacgttaggtattcgaccttagagagccgaattgcacttctctggtgatccctccatcgtagggtgcaacggcgccgccctaatgcttggtgctgtattggggctggtatgtgagccatccatctcgtgatgggtgtatgtgattaaaagcgcgacacacccccttcatgggtctgacc

SEQ ID NO: 172093 - DNA, 544 bp, Zea Mays
aacatcaagactgctggagttactgcgcatgaacttattcggtcccattgcttatcttagcattggtgggagtaagtatggtcttttaattgttgatgactatacacgcttcacttgggttattttcttgcaggataaaagtgatacccatgtcaccctcaagagattcttaaggagagatcaaaatgagtttaacttaaggatcaacaagattcgaagcgacaatagctcagcgttcaagaacatggaggttgaagagtaccttgaggagaagggaatttgtaatatcccaaaaaaagtcgccaaaggttgatcttcggtgcatggatgtgggaaaaagagtggtgggctgttggatgctaagtcagagtcatatgtggcgtcgtttcgtttctcccgcaaagaaaccctagtggtggcccttttccccccttttgcccttcttggccgccccccccccttctctcccccacacacttggccgcccccttcccctctccccttggctggccgccctctcctcccatggaagcccctctccacg

SEQ ID NO: 172094 - DNA, 481 bp, Zea Mays
gcttacacatgctcttaagggagaatttatgatacatcatcaagaatctatgaaggggccccgacctacaatgaacacactgttgaaattagctgataagcttaagagcttgtttaggagtcattaagccacagtgcatctgaaatgctgcaactcactttactagtatatgctcttgttccatccatgaatcagaacacacgtgttagtatgctccaggcatataacgcctagccgagcggtgacactggccgtaagcgcctgtaaccgctctacctggcctcccacatggtgtcactttgttgtaactgtccatgatcaccttgccatatcactgtgctgtacaggccctaacaaaaaccatgaaacaaagggcacatatgtacaaaaacactcaagtcctggccagaacaccgaagggaaactcctcactagggagcaaaaaagctctcttcaaatgtggagacaccatcaaacacac

SEQ ID NO: 172095 - DNA, 320 bp, Zea Mays
gtggaatacttctagttccctctcccttcctccgttcagtatgaaggcgattggttttatgtgaggaacgtggttgggagcaccccgctattcaccagtcatgagccggtgtcctcggatgagtggtagcgcggtggagaggcgagactcaaaaccgaagtaggaaacttgctgacgtcggtcaagacactgaagctgtggggtctctccggcacgcagttggtgtgaaccttcatgcatctccagatccagcctctaatggcccgtgagaaaccgatgcaccaatactccgaggtcaacaaccctaatcgtcattcccc

SEQ ID NO: 172096 - DNA, 403 bp, Zea Mays
tgctgaccattcacctgcattgcgttcgagataggccacggatgtgaaaccgcgacggcagcaggtggtagcatgtggagaaggagtgagttgaagagttcgggaggaaacagctgtagcctgaagaatgttttcaagcctaatgacactgaacgatgtagtggcgttctggctacctttacaacagctgcattgcgatctcgatgaacagctgagttggagagtttacaacagctgcattgcccacgtctccccacctcacaagaatgtacatggctctcatgagctctggaggcccatacgatgataccactaatgatgagacaatgcttgataagctgacattctgttggcgttatggaactgtctgggatcatatcgctaaggccttattcgtttacac

SEQ ID NO: 172097 - DNA, 439 bp, Zea Mays
tgtgacactaacgactggggccgcaagcgcgtctgctccgccgactgtttctctggcgcgtaggccgggctggcagtgatcccatccccctcaaatcggcaccgtacacaaccgcatccgcggacctcgggtgtcgttgaggtccgtccgcacctgggggaagggctataagctgggcgccgtttgctcctcctcctatcccacctctctagagcttcagtaatcgggcagggagtcatacacgcggtcggtagctcggttgggaccaccgtagcgagttcatcggtgccgctccgtggccgacgtgctgtgggacggcatcaccgcaacgccgttattggtaagaagcccctggaccattgctgatcacctgtgtagtgtaatacgttaatggccagcataggggccagaatctctcatcggatttggagtctccata

SEQ ID NO: 172098 - DNA, 797 bp, Zea Mays
attggccagacttttgggtcaaattggagtaggatctagtgctcgattaaggataattgctatggacgatttgtagctagttagttgagctacaactttgttaaagacggattagcaaattcttacatgaaaatccgagatctgggcactacaaatctgtctgtcaggcactctgaacaagttcctaatggtacagtgtccggatcagaatgccaggttcagatgcctcaccgctggtgaccgtgcacccagattcgtgcccgcagcggtgattcgtgcccagcgcagatggataacgaagaagggtaagaaatatcgtaccatggattaactccggccactattctactccggccgccgtacccgcctaagacacgaccgcttcggataggctcacctgagttagtcacctcgcgaccttgtgccacgtgccttggtgctttaaccccgccgcagtgagtcaccgtagccacccaataatcgccggtgagctcaccacggtgaaagccaccaattgattgcgccagtgcaccccttctcttcggtcgccgcgcgtcattccccgaattagtcaccactgctcatggatcctataaattgagcacaccctcggctccgctagatattcaagcattcaatccacccactcgtgcctccaattactcatcagagaaccccaatttgggatttcccccaaatcggtccgaaacaccacgcgaagtgacctcgtcgtggctagcttgtttcaggtccgttcatgctctctgctctcccgtttcagtgcccttaggttctcc

SEQ ID NO: 172099 - DNA, 716 bp, Zea Mays
atcttcggtatgtcaccggtgatcgaccgcaggcatgggtggattggctatcctggggggagtattgctataatacctcctaccacatagcattgcgtgccactcccttcgaggtggtctatgacagatccccaccatccatgctaccttacacgccagggatgacacgtactgaggccgcagacgacatgctatgctccagagatgagatgctggccgaggtgcgccagcgccttttgtaggcccagcagctcgccaagaagtattacgatgctgggcatcgggaggtccagttccaggtgggcgactgggtgtggctacgcctgctgcaccgcacctttcagtccctccatccgcgcgcgaaggggaagctgggacctcgctacgccggccctttccgtgtccaggaaaggattcggttggtagcctaccgcctgcagttgccagagggtgctcgcatccatgatgtcttccatgtcagcctgctgaagccgcaccgtgggaatcctcctgcaactccggggatgcttgacccagtgatggatggccggctgcttcctgtgccggccaaggtgcttcacgctcaacttaggcggggcgtgtggcaggttctcgtacagtggcgtggactggctgaagatgacgccacatgggaaaagcttgaagagttccgtgctgcttaacccaacttacagctcgaggacgagctgtttgag

SEQ ID NO: 172100 - DNA, 602 bp, Zea Mays
cgggcacgacatgggtgtgggcacgggggcgtttgagggcgcgcgggggcgcgcgtgcgggcgtgctctgggcgcgttcccgagtgcctaccgacgtcgaacacgtggtggtttggttctgccggtgttcaaaggcctgtttggtcgccttagcgtgtagatctcagcaaaaatcccgtgtaagatctcttctctgcaccatatcctatcttttccatgtgagttccaagcgaagatatggtcggggttgagagatattgtggtgtgaagttggctctgtctgagttgtccagcccgagacaaaaaccatgtcaagtcgtgtcaaacgacttagggttgggttcaaatttttctagggtgttctaggggtctttaggcgccattttgttaattgggccctatggttttgaggtttggaaaaatgtgaacatgtttgatcttcgaaagagggctggttttgaaattgagaaaaatatgaattttcttttatgcccttctctttggtgacctttttgggtttttctgaagcctttttggggttactatcttactatttttttgtagggtattaagtgtactacaacttttataattagcccaag

SEQ ID NO: 172101 - DNA, 440 bp, Zea Mays
agcaagggcaccacactttacatcggttcagccttcggaatgattcccatctccctataattaaacagcatcatcctcagctcctcaccctcaaaaagacttcgcagctccccctcacctacactcgcaacggccggcaaggacaacagctcctgcctgccagccccgcccacacgaagccgaccgccgtccgcctcactcactctacgcttcgcaaccgcccttcgccgcctacgcccagcacttggaccaggcacaacttcagcatccacagcacgcggcgaagcctccgctgccgccacatccaaggccgcaaagtaatccaagtcctcatccgacgactcttcagtccactcaaccgaactcccagagtcaccaaaatcagaaaacttagacgcagattcatcccattcattcccatcatccacggtcgaagccgc

SEQ ID NO: 172102 - DNA, 663 bp, Zea Mays
ggacaagatatttagatacaatcacacaattaaacttttagctctatctgtggagcaacgatactttagacaatgtatgccgccatggtaattgatgttttgctgttcatagtatgattcaatgactactatatttaattacttattgacaaaacatgagctatttcagaatacatggaattaaaattttaagacaataagtacaaatatgagttatttcagaatgcatagaattaaaattttaagacaacaagtacctggtaacaagttaatgtttttcatgttagggtcaagcttgcagctgtatgaagtttttttctgttgtattatgtctccatgactccatagagtgtcttttttcatgtttaataattacttaggttttattttaagaattcccacatcacacatttttattttgttttccctgttcctttttctcttcctttccattcaattaatgggatgtttgataccttacgattgcaccaacctgttcaattgtacttcagatatcatcttctttgattgtaatcttttgcatactcttgttgatggtgctaccatattcttgaaaccttccacattgtccatctgagcattcttctatctctggatttgtcccttaacaatcacttgctttgaggttccatttggatacac

SEQ ID NO: 172103 - DNA, 1000 bp, Zea Mays
ccttcttctgaaaccttgtttcccgttccacctcttctgatcatggaagaacttcgaactggaggtgaatatttgctgtataaagagttgtgtattgggtagaccggtagaggtcagtctagttgaaagttgagtctttagtgtgtgtccatcagtccatggtatgtttaacgggagtgggaattagtataatgcaacccttatcatttgcctagttgctgttggtagtcttgtcctacggaaattagcacagtcatcctatgtgaactttagttctgtgataagactttatagggatataatcatattatcttatccagaataccatatctagtgcacctcgatgagttgttcttttctgtaacattctacagataattgaggcttggatacggatgcagttacatgcatggggatggggagacagaatcattgcagcctaataatcatcattctttgcattgtagctaacccaactcaaagcattacgctaaccgcatactctgaataagccttttccagggggacgggaataactataggcgcgaggaaataggaacgcgagcgatttatagcaggattagttttgcctctggtgagataatcgtaatctaggggacgggaataaccatacgcgcttcgcttgtgacgcacgacggtcgaaactcgtgctttaaaggagtagatatgtggcatgatagaagtaagcaaaaccaatacatgtatagttataattgctcatagactctgttgtttaaacaaaccttggctattaataaaggaagatactttttttccatagtaggcatggttttaaaggcggctaggcggaactaggcgcccagccaccgcctgaacgcctaggcgacttaggcaggcgcctaggcgacgccttactagcctcatttttgggtgttgacacctgagagaaagcaggggaggaggacctaccagtctaccactctaccagtgaggggcgcccagggagggggagcagccg

SEQ ID NO: 172104 - DNA, 647 bp, Zea Mays
cgaagggatatcgctcgatcagaattgtcagatctaaacagacggcctagatctgacgcctacattataaaccgacgtgtgaaactgaccactggatctgagatctagggcacacatttcttggatcgaagcggtacgctacctatgatctcactcgcccaacatcaatcccacggtcctaaacttttcacaactctttctgatctgggtcgttcgtcctgagatcaacaacacctgtgccattcccttccctgcacagtagaacagcggcgtcgctcccccaacctccggcgagctcgccatagtgcccacgaccccggaacctagtgctccaaaattcacctacaagaccccacggcctagcggacaataacatgtcgccggagagatcacttaccggcgatgagattggacgatgagtgccacccactgccaacagtggtcctaggcggggaagtcaactccggtgaggaattaactctgcagttcctagcgccagtgccaataaccgacccaaatccgcacggtgtgccccgatgatgcgccctcgccagcgccctagggcacaacacttttcaaccggacttctgcccacggggaaagattctatggttctcggcggggagattcacggctatggtggaggt

SEQ ID NO: 172105 - DNA, 774 bp, Zea Mays
tccttgtccatccatttgattgccatgtacgcaaccttcaccattgaccagttgtcttgtaggagtgttgaacaaggagggcctagacaaggcacaaaaactcttagtataggctgtgccacctgctttcaataatgtttactcgctttcaaaaactcttagtataggttgtgtggactcctagtgaggagacatgatattatatcactttttattctagcatgatggtagggttgagcttcccactatcatgatttcttcttcgaatccttgacaccatggcctctaggtttggcatctcatgcccaatgctattctctcgctttcaacattcgcatacctatgcaaagtgtttgttgggggtgaggccatgtgtagagatttttgacatttctttgtcctccgagcgtcaagcgaccaaaatccgttcaacaaattctacttctatccactctagactttgatatgggactctatatgtggccatcaacttcaccgagaagtgggagtattggtagacttcatatatctatgccacagtccaataaaatgtgtgccttgagatgctggtaggggagcttgtgctggaccgtgcctggtgagaagatcttatgtagttagacgaggcatgggagctaaccattaggagaattgaggagcttgttgactcatgtctctcaaccattatgttgttggtgcacttatcctcccagtgcttggccccgctgcaaaggcacatgaggtccatgtgggaatatgccgacaaaaaggatg

SEQ ID NO: 172106 - DNA, 681 bp, Zea Mays
ctggagaatgctctgaacatgctgtggtttcgagatgaacgtctactacagtgatcacgaaccgacgaacagtttccagaaactgagactgaacccgcgatgctgaactgaattcatgctgttctcttcagccttgtaggacaccgaaagcgatggagacgactacgatgaggacgattatgatacgactactacccggacagcgatcagcgacttgtatcacttcaaacccccttgctcaccagcaccgaacctttagtgagcggatcctccattcctccagcatttgctctgtctacatatgttcaagttcgattgtttaatgctggagtttcttctttacgacatactatctcatgtcaatgtgtttggcagcggcactaaacttgttgctatagaagtaaaatactctcggttcgttatcacagtataactttggtgattttgttacgatgtctagtgttagtctaccactttcttttcgagcttctccacgatattgcttctcttgtgagagcaaatatataataggaaacgtatctggtgcaaaccaatctctccccaaccaactgtttctagaaactgatcgaggctgaacccgcggtgctgaactgaatgcatgctgttcccttcagccttgtaggacaccgaaagcgacggagctccaaggtgcgaggacga

SEQ ID NO: 172107 - DNA, 570 bp, Zea Mays
ttggagctacaatagatgaagaatgaagatactactcggtcatatgtatgttctctttttttagtctttgtctttatgctctattttattttatatgatacacttgtacacttatcctattaaaatcggcctagggctttattaaatcctggatccgccactatgttactatgttaggttatttgatacacttgtgctctacccttggtgtggagcgtggtttctcctatttcgcggtgagccacattcgatttcgttagtcatgcatgtgaggtgtgatattgcactctcgattctccctggctggtgtgctagatgtaatgtctggtaatatatttgcttctggtaggacaagaattagttcgttccttggcgatggacatggatgctactgtacactcggaattcttaggtgcagcatgtacttagcgcagggagagacgttggttgatagtttacgatagcaaaagatgcagcaggtggtaaacacatgttgctttgatgccttgacgtggatgtagttctgaatatgcgggagtcatgcaaaccttgtgtagttgtgtgtactac

SEQ ID NO: 172108 - DNA, 582 bp, Zea Mays
tgggtgtcgctgctagacctttttgagttttcggcacctccactcctgccgaagggcttagaacttctaatatttttgtctctttggttctcggttcttcaatcttgtcaaccttcggcattgcagccggttcttcaatcctctgcgtaagggcaggtcctttggcttcaatagccgaagaggtctcaccgccaaattcaggcactatggcgggttcaatgtagagcggtcggtgagtaagaaacttcacctttttcctcttcggcacaggctcgcttgaggcgactgaagcaacatccttctcagaagctgcaccttttcttttctgatcccacgacgggtactgatagttggggtacacaaatccaatagtgtcaaaaaccctatttagtcttttctttttccggctcccaaaggccgcagataacgcattatcttccgctttggagtacggcccaagcagttcatcacttgtagcttcgatacatttcagccaatcatcatttggctcatcaaatttatctccatatctgaaggtgtatttcagtcgaaccagctctccttcgccagtcttagtgatag

SEQ ID NO: 172109 - DNA, 336 bp, Zea Mays
gaaataacggccgagtgatgacatggcacgccaacattttagaaataacaattgggtggtgacttgatgctttttagaaatggcgtctggcccgggaaaaccccatatgtactgcactgtcgcatgcctctgctttctatgtcctagttttgcttttctgcatccaggccttctctgctctcttgcaatattgcctccgctctgctcgccagcaaggttgagatggcacccaagcagaaagcccagagttcgtctaccgcaatcattccccctatcgatcccaacagtcagccacctttcgcaggtaatcacatgtctgtcgtctctgaatccgac

SEQ ID NO: 172110 - DNA, 467 bp, Zea Mays
ggtgaaggaaccgctattttaggagtatttacattttgggatagttgtcgtgtcgcacgaggttgcataaaaccgttttaaaaaaagcgtaaaatggtgtataactcaacgcaaactcctaccaacgttatagcaatcaaattatcccactatttcaggcgtaaaaaacgcacacgacttggagtagttgccatatagcttgctaaacacggggttgtcataaaacacatcatggagtgtcgtagattggcgtaaaatgcaccaagtcttgtaaattggcgtaaaaacacaacaataggtgattgtaggtaattgtagtgtaaatcatagcaaggtgtcgtaaaatttcatttgagagatgtataaatcacaactatcatacagacacttgtttagtacacatcgtaccaaaatataatcctaaccatctattggaggatgatgcattctatctaaactaacataaa

SEQ ID NO: 172111 - DNA, 729 bp, Zea Mays
gcttgtttcaatgaaaaaacataatatacactaatgctattttccttatgtgttgcttttggatgaatgcttgtaccctgatccagacaaagatggaaggaaggatcctagaggaagaaagcttgcaaatccgaaaactggttaaaaaaattttcaatagaaattttgaagggagaccggtgaacaaacgcatctgtggttaaaaaatattaatgtcctgatccagacaattacagaaggaaggacatgcaggaagcttgtaaatctgaagactggttaaagaaattttcaatagaaattttggatggagaccggtggatagacacatctgtggttaaaaatgttaatgctttagatggtgtccgctttttgctgttcttctagcagacttctaccttcagaacttttaattgttaatgtcttttctggtgcatattatcctacctggatggcggatgatgcagaactctcccctaaaaagtttgcgactttaggtgtgccgtggttagctgtaacccgccggggtgtgtgattctcccctgtaaaaaattcagacttagctagaagtggttatggatggtttggcgtattttccttttcatgaagcctttatgtctaggattagtttcactagcttccttctggtgacaaccttctaagtcgttgtttttgtttgatttgttggtcgtgtttgaaactaactttctatttcttaatgaaatgggggac

SEQ ID NO: 172112 - DNA, 1137 bp, Zea Mays
caactttgttacagacggattagtaggttgtcacatgagaattggagaacaaagcgcttcaattcgctctgtcagaacaactgatgaagaacgcgatggtacagtatctgcaaatgatcacagatgcagtgaacgttgccgtcggtgaactccatgtcatgatcctcgttggcgttacgattcgtgcgctctggcgtgtggataacggtcgacggtgaaaatatcttgcgcgaggatgaacttggggcactgttttgccctgtcgtcgcacccacttgcactggcgatgtggctgtgcgaccatcgtcgtcgtgccgccgtctagctaggttgtcacacgccttaagtcatctcaccactcgtctcaagccgtgaagactcggcagtgaccatcgtagaccatgaaccagtgaactccacgttagcaaactctggtgactcttccgccttcccaccgcgagtgattttctgttcaaattcgtcctactcgcggccgcgcaatataaattgatacctcagcctgttccgctagattgttacgaagtcagaacaccaaccctcgcccttgattagccaccatagccagagaatttcgttctttccctaaatctgttgtctgcgccaccatgagacgccgcgtcgtggcctgccacctccaggtctgccctcgccctccttgtccgtgtttcaacgcccatgcatgcttgtgatgcttgtcggctcggccaattaagctataccacgctagatcattaggaacgtgtcgggaaagtctcaaattcgtgggtgttcgtggaccgagctctagaatggcgttcaggttccattggtgatccctagtggagcgccaagggtagaattaggtatagaccgaagtcgagcatggattgttgggtattgtggctggcacaagttcgctggagcgcccacgccgccgtctgtggtcgagaccggtcttgcgatgaagagaaaagagaggggcttaagtgcacatgtcaaagacactggtgaatagggaataggattctttagtggttttttcatatcaccgaggacttctgcgcaaaatggccaaagcgggcctgcgcgggcgcgttttgcctagtcgtgggccggatcgggatagattgagcccag

SEQ ID NO: 172113 - DNA, 371 bp, Zea Mays
ggataacttcaaattactatttagatgaagagaagttgttttggaggttatgccagactcagtgattgaatttgatctagtaattgaagatgcaaaattatatttcagcagattcttttggcttttggcccttgtcttgaaggttttcgtgaaggctgcaagccctacttaagtatggattcgacagctctaaatggtcgttggaatggtcacctaccctcagctacaagtgttgatggacataattggatgtttcctgtggcttttggtttcttcgagtcagagataaaagatagttggatttggttcatgcaacaacttcgtaaggccataggagaccctccagttttagccatttgctcagatgcatg

SEQ ID NO: 172114 - DNA, 764 bp, Zea Mays
gtagggtttaaagcaatagcttggtgagcatcactgacacatatggaccacagaacacgagcaaatcgaacatgacttaccactgaatgggttgaccacggtgaggtgagcagtcgacctaagtggtcaccatgatcttgattcagggagtgaaagggtgtgtttagggcagtgacaagtaatgaaacatgggttctgggagagtggaatagaagagggccctgatgcttaggcaactcagtcaaagagcaagttcaccatgaagacaccctccacccgagtggtataaagacatcagggcaagggaaaacttcaaccacccaacccttcacgaggtcaacaggggggttaaggatgagcacaactagtcattcaagtgcatgtagaccacgtgtgttcagagacagggaaaacggtggcaaacaccccatggcatatcaacatgtgtccaacaagtgcttaagcaggcagcacagtcagcacacactagtttcaccctcccctttctcaaacttatcttaagtgacatgaattgtggcaagtgaaaccccccacaagtcttctttaacgtaccacgcccagaactccctagaagagctagtggatggggatacttctgctattttcagactacactaaactgctctgaacttcttcagtccactgcagagtcaaattcatccctctttttctccaatttctctataaggacagctacctctccacatcaaaattgctcacaaaacattggtcttacactttgc

SEQ ID NO: 172115 - DNA, 477 bp, Zea Mays
gtccgccatcacacaaagatcatctggttcctctatgggggacacgatagaggaattcagagatctcgataaattaggacaggggtttacatcggccgatcctttggaggagatcgacataggagatggtaaaactccaaggccaacttttgtgaacaaaaccctggagaccgatcctagaaataaaatgatcggtctattgaaggaatattcggattgctttgcttggaattacactgagatgtcgggattaagccgagagatcgtagagcatcgactgcccattaagtctggtttcagacctttcaagcagaaagctagaacatttcgtccagaccttctcccacgaatcaaggatgaaatccaccggctgctagaagctaattttattaaaccttgcagatacgcagagtgggtctccaatattgtgccggtggagaaggagtcaggtaagcttagagtatgcattgatttttg

SEQ ID NO: 172116 - DNA, 298 bp, Zea Mays
ccagtaacgtccacacgtcgtgtttgtcaccactcacaacttgttttaacttcagtgcaaagggacagcgagggagcatatacatattccccactccatcagtaggggaggacgtacttgttgtttagcactcgaaagcaaccagctactgcgagctcccccactcccagtgtggtgaactggtgtagtaatcagaatcaacttgcctggcctgctgtctgctgctgacctcgctttcagctttcaccacgagggctgggcagtgtccctcccatgcgggccatgccccccatcctcg

SEQ ID NO: 172117 - DNA, 579 bp, Zea Mays
cggttgtcgcggcatggagagcacctggccatgagcagcgcggcccgcggcggaggatagaactccgacaagcaattccccattccctggactgtacccatacacgacaaggacctcgacgccttcagtaagcaccagcgaacgccccaaatcaatcacagggacccgaagagcattatctgaggatttcctagcgtggcggctgaggagggagctcgccatgaaccacggcatccggcaggcgctatttatgggcgcggagaggaacgggtcacgcgtaggacggagagaaatcccaggcggtagcgaacggattccgcggatcccgttggtcgccagcgatccacacgcggattccccggcagcggcggcggcgtcttcggaagagcggagaagatgagtccgagcaactagggccactatacagtcatcagaatcgagcgcacattttgtgagtccgaccagtggaccccaccgggcagtgcccacgagacaatggcagatgggccccaatcgtcagcgagcaggtaggcgtgcgcgcggaagggatttagtggagatgggccaagtgaggggaat

SEQ ID NO: 172118 - DNA, 699 bp, Zea Mays
gtcggaaatcttagtcataaattgctcaaccagatgttagcacattgctctctttgtcgctgaatgacatgaagcaaactatgagataaaaggacatgtaaccgctagcaacacgaagttgcgagtataccgagaggttattctgaaaaaaaattcactatgttggtgtgaaaaccatagtgtgttcccgtcaaaccactttactcgttctatctaggacctttatgcttgtgtcgcatacacctctcggaattgtaagtacttatagtcactgaattgactcgagatagtcctttgacaaatttggtatacacagtaagctaaatggtaggtcggtcttgaatggacacacacctggggtttatgtagccgaactacactgaattccaccctttgacatgcttaccattatctacctccgatctaccagaagtgagaagggtagataaataactatgaaatcccacatcaccacaaagcttgaagctaaattagacattaacatgtccttggtccttggagccagaagagccatatgtcttgaccactagactactagtgatgataatttatgatagaaatatgaagatcttgtagagaccttttgtgtcctctctactcctgatgatttcttcgtatgagagcagtactatctgttgttgaagacggatcctaggcggataccagtcttgtttcgtt

SEQ ID NO: 172119 - DNA, 894 bp, Zea Mays
taaccagcaagcataggtgacaatgtaaacatggcagttgaattagaagaagcattatctaaggtcatagagaacactttatcaatcatgccaaagtattgaatcacacaagcaatgcgttcagcaatgttaacaccattatgagacacttggatcaatttaaatcctaccacagacttctggtgcctaagcacgtgtccagtgccagcatagaactagcactcaactgagccttgcaaaatttgcaaatacctgcaatgcgcaccttcttaccattacgattttctgtgacttcagtgaagtcatcccaaacaacagatcgatgcttactagtgcttgaagaagtcaatgaatcaagttcattagagccagcagcatcactaaccagctcggcaggtgcccctcagggtcgacgacagtatgactgctaccgacaccgaacaaggcagtagcagcatctcccatgtcgtcgacgtcatcgggaagttgccctaactcaacaagctcatcgttgatggttctagggtactcgacgtcgtcgtcgtcatccatgtcccccttctcggcaccgtacctcaatggccctggcggcactagcacgaccacgacgtagtcggccggtgacgtaccaaagcccacaagcaagcagcgaagaggagattagggttagggattgctgattgggaagggagtgccggagagggacgtacctgccaagccggagcccggagtcagacacgagggtcaagtgcacgacgacgcgcgacgagccgacaatcgatgaagacgtgattagggttagggatttccggattggggagggaccgagggagagccagagaggggcaagccacacagaaggagagtaggagacccgccgatgtcgccggtgac

SEQ ID NO: 172120 - DNA, 463 bp, Zea Mays
ggaagatggggctctctcccatccaaaagtgtatttccactctgcggatcttggcgtatgattcacctgctgatgcggtggacgagtatgtatgcatttccaaatccaaatccaccgttctggaggcagtaaacaggttttgtgctgctgtcatgaatgtttttagcaacactaccttaggcctcccaatgcatccgaagttcaagtgctacttgcatttaacgtgatgtgtggtttcctgggcatgcttggtagcattgattgcatgcactgggattggcgcaactgtccaactgcttggaaatgcatgttcacgggtcgtggtatccatccctccatggtgctcgaggcagttgctacacatgacttgtggattcaacacgcgtattttgggatgcctagaagaaataatgacataaatgtattgcatcactcacctttgttttgcaggcatgtcagcaac

SEQ ID NO: 172121 - DNA, 919 bp, Zea Mays
ttcccgcaagtcggggaatggacctcaacgatgcggtttgcgacgtctagtattacttgatgttgggtcatccaattagttcccaaaatgatatccacattatccatccccaaaatgaggagggtggtcttgcaaaccttgcttcccagttggatgggtatgctacggtttagttggtttgttgcaatcttgccctcaagcgttgcaatcataaaagccccttgggtatggtagaagggcagttggcatttgacgctgagtttttgactaatgaagctatgtgatgcaccagagtcaaaaagaatagaagttggttgattaaaaacggaaaaggtaccagtcatgataggtgctccttcgggtagctcctccagagtagtgaaattgagcctcccttgtttgacttgcaccttttgcttccttcccttttcttggttagccgctggcctctgccttggttggtttcgtgggcaatccttggcgtagtggctggtgttaccacacgtaaagcatttgttcccgtttccttgtaggaactgctgctgctgttgctgtcatgggggctgattatttcttggagctggagcggggaaacggttgggtgattgctgctgctgtggcggcctgattacccatctccctgcttgctgttgggatcccctgttgtgattgttggagacaatccggaacctttgaggcggggctaaagaccctgtcattggtgccttcctcttcttctctgtctggtgggctaagatacagtcctcctgtggaatggccaggttgaccagctcgttatagctgtcggtacaaacagtattaaggcgctcacggagcttggtgttgagccctctctggaagcggtccctcttcttctcatcagagtctgcatggtaactcgcatattagcacaggtcat

SEQ ID NO: 172122 - DNA, 1208 bp, Zea Mays
cgaaggacgaaggtcctttaacgcttaataattgtgttgccatgttttatggtttacaacaatcaaaacgcaagtgaacaacatccaccacatcatcactggagttcagctcagacgagacagtcactagttgtaggactaacgaacgctggagcttccttttcttcttaacctctgtggactcggcctaggcatatgactgacaataccacttgcgccatggactcacgagattatccgtctttttccctccagtgctcgattgctcaggggctccacaccccgactcaagtcgcgcagactcagaggactccccagccagcatgccgagaacagcctcaatcttagagtcactggcagcgggtgtatcatgatgtgagtctacttatcctctttaggaagatctcagtacgtggcaattatggcctctatcatccgagatggccgcactctatggctagaattggaaccctcttcatggataggagggttggacacaaactcagaaaacggactctgcaacaatgaaacaacacgatcagcatgaagcatacaataatttgacaaacgtcgaatgagaaatcgagtggtcagaacttaacagtggaggaagattccaagcagaataagatcgaggagcactagcattcacaatggcacccctcagcatcatctcgatccgactcaagatgttctcgtctgaaatttgtttgtctctcacccgggaaggataaccaggtatacacatatgaagggtagactctatccttgagaggttggatattattgaagacaaagtcgatcaccacaacttcggcaattaggcctctgtcctttaaaccagcaatttcagctaacaagactttagcctcaacaacttcaaaattagttggggcctcaatccaactgggcacgtgaacatctggttgtcttccagaacgagcaggcaaggacttgttgtgattctccatagtgaaccactcaaaatgtcaccctttgatgatgtccttcagagggatatctaagtattcaaccttcctaccccaacaaagttaaaggctagctccaccaactacttgatgttgcccacctgccatcctcggcttgcgatggtagagatacttccacagtccaaagtgtgggctaatcccaagataggcttcacaaagatgcatgaatatggcaatttaaagaatagaattggggtt

SEQ ID NO: 172123 - DNA, 402 bp, Zea Mays
cgccgaggccgtcgacgtggacgcgtcgtcggacgccgccggcatgggctccggcgccgctgtcgtcggccgccgcagccgcgagaagcatcccagcatcgtccttgctcgctctagcgcgactgatttcttggctctgttgcttgttggcaacggtagggaaggcgacgtgtgctcgtactcgtaactcgatcgtgcaccgagaggagctagctagctttggctcgtgaatggagtgacaaagtcggcatgtgacgctgcaaggaacgagagttttataggacaggtgagtagtgagcagggcagtggcgtttcaggtaaatggggctcagtcacgctatcacgctggttctaaccagggatggcaacgagcagttcttcgttgtggaatatctcctcata

SEQ ID NO: 172124 - DNA, 629 bp, Zea Mays
gcggcaagcgaggaggcagtagcgaggtcgagcggatgcgcagagggaggggaagcgaatggggccacaatcgagggcaaggtagggaggttacagtggatgaggcagagctcaaccttgtagaggaacccagggcgacgagagcgtggaggagcgacagatccgagagttttgtgtgccaaggatgggagcggctgagagggcaccaacgccatgtctcatgggtgcctcgttgaggaggcggcatccaccgctgtcaccgcagcgccctagatttttcatcatcgacaggagaaccgtggtgccccacgtgtgtcccctcctccgcgggggtgggggtcgccgccgccatggcccatgggcatctcgttgaggaggcgagcttgatccctatggtttaggagagggagttaggtcgtctggtggggaagaggagacagactgagaggagtcgggcggggaagaggcaggatggaaggggattggcaggggcgatgcgcagaggcatgaatggcgaggcttgggcacgagaatgacggtgcacagaggcgtgaatggtggcatgcaaaggcgtgaatggcagggcgtgggcgcgaaggatgtcgggggtgtgaatcatgggacgtggg

SEQ ID NO: 172125 - DNA, 1008 bp, Zea Mays
ctataacggaaatatttgatcttgatgaagcccaactatatatagtgctatagttaattggagtaaagaataactacattgattatttctggaaaacaatttttagactcatctttctgaatgggtgaaacaacagagtgaagagcatgtgatactgatgtgctgtgtatatcagtgtagacatgtccttgactcctgagacatttaaaatgtatgtgaaaaggacaaagcatggcgtcccatacacatatgaacaccgtgcaatatatatagattgattatactacattctgttgtaactttggcagaatttcatgcaatgttctgaagaatataataatgtcatccaaataacaggcatgcaactgtaatttgtacttgctaataacgagttctaaattagtgttgaggtgcatgccttttttgggatagaattgacacaaaggtatttctcctgcctgaccccttcctgatgggtttggtgtcgagctttgaggcatgcagatatatgagatgtgaagagaggatctccaatccatcagattaagaaaaaagaataatcctctatatcagacaacaggagatcacgaaaacatatataaacctaagttgtaggtgagatgtgctacagcagatagaggattttttgtattccctttatacgtggcagaattttgtttttcctttctggagggtttgtccttcatcttcgtcgtccttcttgttcccgtccgtcgtccgcatctccctgctcatgggatttcggtaggtcctgtccgcccgcctgctctcacgatgccttccatctcctgcttgaggtggcagcgtttgcagagcggcgctgcagctagcgactcatgagctccggtgatgcagtagcggcgtgcggcagcagagcggtcggtgctctcacggcgactagaagaggaacaaagaggattgagaaaaaatggtgggaggatcccctctatttgagggattgagtggatggaggtttgagtcgttggg

SEQ ID NO: 172126 - DNA, 298 bp, Zea Mays
gatgggcatctggctgatttttgctttaggaggaagagagatgagcggtgggtttctgagtcgagcaggaagaacatcaactacccctctcatggtgttcatgctcagcctgtttagagatgtcctgcgatggctagaggtgctttgcctttttctgctaggccttaggcagtgagacagcaagatggtcgtgtgcagcggggtgatggtcatgtgccatatggccaagggaccctatgtcagtggctttggttcttacttcctcaacgaaccacaatttccttcttgtggtgatcgc

SEQ ID NO: 172127 - DNA, 594 bp, Zea Mays
cgaaggggtaccgttgcacatgggccgccagatcaaacacgaacggcccagattagatcgctacatccagagagctgggacacggtgctggccatccgattctaggttaacggctaggattaaataactcccggatctaatctccaccacgggatttcggatcaacggtcgccaatcgccctggtcgaaccggtacttagcttctaatctcagccacccgtggaagatcggacagttaataacctacccgctaccttcgtctcaccgaccgacggcatagaaacactgcacggcggcgcatcgtcggagcagcgtcccaatggtcatcccgacgccaaggacccaacccgaaccgtgctagacgaagtgcgggatactatgaacagcagggaagggctattaccggctcatatcgcgagttgaagccagtccatggtgcagagcggccccagcggcggcgatgaggtacgacgagaaattccgctagcgcagcgacaccacggagaaattaacagctgccgaagcgtctaggagtctcggtgcagcaccggagtgctccacagatgtcccagatcaacatttaaggctccatcg

SEQ ID NO: 172128 - DNA, 408 bp, Zea Mays
agaaggacaataaaccatgaataccaattttcaaaaatctaaaacttgcttagaaactgataagaatcgtcaggactagaccgctagacctaggacgaaaggccttaggaatagagggagaaataggtggctaagtaagtaggccctgtgggccagtacttagatttttaaaggatgccctaggagcaccctttatttcggagaggagctgttatttttctttcagcatgcatgcattataaaatttggaggattaagaattaaggaagtaaaaatcaagctaacccgcttcttttcaaaccatctaggctcttttatttttttccttccaccataatctttacatctgatccccttccgcagatgaattcacccacccccgccagcaaaggagacactcgtttcagc

SEQ ID NO: 172129 - DNA, 649 bp, Zea Mays
ctatgcatcttcagcaaatctgccgctgccggtgggctcaggatttctggcatctctatcattctttccacatgtggctcttcggccttaacatctttagcttcggctagcctaactgtaggcaccttcggcactacaatcggctcttcagcgctctacacaatcggaacagtttcttttgctttggcagctgaagaggtgcctttgccaaattcaggtatcacggccgattcaatataacgcagccggtgagtaagaaccttcaccttcttgcccttcggctcagctgtaatgaccgaagcggcaatctttctctttttcccttgccctcgcagcgggtagcgataatcagggtatacgaagccaataacatcaaataccttgttcaaacttttcttgttctgacccctgaaagttgcagacaaagcattatcctcggccttggagtatgccccaagtagctcatcgctagtagctttaatacacttcagccagtcatcgtttggctcatcaaacttctccccaaatctgaagttatacttcaatcggactagaccaccctcactggagtcggcggtggtttccttcggcatatcccagctctccacaagtggccataccctgaaggctatgtgctcttgaattaaat

SEQ ID NO: 172130 - DNA, 1086 bp, Zea Mays
aggttatggacatgtcgtagttgcaaactctgtgatactccgctactaaactattgtgtcataaactatagtctgactattactagccatctagtacaacagtgatgttgagacgttgatgcactagtagccatgaaggtaccaaatcatgatgagctagcaggaattgacaatgcaaaacagagtctgtgtatgatcaaatctttgttgactgagaagcaaaacgaagaagagattgaacagagaagagaactgaaggtaacctttcaggacaagagaagttatccagattatgtggcctatcttttggtttcttatgtttaggtgttgttaatagttatgagttccatttagataacatgacaaacattttcttgcaactcattgtaaaataattctagtgtagtatctgttttgttgaatatgaaaatacattttcgtagcatagaagttgctggaataatatactagctttggtaattcaagccgaaagctagaataggaagctaaatcaatccacatctcttgtatttttcttttgtacaggatgccattgaaattaagctaagagaggaagctatgataagtagggttctaaaggagaagcttgtgtccaaggaactaggcattgaacaattgcagtcagatctagcagcttcagtcaggtttcaagtggtactgcaaaatgagatccagagatttcaaaatgaactacgttgcctcacaaaagtacaagcacttggaagttcaggtgagaggtgatccagaaactctgatccttgaaaagctattttcatattttttcccttgtcaagttgattttagttttgtcttacttcctaaatctcttgtttctatcttgatgcattatccttgtaagggctatattttctactccctctgttcataaatatatgacaccgttgactttttaaaaaatattttgaatgagacgagtgatcaaatttttcaaaaaatcaacagtatcatatatttcatatatttatgaacggaggtagtaattgtttatgatgatattacacggtttactcctgcacatgactccattgtcatatttggtttcaa

SEQ ID NO: 172131 - DNA, 779 bp, Zea Mays
aacacgtcaactctttgtttgaacagatacggatgatcacaacgattcagcacaaccttttcgaaaatcacgaaccaaggcgtgcatgtgtgcccccaaaaatctcagaataaacttgtcgaaacgcacgaacaaaaaaagttcaaagtagataaccaggttagctaaaagttcatcgggagcgttcgattaattcattttgtcgcaaaaatcagaccaaacgcgtcgaaactgcatgcgagtgcgccacagtaattcctgagagcagaatgcacatacataggtacgcgacccgggggcgctcgtgctcgatctcggccgcgacgcgcaggatgggcgcgatgctgttgagcgtggatgggacgacttcgttgtcgaagacctccatcgagaaggtggccatgcccgcacccctcgacccgcggcggttgagtcccgacacgagcgcggaagtcggcgtcactggctcgttccccgcggcgtgccccgccgcagccgaagacggcggcggctcatctccgccaccgcgcggcgccgtcatcttcgccgccgctccaccaccaccacccagcgcaagctctcaaaggcgatcctcctgctgcattgggctagggttagcgccagagattatggggggttcggacggagagagagagaacgaacaacaaacccgaaatcgcgaagccgcgaccgcgaacgcttcggcgccttcccgttccggctccgcctcggcttgccttctcggggtaacaaacgggggaggtgacacgagagacgtg

SEQ ID NO: 172132 - DNA, 363 bp, Zea Mays
caagaaattgccgaagcaggcgtgttgcttactgaaatcggattactgaaagaaagaggtctgactgtcgaagctgtggtcactgattttgttttcaagaacattcagccactgaaagacagggcttatccagcatatctgtatcgagggctggccgactcaactcgggttactaataagagaattccttctgttgacttggtaagccgacttgaaatgatcctcaggggtaaagtttcgaatgttggtgctccagtggcatactcggcctggcacctacctcctcccaaagctttcaccctttttgtgtcaaatccacctgtgactaacagcaatttgggccttagagtgcgaccctctgct

SEQ ID NO: 172133 - DNA, 469 bp, Zea Mays
tgcaggttgacagtaaacagtttgagtgtctttgagaatgaagtctttttattgatgatgtatttcccaatttacagaatacaaggtcgtcccaatagcttttgaaatctagctaggggtaaaacttcctgagatgttctatattccatgagttcccaatttctgtgtcgtccatttgagtaagacgatatgatccaggccgagtgacttctgctactatgaatggcccttcccatagtggcgacaatttatgtcgtccctcccctgttagaattcggtggaggacgagatctcccactacgaaggatcgatgtcgtatggcctcatcatgatagtgcctcagagtttgctggtaccgggctgactggatcaccgtattcaaccgttcctcttctagtatatcaacatcctccagcctagtagcttcagcttcagctatgttttcgaagatcaatcttggtgccccaaa

SEQ ID NO: 172134 - DNA, 434 bp, Zea Mays
attaaattacaatacatggatcgggttgagaaagtcccattcctatgagctctccacacgaaagtgtccctcaccggagtcagattaaccgtagccagtaagtgtatcatggtctgccattctacaagcttaattccaacaatggatctccggaaagaaagatttagattttcatgtgacagcacttctgcaaccagcgaggtcttattgcgtactatattaaaaaggtttgagaattgctatctaagaggagaattattaagccatttatctttccagaatcttgttgcttgtctgttccccaccttaaaatatccccacttgaggaatttgtccttgacgttcattagaccggcccagaaatgagaatcacccggttttctgacagcttgagttagggatttgtctctcaagtatttgtttcttaatagtca

SEQ ID NO: 172135 - DNA, 943 bp, Zea Mays
cagattttggcggagcctgctgctaggaacgagcccggagagattgttgtaagaaagcaccagctgcgtcaagttctggagggtccatagcgaaggtggaaccgcaccggacaggttgttgtaggaaagatcaaggatcgctaggtcttttgaggatccaagatctgaagggatagaaccgtcgagatggttgtggctcagattgagcgacaccagcccttccttcatcatgcggcaagaagcggcggataattcgtcccctagatcggtgaagaaattcatcgagagatcgagggacagcaaggtgtcaagaaggcataagggggagaagacggaggcgtcggacatgccgtagccggacaaagtgatgttggtcacgaccatgtaagaaccggacgtagagcgtgagcaggcgactccagtccagttacacatgtctgtgcccgaggcccaactgctacccacagcgcttgagagattcatcatgatggccacctgctgcttgtccggtggtagggaagacggagacggcacatccatggcggccaccgactcctggtgagacgaggacaggaagaggtgtggcactagcagcactaagaagcagctgagagtgcagggacagtacctcctgtgcgccatggccatctgagcgaatttgtttcttgtgtcccagcctccggttggttgctcagctctgcctcttctcctcccactcaacggctggatcttcaccggcgcgagcaagagaagagaagcagagggtgcttcattccctttaggttgtgtgtaccattgtcagctagctggttcgctcaacaatggcttccttgggttttgttcttcaggactgtcaattcttgtagctgctctgcttcaacaatggcttccttgggttttattcttcaggactgtcaattcttgtagctgctctgctgttcta

SEQ ID NO: 172136 - DNA, 846 bp, Zea Mays
cgagcaactccgcgaggcggggcggacggcaaagtctcccaccaagcaagttcgcgagacggagcagacgaccaatttcctcgccgagcaacttcgtgaaatggagcaggcgaccaagtcgcttgccaagcaagtctgcgaggcaggacagacgactaactcgcacatcataaaaccgacgtaggggaaggaccaatcccatgaagttgccccacatcagtaggacaagacacgtcattaccaagccacgtctgggcctcaagtacgatggtgaaaggtccccatcaagtgcctacggcacatcatcgtgcactgtctcatgcaggcccccgctaacgtgtggggctggtcaaccccagtcttaggggcatcgacgtcggagtcttaacagtgacccacatacccgaaaggatgtgttagatacaccataccgggtgtaagtttacacataccggcgggtgacacaggctcatgacgagatacagagccacgctgcgcacgaccacaccataagactgtcccacgggacccaccacacactattacagagatgtcagcagtggactcgctataggagaccgcgggatgagcgggaaagatggtatgccataccggggatacgactacgcatgaccctactgagggaccactgcgacgattaggagtagttgatctctttctctctctccctttctctttttatggtagaaatcgatcaccactgcaaggtttagcccttgaagctataaaagtgtaggccctctttcttctcaacacacaagcacacaagatgcaacacttctcattgcaatactacgatcatcactacactgaactagggctccg

SEQ ID NO: 172137 - DNA, 615 bp, Zea Mays
aaaatttggtgaagagacatcttccgctgtcgaagcggaacaagctgctcccgccgctcggagcgctgaggaatcgactatagtgccgaaggtgcctatagttgagccagttgaagctgaagatggggcggccaaaaagctatagtttgaaaaaacaatagcgctgccaaaaattctgagcccactggtagaagcagaattgtcgaaggttgcaaaagctcccgccgcaactctcaagaggagaagaatggctagcgtactagacgctgtcatggagacgacaaggtcactactcctacccctgtagagaaagttgccaaagctgtgacggctcgtgttgaaacagaagctgggccttcagcgcccgcgaaggcagagcctaccgcaactgagtagagagtcggagaagaatttgcagatgttagcatagctctggagaagattgtggccgaaaaatccaaatcccctgctcccgaagcaccgtccgaatatcttgactatattattcgacatgcttcgggaaaaagattatccaaagaagaaattttagaagccaaacactatgcccgggaactgaaatacccgaaggggccttagtgttcaacagcacagacg

SEQ ID NO: 172138 - DNA, 730 bp, Zea Mays
gtcggtactcggcgtagcattgtggtgactcgccgtggggtaggaatcgtgcgcgctcggttcgttggccgcgtgtgcaacagaattccgagtaattcctcgtcgaagcaccgaggaccgtcgtggagctcacgtctccgccgtcagctctctgcgacgcaccattatcgatgggaacccccctcatttgattcctggttacacgtgctcgtcgtaggactcgcggattgaggtttgggctccgatgtgcgtcgattgggtgtttccggtgggtgcgccactgcggaaccatggcggagccgccctggtacggccgtcagaggaggggttttcggtggatttgggctgaccgttgatcacgggctaaacgacatggattagactccgagcgtaccctttcgctagattgtatctgagttgtcaaccttagatctaacgggtctgggtgaatagggagagttttaaatccgagccgttgacgcacgatcaaacggtacccgagcacgccagtccttaaacataggcgatctaatcgggacccttggtgtgggatcggacggctagggtttctagatacccgttcggcctggatattatacttaagagccatcggagaaagtgaaaaacaacacgccgtcctatctgtggcgcgctgagtcttgggggatttttattcctgccccctgctgttttctgtaataatgcgccagtccagggcgttggaaatcag

SEQ ID NO: 172139 - DNA, 434 bp, Zea Mays
tagcgcctgggatcgagtaagaatcctcgccggccatttaactactccggccatttaactactcgggccatttaacaactccggccaccgtaccgatcttgccacagtcacttcggatatcctcgccggtgactgcctccttacgatctcgtgccatgtgccttggcacctccaccccatcgtcgtgacccgttgtaactctctgttgatcgccggaatgactgccacagtaataggacaccaatccaatgcaccagtaaccttccgctccttcagccgccgcatgtcatcgctcaaattcccggccaccgctcttgcctagtataaattaaaaccaccgtgagctctgtaggatcatcacgcacccaaccaccaagtattgtcctcagtcgatcaccagggagcttcaattttggatttcccccaatctgctc

SEQ ID NO: 172140 - DNA, 448 bp, Zea Mays
acgagcctgggtacaccaatagtgagttggcccgaagcgctccggaccgaatggatggctcaatggtggcagtggcgaggtagcgccgagacgcagggttggcggcaatggtggctacgcgtacggcgtggatgagaagaaggggaaggaaagaggggttgaccgagctataaaaggtggagcacagtcggattgcgccgagcgaatcgcggagaggttgttgggtccctggattgcggcgaacgcggccgtggcggcgtggctccgaactcggcggaggtggttgaatcgtccgtcgttcgcgcggagctgtgtgatgaccgcgtgggtcccatgcgacagggacagagcaagtcgcgtgcggaggggtgcgacgtcatgagaccgacatgcaggccccaccagtcggcgcgcgctggctgaggaagtgggccgcgcgggaggtttc

SEQ ID NO: 172141 - DNA, 419 bp, Zea Mays
aaaaagaatgattttctctttgttgtgtcgctgaaagatggaggataagatattgtgtgtggtgccccccttctcgacaacctcagcgtcgttgacgatgtcaaagttccaacattcgagcacgaccagctatagctttccggcttccaaccattctgcaacaatagtctatacccatgactgggaagatgggggataagatagtgtgtgtggcacaacccttctcgacgccctcggcatcggtgatgatgtcgaagttccagcaattgagcacgacccgctatagctttctgacttccagccattctacaacaatagcctgtacccgtgactggttctcttgaaaaaaatacgaggcatgaagaagtactacagacaagcaggtaaggagtcgtaatagaatgcaacaatgagtcagc

SEQ ID NO: 172142 - DNA, 573 bp, Zea Mays
aacgacttggtcagtttgtgcatcaatcttgtacgaaatccaacttctgtctttgcatggcagtgttctgtctagttttgaagtttgcttctcctcggctcgcagggccgtggttcaaggcagctcggcgcgcccaggagatggtaccgcaccaagaagatttggctggccaccggcgtcgccgtcaccgtcgtggtgatcctcctcatggtcctcatagcttgccatggcttcaaatgtcgctgaaccctgagccatgggccagggctgctcgctgccaaaggatgggagcacaatagctcatgcaagctctagataagctcagctcaatcgtccactatatgcagcagtgtgcagcttcaaacggcgaagcattctgcatctgtgcttgtggtggcggcctctgttttctcctctagctcgttttgatgtaccctcccagtagttgaattggatctttgagcgacttacaagccttctaaattttgtgggactttgccatatgtagtatgtatgcttattaatcattttatagctgcatgagatggaggggcttgattccttgatagaaaa

SEQ ID NO: 172143 - DNA, 436 bp, Zea Mays
ggagaagtattttcaaggtcaagccgacctggcccgagtttctgcttctctggatgatgcgcgctctttgaattcttctctcaatgctcaacttgactcggaaaggatggcacatgaggtaaactcccttagttggctttgtcatgcttattgttgactaggtgttgaatgttgattcttgtttgtaggaggaaagacgagcatttgtggcttctcgtgataatctggacaggttatatcgtgacgctagcaactccttgactattttggaaaggagccaccgcttcaccatgtcggacctggatcatcatcgtcacgagctacaagcatctcaggatgaagttcagcggcttggacagcagttatcggccaaggatttgatcattaaagatcatcgtgcttcgaagagactcgtcgcccaggagctagaaactgc

SEQ ID NO: 172144 - DNA, 768 bp, Zea Mays
cccgctcttccccctctcttccggcccagacggcccaacccgcgcgccactcccgccccctgaccactgggccccgcccgtcagcgcctcaccgccctctctctcgcgcggacctctctcgctgacagcccgaccccactcgtcagctccttctccctcgcccatccctcaccggcgcgatcgccgccgaacgcccctcgcctcgtcgcctcgccattaatgcccgccagcccccgcgacaaactccgccactgtgcttgagccgaccactcaccccccggcctgcccgagccgtcccaatcggtgttagcgccattcccgtacccatggcgagctcgccggtgctcgccatctaccccatccccctccctccctcgagcgcctataaaagggcccgctcgagcaccgtcttcgccacacaacaccagtcatcctcactgccctcctccccgagccattcaagcgagcgccgccgtgccccctgccttgctccggtgagctcccttccctctctctagcgtctctctgttcaattaagctatggccaaagctccgccacacactcgcgatcactcgacaccactttgcccccctgtcatggccggaaacctcaccggcggcttcgccgccgcaggcgcccgccactacgccgtggaccggctgccataggcccccgcaggccaaatttgccccaccatcgtgacccactccaaccgcccgtgcttcgccaccccttccccgccagaggaccggaccgacggcggagaa

SEQ ID NO: 172145 - DNA, 841 bp, Zea Mays
acggaaatgagtaccagaggcactcggctgattggtaggagcgggggcagtagtgggacgaataaagataggctgcttgaatggatatgaaggtgggcgaggcgaagaacgattttgattaaaaggtcggatcaccaacctggttctcttttcaggcccttgatttgacctttcacctccaaacccctttgattttccatgtcctgcatttttggcttccactgccagtgtcgtgctgacagccttactgtaggtgaggtccaagcatgttgccatttttcgctaaagcctgtcattgagccccctcataaaacaattctttttctttaagtcagtatccacctggtcaatggcatactgagagagatggttgaatttgttgagatactgcatcaccgtatctcctccttgcctcaaccggataaactcttttagcttcatctggagtactccctctagaacataatgctctcggaacgccaatttgaactcatcccaggtaatctgatgtccaacaagctggactactgagaaatttgcccaccaagtacttgcaggccctcttaactattgtgcggcgaacaggggcttttgcgtctctgtgcatcgaatcaacccaaacttctgttccatcactcttacccattcatcggcttctaaaggttcctcttctttaatgaaaagcggtggtcgagtctcagagaattccaaataagtagtatcacacggtccttgtgggggaactctgcctctgtgcggttggaactgattgctcaccatttcacgcaaaaagcgtgtattatcagcggtggcattaaccagggcagcgatagcctcggcc

SEQ ID NO: 172146 - DNA, 464 bp, Zea Mays
ctgacgggccgggcctacccgtcagtgccccttgcgcccgctttcgtcgctgcatccatgaccggtgggaccaagtcgtcaggttaatcgcgctcgccaacagacttcgcgcagcgacctccgatatctccggcaaactcgcccctgccctggtttctcgctgattcgagccgttagcctataagacctgacccccacgaacctctgtgcccatagccccctttaatctagcaaatcgcggcaagtgcaggtggctcaggcttgaactgcggctgggaatcgaccgccagcaccattatcgtcttcgccaaaattccaggtgcacgaaccgtgtccgggaagccgtcgaggatcgtagcacttgtgccgtgaacctgcgggcgtggggatttcggggtccgaggcaatttctcgccggtcatcgttaccaacctcggatccgcgccgcgccgcgattggggctc

SEQ ID NO: 172147 - DNA, 720 bp, Zea Mays
gaatccgctcgattacagccgaagctagttgttaggatcttggcgaagattgtgggattcgggtgccatcctggggtacttataggtgacctagccacctcctctcgttcatcagatcccgaccccgagtagagccaatggagagcagtctagtagaaaagaaaccaccgtcgatgtgtgctgcccgtgctgccggtctatggccagagtggggctatggttgttgacgaggccgtggtgaacctaggcacggagtcgtaggaactggagaccaaccgaatcctccctaattcatcgtcggtgtcaggaaatccgccgccgtgccgcgcggtatcgtgggtggaacccggaagttccataatccgaggtaaaaacttcttctatgtgttcgcccacgcagccattagggtaggaaccattctagggcaagtattggtcaccgtgggggatagctcaactagcgccggtgtgggcgccgccgtgatgggcggtcgacgccgctcgacctagctcaaggaagaaggagaacgtagtggctgtagatcaaagaatggacggacgagattgggttgctgtgtaccctttcgcccatttagatctggtcgtagatcctggatccaacagttgtgggcgcataccggttcgcgaggtttggggatctaatccaaggcattgaaaactgatcggacggccagtatttcaccatacccattcggccag

SEQ ID NO: 172148 - DNA, 681 bp, Zea Mays
cttgctcagagctatggctgatttgttatccactagaagtttgactgttggagcctggatgttcagtagttctcccagaagccggctaagccagatcccttgacacgctgcattcgcacttgcaatatattcagcctcacatgatgatagggccaccacccgttgtttctgtgatgcccatgtcactaagcttgatcccaacagaaacacacacccactggtgctcctcctgtcgtcaacatcgccgaccagatcactgtcactgtaacctacaagttcagttgagccctgactcttgtacacacacccaaactgtacggtgcctgcaagatatctcaatatttgtttgacagcagcccaatgacttgctctaggctcttccatatacctgctaacaatgcccactgcatatgctatatctggccttgtattaaccaaataccgaagacttccaatgatgctcctatacttggttttgtcaacagcgggtgtcttgtcattcttgctcaacttcaatctattctccatgggcacagcacaaggattacaccccttcatgccggcttgctccagaattttcagagtgtacgagctctgacacagctttgtcattcctgcctgctgattaacttgtatccccaagtaataactgagtaatcccaagtcactcatactgaactt

SEQ ID NO: 172149 - DNA, 594 bp, Zea Mays
cccgtgaaaggggtacgcactactctaatctatatcgttcaccatcaaatgtatggttcaaatcgcatctaaccgaatcggtattctacgaactaatctatgtcgtccatcgcgcaaacaacagtcggagagcatttccttcctcccgatggacaacaaacgacgacatgtggctgccacgacggcgatctcgttgacgcaccctgattaagtgatttggtgctcctatgcagacgcggtgagatgctagatagagcggagaatacggggaattgggtgagggtattcttaccacgtattaggaatttaggatgacagagtgtgcagttcacagcaagcaatggctcggcggtggaggcaagactcaggtgagcaatcatcgatccccatatcgttaattgtgcttggaggcccctcgctcacgtactacggactcacgtaaagctcctaggccttactcttgaagcagaacgatggcatgatgtgcgtggtggtagcggctccctctatctctatctctctacttggcgtgggcgtaattcgtatgcaactaatggctaggagcgggcaccagcatttatatccgcggcaagt

SEQ ID NO: 172150 - DNA, 704 bp, Zea Mays
ggcgacagatctggcttcgctccgacctactacgaatacccccaatgtaagtagcaccaatgagctccaatctcttaaagcccacatagatgaacagcgagagcaaatgcaacatatcgtaggggatatacaaaactatcataaaaggctagtgtgtgcgcttgataagtcgactattgcaaatcttccttcgcacgaggttgaactgagggaatacacacgtaattcatcggcaacaggttgtcacgaccaatcacaacccctttatgggatgccgatagacatgtaccctaggcaacaacagcctcccacgcacatcggcgataaatttgccgatacgcgcatgcccagaccgtccacacgtgagcgcgaaccgttcgggccagcggcggtcgatcccatttttagaagcgaattatcaaggcctgcacccaagccaccacataccgtgcaaaccctagataacccattcagaccgtccacgtatgacgccagacagtccgaatataaccccagatggtccgaccacatggccggacagtccatacacgtaaccagacgatccgcgtatttaaccagacggtccggcatagagttttttaaggaggatggatatccaactccgtatccgtcccagctaaactccccatctcaccatgcgacacaccagcaccataatataacctaccaaacatgtgagagtg

SEQ ID NO: 172151 - DNA, 375 bp, Zea Mays
cagccagtgtcacagcgcggagagataaggctggagcagggcggtgatgataatcgattcctagcgcagtttgcgaaacagaatccccaagctcgtggatctcgcgagcccgttacaacgatgacagagattccgtgcatctagtcccacgcggcggcgacgggttgagagaagctggcgggcggggaaggcggagttccatgcggaggttgttgccaggatttgctttagcttggccgaaagctccaacgtctgacctccacggctttctgctcgcgttttactacgaaggaggaagacaaatgacaagcggggcccacacgttagtgacaaagggctgtagtgtgggcggttatgagtctgccggtagggccc

SEQ ID NO: 172152 - DNA, 506 bp, Zea Mays
gcaaatggaaaatttttcacagctatcaagaagatgttactcgacgataaaaagggcaagtgggctgatttgttacctgaagcggtctggcattaaacacgactgagtgcagggcgactgggttcacccctttccgccttctatatggttcggaggccatgaccccgcaagaaataaaacatgggtccccacggacagtcccgtcagctgtccccgacgtggacgagcccacttcgaaggatctcatcgatggagaccgcgtcttcgccctacaggctctaaacaactaccaagcccaaacaaaagcatggcgtgaccacacagtcatcccgagggaattcagtgaaggagacctcgtacttgtccggacagctcggacagagtcccggggcaagctggagcccaagtgggagggccctttcatcgtcaagacgaaggcgtcccccagcgcgtacaggctcgcaacgccatccggcgaggacttggagcattcctggaacattgat

SEQ ID NO: 172153 - DNA, 430 bp, Zea Mays
ctttgtgttcattatgtgcgctctcatttctgcttctatgaccctacaggttctcgatggtgttcagtaaggatttgttcatcagcaatgatgtgttttaagtttctcttctcttgtatgtccacgtgcatcgactcaggtatccatttcacttgattgtgctcctgcctgctctttttggcgaagataggtgccttggaatgcctttacaaaatgcatttccatggtctttccatgttctcatttgtttcatgcctacaagtgccttgtctgtatactgtttcacgctgatttgttgagcaacctgtctttgtatagccagccatctttcaatgagttgcgagtggatgctcatgtcattctcccaattttccttgttgaattttaccatgcctctgtattacagttatttatacattcctatgtcttc

SEQ ID NO: 172154 - DNA, 662 bp, Zea Mays
gcagtgccacccagctgtcgccccatgattggccctaacaaaacgatggggggcagtgattttcccccacttcttcccgaactgccccctcaatgtttctggaaagttttgggacggagcgtgttgccacgggaggacataacaggaattttgatagctggagtaggcacaaaattattatggcttgcatattatatattactagtacttcatattcatatggacacggttaacacacgctcggtcatgttattagcatgactggtagggggcgcacaatcttttttccagtcgtccaccactcgccatccctggtggtgaaacaccgtcttcgttgatgctcatgaccacagccatctctaatctcaataatcttcttcaactctaaaataagtgtttgttttcgacatgacttgggtgctaaaataccgcccacctttcaaccgtctaccatcggtctctctcccataactcagagtgacgtcccccacctttatcgtcacctcaaacttcgtcggtctcaacaaaatctcttttagagaacacaaaacccccaattctgatactacaaaatgttaccaactaacctggttcgaggttgttgtatctactaaacttattcttagaggagggctcatggtcatcagattcgctcagactta

SEQ ID NO: 172155 - DNA, 583 bp, Zea Mays
ggtggatggataacgtcgcggggaaaaggatctttgccgccgatgagctggaggtcactccggtgactcaccgtcatctcccccttctgctttgcggctggtgcggatagctttgccagtgaaccgccgcctctcggccttgtgccgcgtggctttgcctttccaccgcgtcgccgtgactcgctatggctgtccaatcgtcgtcggtgagatcgccacgatggtggacatgaattcatgcgcgccagtaactccctgcccttccgaccgccgcgcattccccattgaaattcctggccatcgcttgcgagcactataaattgagcccgcggctagcttcgcaacatcatcacccacccagccaccgagaatcgctagcaatcgtgcaccagtgagcttgaatttcagttttcccccaaatcaagcttctgccaccctgaaaccaacctcaccgcggccagccccattccagtcagttcatcctcccctctccctcgtttaagctttctcatatgtctacgatgcttgccgaaacaccaatttggactaggggatcaccaatccacgggaacgtgctcatcag

SEQ ID NO: 172156 - DNA, 540 bp, Zea Mays
cgagactcaacactacagctgtatggacggcgggttgaatccctaattaccagggggctcatatgtgaaaagaaccagcgaagaggtatgcgcggatgacgaccgtccgatcaaaaatggacagccacgattagatgcacggtggatataaccctgattcccgagtcaccgtcggatccgagatcgacgcgaggaggtcgtcgacccaagatagcgtgtgggccatttgattgggatctacgacccagatcttattaacgcgaaccggtatcctgattctaatctgagccgtacattcacaaatcagtggccaggtcgcaccctcctcttcccggttgaacgccggcgacaaccagtgaagccacggtggcgcgccatggctgggagaccccccgatggtatatgatgcgccattaaccgatacgctaggtgccaaataaagctaggacgacggcggatccagggagggggttggtactcacaaatggcttgaagacgaggctgtccacgaagcggggcggcttcacggcggacggtaaa

SEQ ID NO: 172157 - DNA, 358 bp, Zea Mays
gacaaacagagagggtcaatcagtgtcttgagacctatcttcgctgttttgttcactcctgtccacgccaatggcccatgtggttatcgcttgtggagttttggtacaacacctatcatcattcatctcttggcaagtctccatttgaagtgctttatggtcatttgccaacacaagtgggactggtcgctgctgaacagtgtgaagttccggaccttcaacagtttctggacgatagacaaaatgtgcttcgacaggttcgcatgcatctgcaatgagctcaagcacgaatgaaaaggcaggctgcagaactgaacgttccttttcagttggtgaccaagtgtttctaaaattgcag

SEQ ID NO: 172158 - DNA, 527 bp, Zea Mays
gagaagttctgcattataaaagagtatccatttccacgataactgtatctgtatagttctgctttaatgggacacgctacagtaaacatcaaagtttagctaggcagtatcctaaaacaaacggaatcagctcagccgtccttttctaagtgaaggagtccaagtgctactctgcaccccccgaggcccgagggcatgcggtcttttgtatggttagaaatgatttgaacgctagtaacaccatgttatgagaccatgtgagcaagaatatttgacaaaggtgcagcaaaatctgcagaactatatgtctgtatggaacatcacggtatgacgctgctaccatacggaagttttccgaaagcttggaatttcaacgacgactgcatttggaaacccaaaattccaacatatattccacagaagcatcgtgcacgattcaatcaacaacagtcatgggcaagaaaacgtaaggaagtttaatcgttggtagagcgatcacagattcataggcgatcgcgacatgcaac

SEQ ID NO: 172159 - DNA, 512 bp, Zea Mays
gttgaagttggggctatatgcctataacaaactggtccaaaattcttcaaacttatatttagcctttacatcgagagaaaatcgtctcattagcctactatagtgctataaaaatatgatagaaatcaggctccattattgctcattgtcacgtcacacgtcatccacctctccaactcctcccatctagatcgcccttcctctactcaaggctacttttgaaactcaaattctctttgaaattgaagaaaattaagggagaaatgaactaatttacccttcgatctcttccaatttcgaaggtgatttgaatttccaaactagcctcaatgaaccatgattccttctctcccattccatcatctgtatctcaattgccatcctcaattcacatacccacgcagttacggccttaatgtgtgctcctagtctctgtgtcttagatccacgttattgttggctaatatctaataaagagtgtttggttccacctaactaaagtttagtctatg

SEQ ID NO: 172160 - DNA, 823 bp, Zea Mays
ggaggttgttataaggtgaacgatttttatataaagagttgggcttgttagtgggaagaaattagagaaaattctgttacacaactcaatggcagtttggtatgggctgtttcagtcaattgagattgagctgtcaacagttggtttttctctactttagggcatcatagtttttgttcaataagtttttagccctggagtgttataccaaagttatagggcttggtttggagaataattttggttaaggaagtctggtctgttgttaaggggaattgtgagatccaagggcttaaacagtgaggagtggaatggagctgcagtgcttttcacttaacctcagagtttggttttagaaactggataagatcctctctctgttgtactccacccatgtgctcgaattgggatacatccctgaaaatctggggtctctccatattgtaaatatccagggtttggactattgtggggggctgtgaacagtagagtccttatccattttgttcactgtctctagtatgggacaggaaggatatttgtgtgttgggcttgttgtgacctgcattttgtgttgggcatccacgtgtattcaccatgcaatgttggcaccttgagagttatctccaccatgtgttgaacaaattcagtgaaccactgctctgtcttcttgtctattgctttagggcacaatctagtgaagagatccctgctctcgagctcttgctggtcccttggtacctctgcagtttgtgttacggtttgagttcccctctcaatccccaggtcgatttgcccttgttcatgtggttctcgttccgtg

SEQ ID NO: 172161 - DNA, 511 bp, Zea Mays
ccggccagggggtcgctcggccgacgaggatggagagaggggtgtggccaggcggtgtcaacaccgacggacgccgacgctcagacaagagcgagagcaacaacgacgactgggtggagaaccagatgttggcacgtggtggtgccgtaccagaactccagaagagcaggaggaggctggcggtggcttgctagaagatatagatcatcagcagtagtagcatcaatgcatcaccatcgtctttcgatccaactccatgcatatatatcatctgatcgaatcttctccaattctagttactcggatttaaatgacatggcacaaatctaatggctgaaatttaaccagacagagagccacatagaaagcaaccatagaatatccgaatagtgagtcagtaaaagaaagccaagttcgtacatgtggggaagaggcagttgtttcccttacttctccacgataactgcagcagcacaaatgttgaatctcttttcgttgagaattgagacag

SEQ ID NO: 172162 - DNA, 493 bp, Zea Mays
aaaaactataaaactctggaatttcgataatacatatatatttcttctacctctcgtcgagcctgttccagatctcgtgccttttttcgcgaaatcaccgaactgcttcttctcgcgaacggcatgctgctcgcggcggctatcctcgtctatccctacctacccctccgacgtctatctcatcgtcttggacccgtgggccagctctgaccgtcttcctctaattttatttaactctgtctaccactcgtccgacttagtctccgtcttaccctgtctcgcgtaatttgtcgcgctcgcaaccgcctctctcactcgatcgcgacacaattaattaatgatgagttcttttctatatactcaccccaccgtcgcataactcctcgtctccctccccagattcaaatcgcgcatttgcaaatggcggttccaggtgagtcctctcctctctcccgtctcgtgcgtcctccctctgttcccccggccgagcggc

SEQ ID NO: 172163 - DNA, 417 bp, Zea Mays
agatgcttttgattccagctttgctaatgaagtgcggaatgtccgcttcggtttggcaacagatggtttctcgccattcaatctaactgcaacgtcctactcatgttggcccgtctttgctgttccatacaaccttccaccagctctttgcatgaaatatgaatttattttctcatgttggcacaaaggaagaaacaattgatgaaatggttgaaaaacttaaagttcccagatggttacgccgcgagttttagaaggttggtgaatttgaagacgggcaagttttctgggttgaagagtcatgactaccacataataatggaaagactccttcctgttatgtttcgtggttttgtaaaaaatgatgtctggaaagcattagcggagctaagctacttttatagacatctttgtgct

SEQ ID NO: 172164 - DNA, 796 bp, Zea Mays
agttagcagagtatcccagaaaatggagatgatggagggaagttgaaacaggcagccatacagtgagccagccagcagtgcccggccggccggcctgcagtgcacgcttcctagcttgcgcagctctatctagctagcacgtacgccactccgactccgatggagctgagctggttgctgccagtgccagcacgaagctaccgccttttctattccatcgcccggcggacctgctcgctcgagcgaatcctgtgtgctacctatccctcgtcgtcgatctgctgcaccacatggccggatggatcgtctattcgccgtctggccggccagtggccattaattcgcatgccgcagctggagtagtttccttgcttccttcttgtcgtcgctacagcggcgacgtgtacctgacctgacgagtgacgaccagtgccaccacggatcgacgacgacctcatctccgtctgctggtgctggccgagcggagacgttgtacagcatttactcctccgatcgatccgtctttttcctccatctatcatgcatatccgtcgtccgtccctagctgcttccggcccggccctgcgctgcatgcggctgcgcagtgccctccctgtgctccctcgacttctcctcctcccttcttctttcctgatagctagctgcggcctgcggcagctactggactgccactgttccactacacccacacagcacgtacgcgcgctgtgcactactgctaccaccctctttgccgagacgtacgggcatttactccacctcatctgcctccccc

SEQ ID NO: 172165 - DNA, 458 bp, Zea Mays
actgtattgggatcaaactggtgaaaggcagttgtttgggcctgagattatacaggaagcagaggaacaagttcagcaaataagggagaatttgagaactgcacagtcaaggcagaaaagttatgctgacacccggagaagactacttgagtttaaggagggtgattacgtctatttgaaggtgtcaccactccggggtatgagaagattcaaagtcaaaggaaagttgtcccctcgctttattggacccttcttaatcttaaagcaagtgggagaggttgcatatcaattggagttatcggatcatcttgcggatgttcatgatgtatttcatgtatcccagctgaagaaatgtctcagggtacctgaggaacaattaccaatggaggaccttagtgttcaagaggatctgacttatgctgagtaccccgtcaagattctggatacattgtctcgag

SEQ ID NO: 172166 - DNA, 591 bp, Zea Mays
caagaatccctaagacacagagcactatacaccggactgcaggtttaattctaaaaacccgaggggctcattagaaaaatagacaccgcgaaggggtatcgcgggatcagggccattggatcaattctggatggctccgattagatctaaccctctcctgaaccggtatgcactaatagtcgctggattaagatcgggcggcccagacattatgaacccctatccaccactcgttacgagatcagtggttcacaccacccggatccaatcccctgatcatcaccattgattagtcaatcaactgtcagattgctccctagcgaactgttacgcgcctacctcaacccaccgcttgattaagatccgacgccaaggagagctcccccaaactcccgacgacggaaagcggcagcccacaccgagcacggcggcgccattgccgaccaggcgttccccggtttatgcgcgctaagcatcaatccaaccggctctatacactacgacaatgaagacgaaagcgctagaggtaaccgtaccggaagtcatgcgtggtggtgggctgtccacagcagttgcggacttcgatcaacg

SEQ ID NO: 172167 - DNA, 1126 bp, Zea Mays
attatctatactctatggtgtcgattctgttctcaaaaaatcaagataaaatcgtatcgatccatgttggttttagtactgatcaataagatattgggaccgagatgtggatactctgctggaaaccaggaacaaatgaaatggagaagatcttttagactggagatcaggatttggagggtatgctctgaagttgggaatgatagatcaatccagagaaagagaatctgtgcatcaaggatttgaaacagaagtctacgacttttggttagtgcagtttcatagtgtatactttagtttcaagaaagaattcagttttttgaaagcagttatttaaatcagttcttatggctcaatgagggccagaaatggaccctatactggtcggagccacatacacagtgtgaggtgcacaagctatgcggaccgtatggtagctacaaccctgacgcaaatgctacgagcgcaaatgctgggagccctgaggattgtcaggtgacttgcttcaacagttgcagctacagtgcttacacatataacggcactagttgttttgtttggcatggagacctacctggtcaacctccaagaacagcacactggtgatggaggaggaaccctcttactcactcaggcttgctgcatccaaggtgccagctgctgcagtgcacaaggctacactcattggtatagttgctagtggagttgttgcagtttttctaatccttcccatgctaactcgaaggagctgctgctgccgccaagagagcgttcttcaggtatttgagaataccagtgcgaggttgaccaccttccggtacagtgatctgcagcacgccactgacaacttctcggtgaagttgggagaaggcgcctttggctcaatgttcagaggtcaacttcctgcaggcccaagctccactccaattgcagtgaaaaggctggatgggtttcaacatggggacaagcagttccgtgccgaggtgtccactgtcggaatgatcaatcatgtgatgaacttggtacgccttcttggcttctgtgctaaaaataccagcaggctccttgactacgaaagtgatactggttccttgtttccatgttgggcagcaatccaacaagttta

SEQ ID NO: 172168 - DNA, 617 bp, Zea Mays
ttttaagtattacctcaccattcttgatgattgctagcaccacctatggtcgtttcctcttcgtcttaaatccgacacgtttccactattgctcatttcttctcctatgttgctacatagtttggcacaaccattaagagcgtacaatgcgacaacggtcgtgaatttgacaatttgtcttcacgtgccttctttctctcccatggcgccacccttcgcatgtccttacacgtcttagcaaaatggcaaggctgagcgtgtcctccggtccgtgaacaacattattcgctcccttctctttcattaccatgcccctcatcctttctgggttgaggcctttcacaccaccgccacttatcttttcaacgccaccccgccaaaaccctctctttctccaccccataccaggccttgcatggtacaaccccaaactgcaatcaccttcacgtctttagctgtcgatgttatccaaacctctccgccaccacgccacacaagattgctccccggtcttccctctgtgtgtttcttggctactctagtgaccacaaaggatacctttgtcttgacctttccaccaaccgcatcatctctcgtcatgtcaccttcgacaagtc

SEQ ID NO: 172169 - DNA, 883 bp, Zea Mays
cgcctccgcgaatcccgcagacgcaacctctccctcatcaacctgcgcgatgtcactactacccacgatcggcgatcccatctcctagcgctcccacatgaatcccaaaaatcgttctccatctgcctccaccaattaccgtagccgaacagttgccggcggcgagtaccacgacctcatctccctctcttcatcctctctcacatcgcggctagggttaggtcatctcaccaagccaccatgatgcagtagctccgtcacagcagggcatggcagatggcgccacctcttacctccgcagtccgccaggcaacggaaggcccaccaggcggccgcgcgagtgccaagcgtggatgggcgtggccaagagctaagaccctaacttttggtgaatctcacggccgcgctctccttcctctccacactctgtctcggcaccgtcccgcactctcgctcacaatgccaccatcgccgctgacgaggcctcgtctccgtcggtccctgttctgcccaccggcagtatgacagatggaccccatgtctccggcggagggaatggcgaggcaaagcataggtaggcactgaacggacccgacacagcctgatccagttaattggtgttgctctcgttctccctgttcagatctaagggttcagtttggttgtctcaggcaacaacggtgtcacgaacgcgacatcgaaggtgaaattcttttcgcgttcaactaatccccctatgtcattcgatgataatcccttgcttactttggtaatggtttggctactgcacatagactattgttactctgaatgttgcacagcgtcttcttcgaagaagactgggttgattcggctacaacatttaaatgcagctaacccttgg

SEQ ID NO: 172170 - DNA, 771 bp, Zea Mays
ctcataaggctacggaggcaagcaactttgcactacgagatttaatccattccgatttatgtgtgaagtactggtgaggcgaccagaggggtgaatgggagccactgacgagaacagcatcgtgactttgatcctaacttcaatgaaactccacgggatgattgaaactgtgtaacatagcaatactcagtcaagtgttgactgaatataccaaaatgttacacaggaaactacccaactatctgcaaaatctcaaattcaaaatcacacagcagggcgaggggaagtgtcgcactgaagagaggtagtgtcggcaggcaaaactggccagaatctgctaaaacttcacagggagtttgcacaaagggaaagaagatgaatcctgaagtttcacctagagcaaataaaaaacacatgcgcagagcagatttctcgatagggttggggttttgttggagttttctcaaacgaactcaaaatgagatcatctcggatcacaaccaaaaactgtaccaatagggcgtatgcggtgatccaaagagtgattctcaccccacaactatcctgaaacccaaccacaactcaagaactcgatggttttccacaaatctgaagggagaagaaagggaagaacgtgagaacaaaatcgactcaaaacttcagcggaaacaaaactgagtgaacaagtagaaccatccaagtggatggatctggccacccttcctttgaatagagcagtgaagattacaaacacagacgcaagtttaaaac

SEQ ID NO: 172171 - DNA, 503 bp, Zea Mays
agggacttgggctttaggtggatttcttccttcgagctgagcttcaagggctgcaatcctagcatgtgcttcttcaagttctccatgtacccttgagagatctagggtagcactgaccaggtcagtgttaagacctgccaccacatctacaagggtgttgaggcgatcttctccagcttcacctggaacaacactggtttggctttctccacgaagacgtagaggaagatgtatgtacctcgtgtcatgcagcagctactgataagtgtggctgagagaccacagagctctcctggcagcattgttgaccgaagcagcgtaggtagatagtggcgtcagagcctcatgggctgatagagtcctaaaacctctatctcctgcatccatcaccctgatatgcacgcaagtgatgtagtaacaataccgaggggctcagacacttgtcttgtgtcatatagagatcggacgtaggtacctagcgcatgcagtacatcctgcaacag

SEQ ID NO: 172172 - DNA, 621 bp, Zea Mays
tagctcccattaaagtttcccattgggattcctcctacacaccacatccctgtgatcctggctgcagatacagcacctgccactccactgacactcggcacgacgatgcgcttcaccacaacggaaacacaccaaccccaaccaatgcttaggaatagctcgatacctctgagtactccctcctaaagtacccaattcagaggacttgccacgataggggtcgtggcgctggtgttgggactttcccttcttgtgggctggagccccagtgtagcccttcctcgcatcatggccacatggctgatccacacctgaagacttctgagattcaattgtgtactgaggctgcatctccacgcccaatgcctgctccaccatagttcgaaaatctactagtggaaaggcgcccagagcatgcctaatggagggtttcaggccctgatagaattggcttgccttctccaattcattgtaggccacatgaagaacaaagcggaccatcttgttaaagcccacttcatattttgtaaccgacttcttctcctgcttgtaagactacaaatctatcttcatcttctccaggaaagtgactgggtaaaatctcctttcaaattgcctgat

SEQ ID NO: 172173 - DNA, 424 bp, Zea Mays
tctgatatctccaaaaaaagaagagaaaagatgtcgtgtcaagctgagtcatcaatgaatttctacgtactaaagaaatggaaagggaacgcactagtgttatgctaaagcgaaaatctctatagaaaagacaaaagcttctaggatcttcttagggaagcgaagcttccacttacttgctcgtcttcagcgtcaacggatgatcgatggatggtcggtgaatggtggtggtagaaaatggcagcatatatgcaggaggggggctgtgatagtacaaatcatccaagacatcatggatgactggcgagtcttacttttgtggtttcgccttgagccgatgccggattcccttcactttgtcttgagatcagcagcttcatctcgctgtcagaaagccaaccgtactacccacgatgcatatgca

SEQ ID NO: 172174 - DNA, 610 bp, Zea Mays
gttccgcagcctctccttccgattgcaggcacggaccgcaatcccgagtgcagacgaccctccctggttcaataccgaagccatacgacactccctatgccgagattcgcaggcggcggcgtttttcctgcccttgccgtcacagatgggtgcggaccggcagggaagattctctctctcaccctctcgcgattcactctttcttggtgtcgaaattgttgagcaggaggcgggcccgattgaaggtttatggggaacccaatccggccatgccgcagcaatcgggcgagctcacccacgaccgcgctgaattcgcgagttaggtgacgggtctgagcaaccggacccactggtaagccaaacaagaggagtgtggttgcggggtcggttgactggtgagtgggtcccacgtgacagtgacccgggccgagggggagaccgcgcggagtctgcttgaccgggcccgcatgccaggtgcgcgcgcggtggagtagaatttgggctgcgcgcagtgttagtttcctctagtgggccgaaatggagagtagtggcccatcttgcttttctttctctttttcttttatgtttcttttcccttttatttttaaat

SEQ ID NO: 172175 - DNA, 527 bp, Zea Mays
agtgggaagtgataagggaaaaagaactcatcaggctgctcataacatctttgggaagtggaggggtgaatcctcctccatgaaggtccccaacaacagtgtcgtgacgaccttgacccaagcctcaacctcggccagcctaagaggatcgggggaatggtggtcggggtcattgacgccggaatacttgtacaagtacttcagacaggccatcagaggttgaacccgacgttgcataaatgtgtgcactagccatgcaccagtgaggccttgttatttcaacgtgtcgaccacttttagaaggtgctccaccttgctcttgaagtgcgcctccatgccataatgccacttgtatgtcaacatcggctcccgtctggtgaacgacggagcgctgccagccacattcttagcatagaaccactcgcctcatatcacacaaaggagaggagcaggatcttgaaatactctgcattctggctgaagcggagttggatgttggccgagccgacaaacaattgtctgccaca

SEQ ID NO: 172176 - DNA, 721 bp, Zea Mays
aaaaatgctttcccctttccttctctcagaagtcagatggaggtccgctgccaaaccagcttttgctagaatgaagatggtttccccaagttgttgagagcatgcacagatcgcctcggaatcaggagccagccagattatgatggtcgtgaatttgtcgagcatggcatagagaagtgtgtcgtgactgtatacattggatccagtctgcaccatgtggaatggagtgtcactgctgctgggcacagattcaatgacacctgccaagtcgtcgcccgcaaggcattgagggccctgtgtcagatctatgaagaagaagtggccgacacaccgctcagattctttccgccctttcagagagaccgtccagtttggatggccaggatgtgtgcattggaagggaagcagctgcttgaggatgaccccacagtcgtgtacctcactgcatacctgctcaccctggatgcacagtatgatttcttatctcggcaccaccgtcagatgattgcccgagcagaagatgcagagaagcttaaccgtcagctccatctggatctcaccacagctcaagcccgtgcaactgcattgaaaagtcgtgaagtcattgctgttgaagccctgaagcaagccaaggatgagcacgtccagaagttgatggaggcctacttggtaacccataaccaacgtagagccctgcggatccaagaacccgcttcatcca

SEQ ID NO: 172177 - DNA, 752 bp, Zea Mays
acggatagtcttcgtggtagacttaaatttttcgcacttgttgtgctagtccggctgcacccttaggcgacttctgcacggatagtcttcgcggtagacttagatttttcgcacttgttgtgctagtccgtctgcacccttaggcgacttctgcacggagttgtcgcacgcgagggtggctagcgctgagcctcgcggtgactttgtattggtcgaatgtcgaagaccgtcgtcgcggtcttttttcgacgcatgtttttgcgggggatttttcacttgtatattacacgactccgcctcgttaaaaacctcaccccccgggaggaaaagagtgcgggccagaataacattgtttttgccaattacaagggcgaatcggccctgatgagtcaaacaaaaaatttgcggagattgtcgatgttccaggagtgctccaggtcttcgccttttggcgttgcgagcctgtaagcgctgggggaagctttcgtcttgactatgaagggaccctcccacctgggctccagcttgcccctggactctgtctgagctgttcggacgagtacgaggtccccttcgctgaattccctcgggatgactgcgtggtcgcgccatgcttttgtctgggcttagtatttatttagagcctgtagggcgaagactcggtctccatcgatgagatcctttgaagtgggctcgtccacgtcggggacggctgacggaactgttcgcggggacccatgttttatttcttg

SEQ ID NO: 172178 - DNA, 759 bp, Zea Mays
cgatcatcagatatataaagaacgaagaggaatcagatgacaaaaatacagccgagcgcattgctagacagtcagctcactacacactcattggggagacactgtacagaagaggtgcatcaggcgtcctcatgaaatgcattctctcatctactgggaagcaacttctagacgagatccatgctgggcagtgtggagtgcatgcagcatccagaaccctggttgggaaagtctccaggtcatgtttttattggccaacagtgaagagtgatgcagccgagttagttcagaggtgcgaagcttgccaatacttatcgaagcaacaacatctaccagcacagcaactgcagaccataccagtaacttggccgttcacatgctggggactggatatgattggacctttcaagaaagctcagggaggatacactcatgtgctggtggctatcgacaaattcactaaatggatagagttcaaacccatcgcttccttaacctcagctaaggccgtggagtccatacaagatataatattcagatttggcataccgaatagtatcataactgacttggggtccaacttcacaagttcagagttctttgatttttgcgagcagaaaagcattcagatcaaatatgcttcgttggcacacccaagagccaacgggcaggttgaaagagctaacgggatgatattagaagccctcaagaaaaaagtcttcgataaaaataagaagtttgcagggaaatggataaggg

SEQ ID NO: 172179 - DNA, 456 bp, Zea Mays
cccgcgctcatgcaatacctcgcggctatccgaagtctcgagagacagttcaagggattcaccctacagcatgttgacagggccaagaacgaggaggccgatgcattagccaaagccgccgccaggggcgagcccctgccctccgacgtattctttcacaccatcggcacgccagccgtccgaagccccgaagggctccaaataactaatgatagcgagggccaccgtatagtcaacctaatcatgaccgaagactggcgggccccaataaccccattcctacagggatactatcacccaaccgacgccagcgaggcaaagcgcctcaggcatagaagccgggacttcgcattgatcgagggccaattatacaagaaaggggtcagtcagccaatgcttaaatgcatcaccgaaaccgaaggcatgcaaatcctgagcgaagtccacagtgccacg

SEQ ID NO: 172180 - DNA, 776 bp, Zea Mays
gtctgactatctatttgagataaattcgggcaagggtggctcctccaaaggtagtttttactggaatgaaatgggctaccttggtgaggcaatctattattacccatattgagtcgttccctttttgcgtccggggtagtccggttacaaaatccatgcctatttcttcccacttccattcaggcacggggaggggttgtaataggcctgcaggtttttggtgctccgccttcgtccgttggcaggtgtcacactgggccacatactgggctatctctttcttcatccctctccaccagtacctggttttgaggtcaaggtacatcttggtagttcctgggtggatggagtaggctgagttgtgagcttcctcgagtaggacctctcgtgcttccccttttggtacacacagacgatttttgaaccaaagggctccttgttcgtctgccctgaggtccgggagttgtcccttgcgggccttttccacaagtttcgctgtctctgggtctaggcgttgagatttgcatatgaggtcttccagtattggtttgacttcgagactgccgctgtttcccagacatgtattcagttgagctgattctttcttccaatcttctaaaaagttggttccctttattccgaatggttttcgactgagggcgtctgctaccacgttggccttcccggggtgataatgaatttccaggtcataatccttgatcagctccaaccatcttcgctgacggaggttgagatctggttgagtgaagatatgc

SEQ ID NO: 172181 - DNA, 286 bp, Zea Mays
ccgcgggcgacgagtccgccgtcgacctggaggcggaggaggggtccgaggcaggccggtcgtcgttctctggccttcttcagagagaggagtcggtcggcagcgtctctgatctaccagatgtctgagcctgacggattcttttgtttttgttgcctagagatgcagttttgagcagtgagggtgggtgtaacttgtggtggtgcctagtcaattgtaagtgtgttgtatagagtgcattgtgagttgtgactacttttgttgatatacacaagctgattgttac

SEQ ID NO: 172182 - DNA, 978 bp, Zea Mays
tcgttttaatctcgaccgtctatttcctaatgtacggacgcctggtgtcttcaaccacaggccgtccaagcatggacgccgcgccctcctggcactctctctctcgttggtcaaccgaaaaggggggtacgtcggcacaggtggaaagcttaccggaatctagacaagccggctgtcaacgtcgcgtgcagagctgaccacagaagatcggggcaaccaagcgcctagattcgccggggttgatgcgtcggtttccaacacggtgatgtttcagccgaccaccgccacaggggagacaccgcggaacgcttctccgcctaactccacccaaagccgtacacaccgggaaaatacaagcgcatagcagacggcctgccgacacccacaccgtggcaacctatgctctcgctgctcccctttctctttctctcgacggtgcgaacacgacgacactacgcgctggatcactctattcggccgagacgacaactcccccggagctccagttatatggcgagttcggaaggtagtgccgatttctccggcaacggctttgaccagcgccagcgttgtagacgcatgcgaatcacgcgtggttcgcccgggtcagttcgagtggagaagacgcacagtgccagcatgaggggcccacatggcggcgaccggggcgagtccgtgctgcgcgcctgagaaaaccgagctggggctcaccgatcagtgagaaaccggaagcaggcatgtgtggcggcggctaggatttaggatggcgcgcaggggatcttgggccggtggcatggtttgggccgcgcagattaaaaggaaaaatgggccaaaatggctagaagtggcccagctaagcctttctctttatttttttccttttcattttcaaatccaaaatttgaattcaaacgtttcagaagaatttgtactcaaattaaatattcagtttgaacatattagtgggatgaatttgtt

SEQ ID NO: 172183 - DNA, 1916 bp, Zea Mays
cgctgctgccggtctcgtcagtgtgggcccggctgcgctgcggcgaggaacggcggcgggcggagggggaggacgaggacgaggaggacttgggggaggaatcggagtcagagtggtcacccatggcgactgcggcggcgacgacagatctgggccgggtccgggtgggggatctgatcaagccatcgggcatcggctacgcggtaacgcgggggagagcagcgagtccggtgtgtcctgtactcctattcggtggagacgatgggttgtgggccacgcgcccacgccagtcccggcgcccaggatgcgttccgcctgcagctgcagcggaggatcgtggagagcgagcttacacatgggccccaggtggcagtgggagagttggcgggtggtgatttgtcaaattggtgctggccattgcgctattgtcagcgactcggcgacctagggcccacctgtcggtgaccgagtacgtgctcggtgccgcattcatgactgcgacgggaaagccagtgccgtgcgcgagcgatccgagcaagagcaaccgagcgggacggtgggagactgggaggtgctccatctcgcgcgccttccatcacaaggatctccacgcgtcgaccatccgaggtgctcgaggatcggggtccacgtgaacccaccggcaccttctgcagtttctgcttcctagccctaggtcgaagtcttctttgatcaatcgagtcaatcagagaagttgcattttgttgtcgtctcatcaggcaggcgatctgatcggcgacatgtctgaatgtcgtatcggactttatcgatcatctccacaggtattatatactctacttcccattgaactctagaggtgttagtgattttttttcagatttgccgtcgaacagtttggtgtagtaaaatcggacggcgttgttggctttgttttctggactttgagttttttacttcagtttggttgttctccccgatgtagaaatttctgctttgcatccatttttttggggagggtttgtgtgtttatgatactagtaacctcatcttattgatgttggtcttatgcctttcccttgtctagtgccatgccttcctcttctctagtgcctgagccctgaagtgaccaatattgtcggtggtttaaccatgggaggaggaaacgaattcttggtggggatgaccggctctgctcctgattctgcccgccagaagcggtgtcacgacactgccaacggtgaggtgcgggacggcgacactgtggtaaagaacgggaagacgtccgatgctgcctccgtagagaagagggagaaaaaggaacatctgtttaaatgcagtgcctaccatgggaaggatacggacatgtggagtggcgaccagaggataaacaagagcagggtgcctgccgcattatgtgagcagggaagggaaatggatgatgacctgaacaaaaccaacagcaaggagaggatgatgggtgttgaactggacaaggaaaagacgattacatcggatgactgcagtaaggttgagggtaagaaaaagttcaacaccgcatcccctgaggaggagaggaagaagaaacctcacaatgccagcactgggaagaatatgcaaagggatgatgacaaggaggtggtaaggattatgagtaactctgatactaaggtgaagatcaagaaggtgtccaccccattacctaagaaggagaagaataaggaaaagctaaacaaaacctaccgagagaagaagatgcaggctgctgacagcaagatgcggagttgttacagtggagtgaagaaggggaaggtgcccacagcattttgtgataaagaaaagaaaaggaaaatgcctgacaataccagtagtgagaaggagactgcaccaatcacacctgctgttaaagagaagaaaat

SEQ ID NO: 172184 - DNA, 299 bp, Zea Mays
acacaaagaccttagaggcttagagacaatacactattgcagagtaacctttgtgtaatttactgtcctaaattgaaattcttttcattgatcctcttccgccaatgcatgggagaattattagtttgctaccatttgctttgtccttgaaattttcttagctggcctttgactgtgaattcaatattgggaattcattgttttcttagatgaaggtgatgactgctcgcttgcttttattttttggttcttctctctgccatccaatgtcatgatagatattgatcaattaatgtttc

SEQ ID NO: 172185 - DNA, 755 bp, Zea Mays
gtacgccatacgaagtctttacggcaacacatctgcacaaaggccccccaagggtgcagccgaacaagccagcaccaccctaatggcgcaaggtacgttacaatcgctggaatccgacacagtcgaacaaaaccacctacggatacaaccaagtacgtgtcttcgacacccacacattgtcgcggcaagtgaagtccccatctcacttcacaacaaacaatgtcatagtttacatacacacagcaaagggccacctgccacattgcacaaataaatacctaccgcattttgttgccctccctcttcatcgggagccgggggagggcagcgttttcgctcactaccgcaatacaagagcgagggcagcataaacgctacattggctcagccttcgggataaggcccgcctcatgaaaattaaacaacatcatcctcaactcctcaccctcaaaaagactccacaaatccccctccccaatacatgtcccgaacgatgaagacagcaaatcttgttggccatcctgatctacccgaaggtgggttcgctccatccccatccgacgacatctaccacttcgcgacataccaccaacattatgcttcgccaccacccttcgccggcggtactcctcggtcttcgccccagccgggggatcgaatgcttcacgcgcttccagccgcggcatggattccgtcgcggccacatctagtgcagcaaaataatccaaatcctcatccgaagactcttcccaaac

SEQ ID NO: 172186 - DNA, 484 bp, Zea Mays
gaaatgccgaaggagaccatcaccaagtctagcgaaggtgaactggtctagctgaagtatacattcaggtatggggataagtttgatgaaccaaacgatgactggctaaaatgcatcgaacttacaagtgatgagctgcttggagcttattccaaggcagaagataatgcactatctatggcctttggagtttggggaaaaaagagaataaacagagtttttgatgccatcagcttcgtctaccccgactatcaatacccgctgcggggacaggggaaggagagaaaagttgttgctttgaccgccccagctgagcctatgccgaaggctgcgggcaaaaagatgaaggtacttacccaccggccgcgttatattgaaccggctgtggtgccttagtttggcggggaggcctcttcagctgctgaatcaagagaaattgttgctcccatgcagaggactgaagagccgactataatgccgaagg

SEQ ID NO: 172187 - DNA, 872 bp, Zea Mays
gtcctgagttcatccactactagggtcttggttaacggggagcctggggatattattcatcacagaagaggtcttaggcagggagatgagctcaatgtgctaaaggaaatattaaggatttttggggaagctataggtcttgtcacaaatatcaacaaatgtagcatcactcccatacactgtaatgatcagcaagttgacatgtcccaggagatctttccttgtaatgtgcaaaagttcccttgtagatatttgggccttcatttgtctgtgaagaagcttccaaagattgcctttcaagaacttatagacaaggtggctgacaaattgccagggtggaaaatctgccttgatcactaatgctggaagactgaccttggttaaagctgtcctcactgccattcctatatatcatcttcttgtccttcaatgccctaaatgggttatcaaagccattgacaagattcgcaggggtttcctctggaagggcagaaaagatatcaagggaggccattgtgttgttggctggacaagggtgtgtagaccacttaatgttggcggtttgggtattcacgacctggaaatccttggttgggcactcaatgtgagatggctctggctcagaaaaacacaggctgagagaccctggactgagttcgacataaaagtacaccctaatgctgaagctctcttccaggcctcggttcactcttctgtgggggatggtgctacaactctcttttggacggatagatggattcaagggtagtctattgcagtttttgccccctatccgatcagttgtattccaaggagggtgaggaaaggccgcacggtgcaggaggctcttgctgaaaattgctgagttcagg

SEQ ID NO: 172188 - DNA, 676 bp, Zea Mays
cagacgatgaacgtgagggggctcagcattgctcatgtaaaaagtcacttgcaggtaaagcagattattagaaacaggcctacatctcatgactacttgttgcttgctttcctgactgctcatgcgtaccttggcttttcagatgtacagaagcaagaagctggaccacgagtctgctggagctggacacgatagagcagccatctactccggttctcatctcaattctctctcccctcccctcccctccgcctccccccacccccgcccccaaattttagtttagttttatctactccacagaagcatactgcacacgtacatagaaaacgccatggactactgcatcatttccttaaccatcgctgctcaattttggcagttttcaagcccatggatttgcacatgatgatgaggagaggagaccatcgcttccacgacatgtttctccatcgagctgccgctgccggctcggtcatctcctccccgctgctccacaacggggatttattcgggtcacgggacgccgtctcgccggaggccagcaggctctacgcgctcctccaacgccggcagcagccttcctccacgcaaacgttcgccctcatgaactacagtagtagcctgatagatatgatgtacttaatcaaccaccagatcgaaatgaagaacacca

SEQ ID NO: 172189 - DNA, 676 bp, Zea Mays
agcaaagccagaagcgtgcatccccactagatccatcaacgacgggcgagtgaggccaagcgcgataattattgatgttgactctgaggttgtcttccacctcgtcgtcaaccaccgtatggtcccatcagatccaatctagtaccctagcacgggatccttacgagatctcgcttcagcttccatggcagatatgagtagccgaggcaaggagcgaagccagaggcatgcatccccaatgggtccatcaacgaggggcaagtgaagcgaggtcaagcacagtaatcgttaatgccggctctgaggttgtattccacgtcgccgccaaaagctgcaaaaacctgatcacgattcgaggacaaagcaaaagccaaggccaaagcaacaccccaccatgtgggcacgattcaccctagcgagcacaagcatgacaatggccatccggcacccgcgaagccatctccaccactcctcagtgcaagaggtcaaactggagctagccagcgacgatatcaggttaggtgccctggcattgagccgcttgcaatgtgtgtttgaccttacgagaatatgcgtgaagaacctatcaggtactaagccaaaatggaggcaactctagcctctactaccgcccaccacacaaaaatgttacatttttgcaaacctttatgttagc

SEQ ID NO: 172190 - DNA, 580 bp, Zea Mays
gtcgaagactgacgggccccaataacactatacttgcaaggccactaccatccagccgatcacaatgaggccaaacgactaaagcacatgagcagggacttcgcattaatcgagggtcagctgtacaaaaaggggatcagtcagcccatgctgaaatgcataaccgaaaccgaaggcatagaaatcctccgcgaagtccacaacggaacctgcggctcccactcaggacccagggccctcgctgcctaggtgattcgttagggattttactggcccacaataatttgcactgccaatcgagtcagaaggtcatgcgaagcatgccaaaagttctctcctcgctcaggccacccttcgcaattcaccaagctcatcgcccatacatggccacttcaacgttggggttggacatcgttggaccactgcccactgctcaagggaatctcaagttcacctttgtcgccgttgaatattttaccaagtggattgaggccagggcagtctccataataacctcgaagactgcccaaaaaatcttctggcaaaacattgtctgccgcttcagagtcccgtccgaact

SEQ ID NO: 172191 - DNA, 547 bp, Zea Mays
ctcgagccttgatcaatttctgggtctgcaactgggtgccgatgctgagccattcgatgaagccggtaaaaatgtggggaaccgtttcttgggttggctctgggcagagtttgtcaatctccttattatcgttgagaggctgatgacatactctggcttggtgtctcacgagggcgggttgaatgctaacgtttttctattaatggtgacatctataacattgacgagagcgtaaagatgtcggctagcatgttgtttgaccggatgtggggggcctttggcttgaacgtcgtgctggagcgggcgagagatggaagaggtatcttttacctttagtctcccctatatataagggatattgagagctctagacttctaataggtacaataagccttagccaccctctggaccgcatccaacaaccagagtgtatgggtctggtgtgtcctctgtcatgcaccaggtcaaacctactcatgtacgtgtgttagccaaatctcctggtccaacacccaactcccacgtgggatacacgtcataattgtg

SEQ ID NO: 172192 - DNA, 884 bp, Zea Mays
tagaacgtctgtccagatgaggtgtggtggttgatggagtgccccaagccatctggttgtcgctcagaggaggaagaggtagacacctcctatcctgccgatggggccaagacatgagtggtaatgccctagagatgtgtcgtagggcaaggcataccaggtgctagaaaccccatgtgtacagtgcatggttatgcatcctggtagctagctggtctaagggtacgttgatgaccagggaccttgagaatcaggtacccgtaatggatcactgccatgaacatgtggagggcagggcctcctaggatggcgttatagggcaggcggagcctagccacatcacaagtgatgaatttagtgtgttggttgttgttgacactgaatgtaatggaaagtgttacctacccaatggtgtgtggatatgtcatgggatacctcccatggaggggacaagaatcgagcagtagcatgggagctgtagccaccaaaatgcacggactgatagaacattctcccttactatgctagccatgaggatatgggaggtcatggtgtcgatgtggtggtagtgaccaggagcaggaggacatatgcccaacgtaactaggacggtcggagatgttgaaggcgatgggggtagcggtctagttgaggcaaccacacccctgggaccttggcacaatggttagctcatcgagtcgaggcaaggtgtttgtatgacctaccttagtaatgggtaggccacatgttcgttggccacgatggcggtcgctaccagcacttaagggtgcttcgtgccttgctgctagagctcatggatcgtagcgtttgacgataatgaaggactaatgaggcgacgagacgggagaatgagagccacaaaa

SEQ ID NO: 172193 - DNA, 585 bp, Zea Mays
ccagcttcgagcttcggaaaccccatacttctggccatttcccggcagacagataattctttgttgtctgggaggcaatacaagaaatcatcttcatctgtaccattaaacactaaggcccctttcgggtacttcagttctcgggcatagtgtttagcttcaaaaatttcttcttcagataatctttttctcgaagaatgtcaaataatataaccaaggtctttggaaggtgcttcgggagtaggagcggtagctttttcaggcaaaatctgttctatagcttcttcctccgctgccttttctccaatttctgagggtttctccttggcaggctctgaaggctcagcttcggtgctagcctggctcattgtagctttggcttcggtcagttttgtttcagtttcaattggcacttttgaagccttggcaatttccctggagtagagcttgaagcctttaccatctccagcacatctagtacactagccatcctttttctcttgggggtcgccgcaagacctttttgtgcctttggcattgtcacttctatcgaagggcttaaaacttctaatgtttgtgttccct

SEQ ID NO: 172194 - DNA, 394 bp, Zea Mays
ttcggcttgggccaaagctttcacatgatcgcaacctgacttctccaaaatagctgcaattccccttgcacctgagaaggcgcagacgtccccacgatcactcaagatctcctcaaaggcttcagcctcgctgctgatccattcaattgggccttcgggatcgccccgtacgaagttgtcttcacttgaatatgcgccaacattggcgaagctagtttttatcctttcacacattctatagatttttcataacatctttcttttgaggagcgaagttctacaactgttttttcccaataatttttccagtaatcactggcatctcgttcagcttcggcaacaacgcattttaattttgcttcagccagttgtttctgaatgtcttcgatttcac

SEQ ID NO: 172195 - DNA, 490 bp, Zea Mays
ggactgacgctggaaagtgactaccatcaattgctcctatgcaatccttgaagtgtggccaaaatctcgcctctcgcaaacgaggatgaatctcgatgaaatttgggtctttgggcttgattatgtcagatgacatcttatacagtgcattaaggacttcactatacttgcgactaattatttccaaggagtgaccaaacttattccttatctgcctaaatgattgtggacccccacatgcccacaagaaaatgcctagagcttccatagtactgacaccccgccttggaagcagaccataattttccaccaacgtatcatgcaatcgtctaaaaacagttcgtcgcatgcgaaacatgtcgaagcagtcgttactattctccaacgttctctcaacccattgaataccagtttcaaccattgttcttctaggaacctgactgaaaggcctgccccaaatgtctacatcatatagagcaacaagcaattc

SEQ ID NO: 172196 - DNA, 858 bp, Zea Mays
ccccttcttccggagctgctggccaaggcttcacctcaaatagcgtgcgccggggtcttcgccactaatccctacctccatctccgcaatacccgtgggtttcggctgttgaattgggagctggtcgcagtgcgcttacgtcgtcgtcgtgcgccgtagcagagagggagagagagggaattggagagcccagcgcccccaccaacgcctcgccttgtggaatcaccatcgagttcgcctggagaccaccggcaacgaagacaattggaaggctgagcggaattccacgttgtcctcgcccgccgccgtacaattccaccgcagccgggcactgcatcaatcaggcaccgattcatggtatggatcacacccatcacgttcgccttcctctcaacgtcgtataggatcgttcggattgagtcttggtggtgaatttgggctaacagcgtcggcacggctgcaaatcgaggcctccgccatgggcagggatctgtgctcgatggcggatgcaattggttgaggaattagattcagggagtcatcgatttggcaagggttgagctaattggagaatggtgctcgggatggtcggattcgcagtcccgacgatctcgccgccgcgcggtggctttgctctggtgctctgctgctcggggtagacgatggattagagccgcccgtttgatgatgtgtggttctgattagaacacgtgtacccgttgcgcgattcgatcccgaccgatggatcgagatcggatgggttacatcagaacgagcttaatccaatatgggtcgtagatctcgtatcctgtggtcataaatagatatcggttcagcgcggttgtggatttaatctac

SEQ ID NO: 172197 - DNA, 714 bp, Zea Mays
ctgaggtacgggtgggtgcgctagatgcctgaatacatagcgaagccgatggcgcactcaatttataggctccgggggcggtggcatccaatttcacgaagaggtgctggcggccggaggggaagaaggttactggcgcgcaagcttagtggctttcaccatggcaagctccccggcgatgaacagacggctaatgcgagtcacggtgatgcgatggatgtgccaaggcacgtggcgcaaggccgtgaagcgactgtttggtacggtggccggagtaaaataatggccggagtgtttccacggcacgatatttactgacccccggcgctatccaactgatctgagcgcgaatcacggtggcgaaagcacaaatccgcgcgcggctcgtcggcggtgaggcacctgaatctgatcctatccggttactgtaccatcgggttgttcttcagttaacctgacagaccaagtttggcatcgattttctcctaaatttacatggcaagttgttgatcggccagtagcaaagttgttttctaatgatccatctataaaccgtctgtggtaaccatactcaaacatccatggaatcatcttcaaaatgacccccaaagttcatctcatgccactgaataccatacttcaggttttagacagactgacagcccaactttgggcccagttttctctcaactttgcataacaacaatgcttaag

SEQ ID NO: 172198 - DNA, 642 bp, Zea Mays
ccatatgttgtggctcgggtgcatgtctcgataactcattaaaaataggcccagtcatggctggcccggacggtccgcgctcacatgcagatggtccaggcatgtgcagatcggctgatttactgccgatttgcggttgctcagggtatgtgtccattggcatcccataaaggtgttgttactggtcgtgacaacctatagccgatgtattacgtgtgttaccccctaattcaacctcgtgcgaaggaaaatttgcaatactagatttatcaaatgcacgtactagtctcctataatcgttttgcataccccctatgatattttgcatttgttctcactgttcatctacatgatttttaagagattgtagctttttagtattacttacattggggatatctggtgtgggtcggagtgaagccagatccatcgttcgttgtcagacgactttattgttcctgtctaccttgaagttggccaggaacttcgctctcgcctcctgaatcagctgctccttatgctccttgaagtggagttgttcgtcaaccggcaaggtttcctaagtcggctctataatgttgctgggggagacttcagaactatcccttaaaccggccattgagggtcgatttgataggtcta

SEQ ID NO: 172199 - DNA, 487 bp, Zea Mays
ggggcaagcgtgtggaagcctatgtagatgatgtggtaatcaaaacggagaactcagaaaacttcattaaggacttgcagctagttttcaacagtctacggcggtaccgatggaagcttaatcccgaaaaatgtgttttcggggtaccagtaggaaagttactcggatttattgtcagccaccggggaattgaggctaatccttataagatcgaagctataatgaaaatggaagcaccacggtcacaaaagaaggttcaacgacttactggatgtatggcagctctgagcagattcatatccaggctgggagaaaaaggtttaccattttacaagctactcaaaaaagtggataagtttcagtggacttcagaagcacagaaagctctagatgcactgaagaaattcttgacgacaccaccagtgctgaagccgccacgacgagccacgtcaactcaaccagctgaagatctgctattgtatatctc

SEQ ID NO: 172200 - DNA, 1341 bp, Zea Mays
cttgctgtggatcgttggttgttgctggagagtccgaaaacagccgcagctcaatcactgctcccactggtaacgttgacagcataccttgctgagagacataggttccctgataagggatagtaatccacttgtgataccaatcaatatgcatgggactataatgttgaagccaatccatgcccaccactaaatccaccgaagggagaggtaaaaagatgaagtcggacacgaactggtaggtagccatagaccaagttgcttgtggaagatgttgagaacaagtgacgatctgtccattagccactctgaccgccattgggcgttgcaatggttgcgtgcccgtcaacaacgacagaaatcggtcgctgataaatgaatgagtcgatcccgaatcaataagtatcatcaagggatgctgttgaatattgccctgaaaacgcaatgtggagactgcatctttccctgtccatgctgcatcagacagggtcatcaataattgaggttgagtgtcttgcactgtctcactgtcatctggttcatccagcaaatcccacacctcttcaataacttgtagttgcacagtatttggacatttgtgtcccctgaaccacttttctgcacagcgatcacagagaccacgagcacgccggtaacttttcaatgaagccagacgatcagtagatttacccagccgacgagcgtcattcaccggcttgtcaactcctggagtcacgccatcaagtcgatcgtgatcagccggcgcggtgggaggaggccaagccatccggttggaaataggctcgacccgtcggcgtcttgtggattccaacgcctcttcctgcacaagagccagagcgcagacaacatcgaggtttgggggacgttgaaccataattacagctttaatgtcatgcctaaggccatcaatgaaacacatagtgtaatacaatggatctgtgcgtgactcataagctgccaactcgtcaacgagagatgcaaattgttcaacatactcagacacaggacctagctgcctgatatgaaacagctgtctaatgagagattcatgttgctccctaccaaatctctcatgaatgagctcacaaaattcttcccaagacataaaacataatcgacgctctactgactgcaaccagcgataagcctttccctcaaagtgcattgacgccactttgacccacatgtggtattctgtttcgtacatctcaaaataattctcagcttgaacgcgccacagttgttggtgtgaaccgtcaaagcgaggaaaagtaatttgtggtaaacgaccgggtgtcgatcgtgctatgtcgcgtcccg

SEQ ID NO: 172201 - DNA, 770 bp, Zea Mays
gaacaagtacatttccttcgaactggtccccagtgatctgaatccctttcagtagtaaagggggtcccagactaagtcacaagcaacggaactcgacagatagagtttaggaagcaagcgtttaagctataatgaggttcaggatcctaggtgtgcagttccaagtattaggctacttgttacagagtggtgcagtatgcaggcttagggtacatgaccaggctaagcggctacatgacttcggaccaccccaagaaacagacaccttttcttcggagctagcttcctacgatccaaaaatccctttcagcggtgaaggggcgccaaactaagctacaagccatctaactcaattcggatctcggcatagcaacaagagtaggaattgcatggggttggaagaaataatgcttgtaagttgaaacgggaaagaaaattaccgcaaagacagaactgggggtaaatatttcctttataacttgatacacatgagtcgtgcgatgaacgctagggaccaggtttatgaggttagaccccacgggctggaccacacatatgtgtgacctaaatataaaggaagaaactcattccctgtcctcttgttacagataaaacttacaaacttgttccatgttttgtggattgggcagtgacatttctttatccatgacgaggcgtacgcatctgggttggcatacctccatcaccttgaagggcacctcccagctgggggagagtttcgagagcccttctcagatcaagaagctctg

SEQ ID NO: 172202 - DNA, 630 bp, Zea Mays
gcaggactcctctatattgggatcaagttggagaaaggcagttctttgggcctgaactgattcaagaggtagaagaacaagtctgtataattcgagagaatttgagggtagctcaaaccaggcaaaagagctatgctgataatagaaggagaccactggaatttgaggaaggagattatgtgtacctcaaggtgtcaccacttcatggaatgaggagattcaaagttaagggcaaattgtcccctcgctatattggaccattcgtgatctttaggcgagttggggagatggcataccaactcgagctacctgctaatctatcggatgtgcataatgtgttccacgtgtctcaacttaagaagtgtctccgtgttcctgaggaatagttaccaatggaagagctcagtattcagggtgatctgacttacactgagtatcctgtcaagattcttgatacattgactcgagttacaagaaataaggtgataaagatgtgcaaagtataatggagtcaccatggagaggatgaagcaacatgggaaagagaagaagagcttcgcatagatttccccaaccttttccctagatcttcctaaatctcgaggacgagattatttttaaggagagtag

SEQ ID NO: 172203 - DNA, 372 bp, Zea Mays
gataattcttgcagaccaacaagagcagacaaagctggagaaggaatatcgctactccccccactgactctgtaacgccgactgttcttctgaattaaggggacttcctcttcttcttcttcgtcctcgtcaacaatacggacaataaacggcacagggtcacacccattgggatcagctctggcagggtcacacccattaggatcagcatcagcaaggccacacccattaggttcagcatcagcaggaccacacccattgggatcagcatcagcagggccacacccattgggatcagctctagtaaagagtaacactggtacttcttcagcagcaggagcagaaggcccagcatcctggtccaaacacgac

SEQ ID NO: 172204 - DNA, 831 bp, Zea Mays
caattcataaggaattttcctagggtcaatacatcaaatttgtagagctcctaaaggagtataactttgtttaagacatcaggcataagtgttgtacaaaagttggagttaaatggactcaaagtctggctgttagtcgactcagaatatgaaatcttactaacagtgacttgggatgagctttgggagctcttttgaagatgatccagtgagtgtttgagcatggctactatagcaagtttgtagctggattatagggctagaactttgttatagagagacttacatgttaccacacaaaaaacggagattaatgacctgcaaatggccctgtcagacagactgaatggtgttctgattgtacagtgactaaataagatcacaggttcagcccccctcaccgctggtgacctcgcacccagattcacgttggcgtcgcgattcacgcccggtcgaacatggataacgctccccggtgaaaaaacgggcactgaggatgagcttaaggcactgttccgccccagccaccgtgttcgcttgactcacgaccgattcagataagctcaccggagttaaccccctgccgctcggatgccatgtgcctagacgtagtacttcgtcacggtgactcgctctagcatgtccggtcatcaccggtggtcaggccacggtgaaagccaccaatcgtttgcgccagtgctctcccctctctcgatccggccgccagcgcgccattccaaattcacgagccaccgcccttgggccctataaattgagcgtgccatcagctccgcttggtagtcaagcattcagcgcacccactcgtgtctc

SEQ ID NO: 172205 - DNA, 656 bp, Zea Mays
accaaatcaatttaagaataaaagatccactaagtttatatctaaagaatcatgtctaaatcaattgaggttttcaaaaaagggaaaaaattgttgaaaccctaataccaaccctaattaagctatttaagtagaaaagaagagaagggatgaaagaccatgaaaaacttgaaatcatggcttaggccaattataaaaattgaaatacactaactaagctacaataaagattataaaagtttggccaaaatagtttgttaaaaactccaaacaagccattcaagtggtggttcaatggggaaatctaaaattcagatttctgaattttcagcctttgaaccaaaaccgagcacgttcaccttgatctctatctcaaaactcttggctcccattgataaaaatgtgtctaactaacccctctacctcataccagaagatggcattgggacgcatgctctggacacgtcaaacctgggatcttctctctgtgctcggcagtgagacaaagccaacttcaccccctccatatctcttgatctagtcagtaaaacctgcaagcctccacacacaaacgacaaaggaatgtcaggggaagagatctctcaatgggatcatggccataatctcaaagatttggagccaatccgcgcttgaac

SEQ ID NO: 172206 - DNA, 550 bp, Zea Mays
agtggaaataaatggattacccaactaaataactaactttattaataactacaccaagttgcaggggacacccacaccttggtgacaatcattacaaagatccaacttcagtacatgtccatcataacaagcatccaacataagataagcaaactaactctaactaaaactgactagactaaggcactgaactaagcattattacagactccgactctgtcgatctagggatccaaatctatccgggtcctacagtctggggtaccatagttgaagcgaccacggggcggtgaacggtaaaggtgctgaatcctgacaggggcaggagaaccaccatccagatagtggcatgctgcgcactcagcacgcaattccgcaacctccgcccgaaccttgcccaactcgtcaggggcgtggtccaactctgtgttgagcacgacagccaagttgaccatgttgttcagcctaggattgccctcaccaactggcgagacaatcacatctccagcactgccgatcgaacgacgagggtagtacttcaggtcgaggc

SEQ ID NO: 172207 - DNA, 437 bp, Zea Mays
cggaggtgcggggaggtgggtctcactcccttctttgccagcttctccttctgctcctaggggaaaccctgctccaatcccggaggtggtagacgtgattttatccgaagccatctgccagggaaaagagttactaccatgcacatgctaattttttttcaatcaagtcattttattcattacacaagttcattacagcatacaactaccacaagttcattacacgcgagtgctatctaaggtactcccgaactccttctctaaagtgtccccaaattccttgaggaggtcatcaaggctagctagggacatttcctcggtgtcagccgagttctctatcctggtaggaggtagggctggaggggcttcttccttctgctcagtctggcatccttggcttctggtcttcttgcagattttcttagcgggggcgagct

SEQ ID NO: 172208 - DNA, 420 bp, Zea Mays
tttcccagatccttgcgaagcattagattgattttgcctaggatatgggcagtctttgataaaatgtcctgacttgccgcaattaaagcacccagttgaagaactaggcaaggtagggaatcgagtgcctggggcacccggctgctttggggtagtgggagtattattggggcggataatgataggctgtttgaagggaaatgaaggtggacgagaaaaagggcgattttggcttgagggtcgaatcacaaaccgtggtttcttcgcctggccctgattaggccgctcaccaccgaatcccttgttcttcccagaagttgtgtatttggcttccacagataaggctgtgctgacagcctttccatatgtgaggtctatgcatgtggccattttcctttgtagccgatcattcagtccccg

SEQ ID NO: 172209 - DNA, 420 bp, Zea Mays
ttggtttctgtgcagccaattcatccctaggatgacatctagcccttgagtacccattaatactaggttagcggggaaacctatcccccttctttcaatccttagatttaagcacatcttatctgactggagttttcccccaactaaattaacccttagaggtggaatcattggttctacgggatgttatgtgcttctacccatgatgtagaaacaaaataatgcgtggcaccagtatcaaatagtacttttgctagatgggattcgaatgggaacatacctactaccacatctagtgcatcctggattgtttcagcctccaagtggttcaccttcccacggttctaggcctggccacgaccccctgatgcttgttgtggtgctccttgtcttgctggggtcttggaaactggttgttgc

SEQ ID NO: 172210 - DNA, 751 bp, Zea Mays
ctgggattttgcgtgcatcctttttatgtataagtgtatgtgtgtgtatgaggcgtcgattgaaccacttcttaatttgagccattatccttgttggtagggtatagtacgcatgctttatacgtgagtgtgagcatgtaacaccgactttagccaatcccgacttaagccaattgctctgttagcagggtatagtatgcaccctttgctttgtaagtgtgagcatgtgacactgacttaaccaatcccgacttaagatgattgcttcgttagcaggctatagtacgcaccctttgttttgtaagcgtgagcatgtgacacagacttaagccgattgctcccttagtagggtatagtatgcgccatttgttttgtaagcgtgagcatctgacactgacttaggccgatctgacttaagctgattgctctgttagtaacatgtgagagtacttttgtatgtggagataaagtagaagctttattgagaatgaagtcatcgaatttcaagtggtagcctactatctagagtttatggtgctactatggataaaacttctttctgtgctcaatgttccatgagttccctagcgtagtaccattcatctgagttagtcgatatgaaccgggccaagttacttctgcaattatgaaaggtccttcctagggtggtgatagcttgtgttgtccttctcccaattgtatgcggcggagcactaggtctcctactgcgaatgttcggtgacacacaacc

SEQ ID NO: 172211 - DNA, 643 bp, Zea Mays
ggcgcatccatttactgctctgaaaatcgcccagctgttcatggattctgtttaccgcttacatggtctaccagaggcaatcatctctgaccgtgacagaatttttaccagtacattttggaaggagctgttccggctgtctggcacagtgctgcgcatgagttcctcctatcacccacagtcggatggccagaccgagcgggttaatcaatgtctggaaaccttccttcgctgttttgcaagctctcacccacatcagtggcgtaagtggctgccgctggcggaatattggtataacacttcatgtcattcttccctgggcacttcaccatttgaagtattatatgggcgttcaccccgcagtctgggagtgtccacctcggacgccgttcctcatgctgatcttcatgaatggttatcacaccgccagctcatgacacaaactgttcggcagcacttgctccgcgcccagcaacgtatgaaatatcaagctgacaagcgccggacggatcgtgtttactcggtcggtgacatggtgtatcttaagctccaaccatatgtccagagctcagttgtcgcacgtgccaaccacaagctgtccttcaagtactttgggccatacaaaatattgcagcggattggc

SEQ ID NO: 172212 - DNA, 1165 bp, Zea Mays
ggtaactactccttggcagcaaaaagcattaaccaagcttatggggttgaatttcactattgtttataaaaaaggagtagagaacaaggtggctgatgctttatccagacgaccaaatctgcactatgatgatataaccttgcagctacatgctttggccacttcctctgtagtaccaagttggttggctgaggttaccaaagggtatgagtctgatgaacaagctaacaagttgttgcaatctctggctactggacattccatggaccctttcacgttgacagctgggattattcgacataaaggcagagtgtggctgggacatgattctgcattacagttgaaggtgatgaccgcccttcatgacagtgcagtcgggggtcactcaggtttcccagttacctatcgacgtattaagtctgtgttcagttggcctggaatgaaaagtcaaattaaggagtttgtgagtacttgttctgtttgtctccaggcaaaaccagatagaagccgctatcctggtttattgttacccttgcctataccagagcatgcttggcaggtggtgaccatggatttcatttcaggtctacctacatctcatcggtataattgtatcatggtagtggtggataagttttcaaagtatgctcattttctggcattggcccatccatttacagctctgaccgtggccaagctatatttttccgaagtatacaaactccatggattaccttcttccattgtttcagacagagatcctatctttacaagtaaactttggcaagagttgttccggcttgctggtaccaaactgtgtttgagtagtgcttatcatccacagtccgatgggcaaactgagcgtgtgaaccaatgtgtggaagcttatctcagatgctttgtccatgcctgtcctcgacaatggtattcgtggttgtcacttgcggaattttggtataacaccagttaccatacgtctcttggtaaatccccatttgaggtcctttatggtcacacgccttctcaattgggactcgaaccaacagagcagtgctcagtacctgatttatcgacttggctgcagactagacaacttatgcttcaacaagttaagcttcatctgcaacgtgcccaggatcggatgaaaaaacaggcagacaaaggg

SEQ ID NO: 172213 - DNA, 501 bp, Zea Mays
tatttgatactggagcaacacattcatttattactgtatcatgggtagaagcacataatcttccaataactaccatgtcaacccccatccaaattgactcagccggtggtagaatctgagtcgatagcatttgcttgaatgtaagtgtggaaataagggggatagcgtttcccgctaatctcatagtaatgggtactcagggaatagatgtcatcctagggatgaattgactagataagtaccaagcaattatcagttgtgataagaggataattaagttggtgtccccactaggagaagaagtggtagccgagtaaatctcacctgagccaaggaaagaaggttgttatcagatggctattgatagctaggagccagattcactcgagattatcaaggttgtgtccgaattcccagatgtgttcccagaagacttaccaggtatgccacctgagcggaaagttgagtttgccatagagcttcttcctagcaccaccccca

SEQ ID NO: 172214 - DNA, 545 bp, Zea Mays
gggcgacatgctcacgaacaaagtgatgtgtcatgcagtatgcaatgacatgatgggcagcgatgaacatgacgcaaacaagtagtcacatgatgggtcgctcacgtatatggacatactatgcagagagcatggacaaggcgagcgacaacgaacacgacatagacagggagtcacatgatgggtggctcttatgggtataagtgtcgtgcagggcgtgtcaacagggcaggtgatgacaaaaacaacgcagacagggagtcacgcgatgggtcgctcgtaggagtggacgtgtcatggaggatgtgtcgacatggcgggtatcaatgaacctaacactaatagggagttatgtgatgtgtcattcttgggaatggacatgtcatgcaggacacatcaatatggtagacaatgataaacatgaaatactccttcaataatccatcgatgaggccatgcaagtcgagcttgagctcattgttgataaattaacggcattgagtggtgttgctaaccttctttctcaccttcaccaagacgagctc

SEQ ID NO: 172215 - DNA, 1080 bp, Zea Mays
gttttatcaactatcaggactgggcctcaaatacagggaagcgcaggggttttctcgctaaattccaacagactcagccagccaccaggatggagcgcgggttgattacataataatagaggggttcttttacaaaactgcagtcgcgaaggggtatcgcgaagtcctggccgcccgatccgaaacggacgcaccagattagatccaggcgagttacacatccgcgttcaaccctagccgtcggatctggaattcaaggccctgatttaatgactcgaaggggtacgccaggattcgatctaagccgtccatctaatatctacggctcccacactctcaaccatccatctaatcgtcactgttgaagatgagatcaacgatccaccgtcattcttcaacctcaagcctcccaggctgtgcaccacccgcagcggccagcccctctctccgacagtgcacagatcgtcgccccgcgcacaaccataaaaacgaataaaacggagcgtgaaaaggagtctcaccgccggtgaagtgaacacggccaacgatgtcgctggtaaagcgtgcggttcaatggcgcgcggtgatgccccgaccgaaatcgcctctgtgcgatacagagaatcgccgagtcctgcctcttggccctgctcgcacgatacactccctcggagtgcgatggtgaacctcgccccacttcccccctcctgcaactgcaagcgccgcagcaacctgtggtctgcttttcctccacggtgcgccgggattactaggtaggagcggtggctgcaaaggcttttccctgcaacgatgaccaggtttatagaggtaggcgaagctggttggcatcctgcagagcccggcggaggttggagctgtttgacgagtcacgcgaagcgctaaaatcgcgcggcacacacggacaagctgctacgagcgctgaccgggaagatctacaagacttcgtctgacgagtgggaccgcggtgcagcgaaacgcacgagccgcgcgtagaaaccagagaggcagacggtgggccccgcctgtcgggtacgtgagcgcggaagcagcggcgtgggc

SEQ ID NO: 172216 - DNA, 334 bp, Zea Mays
gaaatcttaaccctgctttgaagaagcttttaaaaaccaccacttcatcttttttgggcttcggggtaacttcctctcccccgaagcgaattagctccttcttgtcttcgctgaaatagcctagcttcaataacttagccatgtcaccctcagtaatagtagacttcctaaactctaggtggctgggtttagacggcatcgcaccgtactcatcctcagattcattttctacaatgtcagcttgttttgcttcggcagcagatacatcctctgatgttgccagcccagaccgcctcattgcttcggaaataggaacagtttcagtggcttcggc

SEQ ID NO: 172217 - DNA, 760 bp, Zea Mays
aaattaggatttaaaatagagaaaaagaaagaaaaaaagataaggacatacctgcgtttgggccgactccactccctcgcggcccacttactcgcctcccacccagcccaattggtcactcccgcacagccgtcttctcatctcttttggcgtctatgacttgcgggacccagttgtcagcttcttcctcaacagaacaccgtgaagaccgctgcgcgctcacccgcgattgccggggagttctgctggccgggtcctttctttccccctcctcggacttccctggcttggggtataagaccgcagacatgtggaccccccagctcgagagcctcttcaccttgttaatcagaacggattttgcggtcatcgcatggttgttacggccagattctggtcgagatcctccctgggctataaaagccaaagccgcatcccctcctcgactcacaatccatggtcgacgttgcgctccctgggactctcttggccgccctccatcattgaccagcgcgcggttgccatggaagacctatggaggccaccgacaccatgcgtgcagggagagagagccagggagggccgccgtcggagatctccgcccacagtggcgaatcatcctcggcgcttcgaccgtgggtttcgccgcgaatctttggagcatccatgaagtcgccagactcggagtgttgattcgcgcaagtaatttctcgccgtcgtacaacctccgccatggatccgctcattgccgtggccagcc

SEQ ID NO: 172218 - DNA, 409 bp, Zea Mays
ttcttgtaggttctcagttccttagggagggtttcacagccttaaacagccgtttcaccgtaaccctaaatcctcgcacaccacatgctcggtgaaatgcccaaaccagccaaaaatgctccaattgaacccaaatttttcaggcaccttgccaatacctccagtaacatattcgccaaatttcacgcccatccgatgttctaggctttaatttcaccaaattccccgtttcgagagatcgtttctgagccgagtgcccaaatctcattttcttcgcctaaattcaaaccaagcacacacttcactccatttcacctatataaacctattcgtgaagtatcggctcaattccatgtcatttcgtgcctcaattcaaattccaaacctcatatggctctatttatcgttc

SEQ ID NO: 172219 - DNA, 539 bp, Zea Mays
gccccctcgatttcagagcacccttgaggcctctcgccttgtttttggatcctatcgtcctgctcctgagattcctgtgccagctactgcttctgtgtttgactctcaggccgaggatgcagctcttcgacagtttgacactcagggtacagcggctgatgatgatgatgatgatgattttggggttcctcctccgcctccgcctcctatgcctccacgatcacatgatcatgaggctgggagttctcgtgctgcccctgctcctcctccggctatggaccctgctcttgcgacgattctggccaacctggcagccgagcaggcccggttatccgagacgatgctctcgatgtttcagagcatgcaggacaggcaggatgcacttcagcagcagctacttcaggatcgggctgagagtagggcattcatggcccttatgcttcagcattctggtatctcagcacctccagttcagtctgctccacctcctccgcttcatgctccagtggtgccatcgattttgtcaggaccccctgttg

SEQ ID NO: 172220 - DNA, 327 bp, Zea Mays
caccttgttgccacgccgagtgagacgggagtccagcacctcttctgggatctgcactgcctgtgacaggtcaggaataacagaactgacaggagtgttggcacctatcgccggtttaagttgtgaaacatgaaagatggaatgaatagcgctgttagcaggcagggcgagctgataggcaactggattgattttcttgacaatctggaatgggccgaagaagcgaaaggccagcttgtggctcttgcgttctgctacagaggtctggcaatacggttgcaacttcagatacacttgagcacccacatcaaatgtacgctctgatct

SEQ ID NO: 172221 - DNA, 543 bp, Zea Mays
atttaatccattgtgatctgtggacttctcccatttatagtgtgtccggttacaaatattatcttcctggtcttgatgactgctcgcattttctttggacatttcctcttcgccttaaatctgaaacattcactaccttggctatttttttctcttatgtgaagacacagttcgactgcaccatccgaagcattcaatgtgacaacggtcatgagttcgacaactcttccactcgcaccttctttctcactcctggtgttttgtccggatgtcatgcccctacacgtcctcccaaaacggcaaagccgagcatatgattcgttccattaacaacatcatttgttcccttttatttcaggcctccctcgccccatcctattgggtcgaaggtcttcacaccgctacatacctccttaatcggctacccaccaaaacccttaattatggcaccccctatttcgccctcttcggctctcaccctacctatgaccacctccgtgttttcggttgtgcatgttacaccaacatgtccaccaccgctcc

SEQ ID NO: 172222 - DNA, 601 bp, Zea Mays
cgtcttcgtcgagtgtctagcttggatcaggatgccggtccttctgttcctgctgctgaggaagtgctagtgcctgcatttgctgaagctgaccccaatgggtgtgacccgactgctgtggatcacaatgggtgtgacctagatgacattgaacccaatgggtgtgatctagccaaagctgatcccaatgggtgtactgtccgcgttgttgatgaagatgaggaagaggaggatgaaatccctctaattcggaagaacagccggcgttacctagccagcggggaaagcagtggtgttccttctccagctttatctgccctcattggtctgcaagaattatctctggcgaattttgatcagactcttgaagacatggtcccagaagatctgttgtcagagccagcagacggtggcatgatggatgtttgcactgatgtgcatgatgctaggctggagttatctcgggcggcgtcccgcgcctcatcgaccttggagcgcggtcttaagggtcaggaggctggtctagattgttctgctcccatggaagtgggtgaaggtccttcagctttagaggtggctgttacagaaagcttgaccctca

SEQ ID NO: 172223 - DNA, 727 bp, Zea Mays
aagaggagcacgtactggtcgttagcaagaagctaaacgttaacaaaatgggcccacgctcagcgtgtgcgcgaccaccacaggaacgttaaacccctaaaactgcagatttgacttaatagacctcgagcaattcacacaaattcctcgagggctgcatctagcagatgcgctcgcacgcactgtacatcagtcttaagcagaaagcaagaagctaaacaataacaaaatggacccatgctcaacgtgtggtaaccaccgaagggtcaacccctaaactgcatacttaacccggtaaaccctaagcaattttcacaaattcgtcgggggctcgggggctgcatctagcagatgcacttgcacgcaccaaggaaaaccgcccttcaaataaaagcctctacacaactccaagaagttgcgtaaaggctcgagggttgttgttgggtgcccatactaagcccaagaaatccctgtcaagcaacctcgcgagacggagcaggcgaccaagtccctgccgagcacccttgcatagcggagagtgtgaagtccctatcgagcaaccttgagaggcggagcggacgaccaagtccctgcaaagcaaccttttctaatgggagttcttcgtttctaggttgttcgcttcggattaaaggctattgtttggactggtgctaggaatatgggctgggcttttcggaccagcacgagcacgacccgaaaatatgag

SEQ ID NO: 172224 - DNA, 496 bp, Zea Mays
ggccgcagtgcctgaattcagcggtgaaaaatcttcagctactaaagccgacgaacctacccccacgcaaaagattgaagaaccagctacaatgccgaagattaacaaaattaaagaacctagaatcgaagaaacaaaaatatcagaagttctgagcccttcggcagaagtgacagtgccgaaggcacaaaaagatcttatagcgaccccgaagaggaaaaggatggtcaatgtactagatgtactggagacgataaagagttcaagctctacttcagggaaaactgccgaagcttcaaaaacgcaggctgagacaaaactaactaaagccgaagctgcaaagagccagaccaggactgaagctgggccttcaaagcctgccaaggagaaatccttggaaaccggagaaaaagaaacggaaaaagaagctgcaaaacaaattctgcctgaaataactgtcacttcaactcccgaagcatcttccgaagtatctgat

SEQ ID NO: 172225 - DNA, 668 bp, Zea Mays
ggcttaaaattcctaacacttctgttccttcaatttttggttcttccaccttattttcatcggcttttgactcatctagcacggatgaaggtaccttcggcatcgtagccggatcctcagctttctgtgtaggaggaataggctcctttggtttagcagctgaagaagtttccccaccaaactcgggtaccacggccggctcgatatagcgtgaccggtgggtgagaactttcaaccttctgctcttcggcgtgggctcatctggagtggccgaagcagcagttttggccgaagcagcggtttttctctttcttcctcgtccctgcagcgggtagcagtaatcagggtaaacaaaaccaatggcatcaaaaactctattcaatctcttttttccttggccccgaaggatgtggataatgcatcatcttctgctttggaatatgacccaagtaattcatcacttatagattcgatacatttcagccagtcgtcatttggttcatcaaatttatctccatatctgaaggtgtattttagtcgaactaggtcaccttcgcaagacttggtgacaacttccttcggcatctcccaattctctgcaagaggccataccctgaatgctatatgttcttgaattaggtctcttgtaccaatgaagaagcatacag

SEQ ID NO: 172226 - DNA, 559 bp, Zea Mays
tcactcgctctcgcctctcgggttcactcgcagtcgccgtgctcacgggctcgccgccgtcatctctctccacccgtggtgacgacaccacgcccgcggacgagctcgatctgtcgatctactttcatctacttcgcaaggtaagcccctttcttggctgctcatctactttcatctgctttatcttctcatttgatttcatctgcttcgcaaggatcgctctcctacgacctcgatcggttctcagctgcgagcaaaccctagccgtgtggtctccctcttctcagattagatcgctctcctacgacctcgatcggttctcagctgcgagtgaaccctagctgtgtcgtctccctcttctcaggttagtacccatctagatcttctcttctcgtttgtcctcctagttccctcgattactgatctgtgatcttctcgtttgtcgtaaagttcttgtctttgtttatatatctgattagtatacttgccttgctgatctgttgtctagtaccaaactcttgtctttgtttatatatttgattagtatatctgattagta

SEQ ID NO: 172227 - DNA, 351 bp, Zea Mays
aactttgatgtagaaagcgggaatgaagatgccgaagatcggccctggagaccaagccatgttgtcttcgggaaatcaactatcaagcaagggaaaattgatgcaatgaggggaaggtacttccgtgatatctcaattgtgagggctggaggggaaaataatgtccctctgcccgaagctgacgaagtagtagtttatagaagcttcatgaaagcagggcttcggttccctttagataaattgctggtcgaagtcctgaaaactttcgagatttaccttcatcagcttactcccgaggctatcatcaagatggggatctttatatgggccatgaggagctagggattagaa

SEQ ID NO: 172228 - DNA, 479 bp, Zea Mays
gttagacttgtcctggcttgcagactgagctagtagagaagaatgctagaataaccttgcttgagaaggctagctcagtgagtgtacatgtacatgctcaatgtgcactctatgagggtttgtagttcgctttttagtcctgtagagatgacaacactaggatcaaagagaaaaacaaataccttcgatcagtcttgagctgggtgtctagcattgagccccagttgggcatgatggtcagtcagttcaagaggggaactggtggaccggggttaagctttgttgttaatgatgggagtgatgctcgctttggtacggctggtgagtgcagtggcttgacttcattatagaaacatctagcctccccaaagtttgtcaaaatcaccccacctaaatctgcaattgatgttatgagagatggggtttttgtggagcctgtgagagccccatctcagaaacatgtgtggtgtccaaaacca

SEQ ID NO: 172229 - DNA, 763 bp, Zea Mays
caaaggggtaagatggaatctgagccgcccgatccagaaccgaggacccagattaaaagcccgctacgacgaaccggtacgtattgtgtgtcgttcgatcagggaccaacgcccaggatttaaatagccgagagagaatcccgtacatccgattagatccaacggtcagactctgacacatgaagggggtacgcgacgcacgatcacatccatccatagccgaatcaacggtccacccatcttcttccttaaaccatcccgacggcgacaccgctagccctaacggcggcgccatgaccagcgaatccgccaccgcgcctgggtgcactaattgataaagtaaaatgcgctaaacgactctaatgccagcgcgaatcgaataggaggaaacttaccggaattggtgcgatacagactactggccacgggatggccatgatccgcggcggagttcccccaacggcgagaaattccggaggccacaagcacaatccgcccaaggtgaggcttcgcgcaccctccgtgccaccgtgcgaagttcctggtgcggcgtttgagggtgtagaggcggggtggcgctgtttcgttggtgatggccgaagtcttgcggcggttggctttctcgtggtctctcggcaagctgggtcctggttttctgctgctgtgcgatcaagaagggagagggaaggggaggactcggcaacccatttatgtgccacgaacaaggggccaacgaacacacgggttcggatcggctcgaatc

SEQ ID NO: 172230 - DNA, 728 bp, Zea Mays
tattaaggatcaagcaaccaggaaaactctactccgcggtaggagtcacaacggcctttatccagtgccaatttcctcttcgccaccagatcatgctgccttgtccagtgtcactgctcgtgctgcttctgttcatctatggcattatcggcttgggcatccgtcctctagtattgttcagtctgtcattagctcaaataaattggcttccacgcctcgtccattgtcactagtttgtgactcatgtcaacgagctaagattcatcagttgtcattcaataaatctactcatgtcacttatgctcctcttcagcttgtgcacactgatgtttggggtccagctgttacctctgtaggaggatttcgatactatgtcagttttgttgatgatttcagccgtttcacatggttatatctattgaaacaaaagtccgatgttcagcatgctttttctttatttcaaacccatgtagaacgtcttcttgatacaaaaatccaaactgtccagtcagattgggggggagaatatcgccccctttctcgctatctcagaagtcaaggtattcatcatcgtattacctgtcctcacacgtcccagcaaaacggcattgccgagcgcaaacataggcacctcgtcgaaaccggcattgctcttcttgcccactcctcccttcccatgcgtttttgggatgaagcctttctcactgcctgttacttaatcaatcgca

SEQ ID NO: 172231 - DNA, 1096 bp, Zea Mays
gaccgctgatgtgcttgttcggggcgacccatgctttatctcctgcggcgtcatggcctctgatccatataatagacggaaaggtgtgaatccagttgcccggcattcggtcatgtttaggacccagaccacttcaggtagttggtcggcccatttacccttcttgtcgttgagaagtcttttcttgatggtcgtgaaaatcttgttgttggcgcactcgacgacgccgttggattgaggtggtatatcgaggcgaaggcaggcttggtgccgatggagaggcggaaatccctgaagtcctggctgtcaaactgtttgcagttgtcgattgtgagctcagacgggactccgaattggcaaacaatgttttgccagaagaacttttgggcggtcttcgacgttattgtggatactgccctagtctcgatccacttggtgaagtactcgacggcgatgaaggtgaatttgaggttcccttgagccgtaggtagtggtccgacaatatccagcccctagtgttgaagtggccatgtgtgggcgatcagcttggtgaactgcgaagggttgctcgagcggggagaaaacttctggcatgcttcgcaggacctcgtgttttgattcgcggtacagattatcacgagccagtaaaatccttgaaggattaccttggcaacgagggccctgggccctgagtgggacccgcaagttccgctgtggacttcgcgaaggatttgaatgccttcgtttcagtcacgcattttagcatgggctgactgatcccctttttgtatagctagcccttgactagtacgaagtcccggctttggtgcttgaggcgtttggcctcattgacgtcacttgggtggtaatatccttgaagaaacagggttattggggcccaccaatcttcagtcatgatgaggttgatgatgcggtggccttcagcgtcgttggttacttgtaagccctctgggttgcggacggctggtgtgccaatgacgtggtagaacacgtcagagggtaaggtctcgcatctagccactgccttagccaacgcgtcggcctcttcgttcctggcgcggtccacatgttgtag

SEQ ID NO: 172232 - DNA, 471 bp, Zea Mays
gtcacatttgctgcgtacagctgtagtacgtacgtgaagaacatgtgaattgagataggaaaatatctcgtcaacgtcgttatgcttgttcgcttggcttctattatattactccaaaacgaactacttgttcatgcagctggtaccggcaataataggtggcttgccatctgccaaccactcgctgctgctgctgaatacatgaatggcatataggaacaataaatatgagatatacttttttataatatacttgttaagcaatatgatattaatattctttatcgatctatttagttagatattagtcattgcaagaagaatgtaccttgcattcatgattcagggtgaccgagagagaggggtattactagtaggaatgcaatcaataagtgctggactatacagaacatgttatattatactaatgttgacgagttattagtcgagtcaagctatacaaatgcaatt

SEQ ID NO: 172233 - DNA, 654 bp, Zea Mays
acttgcaggcatttacggagctgggacacatggaacacattgtgaatatctgacatggattctggtagctcaagacggtatgatgcgggtcccactctgctaatgacgggataagggtcgatgaaacgcgatgctagctttcctttcttttggaaccttttgacaccacgcatcggggagaccttgaggtatacgaaatctccttcctcaaatctgagttctctccgtctgttgtctacataacttttctgtcgactctgagcttcaagtaacatcttgcggatcaaggcaactttctcttcggcttctttaacaaagtcgggtccttctagtatcctttcccctacattggaccacattaggggggtctggcactttcgtccatacaatgctgcgaacggtgacattttgatgctggcctgatggctgttgttatatgagaattcggcatacggcaaactagactcccaatttctgtcgaacgtcaacacacaagctcttaataaatcttcgaggaccttgttgactctttccgtttgaccatctgactgggggtgataagcggtgctgaaatctaacttggtgcccatagcttgctgaaggctcttccaaaattttgaggtgaactgcgttcctctatctgacactattttc

SEQ ID NO: 172234 - DNA, 643 bp, Zea Mays
ggacaatgttcaaatacctataccgatacgttcatttgaagaggtaataactttaacaattatattgatttgcggttgtacatacaaatgatttattggtttgtgttattggcttacgattgaccttaaaaatgtgttggtgggtacaagttaatttgtaggatcacacggatatgaatgagagtgctgaccatgaacaaaatgatcatgccagaaaggtaataatggtattagactaaatgtgggactacataatattatgtgctgaaaaatatatactgttgaattgcagaaactggattttgtagtcgatgggataagcttggcaagaccaaataactcaaaacctaaaggaagaacaataaaggggagtgaacaaaaggttattagattgggagcaaaaggtacaaagaaaatgaacaggaaatgccagaagtgtggaattgctgatggtcacaacagtaggacatgtttgtcattggaggagaatagattacagttggctagccttgctggacgtaagagaggacgacctccttgatctaagaacaaggttggacgtaacgctcctcattggaatgagacaacaacatcaaaaaaacacgcaattgattacgataacagtgagtcaggcagtgattag

SEQ ID NO: 172235 - DNA, 605 bp, Zea Mays
ccaagttaagcgaggtgggataattctgaggctcacatggtcgccgtccgactacaattgggccaactgggccaattgcgtctttgccaatgggtaatagtggaggatgtcctcatcattcccaccttcttaaaatgggccctagctttgataccagatgatacacccagcccaggtggggttggccgtggcccaacaaattagggttgcccggagcccaacagttcattaagcacacccaactcagggaaaggctcaatcgccccaaaagactagtccaatgggggaagggtggctctcccttttaaagtggcttcctcctcccaagttaagcgaggtgcgataattctcaggctcacacggtcgccatccgactacaattgggccaactaggccaattgcatctttgccaacgggtaatagtggaggatgtcctcatcaagaagggggtgcgggcctgccatgcacggcatgcggcgtgcgtgtgtccggcgcaaaagaggcagatggggcggttgggtgggcgaggggcgcgtgcacgtgcgtaggcgggggagggtggagtcatggtagtgccgtagtctacactattgacttaataagta

SEQ ID NO: 172236 - DNA, 273 bp, Zea Mays
tgcgtagccagtcgtcggcatcgaggggattgctggatccagcgaacgtgggaggcttgagcctcagaaaatctcccatcctgtcatgtggtcttccaccatttgggtgctgattctccaaacttctcgtgaggacttcaatgagtcgggtttgattggctagaacttgggctaaatctaatggcagtttcggaggtgcggggaggtgggtctcactcccttctccgtcagctcctccttcagctcgtagggaaaaccctgctccaatcctgg

SEQ ID NO: 172237 - DNA, 551 bp, Zea Mays
cgaaagtaagacttgtggggtgtcgtcccatggctgctgcatcggtgttggtaggagcggggtgcttggatctaggaggaagatcacggggcatcgcgtagatgaaggaatcaccggatctggtctgcgctgtgtcctgaagggcggcgggtctgcgtcgcgaagggcagagggccgctgcgtcgcgaagggcggcggcgctgggtgacgaggagtggcggcgctggttcgcggagggaggggcaggtgaatattcaggttgtttggattaggagatagggcagtctatttggtgcaatatatttgtggcactctaggaggtgccctttatttttcaaacaaaatttgataaaatagggcactattggaagctttttttttgacttagccctataatttaatttagggcactaatctggggcactgttggagatgctctaatacacctgagttaagaggattatagtgtaaattaatttaatttatattccaatcacttcaaacctatgtatattaggataaatactagagtaaccaaataagcccttagc

SEQ ID NO: 172238 - DNA, 559 bp, Zea Mays
tgaaaaggtgctctcatggattccagctgcaaagagcgtttccttctactctttgcttgatcaacgcggagggcaagaaacttcccccctacctctctcgtcttggctgaagatgggtgacagagaccataaaactatgtacagatggctgtgatggggacatgaacgcatgtaagtatcaccggagaatgcaatcccaatcaggctcggtttgatcaactgaatgacaaaccaatacatgtcaagtagggaaaaagcaggataagttggtgcgtagtgcaaggagagaacaagttgtgacaatgacagccagtattataccaagtgtaccacggatacttaccctaaaacaaatgaccaaaagaaaagttgatggcgtcattcttacacccatgatcgggactcccagttcaaagatagagttaaggatcaggtcctcagaaaaccaagtctggttagcagctggcctaatgtgttctcatcgcaaagaagacagaaagacagggtcggtcaaccaagtttcatgggcacggacagagatgctcacattcgacctcac

SEQ ID NO: 172239 - DNA, 1001 bp, Zea Mays
tgcattgtgaatttgtgatacatgcatttgtaacttgtaagcctgatacgatacgatacagttcaagtgtttctgcatgcgggctccggcaaccggcatacatctgcaggtgcgcctgcttgcattggcaatgaggccgttcagacttcaccgcgccaccttctatctcgcacgagcatctgagccggcaagtgcagaagccctcaatctcgcatacctcgtagacatactcgtacgccacaactaaacctaaatccgatcgctcgccgtcataagcgggaacagaaccagagcgacgcgaggaaaaagaaggcccaagtagccggtctatgtacctcgggaggtggcggctgcggcggcggctgcggcattggcttgacatgcttgtgaggagaaccatcgccgcagcccaaaccctccacctccgccttcacggtcgccgccgtggccatctcggcgtgccgcttcttggagcccggaagctgcaccattggaacctacaggaaacgtagccgatctcctccaactggaagctcgaatgtgattggcgaatctgccaggggaggcgatatcacgggacgacgcggtcgaggaggcgcgaaggcgagaaaggcggcggtggaggaggcgcgaaggcgagaaaggcggcggtggcggaggcgaaagcggaggacgtttagatcggccggcaggcgggctgggcgcctgggccggcctgtgtctttcctggggaaatgcgaatcaagatataggcagcgcggtttgactgacacatggggacggagcgctggccccgcctgtcggtgacgcgacgaataaggcgtggatagagtggcggagcccgcgaaaacagtccaggtgcgcaagatagcttgtgtccgtaggttacgaaggtatacaaattattcgatacaaactacataaaaacaaacaatacatattatcattaactacgaacctatctattggcatgaacactaagcatgacattaatctcaaac

SEQ ID NO: 172240 - DNA, 275 bp, Zea Mays
tggtgggacaacgtcgatggtaggagctttagtgagagaaggatcattggtggtaggatcatcgttaggaggagcatccatggaaggtcgatcggtaggaatacaaaggaggagaaaatgagtatagaaacataggttgtagagtgatggaacggagacaggcagaaacatcctcttgatgatgtactagagaaagtccatcgatgaagaccttcccctacaatagcaggggtgtcaaaaaagttgtgaagattggtcgttgatcaagtcggtga

SEQ ID NO: 172241 - DNA, 1227 bp, Zea Mays
agtagattcaaatttgaaatctaaatttgaaaagggagaaaagagaatgaaaagaaaaagaaaataaactaaacccctacctgggcctcggtccctcattttggcccacctgaagaagtcaacccgcggcccacctaacaaatctctccccgcgcagcccatccgcatctgcgtgccgacaggtaggacccacctggtcagccactccttccttgcgcggattctttccctgtcactggtgcgtgggatcgcctcgtcagtctcccttcaacagaatgtgtccgtcttctccgcgcgccactcgccccgcgcatgccgcgtcgcgccatgagcttcggggccgttacagccatcccgacctgcctcgctagtacaaagccaccagccacgaccgctgcggcctccccgttccatcacatctgagctggaaccgagcgccaacacaaaatcgatggagaagaaatcgggagagaggaagaagtagtcaccattgtcgcggaccaaggagaggaagagagagattgagagcttgcgagcgacgccgtcaccgcactcacatcgtgtgggttcggtttgtcgcggattggagtcttcggtacgacaggaagcaaaccaagacccctgcgcgcacatattgggttgcggcgctctaaagttcctcgtcgtcatcgcggaatcccaacctccacccatccaccggggccggagaacctctgctgcgcaattaggtatgagaaaccccgttaattcctcggtttgtcggtcatataccacccaattagccatggctcgtgtgtcaattaggggtagcgggtgatgctggcgcggtgcattgagggtcgggtcctgcgatggatggcggcagcaattaatgggtgaatcaggcttggggcatcgtcaatttcgcgagggtcgtgcgaatttggatatggtgctcgggagaaccggatttcacgagctccggtgaacccaccaccgtgtggtggcctactcgccatgagccagtgccaggggaaggagagtgacagcgggcgtgcgatatgcatcgtgcggatgtgattgaatctagagaacgaagggtctggcccgtaggattaaaatcgagcggttaaaatgaggggtggggacttcattaaatctgcaccgtagacaagagatcgggcgactctgggcgcataccggtttgtttagaggccaaacaaatctgtgccgtctgaatctaatcta

SEQ ID NO: 172242 - DNA, 1479 bp, Zea Mays
gaattcaaattatgaaatcaagtggaaaggaaaaagaaaggaaaacagaaaagaaaaaggaaaacagataactgggccactcctgctcattccggcccaattagccttttctctacacgcagcccgcgcgcgcctgccccgccgtttctgtgcccctctcgctgacagaagggcccggtctgcagccactgtgactgacgctgtgctgtgggccatggaggttagctcggtcttctcccttgcaacggattccgcttgcgacgctgggtcttccttcccccgtgcgactcgctcgcgcgcgctccagccaccggaaatcaaggaccacggattcaaccgtacgccagcctcgccttcggaggataaaaccgaggaccgcctggactctcggccgcgaccccatcccctcaatctatccgaaccggtagtgccttcaccaagccaccattgcagggagagagagaaagaagaatagcagccgcccctattgccgccgttggtaatgcccgcgcatggggttctctggctttggtcggctgcttcggttgcatcgcctggagccttgtgattccacgccggtgcgaactcattgccgcgcctggagagagatgagattgagggagacggtggatgcttctgtgcgactgaagttgtgcttgcgcaatggcgacatgcgcccgaccgcacccacgctgcagggtcgtgaagactggtcaggtgtggagtcctctccctgggacggtgaccccgagttcacccgccgttgagccttgctgcgtggtcagaccccccaccattaatcatttctttggtaagatgccatatctagttcattataaattctgtgtcgcgtagctagaggttgcggtatagttggggcgcttggttgcggaaccgtgtatttgtcggtgggaaaacgtcgagtgctttggtgtcgctgctgtgccggcgttcgagggtgggagacgccagtcgccggcgagcgcacctccgcgaacgacctgggccttttatcgctcggcctcggtcggggaagaagttcccccagccgtggaatctaggatgagcggtggagattaggccacgcacgtaccctctcgctaaattcatctcggcagtaggatcgtgatcggagggttagggtcggatctcgtgatcgtagaatactggccgttggatctagatccaatagttctcggtgcgtaccgtttcgacaaaacctaaatctaatccccgccatcggttgtcgatcggatggctcagatcctagcgtaccccttcggccatgcctatttatgtaagagccctcctgaaattttggatctaacccgcaatccagccctactgtgctctatgtctagggaaaattaggatttggcccctgtgttatctgtaaatagtgcgcccagtccagggaattataaaatccagaaaaagtgattagaaaatgattttaatgagaaaataaatgctagaatt

SEQ ID NO: 172243 - DNA, 760 bp, Zea Mays
tgaatttgaaggcatgtacctgaattttaatgcatggttttcttaaacctgagtctaagagcatttggaactaagcaaaactgtgtatgatcataacacaaacaacagatatgccatttatgccagtgagttctactttatttacaaacgaactgcattgtggcataactgaactaagtaatgtattaaatggagtacaaaaaagagaacattaattaaaattgtataactcgggctggttttaccacaaatagtgctttgctgataatgagtctccttgttctttttgtttttatatttttgaatgaaagcatcaagttcaggagctgcattatgtgaaacagtcaccctttctcctatgtcatcgtagttgcaaacatattgtcccatatcgtcgaagttgtattcatattgtcccccgtgctcatctcgctaggggatccactagctctgctggtacctccaagcgagcctcctactatagttgagccacccagtcgaagcaatgtgggtctttaggctcggagtcctccattagtttatccttaggctcggaatcctctaggatgtcctcggtggtcatgtatgagggtccctcctccattgtaggcttagtacgcgggaattgtcaagtgctaatgtgaaccattcttccgttgctcttgcagacggtcaggagggcacgtgccacctatgaatttagtaaaagagtgctacttagtttccattgagtaatataagtgtaagaagttttggttta

SEQ ID NO: 172244 - DNA, 520 bp, Zea Mays
aacatcgacagcgcatggttagatagaaatgatatggaatgtcttttccatggtgacatgcaattgacaagcgaaggatatatatatatagggcaggtataacgggagccctggtcttcggatattaaagggagcccgggtcggtaacgggggtcatggtccactgaaccaagcgcgtgtgtgtttgatggaaccaaaacagggaacatgcaggacagacggcgccgtgactcggcattatgaataaatggttggtcataacggcaagggcgtaaacatatggtagtgggcggaattatagggattagattcctcgtgcaaacgtggattctgtgaaatgtgggcacggaatttgtggatcttgcatggagcataatggcggaaggtatagataatatcgaataagatgttaaaagatatggcataacacatatacatgataaatgttgtgtatatagtatatacagtttggcataaaatgttaagtcattatgcgtaaatagtgatatagagatatttg

SEQ ID NO: 172245 - DNA, 701 bp, Zea Mays
gccgtaaatcaacggccatgggttcatcacctccaccgctggccacacacggcggcgctacgaatcccagcggtcggacctcgccggcgcagagccaactaccgctcaggtgcgctaaactcaaagggaataggtgatatacaaaggtaaggcaatgcgaacaagcacggggaacatttcaccttcaatcccggtgcagaaatcccaggcgacgacgggacgcggcttcacggcggaggaattacaccggcgagaaattcacgccgtgatgcgagtctacccactcaatcgcagacgtggacggcttcctcagccgtaggcgtccctcctcggacacaccccgaagacgaaagcccgtcgttgaggaaatccaccggcggcagcgaagtttttacccgagcggtacacggtggcgcgatggtggtaacgggtcgttggggataaggccaaggggatagcaggttcacggtgcggaagccttatagtcaggtcgcgaccctagaaatcggcgaagtcgggtcagcgcgtcaatccgtccttctcggcaagctccgcgggtagcgcgcggggtagttgatgacttgcgggccccgcgtggaagcgaacgtggtgagtggagcgagtggcttgaggctgtcaagtggggcctgggtgtcggcgcccacccgttagctgggccgcgcgcgcctgcgagggaaata

SEQ ID NO: 172246 - DNA, 1439 bp, Zea Mays
aatggtttttatttgacaaaacaaggggctttgtttccccctttgctgccggtttatctgtttatgaccgattaatcggttgcattgactgtttaatcaattaaaagctaagctaatccaaaatttgttgtgttcaaatttagctgatttcaacaggtttccgtcgaataatcagtaatcggtggtgacctttttgtgggtgtgactaaggactacattttcgatttaattttttcagatagctttttgttgcacaaagttgacacttaaaattttaaattcactgaaaccggatcggtttttattttcctatcagtaacggcaatgggaaatattaccgaaaagcagtcaagaaactcatccctggggtgaccagcttggtgaaccctgtgcacgaccaatcagatgacatccatatcttcaagccacaattagtttgactaagtattatataaatcatcactgtcttgatctcatataagttgtttatgtgaccgcctaagtaacaaggtacatgttcagttacaatatacgttaattcatttgttagatttttatgctaagttattttattaccctttttacaatataaattactcctttaatcatggtaaattactgccagccgatttgcaatgtagactaggctgaaggctggtggagagctgagttctgttcccgaactgtgctcctattcaagagcttaagagttgtccagttatgcgatggaacggggcatgaccgcatgtaccattgaattagactcgtttttagaaatgaacagataattcaaaagattactatcaaattgcagagtaggtactaagaagatcgaaatccaatagagctagacgggtagagcggctgcagatgcgatcagagcctgtcgggatgtatgagaagtcatcactttatgacatcaggggattgacagactttcatacatgcatcatcacctcgcatcgaagatcaactaacaagaacaaatatccgacaagagaacggctacgaaaaccaactcacaaaagagactatgccaacgataaaaccgggtcagttggaagaacacgaggaatgaatctaagagaagaaaagaaataacaagtggctcagaacttcttagagggtttgtgcaaccaacaccggcgtccgagggatgcctccggcacacggatttctttcctcatcgccatcaaactgctcaaaacgatatagtaatcgacaaacagaaacaaagaaaaaatggagaaaacatgaaggcgaaagaaccatcggacacagagagctagcaacggcggcgatgggaaatctttcgctgtgctctgttttatagacgcacaaccctaacacctggacataaaaccctagatgtcatgggcttgattgctgggtccagcaggagcgccgcggtggaactagcccatgggcctcggatcaat

SEQ ID NO: 172247 - DNA, 406 bp, Zea Mays
acactgaactaagcattattacatactctgactctgtcgatctagggatccaaatctatctgggtcctacagtctggggtaccatagtcaaagcgaccacggggcgataaacggtaagggtgctgaatcccgacaggggcggaagaaccaccatccagatagtggcgtgctgcgcactcagtacgcaatttcgcaacctccgccggaaccttgcccaactcgtcaaggtgtggtccaacgctgtgttgagcacggcagccaagttgaccatgttgttcaacctgggattgccctcaccaactggcgagacaatcacacctccagcactgtcggtcgaacggcgagggtagtacttcaggtcgaggccatcagctaccccgctgaacaacgagcaatactgagaaag

SEQ ID NO: 172248 - DNA, 439 bp, Zea Mays
attggaggtgaccttgttaggcccgatattactaggtttgccacgttttttctcaccctggctagcatgctcaagcataagaatggtttgaagagtgtgtttattagtaacgaatggcaacaaagcaagttctccaccactcaagaaggcatccaagctgaaaatattatcctctctacagagttttggaatagtgttgagttctgtctacgagcttctcaaccaattctcattgccctaaggattgttgatggtgatgagacacctgttgctccggagattatggcagctatggataaagcaaaagccaccatcaaagaggcattaaaaaataagcgcaaattacttgcagaagtaatctcatgttttgacaaaaggtgggaaagtcaaatggagcagaagttgtacggggcagccctatttttgaatccaggcaaat

SEQ ID NO: 172249 - DNA, 911 bp, Zea Mays
cccgaatcttaactactcgtatccagtcctgtattcgagagaaatacattagggtaggatacatgatgacactgtatccgtcctgtttcatccctagaggtaactcgatctgctctgttgtgagctacttgtgcttgttgtgtgatgaactggtgtttcttagaaaccctaacttattccggatgtccagatctggtctaatttgctcctaatgtgcttattcccttgcaagtctcccccttgagttgtcttgacccgtgaggaaccagtgctccggatctactgctaacaacaacgacttcttcgatacgatgcagaggtaatatgatctgcttattgtgtgatgcagagataatatgatctgcttgttgtgtgatctgtgtagtgtagttatttatgtgattagtggcgatatctgatctgtgatctgtgtagtagtgatcatgtttatatttgtttgttaccttgcttgatgtgtgaagtagtgataactgataaagtcatgtttattctcccagatgcactaaggtttaattgtgttagcttttaaattgttgacatctctctgtaactgtttgttaccttgcttgttgtctgaagaagtgataaattactatttattctcccaaatgcactgaggtttacttttgttagcttttaaatccttgacatctctctataactgtttgatttatggatctaattctatctctgagtttccatatcctggttctagtactcctaaccttggcagtggaacatcagcatctgctttgcttcaacaagcacactctagtgctggactaagttcacttgacacagaattgtactcctacctggacaatgacacattgcagaagtttgatgatgactttaatatcctaaactagtggtatgaacataagttgtcc

SEQ ID NO: 172250 - DNA, 545 bp, Zea Mays
ggaaagaggcttatcaaattctctagcgcagcgttccagatcatccgcagaaacaggagcctgcccatttttcaaccctagcttcaaacaaatagtgtgagccgctgagttccccctaaggggaggaagtttggctacacgtcttgatcttcttggcacgaagttgggcgggatagactttctggctttaagctttggagatgaaggaaccgacaacacatttgtgaggggctttacgatcttgttaatgaatgtcatagccacctcctcctctgaagctatacgactttgcttggggtgttttcttcgagaatacacttgcaagaccttgcaaggctgctggaccagggcaggagatggccacataatgtccaaagagctgtgaaggctatcattctgctcaatagacaaatcatcagaatccactgagatctgagtacagactgtgtccagatgagccaagccaccatcctgagcaggttcagacaccataagagcagaagtcacagagtcatgagcttcaccaatctctgacagcactaatg

SEQ ID NO: 172251 - DNA, 333 bp, Zea Mays
cctagagatcgtgctgcgaaccccaggggtgcataaaggactcggccatcgactcaatccactcgccccaatatcctcccgctttccctgccgcaatctcgaggattcctcgccgccgcggtaagaaacagggctgccgcgggagtgttccggcttaccgtctaccgcgcccggtgtggggcttggggactacccttggtggtggggcaggctctcgtggccgcactatccggagttggtcgccagcatcggacgaattgctcgcagaacttgcgaaatcaccgcagagccccccgccccatcccgtgggcagtgcacgtcgcaccaccgtcg

SEQ ID NO: 172252 - DNA, 419 bp, Zea Mays
accttcgcgcagtggaactccagacccgcctgcttcacaacaggttgttgtcgccggacagcgaaaatggatcccgtcgggacaccctcgccctccgccgtagataccgtcgcagccagctccaccacccctagccatggatcccgtcggaccttcccctcctccaccatggatcctgcagcagcccactcgccccccgccatagatccagtcgcgacctcctcgccctccaacgtggacctcgtcggaatcgcagctgcctccacccgcgccatgtacctcgtcggagctacctcgccccccgccatagatccagtcggagcctcctcgccctccgccatggatctcgtcggatccacctcgcccgcgactccaactcatcgcgtgcgcggcagcagcactagagggcgcgtgcggca

SEQ ID NO: 172253 - DNA, 589 bp, Zea Mays
ggactatcagtcataaggaaattctgaacctggcttaacagtggcgctggtctgactttagaaataaattaaggacgattcagtgggtttaagtccaaggtcattgtgaggaagttggaggtactatatagaagaaaactttgcttaagtaaggttgggttgttgttgtatggaaaccaaaaataatgccttgaagtagcgctgtcagtcggtctgatggggatagaaatgcgattactacatctgactgaagctagggtttagtgttattgagccaacttgggcgtcattgcatgcttaatccatggggattttcggtatgatcgttataccaaagtgaaagaacgttgattaatgcaccacttcgatgcggccgatttgcaagtaaccacatgaattagggtgcaatgtctatccgaattcgggctagcaggcacgatgtcgacctaggttcagtgaacctcaccggggataagaatgccaccgctgctgtgttcactgctcggacttgcggccgtggtaaaaatcttctgggacgtggcgcatgtaaccatgaggtggcgccgtttgaccaaagcatttcacctgg

SEQ ID NO: 172254 - DNA, 394 bp, Zea Mays
ctccatgtacctgtctcatgtaatatattttatggttatggatgtttatttatgagtttgttttactccagatgcctatgcgtactcgtagttcgcatggggctggcacatcgcgtggtggtgcagaagctgatatcaacccaccaccaccaccagttccacctacactggtagatgccattgctgccctagtgaatgccactgctgataatgctaggattttgcatgagattgctcatcatcaaaacaatcagggtgggcatcgtattccctagaatcagcaaagaaatgcaacatacatggaatttttggagactcggccgccagtgtttgctaaaggagaagagcctcttgacacaattgagtggctgcaggtgattgagcagaagtttgg

SEQ ID NO: 172255 - DNA, 636 bp, Zea Mays
cagaaattcccaggtgacggggcttacgaccgtagagtactttaaaaggagaacgccccaaagccgaatggaagctggtgttataccagaattctgccgttggaagccaagaggatcacttctttaggcaggcattaacaaaacagcgaagcacgtctcgaggcattgattaaatcgctctgtctgaccgtcggattgggggtggtaggacaaactcatgcgcagctcggcacccgctagcttgaagaattgttgccaaaactgactggtaaaaacttggtcccagtcagaaatcacagccactggaaaaccatgcaggcgatagacttgagaaataaatagttgagccacgatcagagcagtatatgggtgagatagtggaatgaaatgagcaaacttagtgaacttattgaccaccacaaaaatgcaatctgcggtacccgaacgagggaggccttcgacaaaatccaaggatactgtgtgccaaggagagagtggaacttcaagtggttgtaacttgcctaggtaggctgactggtctggcttagcctacaaacacacttgacattgttgcacgaatgtcttcacatattgcttcatccgtgtccatgcaaagagactcttggcacggctgta

SEQ ID NO: 172256 - DNA, 629 bp, Zea Mays
tcgacgttccaggggcctccatcgcattatcaagtgcctacaccggcaccctggaaccccactcatggcggtgcatggaaccaggactcgctggtgcagtccttcaacactatgtcgctcaccccgccttcaccatccgaatggtatgccgactcgggtgccggctctcacatgaccgtagatactggtacactctcttccttttcatccccttcaatcacttacaccttcatctatcattgtgggcaatggtgcactccttcctgtcactgctaccggatcacacactttttcttttccgcaacgtaatctagttcttaatgatgttttagtttccccacatataattaagaacataattttcattcgacgttttaccactgataataactgttcaatttaatttgatctgtttggcctttctgtgaaggatctgcacaccaggaacgtgatcgccaggtgcaatagctctggcgaattatacccattcttcccacctaccaccaacaccaccgctttcatcgctgcacctacctcgctttggcatagtcgtctcagacatcttgggcatgaagctatgtccaaactcatcagctccactgttatctcctgcaataaagatgatctcc

SEQ ID NO: 172257 - DNA, 409 bp, Zea Mays
ggaaggggcgagagaaatgcggatgtcaatgagatagagcgggatgcggcgagtgaagtcggcgacgacgcagctcatcgacgcgatgagaggtaagggggcggcgttgaggtacctggtctagggggcaggtcgtcgacggcggatgtgtccaagcggcggtggtgaggtacctggtcgagggggcaggtcgtcgacggcggttgtgtcctggcggtggcgattagggttggagaaaattgtgggggagaaagaagaggagtgggggagaaagaggatgagtggaattgtgtcccagcggcgtttgttttagtgatgacgacgaaaaatgttttttggcacccaatttgtttggcaatgcggaggctaatgcatttaaatatattagcgctgggtacatattgaaaac

SEQ ID NO: 172258 - DNA, 564 bp, Zea Mays
gtgaagttagtgtccctatcaggagaagaagtgttagtagagttgatcttgtgtggaccaagaaaagaaagttatcaccaagtcaccgcccatattgaagagattaaaccatcataggctatcaatgtagtatcagaattcccagatgtgtttctcgaggagttaccaggtatgccacctgaaaggaaggttgaatttgccatagagcttataccaggcaccgcccctatttccaagagagcctatcgagtgtccggaccagagttggtggaactcaagaagcagattgatgagttgtcagagaaaggctacattagaccgagtacctcaccttgggtagccccagtgttatttgtggagaagaaggatggaacaaagaggatgtgcattgactacagatccttgaatgaggctactatcaagaataagtaccccctgcccagaattgaagatttattcgatcagttgagaggagccagtgtgttctcgaagatagatctgaggtcaggctaccaccagctcagaatccgaccttcggatataccgaagacaacattcatcacc

SEQ ID NO: 172259 - DNA, 1230 bp, Zea Mays
gcagtgcgtggtggacccataggaagagtgagtttagagctaatttgggagtcataaaatcggagcattgaagagaataaaattctctcattattaaattttgaataatagagggaccctccaatttccttcggttttttgactcctaaactagcctttagagtataaaactttggctaaaatggaaagacgtaataagatggcagacaagaacgacgatgatattttaacgaacgacagtgatcatttgaaaaacttcttgcattgtaatatttttgtaatgcaaagagcatgaacactcgaagccttttggtctgtattgtaaagtaaagtatcctcgctttggtttactgatttttttgcctttatggtgtgtgaaacttgagtcttgcgtgttttttgagccgaaggcgaaaaacgcatcctcttctttttacgcgttacaaaggcgatactcttcgtagtcatgctttgtattcctttagaaacaacttcaaagatttttacctttactagctctgcattcccttagaaacgatttctgatatttttcacctttactaggtgattagaaactatatctgcattcccctagtaacgactttggagtttttttgcatcttcactaggtgattagaaactagctctacattgccttaggaacgacttcagagctctttttaccttcactaggtgattagaaaccagctctgcattcccttatgaacgacttcgaagctcttttcaccttcactaggtgattagaaactagctctgcatttccttataaacgacttctgatattttttcacctttactaggtgattagaaactatatctacattcccctagtaacgactacagagctttttcatcttcactaggtgattaggaactagctctacattcccttaggaacgacttcgaagcttttttcaccttcactaggtgattagaaactagctctgcattcccttatgaacgacttcgaagctcttttcaccttcactaggtgattacaaactagctctgcattcccttattaacaacttctgatatttttcacctttactaggtgattagaaactatatatgcattcccctagtaatgactatggagcttttttcatcttcactaggtgattaggaactagctctacattcccttaggaacgacttcggagctcttttcaccttcactaggtgattaattagaaactagctctgcat

SEQ ID NO: 172260 - DNA, 635 bp, Zea Mays
ataagttagagttttaatttacgctttataaatacatgtgtcaggtatcgtaattaggggtacctgggttacacccctagacacaattaacccctaaactatcgtaagacacattcctcgacgtcaagaaagtatgagccgcgatttgcctaagaccccactcggcggtcgctcaacactctgtctcgctcaagcctgccctcaggcgagggcaacacttggggaaatcctcgtcccgcccgaggtcccctcttcacggaacaactgtttccacctcacccgagctcatctcgggcaggaggacaaccccgagcctaccctcagttaaaggtcgcaggaaccgcggagacatgagcattcaatgcaaatacctaacccacatgacgccacagtcaagtaggagcgacaggatcacagtcccatccactttcactgactacgatgacgcatgcccagaaataacagctactactccccacgccgtttgctgagttcaaacaactccggatggggcatgcgtacggcagagcacggtctcaccctcgagaggaaactctacctcacccaaagccagccttagcctctgtaacatcccaaaatttaaccccaaggttagaaaccctaatctcctaacc

SEQ ID NO: 172261 - DNA, 794 bp, Zea Mays
ttcgtgtggtagcacaatgagagaaacacacaggcttgagtaggtttgggcagctttgagaggtgtcataccctacttcctgtgttggttttctgtattgtggtgagtttacaagttgtgactacgagaatggtgggctgaggatgagatgaaaaaggtaggggtgcctcctagccttatatacacaactagagagagccccccgcaaaggtgtcgattacaatctccttgcttatctcctgatttgtagcgaactgtcttcctttatcctagggaaatcttgcgctctcgcgcccgagttattgccagtggttcagtctgtgggtgggcgcaacaaacccggcccgacatacccacgctcatgcaacagctaactcggacatgggcctctttcgtatcagaaccgactagcctttgctggtttcgtttatccagtccaccaccagtcacctcaggagggcgcctattgtgtggccccgaacacattttcgtgctaatgtggacccgagggatatccatcccctacaattacacgacacagatgagaacaaaacacctgtggatctatggctaaactaatgcaacctagaggagtaaaactaggagtttctaagtgagagccaaaatgcaaaagccaaagagatggttgtccacaacagcctactcatatgtttatgcagggttatttctatttcctactctacccctacatgcatagagcctatccacttagccggggtgaaatggaccaactcctgtgattttgatctgatggccacacgctccacacgaag

SEQ ID NO: 172262 - DNA, 396 bp, Zea Mays
gagctagaggtgacccggaaggagaagaggctggccaagaaggaggtgcacttggacccgagggaggaggtcatcacggagctccaggcgaagctgaacgcctacaacaagatgctggaggagcagcgggaccagcaggccgcggcagtggagaacctacgaaaggtgcagcaggggctcgatgacagggccagtagccttgccctggccgaagaaaacctcaaggagaaggatgcctccctagataagcgggcggcagatctcgcctggcgggagaaggacctcgccttcagggaggaaatgcttgagaggcgggacaagctactggccgattatgagctcgaggcggaggagaaggagcgggcgctggaggagaaggagcggatgctaggggag

SEQ ID NO: 172263 - DNA, 1199 bp, Zea Mays
gtctaaactgcgaaatacaggacctatatgcaattacttttgaactagcgtggatggcgggttgaataatagaaaccagagggtctatttattaatttgcgcatggctgaaggggtacgaggcactgtgatccgtccgattcaaaaccagtggcccagattagaagttgtctaaatcgaaccggtattcaatccgggccgcccgatcagggatcaacggttaacatttaacaaatgggcccatctattgtactccgtccgatcgaggctcgatggtcaggatcggacgggcgaagagctaaagcacgatcggatcctggtcactggatccgcgatcaaccgcagtcgccctctacatcgcactatccccaaaaggcggcgctatacagggccacggcggaggccatcgccggccgttcccaatccacgatcccgagcgtcgtgcttcaatccaaagggcgatacatggaaaagggacgccagctaaccatatgagaaacttctcacctcgactctggcagcaacgggacttggcgacgtggaggagcagcgcgacggatctcaagaagcacggtgaggaattgcggctgttcagagcatgaatccacccaagcgaggttacgacggtattcctagaggcatgatgaggcccatgggtccaattccgaagacccgcccttgccattagctcaaatcacccacagcagcatcacacgttttctctctcgtgacggtgaccatctacatggtggagttacccagcggtgccaatcgttccatggtgcagaggtggggaagaaggcgctcgcgtcacaattttatagcttcagcggaggtcggttcacggtggttgtaacggaacccggcgactctgcgcggaaacaatggcggcgacaaagtctcacatggttcgtgacaaaggatgagaggagggatgtggcacagttttataacctgggagaaagggagccgagcccgggcaggtagcattccacgaatttcggcttcggtttcggtaggcgtatgcgcgagctcggaatccccgggcagcaccacggttctgttgcgccgacgcggggaaagagatgaagatggcactgaccgatgggtcccgcgtggaagtgactaggagttgcatgaggtgggctggcgggtgaaggcacgagctgggctgcagaggagccggcccagacagtcccc

SEQ ID NO: 172264 - DNA, 738 bp, Zea Mays
acttccgaactccttttctaaagtgtccccaaattccttgagaaggtcatcaaggctagctagggacatatcctcgatgtcggacaagttctctatcctggggggaggtggtgctggaggggctttcttcttttgctccgtctggcatccttggctcttggtcttcttttggactttcttcatgggggcgagcttctttagcttcttatcataatccatcttcagggttcggtaggcttcacgagtgttggcctcctcgccttctgctatatcaagacactcttagagggatgccttctcctttttaagttccttgacctgctgctctaagctttccacccgggagtttaggtgggtgcagtgggaggaaaggtcgtcgtagtggttatcgagagtgtggaggtatctggccatgtagacgatggtggggtcatcctcagtaggatctctccctgacagggcctgaagtcttttcctccaggtgggggtatttttgttgctaggtgggaagtaacgaaggggggtttcaaaaaacctctctgctgtagtttaggcatagctgtttaagggcttttcgggcaacattttggcaagtgtctgggaagcggtgcccgatgaaggtgacttggaagggagggtggtttgggtaacttcggctttctcccaggtagactgccatagagcacttctcaactccgttttcgtggtattctttccagacatattccggcttcttgc

SEQ ID NO: 172265 - DNA, 399 bp, Zea Mays
atttagagctcgataattgctgcacatccacctggtgtcgtctttcttttccatgaacaggacaggagccgaccaaagtgaggtacttggtctgatgtaacctttctctgacagctcatcttctgcttcttgatctccaccaattctggtccagataccctgcaggctcttttatatataggggcggtgccaggaataagctctatggcaaactcaacttttcgctcaggtggcatacctggtagatctttagggaacacatctggaaattctgacacaaccttgatagcctcgagtggatcggtctctttgctatcaatagccatctggtgacaacctcctttctttgacttgggtgagactagctcagtcaccacttcctctcctagtggagacacc

SEQ ID NO: 172266 - DNA, 1082 bp, Zea Mays
gcttcgaatctgctacgcgggactccagggcggcgacgcggaagtcccatttgctgtcgcgagcatgaaaacacttgtccaacgccgagaggagggcgcgtgtttgatgatctagcgcctgggtgacggtgatgttggtgccgatggatggagaagactccatggaacgaggatccgaggaccgatgaatctgataccacttgttagcaaccctcaccgatagaacatgaatcactgaaccagacaaagcataactcaagcaacaagtgctggatagatggagtttgggaaggaaacaacaagtagggaaatcacagctagaaggaagatgctataatgttctagatgatccgggtacaagagagagttggggaaagaagaacagcgctagacaaagtaggaagatgaatagtaaaaggttctgatattttctccccttccttcgtgctgaccttcactgcacctttgtagtatttttccttagctacttgggccggcatggaccgttagacataatgggccgatgtccctaacacagcgcccgatgactaccctcaccgtcgcaacttcctttctctctcctatcgacgatttagtgtgttgcgagattttgtgaaccaggcgagattaagatgcccgagcttataggccacgcgcccaggtggttggataactcccagctcaggagctcccatggcggttagatccgaccaacacgacgttcggagcggaggtggagagtggatcagttctcagcgtgggcgcgagtccacagtattctcgggaggatgaagacgaggactgtcaagcagggcccagatgccatacactcacccgacgcatgtgcgggcgagcgaccgacggtgcgggtccacccatcggcacaacgatgtcgagcgagggcgctaagcggctggtcagtggacccatgttgtcggtgcccattagtgagtaggctgacggggcggccccacaggtcagtggcacgagggagcatgggctgtgtgggagttgggccgagcagaggacagatgtggcccaagagtaggttgctgcatttttcttttctttttcttcttttc

SEQ ID NO: 172267 - DNA, 398 bp, Zea Mays
atctaacttcaaaaatagactagcaactttcctcttgtgaagggatttgatcgattgttgcaccagcataaaattatcatgttgaccttcctctaacaaaagcactttgattagatgctaccagttcatacagacgagggcacaatcgattagcaagcaattttgtgaccaacttagcaacactgtgaattaggctaattagcctaaaattaccagccaaagaagcatccatctttgtagggatcaaaatgagataagaggaatttagcggccccatcttctgagcattgccttggtgaatgacagatagagcccccagcaggttcaccttaatgatactccaacaggatttgtagaacctccctgtaccatcaggccttggagccttatcagacgag

SEQ ID NO: 172268 - DNA, 455 bp, Zea Mays
agtagagagtaacataaacaacaattgcatctacacaacgttcctactctctaaatgcttgtaagagaatatgtagggaccaactagtaaaaacaatataaaacaatactagtaatatactctagctccactccagtaaaaagaaccaagtaaaagaggccccctcatctctcgtgtctagaaaagaggcccctcatctctgttgtgtggttaccagctgtagtggaagggtcggagggagaagaaagctttaatcctgctggcgacatgaaatccggcgaccatgcaacaccgcaacatcatgttgttgctccttccaaggtattcgtttcagaccacttaagtagtttagatgctttgttaaactttaaacacttagaggttgcagatcctaatcctatttcaaccctgagtgctttgcaactagtaggtgcagcaaaggtggcagcacccca

SEQ ID NO: 172269 - DNA, 373 bp, Zea Mays
ctttgcttccttgaatggttgcaggaggagctgctggtgctcccgaccattgtgacgggtttcatgtccttcgcctccctcgtcacctgcgagggggccgtgaatgctttgtcccgcgaggggtgcaggcattacgagatcttcgaccaagcggacaaaaactttgaacatgaaatcttcaaggtcgaagaccctgtgctgaagcagtcggcgggggcgctcttcgataggatgtggggtccgcacggccgagaggcggtcagggagcggtccgaccgggcaatagagcaggtaaaggctgttttttgtgtggttatatgtgcgggtatgtgtggttttgctgaatgagtgtgctgttgctgcagatggcgca

SEQ ID NO: 172270 - DNA, 636 bp, Zea Mays
ggtagccacagaaagttgtcagggtcttcatagctgccgctttggtgttgtcatccgtcctgaagccaacagtcttagaatcaagggaacgccaacccggttgaaggggatgtgcctccagagttagccagactcggcaacatggcacccgatgctcctcatacagcagcaccgtgtacaaagggggtgtagggtaaccgacggagttaagcacttcccataagatggaaggaaaaccatcatgagaaaggaaatcggaactgaaacgagtgtctcctccattagcgggggtgggtgaagtcatctgtggaagaggatcagatgtaaagattatggtggaagaaagaaaaataaaagagcctaggtggttaaaaggaagcgggttagatcaattttttactcctttaatttctaatccttttagttttataatgcatgcatgctgaaaataacgtctcctctccgaatcagaagggtgctttttagggcaccctttaaaaatcctaagactgcccatagggcctacttaactagccacttatttctcccactattcctaaggcctttcgtcctaggtataacgttctagtcctaacgattcaaatactggtttctaagcaagttttagatttttga

SEQ ID NO: 172271 - DNA, 705 bp, Zea Mays
cggatgattcggatcgggacccttgtgtccctcgacgaagacttgaagcaaagtaggctccactccatttcgagccgcctgcaacacatgattggaaagtctagacaaatctatgcaattaacaattgacgaggcaatttgacacaccatacatgcagccttgctagcgtgtccatctgccccgaagaagtggacccctggcttactcaaccaattcatacgatttctattagatatggcatggaactcctcagaagcccaatactcgcacatccacgcccaagcatccgaatggtggctcaaccaatccacctcataatctttgtactgctcagccgtcaggtggatttcctttaccatatccacgtcacaatagttcccctgacgcttttggtacaccgtgacggccctcaaccgtgctttatacatcatgccctttacagctctatctgttgagccattgaatacctcacacacatatggatcatccaaggtataggggtcacacacgcgaaattgtccctgcaaatttgaagatcaccagagacttacaaatgcaaaatctgaattcaatttgaatatcacaagagacttacccaaaacaaatcccacactttgcttgtgggtgtcccgtcgttcctgtatggcttgaggtcccaatgagcccagtaatgagcagctatctcccgaccgccctctatcacc

SEQ ID NO: 172272 - DNA, 450 bp, Zea Mays
gtaagaggtttgttttcggccgtggattggaaatccaagggtcaggacggtttaatgcgagggagagattttggaccataggatcttgatccgatggctagatttgagtaccggttcgcagggctcggatttaatctgagcgcttgaactaagatccaacggctatgggcctatatcagtctgatgtcgtcctgatgtgatctgggccctccatctctaatcgggcggccagggcttatccataccccttcgtcgcggccattttcaaaaagagcccctcgggtttcggtgaattaacccgccgtccagtcgggttgttcactgagtttgggaaagtttgtagtttagcccttgcactttatagaatttgatttgcggtccagagcttaaggaaaatcagataaaagaatttagaatttgattttcaatacaaaaataattctagaaact

SEQ ID NO: 172273 - DNA, 469 bp, Zea Mays
taaaaatttatggcgcgacccgctacttgaggcgtgtagcgagcaacgacatggcggcaccggggaggggcagaggcgccgaggaccaaccgagttgccgagggcaagggagcatcgttgcttcttatcacctgtgcgcctcaagaatgggagggaggagtttggggagtctgttcgcgaggggatgcggctagggcagggttgttgcgcgatgtcgggggaggggagttttggcgcggaggaagaagcgggacacacgaaactgacgataatcgactgttgaaagtggtgcattatagtagtagagaacctgagaccttgcactattgataatgcattgatataaataggatagacgatatgacaactactgcatgaaaggtgatggcttccgtgtcctacctttttcttttcattggacgagaatcggtcttgaacccatgtcacacccggatttagggggcaaacc

SEQ ID NO: 172274 - DNA, 953 bp, Zea Mays
caaaccaactgctttatgctctactgaagtccatcagacaattatctgagctgatgaggctacgcaccacctaatctctccgtacatccgctttgcattgcaattccaatagtaagtttaccttaatctttatttgtttgttgacgaacttccacaaatctccagaactctgtgtaacaagtggtattgttgtggtctacattaactctttgggctgtggcataggccacgctatatgctccaaataattttcttccaatttgtactagctttttcttctagcatttatttacttgatcacatggaatgtattatggtcacatgtttttgttttttatgattggatatttcacaggattacgatttagtttaccctatgcctatatgcaatatgtacacttctatgctttatcttttttcctactaaagccagttgtacaattctatattatttatgtcattttagcattagcactggcaccttactatatgatttagacattgtactcacttgttagactttgtttttctgatatttgaatctctactacaccttaagttggtagtgtgggcgtccacacttgcttcaccacgcctccgccctcgtcctcccctcccctcgctaatctcgcggctgagccacgccagccccatcctcgcatcccctgcagccgtcaccagcgcagtccaagcctgaatccatggcgccgccctcgccctccccccactaatctcgcagtgctgctcctgcatcctctccagagccgactcggacgccaccgtcattcgtctcatctccctctctccgggaggacatcttgctggccgccacgagctggccttcttctctggttctggccctcgcccccacctcactccacacctccccccgtgcccacgtcgtcgaggaacacgcccgcccaactccaccttgccttagcactctccttctc

SEQ ID NO: 172275 - DNA, 463 bp, Zea Mays
accacagtattcattgctattgcactgttttgctgccaaaatattgaccaaagctgaagcttgctcactgcttccgcaaccgaagctatttattttgctcaagcttcataacgagaaagagcttcagcaaagttaagaaaaaatttcaacttcattcgaaaaacaagaaattcaatcaccagatggccagagtacgttccacagctagggttactcgtgacagagaggaggccgaaggtgccgaaactgccccaatctccgaagtgatgaagcgctcagggctggtagcatcggaggatgcacctgccgctaaagccgggtaggctgatgtcgaagaacttgagtctgaagatgattacagcgcagtgccaactaaacccagccacctggagtttgggaaatccaccatttctgaagatgacatgtcgaagctgataaatttgggctatttcaatgaagcgaa

SEQ ID NO: 172276 - DNA, 730 bp, Zea Mays
cacgaacaggacatgggcggcccaaggcgaggtgcttggccttatgtaacctttctctgacagctcatcaatctgcttcttgagttccactaactctggtccagataccctgtaggctcttttagaaatgggggcggtgccaagaagaagctctatggcaaactcaactttccgctcaggtggcatacctagtaaatccttcaggaacacattcggaaactctgacacaaccttgatagtctcgagtggatctgcctccttgctatcaatagccatatgatgacaacctcctttccttggctcaggtgagactaactcagctaccacttcttctcctagaggggacaccaacttaattatcctcttatcacagctgataattgcttggtacttatctagccaattcatccctaggatgacatctattccctgagtacccattactatgagattagcgggaaacgctatcccccttatttccacacttacattcaagcaaatgctatcggctcgaattctaccaccggttgagtcaatttaaatgggtgttgacatggtagtgattggaagattatgtgcttctacccatgatgcagtaataaatgaatgtgttgctctagtatcaaatgacacttctgtaatatgggagtcggctggaaacatacctactatcatgccgggtgtttcctgaactgcttcagcttccaagtggttcagtctcccatggttg

SEQ ID NO: 172277 - DNA, 1665 bp, Zea Mays
agactgggaagcctcctgctcgccagaatgagaagaaataagactgggaaccaccccagctggagacatcagaatgtctgccacagccgcagtaggctcaaccaaactcaaattaggaacagaatgtgtaaaagttattgctgtgactggagacaccaaaccatctgccacatccccgataatgactgggccctgaccaacgtgatctgtcccatcagcagcaaaaccagtcgccgatgctggagaaatgatagcatctgctgcagccccaacattgccattctcaacgataccgtcaatcagctgtagcttttgatgtcttttcatggaataaactaacaaacttggcgacataagatgcttccttgttaaggaagactccatagggtgaatgttctgcaattcagattcaaccatgggaagacccactcccccggagaagacattaacgtcctgcaattcagattcagccatgggaattcgggatggagcatcagaaataataacagcttccgaacaagttccaccatccactggaataacctcttgacttaagactatcgggggagagccagtcaaagtatcttcagtaacgacagtagaactagtagcttccaaaaatgcatcatcaaccgcaaccgggagtggagacacaagagcagacgatgtcttaggaatccaaatagacacagatgacttcaacttcctcttgggaatccaaacttgcttcatcttcttgattgcacctttctcagcgttgaatacctccagggggcctagccgattaaggaccggtaggcgaggcatcctgactccttccttcacaaaggcctgcacgcgcggcccaagtcgctaatgaaccgacacccgaggtaggaccgctgtcatcgaactttttccgggagcattaatactaaaggacgacctcctagatcgacgccgcctccgccgcctgccctgatcgggatcgtccttcgccagaggaggtgacggctggagggactgcagcaagttcggtcggtcaaggaccttcaccaacacccggataggtagactaatgaacggctcagcattccaccatcggtcatgaccggatcaacaatttcaagcttaaactccctgggaatggagctcgggctagaacaccaggcgataatcttgaacacctcacgctgtcgctcacaatctgggtgaagatcagcaatccagcaccactcattgaggagagcttgcacagattccaactcctaagcataggaagggatgccagacacttcaatctccacttgaaaaggcagagacaccgccgcagatgagttgaggattctgcttcatcgcataacatggattttagttgtgggagacaaattcacaattctgcccccatcataggcatggtccgccatttctaaacttggaaggataagaagaaaacttgcaggacccaatcgacacatagacagtgagacagtgagtcatgtacaagctccagcctccgcgcaaaaagtttcgtgacattgaactacaactccaaagtttgagctacatttcttactttttttgttttttcccttgataagtataccttttgttcatctaacctttacaaacttacttcatgcataggtgtccatttttaggattatttactaatttctgtggttt

SEQ ID NO: 172278 - DNA, 827 bp, Zea Mays
gaagtttcaggcatagttctttgccatcattggagttctcactagctaccccatatagagccgcccagctctacggttaaaacaacacaaacctaaagcctttcatctgacgaatggagttggaggtgcttacgatcgttggcaatgcgaataaaaggtggagtcccttgtttaatcaggccagttggtgcacacgcaattgcacgagctgaccgctcagtaatattaattactgtattagttagtgcataaattacgtcgccagtgccctgtccgtcccggcttccggtcccttatcttcaccatccaccaccttcaggccaccccttctcgcccctagttgagactaggagagcacacagctcttggttctttgggaagggccgcccccatgcctcctcctctcctcccccccggatgcctcacttcagctagctaacttccttccttcgaggttttgctaccacctgctgcaacaatctctgctctcgtccgccaagctctgtgctatgtcgctcacggaggtcagcctccacttctgctacctccactccctctccatcgtgcttctccacttcctctacgtgatctcctgatcggccgcctaccgccaagttccgatcgaacaaagctttggtttgattcagagccgaagctttggtcgttccagttccagcaaaaaattacttagtattaattaattactcggtgattgttcctcttcgttccatgatcttgtcccgttcctctcttgctttgctgctaagttccgtgcgtctcctaacgcgaactcctgcactcgaccaatcaatacgactaggagcagc

SEQ ID NO: 172279 - DNA, 340 bp, Zea Mays
tataatttgacttgtggccaaacatttggctctatgattaggcctgctctaaaaataccaatctgaacttctagagcaacccaacaaagacttccgatcccaagggtgttgggacttaggataggcacactacacataataaagctgcagcagttgcaaaaggagatatgccaccggcaaatcaaccatactacattacactatatgtaatattaaaggagtaaaatctctttccacacatttttccgtctgtcgctacaatcttgcgtgtctaactctgcctctctactaacgtatgaggagtttgaaacagagatgatgtgttgctacctactgtgta

SEQ ID NO: 172280 - DNA, 437 bp, Zea Mays
ggggagggcgcactgaccaagcgggcccagcgctagaggacttgggcgctgacaggcgggccagggcgtcagggcacgcgtgcgcgaagcgttatccgtggtccgagtcgttcgatctgaatcggacagaggggaccagaccagggaggaacagatggctgcgggcggcgccgctcctctccacagcggtgaggtcgacggagttgaggctggcgcgagctagggtggctccggggtcgctagagttgagcagagagggagagggcaccacggcgaactcaatggtggggaagaggccatgaatccacgggcagagaagggagaacggcggtgagaaggtctcgggcgggccggagtaactccggtgagccattccggccacggggaggggacttaaggcacgctaaggcctgggctagcttcagcagaggcagggg

SEQ ID NO: 172281 - DNA, 327 bp, Zea Mays
cgaggaggtggtggtggcggtgcttgttgttgcgtctccaacacagcaagtctatcgacaatctgggacaatcgtcgatccagcctctcgtaagtcttgccaaggttcatgtcaatgaaggcatcatgcactgacttgtggaccgtctcctccatttgctccttcaggagcttgttgtttgcctcaagatcttggtggctaacacattcatcgaagtcagtagggatccttgcttcttcatcgtcgcctgccatcgaaacacaaaaacaagaaacaaacagtgatagttatccctaataatttcactacacgctcctctcaggtgga

SEQ ID NO: 172282 - DNA, 272 bp, Zea Mays
cagtgaatttagggaggacgcgcggcggccggagggggagaagaacgctggtgcagtgaacacgtgttcaccgtcgtggcagtaactccgggtcgacggggagtttagaggaagtcacggcgatgcggtggcgcagttaggacacgcggtggacaaaggagatggcacgacgacggtgaccaactttacccgcgggcggtgagccaggggagatgaactacggctagccggagtggcttccaggtcaccggcggcgaagatatttgaccccg

SEQ ID NO: 172283 - DNA, 429 bp, Zea Mays
ataatattcaggttcggaataccaaatagcatcataaccgacctgggatccaatttcacaagctcagagttttttgatttctgcgaacaaaaaagcattcagatcaaatatgcctcggtggcgcacccaagagccaacgggcaggtagaaagagccaacggggtgatattggaagcgcttagaaagaaagttttcgacaagaatgagaagttcgcaggaaagtggattagagagttgccgtatgttgtttggagcctgagaactcaacctagccgagctctgcatggaaacactccttttttcatggtctacggttcggaggcagtgctacccgctgatctcaagtttggggcaccgaggttgatctttgaaaacgtagcataagctgaggctaccagactagaagatgttgatgtactagaagaagaa

SEQ ID NO: 172284 - DNA, 742 bp, Zea Mays
atgatcacaacccttggcatcaacctcaggaagggcctctgccggtacatcatcaggagccgtggcagaagggccagccccctggtccaagcatgacagtcaccgaagctgcctcttcttcattttttcatcgacaggagtagtcggacgactcacttagcgtgcatgctttgggcaggcgccttcgggtttctgagtctccacttcttcaccaagttcttgcccagctgtgatagccattggctcggtgtgggttgagtcagatgattccccagctagcaagctaagcatagcatctatctccgcgtcatcagtgctggccagcatctcaaaatgagtattcttttcatcctttggaagactttgaagtggggcaattaaagcttcaatgtcctcaaaagagggtcgcactctaggacccaggctaccatcacgagcaggagggttggacacaaattcaaaaaatggcctaagtggtggtaggtattaggcagaataggccaccggagcaccaacatttgagactctacccctcaggatcatgtccagtcggctcatcagatctttagcgggaatttttctattagtgacccgggtagaatcattgacaccactgtacaaataagcagggtaggccccatccttcaaaggctgaatgttcttgaaaacaaaatcagcgaccatagcttcaacagtcagacctttatccttcagcaagcagccctcggcaagcagtacttta

SEQ ID NO: 172285 - DNA, 844 bp, Zea Mays
ccaactccataggaatatgatactcttcttagaaagggtgcgagaaatggattgcccgatttcatttcctggttcaaatgtaaggtacatgcttagtttgtcaaagagatcagtctatgaactcaatttagcatcttttaacttgtgaatacttgcagggccaaagagatccatctatgagtgccgagttgagataagtggccaaaggctttgcttatagggtcaagaaatattctgggtatgatgtcaatggataccgttttcgcacaacaaactatgaccaaagtcggcccaatcagaaaacaacgtgttctagagtctttacgcccggccttgacgatgtcgattattttggacgaatcgaagaaatatatgaactcattttttatggtgccaaacctcttactccagtgatattcaaatatcattggtttgaccctcaagtgacgagacggacacattctaatcttgggatagtcgaaattcgacaagattccaccttaccaggagacgatgtctatattgtggcccaacatgccacacaagtgtattatctcccatatgcgtgccaaacgaaagaacatcttaagggttgggatgttgtgtataaggtatcgccgcatggtagattacctgttcctaacgatgaagattataacttagacccggacacatgatggagagttcttccaagaagatgggctagaagggcgatttgagatagacttaatcgaagctatcggaatggacatagatattgaaatggttgttgatgaggaggatgatgaggtgcaaaatgagaatgacttagtaatccttgaaggcaatgacattaatgacgaac

SEQ ID NO: 172286 - DNA, 465 bp, Zea Mays
acggagcaatcggcttaagtcggcaatgacttaaggcggtgcgacatgctcacgcatacttaactcggggtggccactatgccctactaacagagcaatcggcttaagtcggcaatgacttaaggcggtgcgacatgctcacgcatacttaactcagggtgaccactatgccctactaacggagcaaccggcttaagtcggcaatgacttaaggcagtgcgacatgctcacgcatacttaactcggggtgaccactatgccctactaacagagcaattggcttaagtcggcaatgacttaaggcggtgcgacatgctcacgcatacttaactcggggcgaccactatgccctactagcggagcagtcggtttaaattgacgctgatttaaattggcactgcacgcttggcacgttcgcaatcacccatcttagggcaacttctgtgtggcggaaccgcccgaatt

SEQ ID NO: 172287 - DNA, 828 bp, Zea Mays
gatctgcagtcctacaagcaagagaagaagtctgtcacagagtatgaagtgggcttcaacaagatggtccgctttgtccctcatgtggcttataatgagttggagaaggcgagccagttccgtcagggcctgaaaccttctatcaggcatgccctgggagcctttccgttggtggatttccgtactacagtggagcaggaactgggtgtggagatggaacaccagtacaccatggagtcacagaagtcttcccgtgttgatcagcctcgtggctaggatgcgaggaggggcaacactggaggtctagcccacaagaggggaaagtctcagcaccagcgccaccacccctaccgtggaaaatcttctgaatcgggtactttgggaggaagtactcagaggtatcgggttgttcctaagcccaggctggggctggtgtgtttccattgtggtgatgcgcatcgccgtgctgagtgtcagtggagtggcaggtgctctatctgcagtcaagaccacaaggatgtggtgtgcaggaggaatcccaatgggaagctcagatgggagccagtgacttcctcctcttctcagggcactgtcaacatgatgtcaagcgttgagcagcaatttgcagttccactccctccgcagcagttctatgtgcctgggacttcttagttcatggtgatgcagggttttcctcagtatctagctgcgcccactcctgcaccaactactcctatgtcttctcagtttggagctccgcgtctgcctcacccgacggctcagtggggttcttctgttaacttcactccgggagcttcctcttctgcg

SEQ ID NO: 172288 - DNA, 423 bp, Zea Mays
tggacgccatcaggaccagtcactcgagctcgtgcacgtgaattaaacttcgtgatgattatgaagaatgaaggaccaaaagtttcctaaagtgcatgcgccatctatgctcatgatgaatctgcccagaataaagtctagttgctgcgccacctatctatcttttagtttggaaagaaataatcaagaaggtcttgcgccacctaaataaggaatggggatcaaggagacggcatggctgattgggtgcctattccctgccttgtgggcaggagattaattggctgattgggcacctaattttctgccttgtggggaggttgggcacccacctcctcctctctatttaaccagggttgcgccccctcctagagttgagttttctttgatagttttagccatcgtgcaaacttcctgtactgc

SEQ ID NO: 172289 - DNA, 519 bp, Zea Mays
tacggatgctgaagttttgcctggtccgagtgctgggcgtaggcggcgaagggtggtggcaaagcgtagattgagtgaagtggatggtggtcggcttcgtgtgggcagggctggcaagcgggaattgttgtcctcaccggttggggtgagtgtaggtgagggggagttgcgaagtctttttgagggtgaggagctgaggataatgctatttaactatagggatatgggaatcattccgaaggttgaaccaatgtaaggtgtgatgccctcgctgtacgtgtgtaactatagtttgtatgatgaggctgtgcgccttcgcgcatccggctatgtccataggggcgttgcacacttggtctagcacgtttattatgtcggtccggcgcctgtagtcggtctttgcgcggacagtttctcgatgtagacttttgcatggatgtaatgtgccttcgattttgcgcactcgttgtgctggtccggctgcacccttaggcgacttttgcacggatagtcttttaa

SEQ ID NO: 172290 - DNA, 517 bp, Zea Mays
gtcggcctcaagttcggtagtgctgggtccagaagtgccgagcacacgggcggcagtgccgggcaccgaaaaatgcccagaatgatctcaaacttcacatatagtttgcgcggggtagaagacggttactagtgaacaaaccaaaaatcaaagcttagatcagaaaatccgagagagatggggttttctcaaaacgagcctaaatgagaatcaactcgggtcatgaccaagaactgcactgtgagggtgtacgcagtaatccaaagagtctatatccacccaaatcaatccccaacaatactcatgtcgcaaaaactcgaaggttctccacaaatccacaagagaagaggaaaggataaaacaaaacttcagaatttagcaattatcaaaaattgagattgagaagtgaacaaaacatgtgggtcgtaccggcgacccttcctcgaattatacatgaagaacaaaaaccaagtcgacggttacaaaattgacgcggatcccttggttaaactggtga

SEQ ID NO: 172291 - DNA, 811 bp, Zea Mays
cactgatttacgatacagtttgtgttaatatgcaaatgaaggagttggcggtagaggacttaccagtgtgtggaggggaatgaagaccgaccgatttcgggtccctctgcagtggagaagaccaaggcgacgacggctcgatcaatgcgtaggagacactgaagttgacggcgggtcagactctgcgttggagacggtgaaggcgacgacgggtagaatctctagggttcgaccgccgcggtggagcgaatgcggctcggtctctgcggtggagaagaacaagggggcagcggctcggtctccgcgattcctggtccctctccggtgaagaagactaaggcaatggtggctcgaactatgcggtggagaagctgaaggcgacagcgatctctgcgttggagacgctgaaggcgacggcgggtagaatctctagggttcggtcgccgcggtggagaagaacaagcagacgtctgcgttaatggtagggttcggccgccgcgtgcgttacgggtgaggtgagctgaataactgcgtgctcgtgggtggattcgtgggcccgatacacgtactctgttgggcgaaatctacgcgaaggcccatgaaccgacacgtggattactgtttcgtaaacagaaacataagacatcgtaataccaatatttgtgtggggactagtacgactgcctagattgcgggaacataatcttctcgtgggcccggatgcccgaaacatgcgcataccagaagtgtataaactgatacacaaaatagcataacacgtaataatatttgacgtaagcaggtgggtata

SEQ ID NO: 172292 - DNA, 1084 bp, Zea Mays
cagcccaacttcttccctggcttcgacaagtggggcctcctggttgggtgctcaccatccctatggcctcgctgacatcccgaccacttacctctatcctctgcgcgcgctctcagctcaccgaggcgatgtgactggcgggtaggtcccacggtcagctagccgagcgtgcgcgtggatccgctggttggtgcgggctcacaggtcaggaggatcctgttcctcttcccaaacgggacggcgcatactgcctcgttcagtcgtccgaatactgcgcgcatgctcacggcgaattcgccaaccaaccggccgagtcttccgctgccgcgcgtgcgcttctgaccatccgcgcgctcggagataaaagctggtccttgggctcctgccgtgaacccctggacccagtacccaagccttcgccaaacaccattgtcgccgccctcaaaatcgcgccacacctatcgtgagacccgaaaagccccgggggaaggtccgtattgtgatgttgtgccctcttgacgcatcccggtgaaagattcacgatcggttgtgggggaatttctcgccgtcgggcgcatctaccgtgcgtccgctattcatcggtgcctgggacctctgctctacaattcctggtacgtgatgctcatacgtgttcacctggacccactgtaccatctgcgcgtatcggaacatagtattaggtttcaattcactgaatggctatcaccggtgaggggcgcggccgcaggatgaatcgccgccgggatagattgcggcggaggtaggagacgcgacctggtccgttgatctgggacgaacggataggattagatctaggataacggttcggtttagggttgttgtagccgttcgatctatatcgtgtgggcgagattcggtttggggcttttaaatcaggagcgccagatttagatcgtgcggtggtcgatcggtaccaattcagccggggataagtctaatcctagcggtcgaattctaatcggacgacttgaagtgatccataccccttcggagtgcgcagtttgcagaaaggaccttataattttaacgaatcaacccgccg

SEQ ID NO: 172293 - DNA, 438 bp, Zea Mays
tttctgttttttttacgtaaccgaaggagaaaaacaatgaagcggcgttgactcggtttgtggcgttgaatcagtttgatgtaaccgaaggagagaaacaaggaagatggttgcgacgcgctagggtttgatgtaaccgaaggagaaaaacaaggaagatggttgcggcgcgctagggtttgatgtaaccgaaggagaaaaacaaggaagaaggatggtgagaaaaacacaatgcgaccagcaacaaatgacgcgaaagcacacaaattcaacaatgcagattattgaaagaaggtgcgaggctcaaaagggtgctggtataaggtctaacctgaatttttatgtgattttgtggactgtaggagaaaaaaaacactcgataaactcaccgatcaacctggaaatctgataccaattgatgtagctgaggtgcccgat

SEQ ID NO: 172294 - DNA, 344 bp, Zea Mays
ggttgttcgtgttgtgagcaggagagctgttcggtttagaccttttgtttaggagggattgttcaagatattaatgctgccttcactgatcttggtcaagaaatctgaagattagaggagttcctactaaattacagcaaaagcagtcaacttgttgcctgtcgaactgttctgttccccagtgacaaaactcatctgtttctgccctgctcatttttttatggaattgccaagtaggtgggcctaagatgtgacctgatgaataaatataaacagctggactgaaccaaccgaggaacgattgcgtggacgctggatcgtagatcagatcaattgcagtgaac

SEQ ID NO: 172295 - DNA, 2954 bp, Zea Mays
tgaatgttcaaaatccttctcttcttgaccctgtgaccctagagttctcctcattcttttagtggcctgatatattttcaagacctgatcatttgactgggtgcctctttatcattctttactactatactcactttgtagtttgaagattctgttgaagcatagcatattagaagaaagaacaaagttgcatcaatgtttgaactgggatgtgttttcaaattcgagttacaattgttgtacttccccaggcggtagagaaaagcaggtgcatacttgacaatgatagattgttaccacttgctagataactagaacaatgttctgtgtttcaactagtttatcgtggtctacataattacacaaggtagttcttttcgtcgtcaaatatgccattaagttctgtcagctgccaactcctagcttcagaattctggaatgacgactgagaacctttgaacatcttcttaatttggtcctttcttttggattggattccattgatgggccgtttcattttttttatcagcaacatttaaattttgttgaatttttttttatctgcaagaccattttagaagttttgtcttaaatatgattaatgcaaacaaaacttggtacttactatttggatttatgagtttttcatctcccgtttgtgacactggatttagtattaaacttggggtgtatggccagtaaattcattcccctctgcacagattcaatgggcttgtccatttgcctggcccagtcttgcatgtgctcttgggctcttggcagcttaatatcagatctgatattaaacctgtactgacgcctgattgataagatatgaattcactgattttagttacactgactgaacaaggaaggttgtagccccacccccaccccccttaatatgttctagttctgtgttcttagttgttgtttgtgagcataatgactgtaatatacatctacagctgtaagtgctaatgttaaaatatttatttgtttgtgtcttaatgctagctgtattgctttggatctgcaaaaggagacatagaaacaagtgaagtcagagtcatagaagtcaactaaaacgttcagtcaatggaggaacagtgtaactatggcctgaaagggttctgattttgagccatggcgatgtctatcgagatgcaatgctgcttgcttatccatctacgcttgcagtcaagtttgatcactttcatggtttgggtaagcgctgtggttacttcgtattgaaacttagtgcttggttacagcaagctccatggttataaagtatttacatcgacttatctgccctgtaacttgtaaaagcaagtgtgtctctatcgtgcttgctggtacaaaccttactgactcttgattataatagaagttcgttatggcgtgtaaacaggtcataacggtggaagcactgagttctggtcactagcattgtggagcaactttgcaagtggatggagccatgcatgctaaaagggcatcctctgtcacagttcgcctagcaaatgatttcctttcagttgtgttgacatcaaatcacaggggatgcacgcactcccatccaggttagtgccttgagcttatttggcgttgaaaacttgcatgcttccttatcgtggagagccatgctgctaaaataaatcgaggttgcttttgctgtgcggttggtaagttggtttgtgggtgctcttctagagcccctacctgttggcttggccatatatgtgttacggggggcaattgtaaatcctcgtggccttgtttggataccctagtattcacctcaatccacatggggtgaggttgcaatccacctcaacccatgtggattgaggtgaatactagggtttacactccaatccacctcaccccacgtggattgaggtgaatattagggtatccaaacaaaaacaaggcctgcatgggttactcctttaccttttctttccctgttgtgctactgcttggttcatgaatggctctggtacgggtcgtaatccgattcccagaatgtgctgtcttgatatgcacttgttgggcgagcacgtctgcactgggagtgggagttggtctgagccctgggttgcaagttggacggacgatcttgacagcctgcacctaggcttctgctgatggaagcggccacttggcctgctgtgggtgtcatgcccggtagtgagctggagaagcctgccatgcagtgggagctgtccgcttcatgggaagaaaggaaaaaaaggtgacactcaagttatgtccctgtagctacattcttgcaattgcaaagcggactacagtactgcccagaatctgaaattttgaatccttcagcgctggcagctgcagcacctctagattagcacggcagtgtccgagtcacttcagcattcagaaaagcgaggaacagatcagtccctttggctttgctgctctgccaagctagatggttgtagagcgcccgggatctaaggctgtacagtatattgttgttagttaaccaaggcgcttgatccattgaacgcacgcagatttttttcatggagacactgcaacagcaggctacacgtgtgatctggggcagttccattgaagcttcaggttgaggcattgcctagatctggggcgaccactagtgatggacaccgttgcgatggcccatgatcatgcaggatggagtatttggtatcgtggccgtttggtgagatctgatggggttggaaagaaaggaacaggcacttggatatggccaggcaggagcaaggaacgaaggctggggctggtgatctttgcctcttcgtatattcagacaaattaaaggtgccgaaacttgtcttggaggtgctgttacctgacactgagctccatcagtttcccgcccaaaccatgcaggaactgacttgtttctcccctgtaaattgtacagtcgcagcgtg

SEQ ID NO: 172296 - DNA, 539 bp, Zea Mays
gttgggcgtaggcagcgaagggcggtggtgaagcgtagggtgagtgaggtggagggtggtcgtcttcgtgtggccagggctggcaagcgagaattgttgtcctcgccggctggggtgagcgtaggtgagggggagttgcaaagtctttttgagggtcaggagctgagtataatgccgtttaactatagggagatgggtatcatcccgaaggttgaaccaatgtaatgtttgatgccctcggtgtacgtatgtaactataatttgtatgatggggttgtgtgccttcgctgatccggccgtgtccgtaggggacttgtgcacttggtctagcgcgtttattatgtcggtccgactgcacctgtaatcggtctttgcacggatagtcttttgagcgagacttcgattttgcgcacttgttgtgctagtccgactgcacccttaggcgacttttgcacggagtcttttgaagaagacttcgaatttgcgcacttgttgtgctagtccggctgcacccttaggcgactattgcacggatattc

SEQ ID NO: 172297 - DNA, 564 bp, Zea Mays
caatattctgagccaaccagagtcagattctgatgactggagggagccgatcatcagatacataaagaatgaggaggagccggatgacaaaaatgcagtggagcgtattgcaaggcagtcagctcactacactctcattggggaaacactatacagaaggggcgcgacaggagtcctcatgaaatgcattctttcggctactgggaagcaactgctagacgaggtccatgctgggcaatgcgggatacacgcagcatccaggactctagttggaaaggtcttcaggtatggtttctactggccaacggcaaagagtgatgcagccgagttagtccagagatgcgaggcctgtcagtacttatcaaaacatcatcatttaccagcacagcaactgtaaaccatacctgtaacttggccgttcgcgtgctggggactggatatgattggaaccttcaagaaggctcaaggaggatacactcatgtactggttgctatcgacaaattcactaagtggatagagttcaagcccattgcttctctaacttcagctaaggcagtggaatt

SEQ ID NO: 172298 - DNA, 788 bp, Zea Mays
ctacttctcataacactactctactcttccacaatagctaatcctcgagttgtgttggtggctatagctgcagatgtcgatgttccccaagatacacaagacttggaagatctccatccagacaccagagttgcatgtataaaaaccatttggtcccattgcatagtccggtgggtgtcgagatttgggagtggttgccgcaacgacaagcggagacaccctcatggaggtcggtgatggaatacggcggtgctatgcaatgtgtgcttgcaaggaactccatgcccttctgcctgttagatggttgctgatccacgccacaccgacaagtcctcgaagccgaggtaccctagaggttggaagagttgcctcaggagccgaaagaagagttgccctaggggtggaatagatgccctaaggacaagcacaagaagtactctgagggtcagcacatgaagtgtcctgagggtaaaaaggatgtcatagaagctagcgtaagaagtgctccaaaggtttgacgctagtggttgatgcatgaagtgatccaaaggccagaacagatgccctgagggacaaaatacaaattctaggagccagggcatagggcggacacaagaattgctttagggaggtggaacaggtgtcctagcgagtgaacgctgcctataaggaaactgcttgcaatagttgagccagttcaagggattctccttaccgtcataggtgaaggacatgaacatcgtccatacccccatcatcccattgggaaagcttgtggtatgacgacc

SEQ ID NO: 172299 - DNA, 490 bp, Zea Mays
ttttaatccagtccaaagattgcaagccttcattttcctcccttgactttctgtgcagtgcagttgacaagtcaccatttcggacaaacctatacacaagaaccttttcttcttctttatcaaggcagtgccccaacaaaggaaccagcgtttcatgcactccttttgcaaacaaatataactctgccagataagcatccttccgaggcacacgcgaagtgatcctcttcaccaccacgacagtcccgtcttggagcacaccatggtatagatcacctgagtgaccgtgcttgatgagcctatcttccccaaatcccgaggtgccaccagtagctgcagttgtgccggtagctgacactcccaatggtgcacttggtgatgccccactttctctctgatcattcctcctccctgtactcccagaacacacaaagcagaacacaatggctgcaacaatggctatcagcaggaggcctccaccaatggcccc

SEQ ID NO: 172300 - DNA, 926 bp, Zea Mays
gtaaatgagcaaggtctctatagtcgaattatagctggtttatagagctacaactttgatacagatggatggttgagttgctacatgaattttggagcaaaccacccccaaatatgctctgtcaggtgctctgaatggctttctgatggtacagtaactgaatacgattttaggttcagcccccctcgtcagcggtgatctcgcgcccggattcacgccggcgtcgtgattcacgcctagttacacgaggataacgatcctcggatgaaaaatctggcgcttgggatgagtttgggacactatttcgccctggccgcataaaagtagttgtacacccagtgaaccagccctcacctccaatcgtcccccacagctccccaatttgggatttcccccaaatctgtcgagaacaccgcagtgtgtgagctcgtcgtggctagccctatataggtccgatcacgccctccttgctcttgttttagcactcttgtgtgctcttgatgcttctcgacccaaccaattgagctagaacatgtaggatcaccgggaacgccttggttcatccgtagttcgtgctatcaccatggccagagagattaggatctagaactttgcaattgattgaggggtaatgatcgttaggggttgaattagatgttagccatacttgagcgccgatcgttgcgttatccggccggtataggctcgccggagccacttctccgccatccatggtcgggggtctcgacttgtgaagaaatagaaaagggaaggacctatctgcgaatgtcagtgacacagagaaatagtgcaatggcctctttatgggttttcaaatcatcagggtcctctgtgcaaacctgaaaccgcgggcgcgcgcgagcgcgctttcgcctatgcgtgggccgacttgggctagtttcagc

SEQ ID NO: 172301 - DNA, 579 bp, Zea Mays
ttggtggcagtggccctctgaaggtcaaacagtcgagggtccttaggaagtggccacacctctatctcgtctcgctctcgaaaacaaggtggaggaactggtagagtggcagagggagcgggagcgggtggaagcaggtgtggtggaggctgtaggcatagcaggtgtggtggtaggctcaagagtggcagaagctggcatagtggaggaaggtggagtggtagtggtgacaggagccaaggggtcaaaccgaacaggtgtagtgtgagttcggcacgagaggcgacagatccagaaggcgatctgatcagagacaatcctcaactgtcctccctcctctgctctatcaactgttgctgctactatttgagagcacctagagggggtgaataggtgatcctgtagaattcaacactaaattccaacaaccttgattataaaaatattagtgcgggttaatcaagtcaatcagacgagctcttgcgaacacagacaatcaagaaggaacaatcacaagagacacgcgattttatcccgtggttcgaccaagtaacacttgcctacttccacattatggca

SEQ ID NO: 172302 - DNA, 301 bp, Zea Mays
ggttgatctcactcctattattgatgaaagctcctttgctgtatggtggggaaggctcttaaaaaagtgcacaggagcaggaaaaaagccttaaatagcatgatatatctaggggcttggcgcatatggcttattcgtaacaatactgtttttgatggagtgaatccttccattagctttgtcaagagactgtttttagatgagttgatctattgggataaggcgggtgctaagcatctggagagtcttgggcttattattgctttaaatagggtttagtcggcctctcctttgcttctgg

SEQ ID NO: 172303 - DNA, 502 bp, Zea Mays
gtcttgctcggtcgtccagtccgcttgtttctctggtcacgaggtcgtggtccccttctatctcccatacttcgcgcttccctccccctccggatcctctgccgccgtcactcggctcgatgcctctaccgcgaacgtgctcccactcatcccaaacatcgccgcgtcctatccccctccctctcggatcctccgtcggctcttgttgatgcctctgccaccgagagccacggcgatcggatctggatttgttggtcctcggcgaggcgattatcaacgccgcacgcaatgcgcgaagcgaagttgccccccctccgggtcctcagtcgtcggtcgtagctgcccaaatcttacgagggctcaacccaacccaagagtcctttccttcacctcactctctatctctctcaatgcaacgactgacccagcaactgccaccgccgcggtcgggtcttcaccggtaccaccaacgacggtcgggcgaacgctgcctcgcttctcc

SEQ ID NO: 172304 - DNA, 828 bp, Zea Mays
gaccagaaacagtgaatgactagacagtaaataacatctacacttggtgcatgcataaaacaagcataagcataatttctcaataaaagtgtacctcgtttcagcatccaccaacctccgactcagttatgtcgccacatgttcctttccttcagtttcttgtgtcagaacagccccaatgaccttatcttcaactgcaatgtataatcggaatgatactcctgcttgtggtgcttttaacacgggagccgaagataagtattttttaatgagatcaaatgcttcctgctgctctgcccccaagcgaattcggcatcattcttaagccgaataataggggtgatggcatcaatcttcccggctaggtcagaaataaaccttcgtaaataattcaccttgtcgagaaacttctgcacttcgaccttacaggtcagaggtcccacattccgaatagacttgatttggtcagggtctatctctataccatgttcatggatgacaaatcctaaaaacttaccaggggacactccaaaagcatatttacgtgggttcattttcaaaccataccgacgcattttatcaaaggctttgcacaaatcagctacatgagaactaaactcagccgatttgactacaatatcatcaatgtagacttccacagtgtttcccaacaactcatggaagattaaattcatagccctctgataagtagcaccagcatttttcagaccaaatgtcatgacaacccattcaaacaaaccgatgaagcctggacatataaaggccgttttagatgcatcttcttcggccatgaaaatctgattatat

SEQ ID NO: 172305 - DNA, 596 bp, Zea Mays
ctcacctttaggtgtggcttcattagcttcagcttcgacagtatcttcggtattggcaggcacaacaattttttccgccgaagctgagggcagggtcttttggatagcttgcattacgtccatcattcgtcgtttcttctgacccctggcatttcccatggtagccgaagcagtctcctttcctcccgagctttgttcaaatcccttttcctttgactacaataggctagtcagatctaaccccaggggacttagcattgcaaacgggaagggttcagtcattaccttaagtatttctgaaacatcaacacaagaagatggagaaggtcccacagtctttcctggtacaacttgtaccttcatctctgcagcagccatcctgacaggctttcgctttttgggagccaaactttctgcttcttaacagccctctgatcttctttgacggaccggatagcctcccttttcagaatactaacaaccctctttctcttcgctcccacggccccttcgtcaagcctgtcgtaattaggatattcaaagttaagagcatccatcacccaattcaaccttcgtttttcacgggtaccgaaggc

SEQ ID NO: 172306 - DNA, 770 bp, Zea Mays
tggggaatcgggcgactaggtccttcggaactaccttcaacattcaaggcatgatatttggcttttgatattcaacatgttgattacgtgcgcttttacgtgagtattcaactctcatctattttgtttgaatgatttttctagttcattttcctggtaacagagaatatcattagtcttggtttgttttatcactcgcaggtgaacagacttgactcgatgcgctagttttatagatcatatgttgaccatttctttttgtggtggttgtaggaggaggaggctgcttgccgatggagttcaagtatgctgacatgtatgcttagttgacgaagaccgctatattatttcagatagtgagttagctagtaggaccagactggtgcttgttattgtgttggtgtgtttaacttgtccgctttaatttattttcagatcatcaataggctttggtagtttgttggggggtctatctatcagtaggaccttggtgttgtacatttagcactattatatttctttgccgggagaggctgcctgattgttgtgagcttaaacactactttgtgcgtatgtgtcattcagtggctaacatacatgcaggcgagagctctagctattgcagtcatcgatgtcaaatgaatgtgtgtgagagcagtgctatgatcacgaacgaagcacacatttttatagtcaacattaaggggaacttgattatatttgttattccaatcaacaatctatcctagcggccagccacaagcgtatca

SEQ ID NO: 172307 - DNA, 599 bp, Zea Mays
tagagaccctggtgcccatctagtgtgttgtgcgtatgtccggacgtggcttgatggtggtgcatctcgtcgtagcagacgtggatcggttgcgctagactcatatctttgccttgccaggttgctcgatagtgagttgttcattggagagctggccattagatagttggttagctggtctgcctcgcacaattagtcgctggagagttggtaagctggtctgccttgcagagtctgtcggcagagttggtcagtggagttgggtaccttccgaagcatcgcccaagatgccctcgggcgagtcggaaatgcgctgcttttccgtggttggcctcgggcgagccgtgaccacatctcctgcccaaggttggcctcgagcgagtcatgactgcgtctcccgctcgatgttggcctcgagctagttgtgattgcgtttctcgccagaggttggcctcagacgagtcgtggctgcgtctccctcctggggttggcctcggatgagtcgtgatgcatctcccacctgaggttggcctcgagcgagtcgtgactgtgtctcccacttaaggttggcctcgggctagtcgtgactgcctctcccg

SEQ ID NO: 172308 - DNA, 536 bp, Zea Mays
tgttcgagtcttgttgctggtttaggtcatgtcgtcattgtagttcaaccgctccgtcgctgttatttgtttccgccgctatcccatccacctttcccagattacaagtcgagacaccacattactcgatttgccctcgctagccgccttgtgtgaactctcgccacgctagccctagattaggttgcaagccgccttgcatcgcagcccctccttgtttcatcatctggcgcttacctattgcttataccagggaggtttgtgcccttgtgctccatagccgccgctatggttcctgccaatttgtgtctttgacaaccataacttgaggtaccttccataaaacgggcataacttttcgctcggtgctccgtttgagctcaatttttacagcagattcctgactccattccgaggtgacccaaactcgccttcagcttgtttggttcggtcaaaaaaatcaaaaaaaagtcgggaagataactaaacaaaattgtttaagcgttttaaggaatttcaaagatcccttgtgaatt

SEQ ID NO: 172309 - DNA, 457 bp, Zea Mays
ataaattttgcactaataatcattttctaagcgaatttccatagtttattctctgattttctaatttcttggactgggcgcattataacagataagtacaggggcctcgatataagaatcccaagagccagtgtatacatgaccggaccgcgggttaattttacaaaaaccaagggcctctttgttaaatcatccggctgaaagggtatcgagggtgttcagccgtccgatcagatcctgatggtgaggattagatccacagccgctcgaaccgatatcctacgggaaccatcggatcccgatctaatggtctcgattcaatgtgcgctaatctcatctcgtccgcaagatcggatatcaacggtgcacaattagtgtggtaacgcagtagcccaaaactcatatcaaccgtgcgttgattgatcgatggcccgcacggctcccatcctcgtcaacc

SEQ ID NO: 172310 - DNA, 818 bp, Zea Mays
atgagggtgagtatcgagtgagatggggtccgtcctcggccttatatacacgaccaaagagttatccctttacaagttgtgatcactatccactctactaatctcctcctttatcgcagtttgcgaccctacatattcggatttcgatcaccttctcagtcgagtcatcgtcgaatgtttagctcctaaggtgtgcgcaactgcatcacccgagatatcaatgcttctgtagcatataactcggacgccggtcttcgtcttcttgtatcaagttcacacgacctgattataacctgctggcccatcctacaggacaaaccattgggaagcccattaggcggcccatgatacgttttagtgtttgtgagaacccagtggatatctatcccccacaaaattctcaccgaaatcgcgacgtgagagttccaagccacaacgtgaagcggctcagctgcaagcccgacatctggcgagcaatccgtgactaacctacgcactactcagcacaagtttgacactacccgaagagagggatgaggcgacgctaaggaagaaggtgtcaccgagggcggaggtggggatcacgctggacccaacgagaggcagattgctggtcccgaaatcacccagacaagtaattgagtagcctccggtcagtcgcgcgcgtggcaacccacaccaaaataatccctggccgaaggtggatcttcacgaccacccgtcgaagccagggcggtgaagaccggggctaatcgtagaggcagtggtggcaacctaactcggttctcccaaaatcactacttctcccccgatgatgg

SEQ ID NO: 172311 - DNA, 647 bp, Zea Mays
gccaaggcgaaagggtatctcccgcccggagccgtccgattagacgacagtgccacaggaccgcgggtttatttctggtttagtaaaggtctcatatgaaaatgcgcacccgcaaaggggtatcctctattatcaaccgcaggatctggatcttacggctcgaattagattgtcgcggttaaaggacccgcgcgttatatgaaccccacgatccacgatcaacggatcacagcgccccattcccagatcaaatctgcgcccttagatcccagatctacgtttacgatttaatgaagcctgaaacacgcaccaatcgtccgatcctgatcggacgttgcccattcattttcctttcaccggtatccttgttcgatctagaccgttggtccacagatcaacaatccagcacgtctctaactagcccgagccgtgatcaaatccggccgttcattctgtcatctacggccatgagctcgtcctcatcctctgaccacacgccacggcggcgcaccttcaacctccgactctctctctctcttctttttttccacggccgaacgccaacaccgtttgcgcaccacgcggcgaatgcattccactccgagcgcctcccaccgcgcacgccgccggtgaggcctagaccctgc

SEQ ID NO: 172312 - DNA, 543 bp, Zea Mays
ctttgcctttgccatagccattgctactctactgccattttgtggtggcttcgtaaaaattccccctctcatcccctgattattacagtgcccatgacccctttctctggagggacctttcttcctttaagactagaagttggcgtgtgctttatgcatgaccgcgtgccgaatggatgcttctagtagttctgcatcagaagctcattctgagccttagcaccaagcaacatgttgacgaggtcacattatttgtgtacttgttgctacagtactgctgttggagcaccatattggaggggtagaaggtttggagagttttctcgatcatctctaagtctatggctatctggccacagaaatgtagctgagcgacaatgcgatggatgacagtgttgtaagcctcaactgcattgaagtcgagagtggcccattcatgttgcgcccgcgggagcatcacatgcttctccacactgaaacactcacatagctctgtccacaatatcatatggtctttcacctctggatactccatcttcaggc

SEQ ID NO: 172313 - DNA, 730 bp, Zea Mays
caaactgatgcaagagatgaggattaaaagcatcagtagattaaatttcagtttagtttgtttctggacagaatactttagaactgtattgtgctttattttgtaagtaaggtttgtctttgactttccatgtgaagttattctcttatatgcttcatactacagtactattcagcttaaaatcagtgatggatcgatagcttaagcattcaacacaagccagatctccaagcaattttctgtttgagtgctgatacttttgtccagctgcagtcattctgacgtaaccagcacttccttgtaagcttgcctctgaaactgaagtgctcggtcaggtttctgaaatgcattgctttgtcgtgctgaaatgttgtggtcatgctgtttatgcagagacttgtagcaaactgtggacttgtagaaactgtgttgccgctgtttgaactgtgatgcaggaatgctgtttatgcagagatgtcactgctcggtagtttctgaggtgtgtcactagctgcttaaatgatgcttaaatagtatctctttgtttctcaatcagtaacatttatgtagcctagtggtctgttgctgctaggtagtatctaaggtgctgggttcaaatcctttgccgttgcccttttttggcatctttttttttggctgcaaacaaactagccgaaaccatggccctctttccaccttttttttgcttctataatcctctgatattttt

SEQ ID NO: 172314 - DNA, 494 bp, Zea Mays
ggttggaggttggctgcttgaaacagactgggtgtggaaggaactttgaccaggctagttgagacgtgacagagcggatcctgctgtttgctgaagtttgaccccttggaagggaaccgaaaagatcgaaccctctgatgcctatcctgttgttgagctcagagaacttgaaattttctcttgaggtgacctttttcctcttctcgtgctcttttcacttggatggccttgttcgagaggtgcgagaaacttagaaagtcttggctggcaaggatggtcttaagttctggtcttaaccctttcaagaaacggaccatcttcttggcttccgtgctgacatcatcaggtgcatagcgagcaagttctgtgaatttgtggatgtattcactgacagatcgccctcattgagttaactccccaaattcctcctcctttagctggacaatttccgagggtacatgatattctcggaaagcagcctcaaactctgccca

SEQ ID NO: 172315 - DNA, 697 bp, Zea Mays
gggggctgcccacggggagggggcggagttccgcggcggggatcgccgccggtgggctctgggtgggggacgggggctggaaagtggtgcttcgggttcgtggcctcgtgagggagctgctcggctcacttaatttctcgctagaccaacggagagggagagggaggagggggaaaggactcaccggagaggaggacgacgacgacgcttcgcgaattgtgctcggggaaggggaggaggggaatggccgaggccggtgcagggaagaaggagctcggggcgacccttttataggcgcccgaggggaggggagcggtggagctcggcggacaccggcgagctgcacagtgccggccataaatgccgcacaacaccgccgatgagacgccacggcggggcggtaccggcaaggacgttggttaagggggggaggacagggcggtgccgaactcttcctgtgcggcgaggagacggcggtgaagggacggcggtgaagggacggcggggcgtcgtatgcggggaggacgatgaagcggctgaccggtggggccggtctgccagtgggagcgagcgcgcgagagagggcggctggcaggtggggctggcttgtcagtgagagagaggcggggcgcggagcaggctggcgcgcgcggaggcaggccgggagtgggccgagagaggaggagcgcgggcgcga

SEQ ID NO: 172316 - DNA, 925 bp, Zea Mays
cgcaaacactatttccttgaatcccagggtctattttgttaattataggacctgacagtgatgatctttctatagatcaggattgcgggttgataaaccgaaaatacagggtctcttttgcaaatatctacgaccgaaggggtatggaggattctgagccacacgatccaacatcggtggcccagattagaattaaccctatatgaaccggtacgcaatctctcccacacgactaggaagagacgaccctgattctatttcgttggattcaatctcacccgtgcacccacgatccaacgaccccggtttactcacctaaatcgttatactctcatgttaatctactcccttcaccggccgatcgacggcccccgtctttcttcttcctcaacgcccagtcacagtggtggcctccataccgcgaccccattgccagtgtgtagcttccgccaccctagtgccccgctaacagttcggctagttgctacgcaaaacagagggcaagacgaacaacatggagacactcaccggcgaccgaaaccgcgacgacattgaccccagcccaaagcggtttgccaacgagttccagactccagagggaacctgccatggctttggtacacttcggcgagcacatatgcacccatctgagcataggaaagatccgccaagatccttcgtgagccggtggacgtgtggagtctcccacacaggcaccgaacgacggaggaaataggggaaacggtggtggcaatcctccggtaatggaggtggcgctctgcatggttgtctttctcggcactggagtcgagcgcatgaaaggtgggaggtgaaagatatgtgcagcaggtagatatacccacggctgaggcccacggctggcgaacagattccccttggattcatggccatgcgaaaaatgcac

SEQ ID NO: 172317 - DNA, 345 bp, Zea Mays
ataaagaagccatcgaaagaataaccaagtgggcctgtgaactgggatctcatgacattgaatttctacctcgcaccgcaatcaaaactcaagcactggttgacttcgtatcagagtggaccaaacaacaggtgctgaataacccggaaaccgcagaagtatggcgaatgtattttgatggctcgttgaaactacagggggcaggcgcagggatcctcttcattgcacccggaggtgaacaactcaaatatgctcttcaattgttatttccagcatccaacaatgcagcagaatacgaagctctgattcatggactgaacattgccatatcactgagcatcaaga

SEQ ID NO: 172318 - DNA, 530 bp, Zea Mays
atcaaattctagctcatgacccttcatttaacatatttgctattgtaaatcgttttgttgatggcttggaacctggcattaaggttgtagtttttatgcagcggccatggacctagatactgttgtttccttggctttgttacaggaggtgctcactggtcacaagacccactctatgccttctaaggtagctgaaccatcactgtccagaactgtgtcacatccgacaccattgtcttcctctcaacctgctgctacaacttcagaactccggcgtggtgtggatggcaccaaatcaagcttgaagaaaacaaaatttcagcgttgatggcataccgtaaagctaatgggttgtgcttgtgctacaagtgtggtcttagatggggccaaactcacaagtgcaacgcaatagttcccttgaaattggtggaagaagtctagcaaatcttggagacctctgtacctccaaaatagaagtctatgccttaggaggattctggtgataatctgatgtttttgtccatcaatgc

SEQ ID NO: 172319 - DNA, 488 bp, Zea Mays
ggaagagcaccatatggggggaggagaaccaaacagggggaggaaataggagaaacaacgcaccattcatatggaggagcaccatatggatacccatagggtatgaaggagggtattgataattgaatggtggtagaagagtagtgtcggtggtagaagctttagtggaaggaggagcgtcgctgataagatcaaaattgggagaagggggagcatacatagaagatcgataaggacatatagtaggatataggagaagtgaggaaacacggaagtgcaaaaacatcctctcgacgttgatgtacgagagaaagtttgtcgaagacgacctcctccacaccggcagtggtgttaggaagttgtggaaattgtttgttgaacaagtcgttagagattcgaaagttcggactcccccaaggtaccatattgaaatagagaatggaagacgacaatataaaggaagatgagtgaaataaagaataaaggat

SEQ ID NO: 172320 - DNA, 296 bp, Zea Mays
gtgtgtgctccccctcaagttgtgcatcaagtatttgaatgacttgcacttttgcacattctagcttccttggaactagaggggatcacaacataccttggtcaaggcatactctatcactttcatcacacaaggatgccaatttgaatatcaattgaaaagccacttaacaccaattgaaggctaaatgaaaggttgactaaatacaacaatgcacgcctcagtggcacctaagccaattgaatactcacaggaagtctaacatttacgcaacttgtacatgcttcatatttaac

SEQ ID NO: 172321 - DNA, 972 bp, Zea Mays
tgttgaaaactagcggtgaactacttggagcatactccaagtctgaagataacgcactatcaaaggccttcgggagctgaaaaaagaaaagactaaatagagtttttgatgctattggatttgtgtaccctgattaccactacccaccgcgggggcagaaaagaaagggtacaacttctgggaagactgctgcttcggctactccaagcgagcctgcgccaaagaggaaaaagctgatggtccttacccaccaaccacgctacattgaactggccactgtgcccgaatttggcggtgagacctcttcagctactgaagcgaaataacctgctccttccacacaaaagattgaagagccggctgcaatgccaaaggcatcctcagccaaattagctgagccaaaggccgataatattgaagagacaggagtcgaggggacaaaaatattagaagttctaagcccttcgacagaagtgacagtgccgaaggcacaaaaaggtcttacagcgacctccaagaggaaaaggatggccagtgtactagatgtgttggagacgataaaaacttcaagctctactccagggaaaactgtcgaggcttcaaaaccgcagactgatacaaagttgaccgaagccgaagctacaaagagccaggccgagaccaaagctgggtcttcagagcctgccaaggagaaatccttagaaaccggagaaaaggcagcggaaaaagaagctgtagaacaaattctgcctaaaaaagctgccactcctactcccgaagcgccttccgaagttcttgattatattatacgacacgctttaggaaaaagattatctgaagaagagattttggaagctaaacactatgcccgagaactgaagtatctgaaaggggccttagtgttcaatggcacagacgaagatgacttcttatactgcctcccagacaacaaagaattatctgtctgccagg

SEQ ID NO: 172322 - DNA, 439 bp, Zea Mays
caaatatttctaagactcagagaatagttccactggacgacaggttgattcctacttaaatcaggggctcatgtgcaaaaaggcctgggtgaaggggtacaggaggatagcagccgtccgatctaaagccgagtgctaggattaggtgcatactcgaccgaatcggtattcaataccggttgatggatcgaaatccaacgtcccatatttcctaataccctgacaccctctgaccaaccgatcgcgatccaacggttgagacgattcttgcgaaggggtactgcggcttctaatcaggaccgttcaatttgaatcaacggcagtcactccgtcatcctccccaagccagcacgcggtggccagggagacggctccagcggcggtactttgccagagagcggcgcccccgtgttctggtgctcctagcgcgaggcagaga

SEQ ID NO: 172323 - DNA, 418 bp, Zea Mays
gtcggatataagcttatgtctgacggtggcgtagaaagccgtcggagaataagtggccgtcggatatgcgtcgttttactgtagtgttagattgatccatagcgagttgacattttttggtcagcttggataagacatcatagagtcaacttttgtggtccatgcctacctatgcgttgcgttggtggtgccatgaaggcacacgaccacaaggtttttccacacgcccgagagcaagaaaaaagattgacctgaaagcaaacaccgaagcatgcatgtcagcatcacacgtgcggccgcgtctcgatcgcgtcgttatccaatccggcgatcccccgatcgagattctcaaatcttggcggcgcgccacgcgtagacaatggcccccaccacgtcgatcgttactgcgcctttccgc

SEQ ID NO: 172324 - DNA, 531 bp, Zea Mays
cactggcaacggcgagaaatcgccggttctccgcccaccgaacccggacgaggacaccacgggaacgacgctgaaagccccgatgaacttccgcgccgaagctacaccaccccgctgtatttttcctctcggtggctgcgtgcctatggcgctccctccaggctatcttcctggtcgaccgagacggcgaatactgcaggggacaacaggtttatgggcgggcaggggggtaatgccgcagatcacgactgtcgatcgatccgcgtccgcatcgctcggagctaaccgcagaccatagaagaatacgtagtggtcccagctgacagcgacagtggaggatacgctggtgatgtcacccctgacatcacaacgtcattagctggctgaaaaaccataaactatcgcggctacgtgactatgtggctgctaggcgggcccatctcgtcagtgccagtcgcacgttcagccggctcacgtcgcggcgcgcgcaaggcgatgggccgaggcgcgggagagcaagttttaaatggg

SEQ ID NO: 172325 - DNA, 2525 bp, Zea Mays
gctcaacctagctattaatttgttagctttccaaacagggcctaaataccagtaggtcaaagatcttaaggcatttcaatactcctacataatgaaactacacagtacacaaacacatatcttcacaaatcttactagttacaacaagaaaaaagtaccttcttcagctgtgcctcaagctcatctctttgcttttccaattcagtaatctcatcaagcaattcctttatcaggccaagaaagtaaaataagaacatcttatttgattacactataaacaggctgggacacagaaataaacactaaagcatatgcatatttgttcaatagcataaatgaaatattatgcaaagaaaagttgatgttgtgcaagtgcatatgtgtgctgcgagaatctaagtatgcataactgctttcctattaccctatagcataaaatgggtacaagctacagatatgattcaacacacacatggcattgttccttagccatctagacccttggtcttgttctgttttttgtgttttttctttttgttcttggcaggatctctgccttgtaaaaccctttgggtttgtctcctttcctttatatataaagatgtgcagttctcctgcgcgttcgataaacacacacacacatggcaatttgatatatccaaaattttaaaccagggtcctgttttgaaagtaaagcattttctgtgaatgtgtgatttcctatcaaattctcccacacttgagaatcctatgctccaaaagggacttctgttgaatacactatttttgagtcccaaaagtgcatcaatgctttccagacctgtgcataaaataggtagcaccctaccttttcagaaacactgacttcattctcttttttcacacgaaagttgagagcatcttctttctggcgcctggtaaaagatcaaatgaaaaatcacatcaagttgtcagtaccatgatttggatatctcagattttcaaagaataaatgggtttataaatattacagcaaaagaaaattgtactacacaaggacacttccttagaaagttagcagcagataaaaattgtgaggacggaagagattatgtacaatcagcaaagtaacatatatacaaatacaagttgttcgttgcaagtacgaagtgtcgaaaagtccagataccacaggaaaccagaaataaaatgtgctagttctgagactaaggtgcgagcatctggcacattacaaattcagtaatccacaatgtcagagtaatcacaatgtattagttttttcatcatgttgcttaagcacacacaaaaaagtttaactgattttgaaccgagtcattgatgataaaaataaattgtgagcaagtaatatacaacaatagagaagagtttcaaccaaagaataaaatcaaagcaaacatccaaggatgaaatatattttgttcacatgagattctgtaagtgccatgacaaaattattctatacaggaaccaagaaaaaacaacttcagaagcaaaacctgtgctccaaaatacgctgttctgctttggaggatgaacatgccagggaatctgctaaaacctttagtttatctacctggtaatttgtgagtgctgttagcattacagagcatcaactagaatatttaggtaggcctgaaagtcctacagcaatcaacaataacaaaataaaagaaccagacaaagctatgggccacataaactctaaccaagcgaaactacctaagaatacatacttttttctagagaacacaggacactgagtttcatttcattatagaagagagaaagtagaggtcaatagaaaagagaaagtagaggtcactagtccataagaaaccggaccaaaacattatagtgaacaacaaaaacacagcctaacagggccaaaacatgttttccagccagcttctccataagctctcctgcagctagcagcagggacccctccactcaactcaatactgagatcacattagggacagctccatcaaagacacaagtggttttttgtcaatcttttgttgtaaagtactacaactatgttattaaaagtaggaatcatcatataatgcaaccaataaaagtatcagcaggagactgcatactcctattattatcagatctcgtatggaagcctgaagtccacacttcataagaagtcagatgctaagaagatcactgaaggtttacagctaacaatccagagtcattccagtaaaggggtgcttctaaaataacaactgaaaacatagggtaagccaaagaaagttcgaataaatgtgctaaaacttggccatgattagtagccaaaattatacttactccataacaattcaagggacctcaactcaaaactgaaagcatctaaatataaaacacaaacatgccttctgagaatgaatctccagggagtcaccaagagtgattgatttcttcttcagcagaagttcttcaactctagagcataagcggagttcaccaagtgcttctttgaagacctgaag

SEQ ID NO: 172326 - DNA, 751 bp, Zea Mays
atctctcccgttgatgatgcctccatcgaacggcaatccgtcgatcgccgccggtccgccccgatcctctccgtcgactgccatggttggcacattctcgccctaatcttctctgctaacagaaatgcacaccccatcggagttaagtaggactgctatctgaactcaacagcgttctgttttacccatctatgcacatgaacatgatattcatcactgtgctctgaactatgctagctgatgactcttgatctatgaacatgatattcatcactgggttggattattctttaaaggacaatttcgagcatcatgatagtctacttgcttgcaacacctgcacatacgaggaactttctgtttcttctccacattatcaccgggcttctttactttctgaccaggttttattcgtttgcacctacccacagatttgacttcattaggtggctgtataataacatggttagggattgaacaaccaataaaggactcgatctcttgaacttgacttgtcattctctctggtagcaatatggaaagatcttcaccaaatgcaacaatactatcccgaagtgtttgtaacccattgtttgatccttcggcacggtgaattaattcttcaatcttgcttctaatttgagatgccaactttgcattagttgtttctacagcatcctttggaacttctttcaacatgtttccctctccatcgaagacatcatccttagtcactagtttagtccatctc

SEQ ID NO: 172327 - DNA, 471 bp, Zea Mays
gccagactagcacaacaagtgcggaaaatcgaagtcttcctcaaaagactatccgtgcaaaagtcacctaagggtgtagccggaccctccgtgcagaagtcacctaagggtgcagccggaccctccgtgcaaaaaccgactatgagtgcagccggatcaacacaataaacgcgctagatcaagtgcacaagtcccctacgggcacggccggatcagcgaaggcacacagcctcatcatacaaattatacttacatacatgcagcgagggcatgacaccttacattggttcaaccttcgggatgatacccatgtccctatagttaaacagcattatcctcagctcctcaccctcaaaaagattctgcagctccccctctcctacactcgccccagccggcgaggacaacaattctcgtttgccagccccgtccacacgaagccgaccatcctccacctcaccacaatgacgc

SEQ ID NO: 172328 - DNA, 557 bp, Zea Mays
cttaagcgttagcccgcatcatggtgaatcacggagtgcatgtccgatgatcgccggaggagccgccacggtgaaagccatctgtcccaagtaccagtgccctttttctctccggtcgccagcaccattctgccaaattgagcgccaccgctattgcgctctataaattgcggccaccgtgagctccgtaggttagtcaagcacccagcctccaagaatcaccctcagttgatcaccagcaagctcgaattttacagttcccccaaatcggttcaaacacgccgcaagaacacctcgccgtggccagcgcaaattaggtccgatcatgttgtctttggtcttgttctagcatccctgtgtgttctgataacttatcgacccaaccaattgtgctaaaccgatgtagatcatcggaacaccttgagttgttcctggggtgcgcggtcaccgtggccagagacatttggttagccattcatgaaattgacttaggggaaacattcactaggtcccgaatctggtttaggccaaagaagggcgccggtccttgtgtgaat

SEQ ID NO: 172329 - DNA, 687 bp, Zea Mays
caacaggacaatccttacatagatgtccctttttggcatatgtagcaaaggcgatcttcatgttttgaagatttcttctttccttgtttcttgcttgctacatggttagtaaatattttctttttttaaaattatgcctttttgttttacatagggacatgacttaactaaatgtcccttctcaaagcatctaaaacaaattttatcatccttgttaataatcaagccattttctttaatatagggacatgacctaatcaggtgccccttttcaaagcattcactacacttcttacttttcttagtgtgaagtgtggcttgatcattaccttggatgttaccttgcatggaggcgtggttgaggcttttggtagaggtattgatcttcttcttatgttccttcctcttgacattcctcaagttcttgacattttcttcgaggggttttgtgcatgctacggttgttcccgtctcaagcttcttcaccatgtaatcacagttatcttgagaaggttgagcagtgcacttcccttttagttgtgtcaagctcgttcttagcctctcattttcttccttgagctcttgatatgtaccatcatttattcctagaaattctagctcaaaggaggatttgcttgctggcgagcaacaagcattagcacatggcaatatagttttaatttgaac

SEQ ID NO: 172330 - DNA, 423 bp, Zea Mays
gccaaagggttcgcgctctccaagccacccaagtcttcgacctcctcatcattcgccatctacaaaaatagcaccaaacatcagtatattttcttaaaaataaagtaaaataacaacaattcgtacctgctccatcgcccggtcagacctttcccagacagtgtcgcggccgtgagggccccacatcctatcataaagcgccccagcggaccgctttagcaccgcatcttcaacctggaagatctcgcggtcgaagtcttcatcggaccgatcgaagacttcgaagtgcctgcacccctcacgggacaaggcattcgcggccccctcacaggtgatgagcgaagcgaaggacatgagacccgtcacgatcgacggaagcacctccagctcctcctgcaaccacccgagaaagcggaggcccac

SEQ ID NO: 172331 - DNA, 402 bp, Zea Mays
gtgtagggtggaaatgaaggaagaggcatttcttgattactctccttgttgccaccaccagaagccccacctgctcccgggttgatctgacgggtagtcaccatcttcatattttattatgggtagctggtgagacatgccgtaacttttttgaaagaaggaaactatggcatataagatctcatagaagaagacttcatgtgataatcataaaggcaagaatcacattctaagcacacacaacatttccaccacatacttcataagataaaatgtgcatacaagccaattgttttgctagcatacacatgctagaccaaaagaatgttctccacacacacgttagaagccatcacatcacaggccttacaccatatgtcttgttcctactcctaggaacgc

SEQ ID NO: 172332 - DNA, 697 bp, Zea Mays
tttagagcgcaagctcttagcatatcttccaacacttgatttgtcctttctgtttgcccacctgtttgcggatgataagctaaactaaagtttagcttggtatccatggactcatgtagtcttttccaaaagcgcgaggtaaattgggttcctcgatctgatacgatcttcttcggtactccatgcagacaaacaatcctcgacatgtataactctgctaactgggctcccgagtaagttgtcttcacaggtataaaatgtgccactttagtcaacctgtctactatgacccatattgaatcatagccatctcgagtatggagtagtccaactatgaaatacatactgatttcttcccatttccctgctggtaccttgagaggttgtagtaattctgctggtctttggtgttcggctttaactcgctgacacacgtcacataatgcaacatgagtagcaacatctcttttcaatccgtaccaccaatacattttcttgagatcctggtacatctttgtacttcttgggtgaatagagtaagctgaatcatgagcttctctcaaaataagttggcgcaagtgctcgatttcgggtacacagattctcttcttaaaccatactgtgccttgttcatcttccatgaaatctggggctttacctaaaccaatcaaagctttaatttccttaattttctcat

SEQ ID NO: 172333 - DNA, 657 bp, Zea Mays
ctatattaaacatgcgactaaataacattcataaatttgatagcgaaatcttgtgttaactattgtttataatataacttacacaggcatcctgtttttcttgtccaatgcaactctttcacggttcaatacggctggctccatcaaaacctattatcatttgaaaatattttaaactaaattgtgattcttgttgcggtagcagatcgaggctccaccagttcgcaatactatgtttcaggtgttttctatttctttttcttttttgtcattccaacggggaggcctcattatcctagcactacattttagtctcagtttgtgaacaaacattttgacaaaccacagtatatatgcagctggaagtatgacagaaagaaaaaaagaacatgagctacttgcaggatcagtgccaagaaacgcagcgaaaaagcccgcaatctccggcacgcacagaacgaagcttcctattctcatatccacttagttttgttcatgcaggtagttaatttcaaaaccattgtgcagatcaactttagttcatacaatgttggtgataaagactattgtggttatgactatagccttgtaaggcagctttctgaagtgtatgagtaagcttgaagaaatccgacaaggtatggaactaccctttag

SEQ ID NO: 172334 - DNA, 447 bp, Zea Mays
tgtcaaatgcctcaagtggccagcagtttcctcctccacaccctatgtggcctacgggttacatgcagcagagtggtatggattgtaactttatgggaaacctcagttttccaaaccctgctcaaggtccgacaacaatgtgggcgcccatgcagacaggaaatactacttcgcaatctaacatgattccggcctcacaatcagcaatgtactggaatcattacttgaactttgtgaggaatcctcttgggtctgctgaaggcaatccttttcctgactccattccaccttccaatactagtacaccattgcagggttccaatactataccttcattacctgtgaacttggactcagatgctgaacacagtgttcacgacatcaacagtccacaaaagaatgcacctcctctgcagaaacataagaagtctaaggaacaaaacttta

SEQ ID NO: 172335 - DNA, 529 bp, Zea Mays
gtgccatcttagaaaaacgatcaacgacaacaaaaacactatcgctccccctcttcgtcctaggtaatcccaaaacaaaatccatagaaatatccgctcacggaactgaaggaataggaagaggcatatacaaaccatgtgggttcaatcgtgacttcgctttttgacacgtcgtgcatcttgttacaaagcgctcaacatcacgccgcattcaaggccaaaagaagtgtgtggacagcacaacctccgtcttcttggcaccgaaatgacccatcaaaccaccaccatgcgcttcctgcaacaacaaaagacgaaccgaaccaactaggatgcataggcgattagctctaaacaagtatccatcatttagcacaaatttattccacgtatggccctctttacaatttaatgcagcctttttaaaatcatcatcaaaagcatattgtcccttaattgtttcaagtccaaaaatacgataatcaagttgagataacatagcatagcgtctagacagagcatcgggaatcac

SEQ ID NO: 172336 - DNA, 715 bp, Zea Mays
ttcagaacctggttgtagtgttcctggcactaccgtggatcgtgggttgatttaccgaaaacagaggggttctttagcaaaaagtcacggtcaaaagggtatcagcccatgagcaccgttagatgcaagatcaatggtgcagattacactaacttctttatgaaccgatacgcaatgttagcatttggatccgagattgatgctcgagatacgaccatgctagtgccgctccccagccctcggatggacgacacacagtccggaatttaataactctatgtttaacctcgcccgcccaaattacatcggacggcagcagttaagcccacgctgaatgacaacctgattaaatctaccccactcattgaagatcctccggtccccggcctcatccaagttccctccatcggagccattgattaccggatcggtgccccgagccctatcccttccaacacctcaccggccaccgtgcacaccgccagaacacgatagcgccattagcgcacaatccgccccatgataccctactctatacttcgattcggtggggcaaaatgcagagaagagggagacgaacttagtgggcgcttagctttggttgtccgagatgaggtggtgcccaagcacggtgaagaacggaggcgaggacgcgtttgcccactaacgaccaattcacggctctaccctactctagccttcatgggtgcggcat

SEQ ID NO: 172337 - DNA, 477 bp, Zea Mays
tttacatgcagtggattacaatcccaatctgcaaaaaaatggcaaaacgaatattacaatgccaatctggaaaaaaatcccaacttttgaactgaacatgtatacggcagcgagccggtgacaacaaaatcctcctcggatatctcctgttcatggtgttgtgcatgccaaggacctccgtcacgacggcctcgtcggcgaccgcatgccacaacaaacggttgaaggcagtggtggataggttgacctgatgagaaggtggcggcggcgcagacagtccattatcgtcgaggccgtggagtgactcggaccaccgctgcgcgatcttctgggtgagcagcgataagagtgcgtggagtccgtgctttttgcaaaaagaatgtggcaccgtcggatgttagattgaatctatttccattataaaaaaccgttggatcttagatggaatcaccaactgacggataaaaatccgttgga

SEQ ID NO: 172338 - DNA, 640 bp, Zea Mays
cgaggtcactgagacagcgccaattttagaagtcatggaacgatcaggactagttgtgacagagtgagctattaacgaaggtactcctgatgatgaagctgaacaggttgttgttgaagaagaaaatgctgatgaagttgaggaagattacagtattttgatccccacaaaacccagccatctagattttgagaaatctaatgtgtccgaagacgacatgcccatgatgatgaagcttggctactttggggaaactgaaagaaaacttgtctgatttgccggagaagagactactcatgtaccgaaggatgatgggcaggattgtgatttcctctaaacgagatgataggggaggtgctaaagaattttgaaatatatcttcatcagctgactcctaacactatcgttaagctcagtgtcttcatctgggccctccgaagcgaagggatgtgcgcagatgctgaagctttctgccgagtgcacgagctgcactaccagacgaaggccagagcagatggccttcacgaaaattttggatgttataatttttgtatcgcgaggaaacgaaggcgccagtcctcagctaccgtacaaagtggcccactggctggaaaatgaatggttttacaagaaagctgat

SEQ ID NO: 172339 - DNA, 668 bp, Zea Mays
ccatgccttggtctggacctgatacttgtttagggcctgcagggcgaggacacggtctccatcaatgagatctttggaggttggttcgtcgacgttggggatggctgattggtttgtttggggggcccatgctttaactcttgtggtgtcattgcttaggatccatacatcaggcggaagggtgtgaacccggttgctcgacattctgtcgtattcagcgcccatatgacttcgggtaattggtctgcccatttgccatttttgtcgtcaaggagccttttcttaatgtcactgaaaatcttgccattggcatgttcgacgatgtcgttggattgtgggtggtagacagaggcgaagactggcttggtgccgatggaactgcagaattcccggaagtcctggctatcgaactgtttgccgtcgtcgactgttagcttggacaggactccaaaccggcagacaatgttttgccagaagaatttttgggcggtcttcgctgttatcgtggagactgctctagccttgatccacttagtaaaatattcgacggcggcaaaggtgaactttaggttcccttgagctgtaggcagtggcccgacgatgtccagcccccaacactgaagtggccaggtgtgggcgatgagcttggtgaattgtgaaggggtgcc

SEQ ID NO: 172340 - DNA, 782 bp, Zea Mays
gtctaaggctaaggtattttcaaagattgatcttagatcagggtaccactagatcagaattcgcccccaagatattccgaagaccacattttccactagatacgggctatatgagtatttagtcatgtcatttggcttgaccaatgctcgttcctactttatgtacttgatgaactctgtctttatgctagaaccggaccaatttgtcgtagtattcatagatgacatattggattagtccgagtgtgagaagagacatgaagagcatctgagaatcgtactaactagacttaaggagcacaaattgtatgccaagtttagtaaatgcgacttctggctcaagtaagtacaatttctggggcacatcttgttagaaaataggatatctgtggacccaagtaaaattcagcaagtaatggaatggaaggcatctacctctatttcagagatcagaagtttcttgggattagccggatattaccgtcgctttatatcagacttctcgaagattgccaaaccaatgactcaattactgaagaaggactataagtttgcttggacaacggagtgtgaaatagcttttcgtaccttacaaacgttgttgaccatggcgactgttttgcctcaaccggatattgagaaaccctttgatgtgttttgtgacgcagcagggattggactcggttgtgttcttatgcaagatagtaaggtgatagcttatgcatcgcgccagctaagaaagcacgaagctaactacccaacgcatgacttggaacttgccg

SEQ ID NO: 172341 - DNA, 1196 bp, Zea Mays
ctgaattgttattctctcgaatgacgaagatatgtccttcaagaccttcgtctgagagccattgtatccaaaaggagatggtgtttcggaggacgaaggtctttaatctctaacaattgtgttgtcttgttcttgatccatagtatttaagaagtaaacaacattggcacccacctccggtgcactcgaacgaccaccttcggcaacatctcaagcattcacctctatggtccaaaatctattcacgaaggggtatgtccacttttaatcacagatgcccatcatgtgatggacgacacccccaccattttcaacctcccgccgcttacccactcaccacgctagccagcccaggacgaccgaggccatcttggtgcactgcccggccacaaccaccatgcgagccctagcatatccatggccgcacgaactggggacgggaaaagcgacaacatagcgggagatacccttaccgatgatgaggccttgacgacattaatcccgacgacgaaccgcaagcaccggcatgccccagctccacaacccattatccttcttatttcctcctctctctctctgttacccgccacttgccttgctcgcgcatggtgactatttgcccagcggctcccggttttatagaggcaagggcgggatccgccatggtggtcggttgaggaggacccgtgcatatttttaggagggttggttcgtcgagatggtgcttgacaatggtggacgacaggggcaaagagaggtgcacaacatatatacccttggccccagggcaaggaacgcgtccagcctaacggccacggtgagcccttaggtagcaaccgcggcatgcaaccagatgctcctgaggatacggttgactctgactcgatggccctgctcgcccgagcttgttcccacaaccatgcggacccagtagctgagcccctgcccggcggtcccaacaagaggcattctgtgcggaccaagtctgttattccgtttgagttcaatcccacaccgggaggtagaagactatctggctaagggggtccacacgacatcgacacggcaacagaaacggatggcgtcattcaggatgtcatggtgacatcaatgaattaaaatatggtttcccaaggtggctgcgcgcatgacgctgtcgatccgtccccaccagtcattggctccggtagcacaac

SEQ ID NO: 172342 - DNA, 451 bp, Zea Mays
ataccgtgttaccggccttggagaatcaaagcttttggctgtttatattgttatgatctcgtgtggtgtttcaaggcatccaatatgaatgtgctcttcggctatttcatatatgggtgatgtgctggatttctggttcatatgaatttgttcacatgtgaatgtgaaaaggctcaatatagatgcccttgttttcctttatttattagaaggtaggagccaggcaggaaggggcaagcagctgacagcatgcaagcttcgttgcttctgctgcatatttttggttcttttttgctttatgtacctcctgcattccttgtttaatttctaaccataataatgtttcataagctcaaaagggcatgcggcgctgttgtcaaaatctgcaagcatatcttttttttcttactgaaattccacttattttcagatggaagtttcagagtggcaa

SEQ ID NO: 172343 - DNA, 888 bp, Zea Mays
cccatgcccaatttcccttattgcgccctgtgttcggccaatttcaccttcaccggtgctcggccgcggcggtccgccgtgctcgcgcggtggccggccaatttagcccggtctagttcaccggagtaggtccccgtgtcacccctgcctctgctgaagttagccaaggccttagcgcgccttaagttcccctccccgtggccggaatggctcaccggagtttctccggcccgcccgaagccttctcaccgccgttctaccctctttgctagtggattcatggcccttccccgccattgagttcaccgtggcgccctctccctctctgcccaactccagcgaccctggagccaccctagctcgcgcctgccccaactccggcgacctcaccgccgcagagaggagcggcgtcgctccccgcacgtctatttccccggtctgatttcccccgtccgatcatgatcgcacggcccggaccgcgggataccgctttgcgcacgcgcgcttgacacgccctggcctgcctgtcagcgccacctgcagctgctcatccttcctggtctgaattccctccgtgatcgaacggctcagacccccctcggaccccctcctccgtccgattttgatcgaacgactcggacccctgtagtcgtccgtttccctctggcgctgagcccgctcggtcagcgcgctctcccccctctgtcgctgacactccttggcccgcttgtcagtggcgcccgcccgcgcgcgcgctttcggccgcagatctactcttagccgttggttttagatctaacggttagcttcacccgataccccttcgcgtggctgttttattagagaccctcagtttattggaaatcaacccgctgtccttggttttcg

SEQ ID NO: 172344 - DNA, 774 bp, Zea Mays
cagccggtagagggaggtccggccgacggcgtcggggctggggaagaagcagctccgctgctggagaccagagacgccgcgtgagacagagctcagggagggagaggagcgcgcagacaccagggcgcgcggcgcggaggaagcaggagcaacacgcggcagggattgagctccactgagcgcgagctcggagggaggttctggcgcgtggaggaagagaagccgataagcaggaagccaagcgctagaggagatggctggggaagaagataagtcttcacgggggatttttacagcccaaagcggcggcagatttttcaactagcggccggatggataggattgtctggataaaaatcaaagggaagaaaaggataacgacggctgcagatttttagggatatacactgggttgacatgctatacagctacacatttcattttaatgatttagcgaactaaattatctactaatcacttgctgtcagtaataattatggtggtttggtttgcttcggacatgatgcaaatagaccgaataagacggatttcggcttcagtattttaatttacgactgatttcgttgaagttaaatcgattagaaattattcaagtccggctctaattaccaaattctcctgattattaatctcgcgcatgatttttctcagacaacgcgcgattcagactattttgccccgaacattctagtcgtcgagttcaaattaatctgcttgggataaaatacgtaaaagcacatcaagcttccgaat

SEQ ID NO: 172345 - DNA, 515 bp, Zea Mays
tagggatttggattggatctcagcaggccaatccaccccgtcgtcgctacctcgttcttgtgtgcggctcgtcgccgtcactctgacccggttgtggcacctgctcccgttgcggcgcgcgcttgtggccgatgccagcgaatccgtggccctctgcaccacttgatagcttggatctgcgctatcgctcctcatcctcgaccgggcacggcaccaggaaacatggagtcatttgtttctaagatgtagcttcgcaaagagatgatgggaaattgttggggtagcttcgcaaagagatgatgggaaattgttggggtctcacgccaacccaatctttgaacccacacattggagtccggagtatgagaataaaactagcacaactttggtctatggagacaattatcataatgatatggtgcatttggaaatgtagaaatggttagatcttcgaaagcacccctccgaccacctagtggtgcaaaatcagcttcgttcaagagatgaaccttaat

SEQ ID NO: 172346 - DNA, 315 bp, Zea Mays
ctagcctctaaggcaaggctcaggcacttaacttggaataattcaggcagttccgccacatgaatggtccaataaaatgaggggacaatttgcccttaactttaaatctcctcatcccacgaagtggtcaccttgaggtacacatgatcaccttcctcaaactccagtggtcttcttctattatcagcgtagctcttttacctggtttgagctaccctcaagttctccctgattacacggacttgttcttccgcctcttgaataagttcatgtccaaagaactgtctttcttctgtcggtcccaatatagaggag

SEQ ID NO: 172347 - DNA, 966 bp, Zea Mays
tgatcgtgggggcacggaccgagccttaggacccgacagtcaggcaggtgttcaacaatgagagatcacatccaagagtatgaagctggcactgccagctatatacaatacaagtaactgttcccatggtcttaactgagtaccagctgttcaccaattggctgagtagcgctagtatcttcatgagacaccttaacaggcgatgtacagctacgtacgggaacaacaatagttctgtgtaggttggagtgatgttttatactattatcttcgaagagagagtaaggtaaacaaaaacaacaagaactcatacaaggttacaactaacaccttatgaagaacaaaacatgcatgacgacttcttccccccctgcctgcctctttccttatcagccaaaccgagcctccacctccatcacattgtcctttgcaaggtagcagagagggcatactgtaagactgattccgcacgactcgcatgcgcagaggtgttggcacggcaggattagcatacaagcatcacgggcacaacagaccttacagagaagcctggtaacaacaacacgtgtggtgctcctccctacagaagctccctccacgttcggtgcctggctacaggagccagtggaggatgagccatcatcaagtgcgtggacgacacttgttgttgcctgcaacacaggaggcagccgggacatgatgagccaccggttcatttcgtagaaccctttggcgaggtactgcacctcatccctttcctgcaacgcggttcgcagaagctcttgcgtgctcttcagctccatgcgtaggcgcgacacttctccgttcttttccgccagcgcatctctcgccatcgactcggccaggtttagtagagtctcgttttgtgcagatatctgttgctgtagctgtagccgtacctgctcgttctgttgcaggaagtgagaagaaatggacatatataaa

SEQ ID NO: 172348 - DNA, 410 bp, Zea Mays
ctactccccccactgaccaggtagcgccgactgtttttctgaattaaggggatttcctcctcctcttcctcatcctcgtcaacaatacgaacaacacacccattggggtcagcgtcggccggattgcacccattgggatcagcatcatcaaggtcacacccattggggtcagcgtcagcagggtcacacccattgggatcagctccagtaaaaagttccactggcacttcctcagtagtaggagcagaagggtcggcatcctgattcaaatatgacactcgccgaagcctcctctttttcttcttcttcccctcggcaggactagttggatgactggccgggcgaaggcgctttgggcgagcaccatcaaaattttgagcagtcaaggtcttttcaggcccggggacagt

SEQ ID NO: 172349 - DNA, 618 bp, Zea Mays
gtgaggagttactacatcattcattgccattgcactgttgtgctgttaaaaaatttgaccatagccgaagctttctgcattgcgttctcgagcaaacgtttcatcatttaaggttagcttcgtcaaatggtgaaatcattgaaatggccagagtgcgatcaactgctagagtgtctcatgagggggaagaaactgaagccgtcgaaacagcaccgatttcagaagtaatgaagcgatcaggtctggttgtggcagaggaggttgctgacgaaggtgcttctaatgccgaagctgaacaagttgtggttgagggtgaaaatgctgatgagagtgaagaagactatagcattctggtcccaacaaatcctagtcatcatgaatttgaaaaatctgctataatagaaggtgacatgcctatgatgatgaaattggtctattttggagaggctgagagcaaacttattcgatttgctagggaagaggtaatcccggagccgaagaaggatgaagctgtcgtttttaagagcttcttcagagcagggctgcgattccccctgaatgaaatgataggggaagttttaaagaactttgaaatatatcttcatcagctgactccca

SEQ ID NO: 172350 - DNA, 1006 bp, Zea Mays
gcggattccgttgcggggaggggataacgccatggcaaggacttgaactttagggggattccttccttctagttgagcttccagggctgcgatccttgtgtgtgcatcctccagctccaagtgtaccctagagaggtccaaggtagcactatctaggtcggtgttaagacctgccaccacaccagctatggtgttgagacgatcttcttcagctccacctagaacaatgctggtctggctttctccacgaatacacagaggaagatgcctgtacttcgtgttgtgcaactactgccggtaggtgtggctgagggaccactgagttcgccttgcaacatcgctgaccgaagtagcgtaggtggatagcggcgttagagactcatgagctgacagagtcctgaaccctctatcacttgcatccatcaccctgacatgaatgcgagtgatctagtagcaagcctgagggggttcgcacactcgcctggtctcatacaggggtcggacgtaggttcccaatgcatgcagaacatcctgcaataggttagggaagtgccctgtctcgaacattgatgtataatgttcagtgacatgccataaccccacgtagtggtcctgctattcatcgttggcttcttcgttgatgttgtcctcctcctcttcttcttcttcatcgtcgtcaccagagtcgcccgggttgtcgcctccgggagcagggcttggactgctggtgctggcggtgcagaagatgacgatctagctacgaaggctagtgattctgccaacggggtgggcgtaggtagaaactcctccgaactgtccttcagaataactcttttctccacacgaatgcgagggagatccacagggatttccttgaccaccactggatagacggtggcagagggatgtacttggtgttggtccgggtggtttggattgtacgaaccatctacaagagaaaatgtcaactcagttgaattttaaagaggtaaggttaatataataa

SEQ ID NO: 172351 - DNA, 556 bp, Zea Mays
cattagcgggttgggattattttcaaccttgggatgaacagcggtcttggtgggcaaagaacggacacggtcgtcggtgagcgtttggatggcgaggtacaacggcgagcggcgtggacgaacttcggcgagtctccacggatggcgggcgattgacgaacggtgtggtcacggtcatggggtgttgcgcggacggcgaagtacaaactccggtgcgtcaccacggcgaactccggcgacggcgtgcggatgcggacggtcaggcaacgagcttcacgacggcgattacgtgggcgacgagtggcaacggcacaacaatacgttgtcgcgagtagatcaaggacgtggctctgtgcagtgggcgagcaaggagcgcgagagagaaagggagcttgggaggaagagagctcgtgcgtcggtttttatagggaggaagagggagagagagagccggggagggggagaaacggcgaccaaggtcttcaaggcaccattgatggcgtgcatcaatggaggggagagtggggatggagtaacggtcgagttgacgctccat

SEQ ID NO: 172352 - DNA, 399 bp, Zea Mays
tgacgttcgatagaaactgggagtccagtttgtcgtatgccgaattctcatataacaacagccatcaggccagtatcaagatgtcaccgttcgaagcgttgtatggacgaaagtgccagacccccctaatgtggtccaacgtaggggaaaagacactggaaggacctgccttcattaaagaggccgaagagaaagttgccctgatccgcaaaagattacttgaagctcagagtcgacagaaaagttatgcagacaacatacggagagaactcaaatttgaggaaggagacttcgtatacctcaaggtctccccgatgcgtggtgtcaaaaggttccaaatgaaaggaaagctagaaccgagattcgtcggcccctatcccatcattggtagagtgggac

SEQ ID NO: 172353 - DNA, 1008 bp, Zea Mays
tgaattttctatgaattattcaaattctagcactcatttatataataaaaacctattttctaatccatttattcaatttatcacatcactggactgggcctcaatttctagagaaggcagggggctatgcgcaagatatcccagacacagagaacagggtccctggacggcgggttgttttctgataagcgtaggggttcttttgtgaaatgagcggccgaaggggtatcttgagttctcggccgcacgatatagtatggacggcacggattagacttagggttgcccgaaccggtatgctgagatggtccttggattcagaatcaaaggctcggatttaattaaccctagatctagttcctgtcgcacgttggaagatcgagcgaaggtgtacgctggacctaatctcagccgttcactacgaaaccaacggtcagggtgcgttcttccaccccgccgcactgccacggaggagagaaaccccgcgcggcggcgcccgtgaccggagatccaatccgtgcactcgaacgtccattttctaattcggtctagctacatattgcagatggtacactaagcacggggatgagtttattaccaaggatttgcggtgttgtgtattcctgacgaggagttgcggccgcaagatgaaactcgcccgtcggtgagaaattccactccaattcctggcacacggcctctgcttccttcacagaatcgcccgcaacgcaccgaggattgcccaagtcacagtcacggccgagttcctccacaccgggacttagttcgccggagcggtggcactcggttggttctaagctctggtggcgagaaactggggcgcggccaaaaggagatgggggcacgagcggcgaggtcgtggggtccattatttgtaggcgtggcgaggtgcggaacagctgcaacggtctccgaagtctacggcgaagctccgccaagcacgcgtgttcgttacggaaggggaagctgacaggggagggcccaccc

SEQ ID NO: 172354 - DNA, 835 bp, Zea Mays
ctcagcccatgccctcacctctactcggcccagtaggaagatacccatctacgccctcttccttcaccgcacggcctgcacgcctggtgccactgataggtagggctcgcatcgtcagcttcaacctcacgtcgaagctgtcgcgtgcttgtgccgtggatcccatgcctccgtcgtcgctgacacttgggccctgcgcgctagccatccccctcggacatcaccgtgtgcgcaaggttcgcagcaactcccagctagcataaccgtctaggagtcgcccgaccacgatttggcctctgtccaagctttgcggcaacaactccatcaccagctatataatccaatcgtccgcacccatacaaccatcgcatggagccgagtatcaccatcaatactatgagataggtagtggtcagagggttcagagaattcgtcgccacgagccgccgcgtgaggagatcgaaccaccatcatggatgcaatgatgccatcgtcgaggactccctgttgggcctgagagcttcgcttgatccctatgaatgctctcgtggcgtccgcgcgagggaatgaccaacaggggatgggaaatttctcaccagcgcaatgtcaccgccctggatccacgtacctccgtggacagcgtcgtctacacctcggccgtcggtgagtaaccactcaacgcttttgcatcgttccgaatctggggtagcacgttctggttttggtttatcactgggggcggccggggcgctgctcaccgacgcatgactgccacggcggggtatgcgtcgccgtcctagatgtcgtggggagagggatgagttctggtccattg

SEQ ID NO: 172355 - DNA, 1150 bp, Zea Mays
ttgtggatgcacgatgtatcaaagttggagctggtctattaagctataattttgttgtagagtgttggtcacgttgctatagaaatctgagaggaatttggccctgaactttgactgtcaggtgcactgaatcggattttgccatggtacagtgacctgataaggatcagaacgccagcgcaaaatgctcaccgccggcgacctctttgtcgggattcgtgccacgggcgtatggatttcgttcaccgggtaaatatctcgtcgtggatgtgcatgagctactgtggcctcgttgtcccctgccccttttcaccggcgacgtggcctcatggtcgtcaccggagttgccgtgctttactgcggctgtgccacactccaagtcttccaccacgtcgtccctagccgtaacagctcaccagtaaccgccgtagctcctcaaccggtgatcaccggaggaagcgccacggtgaaagccacccatcccttgctccagtatcactgttccccccggccgccagcacgaccttgcgaaattggacaccaccatcgatgggacttataaattgagccccccctcggcttcgccatgtatcccagcagctaccgcacacacctgcatcccaaatcccccactagcgagcacaaatttcggattctccccaatccggttctagaacaccgtgaactcaatctcgtcgtggccagcctgttctggtaaaaatctgcccaattcaaaccttgtttaagtgctctcgtatgcttgtgatgcccatcgacccacttaattgcacggagtagactctggtcgcctggaacacgacggtatagccgttatgcacacggtcaccgtggccagagcaaaccattgggccatagatgaaattaggttgggggaaatgctcggggtaggtctaatttggtgtccgtcgctcgggagcgctggtcatggccctgttcggccggtacagttgctcaccggagcgcggtcgtgctccacgccgtcgaggaccttcccccgcgaagaattagaaatttgaggacattattgcaaactgtcagcgaatgtattaaatagtaaatgaacctactccggtttagcttgaaacccgagggtccctgtgtaaagtcgccagtgcgcgcgggcgtacgc

SEQ ID NO: 172356 - DNA, 401 bp, Zea Mays
ggttgtttgatgctgccctgtccagtgatcatgttgctgctctggcggccctgtttggctgggaggtgccccctggggtgcaggcctgagctggttctgtccccgtgttggtagatggctttagtttctccatggagcctggatgttttttggtttggaatgttaggggcctcaacagtcgtgctaagagagactctgaaaagtcgttggttgtaagcctcagacctgctgttgtatgtcttcaagaaaccaaaatggtctccatctcagacttcaacattctttctattcttgggtccggattcagtaattttgtttttagtcctgcccatgggtccagaggaggtattttagttgcttggcgtgatggttcctttgtttcagcagcctcaataatcaag

SEQ ID NO: 172357 - DNA, 450 bp, Zea Mays
cactgtcgacccgttcttcgggccttgttctacccaaatcaaagaatgtccgtagacccaagtgcacccatgaacctttccccagcctcaattcggtcatcctcgccgtcgtttgctcggaatgcgttcatcctcttacccatccgctcggtcaccgtggaccgattgattcgtagtcccaaccataaaattgatttgggggaaatgatccgtaggagttcaattgtgttcctgtcgcttgggaacttcagccgtcgcgtcatctggccggtctagctcgtcggagcacggctcccgcgcggttcgccgtcggggacttggtgtggtaaatgaatagaacgcgaagggtgtttctgtaaacggtcagcgactcataaaaacagtaagcaaatctaatttgagttagccaaaaccgtgagggcctctgcgcaaagtctccctcgcgggtgc

SEQ ID NO: 172358 - DNA, 840 bp, Zea Mays
tggacggtggcttcaatttctggaaaggctagggtgctctgtgcaatatttaggacctaaattaaattttcttactgctagataggacggcgggtttattctacagaactgcaagggtttatttgcaaacaacgcacggtgaaggggtatcgtgaagtctcaaccgcccgatctaacccagacggtccagattagatcgcgttttaatcgaaccggtatacgattcaagcccactgatcaagatccaaaggccaggattttattaaggcgcgatccgatccctgccctccaaccaggatctaacgcccccaaagcgtcccagccgaatgggtatacacgctctaatcctagccgcacgctaccggatcaacggatcccggttgtcttcttcaccccggccgacggacgcaagggatgagagcgcccagggcagcggtgccattgccggccaaccccgcccggcggccggatgcgtatttccaatcgtagactagcgcaggattaagcggaaactaaaacgaactcgagaggggtgcctcaccgagggttgggatgaagacggggccgatcgatggtgccctatgcgcacgacggcgccccaaatgctccggctagcaattatctatcaacgagacccacaacgggccccaggaagctccgcccagattcctcgtgcgccgatgatcctccagggtcgcccaccgaggcctgaccgacgatatggacggaggtagactacggcgggatctgccttgctccaccatctgcccgcatggatctcacggaggcgaaattcgatggaatcccacgacaacttgttggatgggcaacgacgtaggc

SEQ ID NO: 172359 - DNA, 1181 bp, Zea Mays
agcgtgcacgaggacgtcatacttgtactgtgaagatgagcaatcacccactattacagcagcgagctcaccattggctggtaagttgtactgtgcgtcatgccgtgtgttacagcctaacaatcgcaacgtcaccttttggtcgccttcttcgtctaaacgttctttagcaaagcgaaatgccgcgaccagcttgttatgctcatctagcatgttaagtaataaacgggccacctctggatccggacgatcatggacatcagcctcattctcaaacatgcccaacctattttgtacctcatgttcagtgtcatatatgtaaagttgtgcaaactgtgggcgcaatccattattgggtagtagcgagccaatgccattgattttgaaaacataaggtgcagtaccgttatttatcgatcgatcaacgacagcacctagtgaggtaaacgcgaaaagggaattgtacgagcggatttgcctaaggaaccgtcgtgcacgactatcaccatcgaatcgcagtaggtaacataagggtgctggtggacatttgtaaggctctaaaacaatcttacctcctctacaacaaagattgtacacaagcctgcgctgcgaaacagcagacaaacttttgacccgttcctgaaaccagaaaacggcgccacaatgtgggcactcgtctgatgggccaccatagtatgagcgatctttgtaggtctctacaggcaaagatgtgtaaatgttgcatgggttactttagaaatatgtagagaaaataatccaggtggtacacaagcacctttaagcagctcgacgtatgatctttcaagagacggtgaggctgcatccgtgctaactataagcagaaagtcgagcataaattcataggattttttacgcgcaccacacatgaaacctaaagattattttgaaaagacatacggtagggaaaaatcgttgttggcacatgctcgttcagcagacgcaagcgtacgacgcattctctgtctgcgatggtgtctgttagcggtggcaaccgttgtaggaaagtcgagtaaggacttgttgcctacaaacggcatgtacacgcatcttagtatgcgtatagagctgtagtagatacaagcagcatgaaaagcctgacagtcactaacctggccacttttgacgaaccagctgagagt

SEQ ID NO: 172360 - DNA, 950 bp, Zea Mays
tgaaaataacgcagggctgcttcttttggtgaagaaaacaggcttttgttgcactaacatgaagttatcctgtatgaaccgtttcttgatgaaagcagattgggttggggtaaccatctactacagttttccagctagcctattagccaaaagctttgtgactaatttagcaaaagtgtggacgagactaattggtctgaaatctttcacattctgtgctccctcccttttgggcaaaagaatgatatagacagcattaagacccatgtttctgaatttccgagcccacacccaagatatggctgcccataatgtcgtctttgatgatcgaccagcacgccttatagaagcgtccagtgaacccatccggtcctagagccttgtctaaagggagctcttgatagtatcccaaacctcttcctcggagaaggaggcgtccaaggcagctaagtcaatggaaggcatgcctagagcatctaaatcaatagtagtatcacgcacctcgcaagacccaagcagtccactatagaaacagaagaactgggctgccttagcatcaggtgatgtgagggtacgtccatcatcatcagtgatcttagaactaaaattgttacccttacggaacctagcctgagcatgaaacaaggacgtgtttgcatctccatccttgatccaactaattcgggatctcaatctggcattagttcgcctaagaaaggagagggccaaacagtgcttcttgagtgtgtttttgagccggtcttcatttttcagcaagagctctactatcctgagctatttcaagttgatgaagaacctcctttgccaaccaccactgactctaaatagtaaacatgcccccacctttttgtcactccaactctgaagacctttggtagtggccttaagcttcaatgataagtcaccaagggataggaccctgccagggc

SEQ ID NO: 172361 - DNA, 889 bp, Zea Mays
tgcaaccggattagcaaaaacacgaaaaaacacctaagagcacgaaatcaccactcacaggaaaaggaaaaaacccttagtatattcaacaaccgaagacttgcatagccattcctcggcgaaggggggcgagggcagtgtttcactcaattcgccaaggcatgcctatgccaatctattaaatattacaaaggtttcgccttcgggatcaggccaacctcctagaaagtaaacaacataagcctaagctcctcgccatcaaaaatagccctaaggtcttggtcttcaaagccacattcgattgttggcacaaggacgaccctagacgaaggcctctcctccgaccacgccctctctcgttcttgagaacgctgaggtgacatgtgaagcacttcacaaagcgaaacctgtaggcgaggccccccattcccacatgatgacgccttcaggagcctctgatgccttggggcggctcgacggcggttcccaatctccgcttcaatactccaactcttctcttgcttctcgccacaatcggcgagaccctagatgaaggatcccccgtcctagactctgtcgcagacacatctaacggtacaacaaaatctaagtcctctttcgaggactcatcgtccatccttgcgaacgggcttagtaatccttcgctacccgatgaccatgaatcaaaatcagatcccctcgttgctaaaccctgttggactccgacaaagcaatgacgtaacactttccacaacactaaatatttttgtccccttgcccaacaggccaaaatctgcttgtgcaggcccagtcatcggaacctacgcaatagccgactttaagtattaacaaatagacaaagtattcttgcagcaatcctactcctatc

SEQ ID NO: 172362 - DNA, 1100 bp, Zea Mays
gccgtcttggatgtcccgagtggcccgtcgatcccggaacaccctctggaactcccctccccgacagagtccctcttgggaggtgagatctagggttctacgtcgccagaagacaccctgcttcatcacgaaccatctgagccctgcgcgcggaccgtgatgcagagaggagacactcctacagcatggttacggaccatccatgctcccacaaagagcaccggtaggtggtgcacccctagtgtttgaccccaaatagaagacaacacacttttgggcgactccgctgggtacaagaagtgtgacctaacatagatcgccccagatggtcggttcaaaggaccactttggtatctccccaagcaacattgtgaagccgactatggagacctcatcggctgaagatcaacaagaatttgatgagtacaaaaggcaaataatccaagaagccaaggcaaagtacttaactaagttcaaggtggacaggcacgagaaggtcatctagcaaaggaagactaacctagcatcacttcgacctactgcacctgcccccaatgtaagtaaaatggatgacatccaatctcttagaacttacatagatgaacaacaagagcaaatgcaacaagtaatacggggtatgcaagtggattataaaatgatggcgcgtgcatttgaaaaatatgtcattcccaatttcccatagtagcatttgctctagaaactcctactgtgctagaccatatcgggtgtaccgttgtggcatagtctggcacatacatgcatgaatatttgtgtgggatgtggttaggctgctcattgaagaactggcaatcctcaggacctccacaagtcttgtacacaacgtatgccgatgaagaggccaattgtgtttctagggcagcaactgaatacggtataggtggcctggtctggaaaggaatctcccctttgtgacttcccagtaccgagcctgttggagagtacagatgcttcatgatctcttgaacaatgataacaaccataggttcaaatgcattcatcaggctcttggagtgacgatggagtgaatgagcgaccatgtagttgacttcttgacgtaa

SEQ ID NO: 172363 - DNA, 649 bp, Zea Mays
gaatcatgggaattccctccccccacggtcagggagacagccgaatgttcgtactctgagctggaccgagtcccccacggatcaggaagtggctgaagcaggggttttgttaacagaagttggattgctgaaacaaaggggtctgactgcagaagctgtggtcgctgactttgttttcaagaacattcggccactgaaagacagagcatatccggcttatctgtaccgaggcttggctgactcaacccgggtaaccaacagaagaattcctgctgtggacttagtgagccggcttgagatgatactcagaggcaaggtatcgaacatcagcgcccctattgcatactcagcctggaatttgcctccttcccaggcttttaataatttcgtgtcaaatcctcctgctggtgatagcggtttgggtcttagagtgcgaccctctcttgaagaagttagtgctttggttgcctcgctcggagaaattcctgacgacgagagacaggttcattttgaggtgcctttgaatccaagtgatgcagagataagtgccatgcttgatattttagccgaggattcctctgatgccgctcctgctgaaacattggtggtggcgcccatccctgaggctgacaaagctttggacgctcag

SEQ ID NO: 172364 - DNA, 365 bp, Zea Mays
tttggccgaggctatcgctgccctggtcaatgccactgcggataatacgcgcttcttgcgcgaaatggcgggcaatcagttccaacagcatggtgggagagctcctcctcaaggaccgcgtgaaactacatacttggaattttctgagactcgacccccgctctttattaaagcagaagaacctatagaagccgatgagtgggtaagagtcatggaacagaagtttgggctgattcgctgcacggagacgcagaagccactgtttgctgcacaacagctgagagggtctgccagtacttggtgggcaaattttgtagcagttcaaccggctggacatcagatcacttgggaggaattcaagctag

SEQ ID NO: 172365 - DNA, 386 bp, Zea Mays
ccttgccctccgacgtgttctaccatgtcattggcacaccagccgtccgtaatccagagggtctacaagtaaccaacgacgtcgagggccatcacatcatcaacctcatcatgactgaagattggcaggccctaataaccctgttcctgcaaggatattaccacccaagtgacgtcaacgaggccaagtgcctcaagcaccgaagctgggacttcgtatttatcgggggccagctatacaagaagggggtcagtcaacccatgcttaaatgcatcaccgaaaccgaaggcattcaaatccttcgcgaagtccacagtggaacttgcggctcccacttagggcctagggccctcgctgccaaggtgatccatcaaggattttactgg

SEQ ID NO: 172366 - DNA, 498 bp, Zea Mays
gtcaaggagttgtattcaagatcatggctggatgtaacaagcaaataaagcaatgattgaaatattacaattctggatggtgacttaaaagcatacagaaagtattagtagagatcattgtcatgaaaatgagatgttccacgatttactcatcttgtgtgattgaacaagcaggaatcaaactcaaaggaaatcactaaaaggaacgtaggaaaaagctaccgaacgaacaaggactctcacttaagggtgtttcgctttgtgttgaattgtagaccgagaaagaagactgaagagaagcgaagaagaatgaagaaaagcagatgagagagaaaagtttgggcaggtgcaagtgcaccgtacagaaagcatactaccagctaatcctttcaactatcattttagcatcaacctctatataccggaagcatgcgtgtatataaactgtatacccccaataaatacccccaatacacacaagtatgtcatgtccattaa

SEQ ID NO: 172367 - DNA, 1091 bp, Zea Mays
gtttgtgtgtctcgaggtacctggcttttgcctcgtggaggacctcgctgacgtagtagaccggcttctggacagtccgggtatctgtagtcacccctagacttctaggttcttgtcctccttgttcttccctctcggtgactaacaccatgcttactgcttccgctgctgtcgcaatgtataggtatagcggctctcctggttctggagcaactaggatcagcagggaagctaagtgctgcttcagttccctgaaggcttgttccgcctcttcggaccaggcaaatgggcctgatttccgcaggagcttgaagaaaggcagtgccctctcagccaaccttgaaacgaagcggctaagggctgccagcgacctggtaagcttttggatgtccttaacatgagtgggaggcctcattacctcaatagccttgattttctccgggttagcttcaatgcctcggtatgaaaccaggaaccccagcaacttccttgccgagacaccgaagatgcatttctccgggtttagcttggtgcgggttgcccgtagcttgccgaaaaccagggccaggtcttccactatagccaacccttccctagtcttgaccacgatgtcatcgacgtaaatttccaccttatcccggatcagatccccgaaggtcttgctcattgcccgtacaaaggttggcaaggcattcctcagaccgtagggcattacaacataatagtatagtccatctactgttacaaaagtggtatgcttcctatcctccttagctatccggatttggtggaaaccagagtaagcgtccaagaaggataagaggtcgcaccccgaagtagagtccacaatctgatctatacgcggcagtggatacgggtccttggggcatgcgttattcaggatggtgtagtcgatgcacattcgaagcttcccgttggccttcgacacgacgactgggttggccagccacaccgggtgatgaacctcttcaataaagccagcatgcaacagcttccgggcttcctctcagatgaagtcctaccgttccacggactgtcttcgtggcttctggcttactggcttggcgtcc

SEQ ID NO: 172368 - DNA, 422 bp, Zea Mays
gaagagcctcctttacagcaaacaaatttgtcaaaaatagcatacaaaatggtccaggacattcaatttatattttagacttccccttcaagagataatcaaatgcctgcggagttgccatgtgtaggagaaaaaaccagttttgtgtagttgtctttggagcatatgcctgcagacaggatcatctgacattcactcttacaatcgatagaaataggatcattcggtgaggcaatacaacaaacaggtggctggcacacatggtaccacacgacatgagcaatagagcatgagggactcactggaaaggccatctcggcggtgtctacctccagccgtgcctagatgtcatcgtagaactggtactggactgcctcctcccagtcctacaatcgctcccatgccatcaccgccgaccgagc

SEQ ID NO: 172369 - DNA, 732 bp, Zea Mays
gaagactaagaaagaaatagaacagaaatacccagccacacaccatatcttcgtccttagctctagctagaacttgtgcaaggtctcacatctacagcttcttgggcgagccgaggccacgtgatatcacaagtggtatcaaagccttccaatcctcggcgtcatagggagcatattgcgtcatcctcaacaacgtcttcattgcggcgatcaggaccttcctgcggggttcattcgccgactctcagcgcttggcgtcacgtctttgctgctcggcaaccttcgacgggcggtcgatttggtgtctcgatggtgaagtggaagcatggggttggtggcagtagaaacaggggcctgcaatctacttgatgaattgcttgggtgtcgttcactcgactgggtcttcggcgctgacgcagtctctgtcttcgcatggcaaactccaagaagacgggtgatgagaggtgggagaagatgatgaagaggttggaccgattgggaggtagactggaggcgatgatggtgggtcagcatcgatttctggagctggcggaccgcgtggccgcagtggcaaggaaggcagaggaacacaagcaagtggagaggtatgtgccgtgcgagcagctttggatgggttgatagggaaactaggggcaaggcaagggacaaaacaatcgagtcatccaagcattctagggcaagtggatgtggctgcaaagaggggtgaagctg

SEQ ID NO: 172370 - DNA, 824 bp, Zea Mays
ctcgcgacctcgttgtggtctgcggaagcagcctggaaggctgtcgacgtttaggaggaaagctggagttgcgcaagcaggcagttgatcagtcaattctgaacgttcgcttggttcgtcaagctctttctcttggaacatgtacagtcgggtgaaaatgacgtcgttaggcgagcgaggtgatgtaaagcgggtgcagataaccaccccggacgacacaggataatatataggataggatatatacgtgcaccgaccgaacagttagtttgatcagcacggcagcggatcagagcgctcaacggcgacgagctggaatgattaccttttccgatcgctcgcatcgtactgatccgtattccagattatcgaagccagaattcagaaggatgtttgcttctgactctctccctctctctctcttctgaatcgattcatctgagaacacaagctaggcatgcaagccacggaatcaagggctaccactagtagtgtggacgcacgcgtacgtgatgtgagtagtgacacagttgctgctgggaccctacaccagaatcgtatgcaatcaatcaaacctagcgttcagaaccccgcaccgcaccgctccaggcacgtgctgacgtgcatccgcctaaggtcatgtactccggttttcacaaaataacatacaactaagggcacgtataatacatgttttgagttatgtcttcgaatatattcgataaatgtaaaaaaataagatatatatctatattcgagacacgatgtcttggctccatattcgagacagtggcctagctaattggtcaatttaatttattaaa

SEQ ID NO: 172371 - DNA, 477 bp, Zea Mays
tttacatgggttaattaagatccaacagaccggatcttatcttgttcaagtgctacgaatatacacacgagacggacatcagtgtatcagtagttcagtacacattcttcgtaaacagcctactgtggtaacggactccggcgttctatcgagcgcaacagaaaccaacgggcgctacagagccttcacgggccctctatctatactatacctcgccggccgctcacgggacagcttccggccaacgaccgctccacgtatggccacgtacaggcaccgaaacaaaactgcacgcctgccccaccgctggtcgatatccaccatcatttgccctcacaaattccgtccgtgcttttctgtttacatgtcgattacgcgtatctcatgcgtcccacagtactgttctataggggtagatgcgctgctgtttaaacgtcgcttagcaattagcatacgccctgcgtgattgcgagagta

SEQ ID NO: 172372 - DNA, 684 bp, Zea Mays
gacacagggaacattaacttaaacaaatatgttaaacaccatgtattttagttacttcagaaaagaaatattgacgtagatgtacaaagccatatagtgacattagtagatttgcttagatctgatgagttcgcaccaccacgtatatattttcctatctcttttggtggttgactggtcaatttttttcttagggcccctgttcgagagatacattctaaactcagagcaatatggtagattgaaatacctcagcatggatataatagcggcgtcaaggacaccatcgacaagtttctgaaacgagatgcaagaagagtgctgacctgggccttctcatcttggagtccaagattcccttggatgagcagtccccaccagcagtagcctcccgagctccgcacctcatcctggcagagctctagctcacccttcttgttgacgacatccttcctctggtgatccaacaacgcctccaaggaactcatggtctgaccagccttggcaccgaaggcagacctagcggccatcactccgccaccgccgaagcaagacgctgcgcggtgcgctcgataaagctggagtccatggggaaatggccaacaccctatgggaggaaaccagagcccggcaccaaggagtcgccgccccgcgcggtcgacatggcgccgacgtccgagacca

SEQ ID NO: 172373 - DNA, 1145 bp, Zea Mays
gcacacacactgtcaccgacttgtggggccctgtgggcggcctcacggcgctggcgcgcgtactgggacgccgtcctcacctctcgcctgggtgtcttgagtgtgggcccagcttgtcagggtcttcttcttcccccaacaggcttccgccatccgcgcgctggtcggaatccccaagtctcgcatcccagggacgccactttgtctttgcgtgtctcgctaaaccggtgggccccggtgtcggcttcaccttcgttgaaacgaactcccgcacccctcgtcgatccgcttggggccacaaccaaaatccgcatccgccgccgtgaaccgcggatttgacccgcgcatgcccgggcttctcggcgacggattctatcaaccgggggcatataaacccgcccctgtggtcttcccggaaccattggcgcgctgaagaacaaagagcaccgtgagagagaagctggagaaaaatccgcctggacctgcgcagaccgcgtcatgttccgctcggactctgtgggcataaccacctccgcgcatgccgccaccgcctgtataagttggcgcggactctttgccccctcaaccatccccatcgacgaccgcactcccggcgcggaaaccgcgctgcacgagctaaatgccgccaccgtcatgagcgaggtagatcgacgattggtccttggggaggggatgatcggagtcgtgggcatctcttgatgctgtttgacgtgtctctggacctggcgtaccactggggtgcttccaattgctcgccgcagctccatggccgccgcagatccgcatgccccgtgggcagccagctctgctgcgcgacgaccggtaaggatccatccattgagttcgtcatctcctcctcttggtgttgcgctagttcaatgcttcggttggacaccatggcactggttcgtcttgcgccggcgaagttgccgccgtggggaggatcctgtgcgccgtcgtaggtgtccgtcagagaggaggatgatgatacatccttggtcgttggatcgggattcaacggtggcgattaggtagagcgtaaccattcgcgagattaaatccgagccgtacgttatccatccgatggccatgggtaggtgcttggcgtggtcggctttgaaccg

SEQ ID NO: 172374 - DNA, 274 bp, Zea Mays
tgcaaaggaacaaagaaagcggcaataaacaaattatgagctgcagtatgggagggctgcaactgcagaacctaaatactagcaaaggatcagcaggggaaaatatgctagcaagacattggcttagcagcaggcaggcgctcaagagttcatgtcccctgcgttcaggctaccatgcacctgctttgagaacagtaagtttgaacaaatacagctgaaaaattaaaacatgaacacattagatgcctggcttacctttacgttctaggttcgc

SEQ ID NO: 172375 - DNA, 424 bp, Zea Mays
gccgcctcgacggtgacaggcggatcctgggggtccgacggtgctacctcagcaccagcgccaccctgcacggtggaggcaaacgcaatgggaacctcttcggccactgccaatggaggacttggcaccgacactgatgctgaagatgcggtagccgctgacagatcaccggcgacgtccttagtgggtatacgctgctgggaaccagacccatcagcgggcacggcgaccgaaggggtacgagcgcccgtggaagcaaaagaaggaggggccctaacaggcaaaggacggttcaagacctgtcaacgtaaaaactatgctcgaaatatggcatttggaagagcttacttggggccatgaacctcccagtggccttggaagcggggtgcccgttgtcgttgctgccactgcccctgcggtgacg

SEQ ID NO: 172376 - DNA, 812 bp, Zea Mays
ccatgggtgggaacccgggtggtgagtcctcgagggggaggtcatcagtgtatgtgtggatgctacccttaggtgtggaggcatcttcgtcacaagggtgcttgctgtttgctggcccagtcttgttagtctcagctacatttggcagggtgttgtctgcaagtactgctttgcctttcttttctgtcagggttgccttggaggcatcgtccagataggtggtggccctagtgatcacattcttagaagccatcgtgggagcagttcagagcatgaatagtgggcgccaaatgttggcacgaaaatctgtaaccaagcactcagaaacagtaaagcaagtagcacaatcaagcggcggactgcaggcgtgattgtattaccaagcgtgtccagaatgttacaagactggggtatttataggggtagtcaggggttggtaaactaagtatcgtaatgcccccgactaccaactatattctcgtcaagcacagtacaacaggttaattacatgaccgagtacggatttcccaattacacagtaattgatatcctcctgagtcgcttaaaggtgagcctgctaacggcgagctctgttacactgagaattcttagagcaaggtctactagtgtagacatcatggatcgcctttgctgctcttcaagtctgcaagccctcgcaaggagttagcccccttggctcattggcgtgcttagtagacttcgttgtggtcagggaaaggttgtctcgatgctgtaagtagcctctcggactgcctcgacagtttggagacatggtcgaggggaccgtcgcg

SEQ ID NO: 172377 - DNA, 418 bp, Zea Mays
ggaagtcataaaacgctatctgaaggcacagacattgtgtgcgacagacataggatgtttatgtgtacaggattgaggaatagaggtatagtgtcactcatgcatatagacctacgaagttgtgctgcgtttgtgttgttttctgcgttgtgctgcgttcgtgttgtcacccatgccccatgccaagaagtacaaatgtaattatttatggtgagaagaagtacaaatgacactcgaatggatcactcgctcggcatgtgactggcccaaaataagtgaccgaccacactaactacacttagacgtccacgtggcccatgggtccgtgtggcttcacaccatggtaaaatgctcggttgtaccatcgcccagtgattcctttttgaggaagcaaccgacggccgaccccctccttggc

SEQ ID NO: 172378 - DNA, 534 bp, Zea Mays
tccagtgggcggcgacccttcaccgcggaggttgacccccaaaccgccgtctcgcactctcccgcctccctataactaatctcctcctttccactccccgccgcgcgaaaccacacgcggcggccgcctcctccaccacgccgatggcgacccctcactcacccagacccagctgaacaactccctccaccaagcacacgcaagcaggagaaggagcaggagcaggagcaggagccgagggcggcgacagagaatagaggtagaggaaggcgatcgacgaggagctcggtctcacctgctagcggcggcgaccatggaccggatgctgctcgaccagctggccggcgaggccctgcgggaggtgctgcacgcggtgcagggcaccctgttctgccgctccaccgccgagcgcctgcgccggagcgtcgagccgctgctgccgctcgtccagggcctcggcccgcacagcacccagcgctccgcgggggagctcggcgagctcgcggcgcgggtcagggaggcgctcgacctggc

SEQ ID NO: 172379 - DNA, 738 bp, Zea Mays
cccggcgggccgcggccgcccctagccctagctagcgctagctagcggcgggcagatgccatgcccatgccccatccccagactagctagggactagggagggagttcatttcaaaatctggctcgggaggcgccaggtaggcgggggggaatactgttcttgtcactgctgagctgtgtgagagagaggcaatgagtagagagagagagagagagagagagagaggaggagggaggccgcccgcatttggagatggtggagagctcagctctgaatgaattcccttccctagctagtcaggcaggagggtggtccagtggtatcccgacgtgtagatctgatccgcccggaggccgttttcaggaaaagacaacaaaaacaaatacgcaaggatccattccattcccaaacggtggcgctgatatcaagccgtttacccattcacatcaccatattcaaactctaccatacagacagtaacacaagcagtagtatagtacctacaaatcatccatcgactgtttgccgtaacacacaggcagtagtgtagccgctgagcgaagcgcgctcgtcagttcggttcctccgacccctccgctagctacttgcatcgtgttatatcgaccatatatatatactccaaaattagttcaattattttaactattaaactgccatagtcgcagctgtgcagcggcttcttgcagaagcgaacgtccatagatcgaccatcaacg

SEQ ID NO: 172380 - DNA, 687 bp, Zea Mays
ttgaattggtcgaggagcttgaggaggacttaaggatgctagaacaagagagcaaggagtacgaacaaacctggaatacgttgaccgcggtgagggctcttttacggtggcagagaacagatttggggagaatgagaaattagcgaactctggtgaacaattggaggcacgacttggtggcttggtgcgtgattaccctacagacccgatggtgtgctcaatttatagcgtccgcgagcggtggccggtgaattggacgaagacgcgcggcggtcagagaggaagaggggcactggcgcaagcgcttagtggctttcaccgtggcggaccctccagcgatcaccgaatatgcttaacacgactaactgcgacatggtaagatgcctgggcacgtggcaaacgatcggcaggctgccaacgtcggtgagcttatctacgctggccgcaagacaaaggggtacgacgaccagccaccggagttatccccaagcgaagaactttttacctaggagcattatccggtcaccagtgagcacgaatcacaatgtcggcgtggatctaggcgcacggtcgccggcggtcaggtgcgctgcaccagcgatcttgttcaggtcactgtaccattggaacccctattcagtcacctgacagatcaactttgagttcaattttctcctaaatttacat

SEQ ID NO: 172381 - DNA, 652 bp, Zea Mays
catcggcgcgttcgccgccgagcgcctcatgccccgtcgcctcgccattaaggcttgcaccggcctcagcgaccaccccgccactgtgcccgagccgtcccctcactcctcgcctgcccgagccgtcccaatcgccgttagctccattcccgccatcatggcgagctcgtcggcgctcgccgtcccctccatccctctccctctcccaggcgcctataaaaggagccgcccgagccccgtcatctccacaccagctctggccaactcctccgcttctccctgagcaaatcaagctagcgccgccgtgctttcccgtcactccggtgagctccatttcccccttcctagtgaacatcagtccaattaaccagtgcgcaaagctccgccacacactcacggtcacagggcacccctccccacctcccattgcacccggcaacctcaccggcgacctcactgtcgtgggcacccgccaccgcgccgcggacctgccgccctaggccctcgctggtcaaattgaccccacccctgtgatcgcctgcccccgcccgtgcagcaccaccaccccccgccgcggaaccggacccacggcggagaaccgtcgcggattcccaccgccggtcggaccccggtcgacctccccctccctccg

SEQ ID NO: 172382 - DNA, 580 bp, Zea Mays
cttttgaacatcaagcataaatgaggtctagtgaacaacttgccatcattgagaaccctagatgttgtttcctcatccgacagaaacaacaagaaatcctccggcgaggactggtggatggacatttcatcaatgttgacatcgaagctacgagccacctcttccaacacctctgatccttgcaccacatgcctagttcctgcagtggtgacgaacaaggccttacgtaatttgatctcctcccttgccatctcatcagtgaacataaggacacatgagacatctgttgatgggagagtagcactctagctttccaccttcaacaaagtgagatgaacttcaatatcatcaaatgatatgggagagtccacactcgcaccagcacgcacattcatcatccatgggaccttttcctttcttgctcttggaccttcatcatggggcggtaatctgcaaagcgggagagatacacacccagaccaacttcttcttctaatgatgagtaacacgcctagctctgccctacagtgatgagaccttctgagacgatagtctctagaacactaggagacaatccttg

SEQ ID NO: 172383 - DNA, 680 bp, Zea Mays
caaaaagataactgctggatggtcggcaataagaaacatactcatcatctccggttctccttttggggtagtcaccacttgggtgtaataaactcgcccggttttcttcatattcttgccctctggagggttgaccacatttccctttccttgagtcgtgttccccgaagtctattggaaatttgatttattctgctttggataagggcagtctttgataaagtgtctagacttcccacaattaaagcatccatttgaggaactagggagggcggggaaacgagcaccaggggcactcggatgattgttctgggcaggggcaggagtggacggatgaacactagttgcttgaagggatatgtgggtggacgaggagaagaacgatttgggttgaagggatgaattaccaaccttgtccgcttttcagacccttgatatgatccttcacgcccatatctcttggtttttccttgtcccgaattcttagcttccactgacagtgctgtgcttacagccctgctataggtgagatccaaacatgtggccattttgcgctagagtcgatcattcaaccctctcatgaagcaatttttctttttcaaatttgtgtccacttgatcgatagcatattgggagagatgattaaacttgttgagatattgcattactgagtctccccc

SEQ ID NO: 172384 - DNA, 660 bp, Zea Mays
cagaggtggagatagagccagatctatcataccaagagcacccctcgaaggttctggattgcaaggaaagatcaactcatgtgagttcgatcaaaatatataagatccaatggagcaaccattcggaggaagaggctacctgggagactgaggattttctgccctcaaactaccccgattgtctacctaaggaaatcggtacgtaaccataccccagccccctgccctttgaatctaaatataagaaagatgatcttaacataaaccgagttaggttataaaactaaatcaaaaaggacttcctgctgaagttgcaaagaggatggcattcgaagtgcaggtttttaaaggaccttaataaacaaacccacaccatgaaagcaagccataaccttttcctcacccctgaggatcccgacccgaatctcaggacgagattcctttaggggggaaggctgtaacacccaggtgttacctaagatttcttcttagtacccaaatggtggccattatcacatgtaaacataattgagcaaaagaccccaaaacttgagaagcaaaaatttgagtgagtctttttatcttaaggatcataccttaaccatatcatgcaccacaaagtgagaaaaatgctcaaaacctaaaataaccctaagtaag

SEQ ID NO: 172385 - DNA, 860 bp, Zea Mays
cccacttctcccaaccgcccctttccctgatagccaggacccacttcgcagtatcacgggcgcgtgcggacttatcccttgtgccaatgccgcatggggcccggtcgtcagtcctccgtccctcccgttcaagcgcgcgtgtgctttgtgcttcccacccactgaccgcgggcccttgctgtcagctctatctccgtcacaacggaccgcggaaaccgtgcgggtttaacgaccctgcccagagcttgcgcgaaccggccgccacctcacggcaataaaccccagccacacctcctcgttgatccatccaagcggtcgaggaaagagcgacgccactccgcgttcaccaaaacatatagggaggagagagaccccgtcatcggcacacacgcttgcaccgtcacctgtgcctctgctctctgctctggtccggggggtcggcattgccatccgcgcacgtttgtgaccttctcgaaagttgggatcgttcggtgccccattgatttctcgccggagcaaagaccgactgctcgacctcaagcttgtcggggagaagtctccctattgcgcgccctcaagtaggtatgtcccacatgtttgccatatgcttctctccttattgtcgcgtctgcgtgctgtcttgtgctctggaccgcggacccgccatatcccggcgtggcgccgccacggtaacagaactcgctggctgtaacatcccaatttttgatcccaaggttagaaaccctaaactcctaacccccttattatctcctaaagacctcatctcatgaagcaacctactcatcatatgcatgcaccatgatttcttgtagcacttcacatagaatatttcattttgg

SEQ ID NO: 172386 - DNA, 638 bp, Zea Mays
ggggccgatcatcaaatatataaagaatgaggaggaaccagatgataagaatgcagccgagcgcatcacaagacagtcagctcactatacgctcattggggaaaaactgtacagaaggggcgcatcaggagtcctcatgaaatgcattctctcagctactggaaagcaacttctggatgaggtccatgctgggtaatgtggagtacacgcaacatccaggaccctagttgggaaggtcttcaggtcgagtttctactggccaacaacaaagagtgatgcagccgagttagtcaagaggtgtgaagcctgccagtacatgtcaaaacagtaacatctaccagcacagcagctgcagaccatacctgtaacttggccattcgcgtgctggggattggatatgattggacctttcaagaaagcttagggaggatacactcatgtactggttgctatcgataaattcactaaatggatagaattcaaacccattgcttctctaacttcagctaaggccgtagaattcatacaagacataatattcaggttcgggataccgaatagcatcataactgacctgggatccaacttcaccagttcagagttcttcgatttctgcgagcaaaagagcattcagatca

SEQ ID NO: 172387 - DNA, 495 bp, Zea Mays
aaactcttttaaaaccatcgtgagcttcgctcatgacgttttatctttataaacactaacctatgaggatcccaatgacacttttaaccgtgagcactactgattaactagtttctacactgtacataggtttgaaaaggctagcttgatagataaggctcatccccgccttatatgttatgctcatatgccatcaaattctaatatgggactaaacctaacaatctctctggtaacacataaacctaacgcttcacgtcatataacctctcgtagaagtaaggaccgtctcactgtatatgatgtgctcccccaccatcaatttccaatatagaactaaacctaataatctctttcaccatgtacataactcttcacatcacatactcccacgtgtgatctttggtaggtgtttttggggtagaatccaaagctccatgtcccatacaacctgtgcgacctctaagaggttaacgagctccccctatctcctga

SEQ ID NO: 172388 - DNA, 275 bp, Zea Mays
cagttcctcaacccttggggacgagcaaatatcccaagggtaagggctaaaaacgtaagaaacacagcacaaaaacagaagaagggtcggacacttaccagggacacatacccgtggtcgggacgcatcgggggctggttaaggacgccagcgtccagcctccccaccgtgcccgctatccgactgaggaggtcgtcggtggagaggggggtcgaggacatccgtgaaccctccaaattgacccccggcttcatttccgaaagccataactgccg

SEQ ID NO: 172389 - DNA, 644 bp, Zea Mays
gtcaccgtttccagttcggcgattcgggcgtcgacttggtctccaacattccgatgaaggtcgcgctggaatgtcgaaattccgtcgtcggtaagcttggcgtgcagcgtggcaatggtgtctgcgttggtagccaccgccttctccagttgttgccacctgttgtcttgagattccatcctatcgcatatctgctgcaacaccttggattgggcagccagcgtccgtgactgcacctctatggacttcgactgcgcttccagcgctgcggccacgcctgggtcaggagcgcccgccatcttcgctcgtcgggtatagtagatggttgtcgccagaatcgtggacctctgataccacttgtcagcgccacggccgctgaactgcttgacggggtatcgggaaggagaagcagaagaacagaatgcagaagaacacaggagaataggattcaggtaatgttcttctccaccgatacattcatctgttcagtttatatcaatcccgcacttgggctatggcccattacaagtggctcaattaatccactctgctccggacacccgaggattcggccttcttctgcgacggcccaattctttcatttctaccgactgtctctgtccgtcttgaagcctgctgctgac

SEQ ID NO: 172390 - DNA, 459 bp, Zea Mays
tggggtgcagaggccttctcatagcactattctattactgagagggatactgccgagacagccatgcaagatgcagcatgacgggcactttctcagtattgctcgttgtttagcagggtagctgacagccttgacctgaagtactaccctcgtcgtttgaccgacagtgctggaggtgtgattgtctcgcccgttggtgagggcaatcccaggctgaacagcatggccgacctggccgccgtgctcaacacagagttggaccacacccttgacgagttgggcaaggttcgggcggaggttgcggaattgcgtgctgaatgcgcggcatgccactatcttgatggtggttctctcgcccctatcgggattcagcacccttaccattcaccgccccgtggtcgcttcgactatggtaccccagactgcaggacccgcatagatttagatccatagatcgat

SEQ ID NO: 172391 - DNA, 647 bp, Zea Mays
acgttttacacaattttggtgtgcgcatgtttcgcggcatccgggcccacgaaaagatcatgtccccgcaatctgggcagcttacgtctatcgggcccacgaatccaggaaccgagcactcattttttcagctcatctctcccgtaactctcgcggcggccgaaccctagccaaatccgccgtcgtctgctgcttctcctccgcgcccgtcgaaccctagactaatcgccgccgtgagcttcttgtccaccgcgcccgccgaatacacagatattctccccccgtcgttccaccgccgtcgcattctccttcaccaccgcagagacccggactcgccttctccgccgcatacacgccgtcgccttattcttcgtctccgggaagggacccggaatcgcggaggcggttgtgccgccccttcgttcttctcctccgcagagaccgagacctcgatcttctccaccgcggcggccgaacgccgagtcccctacgccgtcgcgagctccgtccccaacgtcgagtcccctacgcatttgacacagccgcgcgtcgccttgggttgtcccctgcagttgggtcccgaattcggctggcctccaggcacatccacactccggtaagtcatcaacctttaactcttacaatct

SEQ ID NO: 172392 - DNA, 1291 bp, Zea Mays
gggtatcggtggcattttgggtgtggaatcccagggtgtcttgtttgttgtggcatgataatcgtgatgcttctgcggcgcttcctttctcgattaaaaaaaggggtaactggattagctagttgtgcttgtgcctatacaaatctcgaataaggctgcgacaagactctccccaggaagcgctcgtcgctcgctgtcgccgaccgcgtcgctattcgagagccactgatttgcccatggccgctgctcaaccaaattgtcattacattgaaggtaccgcacgagaggggcgcgttggttttgggtttcggaacgaaaaacgtgatcaagcacatgcagtaagatatgttgctgcttagcaaattacacgccctacacacacatgcattttattcagccaacggctaggttactcgtgactgtaactacatgcattttgttcgagtctagtgctcaaggacagcactaaatatgcaaggaataccatctcgcacacggaaaagttagggggtgtttggtttctagggactaaacacccccttagtaaaatggacagcatgattgggaatagattcagcattcaccggagaatgggtggagtaccggagctgccagcttttctcgaatgtgctatgagcagggagaaagttttccacaagtgcagtaaacaaccaaaaggaaggcacttcggccattggatgtaggtggagttccctgtgccatggctgtggtcttgtggaaagcaaagggaaaaaaaatgttgcctgcaacgggacttcgggctccaccgtcgatgttctgtctccaatcctcgcgagtaacctgacaaagtggtgccatatcaagtctcttgtcctatccattgcactgcagtactgcgcctgctgctgctcaacctgggcggcagccgaaccaagtctttgaagacataaaaaaaaattatgtgtcgttaggaccattgcttcgtgtctaaacaaaaggcaactagaaagtgcgccactgaacacagcagccgaacaatgaaccaagacctcgtgaatatcagccattattcttgcaaaaaaaaaccaggcattattgaccgaatatacggcatctaatgtgtcatttttgttcaccagcaaaaacagttcatttctgaactatcactctccatgacctaagctaagggctaggcagcctttgcactccagagttactttccattataagtcccggttaccgactcgattggcccaagaagtggaggaatctaatgcttagcatcaacaaaagacgaggaatttgatgg

SEQ ID NO: 172393 - DNA, 565 bp, Zea Mays
gtactcgtaatgtccgttgtgcgtctggaaagctgttttgaattcatcaccttctttaattcgaatttgatggtacccagacctatgatcaagtttcgtgaagatcttagccccacatagctcatccacaatttcatcaaatattggcatagggtacctatttttcaccgtatgggcgttaagacgcctataatccacacataaccgccactctccgtccttcttcttcaccaacaatacaggagaggcaaacgggctcgagctatgttgtatgactccttgctccaacatttcaataatctgcttttcgatctcatttttctgttgggggtgtagcgatacggtcgaagtctgaatggttgggctcccgataacagtggtatcatgtgatccacttctctgggaggaggcagtccagcaggtttgtcaaacaactcatggtattcttccactaactgagccatttcaaaaggtatgttctgggacttgcccttgtcttccacactcaactccaatatgtgttcccaggcctcttgtttaagaatccaatttaactgcaccttgg

SEQ ID NO: 172394 - DNA, 484 bp, Zea Mays
attgacgtagaggaaaagtgagatataagtggagaaatttaggaaactgctgcagataggctttgggcctaaacacaattctttggatagaagctattacatctttttgggcccaataatgatttatgattgattcaatgagctaagtgttaaagggcaattgtcgcttcctcataagtggaagtctgataacttatttgctaaaagtaacctgtcggaggtaagctccagctaggtggcggatagcacccgctctaatcctaagatgaggagggagcatgaggttagcctatagagagataaacacaagaacaaacaagaatttagagtagttcgggccgccgaagcgtaataccctactccactatgagttgtactgctgatagcttgagaaagcttacgtctaatggagtctttgcgtgaatgcctatgagtcgtcctggcctgaacaactttaggttgctctgctctctaccgagtgtgc

SEQ ID NO: 172395 - DNA, 361 bp, Zea Mays
ttagattgtttgttatactaatttttttgaggcaatgtgtgctatactaatgtaatgggccttggtccatcccatgtatctctctccatatacaagtacctgccctaatcagggttaagggtttcactatcagactatcactatgtgcatgtcttagctttctaacctgaatacctgatgtcccatgtcaatttttgtgttaagatattatcaatttggcatccagagatgatcatactaggagtaatttgttgctagttctgttcattctgctgcatgcttgtttcttttgtagtgatgattcccttctgaagaataattgatgttatagctccctgcaattaacttctttcacttgttt

SEQ ID NO: 172396 - DNA, 6490 bp, Zea Mays
cagtcatgcatatgatagccatgaatcccggatgatacgtgacaggcgttttacgcacgcataaaaatatgtagtaatgtgcataaatcatgtatagaaggaatcttttgtgccacgaatcacgggaacaaatattaccatgtgcacaccgtttacgactgcataacgctgtgtaacatgatagtataaaccatgcaacatttaaatctccaccgctttgagataaggaaagacgtgctccacgttcgcgtaaataaaggcacagttacgggaggaaacaaattctaatttacagccgctcgtccacgttcgtatctttgatattggcggcggttaacggcggcggaagggagagcaccgggtggcgattaacggcgagaaaatgtccagcatcggcgctggcgatgacatgcaacctgtagcgtctgtgcatagatcaacatgtacgtctatttcaatggacatgcatcctgtagcgtctgcgatcaccagttacacagagggtgtatctgttactccccccgcgacattgagggcaccttgacatattgatgagcacacaaaatcggtagacgtggtcggcgcagataagcacattcccatgagacatattggggcgcatgaacaggatacacctcatattcttcaaagccatgtaagttctcccaattatgatactattattttcttacatactttttttaatgttgtacctatattacgttagatttaatcgctattgaatcgtaaacgttaaatttttgtgcgcagccggacaatattgatataagattgatacctaaagtcggtatgacatttagtaacgtggacgaggcgtataatttttatagtcaatatgcatacgaggttggattttcgttgaagaaatatagggagcgtaagaattgtaaatggttgaattgttcaatggaaggaaagaatgctgaaagggtagctggaaatccaaggatacataacacatgttcaaaacatagcgttgaattgttcagattgtgaaacttataaagcatagaacattgtcgaatgtagcatacatatatgtgcaactatgcataacatggcgttgtttattgtataaactggtcagcctgtgaagcatgactgtacaaagagatgtttccagtataaaacggtgataattgtatcataaacttgagacaaaacaagcataaaacagtgataattgtattataaaagtatgggcaacaatgcataacacgacgttgtttactgcataaactggtcacacagtgaagtttatgactgtacagcggtgataattatatcataaacttgagagaaaacaagcataacacgagattgttgacaacataaaatttaaatgacactgcacatcatataaagtggagtttcatttgtaaatataaacgacactgcttctatccatataccatatataagacaaattaaattgataaaaaaaatatgataaacgcataaaaaaataccgaacaatgtacaaatggttcttgtccttggcgtatcttgcccttgtcagctcttgtcaatgcttgaataatattcctatcaaaatatttgatgcgtggtgttccacgtttattctgaggtgtagctgaatcatgaagatgatccaaataatacagctgcaaaagcataacatgaatcattgtgagacataacaaaatataatctaaatgtatatgaattttgcataaaaaaatatggctacatataaaagacaaaaagtgacatgcttacaagaatgatgatggaacatccgtaaattgttgtagaaacatttgtaacgctcctagtatgtcacttcttggcagtttggcataaatcattgaatattagctggtaccagtctatctcgtggaaacgatacatttcctcagttaaaagaacctcatggttagttattccccagctggcagtagggaacaacaacctattgcacagtatcaggaagaaggatctgctgcttagatcatcgtcaaaccctttccttaaacgatcttgaagagctgcaacactaaaatcttcttttgataaaccaagtttagcccttaaattgtttgcagcaacagcttcatcaatgcctaatgccgtttctccaccagcatttggtaaccccaaaataagttgcaccgtctcctttgtaattttgagctccttccctgggccggctcaaattgtcatgtcattatggtcaagcttttccatcagccaagctaaatgagatctactgccaagtgcgtcaactctcatatcaagaatactggagaaccccctccgtgcaatagcttggcgctgtctgtcatttaaaatctggatgcttactataacgtcttggggattgcatctcacattaagcctctgctgaaaaaatgtatacaatgaatagcgtaaacatttacatctgcataatcgcaacttaatgtttaaatcaaatctcaaaacaatataatttcacgcagaaaatgatatatcgccattgaccatcaattctaacctgtcgggggggggatccactactttcctccgctttgtaactatcttcttcaagacttatggaggactgtcatcaaagttacgcttcttcgataatggcataaagttatcgtcctcatcaccagcctgcattggtttgtgtctaacagttttcgccggaacacggggtatgtcgacactaaagcactcttgagtagactgaattataatccgctttggattagatggaggtcggtctacgttcttcatgtatgatgttcctgccaaatcaaacaacacatatacataaaaaacgtaatggagcaataaaaattctgctcatatgcaacatccaattaatgtataagctggctatttcgtgcgtactggccctaaatgtacggcgagatgtttatggcataacatgttgacgtatatatcataattttgtcaacaaaatagcataacacggtattgtttagtgcataaacgtgtgagacgttgaagagtataaatttgtgtatccatttaacaatgaatttatgctgaattgttttttgataaatgaaacaattgagttactaataatgtgaaaccgatttacgattcagattgtgtaaatatgcaaatgtaagagttggcgcttgaggacttacccgtgtgtggaggtgcctgaaggccggccgatttcgggaccctctgcagtggagaagcccaaggcgacgtgcggcttggtcaatgcgtaggggacgctgaagttgacggcgggtcggactcagcgttggagacggtgctcgcgacggcgggtggattgcctagggttcggcgccgcggtggatcaaatgcggctcgttctctgcggtggagaagaacaagggggcagcgccaccttctctgcgattctgggtccctcaccggtgaagaagaacaaggcgacatcgtctccctctatgcggtggagaaggtgaatgcgacgacgttcgggcgacggggggagaatctctagggttcggcaaccgcagtggagaagaagcagatggcggcgataaagctagggttcggccgccgcgagcgttacgggtgaggagagctggaaaaactgcgtgcttggttgctggattcgtgggcccgatacacgtaatctgctgggcgaaatcaacgcgaaggcccatggaccgacacgtggattactgtttcgtaaacggaaacataagacatcgtaagatcgtctaaggaaagggtttgacgatgatctaagcattagatccttcttcctgatactgtgcaataggttgttgttccctactgccagctggggaataactaaccatgaggttcttttaactgaggaaatgtatcgtttccacgagatagactggtaccaactaatattcaatgatttatgccaaactgccaagaagtgacatactaggagcgttacaaatgtttctacaacaatttacggatgttccatcatcattcttgtaagcatatcacttttttgtcttttatatgtagccatattttttatgcaaaattcatatacatttagattatgttttgttatgtctcacaacgattcatgttatgcttttgcaactgtattatttgaatcatcttcatgattcagctgcacctcagaataaacgtggaacaccacgcatcaaatattttgataagaatattattcaagcattgacaagagctgacaagggcaagatacgcaaagaataagaacaatttggacattgttcagtattttttatgcgtttatcatattttttatcaatttaatttgccttatatatggtacatagatagaagcactgtcgtttatatttacaaatgaaactccactttatatgatgtgcagtgtcgtttaaattttatgctgtcaacaacctcgtgttatgcttattttctctcaagtttatgatataattatcaccgctatacagtcataagcttcactgtgtgaccagtttatgcagtaaacaacatcgtgttatgcattgttgcccatacatttatgatacaattatcaccgttttatgcccatacattatgcttttttgtctcaagtttatgatacaattatcaccgttctatactggaaatatctctttgtacagtcatgcttcacagtctcaccagtttatgcaataaacaacgccatgttatgcatagttgcacatacatgtatgctacattcgacaacgttctatgctttataagtttcacaatctaaacagtttatggccagtgttatgtattttcgaacttacatttatgctacatacgacaaagttatatgctataaaacaagtcgatgtacattcagattgctacataactgttatgatgtattttcgatagaagcagtgtcgtttatatttacaaatgaaactccactttatatgtgtgtataagttttactccatctttcacatattttttagttccgaagcaccacagagacctgctacacagctgtaccacctgttgaagcacaatttaaggcaagattctatttatatattttttgtcataaaatttcaacataatattcagttatacgctatatatttacttaataacttttattttacaacagcataagaacaggacaaacacttttgatgtaccgcgtcctgacccatctggacatcacaccattcacatcgaactcctgctcttcagggatttgatatcaagcaagctgaattagcttccatcctgccatcgtctgggtttcatagagaagttgtcacattatgatatgaaggttggtaaggcttatttagttattaaacagactcttcagcagattgttgagaaacaatacaatctatctgatgtttttagcgagttaatagatgaggtcctccgtgccgagtcgggagacaatgaagatgtttatgatgtgcagaaaacaactacaaaatcagatgatattcttccccagtcggcaggttagtcagttttatggtctttacgtcaatataaaaaaattattcaaacatttgtcgatatcgttatgatgccattatttaaaacgatgtttttttgtttaaatgatacgtaaagaaggatgtacgtgttcggccccacaaactgtaacagatatgtctactccagcatttcagcaggatacgtagttgacagacacacagatacatgaattactgttaaggcaacaacatattcgtgtactattagaaagttgccccgatgaagctgacattgatccactggtttatacaaatataacgaaatagaccaaaacacctacaaccccagtggtaatgttttttttattacttgtattttcattgaagggttgtattcatcgttttctttaaaaagcatataaccattacaattttttcagggtaaacatggtgacgttggcaagaacatgccgaccaacacaaacgtcactcctcaagcaacaccacatacggaatcttgctcgccgatatttgatgcgacgccgcaaataaaggtatgagtacatcacctcgttgtttttctatattattattagtagtttactaaacatctaatttatttataccataattgttagtctcccggcggcgtccaacaggcggcagaaacagatctccctgacaatggtccatgctttgatcagactccatctgaacatgtcagctcagtaattttcatttttattatagttgccaaaactgttcacagattgttatatattttcatatatctttttaggtttctgttgaaaccgatccagctacaaacactcctcaggttgaccagatttcacttgattcggagatgcaaactgtgttagctctacgcgaatatttgtgtgatacgcaatctgacactagcaggtatgaagtacagacaaaaacaaaatctgtttatatgctgatagttttacgcgacctcactaattgttatcaaaaattccccaggaccataatagattatggtgaatattgttcgactg

SEQ ID NO: 172397 - DNA, 486 bp, Zea Mays
ccggaacattcgttcgcgccgtctgcgtccaccgtccgaactccgacgtggcgcgccctgcgccgcccgctcggcggcggcaacgctccggccagctcggcctcctcgacgctgttcgccgatggggacgacgacggtgaggtcgacgccggcggttgccgtccgtccatgcgtttgggatcctcagggtgagaatattgtgagaatattgtcattgacgagaggtccttttcgattctcactgttcgatttctttaatttctttctcttttccccctctcagtaaccatacaaaaacaaaatttcttttgtggattcttttaatttatagcacatcaaaacagtgctttatgagtccaaaagccatcaaagcagtggtttttgtggattcttttaatctataggatcattgacgatgtgtgtgtctaaaaagccacacaaccaattagtactcttatgggtctgtttgatcagtttcagattctt

SEQ ID NO: 172398 - DNA, 450 bp, Zea Mays
tatgcatatatattaaatacaaaaagcatatatgtgttacttgggttgtgtaagagtactctctgctaactcatcaataaatacctaatccacagcctttgtctagatctatgaatgtcgggcgatagtggggatctagaataaatacatatgctctaatatcggggctcctgaacaaaaaagagatgcaatgcgcgatgcaatgacccgattagagagatgtataaacggatacaaatcacacatttagctggagaataagggttacaatcaaacccacttaaatcgaccgaaatgcttcaaaaaatcgacggcaaactcggtgtatttcaatgttggattacctggaacttcttgaatcgggctccaatgctgggagattgaaggatgtaagctggaatggaacgacactggattggagcggcgctggattggaggcgcggaaatcgc

SEQ ID NO: 172399 - DNA, 873 bp, Zea Mays
ttttaatgtagtcatctctaccttaattaattatttcctgtcgcaaataattatgcatgcttaaatatgaggaaaatatcttttacacctcacatgttcatgcattaattctagtattttttctgcttttatttcccgtagtaaatacttagcggaaatttattaaaatgcatgtgaaggttatattgtgtatactcaaatcgctctaaatatttgctatgtgttgagccttcggactcacgtcgagcgattaaattgtataatggggtactcggacacgttgatcaggttgcgttggtaatcggctgagttatggcattagctgaatattggctgcgccctggcaacacgatgcagtatttgtgccgttcgaacttggctgtgtcatgtgattgctatgtcgtgctctcgcttagtcggatcgctctcgttgagtcggaccgccatcgccgagtcacacatttttcgagggccctgaaggcattgcatgtgtgtcgcaactattgagtcacaattgcgcttgttgcgtctgttgtgtctgttgcgcgtacttatcgtgtaccccaactaccaagcacagttgtgtttgtttgcttattacgaagactggatgtgttgtcgtagccctgatggctgcacacgcgttgacatcagacgctagagcttgtactcgtgtggattgtggtgggttgttcaagcctctgaagccacatcatagcgcaaccctcataagcaattttgtttagctctatattttatttgattgtgttgtgtggcatcatatatttatatatattgccaagtggccataacaactatatcaagctctatagtgcttgaataatctgggaaattaaattgaaatacaacaga

SEQ ID NO: 172400 - DNA, 594 bp, Zea Mays
cggcacctctcgcttcatacaattgtgaacaacacttgaggatagagaaacacactccacacacatgcaacttgtagttcatcatttggttgagatttgagaactcatagtgcattacttgtagttgttgcatattgtggcactagctaggtgatttgggttagttacactcctattacacctagtggctatcatcacctagatgccatagagtgtgtggggttattgagcgaccattggtgattactaccagctctaatcattattgcgagtggttcttgtgcccattcctcgtgggtgattcacaaagagcaactaaagtggaatcgtcacttattggactgcttctttagagtgattcttacttcacctttattatgggcttgacatgttatgtcaattagcgcataaatcaccttgtttggactcaccacaatgaaaacgtaggttgttggcaagaaaccgaatctcgatgatatatcttgtgtcatctcttgccccatcaggttgcactctatacctattcttgcatacttgtctatttagtcttgtgtagtttatatttgagttttatctcctactagtaagtagctt

SEQ ID NO: 172401 - DNA, 827 bp, Zea Mays
atgagcatgagttctggacagcatctgaagaagaaaacatacttgattattacacatcacaattacacatcctcggttacattattccaagcttgttctaattatacatactcaacttatacaactcacttgtccttatttagattacataaggaaacaacctactactacaataatatattcatccgcatcttttgctgctctcgctccactgctagcttcaggagaacgatcatccacgatgttcatggaaagaggggctccaaagagatctagctccccataaggtcctccgccaacttctcctgctgaaccagctcccatcttagcaactttcggtggcacgttcggatgtagctggtcatacaacacgtgcacttcctcgtgtagagcattattctacacttgcagattttccagggctacgcttagctcttccacctgggctcgggcagtcacctcgcaatcccaggctatagatcgttaatttacagcccaatcaatagccctatctcgttccacaatctcccgctgcaaatgttcaacctctgctgacaactcagcgatgcggcgactatcacgcgcacgctccgtgctccatggcgcagttccattgttagacgttcaactctagcctctagatcccctatgggatcattactcccgctactgctcccctcatgtcgaggagccaactggtgccgaggtacaccctaaggtcttgctgccttccgaagggtagtctttgtgcgtgccatgtctctataagaggggaagattacttagtattgtttaaatatgatgcatgcatgacctacgattatgga

SEQ ID NO: 172402 - DNA, 767 bp, Zea Mays
taacctaattgggcctgcggcaccttattcggcccaccataccaatccctcgcgcgcggcccagtctccctgtgtctgcttgcgctcacccggtgccacttcctggtgggtcccgcaggtcagggcgggtcttcttctccccaaccgaagcgcgaccgcggcgctctgtatcagcccgcgtggaccgcgccgagctccgtatctgccggggttggttgtggagggaccgattctcgcgggaagtagaggcataagaccacctgccaccgcccgtcctctggcccagctaacccaacgacctccgtcgccacgaccggtgcgcgctcgccgtcaagctcggaatggcgtgggcaaaatccgaactaactctgacgggatccttggaagccgttgaagctatcttcgccctctctgcgcctataaaacgcggctgcgatgcgccttccgtcatcgatatatggtgccgccggtggttgagcgaaacgccgccgcggtcgggggtttgagcagagccgtggcgccaaccgcgtgagggagttgtgggtcggtctcgtgcggagcattgccgtgtactgggagcggggtatcgggctttgcgatgaagacctcggaagtactcccaccgacgatgaactacgccgtgaaccaatcaccgtcgcgccttgtggttgtgtcgccgtcaccctgcacagcgattacgaccgctaggatcgttgtgttccggctcgggagcttcggtcggacctgcggttggtgtttccgggcac

SEQ ID NO: 172403 - DNA, 641 bp, Zea Mays
gcatcttctcccatataaggcttcaaaaggttccatcttcaaactggactaatagctgttattataggagaattccgccaaggaaagacacttgtcccaatttttaccatagtgtagcacacatgccctcaacatgtcttcgaggatttgatttactctttctgtctagccatctgtttgaggatggtatgctgagcttcgtattacatgggtcccaagtgattcttgtagccgctcccaaaagcgtgccacaaacagtgctaatctgtcagatacaatggtctttggaataccatgcaaacgcactatttgatcaacatagatttctgcatatttctctgtcttgtgggtggtatgcactggtaagaaatgagcggtcttggtcaatctgtccacaatgacccaaatggagtcatggtgctgggaggtattgggcaatcccacgataaagtccatgcagatgtcctcccatttccaagatggtatgggaaggggttgcaaagggcctgctgccttcaaatgactggctttgattctctggcaggtgtcacattcggatatgtacttggcaatttccctcttcattctggtccaccagtataaggatctgagatcgtgatacatcttgttactaccagggt

SEQ ID NO: 172404 - DNA, 709 bp, Zea Mays
cgagcctgatataggtactggtgagagttgtggcactagtggtggcgatgacatccaggtacgcacatcgtgtttttatgaatacaaatttatgattttctatgtgcataaataatttatcaaatgtcgataatgatccatgtttgtaatttaaatggtacaggtcaaagcgtatgaaacagaagatgtagtaagagatgatttacacaatgtagatgatgggaacgaggtatgcatgagatgtttataatgtattgtttatgctgcgttttaacaattgtgtcttcactcgttttgtgttatttcctaggaaattataatggcgtctaatacaaatgaatgcaatactgacgatgttcaatgtaatatgtcgatacgtacattggaacagaacattgatatgcatctggttgctagtagtgctccggatgtggaagctagaaaggtaataacaatcttagaatatatggttagattatgagattgtaaattgacttaatatctttgatttgtagaaacaggagtttcatagggaaggtgtaaacttagcaagaccatataaggccaagcctaaggaagaacgatcaaaagtagtgagcaacaagttcttaggttgggtgcgaaaggagcgaagaagatgagcagaaagtgccaaaagtgtggcatcgctgatggtcacaacagtcgtacgtgtttaactgtggaggat

SEQ ID NO: 172405 - DNA, 472 bp, Zea Mays
ccctgctgttgacgctcctcggtataggttcattgttggttctctgtgctatttggtgaattcaaggccagatttggcgttctcaatggggtacataagcagattcattgagaaaccactggacatatggcagcagtaaagagagtgctcaggtaaattgcaaggactcttcactacggttgccactactagaggacgaaggaggcacagcttgaaggttatagtgacagtgaccttgctggagatattgatacaaggaagagtacctctagtgtcctgttcttcctcagcagcaacatcataacctggcagtctcaaaagcagaaggtggtagccccgtcatcatgcgaagctgagtacaaccctgttttctatgatcgtagcaagattgatgttagatatcattttttcaagaattcatcaaggagaacagggtcacagttgagtccattgggactgttaagcagctggc

SEQ ID NO: 172406 - DNA, 518 bp, Zea Mays
gcctaaatctcacttacaacaaggttgtcagcacagcgctggcagtagaagctaagaatacaggccaaggaaaatcgaagggattcggaggtgataggtccagtcaaggacatgaaaagcgaccaaggttggtaatccgacctttcaatcaaaatcgttcttcatctcgtccactctcctacccatttaaacagcctgtcttcattcgccctgccaccgcccccacttctacaagtcagctgagtgcccttggtgctcgtttccccgccctccctagttcctcaactggctgcttcaattgtgggaagtctggacattttatcaaagactgcccatatccgaggcagaacaaatccaacaatcagcagaactcagggagctcaaatcaaggcaagggaaacatggcaaataattcagcgagcaagaatattaagaagactgggcgaatatattacactcaagtggacactacaccggagggagagccggttatgatgggtacgtttcttgtggcaaat

SEQ ID NO: 172407 - DNA, 500 bp, Zea Mays
tggtgaggctggagcagatggcggcgaggccagcagacccccttgtacgaaggagagtagtcgtggtagttgcccggtcgccgtagatgagggccagcaccggacggagcgttgcagaggggcgccatgtcttgcaggctcttgtacgcggaggtgaacaaccacaacgttgctcgggcacgctggtgcagctacgactcccacaaaatggagcacccccatcatttgcttcacccgccaacgcgctaggaaatcgtgtgctgcagcctgcaggtggacagcctccgccgtctatcgtggagcaagcaccctctcctagacatcgctcttgggttcaagggtagcggtgatggctgcccctgatgacaggggcggtgtcggcgatgagggcacgacaaacgtggtagcagaagtcgccactggtgcgagggaaccaaagcgctgctggcacatgatcttgaaatgtggccacgtgacctcacgctcgtcgcgttccagcc

SEQ ID NO: 172408 - DNA, 380 bp, Zea Mays
gtggagccgcgcatcttcgtgggcgggtcacggcgctacgtgaattatggtatggtttcctcccctgtgttcgcgcttatccctatcgtgtatagcacctctcgggtgggattttggggcactgtgcaggggtaatcgaactcggcggcgatgcgctgtcgcggtggatctcgccgtcgccgatggtgaggacagggggttgatgacggtcgtggtccgtccatttgttgatgagcgcctaggattagatctggcataggatggccctcgcccgtcgatcctgcaacgaacgactacgattggaacctgacattctagcgcgggcgtgggttggtagccgttgatctcgtgatccatggctcgggtgtgtaggcaggttt

SEQ ID NO: 172409 - DNA, 569 bp, Zea Mays
tggttcgatctagagtgttttggtcccttctccaggagtctgtgtccaaccttatatactagagagtagtgggagtacaagttacgtggttacaatgttttcctaaggtttctcatcctaggtttcgattcttcttcggtggtggtgcacatcatcctttatcttgtagtggggtgtgactacataccaagtttcccccttaaaagcatctagaccctacttgggtttcaatgattaatggcaacactagattattaaggccaacatgtgtttttagaggcagattgagttaggtcaaagtaatggtgattgattggtattatatagtttttgtgcctctattgatagaaatcaattatcaaattttaaaggatgagtagccccaaacgtgtctagtgtgcaccagatttgtgccaccgcataggagatagccctgttcagaatggagttaacaccgacgtgtttagtgtgcaccatacttggtgcaccagaaagggcacctagagagcaatgaagataagtgataggccatacactcactagagatgtctaatgtaccaccggatata

SEQ ID NO: 172410 - DNA, 980 bp, Zea Mays
tccttgtttttgaagtttccaagaacttcattgcatttgttctcaacaacctcgagccatttgtagcatggctccacaaaaacagtctaaaacttatatgtatatctcaatctaataaggtcaggtttattttccgaaggaatgatatcctttagctctggcatagaccattcagccttcaggggccaagtattgaatgtcaaatgttcctagatgagatctcgactcccaacatgaatataggcagtgttgaaggtagccagagcttcaaaatccatatagcaaagtggcctcttgagcctgaaggcaagcttaataggcttctgaattaaacctttcacatcctcctttttctttcaagtcgaccttcacacagaaccattccttcgttactgctttggccatttgctacgatagacaagagctagaaatcgagcctcttttcggtaaaaaagttataacaaacaaagttattatggagatgttctatacaattgcctacgtctaatagtgtaattcatggatctggcaaaaacattatgtgctcggctccacaccttgtcttcatactgcctgaataaaaagcctcattatcataatggaattaggagtaagatggtgcaagaaaatattaaatcttttcagcaccccgaccaccatcttatgtagttagaatcaaagcccaacattcaagaagcttcgaaatataaccacttcattgtccttcggctctggtgtgatctcttcacctccaagacgaactaagtcaatatcgcttatgcaatacctattcttaaacacttcgatatgaccgattcagattgatgacttccataagacaatttggctcgacttcgtcgtcgtggtctcttcgttgtcctcttcaacgtctatgtcttcactgtcatcattggacccatctgttacaccagccatgttgccccggcaatctcagtcaagagcatgccctcaccacgaac

SEQ ID NO: 172411 - DNA, 357 bp, Zea Mays
ggcaaaggacgagcgttggtacttgtctgagggaccaaagaagctgagtgactagtcgtggtggctaacacctaggacacacactagcatgaggatgtggcaaagcagatcgtgttgtcggtgcggtcaaggactgcgggacacgtgtctaggatgtgggggacgcgtatgtggtatgctactcacggtggtttggtggttgagcctcaaaacctcccaacgctacggatggcgcttttcaccgagtttgggcctcaaaactcggcggtgaggtttcgacaggaatcggagacggcacgtggtgtcatcgtgaagggtgtgtcgagcaaacgcaacttcgtgtggagtgcgtgggca

SEQ ID NO: 172412 - DNA, 490 bp, Zea Mays
gatagtcgtggaggggtaaaagatccgaaagggggatggatcaagccacccagtcgctgtacccactttatctgcggccaaccgagattatcctcgccagcgttggccgcttaccgttcgtgcgccacgggcctagaagctttaacacgtcacagtaaaccgtagtagtacgtcagtccatcgtcggaggccttgccacggtgacaccacgataacccgcgccggtgactcaccccctctcttcggccgccagccttcctttcaaaattcggagccaccacttgagtgtgccgctagctccgttaggttgtcacgaagccagagcacctgtcctcgcctccgatcgtccaccatagcgctttaattcaggttttgccccaaattggttctccgcgccgccgtggatagctcttccgtggccagcgtcgcctgaggtagttccagcccaattaccgattgttctagctcccttagggtgtagtgatgctcc

SEQ ID NO: 172413 - DNA, 544 bp, Zea Mays
cccaattcgttcaacaactggcgcttgagtttggctgaagccgaatccaagacctaaggcccgtttcccctaaaccaatttcataaacggtgagctatcctgctctgtccacggtgacagtggttatcgcggacacctgaccgcggtcccggtgattaacgaggttctagcttaattggatgggtcgacgatcatccagagcaagtaagaatgccgaaacaagaacgcagatggcgagaatggacctgatttgggctggccacagcgagcttgatttcgcggcgttcttcaaccgatttgggggaaatcccaaattggggagctgtggggaacgatcggagctacgagttggttcactggacgcacgattacctagcggaacatgctgaggcttcaatttataggatacttgagcggtggtgatcaattcggtcgagcagcgctggcggccggaggagaaaaagagctcggtgtgtgaaacaggtggctttcaccgtggcagtcactccggtgatcaccggacatgtaccccatggttcaccat

SEQ ID NO: 172414 - DNA, 415 bp, Zea Mays
cgcggccttgcgccacgtgccttggcacattaacctcaccgccgtgactcacgttagctcgttcggtggtcgtcggggagcttgccacggtaattgccaccaatcgcgcgcgccagtaaccttcttctttctccggccgccgcgcgtctccctcaaattcaccggccaccgctgtgggagcctataaattgctgaccccgcctgctccgctaagtaattgtgcacctagtagagcaacccgtgcctcgaatcatccactagaactccctaatttgggatttcccccaaatcactcaagaacaccgagcggtgtgacctcgccgtggctagctcacctcaggtccgttcatgcccactgtcctcttgtttcagtacccctactcgctcctgatactcctcgaccaacttgattgag

SEQ ID NO: 172415 - DNA, 411 bp, Zea Mays
cgaaaggagaggcacgaggaatcctgctcgacgaggcccacaactcagcctattctatccacccagggactaccaagatgtacctagacctcaagaccagatactggtggagaggaatgaaaaaggagatagctcagtatgtggcccggtgtgatacttgtcaatgaactaaggcagagcatcagaggcctgcaggcctactgcaacccctcccagtgcccaaatagaagtgggaagaaacatgcatggatttcataatcgaactgccccggacccaaaaaggtgaatgattctatctgggttataattgatcgtcttaccaaggtagttcacttcattctagtaaaaactaccttcgggggagccacccttgcccggatttatctcaaagaaatagtcagacttcatggc

SEQ ID NO: 172416 - DNA, 396 bp, Zea Mays
ggttagttaatactggtgaaatagattagacccaatagacatgttttgggcctaagttagtgccttagatcaactcagccatacactcccaataggttacataatccatctatgctaacctatcgataaacaagattttgtcctacccatataccctagctatcttaactatagttagctccctagctcggatggagacaccaagaccaaaagaaacgaggagatcaacttcgacaaggaaggagagaaatcaaactcaaccttcggatgcattaccacctagccccgagttcttcctcaccataaactttcttaccctggctattcttacccaaacctatccatctcttatatcctacgtaataagtggctggatacctatgctctgcaaatcac

SEQ ID NO: 172417 - DNA, 469 bp, Zea Mays
cgctctcagaaatgaggtggaggaataggtggagcgggagtgggagtagtggaagctagaggtggtggacgctacatcacatactgctatatgcgaggctatatctttcttcatgacataccaccaatacttttgtttcaagtcctggtacatcttggtactaccggggtggatagaataagatgagtcatgggcttcctttaatatagtttcttggagactatctatttcaggaacacatattttatttttggactagattgtgccctaattatccttcgtgaaatctgcacctcttccctctaccatcaggccttgaatctcttggattttggcatctccaatctgatccttccagatatcttgctctagagtggggttccacttctatggtaactccttctatgtgaggaactatccctaggttgagcttatcaaactcctctgccaactcatcgggcatgtggat

SEQ ID NO: 172418 - DNA, 497 bp, Zea Mays
ctgataaatgttagctcgaatgagctcacgagctagatcgttaataaaccgagctaagatgttagctcaatttgtgacaaaattaaaataagccgagtcgagctagcttacaagccaagattattttgttccgccctaatcataagttcaactcctgccatgtgcaactttttttatttttgtttttttctatggtttgtgcagatgcttcctgaatgaatgagtggtactagactgataggtgggccttggcatctagtgtgtatgcgcagaaggtgcaggtctatcagtactgcagtaacttcagttacagagcttggttggcaactagcaagtgggatacgcgatgaggccggtgcatcctgtgcttgatccccatctaaattttggatggggtacatgggcatttagggcttgatgtgatgcatggtgaattgtcgatatagacaataatgaaccgcgactagggtaaggtgccatactgccatggattggaa

SEQ ID NO: 172419 - DNA, 632 bp, Zea Mays
gacacatagttgaatttcagtccggcctactatccacaaactaatgggcaaaccgagagaaccaaccatatactagaagatatgttaagagcttgtgctcttaaacattgtggcagttggggtaagagtttaccctatgcggagttctcttacaataacagttaccaggccaatttgaagatgaccatgtttgaagctttatatggcagaaagtgtagaactcctctatattgggatcaaactggtgaaaggcagttctttgggccagaaattatacaagaggcagaagaacaagtcccgttgatacgggagaacttgagaactgcgtagtcaaggcagaaaattatgcagatactcgaagaaggtagtaagagtttaaggagggtgatcatgtgtatctaaaggtgtcaccgatccggggtatgagaaggtttaaagttaaagggaagttgtcccctcgctttattggaccctttgtgattctaaagcgagtgggaaaagttgcataccaattggaactacccgaccatcttgaggatgtacatgatgtcttccatgtatcccagttgaagaagtgcctcagggtaccagaagagtaactgcctatggaggagcttagtgttcaagataat

SEQ ID NO: 172420 - DNA, 602 bp, Zea Mays
ccaagaaagaataggtcggttgcctgtgagttcaatggtgggaattggatcgggtctttgagaagcaagatcacattgtcggttcaaattgaagaatttgtctccctttggattagactccaagatttttatcttcaactgtaggtctcgaactccattacatggaaatggagccttgacagtgtcttcatagttaatttagcctacaaagtgcaatccatcaaatcttgcagccacatcaaatctagtcttgtatgggaggtaagggttgacccaacatgtaaggtttgtccttggattcttctacaggacaagctcctcactatgaacaatcttgccactaggggctggccacaccatccaagtcgctccctctacaatcttgccactaggggatggccacaccatccgagtcgcaccctctacaatgggtccctagagactaggggtgggcattttaaaaccaaaaaccaaacccgaactcgaacccgaataaaccaaattatcgatctatttgggttttgaggttcaggttcggttcctacatgtactatatttcgaggtattagtttgggttcggttcctagcctttaaaacctaaa

SEQ ID NO: 172421 - DNA, 575 bp, Zea Mays
agatgacgtaatgtagagaatgatgttggagaagaaggataaatttttttagagaaaacgctataaaaaatataaatgatagatataaaataagtcggtggagactggagacagtcttgcagcaacacagcatgcgtttcccgtggtggctggctcgtcgcttcttaaacaaaaatcaaaagcagagggggacggacggaaattgaaatgcaggccaaagataggggtgtaaaaagagcatttgacatacgaaattgaaatgcagagacaactggtggctggctggctggacgggatcatatgataaggcggaacgtgaagggtgaaatcgtaagaaaaccgggcgtaaataaaatgagcaaggctagccgctggccgcgttctttgccttcacttgtcctgttcgcccgctagtacagtagtatttttatttcgccccctcgctctcggctcgcctcccattctctctctcctttccccactactagctgcccgtcacccgccgctctgttccatccagcctgcgccggtcccattcgcccgccattccgccgcgcgccgccggcagggcgccg

SEQ ID NO: 172422 - DNA, 465 bp, Zea Mays
gcctaaccctatgcagcagcatattcatccaagaaaccaacaacctataacatatcccttattatcctacccattacaaacttgtcattaaaattaaattcagtactgactaatattatctcgatcaatcttcaaggacatcgagcttgattttgctatgccccagagaatggtgcatgtggacccttcttccttatatgcatcaggtggtctaaagttggctttaacctttagcccaccttacattagagatttggacatcaaaagaaagctaaaacattgtaaagcttttagatatttaagtttagaagagggaggcaaacatgccctagaatattggagatcgcagctactgctatcaccaagtaacacactaagatatcgaagaccgcaactgctgctatcaccgtttaaagtacaagattcagtggtggtgcttttgcttctaccttaacaactaagatc

SEQ ID NO: 172423 - DNA, 306 bp, Zea Mays
caaatattatgaattgtactgttttttccccaaattttgcgtgggtgcggctgtacccacaacgttgcatatagttccgtccaatttcattcatatgggctagagactctggtatctggaaaacaaatcttgcaaatctacaaaaggcacgcattatcacttagcactatactgtatatgactgcaacatgtagagttgtagacccacaccacgaacgaagaaacaaagtaccaggatgccctctaaaccagctataaataccgcagcccttcacttgttccctcccttttccccgccctctgata

SEQ ID NO: 172424 - DNA, 643 bp, Zea Mays
tctagcacgctgatcatcctccttctcttgggagttgtggcaggtgcctttgtcaccttcggcaattctgcctccattaatgggctcagaatttttggcagcatcattgtttttctaattctggctctttgacttcggttgacccgactataggcacctttggcaccgcagtcgatccttcggcttcagcctcagcagaagtagcctgttttgcttcggtagcggaggaggtcccttcaccaaatttaggcactacggtcgtttcaatatattgaggcctgtgggtcaaaacctttattttcttgcccttcggcacatcagtggtgaccgaagtgatagttttcctcttttttccttgccttctcaaggggtagcagtaatcaggatatatgaagccaattgcatcaaaacctctgttcaatcttttcttgccccgacccccgaaggctgaggacaaggcatcatcttcggccatggtatatgtcccaagcaattcgtcgctagtagcctcaatgcatttcaactagtcatcatttggtttgtcgaacttctctctatatctgaaggtatatttcaatcgaactaatccaccttcgttggattcaacagtagtctccttcagcatctcctagccatccacaag

SEQ ID NO: 172425 - DNA, 385 bp, Zea Mays
gtactccactggccggcccggtgaccaacgtgcgcagagcattgggaatttgttaaagctatcaagcagcccgtcgaccttgaataagatatatggccatcatgtattgtaccgtcctaaatcatgctacgccaccagtgcgatgcgccgtggaggacaagtaccacacgccacagatgaatggatgatcggacgtacgtggcaactagctagctgctgctgggtaggtttggttggccaaagcgaaggttggacgattttgctgcagatcgaatgcacatctcatggcaacgccaagttttcctttggattatatgagaagaaagcgactttgtactgttcactccaagctagggtaaagcgactacaagttcagcatgacaat

SEQ ID NO: 172426 - DNA, 913 bp, Zea Mays
ctaagcctgtaacgacaagcatgtcagggtcgacgatgcgcagcttgccggtggtggtggtgaggaagttgagggagccgaacaagatgtggcttcctagtgcgaaggtctcgccaccggtgagcgctgaagtctgagccatcggagtggattgtgtcacttggcacactaaaggtcccctaccgggtgcgccaactgtcatggtttcgtaaactcggggacgatagaatttgtattcggtggggatgctagcgtggactcactatgaatggtgaatcacctcggactcaagcagagggttatactagttcagactttcgccctagtccagtgtagtgctgatcgtagattcatagtactgtttgaggattgtgttaccgctgctgcatgcgtgggaaggaggggccctgcccttttatagctcaagggtaggaccttacagaggagacttgtttcctactggtaagagcgtgatctgttgcccctagttgacgtatcttctttaacgtatttcatagggtcatgtgtcgccatactctcggtctggcataccatcacgcttgtccggacgtctttcatagggtcatgcatcaccgtactctcgatatggtgtactgtcacgctcgtctggcttacgggtccctgtagcgagtctgatgttgatgtcctcatagtggcgcatggcggctcccatagtgtagtctcatggtgcaatcgtgcgcggcgcgacctcgcctttcgtcatggactctgcgtcatcctccaacgtgcatatgtgtacactaagtatggtgtatcatcctatcctttatggtataaaactcactgtagggactctggtgcttaggtcccccattactggagatgactggccccacaagacagctgggatacgtcagagactgtatgcggt

SEQ ID NO: 172427 - DNA, 707 bp, Zea Mays
ttcgattaaagggatcggggagcttaaggaggacctagggatgctagaacaatcaacagaggagtatgaattcacctggaataggctggccgcggtgaagtgttcttacggggtgttcaaaccgatttgggggaaattaggaattcgagctctcaggtgaacgattgaggacgatctttggtggctgggtgcgcgatgatgttgtgaagctctctgtggggtcaatttatagatccccggggcggtggcacttaatttaagcggacagtgggggcggccggagatgaggaagaaccttggcacggtgaatacgtgtccaatggcgtggcattaactccggtggtcgacggggagtttagagggagtcacggcgatgcggtggcgaggttgggacacgcggtggacaacggcgatgacacgacgatggcgagcagctgtatccccggcagtgagcaaaggggatgaattgcggctagccggagtgacttccaggtcactggcggcgaagatattttgaccccgcgacgttatcgacttaccccgagcgtgaatcacgacgccggcgacgcgaatcgcggcggggaggtcaccggcggtgggattcttttgctgcgtccgatctgatccgttgggggcactgtaccatcgtgaactcccatcagggcatctgacagagcattttgcagaggaatttcctcccaatttca

SEQ ID NO: 172428 - DNA, 629 bp, Zea Mays
cagtacgagtatgctacgcaatgacaattaataagagccaaggacaaaccctgtccagggttgggctttacctcaagaaaccggtcttcactcatggacaactttatgtggccgtatctaggactacaaccagaggtggccttagaatcctgattgagaatgaggacggttcgtgcggggtacagactcgaaatgtggtgtaccacgaagtcctcgctgtcgctgaagcggcagccatactagccacctaatttttcatccatcttttgtgttgtacatagcaatgatatgtaaatactccaacgctgctgctactcagacgattgtgtctcttctcatgcttgttatctttgttttttcttgctgcgtgtacagtatattttgctttgaggtaaaattgttctactaatgtgcagtacgtatactggccttatctacttccctgctgttgtattctctaatgtttatgccatttttggtgtcaacactgcagatgggagacgtgttgattccaagcctgcagtgtgggaacttatttgtgacgatatgcgtccgtgtttctcgtttttgggacttttctgatcctcaggatgatgcaaggctgctacactgtgatatggtgctgctcg

SEQ ID NO: 172429 - DNA, 744 bp, Zea Mays
ttgagttctatggtttgaaatgcataagaaaaaaaggtgccaccaaggagatgagaagtaatgccactggagaagttatggtgaagctgcatgttgcctcatgtccctagttacttgccacttacactgcaatcacatagtaattgaaggttagtagcttagcggtcaggggccaagggagacacgagtcgagtaaagaaagaaaataatgtgggagcgattgaagggcaagggaactgatctggacaggttagaaagagaaagcaccgacctttcttgcatgaacctcacccgttcttgagatttgagaaggagaaagcctcagcctttcttgcacaaaagttggcagtaggctcaaagagcgatgaaatcgcggagaagcgagaagaaatcgcagaggagaaatcgtcagccggcacacctctggcgcaatcgtgaacgccacacactcgctcgcctacgcacctgcgacgccgtcacgtgctcgtgcgccaccaagtgctggctcacccgctcgccgccgcccgctcgaccaggtatgtgcgccgccgcctgctcatggtctgctctaaaacctagtggcgagcagagaactgggaaccgtggcccggtctgcctaggtgaggccaaggcgagaagagagggggtcgtgggactggtggtggtgcaaggaggaagagcgtggggcggggctatgacacgagacggagagaggagggtgaggagaacgggagagaggtcggg

SEQ ID NO: 172430 - DNA, 431 bp, Zea Mays
aaatgattaaatgggaaacgactttgcaacggggtccctggcgggtgttttaatgtttccttacagactagtccttggattactattcaaatgtgtcgctgacagttcagaaaaccccctggggttcctctaaacctaacccgaggtccttcccccaaattaacagtacctgcggcggaggggcttaccggcgccgagactgctccggtgaggtggtcgagggtgtaggggaggtcctgagggtcacggcgatgtgcgggtcgccgtcggggatggtcagagtcggccgatccacgtgcgcaagcgggggagctcgtcgacggcgaggagtccagcctatccagggcacaattgaccaattgaatgggtcagagagctttaccagagatcaaggaaggtgtgtgtgcgaggaattgaagaatggctcaccg

SEQ ID NO: 172431 - DNA, 586 bp, Zea Mays
agaccatttgataaaaatagtttcatgataataacatgaagattaagtgataatatgatgagtgttctaaaataacatgaataccgaatctttaatttggccaccctaaaggagagttggagagaacaaaggggtggactggcggggactaggcgttaaggcgaagcgagcgcatcagcatgtcggtgtggagagtcagcgactctaccgcaaaatgacgacggtgaggcgacaataggcgtggaatagcgagggcaggcgacgatgcgacggtagatgacgacgatgaggcgaaaggcagtggtagcaagcgacaaccattgtcgcgttgcgacggcatgacgggacccttgtgagatagcgagggcgggtggtgctgtgatgccaaggtagaatcccactaatagcctacgcatccaccagtgcagattagaaggcagagtagttgtactgcgtgcaggataccgacgtggcgacgagcaccacgactcgagtgggagtgggctgagtagtgaagcatcgagaaaaagttagatgaaagtctagttttcattaaatttattccaacctactatataaaagttta

SEQ ID NO: 172432 - DNA, 1761 bp, Zea Mays
acgccaacagcaattgtaaacaagatcgttgagaagatttcttgagcaaaacgtgttgatctacctgtagatttggggtcaacctaatgatgcaacaaaatctatcaaaacatggtttaagaattatgatcacaggataaaatttggcccctggcctattaacacgagcatgaataataatcagtagcattcctcaaagatctggtagacttaccattacaacatgtaaaggttgcttttctgatatcccagggttcatgaaaggtttgtcctcattcccagatacacgttgtttcaactcttgcaactactgacataaatgcatattacagaccgtgaagtggttacaacatgccaagttaccaacatggtaactaatacagagtagaagttaacacagaatggcagaaagcattgtggaaggaaatgcatatagttggaagttataagctttgtgcttttgcaggatcacagcaatgtttgtctatatgaagagccaaacaggctttacttgaaaacaagtgcttcaacaaatggaataattgcttgaacatccctacaaacatggaaatacattgaagaatacaatgctgggcaagaatcgtatgtcattgtgtgacatgtagatggatttggaaaattgaatgtcagttaagttacaaaacatggtccaggtctttttcctgaagctacattgacagaataatatagcgcatgaaacttcatcatatatattttaaagagttgctaaataatcttaccagggctggcaggcttgcagacctcccagattgttcatctggaaggtaatctgctatagtgttagtgagaataagtgcccgcaggtactctgcagcccccctgctatccacagcatggcttcgctcctcaaaccttttaatgacatcttcagggctgcatatttttggtgcacaccaaaacaggaaattcaaacaggtgaaaccattcttcagtttctaattcgaagatttgatgcaatggtcagtacaaagtccaaacaacaaaaccaacaaaagaagcaactttcttcattgtcatatttatttcaaattgcatcaaaagatggcacggaaaaaggactcccatgcttatgtcaacaatacgaccactactaatgatgatgcagtactaggacaccaaccataagacaaattggacgaatttatgaacgttcaagaacatccaaatttgtgctttctcctaccaatgatccaacagtatatgaatcatcaagcactcaccatattgcttattttcaactttgtgaggcaaatcagcatagagggtatacggtatacctagggcgcagaatccactcaatatcgcgaaacttgggaattcatacccacaaatttctcaagaaaccttgccacaattgttccttaggtaagtcaaaccgtataaacaaccacggcaaatccactcagccggaaccacattcgcccaattgtcaaagtaaaacaacgcaccttaacttgttgagctcgtgcaggagcgcgctctgcttggccgcgtcgttggggttggcgtccgcctcgtcgatcaagcgctgcagccggtgctcggatctccagaaaggccaccagcccatccagtccctcgacagcacccagtcgacgaacctcctggccgcggctaacaccgcggccgcgaccgccacggcccaggccctagccttgtccaccatgtcctccagcccctccttcgcgctcatcgcgacgggctgagctgccgccgtcg

SEQ ID NO: 172433 - DNA, 414 bp, Zea Mays
gattaggagagcataggtatcgagctacatattatgtaggatatacgctggacaggttgaggtaagaaagattatggcaatgagaagactttatccaaaatgtttaagtcctgattcatctcgagattcgttttggctgttatatccttccttgtcgatgttgatcttttcttctccggtcttggtctcattggtttgaggttagtgtatatcatcagggttggggagtgtggttaagatagatctggatgagatagactacataatgtaggtcaagttgttgggtatggccgagttgatctaagtcaccaatttaggctcgagtgaactaggagtatggccttatcttttgtacccgcattaagtaacttactcttgattagatcatcatagtttagataaaatctagattag

SEQ ID NO: 172434 - DNA, 732 bp, Zea Mays
cattaatggatcctgcacgcaatgaatattcagtaatggatcttgtgctttgtttcattactttattaactccggctttagagttatctttgaatgcgttcactttgatgaaattaaaagcagaaaacagataatatctatgaccaaatatgacaatgcaacattttttgcagctgtttacttgttgtatgcatgattattgtacgttctatagcgtgacagatgaaagatatgcttgatttgttcatttttcctgctctatgcctgaactataaggattttaatgcatgacagatatcaatattcggaaatttgtctaaatatgacacctaagatgtcattgaaaatatttcctccatgttaagtatcatagacaataatagtaaagtgagcttgaattgtacgttgttttggatatatgatagttgctgttttgtaatgtttgttttctttaacttcattttgtctgctgcatgttgtccttaatccatgacaaactctctggctagaggtgtttacactaaactctctgagacctatctgtgtcccaagaacccatttttatttcctttgttgggaaagtctgcatgatttctaatcacaaatgaactggttagcaacatcgcctaggtgatcttgacaaaaagaaaaataaaaaagttgatttgaaaactaaaaataagctttctgtcgaagcacgtctgagcaaccattatgtagcaataagattag

SEQ ID NO: 172435 - DNA, 527 bp, Zea Mays
cctgagtgacatggtttgaagaattacaaaggcgcttgggccttggatcttaaataaagaatttacgtaggttatctatattccatgaatgctctaagtcttcgccagatgatgtggctagcatgtaagcatttagcgacgcttttgccttgactatgtatggcccttcccactttggctctagtttgccctacgactctgttctcataatccttgtgagtactaagtccccttcgttgaattctcttggaacgacattgttgtcacgccatgccttagtctgagcttgatacttgttcagggcctgcaaggcgaggacacggtctccgtcgataagatctttggaagtttattcatcgacgtcagggatggcaaagtggtttgttcgtggggattcgtgctttaactcttgcggtgtcattgcctcggatctgtacatcaggtggaagtgtgtgaacccggttgctcggcattcttttgtgttcaacgcccatatgactttgggtagttggtctgcccacttgcct

SEQ ID NO: 172436 - DNA, 419 bp, Zea Mays
gaaaactatacaaatggtcaattcatggattgaaccatttaccaaagttgaagtacattaataaatctacaaaatatagtaagggaggtattacaaaaaggtcctacaaaaaccccaaatcaagcccccaagtggagagcacactagagcaatccatttttctctaagtcccaaaatcagccctaacctaaagatcagaagtgttcacccttttgctggcaccaaaaccacatggtacaaataacaaaaagtagccaaactacccaaggcacacccctgaaaaatttgaaaccaaaccagggtcgtttgacacggtttggcatctgttttgtcgcggggtgaacagtgcagacagacaagacttggcgccaccatatcttccaagctagacccgatctctccttggaactcacatgaac

SEQ ID NO: 172437 - DNA, 797 bp, Zea Mays
gtgaagttatgcagtggtggtggatgaggaaggcactgtggtcactacaaaagtcccggtcatgcagctctagtacatgcctattactccgcggcttaaacacttgtttctaaatcatgagacaatgaagcaaatgagatggcataacgaaggggatcgtcaagacaagattcagatatcatggtgcatccatcagatggcgaggcatttcagtcactggacggttttgatccagaatttgcatgggaccctagaagtgttcgtcttggtttgtcgacagacagattcactcctttcagtagaagttctactccgtactcgtgttagccggtgttcattattgcctacaatctccctcctaccaaatgcatgaaagaagaggtcacatttcttgctctagttattgtgggccctaaggatctgtgtatgaaaatcaatgtatttatgcaaccgttgatcgaagagctgaaattgttgtggcaaggggtggaggcttatgatagccatctaatttgtaaatttaatctacgagcggcatatctatggtcaattcatgatctgttgaaatatggcatttggtgcgagtggtgtgtccacaataggatgtgttttttgatatgtatgagtgagttgcaaacatatgggttaaagcatggcaaaaaggaaacattttttgatatgcacggatgtttccttcccgctaatcatccttttaggaaagataaaaagtcatttcagaaaggaaatagggttagagatgggcctccaaagcgacaaacatgtgaagatatcatgag

SEQ ID NO: 172438 - DNA, 344 bp, Zea Mays
atctttactacatattaagacagtaaaggtagtctgcctcccctcgttctgccgttctgccgtccatcgatctggaccgtccgtatcctatcgtgcgtctgcgtctcccacactccatccccctccaccgcacccaatccctaaccatcccccacacgttcctctcctctctctgccgcgttgcctgccccctgctcctgccgcgatagatgcctcgcggcccccgacaacgacgaccgcgccgccatggcctcccatcacctccacctccgccacaggcccacagggcgcaccctccccctcgccgtcgccttgccgcatcaccaactacccttcgcatccgc

SEQ ID NO: 172439 - DNA, 556 bp, Zea Mays
agaaaatgcaggactcctctatattgggatcaaactggataaagacagttctttgggcctgaacttatacaagaggcagaagaacaagttcgaatgataagggagaatttgagaattgcacaatcaaggcagaagagctatgctgatacccggagaagactgcttgagtttaaggagggtgatcacgtgtatctgaaggtgtcaccaatccggggtatgaggaggtttaaagttaaaggaaagttgtcccctcgcttcattggacctttcttgatcttaaagcgagcgggataagttgcatatcaactagaactacccaattatattgcggatgtacatgatgtattccatgtatctcagctgaagaagtgcctcagggtacctgaagagcagctaccgatggaggaccttagtgttcaagatgatctgacttatgcagaatatcctatcaagattcttgatacactgactcgtgtcacaagaaataaggttataaagatgtgcaaagtgcaatggagtcaccacggagaagatgaagctacttgggagagagaag

SEQ ID NO: 172440 - DNA, 480 bp, Zea Mays
gacaaccctgaaactgaatctggacagacagtgaagtcagatgagctttgggatcagatttgagtataatccagtgattgtttgattgagggtgctataacaaaatcaaagatggattgtaggacaacaatttctctgcaggcagatgatcatgttgtcacacaaaaattggagaataaggagcttcatttagctctgtcaggcgctctgaatgggattccaatggtacagtaactggagaagatcccaggtgaagtgcacctcgccgccggcaacccctcgttcggattcatgctggcgccgcgattcgtgccctctgcggtgtggattacgatcagcagtggaaagattttcaccgtggatgagtttggagcactgttttgccctgttgccgtacccacttgcaccgtcgacgtggctgcatggacgtcgccgtggttgccgccattcactcgatcgcgccacgctttaggatgtctt

SEQ ID NO: 172441 - DNA, 800 bp, Zea Mays
ggagcacaactttgctatagaactcatgccttggtaccatgaagaattctgagataaatgagcctgaagttggactgtcagactgcttgaaatctgaaattcagattaacagtgggatgacatgaacttagggcttaattttaagcaaggtccagtgacttcttgtgggagcacattgtagcaaaattatagttggttagtagctctaaaactttgctgcagaatttcgtatgtgttgccatacaggtttgggagaaaatcaagctcaaaaacggtctgtcaggctgactgaactccattcgccatggtacagtaagccccaaactgaagaagatcacgattcatccccctgctcgtcgtcggtgaattttcgtcgggattgttgatggatcggcacgattcgtgcaccgtgggcagcagataagctcgggcaggtaaatatctggcgcccggattgagttgagcctcgtggtggctaagcccgccgtacttcctccctagctcatcgatcgaacggataacctcgccgtcgtcgagctgttgccgttgcgcgccacgtgcttaagcactagtcctcatcgtggtgattcacggggtgcttgtccagtgatcgccggaccagcgcgactataaatagcccatgatccgcggcaaggtatgaacatcacgcacaccgtaagttgatccgaagcaaaaatttgcgctgcctctgtcccctcctcccaaattggttgtgcgcagtaaaactagaaccccttatggccgtatagccccaagccccgccctcaattccactcgtg

SEQ ID NO: 172442 - DNA, 686 bp, Zea Mays
ggaggaagaactccgacggagacaaggtgaagaaggtcggactcagaaacaacagacatgtggttacctgcgaaaggcaactggctgttgggatcgatgggaggaatagtcccggcagatgaactctgattcttccgcttggacgccatctcaatctcgctggcgaactgagcggaagcaagattacaaagaagcaaagaaggtctggatgcagaaaagtagggctagggcttagaatgcagaggcatgcgacggcgcagtacaaatggggttttcccgggccagatgccatttctcaaaagtgcccagtcatcacccggccgttgattccataaacatcgatgtggcccaatacaactcagctgctatttctaaaacgctgacgtgccaagtcatcactcggctgttatttccaaaacgaccgacgtggcccaatgtaactcagctgttatttctaaaacgctgacgttaccagtctccactcggtcgttatttctaaaacaccgacgtggcccgttatcactcggtcgttatttctaaaacaccgacgtggcccgttatcactcgactgttgtttctaaaacgctgatgtcacaagtaatcgctcggccgttatttctaaaatgacaacgtggctcaaaaggactcagctgttacctctaaaacgccggcgtcgcaaaaagaac

SEQ ID NO: 172443 - DNA, 527 bp, Zea Mays
gtcgtgagttagaagatgggatttcgccgcctaatcggggctcgaatggcgagctcgaaaccgctcgctgccgcgtccatgcgttcggccgtgatggattagcggaggaaggaaatagaagagagacagagaaccgggggggagaagatacgcgccgccgcgcttggctatcggtaggtggatgacgggtgctcagcggttgattttcgtggcaacggtcggatttgatcctgagtctggtatcgcgacggccgtcgatcctccatcgtgcggttgggattagagtaaaggaagtgtttcgatgaatgtgatcctcgccgttggatggtaatccgagggatgcgatcgcgttgcagttcgcggggcttgggatttaaaatctggggcgttgacttttgatacaacggccgtggctagctcataacccttcgcggcgtcaattttacatacgaaccccttcccttttgttatataaacccgccgtcccttacggcagagtactgagtctagggatttattgcaccaag

SEQ ID NO: 172444 - DNA, 518 bp, Zea Mays
caagccattcctgttgcccctacaggtgctgctcagggtgctggtggtggagaagtgcccggcggtgctgtccctgcgggtgttgttccaggtggtggggccgaggtgcctcttccagtcagtggtctttctctgatgcagtggatgggcatgaagttggattcttttgatggcagtggtactccggtcgaggcggcagattggttgacttacgtggaggataagatgaatgttttcgagattgtgtatggagatcgggttcgctttggcacacagctgctgaagggagaggctcaaatttggtggagaggtgtgcaggcagcgcactcctccttaccaggagtcctgtcttgggatgtcttcgtcaggcagtttgaaaggagattctacccagtcaccttcctggagaaaatgaagattgatttgcagtcctacaagcaggagaagaagtctgtcaccgagtatgaagtgggcttcaacaagatggtctgctttgtcccttgtagcatcgcaaaaat

SEQ ID NO: 172445 - DNA, 871 bp, Zea Mays
cacctgtgttggtctctacgattacgctcggtaacgctgacaggcggggccgagttggcgggatcgtctccctcccgtgatcctcgccaggttgttgcaagtgccgcgcgcaagcgatctcaacgaatctcgcgtgaccccgcataacgccgcttcaccgacacgtgggcccacgtgccagtccctgtcctccgtcttcctcgcgcgctccccgaacggactccgctttgtgcgaggcgattgcagggcggattccgcgccctggcgcgtggtatccggttggggccgcagctccttgggccataaatgacgaccgtcgtgaccccctcatctcatccacctgtgcccacatccgagcacaagcactgtagccgccatcgccgcaagctcggagaagggtgggccgccgccacgggcaattgctttgtgggtcgccgccgaccgcaccatcacagggagggactcagcatcgcgtcgatccgaggtaaacgcgcccccgcaagctttgtcaagctctattgcgtatgtagcacctctcggatttggatttgggcgcacctggcgtgatttggccgtgcgacgacggggatccaccgcaaccagggcgcggcgccaccatgcgcgatgttggattggggaaagagatttgggccgtcagatttggtgtcaacggctgtgattagacgcttgcgtaccgcttcactgagttaatccatgccgtcgattggatgactgggggtgtggatcggatcacccgtgatgtgatctggaccgtagaaatcgtatccaacgatctctgtccgcacaaaagcagtaagtgtcatgttccgatcgtggccgtctcggcctgatcggatggtcacgattctac

SEQ ID NO: 172446 - DNA, 806 bp, Zea Mays
atcttatggatgtattgtccaagtcgtagttgttgaaatagtgataagtatggtgaaaagcgcatcgtaattcgccccgtatggcgtaaagtagacttgacaccagccctgcagttctgtagccatctctttgtggaagggttggtggcatcgggcgtccttttgtcgatgttatttgggcccaggccatgctcgggcgaggcagaggtttctcccaaggccatggccggacctgtgcctgggcatgcagtagtgtagggagtggttagaacagttgccggagtggcctcctgagggattcgcggggagttggtggctactgccagggaagttggccgaggccaagctcgggcgaggtggagttttctgctgaggctgaagctgtcttcgggcgcggtggaattttctcccaagggtgagactgtgcataaatgtttgcatgtcccatccggagttgttcgagaacagtgaccggagtgggggagcagggtccgatattcgcgggtgtgcgtcatcgtagtcggtgaaagtagatgggacagacggtcccatcgtcctctgttgactgtggtgtcacatggagcagatatcagtatcgttgcatttaatgtgcacgtcttcatggttcacgagatctttggctgaggctgggctcgaggctgtcctccgtccgagatgagctcgggcgagacgaaaattgctttccgtgaaggggtgccatcgggcgagttgagcattttctcatggacgcagcctttgcccgtggatgggctcggttgagacgtagttttgagcgatggtcgaac

SEQ ID NO: 172447 - DNA, 378 bp, Zea Mays
tgaactaataggttcctaaggcaattatgtgtaaggtgtttatagtgacgctttatcccgaaaggtgttaagtctgcgcataaataagagataagtgtattttgtgtagtgtggattgattttaagtgcatgtgtcgcaagaaatgaattagtgcgcctaaaggcgatgaatgggtgtgatgaaatggtgacatgccttcttagtcatcatgtcgtctgttggtgacctaactgaaggtcgtagagaagggtcgattacctgtgtgttattattgtcaccttgcgggtctgtatgaattgcaatgtgaagtagtaggctctctatgtgatgctagatgtctaggtagactttcgtgaattgtggtgctcagaccgtcg

SEQ ID NO: 172448 - DNA, 447 bp, Zea Mays
gtgcccgcgggtgtacccgcgggtgccataaacccgcgggtagcgggtttgggtaacatacgctacccgtcgcgggtagcgggtgcgggtacgggtttaaaattaatctcacgggtatgagtttgtaatctctgtacccgcgggttttaaacatgttgccatccctaattttgttcatggattactttggatggcaagaaggcacgggttctaaaacggaaacaaagtatctgcagattttttgtatgtctattatgagcaatatatattatgtcaatattaaaatgtgaattgtacaagttgattaagtttttgtgttacataggtttaaatatattgtttgattgtatgagcaatgatcaattcaacttattttgttaaggtaaatcattgcttcattttaaattatttgttgtgaactaaaacttatacacgtacatatggatt

SEQ ID NO: 172449 - DNA, 671 bp, Zea Mays
ttttgaaagatctgaagcccctggtcgccgttttgcggatcctggcttcggttttctgaagagatgcgatatcatacctctggacctctggacatgcgggttcgttctatacatcctcgcattttctcgaaggtccaacaatctgcttcaaatacaccagtgaatcataagaattgttcttggcagtttgcattttttttgttttttctattttttgctatgtgaatctatttgaatgaatcatatgcatcttgaatccgtgacgacgaatcgatggctcgatgatgattattcttgctttaaccacaccgaactaaaggctattggaagggtgctttcttccttcctccatttgcgccaggctcctctttcttggtgtttcctcatgaaaccttgctttcttgttgaagaatgcagttcctgttttcttccgcgagagtgcgaggtagaaggattcggtaagatttggtagcgtagcaaggggggaaagctggaggcctcgtccgctggttcttggcttgtagaaaaacctggcctttctctgagagcctttgccctgtatttgcaattgatacccctctttgaataagtatttcccccttttcaagccaatatgttccgctgatcaattatttatatgggtgttggacgataatctggaataaaatttg

SEQ ID NO: 172450 - DNA, 299 bp, Zea Mays
aatttatgatttgggtgagcaagaagattggtactttgctgtcaacaccgaagactgacaagataagagtcaaaagaatgttgtcaccacagttaaaaacccgtagaagcaggagaatcgctaggttaggagctgaacctgtccagcctacagccaacaggcagagaaagcaggttatgagagccttaggggtggttagcagcagggaggcattatctgatcaatctcatgaagaatacgctaagttgttcagtcaatctctctttggagaaaccactggactgagaactaatatccat

SEQ ID NO: 172451 - DNA, 331 bp, Zea Mays
gtagcgtctgggtgatggcaacatgcgcggccatcgcattatgtttgtatgtggaaagacggtcgaggaggcgggctacgtacacacgccttgccctggagtccagatcgaggaggaggaggacgacgaagcaggcgcagtggcggatcaagcagcagaatgtcgctcgctgttggtgtcaaggaatttatgctagtgccgtggtggaaccgacacgatggacaccaccagacggtaacgcatcgagatcgatgcgaccaagtgcttgggtccggagcagggagcactacgctatcgagctagctggagcacgaagcaagacaaaggggta

SEQ ID NO: 172452 - DNA, 691 bp, Zea Mays
gctaaataccatgcatgtcactagctccatacattattatatgataaactagaacccagtacagtttagcagattgatgcaccagaagtgaatttaaaaactttcaaaaatattgttcagaattttagtatccagagtcatattcaagtccatctttcagctattactttgacacatgaaaaattatcaccaccagtgtaggtagattgagcatataacatggttcgtttgttatttcaatgagatcgaggacagtgatatattggaacaatgtcacattttgatctgataatattaactcataattacaagcccaaaattaaagagttgatagtgctttattagatattaggcaggcaaatacttgtcacttgcagtaataagaaacacacatctgaagcagtaaattttctgatggatggagtaaaatctattacacacaaggctatatatgagcagcaatacacgcatcagatattaaaaggcgaggtacgtataaacgtacatattgacgaggttactaacaaagccattaactacacttgatcaatgcaataagcaaattcgtatgtaaaaaacaaataacaaccccttttaccctttaaagtgaaggaaacaatgtgatgaggtacatcagtataaaaacgaccaataaggaacagtatgccgtagactgtggagtataagtgta

SEQ ID NO: 172453 - DNA, 468 bp, Zea Mays
ctcatgttacacttcatttccttctataaaagctaagttaaggtcttgtgtctataatattgttagctagtatagtttttttcttgaatacacaggacaactacacatcattatataaaataaaaagagggccaatacaaccacaaacaaacaaaacaaaaaataccagcaatacccacacactacacatgccactttacatacatgttagggtaatagacatccttagacatgaacctattactcttcatgagtcggaccagtcaaataagagaggatccatgcacctgctatctcccaaagatgtcatttgtcactagtgatgctcagagctcttgatgtgttatgagttgcttcatcgaatatacaaagcattttgatgtgtctcgataattaaatcccctagcatgacatggaactaaatcccttcttttgatgttatggaattatgtgccctgatctatccga

SEQ ID NO: 172454 - DNA, 280 bp, Zea Mays
gcgacgccaggagggttgaggctagggcgtttaaggtgggcgccaatagcagctcacctaaggaaggttcgtccaaagaggaaagtagcagcaactcaaccaaggaaggtccgtccaaggaaagtggctagattagtggccaaattgataggccttaattgtaggggagttggtttccaaataagtcatttcctaaattagaagttacctagttggtcgggctagtggcctatttgtatggaaccatgaggcaatgaagggaataagaaatatatcacct

SEQ ID NO: 172455 - DNA, 287 bp, Zea Mays
ggagaagaggaggacatggtcgtggaaagggagagtggttgctctgattgtgtcgtgagcatccatggagaacgaaggctgcctacacaaagatgatgagcagacacacctatttctcatgaaatctgggccacaccaaaacatctagcccaggacgtctgatctgttgttttccattaaatctgcgccgaaccaaagcacccagtccagaatgcctatggctttcgtcttgacggtttatgaactgaggatttgtaccagaccgaccatcgaacgatgctaccacc

SEQ ID NO: 172456 - DNA, 959 bp, Zea Mays
cgaaggacataatcaccaatactatatgttgcatacatctcactgtcaggaaacttcgcttttgacaaccttggttgtcaattatcaatacttgtctgatttagatggaattcagtgactcttagccgcttttgtttgctttttcctgagaatgcaacaatttacaaattggatttcctaatgtagtaaacaagaattcaaatctggagcagcctctagtggcatccgaggcacaggctgccaatcagaccatagtttcctcaactgcataggaaaaaacaattgtgattacagtttattaaatattcatatctaacaaataagtaccattctcatgttattcttctgagaacaaaattagtgttgtcatatgcaatgactaatgaccttatgcctagtttagtattgccaataaacatcccgacaaggtagtctttctgaaccgtatagccaagatacactaattacaaggtacctacctaacttatgaggagaaatttacctaaacactacccacctcagatttgcaaagatggaccaatatcattatatcaatatgtcatatgctgagtttttataatcagaagatcaaaccccacgttcgattggaagaaaatacctgaactttcctagagttagttcgctagccagtgaaccgtactactaaatcgggaccaaaccgaacacacctctcaatccaaagatccaaagcaaaatggtaaattcagggcaaacacgaggtcacggaactgtaccgtaatcgagcctgtccccgctggcgatgtgcatccaggatgagaagtagttatggagatgtgtaaatccctctacatggagcaactgaactctagtctccagtaaacaaacatcgactaaaataaattgagatgacaatagtcaggagctgaagaatttgcagaccaactaaaataatcttcaaactttacattttctataaa

SEQ ID NO: 172457 - DNA, 356 bp, Zea Mays
agcgggcaaggcagcataccaagcgatgtggtgccagtaagataatgagaataggcgaacacaaaaaaaacttttgtgttgaccaattcccccaattgtgctaggaattagcccacatgttcgtgattgcctctactgccctcgcttgagaatttggagaaatccggcacactagtcccttgtgggtactgggtggagtcaaattggtggtcatatgatttctgatatgactgttccgcgccagacatactgattcctagcctatttctgaataatttgggtatttcttcctgaattttatccatagtagcctatggtagaggaacataccccataacatgaagctcggatgctcg

SEQ ID NO: 172458 - DNA, 747 bp, Zea Mays
taatgccttttcatgcttatattttccactgagcaagtgcatgttctgaaattacaccttcagatgtgtagaaaccttcttcttatcggtgaagacactggtggagtccacgacatacataacaccacaacttagggaagcacacaatctatgaagagccaaccacaaaactaaaggaagtagtatatggacgacacttcaagcagcatatgccaacaaatactaacggtataaataaaataatttaatagagcagcgaaccagtagaatacccctagatctacagagagagccactaaaaaattggaataaaaacaacattgaatgcgacgattaatcaaatcgagcacgttggctcacagatccatgctatacgcctataccgaacgcaaacccgtgtaaaccaccagatctactcatggcacagaagaaactcaacagatcgagaaaaataccatgtaatatgtggtgatgaaagggttgttgaaggcgacaaggttggcatcctcggtctagggtgtgacattggccacgagcttgccgatccttctgaatccgagcagacgcggacgcagagagaatgcacaactcagatcatactaaatcaggttgaggagaaatagcatagcatggtgtaacaaactaaccgctagtttcggcagtagcgcgcaaccgaggactagcaggcgcgtgtgggattctctgatgtggctggtggcctagatgctgggcgagcgcggctgtggc

SEQ ID NO: 172459 - DNA, 532 bp, Zea Mays
tgttaaaataaatgcaaaaggaaataaaagaaaaatattgcatcatgctggtattttgttgtgcacttaatgtgtgtggaattcacaaaacaaattgaattttgaagtttgagttagttgaatttgaaatttggaagtaggaataaaagcacaaaagggagatgaaaatagaaaagaaataaaccctcctggtgacttgggctgaaaccggcccagctaacccaacgtttcagccgacccaatagcacccgtctgtcgcctctctgtagcgccgacaacctaggcccaccagtcagtctctctggatgcgagcgcgtgagcgtggctacgctggcatgagggccatactgcgtcagccacacggcgcacgtctttatcactcgggactgctccgcgtcggcgcaatggactaccgcatcacctgcaaccactctcaccgagattcctggccctagctgggctcaacaaccctccccatgcgtctacaagatgcacggggttctctcggccgcgctcgccgtgcccaagccac

SEQ ID NO: 172460 - DNA, 944 bp, Zea Mays
aactgaggaagagcacgatggtacagtaactgaatcagatcgccaggttcagtgcaccaccgccggtgattccacgccacgatcctcaccggcgttgtgattcatgcccaatggcgcgcgaataatgactcagggtaaaagatcttgcgcaagggatgaagtcggggcactgtggccgcccggtcgtcgtacccacttgcgctgcgacgtggccggacgatcatcaccatggagatcgccattcaccacgagtgtgccacacagtagtcgattcaccacgtcgtcgcaagctataaggactcgatagtgaccgccgtagatagttagcctatgagcgccatgttagcggcctccggtgactcctcccccttctcaccgcgagcgcttccccattcaaattgatgcctcggcctgttccgtgtagttgttacgaacccagagcaccagcccttgcctccaattatccaacgtagcgacccaattttgtttccccccaaatccaatctccgcgccaccgcgagtcacctcatcgtggtcggccgtctacaggtccgctcgcgccctcttggttcgtgtttcagtactctagtgtgcttgtgatacttggcgacctcgccaattaaactatactgcacctagtcgtcgggaacacctcggttttccctcggatcttgttgtcgtcgtgagcagaagaacttcgggccggattcgtgcaatcgagggatagattaggatcaccaggggtggaattaggtatagaccgagttaggacacatgtcgttgcatattccagccggtgcaggttcaccggagcgcgcacgccgccgttcaccgtcggggacttggagttgtgaagagaaaggagtgtgagggtttaagtgtgaatgtcagtgagacacgtgaatagtgtcgtggcttctttgcgggtttttcaaatcgtcagg

SEQ ID NO: 172461 - DNA, 1359 bp, Zea Mays
cacaggggcctccgcgcaaaactaagggacgacaggttaattctcggaaacccgaggggtttcttaaaaaaatttccatgcgaacaggtatcatggttcctcggtcgctagatcacggatcgacaaccgagattagatcggcgggtgagcgtgcgagtacgggtgggcgagtgcggctgaccggtggggcagggaagggttgaggcactaacgagtagggcccacgggtcagcggtgtgctgagggcgcggggcgtgctggccgctagatcgcagatcaacagcgttgattccacaaatcgcgtgaacgttatccacgaatccgggccgtcagatcagagtcggacggttgatatgggcgccagagggctttacctactccggtcggccaggggcggtgcagctgccagagctgaggtagactggggcttctggggcgctaggggtcagtctgggtggccagagaggtttgggaggtctcggcgaacactaaggcgaggtcaggatggcgtgaacgaggctgaggtaggcaaatggtggagaggaacccttaggtgaacccagggttgctccgacgagcaatacccatcgcggtgggggttaatctggctctctaatgccggcataggttccggggagagggtagggatgctctaggcctgaattcgggctcgaggaggggttgcagcggatggacgccgtgaggaagcgacggtctgacaaagggggctccggcgagacgaaattcaccacagtaaagcgaaagtggcgcaaaatagggatgggggagggtcacttaccctgagaaggcgcttggggcggcttggcacggcgcggggaggctccggttggccggacgtcaaagaatcggggcggcggcgagcttcaacctgcgcagggaagaggctgagcgcagactgagcagtagagttgagaaaaggggaaaccaccgtgggttcctggtgcgccaatcaggcaaagctcactgtggacaaagcgctggtagaagtccagcgatgatggcagaacaacgaggcaacaacgaggggaggcagcgctgcggctgggtgagtgcgagggcgcatgccatgggcgtggcatttgcggaggaagagggcgggtctgacgggcagggcccacgagccagggagagcgggtacacgcgagtgtgcaacggtgctgagagggtggtcccactaggcagagaaagaggggcagagcgagcgagcagggcgcgatgccgataggtggggtccgcctgccagcggatgtgggcgcgcgcgctagatggctagctaggccgacttgggccgaaaggccaaggggggagggagttcgggctgctttccgttttattttt

SEQ ID NO: 172462 - DNA, 1423 bp, Zea Mays
ctagtgcacattgtgctgtcactttagaactgtgtaagaacagggctagtgggtggcctctggaccttactacagttccattggtggccaccggccaccgcaacacatgcgtttccttttcgttttcgctttctctgtttgttcgtcctgctcttgcatctccgcttcttccggtttgcttatgttgacatattgtggatacggtatgtccttatgtgcaagagacaggatttggtgggtccgtttttttttctgaattgcattagttgttgtgtagcaatgattctgatcagtcgctcgttctttacatttgtgctgctgttgcctatggccatatcatctggacacaaatcatgtactatcttgtatttgagccactgcgttgaacacagtcgagtgcactagagcagtagaaatgctattatgttcttgtgagttaccccaggcatgctcttatatcgaagcccagagtgcctgattgagcccaatcatttgatacaatcatgctatggccttgcttcagatttgggtgcgcaacagctcatgtgtaactttgcagttaagcttttctgggacgagcataaagtctgaggcttcttcctggctgcttctatttgaccacttcactgcttgccgaggttgcagttgatctgctaaagtatcatcattttgccttggattccttcgcaagtcgcaactgtgcatactctctcggacagctatcatacctgtactcctgggctacctaccacaagtccttgcctgtttgatctgtaaaagatgtacatgcaagatcacaatgccttaagcacatgtaagaatccttctggacaggaaatatatgccaaccaaagaattactatggcaacttttgcagaggtggtgagggaccaactggaactgcagtgttggatacaattacatacagggtccgggtggcaggccgaggaggcgaggacatcaccgagctggcatgggtcagggaatttgctctttttttctttccctgccccaccaaccgcctttctcgcagagtcgcagtgacctttgtttggttggctgcggtactgtcactgctgctgtgcctgtcctgcggcaggcatggcacgaacgagtgaaaaagagagagagagagggaatctgatgcatttcttgttcgtgtgttttactactttccggcttgccgcaagaaaaatgtcacaaatctaccaggcaacacctccttcctttcgaactttggtgcgttgataggaccgtcctttgaaatctccagttcatttcgtccggcccccttgagcttggaattttgaaagatgtacccgtacgtctcagcaactgtgtgtaccttgtgctcctagtcctagtccttgccgtgcattgtccatgtcatgctaacaagttgttgggagtagcgtacaagcgc

SEQ ID NO: 172463 - DNA, 343 bp, Zea Mays
accttacgtgctatatatttgtggtcaattcatgatttgcctgcatatggtatttggtctggctggtgtgtccacggtcgactgtgttgtcccatatgcatgggggacacacaagcatatcgattggagcatggtaaaaaggtctcattctttgattgtcatcgacggttttttccatccaatcacccgtttcgaaatgatacgaagtcatttagaagaggcataaaagttaaagagggtccaccaaaacgtttaatgggtgaagatatcatgataccacatcgtgcccttcaaagggctatagaaggtcatgagtttgaaggttatggtcaagatcacaact

SEQ ID NO: 172464 - DNA, 598 bp, Zea Mays
aggttagggcgagtagtttacatcactcggaaaaacactcccaacagacaggaaggacacaaccttcagccaaaaccttaaagacaaactaattgctttaccttaaagagaaactaatttaaagcaattatattcgaaaaacgccaaccaaaatgagcaaagatatacatggccaccgtctctaacgagtttattggaaccaagatatcacgaacacagggcttcttaaaattggtatcccgaacacaggtattggaaatttagtattataatccattcgaattcagaattttgctatcggggtgtgatttagtcgatccgcggtcgctgttacggtagtccttctcactgtcccgtagcttagaacggatctttgctcactgcctcctctcctcgacggcgctcgtcctctcctcgacgacgcaggagctctccggctcctctcctcgacgacgcaggagctctccggcacgtcgctcctctccctgctcggcccgaccaaggtacagagctctcctccagagcggcccctttctgtttcctggctgccagctcgcgctccctgctctgttctagaatccagtggcgcgcagaagag

SEQ ID NO: 172465 - DNA, 525 bp, Zea Mays
gtggctggtcgctcaacaaaggctttggatagctgtcaggttgcaaaataggcatggattaccctgcgagctgccctttgtgtgatcaggagcaggaaacacttgaccatctactgattgggtgtgtgttcacctaggattttctggtttaaactactatctcaagttaatctccaaagcatggcctcatcttgttgatgcatcttttatgggctggtggagatggctgggcaatcagatacttagagtggtaggggaaacaataaactccctggtaattttaggagcttggactctgtggaaacatcagaatagttgtgccttcgatagaaacaaacctaatgcggatcttgcttttaggatggctgatcaagagagagagagagaagtgggagctggctaaggcaagaaagctatccttactaactagtcgagtctcgggtctgtaggctttgtgttagagtttgtagctttggatgttttattcatggatgagtatcagtatgcctgtacttggcccccgtg

SEQ ID NO: 172466 - DNA, 548 bp, Zea Mays
cttgttgataaatggttttctagggtttcttttgcaattatagctcgacgaaggggtatgggctaacgtgagccaccagatcaaatacgaacggccaatattatattgcggaaacaatggactagaacgcaatccatgccgtcggatctagaacctatggctaagatcttatgaagccttgatctcatccaggccggacgattattgatcaacgccttagaacaccccgctggaacgctgcgccaggactcacatctcagccctccgccactaatccaatggcacagagcctgtcttcctccctgcctccacggcgaatgacggggaaccgcgccgcggtgccaaactgtactccgacgagaacaactccgaccccggagcgcccaatcctcaatcactaccgcgtacacgcacagggggatgtattgaactgactgggagaatactaaccggctctggtggaatggagagctctgcccgcgacagctagcggaaacagcggcgacgttgcatcgacgttgagaaattgagggccggtccagccacca

SEQ ID NO: 172467 - DNA, 600 bp, Zea Mays
tgagcatgttgcaccgccttaagccattgctgacttaagccgattgctccgttagcagggcatagtggtcaccccgggtttagtaagcgtgagcatgttgcaccgccttaagccattgccgacttaagccgattgctccgttagcagggcatagtggtcaccccgagttaagtaagtgcgagcatgttggaccgccttaagccattgccgacttaagccgattgcttcgttagtagggcatagtggtcaccccgagttaagtaagtgtgagcatgttgcaccgccttaagccattgccgacttaagccgattgctccgttagcagggcatagtggtcaccccgagtttaagtaagcgcgagcatgttgcaccgccttaagtcgttgccgacttaagccgattgctccgttagcagggcatagtggtcaccccgagtttagtaagcgcgagcatgttgcaccgccttaagtcgttgccgacttaagccgattgctccgttaggtagggcatagtggtcaccccgagttaagtaagaatgcaagtcaatcgtggacaaactgagtatctttgaagccttttttattgatgacatatttccca

SEQ ID NO: 172468 - DNA, 554 bp, Zea Mays
tcctcgcgaagcgctggctacatcggccgaggcgagggctgaagactcgcggaggcgaagggtggttgtgtcgaaatagagcaccagtgagacgtcacggagtggaagacatcgccgaatgggtatggaaaggtctcgtcttcgactggatcggggtgatcagcgcgagctactttcctcgacgtccggaacgtgcatcagagagggggacttgcgggacctatttgagggggaagagttaaggatgatgttgtttaatttctgagaggcgggtcttattccgaaggtggagcctatgtgacattttcgttgccctcactgctcttgttgcgattgtgagtgaaaacgctgccctccccctcttcgcaatagagttgtgagggtaacagtcgtgatttgtattattgcgcaatggtgtcgttgagaccttcgtttgttgtttgtttgtgattgcgagttgtatgttgtgctattgagagttggcttggatttgtaaccgcgtttgtgccgtagggatgacttcgcggcactttaattatcggttgcgcccctag

SEQ ID NO: 172469 - DNA, 1076 bp, Zea Mays
gcgggagcgctcgcatgaaacggctcaccagcaccctgaatccctactcatggaacgaggtgaagctcaccacgtagcccacgggcagaactggctcctgcttgtcgcccaacgcataccacttgggctgtggaccgtgggagcggggggcaaagcagcccgacttccaccaacgcctctaggtccttgtcggtgacagaggaaatgggccatgggtcgcggggagggagaacgtttggcttctcggccattgaaactacaggagaaagcgagaacgaggcgaggagctctttgcacgaagaaggcagacgacatgtaaggtaggaaagcgaaaacatcaaggtaaaaatctgaagcatccctctcgggcgaatttataggaacggacggagtcgccgagacgtgggtcgtgccattccaagccaaaacgaaccaggcaatagttgtttcaaaccccacgcgcacgcgcgccgcaaacggtcagctggcaggccgagatgtcccatcgcattaaatgaccgtgccccctccgggtgaaagcgcagcgagagttgtttcgcattacacctcaaaaggtacgccatcctcgctctgcctccccttccttttttcatcccctcacagacaatacgaagaaggcatcttctacctcgagcatccctcctcgagaagaaaaaaggtgaggctaaatattgttcaaaggtttgaaggttaggccctcggcagggttcggtaagaccacctcagaacgtcagggctccaagcccattactgattaggggttcgaaggttggctcctcggacgggcttcataaccgccccagatcacagagttagggatgactgtgagtacgcccgtacatggccatggctcgggttgcgacctgaggtaccctaagacatattcgagacccctgggagcgatttgtgacggtatcccattgcaggaaggcatcgagcccttggaccccgtcaaacgggttcgggaccaggcaaatcacccgcaagtacttttttggggcgtgtcttcggaccgctagccgacccctatcgaacggatctcggacccccgcccg

SEQ ID NO: 172470 - DNA, 538 bp, Zea Mays
cctgcccaccaaatgttgggaccacctacacgtggacgggtgggcccaaacactcaggtgggggaagagctcaggtgaacaacgaactgtggacgagaaccgtagcatcttgttatgtgtgtcacgtccgtgtacagtgcgagggtatttataggtaaccggtcgggtaggtgggtccccaagtactgttatacccccggttacctgctacattcccgaaatattccctcctacaggttcattacagtggtgtgaggtacaatcgaactagacatcctatagaacctacctaaagagagcttacaagtgggcccgaagggtgattgggcgtagcatggaccccaccgtagaacgccgtagccttggcctatgcgatgtgccttttactctacgaagtcgagccttcgacctcgtcgagactattttgcttagtggaagagtccgagtcattaggggcgcatccacaaggctacaacaagccccctcgagtagtgtggcccttcgctccatcccctccgagagtcccggtcgaagacct

SEQ ID NO: 172471 - DNA, 432 bp, Zea Mays
gttggccaacgccttcgacggtgacacaagtgcggagttttttggacttgtaggcttttatcgccgttttgtgaaggatttcagcaccatcgctgcccctttacatgagctgaccaagaagggcatttcgttccattgggggcagccacaagagtattcctttgcacttttgaaagagaagcttactcacgcaccgctactccaacttcctgatttttggtaatacttttgagcttcaatgtgatgcaagtggagttggtattggtgttgttttgttgcaaggaggtaaacccgttgcttactttagtgagaaactgcatggacctgttcctaattattctacattatgacaaagaattgtatgctctgattcgttctttacatacgtggaagcattatttatggtctaaggaatttgttattcattcagat

SEQ ID NO: 172472 - DNA, 758 bp, Zea Mays
gattaataataataatgattggaagaacagtcgttcaaattggccagtccaattaagaatggttttgcgtgtgaggtgaggtggtgacatgccaaagtagtcatcgtttctctatgtttataagtggagtcaatacccattaggcgttcattaaatttcacgtcgcacatagtgtatggttgtattagtgacaaggaggtgtaggttttactcaattagaagtttggttgatatggctaggaaatttgtttcggcttgggtaatgaagtggtgacgtgaccaagtagttccccccgttatgagtcgggtctagatgtgttatgccttcgccgtgatacccatcgcatatgctaatttgatgtatatgaaaaatgaaatagacacattatatgatttagtggtgctggtattgtgatctaagtatattatatatgtgtgataaatgttgggcttgaggattgtctttcgggcaaggaaggtgtaatagacttatatgtgtagaatgattaagctagtaatacaaaatgacatggataaaaattagtgagtctacttgttagtcctcatttgattattttaactctaacaaatggtaaagtgttagaataattcaagtctctagatcaaggcaattcttgaattatatagaagctgaaatttattgattgtagttttcgactgcacgcactgttttagttgtgctatatgtttgatgaactaaattgtattttctgtagatatgtgctatagaaaagtgg

SEQ ID NO: 172473 - DNA, 529 bp, Zea Mays
gaggaaatccacaacatcaaacttagagtgagagaccagggcaccaagcagccaaagctggatatgagtggcagcctccctgtaacccatccgtggtagaagcgtccgtctcatgagctgatatagaaacttggccgctgtggtgaagtctaccggagaacatcgcgacccatctgagaagggcggtcggaacaaagccgtgacgtgagctataccaggagcaacttcactgtgagggcgacgaggaggatcagaggtgccatagcacaagctgtgaagacgagtcgatgactcggtgaatccaaacaactagcgaatctggctggcatgaatggtaacatcctctcgctcaaagcggaatctcatccactagtgatccgggtaaatccatacagaagcatagaaaactcggacccattcctcaacatatctgccactggtagtcaaaagagagagaaggccaggcagatatgagagatgtacctcagagtcagcaccggcggctagcagaaatgcaggaaggtccaaa

SEQ ID NO: 172474 - DNA, 621 bp, Zea Mays
ggcgtcacatagagagtctactaattaactcgtaacccacttaaagcactagcgatacatatatacgataattacgtaatgcaaataaccctttccgattcacacaagttagctaatcccaacacgaaagtagtaaaccatacacgagcgccacattttcttagctagaacatgacaccctagagttctatgagaccgcaactttaaacacccaacattagcactcatacgcatcttccatcatgagttccttagaccccacgggaacaagtagagaataatatttctcaacgacttttaactaagttaatagacaggtgacacaatgactactgcggtatgtcattacttcatcagacaagcaaaaatctattctaacaattttggccgaaccgtcgactaactgtttataaaactagcctatccttcgtactatcactttcgccacatcatgcatacggaaagccaatttaagcacacttcctcatgcacaaatgttacactgatttcaattatcacggatgtcactaacacaatacgacgcgtctactactcatttataacaaagtcatactctatgcgcaaggaggcctttcaacaaactttaaatggtgcattcct

SEQ ID NO: 172475 - DNA, 841 bp, Zea Mays
ctcgcggtgactttgtattggtcgaatgccgaagaccgtcgatgcggtcttttttcgacgtagatttttgcggggggttttcgcgtgtatattacatggctccgcctcgttaaaaaccccacccctcgggaggaaaagagtgcgggccagaataaaattgttttgcgaattacaagggcgagctggccctgaggagtcaaacaaaaaatttgcggagattatcaatgttccaagaatgctctaagtcctcgcggatggcgttgtgagcctgtacgcgctgggggacgccttcgtcttgacgatgaaagggccctcccacttgggctccagcttgccccgggactctgtctgtgctgtccggacgagtacgaggtctccttcgctgaattccctcgggatgactgtgtggtcgcgccatgcttttgtttgagcttggtatttgtttagagcctgtagggcgaagacgcggtctccgtcgatgaggtccttcgaagtgggctcgtccacgtcggggacggctgacgagactgtccgtggtgacccatgttttatttcttgcggggtcatggcctctgatccatatagaaggcggaaaggggtgaacccagtcgccctgcactcagtcgtgttcagtgcccagaccgcttcaggtaacaggtcggcccacttgccctttttgtcgtcgaggagcatcttcttgatggttgtgaaaattttgccatttgcgtgttccacaactccgttggattgcgggtggtacactgaggcaaaggcaagcttggtgccaatggagaagcagaaatccttgaagtcttggctgtcaaattgcttgtcattgtca

SEQ ID NO: 172476 - DNA, 671 bp, Zea Mays
cgtgacagcgtcggttgctcgctgatcagtgttttctggccgttcaggtccgttttaccctgtcactgtcagtaacggcagccagaagcaacagagcaggccgaaagagggcgcacggcaggcattgccaagagaccattcccacccgtcctgccctcccagtagcgtgacagttagagaagccaaggcccggcggtcaccttgtgtgcctccacaagacgaggacgacgacaccacctctccgcgccgggatcgctccttggagaccatgccgcagcaggagctggagccccagcagaggaacgagagggctcagccgccagccagcgggtctgcgagcccagtggagttcagagttcacaagcagcacgccggttgcatggacgctgcgactcaaaccgatgatcttggtcgcagaacacccgagctgcgcaagaagagtctgaggagcacagaccatgacgccgtcgttcgtgaagtcacagagtgctggcagaggcagagccatccttgcaggtcagcagacctcccaggggtgtccagggaagaactcctgcaccagtctactactccaccgagcacaccgtcgacccgtggcaagtccgcgagcttagagtcgctgatacgagcggacaacgcgacgagcagcttcaggatccttgaggaggagg

SEQ ID NO: 172477 - DNA, 1274 bp, Zea Mays
tggagcatttaattaaaggaatgtaataaaaaagtaaataaataatcaaataaattttattgcatttgcatgctggagttttgtttgtgcataaatttgatttgaaaagttaaactcagtgttgaatttgaatatcttaaactaaaataaaatagaaaatggaaactaaaaagaaaaaagaagttacctgcgcttttgggcccgttcacacccgccggcccatctctgcaaatatgcaccccggcccaactgaccatcccgcaccagctatccacatcaagcgctgacaggggggtcccacccacagcctcacgcttggtgccactaacatagcctatgggacccacatggcagctccatcccctccgcgcgatcacaacaaaccgggatgcgatcttaacaactccacaccaagatttcctcggttgttactacctctatccgggatataaaatctgaggcctagcaccttgaatcccaagtctcggccatggtcccgagcacgccagagcgccaccaccaatcgagcagagaatcaccgggagagggatgttggtcgctggcgccaatccacatgttcactgtcgccgaggtctcaacgcatggctctgggggctcgctggcgtccattgtgtgcttctgtggccacacctagcgggaaggagtctcgggtcgcggtggattgctcaccgaacttcggtagttcggtgtgcacgttcgtgccaccccacgtcgtggccgggcgtcaccattgtccgaacaactctaggtaagacccgaatagtcttgccaatcgtgttgcccaccttttgcgctcatattcgtggggttccgtgcacttgagggccaggagctcccctcgccagtgatgcatcgccttgcgcgctagcggctcgccgctcgacacctagacagtaagagaggctgtcggccacaggcagatcaggcggtaatggctaggattagaatgcaaaataccccttcaccacattatatttgaaccgtagatgttggattggtagggcaggaatggagcgaggcgtggtcgtgtgtggaccgttgatatgggatctaagggtgacggtagcataccggttcataaccattataggactaatctgagccattggtttctgatcaagccgtcccgaacacaagatactccttcggccgtagacaattgcaaaagagaccctgtactttatttgttggagagaaggccatctacgcccctcgctcggtttatttataacataaacaaaacatgtcatgat

SEQ ID NO: 172478 - DNA, 332 bp, Zea Mays
caaaaaataggaaattttgggtgctacatcatgataagcaagtggattatatctatggaaggttgtttagagatgagcaattcaagaatgagcaaatgcacttcaacgtacgtgaatcattcgaatatgtgtcgtacacactcttgccacactgctaaacttacttgcgtagcgccttcgatggaactccatgccccgcgttgtcaccacctctgtcgtcgtccctattgccaccggctaacctccccgttgctccagttcaacctccccatcagcgtatcccccatgttcttttgtctgttgttcctcggcgtagctgtccccgcttcctg

SEQ ID NO: 172479 - DNA, 489 bp, Zea Mays
gattgatgtcaaaacaaactagagtggagataaaaattaaaaattacgaatacttgcaagataaaagcatttgtgtatgtgtagctccccctaaatatgtgcatgagttttgtgatattaatattaacttgatatgtcaatttgcaacatatttagagagagtgaacaatcaacaccatacacaaaacaatgagggatttaacacaattatagagtgtgatgatagaaagagtaaaattacacatacaaactcattattgcaaagcataagatatgaaaagttactactgctattacaataatgatatcacagctcatcacatcattaaaaaagtttatgacttcagagccatgcatgcatcacaagatagactaataattattacaaaccgatgttcattacataaatagaaggtactgtcaagataagaaaccttctcccctttttggcaacaagaaccaaaagagcagagagccaccaacacaaag

SEQ ID NO: 172480 - DNA, 395 bp, Zea Mays
tctggcattatcactatttttcccaattttggctcttcggccgcatcatctttggtttcggctggcccgattgtaggcaccttcggcactacaatcgattcttcaacgctctgcatggtgggagcagcttgttttgctttagtagttgaagaggtcccttcaccaaattcaggcactacgaccggttcaatatatcgcggccggtgggtcagaaccttcattttcttgcccttgggcacatcagtggtggccgaagcggcaatttttctcttctttccttgccttcgcaatgggtagtgataatcagggtatacgaagccaattgcatcaaacaccatgttcaatcttttcttgccccgaccctcgaaggctgcggagaaggcatcatcttcggc

SEQ ID NO: 172481 - DNA, 835 bp, Zea Mays
cttctttcctctgggctgctttagatgagcttggggtcgtcattttagccgttgagcgaattctggccatgtggtggttcagctgaagtttgcaaaaacaattcaggaagcggaaaaggctttgaaggtagagaatctagcggcagcaggttggtgtgagcagtaaatgtcgtggtaaccgcatggagccgactagcttatacaacttggtgggtagagaagccaaggagacgcaccacttccgtcctatgcctagaggaccgttgtgtcttcttttatttcgtttttaataatgtgctcatgcaaggtgtttttggacattcagcatgagacctgtatcatttctgtggtctatgctcgttatgaaaaatgaattaattccacaaggggctactgttgggggtcctcattagctgaaggtcctcaaagcattgtcttatcagttattcctaagtgtgtttcaggtgtgataggataaatgtcgaaggacaccttttgctaagatgatgtgcaaatgtcataactgagaagatgaagctagaagctttggcttggtggcatatacatgtgatggcggaacagacaaggcatgacttgttcggcaagactatgaagagacaagaatgcccctgaccaactgtgtaactcatatgtataggcttaagggcatgaatgtaattttgatgaagttgtaccccgtgactataatcagaggaacattttcatgcacgggacacgcttttttggctagatagaactgattcgctctgcctacgaagttgtattcttttcaccttcggattgttgctcacaaagccgaagacacaattgtaac

SEQ ID NO: 172482 - DNA, 645 bp, Zea Mays
accaaatgaatatcctgggagagagcaaggtcttgctctcatttatgaagccaaatagttctgaaagcatcaatgttttttatatgatttggcaagaaatcattcatgctgcctgcttccctctcaagggatgtcttcacgcccccttcatcatgaagatgattgaagtggtgactcagtttcgctttgaaaaaggaacaagacatctctcgtacacccccttctggattgatccaaacaatccagcagggcgtctgaggaaagtcccctccagctctcgtggacctgctgctgccggcccctcgagcccctctcctggtcgcggatctcccacaccacgtggtcgaggtcgtggtcgcaggatgggtgctcgactggcccatggtattgtaacattcttttccatgtgcacgaacatatcttccgatgtgcatgagctggctaggcgtcagcgggagactgacgacaacctccgtcgtcaagcttcttccatgggtatgccatttgctccccgctcgcctgatgtgcctcttcatcctcctcctccagaaatcaatgaatggcaccagcaggcctatggggtgccctttatgtcagctgaagatgaagatgaagatgaatatgaagaatactttgatgatcgtg

SEQ ID NO: 172483 - DNA, 361 bp, Zea Mays
ctaagaccagcttttaggaagcttcgaaaaataacaacttcgtcctctttaggcttcgacactaagtcatcgcccccagtcgaaccaatcagtgttatcaatgtaatcaaacttagtgagtacctcgatatgtcctcctttattcctcgactttccgaagtcaacttggcttggcttcgtagatagtattatcttcctcaatatcaatatcatcactgtcatttcctagtccttcagatggatccgcatcagcagcgtcgacttgggaagtagtggcctctgctatcacggtcaagacttcaacctttgactctggaacatgcagagaagtcaccaaagatagcccgagggtagattgctc

SEQ ID NO: 172484 - DNA, 1417 bp, Zea Mays
cgtacaattctgtcacatgaagaaatgtatcatcattcactttgtggcagaagactcctgtccaatttgacctgcacggatctcccctattccaattcataaggttttgcataggatcaactaatcgtcccttgatagccctgagcccattgactacattatgggaataaaccattcattaacttgcagagtttcaaacgttctcacaaattaacatatggcagacagaaattaccctcggaagggtcagtagtctgccccaatgcaacatccgagcaggggagcaacacaagtagtgtaactgcacagaggacgtctgcaaacttagccatcctcctagaaaattagcaaattgtcatatcccaacagcgaaatatccaaaacatcaattgctatatatgtatccaagaaaagagaatcgcctgaccctatataaaaacaatgattagtagtaacatcattcttcatgtcgtggatttgtacgatcagggaaagaaatatttatcttgacatgcttatttttcaatggagcggggaaataatggccagatatgcaaatatgatatagtcacatgcagtagtgcacctaccatgttctaacaacctgtctggcccaacagtctgttcaaaataaaatatataactggccggggaggagaagcatgtatagcttagagcgatgaaaccgaacccctttttggttgagcatatatattgcccagcgtcactgctaattatttcaactacactgacgataacactttcctacttttggaatcacgacatgccaactaaaccagcacaggcagcagatactcgtggaattgatgtttaagcactgacgaagacacaaactatttcctctcagaacagaatcgaatctgcccgagaagggaactacggaagtaagaaaactgagctgacgcgaacattcgtagaacataattgttcgagaaggagaatatcaaacaatacataccctagacacgacgcaagcagatagtgaccagatgaacgggatttggcgagaattcacctgaaataatcaattgaaaagctcttcttctcaggaagcctggaataaagggcggcggaggaaggcaagttctggacgaagctgaggaacaggagagggacgcgagtgagaaactgagaaggcggcgttgctccttgcctccttgtcgatcctatccgcttgcttacttcagctcccgctcccgcgggaagagcgactcccgcagctacgcgacctgcgccgcgctgatagcagcactgaagtccgccgtcgcgacgtgcgttatatggtggtagtggatcgcagagtggtggccgcttcctcgttggaactgggaaccttcacttgttccacgctacacaaaaatctatttttgtcccttcaaagcttattagttaaaag

SEQ ID NO: 172485 - DNA, 327 bp, Zea Mays
cggcccctctgcattagtaccgcccccactccatcgtcacaagcgtcagtctctaccacaaaaggaatattgaaatctggtaatgcaaggaccggtgtggacaccatggcctgcttcaacctctgaaaagccatctctgcctctgatgtccattggaatgcccctttttgtaacagcctggtgagaggcctagcaatggcaccataaccctgcacaaaccgcctgtagtatcctgtcagaccgagaaagcctctgagatctgtgacattcaacggcttgggccacttgagcatagcatcagttttcttggggtcagtcgctacccca

SEQ ID NO: 172486 - DNA, 287 bp, Zea Mays
agatcctagaggccatttggagggtggcctgctacaagcctacaagggagggagagagaggatgcttggcagtctcgttttctggctgatttcgtgtaagcagatcgggagcagcttttcagtgaacaatttggtcatcgatcgcgaaattgtactctaaagtagacatgtgcatcgatggtcacatgcgaagtcttttgtaccttatgatcaagaaaagacttgtccgctcaaatctgaattggatactcagcttactgtctttatcagcactgtttgaggaaaaa

SEQ ID NO: 172487 - DNA, 755 bp, Zea Mays
gctcagttttgcacaggacaggagaaatagaagataaggggcaggcataccccatggcggatcccggaatggagttagggcgtgctgccaagcaatggaatatttaggaactaagtttaagctggcttaaaagtactcaaggggtgggcaatcggttttaaccgacagttcggttcggttcttcggtgcagtagaacttcggtttgggaagaaataggaaccgatcggtggaaacaaatatgaacaaccgacgatttcggcttcggtttgatcggggtgttcggtttgtaccgaagttttgagtcttcgtacctctgctgcttgttgtcttcgttgttgttggttctgcgtcttgctcgggttctcaatacagggacaaacatggaagggataaggttggcttcgtgccatgagcttgtcgtgagggcataaggcctgagaatttgtgacttggaattgtttaatgggcctgtaagctatatgggctgctcagaagttaaacgcgcacaacagacaatagtcctaatcggttcctcggtatatcggttttcagcacatataaaccgaagtcaagctgaacccttcggttcgtaaaatttgagaaccgacaccgaaccgaacaactaaaaaaaccgatatttcggttcggttcggttcagttcagttcggtgatcggttttcggtctaaaagtgcccagccctataaaagcatgaccgaacttggacacttcaacttgtaaattgatgatgacact

SEQ ID NO: 172488 - DNA, 483 bp, Zea Mays
agcactttgcgctcggctctagcccttggattcttacagcccaaacaaacatccccatcctaattacagctttgggagtaatctgatgaagaaagatctggaatatcttcagcacttcaaccacaaatttgctcaacgggaatcgaaggcctgccttcaaaaagcttcggtaagcaacaacttcattttcctcaggagcaggggcagtgctatcctccaaccctcacaatagacatgtcatgaaagtatcttcctctcatggtgtcaatatgactttgtttaatggtcgattttccgaagatggtatggcttggccaccagggccggtcctcagaatcttcatctccactttccacatcataatcatcactgtcatcagaatcttcagacaaatcctccattatctccttggtaattttctctgtattcgttattgtcatagattcataaaatccagcaataaaaggatctgcaactttcttc

SEQ ID NO: 172489 - DNA, 834 bp, Zea Mays
gtggtgcagggactgctcgagcaggatgtggtggacgcctacgacgccccgttctacgcgccgagcgcacgggagatcgaggaggaggtgagcaaggaaggctccttcagcctcgactacgtgcggacgttcgaaggcagcatgagcagcggcgcaggcgttgagacagacggcaggaaggtgtccatggcgatcagggccatccatgagtccatgctcacccaccatttcggggccgccatcattgacgcactattccacatgtacacggagctagtcaccgaatccatgcacaagggagaggtcaagagcgtccagatcggggccgtcctggtcaggatatgatgtaagcgcttactagttatatatatagttgaatgattctttcttcttaattatttctcactgtcatattacttcttggcgtgctcctagttatcctcagcctcacacacaaacaagcaatgttgttcggaattaccatgtccttttactcctttactacacaaagtacacaaagtctagcatcacctgttcataccccttcaccaccggtttcgcgggcatttatgaaagcaagccgtgataaccaagattataaccatcagttcaaaaaccgtcgacgttaaacctctcatcgtcatcggcactgtgtacgatctagcagtgatgacctctccatcatcaccactggtgttcacgctgatctgcagattaaactcttttctcgcttcctgagtaggagtgcaacaatattatggtttcgatcctttttcacacccgtatataaataagagagatggcccatatacaaaccaacgtttgtcggtagct

SEQ ID NO: 172490 - DNA, 298 bp, Zea Mays
ggaagattgatgcctacacccctatccttcggcttaaaaatgatgtcgaattcacctgggggcagaacaacaggaagtgtttgatctcattagaaagtatttgtcttcggctcctgtgttaaaggcgccacaggtaggagtgtcgttcagattatacattgcagctgaagataaagttattggagctgttttgacacaagagaccgaaggaaaggagcatgtggtaacctacctaagtcggaggctggtggatgctgaaacaaggtacactttcatcgagaagttatgcttatgcctg

SEQ ID NO: 172491 - DNA, 1410 bp, Zea Mays
gaaatattataaaatacaaaaataaattcataaatcctatattggtaagttcaaattgaatatataatctgaatataaacttgccacaaagtttggaaacttaaacctggaattaattcgaagtttgaatttgaaatagaaaaaaaagagaaaaggaaaataataaggaaaatcgcgcttgggccgaaacctgacccttggcccatttcccaaaccccacgtgccagcccaactcaccatctgcgcgcatgtgggatatctgcctctgtctggcgggtcccacgtgtcggccacacctcattcctaggcgctgatgcttggtcactgcaccgtggggtcgtagctgtcagccaggcccatcatccctgttcgcgcgcggacgaatcgctgatcactgggatcggtgtgtcagctccttcttcttcgctgaccgccgaaacagaatcccctaaatccgcgccgcccagctgccgttcctctcagcgcggactcactccatgcctctcaacagcgcaacgcggtgtttgcttgaaactaccgcgtggggccacctcgtcggatgaatcttcttcgttctgttaggattgtgccgcaaatccccattgccgaatgacgaagcaggatctccgtggctctagggtatatataccggtggcactcccctccttgaaccccaagtctcgacggttagtatctacgcctcgccatgacctccgagcatgaggaaacgctggtgggagatcgaacgggaagcagagaatgggatgaaggggggagtctcggattggggcaggagaccgtagcatcgtggcctggatcatgacttgagcttatgggatcatccgtgtcgtgccgcgcgttcctagcggtttgccggccgaggtcaacccctggagcttcatggcgcgtgccggagttggtggtcggcgtcacgccgtggaccgggtcgatcagcccccttttgcatcggtgagcccctttaacgtgttcaccatcttctatgccctctaatacgcgttactgtgtctcaaattgggggcgtttgtggtgctagcccgtgttcaccagaaccacaccatcgtggtgccgcacccttgctgtgggcgggagtctcactgccaccatcgtcggtgcgctctattccattgaattcaccattgtccctatgctattttgcaccttcccttgcatgtggtagtgtgcgggatcgccagacgggtattgctccggcaatgtcgccgtcgcgtgggaaccgcgcgccaccaccatccgggtaatggtggggaagaaggtgctgcctccgtcgatctgttcgcagacggctggatctaggcgtcaggtaccgcttcggggggagtgggatccgcacggtggatttggatccaacggtccctggttgatccctcccac

SEQ ID NO: 172492 - DNA, 840 bp, Zea Mays
ccccgagccagaaggggatttggttgtgttcgaggcctttttcactgctggactccgcttgctggcgcatcaattcgtagtggaagttctgcggaaattcgaaattcagattcatcaattgatgccgaacactatggtggcgttggtgaagtatgtttgagcggtgacatccttatggtggagaactgtctattttttaggtcttcgccaagaattatttcttgcattggcagaagaaaaagataggtggactgattgcgcaatttaggtcctgcacattcacgctgaggactgcgaagacttcgaccgaagtagttgagactgttccttgtgccaagaataagtggggtaactagttgtatttttggttttatgtggcgccgggggatgacgaagggttgcctggtttgcccctgtccatcttgtgctcgcattgttaagtggccttctcatagtttcaagtgaggaaaggggataagaacgaggaggcccttcatgacgcagcccggttgagtagtggccgggatttagttgaagagtttgttgtctgcattgtgtggccgctggctcacgggtggggtctgggcgaagtcaggcttcgcccaatgctgtcttttggtgaccagatggtgtggagccctgccttcgccattgatttacaagggcgggacctagccgccttcattcgagaggtggagtcggaggcgattaagattgttggaaaatatgtgctgaagatggtgatgttgaggagctgggatatccttggttccaacgtcacattgaaccgggattttgaattgaacagcttgcgctacggtccttacccagagggggact

SEQ ID NO: 172493 - DNA, 960 bp, Zea Mays
gccaaataccagagaaggcaggggccaccacgtaagaatcccgagacccagcgcacaacaacattggatcgcgggttagttactgaataagtaagggtctctttagtaagataacctggccgaaggggtatgagcggttgagagccacaggatcgcaccgacggtcaggattagaacttatactactgcgaaccggtacacagtgcgggccgttagatttaaattctctggtcaggattttaatatatcacgatcgagcaccacccgccgatccaacgatctacggctgagatgagctgggcccaaccggtacacaacatctaatcctaaccgtcaatgcaaagatctacggttcaacccttctcgtccccagtcagccccagggcggcggcgcccaagcttcccccaccggcgatctagccagagcaacttcaattcggcgccatgacgcgccatacccgaaatcgcgcagtgcgaaacagtgtatagattaaggcgaaacatagggagtagtccttaccggcgatagtggcacaggactctcaacccacggggataggcgatctgcggtgatgattcagctccgacgagaaattgtgttgatcgcacgagctcctgagcgctaccatacgcacgcgtatactccacggttcttggagaaggttattagccaatcgccgagcgctgattactggcagagacgagctatggcggtggcggctccaagtcctctcaagatccctctgttcatatcacagatagcaaggggagccagcatttatagtcccaggggcacgcatggtggtgtcgtggatggattaggtggttgcaacaatcatccgaggtcttggggaaggatttgttaagatcccatggatctcgcgtggattgattcacggacgagttcaccgcggagaagtgcctgacgatgcgggcccaatcgtcagtcagcgattagag

SEQ ID NO: 172494 - DNA, 940 bp, Zea Mays
gctgtgttccctgtttcacttataggacaggttgtgttagtcggttaggtctttcaccactacaaacgtgtactgcaatcaataatacgacaccgctacagatgtgtttgatgagtacttaagacagggaagtgtaccattgagtgtctagacacgtttgcatgaggggtgattgaggtgtttgatgggtgtacttgtgatgccccacacgtgaggatgttgaagatttactttaggtcaatgaggctcgtggtttctttggaatgctatggagtttttttccgataatggaagcttatattaaaataccaagtcattacatcaaaagaatacaaagccttggtacaaacctccggcctctacctaatgcacatagtcagctacagaaaaggggaaaaaaagaaatgaacatgacacatagctagtggcaatcaatccgaaacctagaccgactagtgaaagaatgttgtgtgccctatcccagataggtgatgcaaggagacataaatctttatcctggttcgagcaaaataaggctctgcttccagcagagggaaatgagacttatatttttggcacctaagtgcttccagtagggagtacaaactggtcgggagagggaaagaatctaaagtccctagagttgattgagacaagtgtcaatatcaccgcggaggtgaaaaccgtgaagtgtccccctgcctgaagccctggacgcctctatttatatcctcaaggagggtcttcaggagcaccggggtttgttgtgtatggagaggaggcgtgatccagcccctgtagccgatatggcctttggtatatcccttgtacttcgatgttgacttgtgccgggaggagatgtccggttcctgtatttgcatctttgattaagcagagccgaggccagggctaatggctcggttatgtacccgagtctgtc

SEQ ID NO: 172495 - DNA, 514 bp, Zea Mays
gaaagaagaggaaaactgctgcttcggccactccagtcgatcctgcgccgaagggcaaaaagttgaaggtcattacccatcggccatgctatattgaaccagccgtggtgcctgagtttggcggggagacttcttcagctgctgaaccagaagagctcattcctcctatgcagaaagctgaaaagctagttacaatgccgaaggaagcttcggttgaacatgctgagtcgaagactgaggaagataaagctgaaaaaccaaaatttgaagaaacaaaaatgttagaaattataagcccttcatcggaagtaacagtgccaaaggcacaaaaaggttccgccgcaactcctaaaaggagaaggatggcgaatgtactagatgtgctagaaacagtaaaggctttaagctctactccttcagggaaaatcggcgaagcttcaaaagtgcaaaccgaagctgaaacaaagccggccgaaattgaagctgcaataatccaagctgataccgaagctgg

SEQ ID NO: 172496 - DNA, 890 bp, Zea Mays
gctgaagggaacgacattatagatctactacctgtgatgacataagtatcactaacaccatatttttttgctgcagtaatggctgcccaaacacggttgtacgcacgtgttccttgtagcgtaggtatcggctggttagaaggtcccggaaggttagacggggctatttcgtcttcaccatccataatgcgatggccatcagctgtctcaaagaccgggcaatctaaagaggttgcatattttttggcccgcaagagaagcataaaaaattaggatgggtatcggccgttgcgcgcataaacaaagaagcgatactatgagcactaaccctgcgcaactgcaccgtgcctcaggcgcttcgggtcatggcgagaatcaggcatagcactatatatcgcatagcatggaagaacatcacgtaacattggtgaaaaattggtttgtaacaaacaacacataaaaaacagggcaggcgcttaggcacacaaactaaccgacgattggaaatgcaaaatggcgaggggtcttctccaagttgtgataaaattcccccaagcagcaagcacgcaagcacccaaatcactgggaaaaaaaccataagaattagcgaaccagcaacgacatatctctgcacataagtagagagaaacatttacgcatctcctagaagacaactttgtaaaaacaagaaaattaacatgacgtcactattcaaataataccagactattcagattgatacctatcagacagatttttggtcgaactattctccttaatccaaacttcagcaataccacacaacacaaaagtgctcttgaacaatagtagaaatggctaggtgcttttgacgcaaccgtcaaacaactccaagcttggctaggtgattt

SEQ ID NO: 172497 - DNA, 625 bp, Zea Mays
tgtatcacatttgagtcccaaaggatcaggacgcttcaggaggtatcggagccataggactggccgtagatcatagccctgaccttaaaaacctttctcaaaagaaaattttaactttttaaaaagagtctccccttcttttctcccaaatattaacaaaactcttcttctcttaactaccagatggaagggccgttcgtccttaaaacgtcctattgctcggaggtagagggattcgcttaccttctgcggagttgtgcgcttcgcctgggaatttgcaagaagccggagtatgcctagaagaagtaccaggaaaacagagttgagaagtgctccatcgtgatctacctcggggaaagctgaagctatccaaaccacccaccattccagatcactgccactggccaccatttcctaaacacttgccaaaatgccaccctaaaagctctccgtcagctatgccaaaactatgacaaggaaattaccgagacgcccctccgctacttcccacccaccaacaaaaatagccccacttggaggaaaagactccaagccctcttagggagagagcacaatgaggatgaccccactgtaactgtaatctacatggccagatacctccaca

SEQ ID NO: 172498 - DNA, 738 bp, Zea Mays
tggcgaacctgatggacattagcgactgaactatgtaaaagaatgtggggaactcgaaagaatgagaggtgaaacgaaccaggggaggagaacgacggcggtgaatcgatgaagcgcggagattacggcgggtggaagcggtgggggtagtcgtcgatggcgatcgcaggagcgaatgacggcgacagggaggagctgatttttttacggtttgggtggacccgagcagaattaattgaaaggggtctgatgggtctggctcgttgaccatattggctcggtcggcccgcgggggagcggcgcgggactttgggtccactagtcagcgcacagtcagttggaaaggtttggttactacgtgttcatattaagcatatatagctgtgcaaagtatcgtaaacagtttacaaaaaagaattaatcaagacccacgccaaagtacgtaatataataaatcccaattgatacacagttgttaacatcaaattatacaaacataaatcccaaatactacaccacaccgaccaggccgcatcgctgtgtcaatttatgtaaccgttggagtcataatatgcaagtataaacgcggtcaattcccacgcgggacaacaccacgactccggagaacccgcgcggaacgagcggactcaccgtggcagttactcgtttatgcatatggaattcgaatgaaacggatgcataaatggtaatagtgggtgggtgcgcacgtacgaccca

SEQ ID NO: 172499 - DNA, 408 bp, Zea Mays
ttggatttgaattcaaaagagaaaataaaaagaaaaggaattagaagttcagaataaaagaaaaacaaaaaacagcctagccacccttctctctcggtctttcggcccatgaggcctagctcgcccgtcccctctctccctctgaatcccttcgcacgcgccctgccctccctctcactatgctacaggcctggcccatcagcgatgctgcccgtttccctccgcgcgttcgtgcctatatcccgcaggacccgctcgctagccaccccgcgtgcgcagtcactagcgctccgaccccgccagatagccccgtcttccccacaaccgccgctgacccgcgcgcacacacacgccgagaaagccggccacgtcgcgcccccacgtcccccagctccattttgagctccg

SEQ ID NO: 172500 - DNA, 667 bp, Zea Mays
ggccttcgcaagctgaaagcactcggcgtcaccacctgcatagtcaagacagactccaaagttgttgctggccaggccgagaaagaatattcagcaaaagaccccgcactcatgcaatatcttacggctgttcgcagtcttgagagacagttcaagggtttcacattgcagcatgtggaccgcgccaggaacgaagaggccgacgcattgggcaaagcggcggccagaggcgaagccttgcccgctgacgtgttctaccacgtcatcggcacaccagtcgtccgcaacccagagggtctacaaataaccaacgacgtcgagggccatcgcatcgtcaacctcatcatgaccgaagattggcgggccccaataaccatgttcctacaaggatattaccatccaagtgacgtcaacgaggccaagcacctcaagcatcgaagccgggacttcgcacttattgagggccagctatacaagaagggggtcagtcaacccatgctcaaatgcgtcaccgaaaccgaaggcatccaaatcctgcgtgaagtccacagcggaacttgtggctctcactcggggcctagggccctcactgccaaggtgatccgtcaagggttctactggctcgctataatctgcgccgtgaatcgagtcacaaggtcgtgcgaag

SEQ ID NO: 172501 - DNA, 666 bp, Zea Mays
cgccaacttaagccgattgctccgttagtagggtataatggtcaccctaagttggataagtgtgagcatgtcgcaccgtcttaagtcgttgccaacttaaaccgattgctccgttagtagggtatagtggtcaccctaagtcgagtaagcgcgagcatgttgcaccgtcttaagtcgtcgccaacttaagccgattgctccgttagtagggtatagtggtcaccctaagtcgagtaagcacgagcatgttggaccgtcttaagtcgtcgccaacttaagccgattgctccgttagtagggtatagtggtcaccctaagtcgagtaagcgtgttgattctgagtccgatcaaatcgaagtcagttgatagtcagtagtttgaatgcctttgaaaatgaaaacttttttgatgacggatcctccaattacagagtacaatgttgctccgatagcttttgaggtcttgcttagggtaaaattttctaagatgctctatgttccatgaattccccacttctgtaccatccatttgagtaagccggtatgatcccagccgagtgatctctaacacaatgaatgacccttcccatagtggtgacaacttatgctgtccttcccccgttagaattcgacgaaggaccaaatctcccactacaaaggatcggtg

SEQ ID NO: 172502 - DNA, 613 bp, Zea Mays
cgggtgctccagatctgaagagaaaaaggtacacctttcagatccattgtgctttctatgattctagtaattcaaatgctacaactcgtccagatctagggtttaaggttgagccaacatacattcgatggttgtacgattcattgagcactaggttttctcttgataattgttgttcacagtaacaaaatttgattgtgctacaagctttgttgttctaggaatcaatgtgtattcacaaatacatggcgactggttttgacatactgaatcatgaacactaggttttgtcttgataattgatgttgacattaaggaaatttgattgtgctagaagctatgttgttctaggaatcgttgtgtattcacaattacttggcgaatggttgtgacacactgaatcatgaccactaggttttctcttgataattcaatttgacattaagaaaatttgattgcgatgtgtattcacaaatacatggcgactggttttgcacactgaatcatgggtggtgttgataacaccagttctttggcacaacattattcagtaatcttcatcattatttcaactgcctattggcaatactagctgctccggagtttatttacc

SEQ ID NO: 172503 - DNA, 501 bp, Zea Mays
ctctacgttgtttcggcgatgaggatggattcatagcggcaacaaggagggcgcgagcaggggagtcgacgacgtagtcaagtcacagcgtaagcagcagcacgaaggacgtggttgttgggtggtgacgaaatccgatgaacgacgaatgacgatgacgtttggcgcgatgagctggacagcctgggcgagctccaataaggtcctcgacgacgaactcgtttcacaagcctagacgtgacatggtggaatggttacggcgttggtgtggcagcagtcagcgtacaacgcgtgcaaggattccaacgacgacaaactgttaaactatgtctagattcatattctgttagcaagctcctattctcacgtatgtaccgagtcatccggctctatcccttgtatagcgtgtgtgctccgagtcttgtggctctatctcttgtaattaggcctatatatactttgtacaccgaatggcaatatacatagaacaattcttcttct

SEQ ID NO: 172504 - DNA, 430 bp, Zea Mays
gatgaagcagggcgtgaagtgctgaggttggaggccaagctcctccagcagcagcacgaagaaagatgaaatcggcagcgccagaccgctggggaggttggagacaaagagcgtgaactctctggcggtgagatcgctgtgaggagaggcgccgacacagatccttccggcgaatgtcggcgcaccccatctgagcaggttgcgcaccaagttgagtgccacctcgggctggagacgctcgggtggatctagcaaggccatggcggctacggcggcagaagagcgcggagaactcaagggtgaaagggcgcagcgagtgatgagaatggctaccacgctcgggggagtccctttttaaagaaagattcccccactgacgccccaaaacaccgcagaagatctcgcccgacgcgtgccagggtgacccagc

SEQ ID NO: 172505 - DNA, 480 bp, Zea Mays
atacaactagctgtaacagctaagacagcagtataaatataatgtagtgtatctaacatatttatgtgggttgtactaatgaagttgtgccttacttaaaaaacagagccacagatatgtcttcattaagacatggtgtctttatttttttacacttagacataccttaagatacggtcattaagaatgctttgtacatgtattaacagccttacgaccgaggtccgacaatgacacaaacaactcggggcacaattagctactccgattgccctaacagtaattagggaggggacgatgagagggaaagacgtgaacattgtaaccgcatgtcctcgctactgcttgcgtcctccttccccttccttctccacttgaccattattgctaacaccacgtatgacgtatcagactaccaattctattcccatccatactctgctgctcgccttggagcctactagtactaccgccgccgac

SEQ ID NO: 172506 - DNA, 313 bp, Zea Mays
tgcttccgggatgaatagaatagcgactaagatgtgcttcatccaaaatttgctggcagagctcttcattctttggcacaactatgcggttgttgaaccatacaacaccttgatcgtcttctttgaaacatttggcttttccagccctcatcttctcacgtatatgtttcataccctcatcatttttttgtgcgtcaattatcctttgtaaaaggactgactaaagctttagttgacttaaggctccttgttggatcattcccaggtttaacttctccatctcctggcatagtgtattgtcagaggtcttcac

SEQ ID NO: 172507 - DNA, 642 bp, Zea Mays
cggaaaggggctggccgcggtgaagctgttcttcgcggtggcggcgacaaatttgggggaagtttgaaattccagagctcgggtgaacgattacgggtgggagtgggtgctaaggcttcacgatgacatagcgcagctgccccggccatcaatttatagagggcttcgacggtggcgctcaatttggccgggcagagctggcggccggagacagagaagaatcatggcgcagtgggttcgtgtcctcagtcgtggcgagctcaccggcgacgattggacagccgtagcgagtcacggcgtcgcggtggaaaggcaaagccacgcggcacaaggccgagaggcggcggttcaccggtgaagctatccgcgccagccgcaaagcaggaggggatacgacggtgagtcaccggagtgacctccagctcaccggcggcgaggatccttaaccccgcgacgttatccatccaccccgagtgtgaatcctggcgccggtgacacgaatcacggcgagatttcatcggcggtgagatcttttggtctgatccagccaggtattgtaccatggcgatcgccattcagtcgactgacagaacatcttggagcatgatttactctcaatttccaatgacaactcatcccaag

SEQ ID NO: 172508 - DNA, 396 bp, Zea Mays
gcttggtaatggggtctgcatgcaatgtgaagtttaatgggaagaagtgccttgctttatttgatgctgaactaattctctcttagcattccataataagtaagatttgcatcctatcatgttttacaaacatctgtgatatgggtgctagcgttaccaaacgaagtgatggctgcatacatgttgcatctgtgtccatctatgacggaattggtagattgacaggcacatccgaccaaaatcttcaggctgcatacaatacatctgtgcccaacaacacatctgtagtattgtgctgctttgatgctgtattggtgtatctgaaatgtagttaaactagtgacttagcaccgttgttgaattgttgtaccaggccaattgtagatagacaagtgt

SEQ ID NO: 172509 - DNA, 499 bp, Zea Mays
ttgagttgctaccaccgtgaccaatactggcattagtgctagccacactagtaggggccatagggtcagtagggtagggctcatggagcttgtccctatcctaggcctgtcgaggtcaatatcggcaccgataccgaacaaattatgagcatcctccttcttgttaaatgtttggagcaagtactccttggtggttggatcaagatccatgaaggacctcaagtctactaatgtcctcagtgcatcaggctcctcgagggctgcacgataccagcacatgaacgatatcttggcgcaagaaacaatgaagacaaagggggaagaggattatggttgaagttcctcgacaaatttgaaaggagaaggcaaggacttaccaaccttgcacaattggagctcctgagttgtagactagctggccaccggtagcaaacaccaaaggagaaaggagatccaacttagagactcaatagaggggattagggttagggatgcatag

SEQ ID NO: 172510 - DNA, 500 bp, Zea Mays
ggtacaaccaaccgaagcagacggtagacccgcaaagaccatctaggtcggactggacccatctcggaccacccgcattgcgggaaatctggggaggaaataggaactcgcgctcgtcaccttcctccgggcaaatgccgacatgttcgcttgggagccgtcgcagatgcttgggatccccagggaggtgattgagcaccagctgaagatctatccggacgccaagccggtaagccagaagcctcggagacagtccgtggagcgataggacttcatccgtgaggaggttcggaagctgttgcacgctggcttcatcgaagaggttcatcaccccgtgtggctggccaacccagtcatcgtgccaaaagcaaatggaactccgaatgtgcatcgactacaccagcctgaataaggcatgccccaaggacccatatccacttccacgtatagatcagatcatggactcccgcccacgtcaaggacatccagaaacttgtggg

SEQ ID NO: 172511 - DNA, 760 bp, Zea Mays
atgcatactccaattaagctaggtcatgtccacggcattgcagtataatgcagatatttgcgatctagtactaaagggcagacatacagggtgcctggcattgtagtgggcgagagcgtggagaacctggggaattttgaagaagttgcactgatccctacgtatatgcatttagaaaccatccaaattcaagcaggcaatcaggagcaatcgatgggtatactacactgtgcgttcatgccaataattcaccatatgatacatcacaatatatataaaaacaaagttcttatgtaatgcaataataagacggtatatgataattattttggtaaataaaataaaatactaaatgtatcggtccggccgaaataacgctagatctcttttttgttcctcacccagattgaaattttggcagagagaaattgcacagatgaattcaaattgagagatgaggagctagacgccgaccgtacgtaccattccgagaacggcgacggacggggacgaggagcgtgcttgttatgtggcttcaagatgcggtcatgcccatgggctttgttttgcaaccgtagctgctcctcgctggaaagatccggcagcagcacctccaacgccggcgccacgaaatccattccaatcgatcccatctccatcacgtaccgtaccgagatcaacgacggacggggaggaggagagtgcttgttatgtcgcttccggatgcggtcacgctcgtgggattggttctgcaaccgtg

SEQ ID NO: 172512 - DNA, 923 bp, Zea Mays
gcttggtgccgatggagaggcagaagtgcctgatgtcctggttgtcgaactgtttgtcgttatcgagtgtgagctcggacgggactccgaatcggcaaacaatgttttgctagaagaacttctggacagtcttcgacgttattatggatattgtcctggtcttgatccacttggtgaagtattcaacggcgatgaaggtgaacttgaggttcccttgagccgtaggtagtggcccgacaatatctagcccccagcattgaagtggccatgtgtgggcgatcagcttggtgaactgcgaagggttgcccgagcggggagaaaacttctggcaagcttcgcacgacctcatgactcgattcgtgacgcagattatcgcaggccagtaaaatccttgacggatcaccttggcagcgagggccctgggccctgagtgagagccgcaagttccgttgtggacttcgcgaaggatttgaatgccttcggtttcggtgacgcatttaagcatgggttgactgatccccttcttgtatagttggcccccgactagtcccggcttcggtgcttgaggcgcttggactcattgacgtcacttgggtggtaatatccttgcagaaacagggttattggggcccgccaatcttcagtcataatgaggttgacgatgcgatggccttcggcgtcgttggttacttgcaagccctctgggttgcggacgactggtgtgccaatgacgtggtagaacacgtcggagggcaaggtttcgcctctagccgctgccttagccaacgcgtcggcctcttcgttcctagcgcggtccacatgctgcaaggtgaaacccttgaactgtctctcgagactgcgaacaactgtgagatactgcatgagtgcggggtcttttgcaaaatattctttttcgacctagc

SEQ ID NO: 172513 - DNA, 274 bp, Zea Mays
gctcaatgtaatgtaacttggagacagtctgataaggtgaagacaggcaaggaaagggcttcgagggactaagagaaggtgaaggtcaagcagatggcttgaggatcgaggtaccatggctaaggtgaagaagcgattacttgcaagatgtcgacagactaatcagattgtgaagagtcatatagtgatgaagaccacaacattagaagacatgatttgaagtcatctgtttaactcataaatgatgagatgatttaaatcataacactcgagg

SEQ ID NO: 172514 - DNA, 450 bp, Zea Mays
caacaattcagtcattggattggcaatcctggagaaatccgaaataaatcgtcgataataccctgccaatcccagaaaacttcgaatctaccgtacagtggtaggaggtttccaattcatcacttcttggactttctcaggatcaatagataccccatcctgagaaatggtgtggcccaagaacttgatttccctcagccagaattcacatttggacaatttagcgtacaactgatggtcgcgcagtctctgaagtacgatatgcaaatgcttagtgtgctcggcttcattcttggaataaaccaagatatcatcgatgaagaccaccacaaacttgtccagctcttgcataattactgagttcatcaaatacatgaaataagccggggcattggtcagcccgaaagacatcaccaggtattcacaaagcccatatctggtagagaaggc

SEQ ID NO: 172515 - DNA, 614 bp, Zea Mays
ctgactaaatgtaacagaaaatctttttactgattaatcagataattgatttagtgatgaaagtctggatggtcgctgtctgaattatatttcctcccagaaaaaaacacgacaccagtagtgcttttccttttctcaagatcacctgcatggtcgctgtctgaatatcccaacaattcggagttgtccccttttacatacctacagtcgtattgtgttgtaccagccacatatcttacaattcttttaatggaagtccagtgttcagaatttggtgtctccataaacctgctcaccattcccacaaaatatgctaggttaggtctggtgtttacaagatatctcagactcccaactatacttttgtacttggtagcagctaacaccttgtcaggttttccaggtattaacttgcattgttgctccattggaatgtcaactggattacactctttcatcccacggacttcaatgattttatcagcatatgcgctttgacaaatagtgatttcaccaggcttttgtgtaacttctataccaaggtaataaatcagcagtccaaggtcactcatactgaaccttcctttcatttgctgtttgaacacctctatcta

SEQ ID NO: 172516 - DNA, 728 bp, Zea Mays
gggaaatagacgtgcgcggagcggtactcgcggtccgagccgtttgatctgaatcggacggaagagatcagaccggggaaacagacgtgcgcgaagcggtacccacggatccgagccgttcgatctgaatcggacggaggacatcagactagggaaacagatggctgcaggcggcgcctctcctctccgcggcggtgaagtcaccggagttgaggcaggtgcgagctagtgtggcttcagggttactggagttgggcagagaggaagagggcaccacggcgaactcaatggcgaggaagaggccatgaatccacgagcaaagaggggagaacagcggtgagaaagcctcgggcgggccggagaaactccggtgagccattccggccacggggaggggtcctaaggcgcgctaaggccttggctaacttcagcagaggcaggggcgacacagggacctgctccggtgaactagaccgggctaaatcggctagccaccgcgcgagcacggtggaccaccgcggttgagcaccggcgatggtgaaattggccgaacacagggcacaataggggaaattgggcatggggacgagtgtctcacctcgaggcggagctcggggaggcttggggcggtctccggcgagctagatggctgggaacacgggcgcgggtctccggtggcggctggcagcatgggcagagcgcaagagaaggcgatgctgagcgaaatg

SEQ ID NO: 172517 - DNA, 1313 bp, Zea Mays
tcctgccgcagaccccggttccgagatgatgagagtcatgtcacgatggagattcctcggatctagacaccacgccctcaacacaaaggacaataggtcaggctttaatgctgtcgccgggtgcaactcggaaataatgcacgagtctcgcaacagatgatctgttgtagttctagaccatgcatgggccggaatgcccctgatctccacattaaccaaggccgggagcgatgtcgtagccgcatttgcacaacgcgtccacctcttaaacatgagatcaaattgtggtcctctgaatattcttccaccattgaacacccttgaagctactctctcatccggcaagaacaaaatgaaatcctcgggcattgcctgatgaatggacattgcacccacctcgacgtcaaaacttcgagcaacttcatcgatgatctcggcccctaggacctctggcctggtaccaactattgtgacaaacagcgccttccgcagtgctacgtcctctcgcgccatctccgccgagaattccagcacacaggagggagggaacatgggcctgacttgttgatcgtttttctgctcctccgttgtaacctcctccgaagtcgtcggagcaacaggatctttagatgatacagaagctggtgataattgttgcatcaccgcttcccgacgcctctttctctttctatgatgaactggcggagcagcctccccggagcccaacgccaacaacaggggtgaatgatagtcgtccctggtggccgactgcaacagggagattcgcttccacaccgattccttgcgcttgaacgtctggaaatcgcctccttgagagctggaaccttgcatccttattaagcgctgccacaccggaacgcgagaactctggcgcgcacggtgcgacctcactgtcttctttgtatctgcctagaacgagaacgcagaagctcggtggccgataccttggcacaccaaacaacgtgtgggtcgtctacaggtagcaacgaagtgggagggagacagacaattaaagcatcttcctcggagatcctttggggaccatcgacgaggatcagatgcagcacgtctagctctcctatgcaccacctcctgccattcgccttcagagtgagaaggaagcgctggcgtctcagactgcattgtcggacgcctacaacccgtcttctctatcgatatcaaccggtgggcaaccttcggtggagagggaacgtcaacgatcggtggggaagggttcgctctcccaccaatgacgagcacaacctctctataggaccgggacaccgtccctg

SEQ ID NO: 172518 - DNA, 623 bp, Zea Mays
ttgacttctgccccacatgtccttgccgcggccgcctcttctgtgacttggcatcgtcgtcttggtcaccccagccgcgatgtgatgtccaagctctccagcagcacctctggttcaggttgtcgagcatcttttgagcacctctgtcatgcttgtcagttaggtcgccatgttaggctcccattccccacctcctcttctagagcagcatgcacttttgatctgatacattgtgatgtatggacatctcttgtaatcagcatttctggatctaagtaatatttactcattctcgattacttctctcattatctgtggacttttcctttacgtcagaagtctgacacttatcccactctgtctcacttcttcgcctgggtctccactcagtttggtcgcactatccgaagcatccagtgtgacaacggacgcgagttttataacaatgtgtctcgtgacttcttcctctctcgcggcatccacctccgcatgtcatgcccctacacgtctcctcagaacgaccgggctgagcgtatgattcgcatgacgaacgatgtcgtgcgctctcaacttttctaggcttctcttcccgctcgatactcggttgaggccctcgccactgc

SEQ ID NO: 172519 - DNA, 483 bp, Zea Mays
cgaacctgaaactagtacgtatatatgaaaagaattcacgacccgtaatggcccgtaattcgcactggcttctacgatatttttgtctctatatattgcaactgcagcattttaaacgatcggttttaattcgaaacgaacaaccagaatctataaaaccgagagagcaattaattccccattgcttcggtggagacaaatcaggtggccaaccaatcaatctcgtggtggtggagagaagtaggaaaagaagaaagtcccattggtcattttggttttagttggtgatgatgatgcatcatcggtcataactttccaatatatgcgacacggcacatcatatcaccgtaaccatcaagaatgccaacgtacgtcagatgaaacgaagccaagcgctcttgcgaattcatggtcctcactagctagctggccgggtgcggttcacacaacaaaatgcaacaaaatatgatcctctctcgcggc

SEQ ID NO: 172520 - DNA, 885 bp, Zea Mays
gggctggtgctgtgctttataattccagactgaagcatgtccttgacttgtgcttcgatctcatctttgatcgctggagcataacgatatggttgaatgaggataggttgggctccagggactagcggtatagagtggtcacatgatctggatggtggtaacccctttggttcctcaaaggtagacaggtgttgctgcaggactgaagtgatgcgaggatccaaatcagttggcatggttgttgtgccatcagcttgcaagaggtagacaacatgaagcacgtcggatggatcggaatggtgaaacctgccttgtaaacatataaggttgccctagtaaggtagtgagatccacttgtctttccaattgattttcataggactaaattgttccagccagtccatgctgataacaacatcataagtggacagtgggaacactcggaaatctatataaaatgtgtatccttggattgtccattcagctgctttcaaaatatgtgagcactaaatatgaccaccatcagccagtttaactgtcactggagaaggcatgagggaaactcccgaaagttgagcagccagagaggtattgatgaatgaaagagagctaccagaatcaaccaaaattgatatggaatggccttgacaagtaccctgtagctgaaccgtgtgtggggagctcagttctgaaactgctgatactgaaacagaaagcagctcctgagaaatagatttgttgtctggctctgtgctatcacatctcctgagaaacagaaagcagctcctgagaaagcagctctgttcgaccggttcatgcatcagctcccacatctcttccaaaacttgcaattgaacagttggagcacaacggtgtccatggaac

SEQ ID NO: 172521 - DNA, 804 bp, Zea Mays
tttactgaatttcagttttagtcaaattggccaccatttactgaatttcagttttagttaactgaaccaatttcagtcaccagtaacctaacagtgcatttccagtcaactttttctccactttttgtgtaggatcatatccattactcttaaagacatttgtacaccaacttatggccttctatttctctatagaaaccatagttcaaaaccttatggattatttaccacgaagctccaaagtcagtcacaatcactgaaattcagacttagagaatagtccaaatctgaaaattcagaattcagccaacaccactttgaaccaccttttctccaagttccaagtagctttaggggtattacctttaactaaacttgcacaccaacatatggccttcaaacttgctacaacaatcttagtccaaaaccacatggatcaggcaccacaaagctccaaagttgagctagacacactgaaattcagacttaggcaatacaccaagtctgaaatccaaacctgtcaggccctcttttgaccagttttactcctaattccatatgacgttagggttaagtaaattaaacaagtttgtacacctaaggtagccccacaactttgctatagtgaccagcacaaaaatgtctagaagacaaaagttagaacaacccaaagttagctaattgacattattttcagcaaattccaaattgcaccaaaactaaatttcagcagtttactccaatttttcctataaaactggacatctccactcatggaagttgttcaagtttccatgatccacc

SEQ ID NO: 172522 - DNA, 352 bp, Zea Mays
ttttgattaaaagctaccctgttgtttcgcggggatcatctcgttcgtcagtcggtggatgaacggtcggggtcgggtctcaacgttttaatggttgggtcaaatctgggccgtgggcttttaatccaaaggttaatacagatccataccccttcggcttgctgtcttgcaaaagagccctcctggaatttgaaaaccaacccgcaatccacggcagagaaactctgagtctgcggacgttttgtgttaacgcccctgtactttctgataatattacgccaagtccagagaacaataaaaatagaaaattgattatagaaaatgatttttaatacaaaaacaatactagaaa

SEQ ID NO: 172523 - DNA, 580 bp, Zea Mays
tcttgtactaaaaaataataaagttgaatgtcacatgtgcgtcgactataccgatctcaacaaacactgcccgaagggttccttccgcctccctagaatagatcaggtagtcgactcaactgttggctgctctatgatatccttcctagattattactcgagatatcaccagatcagtctagtgacttactagagttcatcacgccctttagggcccttctgctacacctccatgccgtttggcctaaaaaacacaggagtgacttaccagagggctatccagaaatgcttagctgatcactggggcaagcatgagtaagcttatgttgatgatgtggtaataaaaaattaaactcagacgacttcattgaagatctctagcaagtcttcaacatcttgaggcactaccgttggaagctaaatccagagaagtgtgaattcaggtacctgctggaaagctactcgtgtttattgtcagccatcgaggaatcgaggctaacccaaagaagattgaagccatactgaggatgaaaccaccacgattgtagaaaaatgtatagaggctcacgggatgcacgac

SEQ ID NO: 172524 - DNA, 725 bp, Zea Mays
ttggaaacaggtgcgccgatctgctgcagcagcccctgatctccgactccattggcaagctcgcagctactataatgaagatatgaccttttcatttccttttccttgatctcctgcaaaacttcgtggagctgaagcttcttctgatgtggcagcaacaggaattaggtaccgttccacatgctttttgtcttaacaaacccacatgataatagtataaaaatagtgacaacacactaacaattgcgtgtgcgatgagcattagcgagggaccctacggtagcccgtgctgcagattgctatgatggttcttccacactagtccactatccctccacacctgcctcgagcagaacacctgccgcccgaaattttgtgttaaatacatgcatgcatgatggctatcctgatttctaagaccatctccagcaacactagctatctcactccgcatctacattatacacgctctaagtcactatttcactctccaacagccttcgcatccgtctccgcaaaatacatgtcgggcaagtccactcctcttctccatgtcttctctctcctcttcgcacacatatgagaaagcatgcaatgaagagcctgcgcttgtgggacccgatcgtcaacctaatcactacatgtggatacaaagtgctatacggagcctgctggaacacgccgcgcaaaacagccacccatccgcatacacagccgtgtgaaat

SEQ ID NO: 172525 - DNA, 409 bp, Zea Mays
tgtctcggatttcgataataatagactagccgacgtgtgtgatgtatagcggcctatattgttgctctagttagccgaattgttagatgacttggttaagctcgtaatcacggtgaattgcttgttgtggtctaaatgtgtatggttacggtcgcgggtaaaaagtagtagtgctcatgtgatgtctaatttaaaacgcaagtgctgggtgattatcgtggtgaatgcgttgttaattggttgtagtaattttagtgcactaatgatttgaataaaatttgcaaagtcgaattgttggttctaatttgattgtcttaactcgaacaaatagtaaagcgttagagtaattcaagtctctcgaacgcggcgattcttgaattacatgtgagctgaaatttattgattgttg

SEQ ID NO: 172526 - DNA, 467 bp, Zea Mays
aacaaatcagggagcaaattccgcgcaagattctcgccaaccgaaccacctcgcttcgttccttggtatataaaaacatatcgcgacctcctcccttcccatcctcgctcgtgccatccatgttctctggaatccctgctcagccacgcaaacccggccagcgcccttgctccaacttcgccgcggcgccgtcgtgcgggctgtgcgaatcgagatggtgagagaaaccaacggccgcgctgtagcttggggacgacacacatcgcatctccgggctctggtgactatctaggaaccaggaatccctcaccggcgctctgttcatgtcgcagacccgccccgaaccgtggacaagctcgctactccttcaatcgcgggtaagaatctccattccgtgctcgccatcacactgtctaggtttagcaccggccaatttcaggttaggggcgtccgggcgccggattgcg

SEQ ID NO: 172527 - DNA, 280 bp, Zea Mays
attccccagactcaatgatcatcgcccacggacggcgggttgatttgtgaaaaggacaggggctcttttacaaagacgctgcggcgaaagggtatgtccaaatctggaccgtgagatctgagatggagggttcggattagatcggatcttaggtgaaatggtattcaacccgggccgcaggatcctagatcgacggcccgcaattccccaagttagcttcagtccacgcgcgacccagtccccacgatcccgatcagacggtccaaagctcaacactgcg

SEQ ID NO: 172528 - DNA, 541 bp, Zea Mays
caagtatacgtgaagttgtggcctagggtagacagtctggacctgattgaacttgatattataatcacattaatcccttctgtcctcaccttttctctctgcaggtctgtgaggattgaacttgatattataatcacactaatcccctctgtcctcaccttttctctctgcaggtatgtgaggattgaacttgatattataatcacactaatcccctctgtcctcaccttttctctctgcaggtatgtgaggattgaacttgatattataatcacactaatcccctctgtcctcaccttttctctctgcaggtctatgaggattgaacttgatattataatcacactaatcccctctgtcctcaccttttctctctgcaggtatgtgaggattgaacttgaaattataatcacactaatcccctctgtcctcaccttttctctctgcaggtctgtgaggtagtgtcgcaggcatctccatcgtctcaggtcagctccccttccaataaaatggtgaagtaagcccgtcctcattcctttga

SEQ ID NO: 172529 - DNA, 658 bp, Zea Mays
tggggtcatcattcagagaaagaagcaacatgggaaagagaggatgatctgaaacctaaatttcccgagctctttgctagccagccctgaatctgtagggcaagatcctttttaatggggtagatttgtaacaccttgtcccctatcctccccctgcgctctctcccccgctcggtcacctcatttgcagaccgcgcccagctcaccccttctcgcccgcccgtgcccgagcaccgcccgaagcaccgtttctgcctcacctatgtcgtgctgatccccgcgactgcgtcacgctagtgccccatttctgcctcattcgatgtcgtcgttgcgtccgtccccgaaacccgccggctccgcctgagcttcacctcacctgagcttcgcccgaggtaaagatcgtcggtcgcctccctttttctctctccccatttcttctctatctttgcgtgtgcgccggtgagggttgatggtggtgcttcaccactgggccgtgtccctccagccaatggtcgatgtctgcatgcccctccctccccgtgtcgtcgttggccacggccaacgggcggcactctgtttcacggccggggaaggcgaggaccccgacatccggggcccactagcagtctccccgcgccaactccttccctctacccct

SEQ ID NO: 172530 - DNA, 430 bp, Zea Mays
ggcatacacaagtttgtgacagtgatttatccaatacatgtccaacaaacctgctaggctgatcatgaggaggtttaaatagttgtgtacttccaatgctatattgtagtaatcacatcatcaaccctatgccctcgaatgattgttagttttatggagacctattcaaaacaaaaaacacaagaccatagtatccatggtgcaaacgagctcaagctttcaattaaaatggtagtagcaaccgaccatcaacatgtcactccataacatctagcaatgcacaggatgcacaggatctaacccagaccataatacttagttaagcagtaacagatctaaccctcctaccacgactcccataccaacgacccagatccagactagcagagcgcgattaaagccagatcagaggtgacatagttcagtccag

SEQ ID NO: 172531 - DNA, 845 bp, Zea Mays
gccagcgcgcgcatgcaaattaaatacttaatactggcgtacagttgtagaagagagacattatattacaatacggatataaagtgcttcgatgattatgggcattatataatatattatggctacataaaagactgagttgcaaacaatatgtttctggtagcatttcagtctacatatatcaggatgcatagacaaaaagacatgaggatcctgttttccagataaggcattagttatatacatctggcattgttttcaaggattaactttgaaatcagaacgtctttcctgcagtttaaggtaaataagttactttaaagttcaacaaaatgttgttgtaattgaagtaaggaattgcaatagattgtatggacgggaaagtagagtgaattagatcatacatttgtatttgtcggagtcatttttgtcagaattgaattttaaggacctgtacttagatctgatccgaaaaagaatagtaaaatggtgaatgtgtgggaagtaaggaggttgccatgttatgtatctgagtttagtacctttttgtggtgattcaaaagtttccaggtcctggtcttcaattctaagattgacttgttgcttgtatgtataattatgcgttagaacagaacatataaatgtaaataaattggtaaacaaaatgaactcgaaatagtaaatacattgaagttgacttacatttggagaaatgtttattgacagtttgcacattgttgtagaaggtgaaacggattggtttgtaaatatattgaagttgacatacatttggagaaaccttagagtgacctgataatagtccataacatagaaaagggtttggc

SEQ ID NO: 172532 - DNA, 435 bp, Zea Mays
caaaaacgaaaccaaattaagcacggatgaaaacgaattctgaagaacacggatggaaattgaaaactaaaagaaatcacctgcagactccgagctaacggctctcgcaattctccgcagctcctattggtccatgaaaccaacaggaacctacggacgcctttccacgaacagattaaacgcgcgcgagaagcagcgccgccatggcaccaataagtagtcgcgaaacacgcagcaaacggcctaaaaggtttcctctttctcctctggaactgacctgatcggtttcccacgacgacggcgactccagcagccgcaaatccggtaggtttcggaatcgagggtcggagactctggggttctggaaggaggagctggtgaggaacgaaacgggaatgaatgaatgcgaatggaaagaaactgactggggatccg

SEQ ID NO: 172533 - DNA, 489 bp, Zea Mays
ctgaaatggctgaaagaatctgagaggtgtgtcagccacttcttcttcttagatttgacacagggccctcaatgccttgcgagcgacgacttggtaggtgtctttgaatatgtgcctagtagctgtgacactccattccacatggtacggactggatccaatgtatacagtcacgacacacttctctgtgtcatgctcgatgaattcacgaccatcatactctggctgactcctaattccgaggcggactgtgcatgctctcagcaacttggggaaaccatcttcattctggcacaagctggtttggcagcggacctccatctgacttctgagagaaggaaagggggaaagcatttttgaaatgaagggatgagagcaagaattttttaagaaaatagttttgactcaaaaacttttggatcaggctaagggttacgtcctgcggcgaacctaacagctctgataccatctgaagcgccccaatccctt

SEQ ID NO: 172534 - DNA, 462 bp, Zea Mays
aaaataacaactgaagagcatatttgagttgttcacctccaggagcaatgaagaggatccctgcgcctgctccctacagtttcagcgaaccatcaaagtacatccgccagacttctgcagcctccgtgttatctggtacttgttgcttggtccactctgatatgaagtcaactagcgcttgagtctttatcgcagtgcgaggccgaaactcaatgtcgtgagctcccaactcgcaggcccacttggctattcttccaatggcttctttgttgtggagaatatcccctattggaaatccggtgactactatgactttgtggtcatcaaagtagtgacggagcttgcgagcagttagaagtactgcatacaatagtttttgaacttgaggatacttctttttagagggtcccagaacttcactgatgaaatagacgggatgttgtactggatatgcgtgtcctt

SEQ ID NO: 172535 - DNA, 500 bp, Zea Mays
aagacgcctccggcgagtatccagtttggatcgggacgctggtatctcggttcctgctgctgaagaagtgcctgtgactgaatttactgatgctgaccccaatgggtgtacccaattcgctgctgatcccaatgtgggtgctccatctgttgctgatcccaatgggggtgctgcttgtgttgccaatgtggacgacgaggaggaagaagatgaagttcctttgactcggaaaaacagtcggcagttcatcaccagcggtgaaagtagtggagttccttctcctgctttgtctgctctcattggtctgcaagaactgtccctggccaactttgaccagactcttgaggatatggttccagaggacttgttatcggagccagtggatgatggtgtaatggaggtttgcgctaacgtgtttgatgctgggttgaggtcatcccgtgcctcgtcgaccttagagcgcgatctcgagggtcaggggactgacttggatcgtcctg

SEQ ID NO: 172536 - DNA, 386 bp, Zea Mays
caaaatcccagatttaattactacgggtccaaccaaggccccccgatcccgatcgaacggctctcctgcaacctagctgatccgatgcccgcgtctaatcctgagcgttcgttaactaatcaatggcccatggcctctctccttcctcctgcctacacacaggacgacgcgtccatcacccacggcggaactcgccggagcaactcgaaccaccgcaccggtgcacgactcgcaccccaaagtacgtaaaactaaattcacgaccacgagaacttgctgggatgggttttattccgaattttggtagttgtggcactgagcactagggcctacggccgcggcggacaccatgcaccgacgagcaattcaaggcggttcccacctcc

SEQ ID NO: 172537 - DNA, 587 bp, Zea Mays
gacaggcttgtgtcagatatggatgtagatgtggttgcggaggaaacaaatgtagctacaaaagaaaacatggctgcagtgccagatgaaggaaaggaaattgataacactccttcggacgagagggattttgatcttcggcacttgggcggtcaggaactgtttgaggaagacaagtttgaattgaaagaatttgctatatcttgcggttaccaaccggggtctttgctcttcggcggggttgatgaggaaattttaggatgtattcacgaccgtgccgggacgaagataattggcactcaatccaagagtgttggtttttcaaagctggagaccgacattagctgttaccgacggcaacacattgtcggtagcctattttattctaactttaaggtgagaccttcatctagatttttattgccttcatggtggattgaatgttctaattttacctttgttttgcagagcatgttgttaagtaaggcattaaaaatgcagcaggattctgaagatagaaaaaatgaagtcatagttaaggaacttgaaggttctctaaaagaaaaagatatcatgctgcaaatagc

SEQ ID NO: 172538 - DNA, 659 bp, Zea Mays
cacagtgaagacaggaggacagagattttaaccttccttcggggaaatcatgtggtcgatgacgaagtttacatcaaaagaatgcaggcaaggacaaggccgtacaagatcaaagaagggtaattgtaaaaggagggagtctgttcaccctcgttaaaatgtatttctagcgatgaaggtcaagagctaatgagagaaattcatgctggaatatgtggatcagacattggccccagggccctactagggaaaatcttccgccagggattttactagccaaaggtagcttcagatacaacagaatgtgtacagaattgtgacaattatcagaggtgtgcaagggattgaaacaatctttgtctatgacttagttgatacaaccaacatggcccttgcaaaggtggggaatgaacataattggctcattgccagctgcctaggggaacttaaaatatgcagtggtagcagtggaatattttttaaaatggattaaagcaaattccttggcaacgataactttagtgactattcagaagttttctgaccaaacattatatggctcttcggagttccaaggtccatcactattgacaatgacacccaatttgactccgaagcattcagaacaatctgcagttaggttggaactaatgttcatg

SEQ ID NO: 172539 - DNA, 843 bp, Zea Mays
gcagtagcgcgcgcccgcgcttacgcctgcacaactttgcaaaaacgcccacacgatttaactatttcattaagattcctagctaatattccctgtgtcgctgaccttttcacataaaccctccgcctttctgttctttacatgccgagatcctcgacggcgaaccgcgcggggagccgtgcttcggcgagctagactgggcggagcatgcaaggattggtgctctccgacgactgactccagattcagacctaaaccgaggtttcccctcattcaatttcacgaatggctactaggtttgctctaaccgcagtgaccatggaccttgcggacagatgaacgcgttcccggcgattcatggtggtctagttcaattcgaggcgtcaaagagcttgaggaggacctaagaacgctagaacaaacgatcaaagcgctgagactgacctggaataagctggccgcggtgaggctaaaccgagcggagttcagaagtgaattggggagaatccaaaattagagttctctggtggaggatttgaggtgcgggtgagtgcgttagctgcttgaatacatggcggagctgagggggtgctcaatttataggcctagtgagcggtggccaggaatttgggttgagcgcggtggcggtcagagaagaagtgagtcaccgacatggtgattcgtggccccttaccgtggcggccctcccggcgatcttcggaccagtatggcactagggttgcgacgtggtgactacggaggcacgtggcgttcggtcgtcgggcagccaactccggcgaggataatttcgaccgactgcgcgacaagtgggcatgatggccg

SEQ ID NO: 172540 - DNA, 310 bp, Zea Mays
gcttgacagagtcaccaccaagccatccaggaggcagcaacctcgaaatgtaataagccaatgatgctcgcttgatgattcacctagtgtctcaagatcacttcgatgatacaacacaatagaatcactcattagaatgcaatcctaagctaatattgtgagtgagagcgtttggaagactaaagtgtgctcaatgtgtgcaaagaatggccaagagagctaccccacaagagcaccagttgtatttatagcccccaaatagaactagctgttatgagcacactgccctctttctgcgcactcgcggacg

SEQ ID NO: 172541 - DNA, 927 bp, Zea Mays
agtcttactactttttttggaactgcaagctgatgacttgggtactacacgtgtgggagttttcccctgatgccccttgtcggattggtcgacctttgcgactgaggactctagtattctcagtgcacttgtgtgtgaggaccagattgaggagcactcaatcagccaaacactaaagtttggggtgccccccacgatgggtgttgtggcatctagtaaggatattatgtctataacataggtgttccccacatttggttgggtacatagaagtggatagtaaatgcataacatggtggatagactggtggatacatgggtgcataattaagtggaggtgtctttgatgttggcggtgttgattgtggatttgggttcatctagacaacatcacaggtcgatttattcagccttaccttttgagatgaaccattttcttccgcttgtctctcttgggtagacgaatgaggtcgctttgcttgctggtcatgtgaaacgacctttttgttgacatatttagctagcaatggatcaaaagtagggccaacttcaatcagccgaccagatgccttaactgtattttgattccacatacctatttcaggtcattggggtttgaatgtgtgtggtcactgctatctctagtcgccaccaaatcgtttgcctaagttagccagaccgtctgtcgtggagctggactgttcgcgctggtgtgccggaccacccacaatgtgcataacatggggctttgctcgatcgcctccttgcatatgactctaggttccttagtcctaatggtaatctttaaagtattgcctccatcgagggtcttctcaaccacaacctccctagagaggattgtcttgtcctcatcaaagactcgagggttgccgattacaacactctttccttttgtctttattagcc

SEQ ID NO: 172542 - DNA, 366 bp, Zea Mays
ggaggggaccaagagaagaaaaggaggataggaaccacagaccttggagtgttgcgagtaagaagaaagggaacaagaaatggaggggaccgagaaaacaaaaggagagggggaccaggagttgcatggagtgttggcgactttttagttgcctcgagtgtaggtgccttttttaagttgtctgtagtgttggcatcttttttattggctggagtgttgacgccactttttattgtactttactgagtccaacgactgagatgaagctaaattcagtgaatttgtgtttgtcgaattgagaggacccggttccgtgcagacttgtacaacatttatgtatgctccctgctgccacttgcatttccc

SEQ ID NO: 172543 - DNA, 443 bp, Zea Mays
tgagcttgaagttgatgtcagtccactgttagtctgaaaattcagaccttaacagcctgacatcctgattttgagcatgattatctccaattttttcacaagaacatggcttgcactcttaagcaaaattgttccccttagtttgctctacaattttgatgtggtgacctaaggcaaaaactctataatttgaaagttacaaagctcaaaagttgagcccataacactgtttttcagacttaggatagaactcaattgaggtctattttgcaattaggtccaaaactcagggtttggcttgtaaatccacatatgagtgacccaaatgacttaagatacttatttgacttggtttttgcactttagtccaaaagtggacaaattttgcacataggtccctagggtttggttttagggttttccagggtttcaaatggggtttt

SEQ ID NO: 172544 - DNA, 314 bp, Zea Mays
taatgactcgggcttcaccagagacatactacaaaaggcgctgaccacctccgaacagctgtttagggaggtggacctctacatcaccgccgacgaacgggccaaggacctcatcgggggaacaaagcttgctccatctgcaccatgccgcgacgcgaaccagcaaaccgacaagcgctgggagaagaggcctcgtgaagaagtccatgtcactggaccacccgtctctcgtgcccgaggggcaccccgtggaggcgaacgaacattggacgacatcctcgacgcccagtgcccgtaccacaaggatatgcgtc

SEQ ID NO: 172545 - DNA, 445 bp, Zea Mays
ctattgatgacaatgcagcatgggcttcaatgagagatgaatgggcaaatgatatgtgggccaacaagggtcactgccacatctagtattatgtagtaggaacttgtgttctattctagtaatatgtttttatggctgtctgcctgctggaacttgtgttctatttatggttgtctgcctgctggaacttgtgttctattgtaacatgctgtgatgaatgtcttaatttgggtccatggctgggtaataggagatggcagaaggtcatgaactgcctattgtggatcttggggatgatgttgaggttgcagggcaaagggcaagggctgtcatgaggtggacatcagccatgtcttcttttgtcctccgtcgcatgtgtcagctgatcaccactggtgtgaggactgataagggcttcaaagaggttcacctaaaccaagttgcc

SEQ ID NO: 172546 - DNA, 571 bp, Zea Mays
tgggactataatgctgaagccaatccatgcccaccactaaatccactgagggaagaggtaaaaatacgaagtctgaaatgaactagaaagtagccatagaccaagtggcatgtggtagatgttgagaacaagtaatgagttgtccattagccactctgaccgccattggacgttgcaatgggtgtctgcccgtcaacaatgacaaaaatcggtcgctaataaatgaatgggtcgacccagaatcaataagtatcatcaaaggctgctgttgaatagtgccctgaaaacgcaatgtggagactgcatctttccctgtccacgctgcatcagacagtgtcatcagcaattgaggttgactgtcttgcacggcttcactgtcctctggctcatccagcaaatcccaaacctcctcaataacttgtagttgcacagtattggggcatttgtgtcctctgaaccacttttctgcacagcgatcacagaggcctcgggcgcgacgataacttttcaatgaagcgacacgatcggttgatgaacccagccggcgggcgtccgtcaccggcttgtcaac

SEQ ID NO: 172547 - DNA, 550 bp, Zea Mays
ctcgaggggaagcgctggagtcacgaggcaatggtggtggcgcagggacacgacggggcgacggtggcggagctctggctgcacaggaagaactccattgagcatggaccgggcggactagagggattacgggcgaaccgaggggtgttccaggtggcgggtgatagggcagagcttactggggcaacatacgcgactaggagttccacgacgaccgtagaatgggcggcggatggtggcggggctctggtcgcacgggcagagcgagagagagggtgagggggttcgacttagggcgcaagtgagcgaggggaggtgggcgagcagggcgcagggctcaaaaggggcggggacacggggatgtggccagagaatgcgcggacgtgggcgtgtccacgacgggggatcgtgagcgagaggttagggacggctgacaggtggggtcggcgggacacagagggaagcgagcacgcgggcgagagaaacggcgccgacaagcatggcccacaggcagcgagagagagaggggagtgtaacaccccgggatcca

SEQ ID NO: 172548 - DNA, 485 bp, Zea Mays
tctgctcactactacttgactatggctcgtgggaaggttgttagcccatgaagccatgacatcatcttgaatcgagtgttctgctgatgatgcaatctgcggagaggtttgaaaaccatggaaagcaaatttagatattatagaccaagttttgctacattaatcttgagtttgccacttggatggaggttaatccttagaatcgtcatgtagaagctcatgtcatacatccttaagcatctcttccattctatcgtagtccccctcttcatctgcctgaacttctgatacattctaacaaggtggttccttgccataattcaccaatgtgtcacaatcaggcataaagtcgttcttacaaagatctattgacatagtcctcctatcatgggaataattgttctggcacttgctagaaggacacctaacatcggtaccgatctctaacctaccaaaaccacgatcgataaattcatcgatcttga

SEQ ID NO: 172549 - DNA, 966 bp, Zea Mays
ccaccttgctttttaggtgtacaaacagaattccaatgaaccaggtgaatttttttattgcgaacctccttgccataaaagcctcttcctctacagatacagtttcctaataatggatttaggagccggataaatcgataacatgtaaagaggaacattagaaagacaactatttaataacgtcaatctacccccaagcttaaaaatcttccttgccaaccagcaggccttttattcatcttttccatcataggacaccaaagagacttactatttttttgttgtcaattggaacaccaagatatttcatcgaaagatgacccacaggacaggtaaatatatcagcatacacagtttcgaaatctttagcctcccccaaacagaagatttcacttttatgaaaattaattttcaatccaggcatttgttcaaaaaggcaaagaatgaatttaatatttctagcactttcctaacaatcttgaattaagaaaatagtatcatcagcatattgaagacaacaacatccattttgaataatatgaggaattaatccacggacaagacctctttcttgagctttctgaataatacaagccaagccatctgcaacaagattgaacaaaagaggcgagaaaggatctccctgtctaacgcctttatgagtggaaaaataagggcccacaacatcattggttttgatggcaattttaccacctctaacagttctcataacccaatcacaccatatatcaccaaaaccttttttccatcatgtaatgaagaaaatgccaattcactttatcataagctttttcaaagtcaattttgagaaccacaccactttgttttttgtctcacttcatgcagaatttcattaagggaaaccacaccgtccataatgtacctccctttaataaagccatactggttttcactgatcactttagtgatgtaggtagccagtct

SEQ ID NO: 172550 - DNA, 437 bp, Zea Mays
gggggggctcaaccgcggcctgttgcgccgccgcgctcaggctggtggaggaaggtgaagacgcatggcccctgatttgataaccgacggccaggatcgtagcgcagcagtgttttagcctggggccatctcggccgtccgatttggggtgaaggattaggatttgggcgatcttcataatatctgggccgtcgatcttgaatcagacggatcaagtctcgtaccggttcggttgattatagatctgatctacgtcgttgatggacaattctacggcccagatcaagtaaaaccttgtgccgagcctgttttgcaaatgggaccccgcagaactaaagaatcaacccgccgtccatatgtgggaagcctgagtctggggaaaacttctggttctgcccctttgtttctctgtatttggtgctcggtccagagaacaa

SEQ ID NO: 172551 - DNA, 473 bp, Zea Mays
ccgtcgtcgtgattcgtgcgccgtgacttgcggataacggtgggcgggtaaagatcttggcgcctggatcgactcgggctcggtcacagctaagctccacatacccacttgctcgtcgatcggtcgagatagacctcgccgccgttggccgacttaccactgtgcgcacgtgctaaagcactgaaccacgtcgcagtgaatctagccatgcattcccggtgatccctggagagccgccacggtgaaagccactaatctcgagcgccagtgactcctttcttctccgaccgccaccgcgcccaacccaaattcatgcgccaccacccccggagtctataaattgagcgtatccgcggctccgttaggtaattacgcatccattgcaccagtccttgccccggattatccaccagagcctcccaatttctctcttcccccaatttggttctccgcgccgtcgtgtgttggctcac

SEQ ID NO: 172552 - DNA, 945 bp, Zea Mays
gatgtgttgaactttgcgttggcctacgacttgctgatagcgaatactctctttaggaagagggaatcccatctagtgaccttccatagtagacaatattcgagccaaattgactttatccttgcaaggagggaggatagacgtgcttgcttagattgtaaggtgattcctagggagtgtgttgtccctcaacacaagctggtagtggtggacttttggtttcgggtacgtgtccaccgggacatacgtgccaagatcgcgagaacgaagtggtggaagcttagaggggaagcagcgcaaacgtttaaggagaggatgctaggtgaggggcttgggaagaaggagaagatgcggacgacatgtggctaaagattgcagcatgtgttcggagggtggcttcagaagtgtttggagtgagtaagggggataaacaagaagcaaaggatacctggtggaggaatgacgaggtgcaaagggctattaaggagaagaaggagtgcttcaagcgcctccaccttgacaagagtgcaaccaacgccgagggctataaaatagcgaagagggatgcaaagcgagctgtgagtgtagcaaagggtcaggcgtttgatgacctctatcagcggctaggcacgaggaaaggagagaaggacatttacaggatggctaggatccacgagaggaagacaagggacatcaaccaaatcaaatgcatcaaggatgggacagatcggctcctggtgaaggatgaggagatcaagaacagatggcgggagtacttcgacaagttgtttaatggggagaatgtgggtcctacccttgagttggatgactcatttgatgatagcaatagacgctctgtgaggagatttcaggaagcagagatcgaggaggctttgaaaaggatgaagggaggcaaagcgatgggccccgatggtatccccattg

SEQ ID NO: 172553 - DNA, 510 bp, Zea Mays
caagcataaaattgacagttcatgtaaaaatgtcatgacataataagtaaaccaaacaaccaaactgtgctgattgatgggagtgaaagctttgtgttagccaaccaattaacgctggaacaagcacattaaaggccttattatcaactgaaccctgttgttacctgccgatcaatattcttagcaccgtcctgcagatcagccacattactgcagctctccttggcttcaacctctgccttcactggaggcgcagaggggtgtgccccctcgagcaggaggacgaccctcctgatcccattgagccttgcgtccctgggcacttcgttcatcacggcgaagggttctccgccctcatctctgaccctgaacccgacggcctccaagagcgccatcccgccttccctgtccgccaccgcctctttgatccgcgggttgctcagcctcacccgcctgaacttgtcgttctcgggctcccgcagcaggttgcccagcaggcgtttgaccacc

SEQ ID NO: 172554 - DNA, 698 bp, Zea Mays
gcgagcagcaccatgtcacaccatgtggggtacttggtggtcgagagatcaaggacgatcgtgaccaaggcgcggatgtcctggatcatggttgtctgagtgtggaggtgcgcgatgactgcagtgtcacaggcggtagttgtgtcgtctctatccttggtgggtgtcgctgctttctgggcatcgagcaggtggcgttccatggcgcggatagcgtcttgttccttctctagggaaagagcaatggcatgtgcacgctgccaagcgacctccaaatcaggcgtgccttctccacggtggcgcgagcaggcgcctgttcttgctcttgtttcttggtggtagcagttgctttctattcgtctgtcaagttggagtggcactcgctgatgttgtccatcatgggaaaaaggaggggttgctaggggagagagagagggtatagcgcaccctagggtaggattagaggacggaagtgaattggatctagtctcgtgataccatgttaaagggatgtggcactgaagtcggatattggattgatgatagaggtacaaggggtgtacagtatataggcaaggatcatctaaggcttatagaaaacacccaatcaatggagatccttgcataacctatggccaactaccataaacaccaatgcacaaatggcagtcataatcagcctatttacatagtctaac

SEQ ID NO: 172555 - DNA, 724 bp, Zea Mays
tggggcccatgccttggccgccagctctgaggtggtgcctaggctagtggtgcccaatccattggtggctaggccggtagtgtccaggctcgtgtccaagtcgacgtggcctaagccaccaccaccagtagggtcatgggtggtaggcctaggataggaagggccagtggaggcagtgataatggctcgaaggtggtgaatgtgggggcaatagttggggagagagcaggtccaatagccatcaaagtccaatgacaagggggagaagaggggagaagaggtgtaaagccagtaggagggaggtgttggccatggggtgataaccctagatcttggctagtggaggctaggagagagagagagaggaagagaacctgtaggttgataccatgttagagaatgaaaatcctaatccattgatagtgggatgcagtattgaatatactttaaccctaatgggctccatgggctgggctctaggtccttaacacatatatagtctaacagtatggtcagcagactttgtagggaaaatggaatcattgcctacaatcatgaaggagatgtacaattaggatgtcgaatcagggaaacattaccatcatctggtgtcttgtagttggaagcactagagccgacctagtaggtgacagcgggagggttgagggccactattctaaacaagttagccagagactgttgatccaagaatcagtctaggacg

SEQ ID NO: 172556 - DNA, 444 bp, Zea Mays
tttctacaggggtactaccacccaaccgacatcaacgaggccaagcgcctcaaacatcgaagccgggacttcgcgctgattgaaggccagctttacaagaaggggtcagtcaaccaatgcttaaatgtgtcaccgagaccgaaggcgtccaaatcctgcgcgaagtccacagtggtacctgcagctctcatgcagggccaatggccctagccgcaaaggtgatccgttaaggtttctactggcccgcaatgatctacgccgcaaatcgggtcacaaggtcctgtgaagcctgccagaagttttctcctcgatcaggcagcccttcgcaattcacgaaactaatcgcccacacatggcctctccagcgctggggcctggacattgtcgggcccctgcccacggctcaggggaacctcaagttcaccttcgtcgttgtcgagtatt

SEQ ID NO: 172557 - DNA, 545 bp, Zea Mays
ctaaatccttgtgtgttcttgagttcttcccgttcattccaatgatcaagtgaaacgcctaagcccctcctcatctcaggatttagggcgggtgcactccgccacccgtccagagatttactctccgacatttggcacgccaggtaggggcctaggcattaggtttttgcttgatcccttgcccaagcatgatggtgcagatcattgagcaccgcgccgagacttcggttgactttgcggtggagggagaagttgcttcctccacaccgcaggttcccagtcgcccagcactagtcactcctgctgtgcacgctgcacggcagcacacggttgcgcaaacgtcccggactccatcaagggcgtctccgggggcgttgtcagcagccagggagttgttgtgacaccctccaagctccacggcttcaccaggagccatgaagcaatggcgggacgacttcgaccgactgctcagtatggcgcattctacctcgactaggtcgaagacgcggtcatcccgacgccaacacgaggcatcagcatctgtg

SEQ ID NO: 172558 - DNA, 593 bp, Zea Mays
aaaagctacatgggccgactgactccacttctggcccagcacaccgcgtagcccaacaccagaagcctggcgccgacaccatgggcccatgtgtcagcttcgtccccctcgcgtggatgccgtttcgctgtcacgctggccccactggctagccacccctccctcgcgctcgcgcctttagctgatgatcctggcccgcatgtcagctatttgggcgccattgcacgctcgctgtcacgcggggcccatgcaccagcctcaagacccactcgcctccatcacgccatctcgcacgcatggcggggcgccgctgcggcaaaaatcacggaatccggccccggccgctgaagcgctgaccacgtacgcgcccatatagtgccatgacccccgggcacgcatagttctcccatcattcttgccctcacgaccgccactaaccccactgcaaactaccgtcgtgtccacccgggaagaagccaccgtcggtgaatctcatcaccgcgcgttatctgtcctcggcgttgggccgggaagatcgccttcgtctgggaaagtcgtctgtgccctcaattcgagtcgaaccccaccagaac

SEQ ID NO: 172559 - DNA, 521 bp, Zea Mays
cagctcggaaagacttgcgtagggtttacgaacgttcaactactttgtcagagcataccaagcaaaattgcaaattcaagagatgtttcataaagcctgatgacataattccacgtttcagttcagaatcttcagatatagactagatagcaacaattatggtagctgacataaaacttgtatatctctggtgatacagtagtagctcaggatgtcatcaaatattcctgcacatgagatagtttagctaacttacaaccgtataagatcccggccgttacttttttttctattctgccggttaagttaaatcaaatacacaaattcaaaacagttgcttgaacacttcgcccagaggtcagcagcaatactaccaataacaagagataattttgaaacaaacaaaaacccttaaattccatataagattagatacgaacagaagacagaatgcaccaaattactagaacataacacagctatttgcaccttgaattcaggactcaaatggacacaagtaa

SEQ ID NO: 172560 - DNA, 343 bp, Zea Mays
aatgcatgattatcgaacacgtaaaaactaaacaccttacaccagattgttagtacattagtggcttggataacaaacacaggacacaaagtaagataatcagaagtttcattcaaatacttgagcgtttgaaactgcatattccataccacaaatgtgcctaagcaagaatcccagtttcataatttagcaacattgcaaaggagtttccagacaaaacatggaacatttcacccagtaatgacctaaacaaatctgacgtctcagagcaagctaacttgcaagtgaggatcaatagtactctctacgtcccaaattaaaatttgttttagacatttaatgg

SEQ ID NO: 172561 - DNA, 602 bp, Zea Mays
cacaccactctcatcaagggtcggcagtcgggccagcaccgctgacagcaacgctgggttgtcgcagagtggcgaaatgccctagggaggcatcaaggattcggggataaaagcctcaccagtaatccccctcacgaaaatttctagctcctcccaggtcaggtcagtcccaggcccgcgcaggatcctgccaatgtcgttggagcctgtaaaccaacaagacaaatacggcctcccctgtagtggcatgactcagagcttcaggaaatcaccaagtacgtgcattgaggtcaggccgacaaccgccagttccttaatcctatccaggatgggctcgaactctggcatgaggcatggtctttccctccactgcttctggccgagtctgggcccgtcattcggaagggcaagacggtcgctgacctcggtacgagcaatcacccagttgtgccgccagttctcccacctcgcgccgctaagagaagcgatgtaggtcactgtcggatctggccttttctggaagtagtaggccccattgtggtctttgcctttcccagaccgcactagcataaaaactagcgaaagagggaagtgcaagcagc

SEQ ID NO: 172562 - DNA, 1486 bp, Zea Mays
ccgtgcttgtgatcataccattccacagctagtgtttatccatccttaccggtatgcacctgctatcaaggatgagatcgaagcccaggttatggagatgctccagtcagggataattcagcccagtaccagtccattttcaagcccagtgttgatggttcgcaaaaaggatcagacctagcgtttttgcgttgactttcgccacctcaatgctctcacaatcaaacggaaatacccagtcacaatcattgatgagtttttggacgagctgcgcggggctagctagttctccagtcttgatctgcgagctgggttccaccagatattactcaaggagggtgaagagttcaaaacagcctttcagacacatagtggtcactacgaattctgtgttatggcttttgagttgacaggcgcaccagcaactttccagagtgcaatgaacaacaccttgttgccggttttacgcaagtttgctctagtatttttcgacgatattctggtatacagcccttcactagaagcccatattgaacacctatgtgtggtgctggaattgctccagaaagaaaattggaaggttaagttgtccaagtgtacatttgccacaagatccattgcttacctcggccacattatcagttatgcaggagttcaaacagacccacataaagtgactactgtcctccattggcccactccaaacaatgtcaaggaactgcgtagtttcctcggcctcgctggttactatcgcaaattcatcaaacactttggcattatttccaagcccctaactaatttactccggaagaatactatgttctgttggacacaagaacatgaagtggcatttcagtgtctcaaatcagcccttagtcaggccctagttcttgctcttcccgatttctctaagcagttcatcttggaaactgatgcttgtgccatgggaattagagcagtgcttatgcaagctggacatccactcgcctttgtcagtaaggcgttgggcccaaagaccagaggtctttccacttacgagaaggaatatctagctatcttgatggccgttgagcactggcattcctatctccagcaagccgagtttatcatccacactgatcagcgtagtttggttcacctcaacgagcaacgactccatacacattggcaacaaaaggtgttcaccaaattgttgggcctacactactccattgtatacaaaaaaggatctgacaaccgcgtggctgatgctttatcccgccgttcacaccatgaggcatcctgcttagccatttcagtttctaccccatcctgggtagcccgagtggtggattcatacagccaggatgctcatgccacacagttgttagccaagctgtctttcgacaatgactttgtaccccacttctccttacaacaagggctcctcaggtttaagaatcgcatttggataggtgactgtgcactgataaaacaacaactggta

SEQ ID NO: 172563 - DNA, 746 bp, Zea Mays
cacagggaactcaggaagaatctaatcgaacacctatgacacgctatagagacaaataaagattagacagcatgttgcgattatatgtagtatagttattatattgatgggtttttaaatattgtaactatgttggtcttatttgtgtttgaagcttcattctttcgttaaacggcagcacaataaatcgatattcacgattgatcctaggctatatacaaagtattcaactgtttgcaggagacctgcttttttcttcttcttcttgtaattgtctatacgttggttggattcttgtctgttagagacaccctccgtttggtgaccgagatcgtacattgcgtcagcgagtggactggttttgtggccgtagtagtagccgccgtttcgatcgtaaatccaagtcatggcgttcggtttcatcggcgattaatcggacagctagacaaagtccattattgcgtgtgcggttcttggttgacaacgaattaaatagtcatgctaccggcgtcgtgtgctatgctatgcctgggagtgggagtccaatagtccatcgcatcgtgctcgtgcgtgcacacctggtctcgtctctgctccaatccgacgtggagccgagaaggactgaaggacagagagagggagagggtttacaaaattcgtcgtgcgcgcttgcgtgccatatatctgcgtctccttgcgaagtccgctggctcttggagacggacgacgatagatatgatgcagac

SEQ ID NO: 172564 - DNA, 747 bp, Zea Mays
cgcttttctggctactggttcatgtccttcctgggtgctgggagtatgggctttgcacccccaatgagatcttgggctcgctcatacatggtgatgtagatgtccgcctcccgaaatagtagttccgaggtgatgggctccttctgaaggatggctcggacgaaagccgagtcgttggatcctggatcacgactgcctccacgacttcaggaatacggttcctcatggtttgcaatcttttgagaaatgagcggatggtatcatcgctctagcgtttgatggatttgaggtctcatggttgcaccgatttgacagaaagggattggtaattcgcaacaaaccgacgcctaaaatctccccattcgtcgatgtagtgtcgcggcagatgccggagccactgcagcgcatcctgccctcggacaatgggcaggtacgctatcatgacatcatccattgccccagcgccccaggcggcggtcatatagactgccaaccagcctcccgggtcttgcttgggctcgtacttgtcgacattggaaactttgaagtttggaggccactagatcgcttggattcatggggtgagtgtggagactacgcacgtcccctatcctctgatcggtgatcgtattgtcggtctttaggaggcgagagagcaacacatcgcctcaatcgtcatggggctgggctgctggtggaagctaccgctgactcggtcctcgttgcacagctgcgagctggtgctcc

SEQ ID NO: 172565 - DNA, 370 bp, Zea Mays
aacaggtgcaacgaaccggtatgaattaacgtgtacgtatggccctactagctatctgtctgggatgcatgtaataataagctaatcctcgagagttgacgcgccggtccaaaagttaggtggagcccgattttccggccgtgcatgcatcagctccccagcagtcttgtcgtccaaccagcagtgctcctgccaccgtgcatgcttttccttcgggagctcgtcgcacgcagcagccagcaagtcacgtgaaataaatatcttcggttcctgtcgcgattaacgcactcgtaatgacgtctgcagcctttgcgcgcgcgcacaaatgcgtgggccttcttgtcaaacaagcatggaatagtagtatttc

SEQ ID NO: 172566 - DNA, 916 bp, Zea Mays
accgagtcagcggcagcttccactagcaacctagccctaggatgatcgaggcgacatgacgctcgttcgcctccccgggaccaacgacacaatcaccgacgagagggtagggggacatgcagagtctcctctcttacccccgattctgagcaatccagtggccttcaaacttaaaagtctccaacgtcgacaagtacgagcccaagcacgacttgggaggctggttggcagtctacacaaccgttacgccgggctgctggggcaatggaggatgtcatgatagtgtacctgcccattgtcctggggcaggacgcgctgcagtggcttcgacatctaccacgacaatgcatcgatgactgggaaaacttcagccgtcggtttgtcacgaatttccaatccctctctaacaaaccggtgcaaccatgggacctcaagtccatcaagcgccagagcgatgagaccctccatttgtttcttaggagatgccaaaccatgaggaactgcattcctaaagtcacgaatgcaactgtgatcgaggatttctattgaggatccaatgactcggccttcatccgagccatcctccaaaaggcactcgtcaacttggaacaactgttccggcaggcggacatctacatcaccgccgacaagtgagcccaagacctcattggaagcgtgaagcctgcacctccagcacccaggaaggacatgaaccagcaatcgaacaaacgttgggtcaagaggcctcgcgaagaagtgcacaccgcctggccaccggctactcggacccatggtgcaccccacggtaaggtatggacactggatgagatcctcaactcccagtgtctgtacaaaaaggagatttgccacactctatgaaactgtcgggacttcaagaactctgttgggcacgacc

SEQ ID NO: 172567 - DNA, 778 bp, Zea Mays
ctcggactcggtcgctgttgaattcaccgtacccacttgctcttcgaccagtcgggataagcctcgccggcgttggccgcttgtcgcctgtgcgccacgtgcttaagcggaataccacgtcgcagtgaatcgccttagcatgtttttcatcgccggtggccttggcacgatgaaagccatggtatcacctgcgccagcacaacttctcctctctccagccgccagcacaactgttcaaaattagccaccaccactctcggacactataaattgatggtattgatggctccgttaggttatcacgaagccagggcacccacccttgcctctgattagccaccacagtgcctgaatttcctttttcccccaattcagttctccatgccgccgtgagtgagctcgccgtggccaaacgtctacaggtccgttcataccctccttgccctcgtttcagcacccttgtgtgctatggatgcttatcggcccagccaattgaactagaccacgttaaatcgccgggaacacctcggtttgtcctcagttcgtgccatcaccgtggacagagagattttgagctagaactccgcatttggttgagggattagtgtcgccgagggtggaatttggtgttgagcaatggaggggcctagtcgttgcgttttccggccggtataagctcatcggagccactactccgctgtccgtggtcggggatctcgccttgcgaagaaatagaaagggaggggccttggtgcatttgtcagagacacatgtgaat

SEQ ID NO: 172568 - DNA, 779 bp, Zea Mays
actcctctataaccatcttatcgttgattagcattagaggcaataatctgattattgattagcaatggatactcgaactaacacggatagggaaatatatcttgtaatcagtctgtcttaataaatgcttacattgcagttggggtttgctgtcttcatgtttcccgaaagcagagtgttgtgtccgcatctttggttgattagtctagaaaaggtgggggggaggggggaagctttgttaagctggcttttattcgcacattagtcgattatggtaaaaattatattctatctttactttatgcgttttctcaggattagctcctcctttagcttactgaatttgtggacactttgtttggagaccatcttttcctgtattaagtttgttaggcgcagacactttttttttaacgcaatgcacatacacttttcgtgtatggtctggtggcaatgatttaaatggagcgggatagacattaggtttgttaatcagtggacagtctgttgctgttcatgacaggtgggaaagttgagcgaagctgaaaccgtgtcccttattttgcaagggtggtgctcataaggaaccacccccctcttctttgctggtgggagaacaccaaatggcccagctgttgcaccatcaggattctgcattctacagcaaggaattgcacgggtgccggtggggtattcttcaattctttgggtttcgccgtcgcctacggtccacaaagatgctctctgacaagagacatggtcaggagaaaaacagccgt

SEQ ID NO: 172569 - DNA, 714 bp, Zea Mays
gcctttttgcattgaaacagatgccaatggccaaggagttggagttgttttgttacaagatgatcaacctcttgcatacatcagcaaggcattgggtcctcgttcattgggactttctacctatgaaagagaatacttggcaatcttgatggtcgtggagcagtggcgtccatacctttaatatggggagttcatcattaagactgatcaacgaagtttgtcccatctttcggatcagcgtcttcatagcccttggcaacaaagttttttcactaagttgcttggtcttcagtacaaagtagtatacaaaaaggggtccgacaattcagtggccgatgccttgtcccggcgccctcatgaccaaatggaactttatacattgtccttggccactccagtttggatgttgttagcaccggttacacggagcagaactgaggaagggaatggggtttcgtggagaagaagaacaggaggtggaggaataaggataggcttcgatagatattttcttcttcgataaccattcctccacgtttcagcagtataagtatttacttattacatgggcagcactggccctcatttcacccactctgggccagacagaaccacattgggcttaagcttcctcttgggcctcgtagccatgccttggtgattgccagtttcttcaacagccttgtcttccactattacatctccttgtgtgct

SEQ ID NO: 172570 - DNA, 680 bp, Zea Mays
gctttctgatgtcaagaacaagtggcatgagacgggggccagccttcatttgacaagctttgttcctctgctttccatcatcctcctgcatgtccaaagaaatacttatcagcgtctcatcgtcgccgttcgtgcaagggaaaggtaaaaagtgctgcttttctacactgtgataagaccctttcgcggggtagtggaagcacctagtcctgttcattcgctcgacaagaccctaaatctggggggcaccaactcccgatgcccaaccaaagcaggcagcattaccgacgtctcaagtagactgcatccatcattagcacaggaaagcaaaaaagaaccaaagctgcgatcgatttttagtccaggaaatggcatgcatacaagtaagaggagcatatgacaagtatacgtgagagtagaagtgagtgtacatcatcatccgtacatagtgctgccttgccaaattcaaatgataacctcgcataggcacttactagccagcaatgtattatttagggaacactaaaacactgtccttatcactagctagctaggccaagaaaatcttgaaattttacatacctcgactcgttgcatctcccagctttccacgaggttacgtcttgatttacatgaaaagttcaccgacttgtccttgtttgcttcgactgaaaatcacc

SEQ ID NO: 172571 - DNA, 302 bp, Zea Mays
acatcttaagggttgggatgttgtgtataaggtatcgccgcacgggagattacctgttcctaacgatgaagattataacttagacccgtacacatatgatggaaagttcttccaagaaaatgggttaggagggcgatttgagatagacttaaccgaagctatcggaatggacgtagatattgaaatggttgttgatgaggaggatgatgacgtgcaaaatgagaatgacttagtaatccttgaaggcaatgacattaatgacgaacttgtgccttcagatggtgttgactatgaaatggttg

SEQ ID NO: 172572 - DNA, 285 bp, Zea Mays
tcgggggtaagttgatgaagaaagatctgaaatatcttcagcacttcaaccaagaatctgctcaatgggaatcgaagacccgccttcaaaaagcttttgtaaataaccacctcattttcttcaggagcaggggcggtgctgtctcctccaaccctcacaatagtcatgtcacgaaagtatcttcccctcatagcgtcaacatgactttgcttaatagtcgacttttcgaagatggtatggcttggtcgccagggtcggtcctcagaatcttcgtctccactttcc

SEQ ID NO: 172573 - DNA, 1193 bp, Zea Mays
aaagtttctgagatggtccagcctttgacaaaaccagtctgatctaggtctaccaacctcgaaatttttgcttggaggcaggaggtgatgagttttgagatgattttaacactgcagtatgaaggtggattagtcttaaatatttcatctcagaggccctggcttttttggaagcagcaccaaaaatgatctattaatgcattctagactcgtgtgctcattgcggaagtatttcagcaaggccatcacaccatttttgatggagatcgaggccaccttatatagaaactagggccaaaaccatcggggttaggggcagagtggctcgacgtggagaagattgtcgtcctagattcatcctatgagaagaggtgatcaacgtctaagttgaaggtggtgtgcccctattaaagggtgttgatgtcgaactgccagagagcaggtgatcccaagtcggcgagctgccaatagtaggaggtggctgaggcaagcatggacttgtgatcagttaggtcagtgtcaccatcatagatgagtttgatatagttatgttggcggtgatagtttgcggcgatatgatgaaaagtagtgttggagtccccatccaacaaagcgtgaacagtgagaccaatttgtcatggcatacacaacggagttcctcttcagggagagagtggttgtccttcttctagccagttgaagagtgtgacgatgaacttgcagtgctcaatggaagtttggaggtttttatgagcacgcactcatgccttagctctccggtggacctgcttaaggttagcagcgagacccctagtcgcatcacatttggtagcaatgggacgccgagccgagaggatgaaaggtagataatcggggtttcggagccaagcattttgaaagtggtagatgggacgcaagggggtgccgaggaggggtttacaaggaactgaaggaaggggtggtgatctgagacatggtgaggtaaggcagtcagagatgattcaaggaagacgttggcaaaagaggaataagtgtaaaattggttaagcctagccaaggccgggatctctcgaccattggaccaagtaaacaagcacccatgaagagggagttccatgagccccaaggagtcaatgagattattgaagagatcacagagatgcaagtcgaagcaacgcgagctaattttacta

SEQ ID NO: 172574 - DNA, 727 bp, Zea Mays
cccccgatggctccctccgccgtgattcgtgctgccgacgtcgcgattcgtgcccagggtggatggatagcgtcgcgggtgaaagatcttcgccgccggtgtgctggacgccactccggctagccgcaatccctctccccttgctcaccgcccttgaataaaggttctcaccgccgtcaagccttcatcgttgtccgccgcgtgtctcagactgtctaccgcatcaccgtgactcacccttgctcttcgtcgatcaccggaataatcaccacgacggttgacacgagttcacttgcaccagtaacctttctctctctggccgccaccgcgccatcttcaattcaagcgccactgcccctgggatctataaattgagcctgcagcgagcttcgcaacatcatcacccacccagccaccgcgtctcgctagcaatcattcgcctgagctcgcgaattttgaattcgccccaaatcagttctccgccacccgaaaaccaacctcatcgcggccagccctccacaggtctgctcataccctttttgttcctgttctagcatctgtgcatgctggtgatgctcgtcgacccacgtaattgaactagaagtcctctggtcgccgggaacacggttgtctcgccgtgatgttcacggtcaccgtggccagagcaaaccaattggccatagatgaaattaggttgggggaaatgatcgaggtagctccaatttcg

SEQ ID NO: 172575 - DNA, 625 bp, Zea Mays
atcggacaacccaagcttcgtcttcaacctcatgccaaagcacgatgccgcagggccttcccccgcggtgggatctatcgcacgagtcatgaggtcaactcggcactcaaatcctaccaaccggatggtcccacacgatgcaagcggaggtagcgaggggagccgtggtgttcttactagttcttgcgccgcagtccgcagaccatcgcccatggcatcccgcaactccacggtggttgaagtgctccggtgaggaaattctcggacgcccagaccacccacacgagcatccaccacgccgaccccaacgcatccagtcgaatgcgtccgaccacctagtagcagccaaacgatggcaggtgcgggggaaagcagcagcagtgacccacaccttctctcttctctcagatcgatgacaaggcccaccctgtgccccgcattgctttgcggtgtccccaagttcgcaattagatggacgagggggggttaacggatgctcttatagaggtatggagggaagtttgcgccaaggaggtagcagggaggcgcggagttctgttacggagcccgcgatctcggctaggaggacgaacctgactgaaaggggcacgctagtcggtgaccg

SEQ ID NO: 172576 - DNA, 505 bp, Zea Mays
atttgatgaaccaaatgatgactggctgaaatgtatcgaatctataagtgatgaattgcttgggccatattccaaagcagaagataatgcattatccacatccttcgggagccgagggaaaaagagattgaatagagtttttgatgctattggttttgtttaccccgactacagctacccgctgcggggacggggaaagaagaggaaagttgctgcttcagccaagattgctgcttcagccactccagatgagcctgcaccaaagagcaaaaagttgaaagtccttacccatcggccacgttatattgagccgaccgtggtgcctgagtttggcggggagacttgttcagctgctgaatcaaaggaatccattcctcctacgcagaaggctgaagaaccggccatcatgctgaaggcaccctcagccgagcaagctgagtcaaagactggtagagataacgccgaagagccaaaaactgaaggaacaaaaatgttagaaatttta

SEQ ID NO: 172577 - DNA, 507 bp, Zea Mays
atgggctgaaaagagatgtagctgcacacgtggttgtgtgtgatgtatgtcaaagagtcaacaccaaagaccagctggactactgcacccgttaaaggtacccgaatggaagtgggaagaaattggtatggatttcgttaccgggttgcctcgcacctcgaagggttatgattctatatgggtgatcgtggacagattgaccaaagtgactcacttcatgttggtcagtactacttataaaggttctcagctggcagagttatacatggctcgaattgtgtgtttacacggggtaccgaagaagattggttctgctcgtggatcccaattcacctcaaggttttagaagagccttcatgagaacatgggtacgaagttgaactttagttcggcctatcatcctcaaactgatggccaaactgagaggactaacctggatatgttgagagcttgtgcccttaaacatgggggcagttgggacaagagtctaccatatgctgagttctc

SEQ ID NO: 172578 - DNA, 681 bp, Zea Mays
cagtacctagttccctgcgatgttataacgcaggatgatcgttgaaactggtacttagttccatgtgagatatttgtaaacagtagtacttaggggatgttcagccgtaaaactgctgcatgtattgtgccgtgcggtacacaatttggttttgggatcaacttcatcggtattgtgatgtgagctgcattgggcacaggaaggatgcatgcaattcaaccgcaaggccggcccgagtgatgtgatatacacaccatacatctgtatctgtactaactattaagggggcagtgtagactgcccccgcctcccacccgccgctccgcctcccccgccgtggaacccgcctccacccgcaccccgcctgcggagccactcctcaatctcccgcgaatcgctcgccgctcctccagccaaatccttgcacgcgcccctcgccctaccttgagtcccaactgctccatctgcgcaggcaatccacatgtcgcgcatggcggtcgcacctccacctccacgccggagcacgcgcccaccggcacgcccctcacccaactttcatccccaaccatcccatctgtcgattccaccccatccgtgcaggccagccacgtgccgtacaaccaccccgccaagcgcaagccccccccgccccgccgcctagaagaaggaggacaagccccg

SEQ ID NO: 172579 - DNA, 288 bp, Zea Mays
gcaacctcatgtgatgatttgagccaagttgatcagtttagtcttcatgatgaattgattgaaaaagttgaagccatgacactagagaaccagaaattgaagaggcatttgatagatgcaaccactagaggaaaagttgccatagaaagcaatgacattaataatgaattggcagtggacaatgaaaggcttagagatgaagtcaagaaacttaagattgagaaagaacatcttgccacaagtgtacaaaagttcaacaaaggccaataccttcaaaatgagttactc

SEQ ID NO: 172580 - DNA, 955 bp, Zea Mays
atcagcatcagcagggccacacccattgggatcagctccagtaaagagttccaccggtacttcttcagcagcaggagcagaagggacaacatcctggtccaaacacgacactcgccgaagccgtctctttttctttttcttcccctcggcaggtgcagttggatgactggcctggtggaggcatttcgggcaagtaccatcaagcttttgagtgttcacggttttttcaggctctgggatagtcgcaacagccattgtttcaacagggaccgagtcagatgaatcctcagccaacatgtccagcatagcacttatctctgcatcacctagacttataggcatctcaaagtgaacttgcttttcatcattgggaagatcaccaagtgaagcaaccagaacctcaacttcttcgagagagggtcgcactctaagacccaaaccactgtcactagtaggaggattggacacaaaatcgaaaaaggacttggaaggtggcaaattccaagcagaatatgcaacaggagcaccaatatttgatactttgcctctaaggatcatttccagttggctcaccaaatccacagcaggaatcctcttgttggtaacccaggttgagtcggtgacaccactatacaaataagccaggtacgctctgtccttcagcggctgaatattcttaaaaacatagtctgcaaccacagcttcagcagtcagacctctctccttcaacaaacaaatctcagcaagcaaaaccttggcttctgttgtctccaagtctgtgggggactcaatccaacttggagcacgaacatctggttgtctccctgaccgagggggagggacttgccatggttttccataatgaaccactctaagcgccatccttttaatgctatccttgagtgggatgtcaaggtattccattctcctcccatggcgcatctccagactcgca

SEQ ID NO: 172581 - DNA, 534 bp, Zea Mays
ttcatatacctttgatcttgttgtttgtcatattatttggttatggttggctcaaagcatagatggtcatcaccagacctcacaagtccaagtgccttggatgtacacattgacattttgggactaacaatttttcgaattaatcatgtgtgtagtcccaaggtgtttgaatgataaatggtggacaaaaaaggtgcttccactgcataacgatatcaaggttctttgtctaaatttccttgatttttcattgcatctagctttcatttcctatttttcgtatggcaatggggttaggccacatagtttctccatattcgtgcttaatgccaaaggggggaaattagaggccaaatcaaatggatcaaaccaccacttgagtttttaaaatgttttaagctttgaatttgtcttttgatctaaaactctattattgtgaaaactgcttgttgggggccttgattgccaaagatcacttgcctaacttctaccttcattgttaacaagtgtgtttcaagaatgtcctcactgacg

SEQ ID NO: 172582 - DNA, 287 bp, Zea Mays
aaacagtactaatgcttgctgatcagatggtgagtctatcctacggttctacatttttcttgtatttgttttggacctgttgaaaccacatactgatgtagtgtcaataaattcttcactttgcatttccttggtctttgcaacaaaaataacatgccttggtgtgggatacagatcagtgttgtttgctacctggcacgttggagtccagtgcgtctgccgcctccgataaactcaagtccatcggtcagtccgtcgatgaccacgatattgtcgctggtctcctc

SEQ ID NO: 172583 - DNA, 527 bp, Zea Mays
tggattcgtgcaccggactcggggataacgctctgggtagaaagatcttcaccgctcgtgcgctggacgccactccggtgaccccccccccgtacttcccctctgccctgcggctaaaaccgataagaacgccggtgatcaccgtcgcacgaccttgcgccgcgtggctttgctttccaccacgacgccgtgactcgctacggctgtccaatcgtcgccggtgagctcgccacgacggtggccacgaattcacagcgcctaaattcttcttcacctccggccgtcgcgcgtcagcgcccaaattcacgaccaccgctcgctccttctataaattgagcccgcggctagctccaccacattatcacgcaccaccccaaccactattgcccccagccgatcaccagcgagccctaattctggttttcccccaattcgggtttccgccacccgaaaccgacctcaccgcggccagccccctttccggtcaattcatcctcctctctccctcgtttgagccttctcataac

SEQ ID NO: 172584 - DNA, 442 bp, Zea Mays
aaagggtaaattgattgctaaagtgcggaagttttgatgacgggaaagcagccgaagcattttgggcatgtcccggaagctacagaaaatcatggcaacgacaaccaaagatcgaagtatttaaccgggtaaaatctggtctgaaatttgtgtggtagtagaaatagagcggtcacatcattagcacaaaacggccgtactagcgtccgaacaaatgctagtgtctggacacagttctttctcgttcaccttgctcgatgctcgctcgctggcgacctcaccaccggccgtccatccccgctgctgtttgccgatcctttcctaatcccagtccgccggtgacctaaacttccactttcgttcccgccgtcgacagttgacaccgtgtaccggttgtcactctttcctcgctcgctggccgcgccctatcatcgaatttgcc

SEQ ID NO: 172585 - DNA, 1137 bp, Zea Mays
attttatagtccaacatgatgttaagtgaagttggacttaggcgaagtggtaattaagatgatcaacacctcaagctagacatgagaagccaagttgaagattaaaagacaagaaaatttccaagacataagatggaaccaagttgggcatgaaaattcgaaaggaaaaagttttttaagatgatagaccaaccatgacgggcatcacatcatctgctagagaaaatcatagcagaggtgttcctagaggtgttggacaatagtcagactaagaaaatattagggtggtgtaccaaatgacgacaatgttcacgctcagcaggagtgtcagaccgagacgacataggatgtcggatcatcggttagagtttgacagtaaggagagaggttctagagaggagatcagagtgttagtctagtcgaaagaaggctatcgtaccaaaaactacggagacacacttaatggtcaacaacagctagttctgaaatagtggccattaagagtcatcgtactatgacataatggtctgacgaccatatattgcatggtatgacaatatccatagatgactattgaagttgcgacggctatgcctaaccttcttgggggctatgaatatgacctcaaccgacatttaagagtgtggagcccaagcaatacttatgcgagttgatgcttgtctataacatctttagccatcaatgtgcttagtgaaatcacaacaggaattagaagtactcccgtcgacctgtataattcccatcaacaataaggataaccgacatgagttaaggtaactcccatccgtcaggctggtagccgatgggattaattatataacttttgtcggctatcattattatcgaattctaccatcttagagtctgtccgatgggagttatcctagggccaggcctccctacttctctccatgtgcaactctatcgctctcactctccaatgtcatctctgccctgtagacctcgcgttgcccgccagcgcgctgtcccacgctgcctccctacagctcacacccattggttcctctagcaacgcatgacgctggcatcgtagttgcgctacgacactggcccgtggtctaccaacgtcatcgctccctatgctacggtgtcgat

SEQ ID NO: 172586 - DNA, 950 bp, Zea Mays
ggtgcaaagaatgttagattacatgattatcttttcatgatggcaagaacggggtttaggaagattaggagttttgtttcaatagaactacttgttttgtggtgctgtgaggtgaggtgtttgatcttcttatatattcatctggtgtggatgtttcaccattgaattaaaatgaattgttgaagttggtaagggttgtgcttagtgcatattaccccttcataaaagagtgtcgttttaagacattgatgctgatgtatggctgcatccaaattcaatgttgtgaaatcgtagtgttgattgcatctatgacttgctttgagcttcattgcatgttgtttcatgcttgttgtcaggttgtgtagcttccttagaccattagtccgaggtagaagttcttgtgttgattaataccaataatggacccatgttttgaatggtgatgctatttggggtaccttggatgttttgctgggagtgttcgaattcgaggacaaattctttttaaacggggtagagtgtaatatcccaaaaaaatgttgaccaaaagttgatcttcggtgcgtgtatgtgggaaaatggttgtgggccgttggaagttcagagtccgcagatgtcaagatctcatttaaacgatatcatttgagtattcatttgtctgaatcaggccatgcatgggggaattggttgtgagccgtcggtttcgcatcaagggcatcgggggcatcgctccctcctctcctaaaaaaccctagctgcccctccccttccctcatagcagcagccgccccccttcttccccattgcagccgctcctctcctcccctccccaaggtgatgcacccacctccctctaaaccctagccgccccctggttcctcctttggtgtgctgcattctccattggtggattggtgggaggaagaagaaagaaagaaaaggagtccaag

SEQ ID NO: 172587 - DNA, 685 bp, Zea Mays
gggaatcgttgtatcgtccgcagtcggtcccgcctgccaacccctcccactcccgagcgctcgtgctcactcttcccaccgacagctcggtcccgcctgccaacccctcccactcccgttgctgccatcccgaccccgcctattcgctcctcctcccccgtgatgagctcataatggagaatagcaatgtcactggccaccgtccctcctcgtcgatgatcacgacagtaaagttaggcacctcccgtcctcccgttgtgcaccagaacccacatgccaccgccgtcgtggtgtcacctcgcgccgttgttcaccattgctatgcaccgcctctatgcgctactcgctgatggctagctagtcgctgagcccctcccagtggcctataaaaagagcgctctgagcccctctccattcgcacctctcacaacttttcctcccctcccccgagctcaatcaaagccggcaccatcgccccgttaactctgatgatctccccttcttcccttctcgggtgactagagccaaattggtatagctcttgagctttactacaatctcacaggcacaaagcacctcatcccaccccagataccccccaacaccccaccgcgacctcgtcgtcgcggtgacccgctaccccactatggacaaccctctctagacctccactggccaaattgag

SEQ ID NO: 172588 - DNA, 690 bp, Zea Mays
ccaactttcctgtctttcatgtaggtgtgcccaacttagctaggctagcccctaacggctattaggctagctttcctaacctggttgagccggctctataagttggctgggatgactttcttaatgaaggtccaaatcaacctattttttattctaatgatgttgaaattgatttggatgattggagagctcccgtagtaaaatatttatgtgatccaagttgtaaagttaaaaagattctttgacaaagtgcattcaagattgtgttttacaatgatgggttatataggaccgacaaagacttgttattaaaacatttgtgattcgatcaagcaaatgagctatgggagaagttcattaagatatttgtggcatgcatcaattagctctgaagatgaagtggttgttgtgtagagatgatttttattagcttactatgatggcctattgttttgttactaaggttgtcaagagtgtcacttaattggaaatattcagcttgtgctttatgctatgcttcattatgttatcaaaccatggccttttgtggttgggaactagactccattgtccatattcataccccatcatcaaagggacattgcattgtcttggctactgcgaattacttcactaaatggattgaagttgttgccttgaagaatgtgaacacaaggaggtaattgtgtt

SEQ ID NO: 172589 - DNA, 1503 bp, Zea Mays
gtggaatctaactaattaacatatattctctgaagattacagcaggaacacccttttgcttggatgaactgccttgtgtggttccaaaatataaattaggggcacatgggatgaggttctagcagcatcactaattaaactaaatattgtagtatattttgatctcaaccacaaccacaatggtcggaattcccatttgatacaagtaatttatgtatacacttctcatagatcagccactatgcctcacaattaacatataaactcgtgaaatctacctaattaacatatattctctgaagattacagcaggaacacccttttgcttggacgaactgccttgtgtagttctaaaatataaattacgggcacatgggatgaggttctagcagcatcattaattaaactaaataatgtagtatattttgatctcaaccacaaccacaatggtctgaattcccatttgatacaagtaatttatgtatacacttctcacagatcaggcactatgcctcacaattagcatataaacttgtggaatctaactaattaacatatattctctgaagattaaagcaggaacacccttttgcttggatgaactgccttgtgtggttccaaaatataaattaggggcacatgggatgaggttctagcagcatcactaattaaactaaatattgtagtatattttgatctcaaccacaaccacaattgtcggaattcccatttgatacaagtaatttctgtatacacttctcacagatcagccactatgcctcacaattaacatataaacttgtggaatctaactaattaacatatattctctcaagattacagcaggaacacccttttgcttggacgaactgccttgtgtggttccaaaatataaattacgggcacttgggatgaggggtatgttgttttagggaggtgaatgtggttcccaaggtgaggagatggtcgcgacctggaagggaagggatgggggatgaccgctcctgctccctttgacctaggaattacagaggggaggaggaagacgtggtggttggttaggaattaccgaggggaggaggaagacattgtggccgcccctgccccgtagattgatctattgacagggaacgagaggaaatcttgaaggagatcgagtgagcttcgattcatgcggggttgttgtagatcgtgtcaattgcttttctgtttacgcgaggggagaggtaggtattcacgccaatcattgtggtcgtcgtgaaggcaaagttggattctatgtttaacgaccacagaggtcagctcgctaacgatgacatgtttttggtcgtcggctgggttggacagagcttgcactgtgccgccgagactcctcacaaccacatagtacaggtggtcgtcattttctggtcgttgataagcttttctcttgtatatatataagtgttagcttagtaaataaaaccctagagaagctttgattgttgcatagtgtttttaaat

SEQ ID NO: 172590 - DNA, 402 bp, Zea Mays
tgacatagttagaatgagaaaaagtgtgtacaacatcctagggctcaaaagaagcaaccaaagttgagtgagcgaagtgggacatctcatcatacctggagcgattgactcgctcatgaagctcaccaatcatcagttgaggaggatgagcgcgctggatgtggcatggagcccctctcacagaggtagcctctccctcagcagtagcctgaactctaggctcaacgccctccggcttgagtggaccctaagtggtggaaatagacatgttgggtctttcgtctgaggtcgtcgacgtaggctcaactggggcaatcggtagagtcagctcaagatcacccctgtcgacgtcaggcgtgctcctcctccttcaaaacactgtcagaagaccgtgactcaaac

SEQ ID NO: 172591 - DNA, 313 bp, Zea Mays
gggtgtagccaagggacggcttggtgcgctgagcgtttagcaaactgcccctgagtagtaacttgacgtgaccgtggggtgtaatcatatcgtccaagtagttgacttcagtcccaatgggtgccgtgttacgtgaaacaacgtttgccgcttgacttgttttcagacgatttgaattgcatattgaatatttgcgactattcagtgaccgtggtaggagatgagcggctgcctcccgcccctataaatagggcgcttgcttcactggtgtcttcacacatctctcggccatttgttgcttattctcttcttt

SEQ ID NO: 172592 - DNA, 825 bp, Zea Mays
ctggtccgctgggacaggcgcgcctgtgtttaacgtagtgctgagaggcggcatgcaggacagacggcgccgttacgcggttgtttgaatggcaaggcggtaaacataagagaatggcgcggaattaaagggaatagtttccacatgcaaacgtgattactatgatacgtgggcgcgtaatttatggatcttgcatgggaagtaatggcggaaggtaaaaaaaatgtagcataagatgttgaaagctatggcataaaaccgaaacggcataatagttgcataaatagtatataccgtttggcgtaaaacgttgtgttattgtgcgtaaatattttattatggattttagtttgacattgacatcgccataatatcgggacggtttcggaaataatggggagaccctgtaaacgtggatgcggttacttttatagtatccgagattaactttcattcgaaaaaaagaccactaagcctgcataactaattggagttagagatggccggctctggagagtcgccggcgatggaaggagatggcgttcgtcttgatccagagacagagggaggagttggtggtaactcactggtcacaccacctcctgctctactgggtcctgagatcgccgagatgagcataggggaagaaggagaacaaagggttcgacctcctatgtccaatattagctccagggagatggatacgccacaaatactgcattcacatgtaattccaatcgctgtatttgattcttgattgaatagattgttgtgaacatattgcatggtacaaacaacaatgacaatgaaatagcaggcaaaaaa

SEQ ID NO: 172593 - DNA, 521 bp, Zea Mays
agacggtgaagatcggacaaccgaacaaggtgagggcgctggacggtcggagtgctggactgctgaagtctcgggcgcggacaacgcggagtgcttaagaccggtgcggcggtgcctccagcctgctctgctccacgcctccatggaccacgcgcgacactagggtttctgttttggggagagagagagagggagagaccgagagggtgagggagggagactggcggcgaactgcctgcagccgcccgtgaccgagaggctgaccgtgaggggctgagacgctgagcacttcggtgtgtggtcgtgtgggccgtgtcttgtttcctatgggctgccttgtgggctgctccatatggggctgggctggaccattgcagtgatgtacaactcgtttggctcgcgagtaactcttgggccagctcgagtttggctcgttaaaaaccaagttaaattcttagctcagctcatgactcattttcaacgatccgagtcgagtcgagtcactaatgagttgagtcgag

SEQ ID NO: 172594 - DNA, 1288 bp, Zea Mays
gaaatattataaaatacaaaaataaattcataaatcctatattggtaagttcaaattgaatatataatctgaatatagacttgccacaaagtttggaaacttaaacctggaattaattcgaagtttgaatttgaaatagaaaaaaaagagaaaaggaaaataataaggaaaatcgcgcttgggccgaaacctgtcccttggcccatttcccaaaccccacgcgccagcccaactcaccatctgcgcgcatgtgggatatctgcctctgtctggcgggtcccacgtgtcggccacacctcattcctaggcgctgatgcttggtcactgcaccgtggggtcgtagctgtcagccgggcccatcatccctgttcgcgcgcggacgaatcgctgatcactgggaccggtgtgtcagctccttcttctttgctgaccgccgaaacagaatcccctaaatctgcgccgcccagctgccgttcctctcagcgcggactcactccatgcctctcaacaacgcaacgcggtgtttgcttgaaactaccgcgtggggccacctcgtcggatgaatcttcttcgttctgttaggattgtgccgcaaatccccattgccgaacgacgaagcaggatctccctggctctagggtatatataccggtggcactcccctccttgaaccccaagtctcgatggttagtatctacgcctcgccatgacctccgagcatgaggaaacgttggtgggagatcgaacgggaagcagagaatgggatgaacgggggagtctcggattgggggaggagaccgtagcatcgtggcctggatcatgacttgagcttatgggatcatccgtgtcgtgccgcacgttcctagcggtttgccggccgaggtcaacccctggagcttcatggcgcgtgccggagttggcggtcggcgtcacgccgtggaccgggtcgatcagcccccttttgcatcggtgagcccctttaacgtgttcaccatcttctatgccctctaatacgcgttactgtgtctcaaattgggggcgtttgtggtgctagcccgtgttcaccagaaccacaccatcgtggtgccgcacccttgctgtgggcgggagtctcactgccaccatcgccggtgcgctctattccattgaattcaccattgtccctatgctattttgcaccttcccttgcatgtggtagtgtgcgggatcgccagacgggtattgctccggcaatgtcgccgtcgcgtgggaaccgcgcgccaccaccatccgggtaatggtggggaag

SEQ ID NO: 172595 - DNA, 1000 bp, Zea Mays
cttttttttcacgtgagaatggcaggtgggcccgagcgaacagtgactcactgagaactcctctcacggtcacgtgccgtgtcgccgatgggtgggcccctgatgccagatcgttcgttcccaacagaccgcgaacctggcgggcgaaacagaagccgcacggtcctctgggtgctccctcaaccgaatcccaacagaacaccgatggccgcgtgaatcctcccaggctcgttctcatccggactctcggccatgctcgtcctcgccctaggctataaatctggccccgcgacctattctcctcaccccatcccagtaggaagcgccccgccagaaatagagagagggagagcggagaacctccaccgtcgtgccaggggaagtgtagcgccgccgtgggcggaatcgtggcataccatcgctcgggctcttgggttgagaacgtcgccgaaccccagtgatttgctcggaggacagacacatcatcgtggcctcgtacatcggcgtggtcacccgtagctgcttcacgaaacctggtagggatcttctcaattgattcgtctccctcggtagaccgtgtaggaccaatcggattggggggggcatggctctggggtggtggcttggccgacaccggcaggttctccaccgcgaggatagaagcgccgccgcctgctaaccatcgtgagaagaagacaggggggagatcgtcgatctcggtttgaacggctgagatctgatctcagtcctggcagctcgatcatgggaatcctcaccgtagatccttaatcctacggctcaggtacctgcgggagcttcggcctaatctcgaccgtagaatcctaatcgcgtggagctcgttggtcgataccccttcggcctgtgtattttgcagataagcccctcgccttattagaattgaacccgccgtccactcacgtgggaatttaattaaatctaggtcctgagtttcatagtttagaccctgacctttcgcaga

SEQ ID NO: 172596 - DNA, 307 bp, Zea Mays
tagtgtggttgcaagattatcggcttcggctgcggcggtttcttcagcatcgataggcataattgctttatccgccaaagtatggggcggggtatgttcaataatctgcatcacattcatcatccgttgtctcttctgtcccccagctttccccttgacagccgaagtggtttcctttgactgaaagaagctagtcagatctaaccttagaggacttagcggtgcaaataggatgggttcagtcattaccttcagaatttccgaaacctcagcgacagaaggcgaagaaggacctatagtcttctcc

SEQ ID NO: 172597 - DNA, 658 bp, Zea Mays
gaaaaatggtggcagtgctacttgtttcatggagcatttagcacatcaaaagaaggatgccatgaattatccattcgttcctcttgaaataaagaaattctttactcgtgagctagacaagacaaaggaaaagaagaggcagaggattcagcagaggcaatgtgcaaatgaagaagtaagaactcattatgccgaagaacaagatgatgattatgatgctgaacttcagtctgcactacatcagtctcgactctcgagaggagcatgagttcagtcaaaaagctggtgcatagtatgatagggatggtggatctaggtcgagttagcgggcaccgcaaggatctggcccactgcctaagatgtttagaaggactcggtcacaagttctagagcaggttaaagattacagtcttggtgtaagctgtggaccacgttaacaaaggatagacactggtccatggacgagtaaggatacaaggtcaagagagattcttggtagggcttggactaatgcttgtcatgccattgatattcgtagtagataggtggataactcttactttatggcagcaattattgagagtaaaaaacaaggtcagaaaacatggagtttgacacactcgttcttaataatttatcctaactatctctagcaggt

SEQ ID NO: 172598 - DNA, 735 bp, Zea Mays
gcgttttaaaaaatcggcccccagcccgaccggccagagacctcctttctcccaagccagcgcccgcgagctctcagctctctctgtctctggcgactcacccctccaccgccggcgaactcccagccaccggcggccaccatctccggcgacctcgtccccctcctctcccctcctcggtgagcggctctccctccctcctctctcagttcttctctgttctggtgagcagagcctcccacctcttcccttcgagcaatttcttcaaatctttgtgaaattttgtgaatcctgctggtggaatgtattgcattatccccattgtgtatccctgcaagtttttagctccttcgggagggcattcccacctccaatggccgtttcaccaaaaccctagatccccgcacaccacgtgctcggtgaaatgcccaaaccagccaaacttgctccaattgaacccacattttttaggcaccttcaccacacttccagtaacctacttgccaaatttcacgccaatccgagatcccaggcttaaatttcaccaaaattcccgttttgcgcgatcgtttccgagccgagtgcccaaaaccctatttcttcgcctaaattccaaccaagcacacacttcactcatattcacctatataaacctattcgtgaagtatcggctcaatcccatatcgtttcgtgcctcaattcgaattccaatcatcctatgtctctatttgtctg

SEQ ID NO: 172599 - DNA, 651 bp, Zea Mays
ctccgttaaataacaagaaaaatttagcatctccagtatcctccagtatgctcccaaactagcccttacatgccattctaggacggaagaaataaggacgtaacgtgcatcatgttaggcaaaaaaaaaaagtccacgtatcctctctcgcttcgttgcaaaagttgggcggttttaatcgatcgtgcagacaatgtgtgtacaaactactcatcacacgttataacaataaactgtcatcgcctattctagtagtatcagatgatgccaaatcaataccaaaaggtaacgaaatgaaaaggacaaagatccctacggatccgcagttcttcttctacaccagaaccacgaaatcaactcgaccaaaaacaacaatgggaaattctaaggaacaattaagaattcgacatatccagaacgattacaaatcacgagtaatgcataaacggccgcgcaggacgccccctccaattgatgaataaatattgcgcagaaggacgaacgagattaccggagagagcacggccaacgggaggggggattggatgccggggcgctgagcagaagagaaaaatgatttggtactgagatggggtggcgacgcgggagagagggttgatggaaatagaggtggcgacgacgtccatgcgg

SEQ ID NO: 172600 - DNA, 718 bp, Zea Mays
cctcattcttttcaccccttcggtcccttggtcaagcttctcgtaatccgggtattcaaagtttcatgcatccatcacccagttcaacgttcatttcggtcgggtgacgaaggcagcaatcatcaattggtcttcctttttggtatagttgccaataatttcgtatcacatggtctcgatcatttctggccactctttgcatggcttcttgagctgtttcttaaatttgaatcgataagggagccaaacaagttcgtacttcccccctcctttttcttaggcattccccagccactagaagtcggaaatgtcctatttgccaagtactcttgtactagatctctagtgctaatttcggcagctaccactctgaatccaacttcggctagctggcatggggagccaagctgcatgtggaacaagggccttgtcatcccgaagcttaatttcattggactcatgaccatagtcattaatttctcccttttcttctcgtccgcttttatgtaaaaccattcgcgtgtccaactggttggccacttggtgcgataaccaattacaggggccttcgtatctttctgatatgcaaagttgtaatagccaaagttcttatgaagaccatccgctctagccttcatctggtaatgcagctcgtgcacccggcagaaagcttcggcattagcactcataccttggcttcgaagagcccatatgtaga

SEQ ID NO: 172601 - DNA, 714 bp, Zea Mays
ataaccgaaaggccttcttcaagctttggaaatcccatacttttagctatctcccagcaaacggatatttctttgttgtccgggagacagtataggaaatcatcttcgttagtgccattaaacactaaggctcctttcgaatatttcagtctttgggcataatgtcttgcttccatgatttcttcttcggataattttttccccgaagcatgtcgaaaaatgtaatcaatatcttcaactaaggcttcggggacaaaagattttgctttttctgccatgtcttgccttgctgccttgccggtatctgaagtttgttgatcagctttatcttcaggcgcgacaacctttgtctcaacgggcgctgaaggcccagcttcggcctcatcttggactgtggcagcttcaacatttctcttggtaggtccagggctcaaggcctttgtggtctccaagacagcatccagcacgctggccatcctgttccttttgggagttgcagcaggagccttttgcaccttcggcaactttgcctcagctagtgggcttagaatttctggcattttcactattttttccacctgtggctcttcggccttatcatcttcagctttggctggcccgactgtaggcacctttggcactacaatcggctctttaacgctctacccaataggagcagcttgtcttgcttcggcagttgaagaggccccttcg

SEQ ID NO: 172602 - DNA, 625 bp, Zea Mays
cccaagtaacaaaacaactctaaccgaacttagcatttggccgatcgattcctaacccctttttcgtagcaccaccacaccacacatcgcaaacatagactaatccaatcatacttcacatggcaattatacagagttgcagagtgacaatattaacacataggtaagcgacatttcttcacgactctcggctaagtcaccaaacagatgacatgatgactacgaaggcatgtcaccatttcatcacacacattcatctcctatatgcgcactaatccatttcttgcgacatatgtactcaaaatcaatccacactacacaagtacacttatctcttatttatgcgcagatttaacacctttcgggataaagtgtcactataaacaccttacacataattgctttaggagcttattagttaactcgaaaacacccattcaaagtcataaacacaatcatacactatatgtgaagcacaatttaaggaacgcataacgcgtatagactcgacttataaacatagaggaagcaacaactactttggcatgccatcacctcactagttaagccaaaacaatttctacttatatcgaccgaacattcgcgtcgatcacaccttatatta

SEQ ID NO: 172603 - DNA, 808 bp, Zea Mays
tgacttcgttgtggaatggatggaagcccaggcactgccccctatcgaggacctagaatattggaccatgtactttgatgggtcctacctcaagatgggtagcggtgcaggactagtcctcacattgccccaaggatacaagctccgctacactatctgcctccacttcaacgcaaccaacaacatggtgaaatacgaggccctcgtcaactgacttcaaattgcagcggaagtaggagcacgacaactcatggtgagacgtgactctaagttgtttgtcaaccaagtcatgaaggcaatagagccacgctacctgtggatgtgcgcataatatagcaaagtacgcaagttggaagagaggttaaagggctttgagcttcaccaaagctatcagtgtcgagctctcgaccatcgcatctgggcaaaaacccatccttgacgaggtcttcacctccgacatacatgaaccctccatcaagatcaagcaaccaagggaagagcctagtaagacgatgggcaaccaagtcgaccatgcagcataggctcaggggctggtcgcaacgatcggtcagtagggctgacaccgaccatttatcaacaagctctctaataggatcctcctggaagacacgagtgaggcaaggcagttgtcccgcaaagcaacatcctctgtgctcatcgatggggaactttacaaaaggagtgctttagggatcaagcagaaatgcatcacagtcgaagaaggacgacaattgctcgtggaagtacatggagagacatgtggtcgccacgccacccccagatctct

SEQ ID NO: 172604 - DNA, 669 bp, Zea Mays
ggctgtcaggctgtttgcagtctgaaattcagactaacagtgatactgagtcaactttgaactggaaatcaaccctgatctaatgagaatttggccatggttgctatagcaagattgttgttggatcatcagacaacaactttgttactggccgatccactggttgccatagaaatttgagagagatttgagcccaaactttgactgtcaggtgcactgaaaggaactcgcgatggtacagtaacctgaaacagatcagatttacagctcagctcgccgccgatgatctccgccgtgattcgtgttgtcgccgtcttgatttgtgctcgggttgatcggataacgctcggagcacgccgtcgtggataagccccggccagtaaacaattccggtcgccgtactagggtcgccgcggtggaattagatgagatcgccggtgaccgtcgtctcacggccttacgccacgtatcgggacacgtccgtcgtgttgccatgactcactataaccatctgatcatcgccggtgagcgctgccatgattgttgccacgaatccactacgccagtgatcctcccactctccggtcgccagcacttctcagccaaattgagcgccaccgttgttgcgctctataaattgaagcctcccagagctctgtaggatcatca

SEQ ID NO: 172605 - DNA, 450 bp, Zea Mays
gagatataattcaagagcacatagcctactgagtgtggccacttatggagagctgggatataccgaaggaaactactgctgaatccagtgaaggtggcctagttcgattgaaatataccttcaaatttatagataagtttgacgaaccaaatgatgactggttgaaatgcattgaagctaccagcgacgagctgcttgggacattttccaaggccgaagatgatgccttgtccacaaccttcgggggtcggggcaagaaaagattgaacatggtgtttgatgcaattggcttcgtataccctgattatcactacccactgcgaaggcaaggaaagaagagaaaaactgccgcttcggccaccactgctgtgccgaagggcaagaaaatgaaggttctgacccaccggccgcgatatattgaaccggccgtagtgcctgaatttggcgaag

SEQ ID NO: 172606 - DNA, 366 bp, Zea Mays
ctctactgtctaaccgggcccacctggcagccttctcctctttcttttctcactgggcgcagagacctacctgtcggatcttccctcatcctcgggcggccgttgcgacgcttgcgccggcgacctcgcaacggactccgcgttgcgtgtaactcgtgcggttgttgcgtaccagggcccgcctcctagtgcttatataaccggggcactgttcctccttctcatctctggggctcgacctgggtgctgcgctaaccgagaacatccatggggtaggagagagagagtgagggagagaaaatctgtgcgccgctacccgcttatgatgtcacatggtctcgacttatcgctcagaggatctcaccg

SEQ ID NO: 172607 - DNA, 783 bp, Zea Mays
gacagatcaactttccccctccaatatctcactaactagtggatgatatctttcaacccccatacaagagagttagatcaggaagaggagaaggtgttgtgtatagaaatctcagcaagatcgaccatggatttgagactacacacgtgagaagaagggcagatgaaccatggccacgtgttggacacgagctggcactcgagagcacgcccaacctgtgccccctgtcggacaccaccgtgtccaagccacgcccgcacctataaaacctgctttgacccccagtaacactccccgcacatccttgaactcaccccgaatagctagtcaccagaatttcgccattgaacctagctccgccgcccaccgttctccccgacgcacggccaccgtggccagagctcaccgctccaccccagccccaactgagacatccattaaactccttatgccctagaaaagctccccagccattccccgagcttgctaccgcgctagtgccaccgccatcgttcatcggacttggttgctctaccggtgaacgtggaccggcctccatagcccacctcagttcgattccttcggtagatcgcaccaccgccatgcatcctgtaaagatccccaactggtcaaatcgagctctaccaccaccattctgctagaacacatgccaccgttgagctccaccgcctacgcatgcggacggagcgacttcgaccaccggcgtgacccttgcgacacccccaacctcgacaaccccttccctagagctctctcaccacc

SEQ ID NO: 172608 - DNA, 615 bp, Zea Mays
gagaaagattgctgcttcaggaaagattgctgcttcggccatcacagttgagccaaagggcaagaatatgaaggttctgactcaccggtcgcgttatattgaaccggccgtgatacctgaatttggcgaaggtacttcttcagctgccaaagcaaaataaactgttccgattaggcaaagcactgtagagccgagtgtagtaccaaatataactacagttgagccagccaaggctgaagataataaggccaaagagccacaggtggaaagagtgacaaaaatgcgagagatcctgagtcctctaccagaggcaacactgtcgacggtgcaaaaggcttctaccgcgactcccaagaggagaaggatggtgaatgtgctggatgttgtactggagactacaaaggcgttgagccctgctcctgcaaagaaagtcgctccaactgaaaccaaatcgcaggccgaaatcgaaactaggcaagcagaagccgaagatatacaagttcaaactgaaaccgaagctgggccttcagtgcccgccgagacagagcttgccgcacttgaagaaaaggcgacagagcaaactgctccggaaaagattgaggttcctgcccccga

SEQ ID NO: 172609 - DNA, 880 bp, Zea Mays
gccatatttgacagctctatcttctaccgtgaccgagctcgatcgggtattgcggtaggttgttgcgatcggatcatggtggttaggatttgtgggcctcaatcctatctccttgcgcctttaaataccggctgaggtgctctgcgattcaacaatcccgtatggcatcgaggctgggagatcgtagcatagagctgagcatcaaaaccaaaggaagaggacggagagagatcgagagagagaatggccgccaccgacgaaccgtggtctggctgccgtgatgactccatggtggttcccggggacctcgcaaggcttcgggagtccgctcggcgcccaatcaaactggaagcatgggcatggcgcgtaccttgctagacgacacattccatggcggatctgtactgcgctgctgtcgactccaccggccggtgagtctttacacccataaaattcgcctccatatattctcatcgtgggggccgttgcatgggagaattgggggctgtgggcgagcggggctcaactaaattctcgccggagcgctgtcgcttccgtggaactgccctcttcgtagacatcaccccctacgtctgcattgccggtaagaagaagtacctcctggagttcgcttaactcccctcgtggatccgtgcgtgtccactctagagctggggcaccttggcgccgggtcgatggacgccggtgtgttcaccgccgctgggcactcggtaccgcctcatgcggccactgggaggaagaagagtccctggtcgtttgtcttattttgaacggctacgattaaatcatgtcttcactgaaccctgaccgtagatccgtgatcgaaggaacgttatcgcgggtcggttcgatagggttg

SEQ ID NO: 172610 - DNA, 782 bp, Zea Mays
gacgaaatagggaaaaggtggggaaattccgcttgcaactcatcttcttgctccgaggtagcttcatcttctgtgtgatgactacactgcaccttgcacattttgatcaccttgtttcttgtggcttgggtcagggtgttgatgatcttgataggatactccatttaggtcaaatcaccatgcacactgagttcttccatgggtagttgttcctctagatctttgagacagttctttaactgtgagacgtgaaacacactttgcacattagataagtgatcaagtagctctagctagtaggccacttgcccaactcgctttacgatccaataaagagaggcgacaacctttgactttgaatctccgcatacccctgattggtgacacttttaggtatacgtgatcaccctcctcatactccaactgtctcctccgggtatcagcatagcacttctgtctagactgtgttgttctcagattttttataatcatctgcacttgtctttcaatttcctgaacaatttctggtccaaacagttggctctctccggtctggtcccaatatagtggtgttctacattttctcccatatagtgcctcaaatggtgacatctttagactagcctgatagctgttatcctagctaccaccatgtgtagggcaaactcttgtcctagctactccgtgtagggcaagctcttgtcctagctaccaccatgtttaagagcgcagtctctcaacatgtcttctaacacctgattggttcttttggtttggccaac

SEQ ID NO: 172611 - DNA, 464 bp, Zea Mays
ggaagatctggaatatcttcaatacttcaaccacaaatttgctcaaaggaaaccgaagaccagccttcaaaaagcttcgatagacaacaacttcgttttccttaggagcagggacgatgttgtctcctccaaccctcacgagagacatgttgcggaaatacctccccctcatagcgtcaatatgactctgtttgatagtcgactttccgaagatagtatgacttggccgccagggccgatcctcagaatcttcatccccactctctacgtcataactatcgctgtcttcagaatctatggataaaccctccatgatctccttagtaattttctctgtatttgtcttcgccatggattcaaaaaatccagcgatgaaaggatctgcaacctttttctcttcatacaacttcgtctcctcggttattttcttctcttgagtcatcttcttctccccactcatcttc

SEQ ID NO: 172612 - DNA, 676 bp, Zea Mays
ttcaagtcgactatttcagacattggtgataaaaacttccatgctctccccagcttcggttcctctagaattttaaatttcatagtgacacaagcaagcaaaactgtagaacaaacatatagagcaacgtaaattatgggtgaaagatctttcagcactaacaaaacttatttttagctgcaagtaatctcttcgatagaaaaaggagtgcacattcatgggtgcaatcatttgaggtggagcagttctcttctgtaacagttcctgtagcacctcctgaccctaacactttggtttaatttgtttgggcgttgtcgtgtccctcgtcaacgtttgatacgacacgaacaacattatacacaatagatcatacaaaaacagcaccaacctgcagcaagctagtcacattattgttagtgactgagtcttgcaagtgattacagtcataagcaggcttaccagaactaaaagttatactaaatactcaagcagcaattgacttacatccattaagagtgaaggatatgctagtccaatattcttacagccattaagcttcatacttcagttgtaagaaaagttgtgcacatggcttccaaccctctacgatcacttaattaccttttttcttctctttaagagatttcactacaaaataagagttccctacttgaac

SEQ ID NO: 172613 - DNA, 593 bp, Zea Mays
cccctcgccgccgatgacccacacgctcgaattcgcgccggcgctgcgattcatgcccaatagcacgcagataacttcgtggggtgaaaggatcttgcgccaaggatgaagttggagcactgtggccgccctatcgccgtgcccacttgcaccgcgacatggccggacaatcgtcgccgtggctgccgccgttcactcggtcgcgccacaccttaggttgttttaccacgtcgcagtagatcgctatagatagcccctctgtcgccgaggacatagccaagtgaatgccacgttcagcggcctccgatgactcctcccttttcacaccgtaggctcttctccatccaaattcgtcgtactcgcggtcgctctctataaattgagcattcagcgtgcttcgttagcttgttacgcgcccagtgcatcgctcctcacctccgattactcaccatagcccgagtaatcgcgattgtccccaattcggttctccgcgctaccgtgagtcaccacatcgtggaccgccgtctccaggtccgctctcgccctcctcgctctcgtttcagcacccttgtgcgctatggatgcttatcgac

SEQ ID NO: 172614 - DNA, 604 bp, Zea Mays
gagagctgggagatgccaaaggagactgtcaccaagtctggtgaaggtgagctggttcaactgaaatacaccttctgatacggagataaatttgatgaaccgaatgatgactggctgaaatgtatctaagctacaagtgatgaactgcttgggccatattcaaaagcggaagataatgccttatccacatccttcggggcccggggaaaaaagagattaaacagagtttttgatgccattggttttgtttaccccgactactgctacccgctacggggacggggaaagaagaggaaaactgctgcttcggccaccacaaatgagcctgcgccgaagagcaagttgaaagtccttacccacaggccacgttatattgagccggtcgtggtgcctgaatttggtggggagacttcttcagctgctgaaccaaaggaacccattcctcctacgcagaaagctgaagacccggctataatgtcgaaggtactctcagccgagctagttgagtcaaagactggtagagataaggccgaagagccaaaaactgaaggaacaaaaatgtcagaaattttaagcccttcggcggaagtaacagtgccgaaga

SEQ ID NO: 172615 - DNA, 787 bp, Zea Mays
ctgacgtgtcacgcgtgtccctgccagcactggcgctacgcgctccgtttcgtgtctttgccggcagacgcgtgcccccacggccccacccctcaaacaacgcttcccctatcgcgtcctgctccacaaacaggtcagcctcgccatcgcccattggtccatcttccacatagctgcttcacctcattgcctcgctccacgcatccgcgagtccttcccatggacgccacttcccactgccgtgatgcccccagatctgacctaggcccacctgcagttgcctccgctgaggatttggagccgcgcgccctgcctgtcccccgccaaatccgccggagcactgtcttcacagcgaaggcacgtcgtggtggtggtaccgcgacatgggcgtcagagcaatccttgtctaggcgaccgtagaaggttagtaccgatggctacttttttaatcttcccctcctcttcctcctctctgcttggcgttgcaacccccgcttcaaaagcaacacagatggcggcggctacgacaatggcgcagaagcaccgcggcttgcgctgcaaccggaacccttttctcagccacgttcaccgcctccgcccgaggacgacaatgacgaggtttgggtttgtttgcagcttcacgcgggtctcttggggttgggtgcgttggaaggttgtcgatttcttaattcgtggcaccaattttttggggttatttctcccgctctggtagaaggcgagggctcctccatttggtcggtcctaggctgatttttttacaaaactt

SEQ ID NO: 172616 - DNA, 577 bp, Zea Mays
gcctcaccttttgagggcggatccagtggtcgaagccggcgaacacgttggcgagggaggcgcagatggagacggcgtcgagtttggacccgcctatggcgttcagcgaaccacccgcgcgcgacggtggacaggtcatcgatcacaaattccgtggctaggagaacagagggcgagttcgcagtggccgaaaaagcttcaaggtgatgtggccatggccccgccggtgacgtgcccatccgagcttcaagggccggatccaagcgttaccgagagcagacgagggcgaaatgtggggcgcggacatgaagggagcataccagtgcatagcgtggcgataccccatccgcggatcggtgcggtcccccgacgaagcatcttcaccggcgagcaattgaccccaggccccatcggcattgtggacgatgaacgacggaggcggcttcccccagtccctctctcctcgctttctatcactgctgtccgcgacaagcacacagagctttactggtgtggctcagggtcggatttggtgtggccaagggatgcgaggtgcgcgcgacttggggaagaacca

SEQ ID NO: 172617 - DNA, 730 bp, Zea Mays
ctctctgtcccaccgagcccacctgtcagttcgtccccaacctcccgcccgcgtccctcgccgtggatgcgcccacgaccgtgcgttctccggccacattctcgagcccgcgcctctttataagccgcacaccgctcgcccacttcccgtcctctcacttgcgccctcagccgaaccctctcgcccccactctcgctctacgcacgcgaccaggtagctccgccgccgctcaccaaagaccgtcattcattctcgaccgccgtcgagcccgtgccacgtccattgcagcggtgagttctgcctcgccgttagctactcgggacgccctttggtttgcccttcccctctctgatttgcccggtccgctctcaccgaagcgtttcttgcgcaaccggagcctgtcgccgtcgacccgaggctccaccgcacccccgccgttccccaagcgtcccgaagttcgcattcgaggtgagcaactttcccatgcctttattttgccaagtatcgccccagtgcccacacaattcctcaccggagttgatccgcgccgccgtaggccgccttgccgtgttttgcgccctctggtgcccccgtgccggttttgcgcccatggtcgagttcgccagatcgccctgagcgcgctcgagctattctcgaagccctagagccccaccgtggccagtcccctcgtctccggcgagacttcgttgtgggatcgagtggcgccaca

SEQ ID NO: 172618 - DNA, 639 bp, Zea Mays
atccaattctggccgttggcctataaattgcgcccgggttccacttctttatcacatcccgcacctccgcgatcgagcactcggctcaatttcaccgaagaacccacaaatccctctctcctctgttcttgctccgccgtgaagaactccttcgtggccagcgctcctcgggtcagtaattatcaaattgctccctgtttcagttagtctttgatctcttattgctcttggatgcggcaaattgaagtttggccgaagcccatcaccggaacgcacccgtgcgatgtaaaacgccgccatgacaccctttccgtcgccccacctttctgctcgtgcctagcccaaaacttagcatgtgcgtcatctctggtgaacccaggaaccttttcccagcttcaatttggccagccaagccttcggttatctggaacagcttagttcacttgatcacccgcactgtcaccgtggacagagcttgatagaccacctctagcaaaattgattgggggggaaggtgcagtaggcatctaatttggtccctgtcgctttggagctccagccgtagcgtcatccggccggtctagctcgccgaagctcggctcccaccgcggatcgcgtcggggactccaccttgcaaag

SEQ ID NO: 172619 - DNA, 1156 bp, Zea Mays
ctggcgtcgactatgatgaaactttcagcccggttgtcaaacccactactatccgagttgttctcactttggctctgtcccgttcctggcccattcatcagctggatgtcaagaatgcattccttcatgggacactcaatgagacagtatttctgaacggccctcaggttttgttgatccctctcggccggagtatgcatgtcacttgaacaagtctctgtatgggttgaagcaggctcctcgcacatggcatcttcggataactggacatctcatctccctcgattttattgagtccaaggctgatttgtcattgttcatctaccaccgtggtgctgacacagctttcctgcttctctacgtggatgatattgttctcacagcttcagcaccgagacttcagcggattattgcagctcttcagccggaattttctatgactggtatgggtcctcttcatcacttcttgggcttgtcagctgagcgtcgagttgatggcccttttctctctcagaagcagtatatgctggatattctagagcgtggtggtatgtgtgcctgcaaaccttgcagcacccctattgatacccacgccaagttacctacagatggtgttccggtggctgacccaacacaattccgcagtatagcaggtgctcttcagtatctcaccttcactcgtcctaacattgcctatgcagtacagtaggtctgtcttcatatgcatcatttgaaggagtctcatctcaccgccatgaagcgcatcctgtgctatgttcagggaaacttggaccttggttttcatcttaactggacctctcttgatgacctcacagtctattctgatgctgattgggctggttgtcccgacactcgtcgctccacgtctggctatggtgtgttcttgggtgacaatctgatctcttggttgtcgaagcgtcagcctactgtctctcgatctagtgctgaggccgagtattgcgctgtcaccaatggagttgcggaggcgtgttggttgtgccaactccttcatgagctccattgccctctttgtcgagccactattgtgtattgtgataatgtcagtgttgtttacttgtctaccaaccctgttcagcctcagcggaccaagcatgtggagatttatctacacttc

SEQ ID NO: 172620 - DNA, 477 bp, Zea Mays
gcggggcttaccagcggcgagatagttccagcgaaggggtcgacgacgtaggggaggtcacgacggtcacgttgatgtgcgggtcgttggcgaggatggccggagttggtcagacctcgtgcgcatgcggggaagctcgtgggcggcgaggatctcggcctaaccacggcgggatagctcaatccagtgagttggggagcttcatgggaggtcagggaagtcgtaggcgcaaggaattgaaaaatggttcacctggtagcccggtctacgcgcggtggcgggtggccgaagtccagcgagggtgatcctgctgctccagtgaggcaatgtctcgactcaagctcgggaaagcttcacagctccacggggaagctatccaggggctcgggtgaggctaggtgtctacgggaatggctggccgtggtggccgacgctcgggtggctcgggcgggcggcgtagaactcgccggagctaag

SEQ ID NO: 172621 - DNA, 547 bp, Zea Mays
tgaatggcggcacggcggaaccagtgaaatccggcgaacaatcacagaggccctggtctcccggcgcccattgatccccacccaaaaccttcatcaacacccgcacatccacccggttcccctcacaagtcaaatcgttggctgaccggagctccctgcgtcatggcactgctcaccactcttcttccccacgcggtccgctgctgcgctggactcaccgaatcgcctagactacacggttttatagcccttgagctatgatgattgaccagttggcaagatgagggggttgcaaccgaatcgcacaaatccttgggaggccgctacgctggcacgtggtcaggccgtgatggctttagcgcggagtactcgacgcggaggctggctggtgggtcccatgggcaggacaagtgtgcggctggcgtaggtgagacagacatgtaggccttgggtgtcagcgccaaatccccagctgagttgagaaggagcgactgtgactgacaggtagaccctacgtgtcggtgccgacccatcatttgggatgtgc

SEQ ID NO: 172622 - DNA, 1142 bp, Zea Mays
aatggagccaactttgagtatgaattcaaccttgatttagtactcaaatgtgttaaagacctatagtcgaattgtagctggtttgtaactctacaactttggtacagaggtttgatgaagttcacatgcaaattttagagaaaatgtgacctaaacatgggctgtcaggcaactgaatggggggatcgccatggtacagtagctcgagtggatcagaatgccagctcagacgctcgtcgccggcgataagaacgccaccacggcttgggatgggtcatcggcggccacagtaaaagaatctcgcgacgtggcgttaaagcagagaggtggcgttttccggttaatcggcggccactgtgcttttagccgtggcagcgtggacggtctaccgacgtcgccgtggaagcgccggtgacctcggttgcgccacgccccagcttgttaccatgcggcggtaaccgtggcacccttaggagtgttatccttgcaccgttgcaccggtgaacgccacggttacagccaccgtgttcttccctatctccggccgccgcgtatcttcattcaaattcccggccaccgctcgctccttctataaattgagcacccaggtagttgcgctaggtaattgcgaagccaacgcacccactcccactcgtaatcgttcatctgagctctggaatttcccattcgccccaaattcattctccgccacccgaaactcaacctcaccgcggccagccgtactccggtcagtccaaccctccctctccctcgtttaagcattctcacatgtctacaatgcttgctgacccgtccaattggactaggggtccactgaccgtcgggaacacgtggatctttggttcatccgcgcgctcaccgtggccagaccaaattagttcaccataagcgcaattaggttgggggaaatgatcaaggtagccccgatttcatgtctgctgctcggagaaccttgttgttgccccaatcggccggtacagaggctcgccggacttcggcggtgcttgaacgccgtcgaggacctcacctgtgaaggaatagaacgttaggggtgtttctgcaatctgtcagcgactcatgagaatagtgtctgaacccattcgcagtttgacagaaacgcg

SEQ ID NO: 172623 - DNA, 551 bp, Zea Mays
gtagaggtgaaggtcttgttggttgagattgttggtttaaaagacaaaggtctgaccgctgaagctatggtggtcgactttgttttcaagaatatccagcctctaaagacagagttcaccctacatatgtgtataccggggtcatagatccttcccaggtgacagacaaacgaatttcaaaggaagacatcttgagtcgggtcgagatgatgctcaggggtgctattgtgaatgtcggtgctcctcgatcttactctgcctggaaccttcctccattggtaagttttgaccacttggtttcttgttcgacgtttgccgaaattttgtatgctttgtgctgatcgtgctattccattgttgcagagccctttttctgagtttgtatccaaccctcccatcattgaagagggtagcaattctagccatagagtgcagcgttccccagacaagatagtggccatagttgctgcgtactgagatctgcctgatgaggataagcatattcatatcttgatatgatggcctgccagtgactctgagattgaggccac

SEQ ID NO: 172624 - DNA, 538 bp, Zea Mays
acaagatctacttggcatgctctgccctcattgtctagatgttgtctgacatatctacataggacaatttggcatagttagaggccttcagttctaagaccaataacaatcacaatagaggaggcgagagtatcctatttagaagtcgttgatctcgatcataccaacattcatacaccgagttggagacttgcctaacgctagtaactatagaggaggcgatctgtttgtcgggcatcgacgtggttccatctatgtaacttatgagtttcacgctccttagaaacggaacaagttgaacgcatcataggagataattactcctgctgaggcagatgatgaccacatgatgtaagggaattagcgtgcatgtagacaatgaagcagaggcattggtggacatggtggaaggggaggagatagaagaaaaggaagaatcagtgggcatataaaagcagggacagaagacctagtatggtgaggtatatggcgcctgccgtaacttgattccgacttaagtaactctagcgaataactt

SEQ ID NO: 172625 - DNA, 554 bp, Zea Mays
agattcatcatcgctgaactggagataaggattaggttcccaattaataacaatgtggcatgtgcatacttaaaagtattctctaagaagaactgaaaaaatagagacaatgggtattccagttgaatttgcacatgaaaaacaacatcgtatgtcacttttacttgaatcattcaggccttcaagaggatagtgctaaaactatcaaaaatcagaagcacactcatgtagttcctccacataaattcgaaccagtcacaatgtacaagctctactcccctgtagtgttgaaaagaaccaaactggtactaaaacaccccaatgaagtttttaaataggcaaaaaacaacaaacatgtgtgccattctattgtcccaaaattttaaccaaatcatacatagagcagagtatcttcagttatcagttggtctgtactaacatgggtgcctatatttagggggcaactcaaacaaaccacctcaaatcaaagccctggtccaactaaatttcaagcgttcaaaacaattttttgcatcacgggatcagaaacacaa

SEQ ID NO: 172626 - DNA, 383 bp, Zea Mays
gcaaggtgtcaaacatcggtgctcctattgcgtattctgcctggaatctgcctcctcccaagactttcatcagttttgtgtcaaatcctcctgctggtgacagtggtttgggtcttagagtacgaccctctcccgaagaggttgaggctttggttgtttcgcttggtgaaatccccaatgatgagaggcaggttcattttgagatgcctataaacccgagcgatgcaaaaataagtgctatgctggacatgttggctaaggattcctctgattcggtccctgcttaaacactagctgtagcaactatcccagagcctagaaaaaccttggacactcagagatctgatagcactcgcccgaagcgtcctcgccaggccattcat

SEQ ID NO: 172627 - DNA, 324 bp, Zea Mays
tatcgaagctacaagtgatgaactgcttggatcatattccaaggcagaagataatgcattatccacagccttcggaggctggggaaagaagagattgaacagagtttttgatgccattggctttgtttaccccgactaccgctatccactgcgaggacagggaaagaagagaaaagctgctacttcggccactctagacgagcctgtgccgaagggcaaaaagttaaaggttcttacccaccggccgtgctatattgaaccgaccatggtgcctgagtttggcggggaggcttctttagctgctgaatcaagagaacctattcc

SEQ ID NO: 172628 - DNA, 649 bp, Zea Mays
ggtacactgctgtgccagtaaccgttggattcggttttaacggtgaagattttattatcctagatctaaccctggccgctggatcagagatccacgacccagatcaaaagatatcatggctgattcctaacggtccgatctagatcgagggtccggattcaatctcgaagggggtatgcccgggatccaatctcagtcgtacactctacatcctacggctcacactgattcacccccatcccaccctttttccttggcccgcatagcggcgacgccgtccagcatggcggcgccatggctgtgcatgctcagcaacggtcccaaggccaaaagtccaatcggagtagtactacgcgaggcggttacgatcacgagcataaagagataagtctcaccggttatcgcggcgtggagggcaccggccacggtgcagcacggaccgcggcggagcagaggcatcggagagcaattccagcggctacagggtccttccctctcccctgacgcccccataagcttccctgcatatcgccgaaccccaccgtacaccaatcgagcccccagcaacggtatgtctccaattagccgacggcggcgcgacgacaacccatccaccctccgccaacatcgatggtggccaggatagtca

SEQ ID NO: 172629 - DNA, 658 bp, Zea Mays
ccaccttcaagcgtcgtcaagaaaaaccagttaaaactagttttaattacattccttttaattatcttgtattcgccgtaattccaatgcccattttttctatatcttttggtaaacctccccacttttatgttgaggaatattcatggtggagtcataaaatgaaaagtcatttatgttcactccatcctaacatttgggacattattaagccaggaatggtgatcctctatgaggacaatgagaactatgatcccatggagttgcaagaactcatccattgtaactcccaagtcaccatgatataacttgcttctctatgcaagggataatataacaaggtgaataacttagagagcaccaaagacatatgggatatattgaatacggcgtatgaaggcaatagaatgactaaggtcaccaaagtggagctcatcgagggtgaatttaggaggtttgccatggagaagggagaagggccataagaaatgtacaatagcctgaagtccctggtgaaacaagtgcgaaactataggagcaagagatggacagattatcaagtcgttcgactcatgtaaaagttaatttacagttttggatcctactcttatttctttaatccgtgagaatcccaagtgcactaagatggtgcccgagg

SEQ ID NO: 172630 - DNA, 564 bp, Zea Mays
aaagaatgttggtgagcttcgcacgggcaaagaaaaatgctatgagatatccatggagtgcgataaaaatttaaagaatagtttctctaaagttggagccttctcctctgagcagaaactcatccgcggtgaccccaatggagttatctagtggatcagtggtgaggtcgaagcttttgaagaaattcttagtgatagaggggatttttgcgccttcgccggtacctgtggggctgtatcaattctggaaaaggtcggttgtgatcatgccaaggctatagttcatccagaacttgttttctcagccgacgatattaaaaacccttcagccgaagcttctgcattaggtggaaaattttactccgaagtatggatgaagggcggccatgagatagctgatgaagctattgggaaaaatgagaaataatctcacgacactcaagaggaaactaaaagagctgaagaagctgctcagcgcgccaggcttataggtacatctattgcggtctagcttcgtaatctgttttagctttagaactaacaaacatatactatggtgcagct

SEQ ID NO: 172631 - DNA, 372 bp, Zea Mays
cggtggcatcgtggtagtagtagtagcctggccgaagagcgccagtgtttggagcatggcggagagctcggccgtctcgatctggagctggcgctccaggctgaggatgaggtggtagcagccgccgacggggtcctgtgcgcgcatgtccgactggaaaatgagggtcgccatggcatcggcggagagctccggactgatgttctccagcgtcttgaggatctttctgacgccgaagagacggtgcgcgttgaggaagcgctcctgctggtccgcagggaagtagggcgcgagtgggcagtccgtgttgcacttgcgccgttggtacttgcacgccgcgcacgcctggttcgtgcacccgcttccacttcc

SEQ ID NO: 172632 - DNA, 539 bp, Zea Mays
cacgaccgcacgttctccggccactaccgagcccctgcgccccttttgaacctcgtgccctgctcgcccacctcccctcttccatttgcgccccctgcccagctccctcgctctgcccacacgaactgagaacctccgccaccgcccgctgacatccaccgcttgttccgtggccgccattgcgcctgtgccccatccagagccacggtaagcttcgccttgccgtcaacttctcgagacaccctttggtgtgccctccccctctcttgtctatccggtccgcgctcaccggagtggttcttacgcagccagagctctgccaccgtcgccctatcgcgtccctgtgcctccgtcattgccccatgcctccagcgcttcccctcaaggtgagcaacctccccgcgcccctatttccctgtatactgcactggttagcgtgcaattgctcgctggagttgccccgtccaccgttagctggcctcgccgtgtgcagtgccctttggtgctcccgcgccggcttggtgccctcggctgagtcc

SEQ ID NO: 172633 - DNA, 971 bp, Zea Mays
aatgaatcccaaaacagaacgcgatgttggcgggatgaaatcctttgattaccgatcaagctaacctctggtctctggcagattcgcggcagtcagtcactgacaggtgaaccccaaccacaagcgtcttcctccccgagatctcagacaatggttccccgctcgcatggcacaaatccgagctccacggctcaaccacccgtgcggagtcgccgggttctgttacagccaccgcgatccaacctccgctggagccccatataaacaactgaggcctcgctcgcccatcaaccatcgaactccgtgaagccctcaccattgtagcacccgagagagagagagaacgtgagatgtgagccgcggtatgggtcccattgcctcgggtgagtcgtgtgggattccctgggaagctctgcgcgtgcttggggtctcaccaggggagaatggcgaccggaatccttcaacaacgtcgagctgcgagtttaacagagactcatacgacggcggggttaatacaccgcaggatccaaggtaatgagctgacccttggattcctcgttctctccgcgtagtgtggctataccgaattggggaataatcaacggattatgcggattggaatcgccggccatgggcaccgtcgtgggctagtacgccaaggtgcggtgtccagccgaggaagggggaaggtgcactggtcgtccgttcgcttgtttaacggatgggattgaatcggccaggtgcggtattcagcgattgaaatccgagcgttggtctgttgatctgcggccgagagcggggcatgctattttgaatcgagatcatgaatcttagatctaacggctatgggcacataccggttcgcgtggcttgggatctaatccaggtgctcggctacggatccgacggctgagattgaagcttaccccttcaccacgctccttttcttaaaaggccctgcctttttattt

SEQ ID NO: 172634 - DNA, 656 bp, Zea Mays
caagaaaggagggtgccgccgtgggcgattctcgccttggctgtcggtccggccaaggggacccactcgggggaaagcgcggagctcaagaaggttgtgtggggcatctacggctgggggagtgccttgccgccactgggttttctcaccggagtcacatactcacggcggggccgccgtatctcgtggtcagcctcgtcctgcctcctcgtcggtgagttttaccccccatgaggtccgctttgtcctgctacgtgtgagtgatgcgccggtgggttgtgtgttcggacaccgggggcggcatgcgggcatgttgcagtcgggcgtcgccgcggggaagaccgtgcgccgtcgtgccccgtcgcgtggtggggaagatgcacgccagccgttgatccgggcgcctgcgatctagattagatcagccatacctcttcgctccgtttgatcatgaccgtgagatttagatccaagggaccggactgggttagggcgtggtcggttttgaaccattagatgaagatctggtggttcctattgcttaccggttcgggtaatagatggtttaatctaggccgttggtagaagatcgggcgggcaggactaaaccatagcccttcggccgcgccaaagttcataagagcccctcagtttta

SEQ ID NO: 172635 - DNA, 490 bp, Zea Mays
atcaagagagcattaaaatggcaccatttgaagcactatatggacgacggtgtcagacacccttaaattggtcagaacctggagaacggtggtatttcaggcctgacttagtcaaggaaacagaagcaaatgttcaatggataaggcaccacttgaaagaagctcaagcgtggcagaacagttatgcagacaaacgacgctgacccttgttctttcaagtcaaagattatatgtatctgaaagtatcaccaatgaagggtgtgaaccgtttcagggtagaagggaagctagcaccccgatacagtggcctgtttcccattctggaacaatgtggaccagtagcataccgacttcagctaccagaaacactgtctgcagtgcataatgtgttccatgtttctcaattaaagaagtgccttcgggttcctaatctaaccatcgatgtggtggatgttgtcttagaaccagatttgacttattcagaatatcc

SEQ ID NO: 172636 - DNA, 557 bp, Zea Mays
tgcggcactatataaacagacaggttggtgaggagttaccacaacattcattgccattgcattgttgcgctgttaaaaaatttaaccatagccgaagctttctgcattgagctctcgagcaaacgtgtcatcatttaagtttagcttcgtcaaaaagtgaaaacattgaaatggccagagtgcgatcgactgctagagtgtctcgcgagggagacgaggtcgaagtaactgagacgtcaccaatatcagaggtgatgaggcagtcgggtcttgttgtatcagaagaacctgttgccgaaggtattctgactgccgaagctgagggaatcatagttgaagagggaagtggtaatgaagacgaagaagattacaccatcttgatcccagaaaaacctagtcaccttgactttggtagatctactgcgatagcagatgatatggttataatgaaaaaattgggttactttggagaagccgagagtaggcttgttcgttttgctggcgaagaagtggtcccagagccgaaggatgatgaagttattgtgtttaaaagcttc

SEQ ID NO: 172637 - DNA, 279 bp, Zea Mays
gaggagggtatggataagtgaaagatgaatgaggaccatcggtggtaggagtgggagcatcgattgtggtaggatttttattgggggaggagaggataagagtatgcaaacagaggatgtggatttagggaacgaggatgagtagaaacatccttccgatgaggatgtatgggagaaatgacgtcgaagaagatctgcaccacaccgatagggttgacgagacgttgtggagattggtctttgatcatgtgagattcggattgaatgattggacttcac

SEQ ID NO: 172638 - DNA, 304 bp, Zea Mays
cccttggataaaaagatagcattctttgcacagaatatcgcttgcttgttgagaaaggtaataatggagattgaacgccgcatttctactcaagcagaacacataagaaatgtaaggaatgctattttatacttatttttcaaattattcttgttgtaactcttacttgtatggcagcaaaatagccttatcagagcacgtgaagagaaatataaatcaaggataagagtactagaggcacttgcaagtgggacaggtggacaaatgcaaataaattcaagtgcggcaaatggaaaaataaatg

SEQ ID NO: 172639 - DNA, 821 bp, Zea Mays
cgcgctgccgtccagctactccaataccaaactaagccgggctagtgacaacacgaacctctctacgtcgcttccgtctagccactccaataccttcttgcataaaacaaccgccaaagacaaacgggagaatctccgagtttaaaaaaagaagaagaagaagtagtagtagtagtgtatagtacaggacggacaattcaaagcggtttgcttcacggaacctcagcatctaatcacttccctgatagcccccagccccccactccttaaatttttagtttttcgttcctcagcgttttaggtgagagctttcgtacggcgtcatccccgggccagctggccagattgttgtttgtccgtgtcgatcgacaggtaaccaacgcaaccttccattccattttgatcctaccagtagcggggccggccgcgtgtgtcccattggtttctcagtgcgtgcgtgcgatgcaaggcgaggcagcagtagttaagcactggcatttcgtatgctaaagatgctaccggagacggatgaatttaaaagaactgggtgctgactctcaagaagggggatcaagtgagactgcaatagtacgcaactagaaagcaaaaaaaaaaaaaaaaaaaggcaaagtgtcagatgcaagtagccttgaggccgcaaggtggtcgcggacagactgaagaggttaatttgataactggaccaacttttttaaaaaagaaaaaaaaaactcttcttctgtaatgagatcctaaaattccggcaaggcgcgggacaaagaaaggtgccagtggctaatcacggatcgcgcacagctgcc

SEQ ID NO: 172640 - DNA, 576 bp, Zea Mays
cagtgggggcacatctaaggctgtacgtggaggcatccgagcgtgtttgatagcgacctcccggtgctactttggtatgctgcacatatgtccagacgtgggttggtgacgacatgtcttgtcatagctgtcgcaggtcaacagtgtcgggcgggtcctccaccttgcagcattggctgattcggagttggtcggccgcctcgtctcaaacggttactcggtgaggagttggtcgatcgctctgcctcacagagtttgctcgacgagttgttgcctcataggattgcttggcaaggagttggttggctgctctgcctcacaggattgctcgccgtggagttggttggctaatgggccaggagatggttggggcttacttttgggtacccgttccacggtacctgattgatagttttaagtatgtacacctagcccctagtggaaacaattttacatctaataataagaaaatgcagggataagaacctatgatgactaggaaaacatatatgctagttgaataatttcaagtgatgagtactctctttccttttacacatattattacaagtcaag

SEQ ID NO: 172641 - DNA, 272 bp, Zea Mays
tggggagggaacggcggtgacagtttcagtgggaaaatgaaagggtgcatggcgcagtggggagggagacgggcagtcacggcagtgggcgtgcatccaggcggtgcggtgcaacaatggcggcagcaaccgtgcaatagacgtgagcagttgagtgtgcgtgcgatgcctgttgtgtgcattgacgaagaagatataacaacaagcagaccacatgtcatagagagaaaaggagaggtctatgcgtccaaaagttaggagaggagagtggc

SEQ ID NO: 172642 - DNA, 1051 bp, Zea Mays
ggactgtctgggccggctcctctgcagcccagctcgtgccttcatccgccagcccacctcatacaactcctagtcacttccacgcgggacccatcggtcagtggcatcttcatccctttccccacgccgcgcggattcctggctccgtggctcggactccgtacgccgcttcctcaatcccatcggggtttccgtatcccacgcgcaaagctcgggttgttgggggcgagctgcaggatcacctcttctataaatcccggcacctccccccatgccatcctccatcaaccctcgagcatcgttgtcgccattaaagatcggaggaaagcgctggtgggtctcgtccttgccgacggtccaacctcgggcatcgggtcagatgggcggtcgggatcttagcctgattcctgggacccgttccagtgcatcgcggaggtgcgtatagatgataggggtgctgggattgctcgccggtcacgtgactccgccgtcgggccgcatctccaccatggacaggggattactccgtgttagcgcaggtgaggttactcccgatcgactcgcctcttcccctgcatggtgtagcgtctgttagtttggtaattggaacactggtgtgcgaatcaggcttccgctggccatggtccgccgtgggcgtgcgcgcgccgccgtagttcgggtcggctgggaagctgggaaagaagacagaccatagaccgttgatacgtgatggacggctcagatcgtgcgttgcgtactgccctgggcgatttgatcgtgaccgtagatccgtaggggaacgattgggatatggtgtgaacgtggcgctctgtggatcacaggatcgtgatccgagcgcatgtgtaatgtgtagcttgctataaaatccaggccgttgaatgtaatctgaacggctgtgtgcatccgataccccttcggccctggaaacttgcttaagagtccctgtgcttttctagaatcaacccgcagtactacaaatagtattctgagtcttgaaacaacttgcgcagaggcccctgtagttccctgg

SEQ ID NO: 172643 - DNA, 875 bp, Zea Mays
ggcgggtcgaggttactctgatgagcaatcccagtcgcagggaggagtgattgagtgtactagggctagcgcgagctccggtgaggggtttgggacacccagggcaaaaaagtaggcacgaggtggggccaaattgaccgagcaccatgcggatgcggtggaccggcgcgcagcgactccgacgagcgctaattcactacggcgaggtggaatcaaggcaaacagagcgcgggggatgattccttacctcggaatggcgctcgaggaggcttggcgcagcgttttgagctctaggtagtcaacacggcgggcaaggacacaagcgagctcgggcggcggcagctgtgcacgagaggggctgggagtgagtgaaatgaggcaagggagagagggcgggtgcacgcggggctcaaaaaggagttggggaacatggggcatgacgtggccggtcttctcggcgtgcgtgcgcagcagggtcagcggcagttgcgaggaagacagggctgacagggcgggtccatggcgcagagacacgggcacgcgagggtgaaatggcgctgacaagacgagcatgcggcacagagagcgggggagcacgtgtcgctgcgaaagttggcgacgacaggtgggaccgggctggcagagggaggagggatgcgagtgcgcgcgtgagcgtgagctgggccgaaaggccgagctgagggggtctgcgggctattttaccttttcttttattctgaattttccaatcccttttctttttattttctctattgaattcaaatccaaccaaaccacaaattcaaatttgaatatttcaaacttgtgaatcaaccaaaaacaaagtttaagctcatcatgatgtaacatttcat

SEQ ID NO: 172644 - DNA, 469 bp, Zea Mays
tagaagcttagggtcttggttgtaaataaaaggacctattggaaatattctttaaactaacctggattgcggattggttttaagaaacttgagggtcttttttgcattaatccctggccaaaggggtatcggcccacatcaaccgtccgattgggaatgtctggtctagattagatctcgaaacataaccgaaccggtacacaaggcctagttaaatccccatccaacgctcacactttattaggtttgatcaagttccatccgtcagattccgaatcaacgatccagacctgacctacgaaccggtatgcgatctcctaaccatacccgctgatgtatggttctatgactacaagtgctagaaaccaaatgcaagtgctataaacattgtaataggtctatacaacatgtctaagagtgcaaacctcacagatttaccattctactccaagttgcatttctagacccc

SEQ ID NO: 172645 - DNA, 462 bp, Zea Mays
aaggattttagagaggagttttatgttgtagttttggaggcagattgagcgatagtcaccaactgccaaatcatctggttttttggggaggagggtaatataggatctgttgatgctgtcgagatcaatggtgcctacatggaaggctcggaggacattcataagggtgggttttattgaatgccagatagctttgtagaaacttggcctaaagccgtcagggtcggtgcactatgggaaggcatggcgaggatgatgtctagggtttttgttgctgtgaaaggagcgtcaaggatggctggaacgatagaaggggtaaagattttggtagttgaaggtagggctatgaacgagagcaactcccatagacgtgttgtagtattcagtgatacctttgtttgtttcctcttgaccatagtggacaataaagtctacctaaatccgggcgatggagcacttctt

SEQ ID NO: 172646 - DNA, 372 bp, Zea Mays
tattttattctagtatggtctatacttttctcaatccattagatctgatctcactcttgtgcttgcgacatctttgtagatgccccctgaccataacctttttgtcttttgggattctttcctctttcatcattaagttgctatcatttggtaatcttatttccttggtattgacatgctcgtatccctggagtcttgaatactgttgtttcaatacctacctctaataaaaaaactctactgcctatttaaactttttagtttataggtccttggtcttactgtcttttgagaccctttcctattctagtgttaagtcactatcttttggcaatttgtactctcttggtcttagtatgctcgtaccatttg

SEQ ID NO: 172647 - DNA, 821 bp, Zea Mays
cttttggtggaggttgacgaaccaaaagcatatgtactgccagcaatcttcggaaacaatagatctcacaagtcatcttattcccgaagtaagaactaagcccgatgcaagtcactcattttttaatccgatagggtgattgtttaatagagctctaatgcataaatgtcgtttgagattgcatctttctcggccatgaccatctgatcaatggatgaaaaggtatagaatggaggtgccccctagcctgaatagacaaagggactatgcatgtatcatgggttcatcgtcgtaccattccatatttgaacatgacaatatatcgacgatgagtaggtgggtggaagtatcctagcatcataggatgaataggcgaggcttgttgcgtcacctttcgggccattttattcgattgttttgttttagaaggtgatcggggtttctttgtcggccgatcgcaaagaacgaccttcttgctagcatatttggagagcacttgatcgaaagtagggccggctttgaccaaccgaccatatgcgttatgtttgctttgcccctgtgtccacttttttcctttgtgtgaaggttgacgcctctgggcatgggcaccggaccgtccacgcaaaggtgtcgaaccgaccgctatgcttgggtcaggttgctgttctcggctgctcaattgagcctgccccccggtgcctctcaacttgttagtcttcttgtccagagccttatgaggaatcactccttgcgatatgtttagcatgcaaggatcaccaatgatgatgctttcgcccttgcctttatcggccatttccgac

SEQ ID NO: 172648 - DNA, 783 bp, Zea Mays
gagatgccgaaggaaactgctgctgggtccagtcaaggtggtttggtttacttgaaatacaccttcagatacagagaccagtttgacgaaacaaatgacgactggctgaaatgcgttgaggcgactagtgatgagttactggagcgtatacaagagccgaagatgatgccttgacctcaacctttggaaggcgaggcaagaaaaggttgaacagagtttttgacattattggctttgtgtatctggactacatttacccctcgcgaaaacaggggaagaaaaggaaagctgtcgcctcgaccatctctattgtgccgaagggcaagaacatcaaggttttgacccattggccaagatacattgaaacggccacagtgccgaaatttggtgaaggagcggcttctgctgccgaagcagaacaagctgctcctgccgttcagagagccaaagaattggcttcaataccgaaggtttctgcaaccgaatcagacgaagtgccgaagctgaagaaaaaacggccgagaagctagaccgagatgaaaaagcaggaccgtcggaggcaggattgtcgaaggtggcaaaaactcctgtaataactcccaagaggaggagaatggcaagcgtgttggacgctgtcatggagacgacaagagctttaactcctacccctgtgaagaaggttgctgaagcggccacgactcgtgctgaaaccgaagctgggccctcagtgcccgtggaggcagagcctgcctcaactgagcaaaaagctgagcaagaatttcc

SEQ ID NO: 172649 - DNA, 965 bp, Zea Mays
aaaatattttctaaacaaaattcgttgttttattaaatgtgtggactgcacgcataataacctgaaatcccagggttagtctgcaaacttctccagactcagactacagccgccaggactgcgggttgattcatcaatttgctatggtctcttaagcaaaattccctggccaaagccgtactgaacgatcacagccgtacaatctgattcgacggcccagattaaatcccttcgtttacaccaccgacgtgcatggtggccgttggatccacgatctaaggcccagatttaatgaatcccgcgaactacccctaccgtttatcgtgagatcaacgattcagtactcacggatctcatccgccgatcccgcactaatcttgtacacccggttatgatccaacggactggagactctccccccctcggcactgacacatggtggcgtagcccaacgcgcggtggcgagactgccaggattgttaactcgaccaacccgagcgccattttcaaattcgctcagccctcgcacaattgatgactcctcgaatctaatttccccaccaattgtagccgccatcaaacgcaggcccctgcccacggcggagccccgatttgcggcggcaccgacgtcgccagtccaaatccacaaccaagacccgatctcttgccctaattccaactctagaccaagcgaacaatcacacatgcgtaggaatgggaccttaccggggctaaggtggtgaaatggtcgtcggtccacccaaacggagctgcggaggcacaaatttccggagagaaaatctcgtcgtctccggctcccccgcgcttgcggcttcttcaatgagctaccgacctctctcccgcactgcctgtacacactcagagtcgataatcgaccttgcgaacaagcaatcgcgcagcgaatcacttcttcccctgctctggttcttggtgttgggcgaaac

SEQ ID NO: 172650 - DNA, 406 bp, Zea Mays
caaatagctgggtaatatatatgcagtggttaaaaaaggaccaccgcggagagacggaggagtttgacggcggcctggccccaagcccccaaccaagatcagccagtgctactggggttggggctttcgtatacaacggagttcatgagactgaacgacgacggccaacgaaacgaacgaaccaacgggagacaagagcacgcatggttcagacgcctaactctttcctctttggctttcgactttggactttggtggtggagcagagcagagcaggcggcaacgagaaggggaagagctttcatgttgtcatggtgcccctaaagaggaggcagccaggcgcgaggagcagcagcaatcgatggctgccttttgacccttctgtgccaaacccaaacgcatgctc

SEQ ID NO: 172651 - DNA, 274 bp, Zea Mays
gtcagatccgaatccgatccgaagtcgggcaggcatggattaggatattatcttctacccacgggttatccgttggatatccgaaatcgacccatagtgtattttttggcctagcccatattacatagcaaagaacagatcctaacaccataaaccccacgcctaacgctcccaatttctcactgttggctgccccttatagcattgctagcttcctgcgctgtgcctcgtggccccttccaagtctcatagaccatagcaccactgacggctg

SEQ ID NO: 172652 - DNA, 454 bp, Zea Mays
aaaagatggctttcatccgacccattttgacaaggtttgacatccattcttaggtgaaattaaccctttgacagtagcaactttggacttaattatctcttaatctagtttgcaaatggctgagaacccttaataaaacttgtagagtattgcgtgggaaatatctttgctaaagtgacccatgtccgaatccaagctgaagacgccaaaaatggccgcccaatgttgctattgtagcactcaccacgtgtacgacgaattgctgcaatggagaaacgtggccgccgtgctctggagcttctcctccataaatagcagcccacctctctctcccttctcctccacgccattctcctaccctcagccaccctcctcgcgcgctcggccacgccagggccgctcccccctgttcccctcaagctccagccgagccccttcttcccctagagcagcc

SEQ ID NO: 172653 - DNA, 491 bp, Zea Mays
gttgaaccaaaacaaaacaactttagtactctgcgtcaacaattaaattgttgtagtgtgaaaagatgtgttcatgtgtcagctagcactagagtcatagttacagccatactagaatgtggtgctctttctcttctcaaggtccccagcatgatcactatctgaaaaacccagaagatcattttcaactcccttgacatacttacagccatactagaatgtgccagctacaaatctgataattcgtttgatagcactgcaatgttctgcatttggattctcagttttagccgtggtgatcgcgttctggcgccgcgccaccagttcatctgtttgctgtgagtgtttgcgagctcgtctgatcgctgtgagtgttcccagtttgggtgctggatactggagcgagcaaccacatgaccggaaccagatcgctgctaacacagcttgatcagggagttctgggttcattcagttttggtgatggctctcgg

SEQ ID NO: 172654 - DNA, 454 bp, Zea Mays
cgcgcgcgcaccagccgttccgccggagaactcccgctctggcacgatcgtcgccgtgcgacaggctgctggccaaacgcgcgcgcgatagccgaggggaggaggacgtagaggaggggtaagccggctgcggaattcaccatgaccaataacttcctcacgacgataaagagcctgaagctgatcgagggttgcaaagccgcacaattatacgccttaagctccgttggggcagcctccacgtccggctcgggggatgccggagggagcagcaacggcaagccccagcctcctccgccgccaaagaccatctcgatgcggtccggatcgctgtactacccgcacgcggcgccgtccacgtcgggcgccttcgtgcccgagccgcacctgccgtgcggcctcccggtggccgacgccctcgagccggccctggacgcgtgcctgcgccccgtcg

SEQ ID NO: 172655 - DNA, 381 bp, Zea Mays
gaggagagctcattgcttaatgactctagctgagagatgaaatcctctgagaataccacagtcccatgcccatttgcctcaaagtatataccaatgtcatactccaaggcccttttgtgcagatatttcactcctgtaggagtgaacaccacttcgaggccaaggctcttcagaaactgcgtcgacgccccattcgcataagttgtctgaactattccaagccttgcagacaatgacttgtttgcttggccaccattgttattaacgatatctagctgctctctgataaatagggcaaacagagatagtatcttatctccatcaacaagatcaacccaaaaatacactgcatatgtgtttaccaaaaatcttgcttcccag

SEQ ID NO: 172656 - DNA, 342 bp, Zea Mays
tgagtttgatgaatcaaatgggtctcaagatgaaaacgataatcttgatgatgttggtggagctcaattgagaaatgctatgaaaacaatggctattggtgaaataaagccaaaagaagatggtgacgatgatgatagtgtggttgtcattcaatcctcttcaaccctaaatgaagaaaatcaccaaagccaacaaaatgatgaaggtgtggatgctcataatcaagatacttcaagttattcggtccctcctcatgcttcaactagtaattctcaaatggtatcaagaatccatcattctattgtgaaggatcacccaattgatcaaattgtgggcgacat

SEQ ID NO: 172657 - DNA, 395 bp, Zea Mays
tagaactacagaataatgaagcttttccagagatgtgagagagttctacaagcttcttgaagcctcagaggctaaagtgcatgaaggaaccagtgtgagcgtactgcaggtggtaacacgtcttatggcgatgaagtcaaagtacacctactcctacaattgttacaacgattttgtgaaactgattattgatatcagcccaccgtatcatagcatactgaatgacttgtaccattgcaagaagctcgtggctgatcttggcatgaactaccaaaagattgatacttgcaaggacaattacatgttctggaaggagcatgaaaataccacacattgcatccactgcagtaagtcaagatatgcagtggtgctagatgaggatggaaacgaggtta

SEQ ID NO: 172658 - DNA, 281 bp, Zea Mays
atgaggtgtgatagggaggctggagatagactaagactcattttcaggccgccgttgtctctgggttctgtcgtcgtaggttcatgcatgaaagatgtaccttaggttatgtccaacagcttacgaatcagttcgcacatgcgcattttgtgcgaccacatcccattatgtatacttccagcaaattgtcgcgtaaaatgtgtggtcgttcgtgtggccacacgttctcttctctgcaggagagggtgcgcactctcatgctcgagacactataaatgggc

SEQ ID NO: 172659 - DNA, 461 bp, Zea Mays
cgcatggcaaccacgtagataagaggcacagtaaggggaaaacaaggcatgggtgacaccgcggcggaagtgaccgagccacggcgaccgccggtgggatacctcaggccacgcacggctgggttcgcgggatggtgccacgtccgaagttatctctccgcgatcgactaccttcactggatcactcgagcacatccggttcaatagtgccttagatcttatccgtgttcttcagatatttacagtgctttgatcttcagcgttttactgaaccgaccacctttcatcctctctatctcctaattcttgttaaggatagggtaacctcccttaataaaatttgttccccaaacaatagtctttaagtttgttatagggttcatggatcaattctatatagattctcagatttggtgctctcaaagtgactgcatttcactgggaccattcttttctgaatc

SEQ ID NO: 172660 - DNA, 535 bp, Zea Mays
caagtagaaagagccaacagaatgatattggaagcactcagaaagaaagtctttgacaagaataaaaagttcgcaggaaaatggatcagagagttgccatatgtgatctggagcctaagaactcaacccagccgagctttgcatggaaacactcctttctttatggtttatggttcggaggcagtgctgcctgctgatctcaagtttggggcgccaagattgatcttaaaaaacatagctgaagctgaagctactagactggaggatgttgatatactagaagaagaatgattgaatacagtgattcagtcagccaggtaccaacagactctgaggcgctatcatgataaggccatacagcatcgatcctttgcagtgggagatcttgtcctccgccgaattctagcgggggagggacgacacaaattgtcgccactatgggaaggaccattcatagtagcagaagttactcggcctggatcatatcgtcttactcaaatggatggcacggaaatagggaacttatggaatatag

SEQ ID NO: 172661 - DNA, 553 bp, Zea Mays
aaagtcgtctggtttctcttaaacctatctagtattttgtttcctactaatgtcaataccgacctgcaagcctctcctacctcactcttttcgggatcactatttcacatactttaaaccacatatgaaattatgttatacattaggcacactatttgacgattcttatccacttacttacaggatgttgactagctttcagaccaccttgacaaaaaaatctggcatccccacctaagaagtatgtttaaaaaaaagaggagagcaaatgcaacccgagcaacaagttgcttccttttttacactatgtaccatagtcctttctaagttctaacattgcagaacacatacatgatcaaaactagcaggcttcaaaaacatcaaaaagattttacaggccctgaaagcgatgtccggtagatcaacgtcattctcatcaaggcgcgacataattttacacctcttctctacacacaacttctaatcaatataatttgtgcattgttcttcactctcctttataacctttgcgcaaaaatagaatagctcacaa

SEQ ID NO: 172662 - DNA, 661 bp, Zea Mays
gttagatcataaagactatccatcatgagttagatcacaaagactcaccttagcaatatttgctgacatctcatccatatttgtttttcctagtttagccaagttcttcacttttgctttcagttcttcatcaagccagagattgtgcttttcaagcaactccttctcctgataaaaccacataagaaccaacaggtgcaccatgcaaacatatgggtaaggctcaagattagatagtaattaatgcatcaaagagtaaagtagtgaatacagtaaaataacaactcttaatctcggtgttaattcatccattttatgttcataccagggaagtctctaccaggtttacaaattgcttgataataggtgatcgcaagagccagtgaaatgagggggaacataacagaatagctacctagcactgccacattgtgagatcaaatgcaagatgatgatgttgatatgataaagcttaatcaacattggacatcggtaaattgagaccctctgttcgattgcgcatgatgtggtggaagacctctcggacatgtctctagctggtgtagcccgtccttcgtggcggagcagacctcagcgagctagcctgcagcctcccgcacctcagcttcccgctcgccggtgagtgggactgacgacctaa

SEQ ID NO: 172663 - DNA, 779 bp, Zea Mays
gaaataaaacatgggtcaccacggacagtcacttcagccgtccccgacgtagacgagcctacttcgaaggacctcatcgatggagaccgcgtcttcgccctacaggccctaaacaaataccaagctcaaacgaaatcatggcgcgaccacacagtcatcccgagggaattcagcaaaggagacctcgtactagtccggacagctcggacagagtcccggggcaagctagagccaaagtgggaggaccctttcatcgtcaagacgaaggcgtcccccagcgcgtacaggctaacaacgccattcggcgaggacttagagcattcttggaacattgacaatctccgcaaattttttgtttgactcctcagggccagctcgcccttgtaattcgcaaaacagctttattccggcccgcactcttttcctcccggggggtgaggtttttaatgaggcggagccatgtaatatacacgcaaaaaaaatcgcccgcaaaaattacaacgtcgaaaaagaccgcatcgacggtcttcggcattcgaccacaacgaagtcaccgcgagaggcagcgctggctaccctcgcgtgcgacactccacgcaaaagtcgcctaagggtgcagccggactagcacaataagtgcgaaaaatcgaagacttttccaaaagactctccgtgcaaaagtcacctaagggtgcagccggactagcataggatctgccatcctgacgaccgcccggcgcttctgcgcagcgtcttgacggtccttgttcatcactgcc

SEQ ID NO: 172664 - DNA, 604 bp, Zea Mays
aagaagccccgccatcactaccttccctagggatagagaacctttctgacgtcgaggaggtgcccctagctagccttgatgatcttctcagggagtttggggacacagtagtaggaaacgctcatgcgtagtgtaatccctaggggttgttatgcttgtaatgaactggattgctgaataaaataacatgtttgcaaaaaaatgacatatgcatagtagtaatactttctcccctttggcagatggcctcggatagaaccacgcatactgcctcagggattggagcaaggattcccctaggtatcgaaggagaggacggaggggaagggagtgagacccacctccccgcacctccggagatgccactagttctagcccaagttttggccaactagactcgactcattgaggtcctcactagaagcctcaagaaccagcgcccgattggaggaagacctcaggacagaatgggagagttcctaaggcttaagcctcccacgttcgctggatctagcaacccgctcaatgctgatgattggctacgcacagtgaagaggaagttagaagccattggatgccctgaaaaccagcgtgttcacttagc

SEQ ID NO: 172665 - DNA, 1133 bp, Zea Mays
ctaggttagtcattcatcgcacgcgccctcgtggaccctcgctgaccacagggacccattggtcagttgaccgccgcgcgcatcggcccagttcttgacaccaccctcgctggtctctgctggtggggccatctggtcagggacgcggtcgtcatctcctccacggtcagctcgcgcgcactactaacaacttcgccggaatactcagttgtgctccaccccgactcaaccaaatcccgcgagaatcctactggtggagaccggactcgtgcgcactccgcacgtgaagccgcgccacgaccaagtggggtccttgaacgagtagcttctcctttctctgcggattgcatgcgggatgtaacggtgatggccgcgccattgtcgcgcgatggttgttgcgcccctgccaccctcgcgtctgtaaagtgagttgtggacctaggcttgttcctttcttcccctccttttaccttctctaccatcactgtttggcggctcggcgtcgagaggatttgcgccgccaggtttgcgttgccgcgccgtggccagactaccgccagcctctgcacgggatcgtcggcgaagttttgcgggagtccgccgaagcgctgtgaaggtttaatacctcgccgtgggggaaatcttggaccaagatgtcgggaatttctcactgttgggcgatgccatttcctttcgtggtcacagtatgccgcagccccaccatgggtaagtaaccttgtgacctgttcaattttggccccataggcgtaggccatactgtagaaagtttgcgggcgctggtagtcggctgggggttctccggtgggcgccgccgccgtaggttgggcgcgccgccgtgacttgtaggcgcgggatggaagatgacccatgtgtcgttaatctgacgatggacggtggagagtaggcgcaggcatgcccagtcattcctgagatccgcgtcgttgatcttgttgtttgcggctcggattagatcgcgacattttaatctcgaagccatcagatctagatcgggcggctctgggcgcgtaccggttcggtaaagtgaggattttatctgggcccgtggtttctaatccaatagctcagagagaaccatacctcttcgcgggcgc

SEQ ID NO: 172666 - DNA, 376 bp, Zea Mays
actccaacatcaacaaggcggaggagatctgattctgagacaacagacatatggttacctacaaacggcaactagctgttggggtcgatgggaggaatgactaccacagcagaattttggttcttccgcttgggcgccatcacaatctcaccggcggattgaacaaaggagaaattagagggaaacagaggaatggtttgaggcggaaatgtgaagctagggctcagaactcagaggcgtgcagcgatgtgttataaatggagttttcccgggttgggcaccgtttctaaaaaagtgccaagtcatcactcggggaaaacgagaattccgacatgactcggctgttacctctgaaacaccgacgtcatcaagcacc

SEQ ID NO: 172667 - DNA, 781 bp, Zea Mays
agaatggtggacaacgaagacgacgacgtggggcgagttcaggtaggatgagcggcacaacaaagttcactacgagcacggggacatggatggataaatcactctctggttaaggatacgagtcatgagaaggcggggagaacactactacaccggcggccacggtaacggaaagggcacggtgaacatgcagtgtttgcccatctcactatgcacacacagagaggctaaaggtttcatgaaactggacacgcgacctcataaccgtagcacacgcaggaccaaaatcacagcagggcagtaactgattgacagagaagcaggcagacagcttagtcaccactaggagataagctgcagacttctctagcctcagatatttgagtgctcaaaacttatccttacccacaaatgccaatgcctgtttcacttacccaaactgaccagaacagcaagggaacacagtggttgagatccttccatttctccacaacctgaactctcattagttacctacaccgagcctttcatttgcccacattggcttactgtcaaacaccacccaaccacagttacaaagtcccagctgaatccagggagtgagaagctttaaaacaccccgaactccagatctccaaactgaattcgagcagactgaaccaaagtttcagccacctgaactaacttgacgcccaactgaacccccatcttttccccacttttatcacacgattccaaatggtaacagggaacctaccttaacataaattgctctccaaac

SEQ ID NO: 172668 - DNA, 727 bp, Zea Mays
ataaaatctaacccttcagtaggctcttcgggggtcggagatttaatcttctcgggtgtgctttatttttccaaaataaaagtagctcccacaggttttgctttagtacaagttggcagtccggcttcggtaatatctggtgacatcctagcttcgtcaaatttctttggaatgtcgccttctttatcaagctttgaagcaggagtttgtacctttgtcgattctataatagcgtctagcacgctggccattctcctcctcttgggagttattgcaggaattttggacaccttcgacaactccggctctggtggcgggctcagggtttttggatgccttgccgactcctttagttttggttcttcaactgtttttccttagcttcggcaggatgcttcggcacttcggtcgtctcggttttctcctgtcccattgctttcgacacttcagctgattctcccttagcaccagcaggagcggggtattctggctcagcggcggaagaagtcccctcggtaagcttcgataccctggccgtttcaatgtacctaggccggtgtgttaaaactttgatctctttacccttcggcgtagcagagatggccgaagcagcaacttttcttttctttccctgctttcgcgagggatagcaatagtctgggtatacgaagccaattacatcaaaaactctatttaatcttctcttgcctcatttcttcggcccttg

SEQ ID NO: 172669 - DNA, 746 bp, Zea Mays
tgagagataaggcgatcgagaggtcaaacgacgtgaaaacggcgtttgaatgataaaaagtgccataggaggtttggaattcgaaatgaggcacgaaatgatgtggaattgagccgatacttcacgaataggtttatatgggtgaatatgagtgaagtgagtacttggtttgaatttaggcgaagaaagagagatttgggcactcggctcggaaacgatcgctcgaaacggggaatttggtgaaattaaagcctggaatatcggatgggcgtgaaattttgcgaatatgttactggaggtgttgtgaaggtgcttgaaaaatttgggttcaatcgaagcatctttggctggtttgggcatttcaccgagcatgtggtaggcgaaggtttaggttttcggtgaaatagctatttaaggctgtgaaaccctccctaaggagctgagaacctacaaggatattcaagagacacatgggaacacattccaccacttggattcactagaattgacaggaaattgatttgggcacaaaaggggtggaggtgagctcactgggctgaacagagagaagagagaggagtgaagacattgctgctcaccagagggagaagggatgagcgcaggaggttgccggagtacggtggacgacggtgcacggtggtcgccggtgagaggatctgatcgccagaggagggcagagagccagagagagggaagaaatctgagagcctctggctcggctcggg

SEQ ID NO: 172670 - DNA, 805 bp, Zea Mays
cgacttagatcaactccaagagaatgcgtaaaacaccccaaaaacatttattggccaataatcttctcgttttcaaccctccaacagtccctccattttctcccccaaatcgagctcaacccgaatacgcgctcctcctccctataattttttgccttggcgattccttccccaattagcatgagcgcgcgaaattggtcactcccacgaaaaatttctcgtgcaaggttttgtttggccttgaagtaggcgcgagaagcataaatggcgtctatcttgagtggtggcggcagtaccggcgacgacgaattgagcgccggtggaagaggaggctaaggtggtggtgactacttggagttggagatgtagcctgatggatctgctcctccaaatgtgaagacacaatccatcggtagtagcttcccccaaatacaggtgaccgacggaggagaaattgacctcgacggcagaggtaccttgcgtggaggtggagtacctttctatccatctatgcctagacgttcgagagtcgtcgcagatctggcttcatccttgttcgggtttagggacgagttatgttcatccttcgacttaggggctaaaggtatgaagcatgaccttcatagtgctcctgttcatagtctgcatgaatcaaccttagtatgtgataccgtcaggctgtattactgaccatcttcatcatcatactatttgttgttgttcattactgctgaacatcacattgccattttggttagtttggtttctgcttcatttcatgtttgtgaaagcccaatcatcgaat

SEQ ID NO: 172671 - DNA, 391 bp, Zea Mays
cgttgatcgctcaccgttgtgcgccacgtgcttaagcgctagcccacgtcgcggtgaatcatggtatgcatgtccggtgattgccggagggctgccacggtgaaagccactcgtcccgagcgccagtacctcttttccccttcggccgccaacacatcctcgtgaaatttgacgccaccgccattggaagctataaattgccgcccccgtctgctctgctaggtaattgcgcaaccagtgaagcaacccgtgcctcaaatcctcccctagaactccccaatttgggatttcccccaaatccctcaagaacaccgagcagtttaatctcgccgtggccagcgcgtctcaggtccgctcataccttctgccctcccgttttagcgttcttgtg

SEQ ID NO: 172672 - DNA, 1118 bp, Zea Mays
gtgggttgaaaatataaatcatgtgacatgtgattcgtgttttaaatgcgagatgtgcgaataatcggttagtgtttcactcgtctaatcgctaagtgttgtcataaataattgcgctaaaattgggttataagaatgcagtggtcacgtggtgtgtttgggtgtgacaagtagattaggagtgtggggtctgtcgaagcactgtgatgtcaaacatgtatatcgaagtgcattgtggtggtaattgcgttaagttaatcggtagtgtctcgagtgcatgccacagcatggttgtatgcgagacaaggtaacataaggtgtgctcgacacgaatgttcggtcgacataagtaggaaattgtgtttgcttaattagagaggtggtgacatgccgaattagtcatcgctttctcaatatttataagtcgaatcgagtcgatgcgtattttgtgtttattaaattatgcttcgcatataatgtgtgattgtgctcacgggttcgagtagacacttcaagtaaatcaagtagatttgtgatacaagtgtgtaatggagttagttgttttaggacaattattgaaatacgcggttcgtaggataaacatgtatgcgttcatgatttgggaagtaaatgcgtggtgactgcgaattggagatttgtgatttacgattcatatgagttggtcggtgtgcgaatatacttgtgaatctgtgggtttataaaaatgttgtagtatatgttgtgtctcggattgcggcaataaaaggcaagttgacgtgtacgttatctagcggcgatgtcgttgctctagttaaccgaatggttagataacttggttaagctcgtaatcgcagcgaatggcttgttgtggtctaaatgtgtatggttatgggcacgggtaaaaagtagtagtgctcatgtggggtctaattgaaaccccaaatggttgggtgattatcggggagaatgcgtcgttgattggttgtagtagttttagtgcactaaatgacttgaataaaatttgcaagttgacttgttggtcctcatttgattgttttaactctaacaaatggtaaagtgttagaatacttcaaatatctagatcatgacaattcttg

SEQ ID NO: 172673 - DNA, 1067 bp, Zea Mays
caaatatccactggtacgtgcttgaagcgaagaactctagtggcaatggatatgtgaagatcgaacaatcttggatccgcagcaagtggctaaacctcaatctcatcacactcttggaagcgggctggaggcaacggtggagtgacagagggagcgagagcattggaagcaggtgtggtgcaggttgtggatgtagcgagagtggtggtaggcactagagtagcggaagctggcgtggtagtggtggctagggtagagggttcaaatctggctggagtggagagtgcccgagatgagaggtgattgatacaaaattctatctggttagagccaatcctcatttgatctccttgctctgctctcttagctactgttgttgctcgagtagctctatccaatttgcgcttcttctttcctccctactgctctaggtagacttcatttcccttgtcctacctgaatgggcgaggatgatcctaatcatcacctcctcctgctggtgtggcattcttcatcctcaccataatgacttctgaaactgcccacagactactggcacgctacacaagaattagagaagataaacaagagtagtaaagtagtaaacaataatatggaatggaagagctagctacttagggcatgtctcccacgaaaaggccaagcaggggaagagtcacgcgatcaggcacaccgtcacactgaaaatgacaaaagaggtgagcatgagttagtcacatcatcatatagacatgaaatgtgaactaagactcacacccacatgaggtacatggggtttggattgcatggtcaaggttttcgagctttgggctttttggagaggtttttggcactagatagagagggaaagttgtattgggtttggtttttagagagtggcatatgtggtctaagggttttataggatgagcggctaggtcaatcacatatgtataagatgcaattaggaatagtatagaagacccgagggtagaaacctaaacatgcctatgagataaacaagaaatgctcaacaaaattgtcaaccatgaaagagtgatactggg

SEQ ID NO: 172674 - DNA, 650 bp, Zea Mays
gtggcgagccggcgaaccgcctggattgcgcactagtgtcctaaactttggaagggacggtgctacatgcaactgatgggatagcgaagtaggtcggtttggttttacctgaaacggtggcgccgatgttgctacccacaatacaggcagtgtttgcggaggagacgaactccggcgagcttccccgtggcactggttcgatctcccagcgcaccaccctatatgcgcaaccaatgcgtccactagaactcccagatcctgtgcccagaaacccagcgacggtgtgacccggtcacagggccatcctctccaccacacttgcgcagcggaagcggtgacccactactctctcatcaccgcgctcgaccatggtagcggctaccaaccatctcgacgagcacgtgagggtcagagggcatggcgcccaagacttatagaagggcaaggagggatcagatccgagagaaaggtgagggcggcaggaggattaacaaggaacgaggcgagttttcagggaggccgttgcaacgaactggtgcgtagaggcactggccagggctgtttgagctagaccgattcctccctaggatgcggcggcgctcactcgtgattgaagaagaataggaacactgctggcgcaagggacccac

SEQ ID NO: 172675 - DNA, 1211 bp, Zea Mays
tttaggactggaattgtcatcagttgctacttacatttgttctcccttctatgtgtttgccattgctattgcaggattgatccgactagtgcatgtagagttgaggtcactgtcaattcttacttcagtgtacgagatggtagaaaggagtataaccggggtaggccagtaagctatgttgttgattcagaagcatattctatcattgatctagagaaagatattgcttcagaatttaaatgggccagtgaacagcaggcaaatttctgggttctaacaggagagggtagtctgacatgcaagttggcttcagatgcacaactacttgacttgttaaggacatccagagtagtgaagttgttcatggtagtcggtagccgtgagcaaaatgtaagagaggaggagatggttgctgctgcagtgaatataggagacgaggagatgcctactgcagtaaatataggagaggaggagatgcttactacagtgaacatggaagaggaggcgatgcctattgcaatggaccataatttggaggtacatgatagaggatttacatgggcagaagtacctgaatatggggaaacaattggagggccaccaatacttgaggaggaggaggaggagcatttcagaactattgggtgtgatcctgatggagacgagcctgtaggagtagatgaagagtggaggtactttaaacgtacggaacatgtagtcattgatccagtcgatgtacacaaaagaaagagggctgctctagaattcagagactttgatactgaagttgtaaagaagttacaaaaaagattggagaaacactactatattcagttgtcatactttaaagtgtggtctggaaggaagtctgcaatggaggatcttcatggtacttgggaggacagttttgaaatgttatggaggttcaaagcagcactagaagaatcatgtccaggaagcattgctgagattgattgcaagaaaattaatgggaagatgcatttctctagaatgtttgtagcagttagagcatgtgttgatggatttttagctggctgtagaccttaccttggggttgattccacccatctaactgggaagtataaaggacagttagctacagcaacttcaattgatgggcacaactggatgtatccagttgcatatgggatatttggcaaagagacaaaatccaattgggcctggttcat

SEQ ID NO: 172676 - DNA, 441 bp, Zea Mays
ggaatcgcggccatggcgccgccgtcggcacacagtgccaccacgtgctggtcgtcggagggcagtaaaggaggaggagatagcgtgaccatcggatctctaacgaatggccgagattaagagctgagtaaagattcggtcagtagcgatggtgggcgtagatcgccgatcggacagctctagtatacggtagttgttggccgctgatctgcagatatgtggttggtagttgttggggcactatgtcgtgatccaatctaatcctagccggagatcgagaatccaatggcccatatattgcgataccccttcggtcacgtatacttgctaaagagtccctacatttttgcataatcagcccgccgtccatgcctagtcaatagtaatcgcagataggtccatatttttacaccgagcaccctgtcatctctagaaatcgaa

SEQ ID NO: 172677 - DNA, 2071 bp, Zea Mays
cttgtagtgactggggtctccgcagtgccaacaggcattggctggaggttggttgcttgcaacggagggggcctgaagggaactttgacccggatgactgaaacatgacagagtgggtccagctggcttgttgaagcttggtcccttgggtggaaacccaaaggatcaaattctctggtgcctgtcctgctgctgagctcggaggacttggaacttcctcttgaggtgacccttttcttcttccctagccctttctacttgtatggccttgtttgagaggtgcgagaagctgaggaagtcttggctggcgaggatagtcttgagttctggtcttagccctttcaagaaatgagccatcttcttggcttccgtgctgacatcgtcaggcgcatagtgagccaattctgtgaatttgtggacatattcactaacagatctccctccttgagttaattccagaaattcatcttcattgagctagacgattcctaggggcacgtgatgttctcggaaggcggcttcaaattctgcccaggtagcatctctaacgacagcgctgaaggtatcccaccaggctagggccatcctagaaagttgatgagcagccagatgaacacgctggttttcagggcatccgatggcctccaacttcatttttattgtgtgcagccagtcattagcgtcaagtgggttgctggatccagcgaatgtgggaggcttgagccttagaaaatctcccattctgtcctgaggccttccaccatttgggcgctggttctcaaggcttctggtgaggacctcaatgagtcaggtttggttggccagaacatgggctaagtctaatggcatctccggaggtgcggggaggtgggtttcactcccttctccaccaacttcttcttcagcacctgggggagaccttgctccaatacttgaggtggtaggtgtggttttatccgaagccatctgccaggggaagggattactactatgcacatgccatattttttcaaacatgttattttattcatcacacaagttcattacaagcatacagttgccacagatcacactacgcgcgagcgttttctaaggtgcttccgaactccctttctaaggtgtccccaaattctctgagaagatcgtcaaggctagccagggacatctcctcaacgtcagacaagctttctaaccttgagggaggtagtgttggcggggcttcctcttttcgttcagtctggcatccttggctcttggtccgcttccggattttcttagtgggggcgagcttctttaacttcttatcatagtccatcttcagggttcggtaggcttcacaagtgttggcatcttcaccttctgctatttcgagactttcttggagggacgccttttccttttttttaattccttgatttgttgctctaggctttccacccgggaatttaggtgggtgcagtgggagaaaaggtcgtcatagtggttgtcaagggtgtggagatatctggccatgtagactatggtggggtcatcctcagtaggatctcttccggacaaggcctgaagtcttttccttcaggtaggggtatttttgttgctaggtggaaagtaacaaaggggtgtctcggagacttccctgttgtagttttggcatagctggcggagggctttttgggcaacattttggcaagtgtctgggaatcagtgtctagtggaagtgacttggaagggagggtgatttgggtagttttggctttctcccaggtagactgccatagagcatttttcaattccattcttgtggtattccttccagacgtactccggcttcttacggatccccatgtgaagcgcgcaactccataaaagatgagggaatccttccacctctgagcagtaggatgtcctaatgacaaaggagccttccatctggtagaataaaagaagggtttgttaatatcggggaaaggagagaagattctttttagggggtaagaggtcttttcttttttaggcaaacttttaaggtgggggctgcgatctacggccagtcctatggctccgataccac

SEQ ID NO: 172678 - DNA, 294 bp, Zea Mays
ggatgagtgggttcatgggtattggagggggcgtaggggaggaggagggatgtgtggtttagggtttgggagccgtcgtgtgaccattgtgacggacggacgaacgagggagggaagcggggtcctaactgaatcggtcgaggggcagtctcaagtcgaggcccatggttacatgagagaaagtgaagacaaaaaaatataaacaatgtaacacacattagcatggtgaagtgtcgtcgtaaatgacaaacgcaggtgtggaaggaggtgggttcaggtttgatttaaaaaacc

SEQ ID NO: 172679 - DNA, 476 bp, Zea Mays
ttctttcctcggtgggtgttgttcctttcgccagagattcttgcgccatgatccgcttccttcgcttgggctgcacccattatcaggtggggtcgacctgtcaacccttctcccatgaccgccgcatgcccaacggatttctgatggagaagatagcgccggctcaccagtgaatcctaccgaccggatgcctttgggctcctataaactcttaaccgccttgtcgtagccaccgccgtactcatctgcgtcgagctgagagcgagggaaaatgcagagagagagcagggagatggagccggatgccgctgccggcgtcttgcgcgtatgccaccgtcgggtcctcgacgactgctctatgtggttcatcgggatccatggatgatgggcatgggctaaccagagcctggcgtcaagcacggggcggtcaatttctcactggagccacgacggtcgcggcgtaccgcgcattgccg

SEQ ID NO: 172680 - DNA, 477 bp, Zea Mays
tgtctcccctccattcggggtcttctctgcgaacccccttttctgcaagaaattttggtgatttcatcggcctctcgtgggtcatcgatgatgatctctttgcctttgcccttatcggtcgcattaggccgaaccaggacctttttatcatcaaaattgatcatgttcaccggaaagggttctatgtccacttgcatttcttgaaactttaatcggcccacgttaatgttcaccggagctttcttcacttttactaggtgattagatttgagctctgctttcgcttaggaatgccttcagagctatttcactttactagatgatttcaagcttaccttcggactgaagaccttagaaacaagcctcttgttcctttaactacttttgtttagtcatagctaggagaatgcacctttatttactttaggtactcttgtgaggtaatacatcctctaggcaacttttcaaacacaaaag

SEQ ID NO: 172681 - DNA, 920 bp, Zea Mays
gtgtgatcagtgtgctcggatactcggtggatagggtactagaatgtgttcttggtgctgaaaactataacattttgtttctattgttagaattcagcagtcgtcctgaacgattgcggaagtaagtgcggcgtgctggttttggagtcttttcctgatttacgccaattgatcggctgctaaggcatagaggtcgccctaagacaagtagttgtgagcatgttgcaccgtcttaagccattgctgacttaggccgattgctttgttagtagggtatagtggtcaccctaagacaagtagttgtgagcatgttgcactgtcttaagccattatcgacttaagtcgattgctttgttagtagggtatagtggtcaccctaagtcgagtaagcacgagcatgttgcaccgtcttaagtcattgccgacttaagtcgattgctccgttagtagagtatagtggtcaccctaagtcaagtaagcgcgagcctgttgcacctccttaagtcattgccgacttaagccggttgctccgttattagggtatagtggtcaccctaagtcgagtaagcgcgagcatgttgcaccgccttaagtcattgccgacttaagccgattgctccattagtagggtatagtggtcaccctaagtcgagtaagcgcgagcatgttgcaccgccttaagtcattgccgacttaagccgattgctccgttattagggtgtagtggtcaccctaagtcgagtaagtgcgagcatgttgcaccgtcttaagtcattgccgacttaagccgattgctccgttagtagggtatagtggtcaccctaagtcaagtaagcgcgagcatgttgcaccgccttaagtcattaccgactcaaccctggtggcctgactttgtgcaaggatgtcgtgatcccgatcat

SEQ ID NO: 172682 - DNA, 669 bp, Zea Mays
tggaatttgaattgaggcacgaaacgacatggaattgagccgatacttcacgaataggtttatataggtgaatatgagtgaagtgtgtgcttggtttgaatttaggcaagaaaatgagatttgggcactcggctcggaaacgatcgctcgaaacggggatttgagtgaaattgaagcctggaatatcggattggcgtgaaatttggcgaatatgttactggaggtgttgtgaaggtgcctgaaaagtttgggttcaattggagcatttttggctggtttaggcatttcaccgaacacgtggagggcgaagttttagggtttcggagaaatggccatttgaggtgtgaaaaccctcctgaaggagctaagaacctgcaggaatgctcaaggcacacagaggaacacattgcacaacaaggattcactggaattcacaggatttgaatttgagcacaaagggtggaaatggtctcactgagttgaacagagggaagagagaggagaagacaaggctgctcaccgagcgaggacaggagagcagcactggtcgaggacgtcggagagcagtggacgccggtgaggggtggtcactggcggggttgagatcaccagagacagagagagaggctggccagaggggagaggaaatgagcttgggctcgggctcgg

SEQ ID NO: 172683 - DNA, 776 bp, Zea Mays
ctgagccccgcctttgccgttgagctatggggatgggatgtgttcgccttcgtcagggaggtggaagcggaggccgtgaaaattattggcaactactcggcgaagacggagctgacgaggagttgggatatacgaggtttgaatgtcaggctaaatcgtgtttttgaattgaatggccttcagtatggtccataccctaaggagggttctgtcaacgtcggggatgaccgaggaaagaagatgacgatctgggcagacaaaggttgcttgaaagggaagactgtagttgcgcgactagaaaaggaagattggggtgaaaggtacgatgaaggcattgggggattcgagggccttagggggttttgttgaggagttggctgagacatgcactgggcctaaggaggtcatgacttcgctcgactttcgggaatcatcttcacgaatgttgaaggtgatcgaaggtgagtggcatagaaaataccctatcccccggacctccgatgaagattactttatgtccctcttggcacatgactttaaaatctttccttacagaagaaacattggtgctattgtgatagcagcgatagaaaaggatcgttaagagtcctcgccgaagaagaggaaggccccgctttggctggtggatccctatcgcgacgcgaaggcgctgtgtcctagagcgaagggccctgcagcggttgctgccatgccccctttggcagtgcctgcggtggcagctaggagggtgcccttgccaccgtgggctgatgcgg

SEQ ID NO: 172684 - DNA, 309 bp, Zea Mays
aaccagactccaccggctgtggtagtggtgaaataagctgccggacggacggagggtggtagtggaggaaacaaagaaactgcagtcaccgccggtcttggtgccacatttggcaagtcaacagttgcacatttcggctcaagggggaggatgaggatgaatgggatgcagtacaaaagcgtgttgcactgtaagtactcctctctcggtctggatggatagactctctggactgctgcctgcagcttgtcgcaggatgggcaacgcatacgcatgattatttggagccactaacgttgcacaatggtg

SEQ ID NO: 172685 - DNA, 462 bp, Zea Mays
gccagattcgccagttgtttggattcaacgagtcatcgactcgccttcacagcttgtgctacggcacctctgatcctcctcgtcgccctcacggtggagttgctcctggtacagctcacgccgcggctctgttccgaccgccctactcagatgggtcgcgatgttcaccgacagacttcactacagcggccaagtttctatatcagctcatgagacggacgcttctgccacggatgggttacagggaggctgccatctagctctagctgctaggtgccctggtctctcacttagagttggatgttgtggactttcttatttatgagatcgaggacactgtactggatggtctacgtgcccggcgacaactcccatatgctcactatctttgccacatcttcgctcagctgattcagccaccacagttctagggcactcttgaggcctctcgcctcctctttg

SEQ ID NO: 172686 - DNA, 795 bp, Zea Mays
gacacccttaccggttcaaaaatcagagtggcagtccttggcactattcatacgtttcactgacatttgcaagaacacccgctcgcttcaccccgaagtccacgatagcgaacagcgcggggccgagctccagtgagcttacaccggccgatttacgcaacgaccggtgctctactttggctgagaccaaaatcaaaccctaacaagagtttcccctcaacaaatttcactattagacctctaactcactctgcccacggtgaccgtatgatcaacagacattctaacgcgttcccgatgatctaaggcagcttagctcaattgagttggtcaaggagtatccggggcaggtgtgggtgctgaaacaagagggcagggagcacgaacggacctggagtacgctgaccacggtgagcaaacacacggggcaaggactggtgcaatggatgcgtaattatcctacgaagctgcgggtgcactcaatttatacaaggcttgagcggtggccagtgaatttgagttgggcgcggtggcgatcggagaaagaatgagtcactggtgcggtgattcgtggccttcaccgtggcggcctcaccggcgacgaaccagtagcagagagtggcttacggtgactcactacgacatggtaaaacgttgaggcacgcagcctggccagataacggtgacttcggtgatgccagcgcgactaaccatggcgggacacggcgactggtccggccagcgaccggattcaccccgcgctggatattctcaccacacccgacgttatccata

SEQ ID NO: 172687 - DNA, 864 bp, Zea Mays
gtccatgtgtgcagacaacgatgatcaacaacggttccgaatttaggtcaacgatgtaggtagagctcgatccgaccggatgggaagcttcacgaggtagtggtggtgctgtgtacccaaggaatcagatggaggtcggctggggaaaccgtcccacgttcaccgatggagcaacttactccagtgagcagtggtggctccggcgtggtagtgagctgggggagtgactggggaggtttactggagctcaaggaccatgacagtgtgcttggatggggctacgatagtgcggttcgctcggaccacgatggccatgcatcagggagaacagggggcggcggtgctcggtccaacggcgtttctggtggccggtgacttaggcacagtggtgggttcgagtagcactccactgaggccatgaggtgagctttatagataggcgtgggcatgggcacacgatcgggccgaccaacgcttcgggcgcggttgggcacatgtttggtcactcactagccttgccagccatggtcgaacacgtggtcgtttgcatctgcccctgtccaaacaatcgtttggcggccctagcatgcatatcttggcaagaatcatatgtatggtttcttcactatgccaaggcctctctggtttgtgtgagtcccgagtgtagatatggccaggatcaaaagatcttagggtgtcaagttggcactatctgcagtggcaattccgagacaaaacccatgccaaatcatgtcaaatgatcttgccttgggttcaaatttttctagggcgtgccttggttattttggcaccactttgtcaattagggcacatggttttgggatttagaactatatgaacgtg

SEQ ID NO: 172688 - DNA, 496 bp, Zea Mays
gtcggttttttaggtagagtcgaggtttttggctttatgttgagtttttctggttgggttttgtttggatcaaaaatcatggcatgtggttgacacgtggattattgaggttaaataaatacggtattatggattgtcccacccattacattgctcggttcagatttggtcacatgttttcaggcaagttgggtcgggtggtccatactcaagtttagtttgagatatgctcaggcttagttgatgttacagtttaagtcttactactttttagcattgttgattatttattatgtaagtgagttaattgatgatacttcatttgcttgctacaagatgcagttcatcttaaagtggagtataatgaagattctaggtatacattttataaatcgcacgggaagatacattactcattatgttctttgcattctatgaactctcctcgtatagtgaagattgtaggttggtgtctgtaatttttttcatcaaagat

SEQ ID NO: 172689 - DNA, 556 bp, Zea Mays
ggcctatgaaccattgaaatatatgaaaggcaggttgtagcggattttattgtagaacatcggatcactaatactcataaactagacatatcatacctcattgttactccctggactttatattttgatggatcagattgcaatgaagggcaaggaattggcatcgtgcttgtttcaccaagtaatgtctccttcgacttctctagccgactgaaaacttattgcactaacaatcaagccgaatatgaggcccttttgtttggcttggaacttttaaattgtatgggagtaaaacatgtgaaggcatttggtgattctcagctggttgtccaataggtattagaagaatatcaatgttttgatggtactataaatagttatcttgagaagtgttggggcataattcattcttttgacgaattcaacattcggcacatctctagagttgagaatcacaaggctaacaatttggcacaagatgcatcaggttatcggataaagcgagggaaatttcacaacaccgaaaatctgataaccggtacaaggccaattcccc

SEQ ID NO: 172690 - DNA, 350 bp, Zea Mays
cgccacggtaaaggccacgttgcgtggccaccagtgactcatcctgtttttactgatcacgctccgccgctcaaattcattgtgctcgcgatcagtctctataaattgaagccaccgtgagctccgcaagatcatcgcgtacccaaccacccagtattgccctcatttgatcactagcaagttccaatttcggatttcccccaaaaccttcaagaacactgtgtgagttgatctcgccatggtcacgcacttccaggtctgttcatgctctctgctgccttgtttcagcattagtgtgcttccctgatgctcctcgaccaacccaattacgctaagtcccccttaatcac

SEQ ID NO: 172691 - DNA, 608 bp, Zea Mays
ggccagctatacaagaagggggtcagtcaacctatgcttaaatgtgtcactgaaactgaaggcatccagatcctgcgcgaagtccacaacgaaacttgtggctctcactcggggcctagggccctcgctgccaaggtgacccgtcaagggttctactggcccgctataatctgcgccgcaaaccgagtcacgaggtcgtgtgaagcctgccagaagttttctccccattcgggcaaccctttgcaattcacaaagctgattgcccacacatggccacttcaacgctgggggctggatattgtcgggccactacccacggctcaagggaacctcaagttcaccttcgtcgccgtcgagtattttaccaagtggatcgaggcaagggtagtatccacagtaacgtcgaagactgaccagaaattcttctggcaaaacattgtttgccggttcggagtcccatccaagctcacagtcgacaatggcaaacagtttgacagacaggacttcagggacttctgcttctccatcggcaccaagcttgccttcgcctcagtatatcacccgcaatctaacggtgtcgttgagcgcgccaacggcaagattttcac

SEQ ID NO: 172692 - DNA, 688 bp, Zea Mays
agaaaagtaatcagccgtttgcaaggacaattgggttctgataaaacagaaagcattgcctctcatgggtttgtctgcgagtcccctagcacattcaaatgggatcagggtcatggcatgttcactccacttacttttgataaaagggctacacaggtattcaaagctcttcttgcttgcagaacttgatgtgcttgcagtctacttacactattttgttggtaccttgtgttcagaggaacgattgtgatgctgcccttgtcgctgcttttaggagggaacaagagaaggaagcacaattgaaggcagtaatagatgcaaagcagactgctgaacagctggtctgtagttcttcatgattttgcatctctaccttcaaagcacttaaagcaaaaatatacatggatagccatgtgtttgctgattttaatattctgttcctacgcaggtagctcaaaagacagaagaggtaagaagtttcaagatgaggcttaagtttcgtgaagaacggatcaaaagattggagcaggttgcttcagggaagttatctgctgaagcacatcttttgcaagagaaggaaaaccttgtaaaggaattagaggtcctgcggggtcaattagatcgtaatccagaaattacaaaatttgcaatggagaatctacaattaaaggaagagctacgaaggtta

SEQ ID NO: 172693 - DNA, 578 bp, Zea Mays
cgcgcgcgccagtaaccccctctttctctggccgccgcgcgtctccctcaaattcactggccaccgctcaagcctgctataaattgcgcacacccacggctccgttaagtagtcaagcccctcatccagcaacacgtgcctcgaatcatccactagagctccccaatttgggatttccccaaaatcaaccaagaacaccgagcggtgtgacctcgccgtggccaacgagtttcaggtccgttcatgtccactgtcctcttgtttcagcacccttacttgctcctgatactcgctgacccatctgattaagctaggaggccctagatcaccaggaacgtgttcactcatccgattgttcacgctgtctccgtgaaccagttgatgtagagcctcattggtgaaattgagtgaggggaaatgattaagaagggtccaatttggtgtctaccgcacgggagcaccggtcgttgtggaatccggccagtacaagctcaccggagctcggcccagcgctgttcgtcgtcgtggactgcgaactgtgaagagatagaagtgcaagggcttattcacaaatgtca

SEQ ID NO: 172694 - DNA, 283 bp, Zea Mays
cgagggggttgaatggctgcgggcgacgctgctcctctctgcggcggtgaggtcgctggagttgaggcaggcgtgagctaggggggtccagggtcaccggagttgggcagagagggagagggcaccatggcgaactcaatggcgggcaagaggccatgaatccacgggcagagaagggagaacgacgatgagaaggtctcaggcgggccggagtaactccggtgagccattccggccacggggaggggccttaaggcgcgttaagtcctaggctagcttcagc

SEQ ID NO: 172695 - DNA, 330 bp, Zea Mays
cgattggttgttcctaaaaatcccgagctcagaaagaaaatattggatgaagctcacctttccaaattttccatgcaccccggcagtaacaagatgtattatgatctcagatccttatactggtggaccagaatgaagagggaaattgctaagtatgtatcggaatgcaacacctgccagagagtcaaagctagtcatttgaaggtagccggtaccttacagccccttcccgtaccatcttggaaatgggaggagatttgcatgggttttattgtgggattacccaatacctctcggcatcacgattctatttgggtcatcgtggatagg

SEQ ID NO: 172696 - DNA, 366 bp, Zea Mays
gtgtgaaagtagtccattttcaaaacgtttatgagagcctttgacatttgattccaccggccttgtttcgcagctactgtactaatggcaagaggaaaaagcatgcacgcatgtgggagggagggagacagtggcaggagatattcacgatgagcagctaaacaagaggccggagatgaatgaagggagaagcacaccacatgagtcattggccaaaccaaccaaccaaccaagcaagcagcaaatgttaggtccgggggaggaaaagcaaataaatggatgcacatggaatcaaacgcagttgggtgggcgcggggcccaccctccttttcagttttaaagtctcccgtgtcctttctcgtttga

SEQ ID NO: 172697 - DNA, 313 bp, Zea Mays
gaagccgactaatcagaaagatagcaagtgaagtgatgagcaggtcgtttgggtggtgtccgagagaccgtcgtatttctggttgaagggtacttttggcgcatgtttgtagttggctgacgctcaagtgatgggttatcattttggtgatctaggtgcatctgatatgttagccttgtagctgctttctggcatgttgtcgatatatataagctctgcttaaaacctgtggtttcgcctggactaatgtttgtggaggctgatccttgcttatctagtatgatagtatgtaggggttagtcccactaggtgc

SEQ ID NO: 172698 - DNA, 819 bp, Zea Mays
ctgaataacatgtctcggtcgagcttcgaaactaaatataaaatgtaagtgaaagttgaactggaccatgagtttgtattgcaaacaatggtactcaaaactaagcacatatatttgacataaactttgtcataaaatacacttgtttaaatatgaataacttacttcacaatatccgaaaggttcggccccatggcgtgccttcctcttgtcggctttagtcaatgcttttatgatattcttatcaaagaattttatgcgaggtgtaccaagcttattttgaggggcaacggttgcatgcaggtgatccaggtaatacaactacagaaaatatttcaatgtgcaagggctgtgtaagtaaacataacaaacatcataaaatatgatatatcatgccccacaaaaaaacaatgagctaaaaaattgcaatatatgtacataaggcaaactctatacttacaaggacaacaatttagcatccgtatatcgtcgtggatacgtttgtggtgcttcggttacgccacttcttcgccgcttcacaaaggtcattaaatataagctggcaccaatcggtctcgtggaaactgtgcatttctttagtcagaagcacttcatggtttgttatgccccagctagcagttggaaacaacagacagttgaataagataaggaagaaacatctgatggtaaggtcatcatcctcccctttccttaaacgatcttgtagcaatgtcacattgaactcgtctttagccaaaccaagctctgccctcaaattacttgctgcaactgcttcgtcaatccccaatggttttccac

SEQ ID NO: 172699 - DNA, 702 bp, Zea Mays
ctatactcttctaagattaagcgttcatcgaaggactaataactttaggttcttcattacgagacactcagagccaacataaagatagaagccatatgctaaccttttaaatcattttaagccttatctcacatcatggaagcaagaatcgatttaagcatactacgcctgcccatatatccatccaagcatattctatacattatatcattccatcgaagaacacttttttaattatactatgcatatatatccatccaataactcacccaatctgcatctaacaaaattttgcaaatacaaactcattggaaaggttataacattccctaaaacttttattataatgagtgtctcagaattggtttccaaaccgataaaacaatgcaactgctttgttgcaaaactgataggatagaaattttggacaactaaaattcaaaatcctataactcctgctatactcaacttaaaactacaacgaacatgcgttggaaaagtttggaaattgtccacgacttttgcaataaagttgcacccaaatttatctttataaccctcaactctgcatgacctacagctaaactcaacctgagatactgcacatcagagattcgacttatatccggacaaccacctctcccaatctatttaataggcaattacaagtaaatacccattaaaaggtacttagaaaaacta

SEQ ID NO: 172700 - DNA, 460 bp, Zea Mays
aaatttccccagtttcagctcgaggacgagctgatcgtcgagggggagagatgtcatgtacgatcgcacctataggcgtcgtcgtgacgccagaagggctgcggagcgtgcggccaaggcaggtgccaccgtcagtggctaagttttggaaagttaggatctagtttccttttgcatgccttaattataggagagattggagtttccttttgcatgccttaattataggagagattggagtttccttttgcatgccttaattagaggagagattggagtttcctttagaggagagattggagtttcctttgatggtcgggccattggctatatatatgtcgtgtaatcagacttggaggaataagcaagatcaattatcccaaagttgctcctctccctcaaatctctcaagccgccggtgagaactcctcacggcaaaggcctggagcgcggctacgag

SEQ ID NO: 172701 - DNA, 441 bp, Zea Mays
ctgatggtggatctgggagctcgtttccttggacggaggagtcctcggatgaaggcttggattattttgttgcgttggatgtggctgcggtggaggcttcaccatgtgtggagggtgccgggatcttcctggtgcgagtactgggtgtaggcggcgaagggtggtgggaaaacatactgtgggtgaattttcgcgaagtggcaggcgccgtcgtatggggatggagcgtggccgtctttgagtagaccgggttggtaaacgagaattgttgtcctcgccgactagggcgagcataggcgagggggatcttcggaagctttttgagggtgagtaattgaggataatgttgtttaattacagggagatgggtatcatcccgaaggttgatccgatgtaatatgtgatgccctcaccgtgtgtatgtaattgtaatttgtatgg

SEQ ID NO: 172702 - DNA, 1066 bp, Zea Mays
tgcattgatcagcttggtaggtttgttggtgccttgactttagtgccaatgatgtcattggccctctcgacaccatggaggctctcctctataatccattggcaacagatgccaatgaagctactacaaataatggagacaagtcattgtcaggtttatagccactactagggtaaaccctagcccatctctccctacataacatgacccaaagaaggctacatcgggtaggggtgagacttttgcacgatcttgggctccaaccatggtctctctagctctagacattgggatgtacctcaaccctcagaaccatgctcaagagccattccttgacgttaacatgaagtgtcgtgctagttgctagaacaacaccatgaatcatagagcataccatggacctgcacaatgaaggcctagccccctagccatagttccttgtttggccccctacatcacatgtaaaccatgggcctacccatttagatctaggtgtgtggccctcaccctcgcactttgtttggtggcttatccctataagttttgcccccatctcctgaagaagtacgatgggacaattaacctcgttgagttcctatagatctatgccaatgccattcccattactaaggtgatgaggaggtgatggcaaattattttcatatggctttgatcgacttagtccggtcatggctcatgaacctctccgaggcctgtatttggtcttgagaagagctttgctggaagatcgtgactaacttcgaggacacctactctccgcttagcatggaatctcacctccacatagtctagcacctagctagtaagtccatggatacctttttgcaacatttttgttaggttaggaacaccattcctctcatcttggaacctccattttagtcaccttctatgtgatgagaatatgctcaagacgctgcccacccacaacatctaggacgttggagagcttctctctctagcaggcaagtgtgcacagggtgctaagggtagatcatggcacacccactttgagatgcatttagggttgcaaggcccctatacc

SEQ ID NO: 172703 - DNA, 563 bp, Zea Mays
gctgttcaccggattccaaaatccgataaatccgcgccttgccgtgcctctgagcgtcctccgtctccgtaacagcgtcggctcactgtgccctgtccttccaccgcagtgcccatgccgctgctttctcccaatctcttatatgaagcccctctgctgtgttgtcttccttttccccctaactggcaagcactcctttcttctcgtcgactccgtcgccgccgtccgttcctcttcttgggatccctatttcttttgtttcgattgatttccgtttcggcaccggattcatgtgcattggctcatcgttcatgtcgctcgtgtagatctgccgcattggatacctggcgaacaaccaccggtcacgaaatcgtccagtcgtcccttcttcagcgatttgaggtaatcataccaccggtcctcgctttgttatgttgctttggttttttggttcattgcagtacaccttgctttgttatttccagtcttcccttcttcagcgattctgacttcgagggtttagtgtaccttgctttgttatttccagtatctcatcagcctcc

SEQ ID NO: 172704 - DNA, 644 bp, Zea Mays
gaggacctcgctgacatagtagactggcttctggatggttcggacccctatggtcggtcctgggtcctcaacctcctggccttccgtcaacatcgtggtggtcggaccaccaccttctcctaggggaacttcctgactcccctggggatgttgtgccgtcctttcggcgaccagcaccatgctcaccaactctgaagccgctacaatgtataagtacaacagctcccccgccttcggagctaccagtattggaagggacacaaggtgctgctttaactcttgaaaggctcgttctgcctcttcggtccaagagaatggaccagacttccacaatagcctgaagaagggcagtgctctctcagccagtcttgagatgaagcggctaagggcggccagtgaccccgtaagcttctagacgtccttgatgcgggctggaggtctcattgcctcaattgtctttatcttctctaggtttgcttcaatgccccggtgcgaaaccaggaatcccagcaacttctctgcgaagacaccaaagacgcacttgtccgggttcagctttgtgcgtgttgcgcgcagcttgtcgaagacttgggctaagtcttccactagggtcgaccctctcttagtcttgaccacaatgtcat

SEQ ID NO: 172705 - DNA, 648 bp, Zea Mays
tgcaattcaagacgtcttgtgcatgtgcttgcctgctaggcgctggtactacatcgtgttgctgcttctgtccatgcgttgtgtgtggaaaagaagaaatagagacagcagcagcagcgttgggcacgacatggacagaacatgcatccatgttgatgctgatgcaagggaagctcatcgcaggagcagttcgcaaacgcgcgcaaatgctgtccagaacgagtccatcacaaggcttcggatgaacggcaactgagatggaggcttatccggatggatgatggtgtttatctgattgctacagacccgggccgttgagagatatccgttgtacatgcgtaaaggaagtccttatcggatccatgcctcaggcctataaaaaaatacgcaagacgcaaggggagaggacgcatcagagtagacctacaccaccatagctaggcagccgtcttagccacgccaagctagaagcaagagcaagcgtcgctgctaccaacccgagctacaccaccgtcccgctcagataggagatcggggacgaccaccgtagcatgccacttgagcccagcgttcggaatttctcaacggcgaggaaggccgcaagaattgctgcacgactcggctagcgtcgtctatgcctccatcgct

SEQ ID NO: 172706 - DNA, 682 bp, Zea Mays
gcaaagctcaggcgagctagactggccggaaggagccaagactggtgcccccgagcggctaacaccgaatgggaccttcccgatcaattcccccaacttaattttatggttggtaatctatcaagctctgtccatgcggaccacggacgatgaggacaattgcacgcgttcccggtgaccagtggtttcctagtgcaattgggtgggttggcgagtatcacagacgtatgagaatgcttaaacaagggagcagaggggaggagttgacctgaattgggttgaccacgacggggtgtgttttacggtggcggaaaccgaattgggggaaatccaaaattgaggctcactagcgatcgactgaggatgattcttggcggctgggttcgtgatgatccaacagagctcacggcggggtcaatttgtaccaagtgaaagcggtggccggggatttgagcgacgacccgcggcggtcggagaagtaagagttcactggcgcgcgattagtgtcctattaccgtggcagtcattccgacgagccatggagagtcacaagggttcacggcgatgtggtggacaggtagagacacgccgcggacggcggtgatggcttaacagcggtgagaaccttatccaagggatcagtgagcaaggggagaggcacggcggctagccggagtggcgt

SEQ ID NO: 172707 - DNA, 574 bp, Zea Mays
agcaggcaggctacacccatcgggatcagtttcagcaaccgcaggcaccggcacttcttcagtagcaggaacggaaggaccagcatcctgatccaaactagacactcgacgaagacctctcttcttctgtttcttcccgtcagcaggagaagcaggctaattggctcggcgagaacgcttcggacgaatgttgtcagatttctgaatatctaaagcttcgctatcctctaggatgggcgctaccgccagtgtttcagtagggactgcatcagaagaatcttcagctaacatatccagcatggcacttatttctgcatcactcggatttaaaggcacctcaaaatgaacctgcctctcgtcgacaggaatttcttcaagtgagacaaccaaagcactaacctcttcgggagagggtcgcactctaaggcccaaaccgctatcgccagcaggaggatttgacacaaaactggtaaaggccttggaaggaggcagattccaagccgagtatgcaacaggagcgccaacgttcgacaccttgcctctgagtatcatctcgagccggcccaccaagtcc

SEQ ID NO: 172708 - DNA, 793 bp, Zea Mays
cccggacccccgaagtaaagcagcccggagccattggatagggttcggaccccatcaagtgggctccggaccacccataacaaggtcccgggagagcaagtgttgtaacataggcataggtccggtattgacgcgtgtccaggctctatccggagcgcctccgctccccgcttagccgaaggtctaatgcggcctcatggctgattgtccgtgacgtaggccagcgggcggagcgtgacataagggctctgagccgtgcggcctccacattcattgcggaggggacacgccgcctgtccacccttctgataggtgatgtgcccccacagcatttattgcgtcctgtccattccgctggcaggcggcgccagggccaccctgcagacggtgcacctgtctagtccgttgccgaaacagtacgcccgtgctgcgcggtgtactgtactcatcccttatgcgagaagcttccccctgcacgccgagactatgcagatctcgggtgtcagggtgcaagaagattgctccaacagaagatattagtagctacatccactatgttcctaggcccacgtgtcggggctcagcactcttgtacatgtccccctttagctataaaaggggaggcatgcaacgttacaacacaggcggaaaaaggctcaaaaaaagctcaatctggaggcttggactctcaagtttccacagcaatacaacacacagtggagtagggtgttatgctccagcgacctgaaccactctaaactctcgcgtgttcatgtgcttgatgtttgcttag

SEQ ID NO: 172709 - DNA, 396 bp, Zea Mays
gaatggactagtaccatgtgcaagccattagacacatatctggatgatgacaatgttggtgataatgtttaacggttgactgcaaaatcgggttctttaaccagatccatctttagacaagtactgatgcaagtgttccaaatggatccttaatgaattattgggcttaactacaaaactaagaacgaacaaaatcctaaatcaaatgaacacggattaacctgggagccagattgagatgtgcttcgtacctgaggaaggcaagatctacggtccaagagtgagcagtgaaggggagaaatccggatctgaggatgtcgtcgacggtcggagtggagggagacggatgcggcgacgaagaatagcctcgacggagttggatatgtcggtgcttgc

SEQ ID NO: 172710 - DNA, 319 bp, Zea Mays
ttgagggcagccaagtgtggttctcgtggatcatgcatgtggagacaaacctgatgaacaacataagcaatgtctggacgagtgaatgtaaggtactgaagagctcctacaagactgcggtaatcagtgggatttgaaactggagtgccatcagaggggagcttggggttcacatcgactggtgtagtacatggcttgcagtcactcataccagcttgctcaagaatctcaatcatgtactgatgctgggaaagatagatgcctgaggtagagtgctgaacatgcatgtcgaggaaatgttcaagtctgccaagatcct

SEQ ID NO: 172711 - DNA, 327 bp, Zea Mays
atgcccgttagttcctcgggaaacacatctgggaagttcgatgcaaccctgatagcctcgagcgggttggcctccttgctatcaactgaaatctggtgacaatcacctttcgctattttaggcatccttagctcagccactaccttctctccgggcggggacttcaatgttacggtcctcttgtcacagctaacattcgcttcatacttcattaaccaattcatccctaggatgacatctaccccagcggtgtctattactattaggtcactagggaaccctatcccccttatttccacccttacatttgagcatattttatctgct

SEQ ID NO: 172712 - DNA, 702 bp, Zea Mays
gactgtgcgatgccacgtgttcgatcacttgcctgaccgaccgagcgcggattggccgcggcagcgcgcaccccgtgtgtggttgccccgccccgcgcgtctgcgcctcgccctcgcctataagtgctcccataggccttatacatatgcacttgtgcacccaaagccccgcccgagccatagatcaccggagttcgccgttgaaagcgagcgccaccgctcgccatcactgcccgagcacagccgtcgtggctaatcttttccgtcgacccccagcctcgccctagtcccaagatagcttctccgagaggttgtgaagcttccccaagcttgagccaaggcattgcctcaccagagatgcgggatcaccctcgcaagacttcggccgcccaccaccgcgcgtagaccgagctatcaggtgaaccattcttcaattcctcgcacacatgccttccctgatccctagtgaagctcactgactggtttaattgaactctaccgccctggataggccggggccctcgttgctgatgagctcccccgcctgcgcatgtggaccgacctactctgaccatccccagcgacgatccacacatcggcgtgaccgtcacgacctcccctacaccctcgaccacctcaccggagcaatctcgccgcctgtaagccccttcaccctttcctccgccgtaggtactgtttaat

SEQ ID NO: 172713 - DNA, 466 bp, Zea Mays
ctcttgagatgagctaatcctttttagtagagcctgagatgagatgagctgagcttgcccaggctcctgtgtgtcgccacttcacctcacctggatggcttgcatatatctatgatgaggacagacctactcctcctgtgcttctcatccctcatcacgcttttgtgtcccaatcccagccaacaacgttggctagagtgcctgtctgtgctctctacgacagctcaatgcagaactcccttcatagcaagtaggtgagccatgaattatctgttactgttttcatcagttgaaaattggagcgatagaagaatggtcataccttgtacactactccgtactcaccctgccaagttctcgttcagttgaaaaattgcatgtgatggcttttcaaaaattctattggcaaacatattggttctgcagctggatcctgcagcttcttctccaatttttcatgttcaag

SEQ ID NO: 172714 - DNA, 379 bp, Zea Mays
cctcaacggagcgtagcgttacagagctgagagcgcgcagggcagccgccaccatgggacctctccggcgtctgcgattggaggccaagatctggacagggagcttcaccgacacccacctcgtgtttgcgtgacctttcggggtggggaatggcgggactcgtcgggaattcgtcgctgaacctggtggcaccgccgcggagccgccggtcaccatgggcgggggtctacgccgcatgagcaccggtatggaagctctcaccatgatcaccattttcccctctatgcgatccagtcgtcggtaggatagggggcacactgggtggggaacgagtgtagctccggcggcactgccgtcgtgcggggaccgcggctcgcc

SEQ ID NO: 172715 - DNA, 545 bp, Zea Mays
catctcccggcagacagataattctttgttatcagggaggcaatataggaagtcatcctcatttgtcccattgaacaccactgctccctttggatattttaactctctggcatagtgattggcttcataagtctcttcttcagataattttttccccgaagcatgtcgtatgatataatcgcatgtgctggcaggagcttcggggacggcagtgtcaatctcctcaaccaaaactggttctgatgttttttcggtttccaaagattgttccttggtgggctctgaaggcccagcttcagcttcagcttcagcttgttgcttcgaagcttcagtagacgcttcagcaagttcaacagtcttctttggagttgtgcttgaagacataattgtctccaagacatctagtacgttcaccattctttttctttttggggtcaccaatgggcccttttggatttttcttgtttcgacatttgctgaaggacttaagatttccaatattttttgtccttcaattctcggtttttccgccttctctgctaaag

SEQ ID NO: 172716 - DNA, 361 bp, Zea Mays
aaacaactctgcagcttgcttcaaattgttgacacgtgtccatgcaccaatctcaaagaaacagagcccgcagccactttcgtctcgcctcaacccaaccattcagcggctcggctaacagactccaaaatagaacatgcagccacctacgattagcttcctgcaggtcggctaacagacacctcgtttttctcatctacaattgttgattcagttgttgtgccactgtcgccgatcattacctctcctgcgtcgcttctcagcgattcacctcttcctcgtccgagacaaaggtaatccagcaatggctaaaatctatcagtttgcacatatatttttaaggcaatcatccagcaccata

SEQ ID NO: 172717 - DNA, 417 bp, Zea Mays
cgagcggcggtcctaggcgacgttgacgagcgacggcccaggcgatgtcgtcgagtggcggcccgagacgtgagtgtcgtggcagccgtgacagccctaggcgtgagcggtgttggccgcgtctgcccgaggcatgatcggttgtggtgattgtgacctctcgaggcgtgatctgtggcggtggcgatgaccttccgaggcttgagtggtgatggttgtggtgaccgtccgtagtggcatccgaagacaacgatctcctccgatccggcgcatcagagggcgtcctcctccgacgaccaccttcaactcgatggcctctaaggcgtcctttgatctagtagcctcgggatcgtcctctgacgatgatttattagatccatgtttatgtcattgatgattatgctttatgcctactac

SEQ ID NO: 172718 - DNA, 361 bp, Zea Mays
ccacccccaaatatatctagctagttcactggatatggacagaggtaaatacagataaaaaaactccacggcagcaagggatatcccatgttacttaccctcccacagcaaagcttattcctatccataactgccatagaagcagctggattcgttagtggatgtagatctttactgcagatatttttgatccctattgaactgccactgcttgactgaactcacaacttcacccctttatttttcccagctccaagcaacaacaggggaaccgaccttaaggaaccttgttcaccaactaacccactatcaatcttccatacagatttaagccttataatccttagatcagacactaaac

SEQ ID NO: 172719 - DNA, 629 bp, Zea Mays
tgggcgctgtcatttggctaggtgctcgatgatatgatgggccagggtcgatcaggggacggctagaatgctccttcctttggttgttcgggaggaacgatggtctgccggaggcgtggtggtcgtggtcccgtccgtccaggtatccagggccagcaggaggggaacgaggaggcgtgtgcggcatggccgcgtgggggcaaccgctggaacagcacagcacagggcatgtcggtttcttctttcgttccgggcggcagggggacctagctagacaatgccacctacactactatgagctacgagcccgtgtgcccgcctggttactgttccggcatgcagctcgcgtgtcctgtgccgaacaatccggagcatttgggcatcattacattgttcagctagtagtacctagtacgtatcaggcagcagaggctaatcacgaatagtaatagtagcttgagccccccgccccaccccgcttactgatcagcagtagtgcccacgtactcacacgctcctggcaggcagctagctggtccgcccgctgctactgacggtagcgcgcagctgcagcacgttggtctcctcgtctgcaaacaaaacatgcagggtggctgtcacacgacgac

SEQ ID NO: 172720 - DNA, 1081 bp, Zea Mays
cctcggacgctagagtcaagctcggtgaagaactcccgtcgaccggtcatgtgatgagtcgccggtgtcgaggcaccatccttcgatcatgtctttgctggagccgtcgccgaggaaagtgcgtgctttcgactcatcaaggtggaggattgccgttgcggccggtgccgctggagatagctcgatgcttgcatgtgctaggagcatagcctcctcctccgcctccgcctgtgcgacgttggcctgaccacgtcgtggctgtcgacagtccctggcccagtgtccaagcttgccgcagttgtgacagtcgtcgtctcgtgccagcttcttgttgccgacggcgccgccttgggcacctccacgggcaccaccctcagcatgttctcgcgccccggcctgtgcgcctccacgcgccttgcgcggcttgccacgtttgcggcctcgtgtcgaggactcccccttctttttgtcactccggcaggcctcccactactcccgagtgagatgtagcttcccgccgatagtgataggcccagagggagcctgtggttcgtcgccgtcgaccaccttgagacgacctatcgcctcttcgattgtcatcgtggagaggtctagcagagactcgatcgagcgagcaatctacttgtacttctcggagatgcaacggaagagcttctcaacagctctctcctcatcgtaggtgtcgtcgccgaactgcaccatcttttgcaacacagtgttgaggcggagagcaaagtcatcaacatcctcacctgacttgaaggccaggttctcccactccttgcgaagtgcctgcagtgtggtcaaggcacgatcgctgccgatgcgggtcgcagcgatggcgtcctaggcctccttggcagtccgcttctgggaaagcgaaaactgcatctcgggcgggactgcagcaatgagggcatccagtgcccgtcgatcctcgtggtagtcgacgtcgccgtaccgaactgcttcccacatgtggcgaacctggagccgtaccctcttcactgcggcccactcgacgtagttagtcttggtgagggtaggccacccaccgtcg

SEQ ID NO: 172721 - DNA, 482 bp, Zea Mays
ggtgggcaatggtgacagagtgtcgatcggggcgaggatagtgtggggtaggtgcagcggccacctcccactcttctccaaggcgggtgatagcgatggaggtggcggggtcgatgcagcagccaccttcctctcttctctgaggcgagcgacgacgacggaggtgctcatgtcggggggaccaggcggggatggcgtgacaacagcgaggagtcgggggatggcgtgaggtggatctgagggaggggaggttaacgagaggaatcaaggagtcgggcggtgtggattgtggcatttaatgagcttgcgtggcaaagaataccaacccaaccgtaggatccaaatctgactgtcctgattctaaacatcgagattctccccgatccatccgatccttcatcgacgcaagagaagagatctcccccgaagcgttacaaggatctaatccagaccgtttaccatggcatcgacggtcatccaat

SEQ ID NO: 172722 - DNA, 563 bp, Zea Mays
gtcgtcttcggggtcgtgcgggacatggtgagggccctgcccggagcagagatcgaggcgtggcgcggtggcgtcgacgtcttcttcagggtcgtgcgaggcgctcaacctatcgcaacagagacgacgaagggataagcgagagaagatggagaggggagaggaccacggagattggttggagcgcaacgcgacgcgggcgggcgaacgatggcggaggatgcggacgcggaggggaggaccatggaggatgcgtctgcccgaagcagagatcgaggagcgttgatggcggggctcgtagatggcgggctgcgttgatggcggggctcgtagatggcggatcgaggatggcggatcgagggtgcgttgatggcggccgcgctgcagggccccggatcgcaggatcgacgttgatggcggctggcgtcgcggtgatggcggggagcagacgggcggtgggtgggcagagggatcggcagaaccaaaatgtggacgcctacagtagcgtcttaagagtagtagagatgtccggtggtcggatgcctctccccctttgcttccct

SEQ ID NO: 172723 - DNA, 1368 bp, Zea Mays
ggcaaccagtatatgagtatagcctccctgagccttcttgaaaggtccaatcatgtcaagtcccccaacatgcaaacggccaggttacgggaatggtctgcagctgctgcgcgggcaagtgttgttgctttgacaagaattggcacgcttcgcacttttggactaactcggcagcatcactcttcgcagttggcaaatagaaaccagatctgaaagcctttcccaccagtccttgatgcagcatgcactccacactgcccaacatggatttcatctaacaattgtctcccagtggccgagtggatgcatttcatgaagactcctcctgcgcctcttctgtacagcaaaccccctatgatggtgtagtgggctgactgccttgcaatgcgttctgccatggctttatcatattgctcttcttcattctttatgtacctgatgataggctctctccaatcgttgggatctacctctggctgactcaaggcgttgcattcttccacctggtccgtgaggatgctcagctgtgatatttcttggacgaagatctcaggcggagcatgggcctgactggatcccagcttcgacaacgcatctgctgctgcattgcgatccctttccacgtgatggaactccaatccttcgaacttgtcttccagttttcgcacagctgcacagtatttgccattgaatcggtcgagtagtcccaatccttgtttatctggcttatgactaccagtgagtcgccatataccatcagcttcttgatgccgagtgatactgtgatggtcagcccatggaccaatgcttcatattctgccgcattatttgatgctggaaacaacagctggagtgcatacttgagttgttcacctctaggagcaataaagagaatccctgctcccgctccttgcagcttcagcaatccatcaaagtacattctccacacttcagtaacttctaggctatccgggacctagtgctcagtccattctgatataaagtcgaccaacgcctgagtttttatcgccgtgcggggctggaactctatgtcgtgagccccgagcttgcatgcccacttggctatccttccaatagcttctttgttgtgaagaatatcccctatcagaaatcctatgactactataactttgtggttgtccaagtagtgccggagcttatgagcggttagaagtaccgcatacaacagcttctggacttgaggataccttatctttgagggcccgaggacttcgctgatgaagtaaactagatgttgcaccgggtatgcatgtccttcctcctcccgcttgactactaacgcagtgcttactacgtgagtcctgtaggagatatataggagcagat

SEQ ID NO: 172724 - DNA, 553 bp, Zea Mays
gtggactctaggatgggaggtggagacgcaccggtgaaagagggtcggagcgtgtagaggggcccgacgctatcacatcgggcgagtggggtcctagtggctagatccttcacagaaaactagaaaggtcaaactcaatggaacaagaattgttagtggtgaaccaatggacagaaaggagattatgggcgatgtgtggggctacgaggacgtcgttgagatagaacggtccaaggagtaccgaggcacctactgatgtgactggaagagtggaaccgtttccaacgacgattgaggtaggttgtgtagaatgaggtgggtgtgaacgagatagcatgcctatggtaggggtggtgtggtatgcaccgaagtcgatgagccagccagaagatggtggagtcaacgccatggtgctgtaggcggcgatgagaggttgggtcccagcctctagtgaacgaggtccagggtgttgtggtaggggtccccctaggcgggagcggaggcgaggccgaggtcatcgggggcgcaccgtacggaggcattccgtacgctg

SEQ ID NO: 172725 - DNA, 654 bp, Zea Mays
cggccgaagtccggcgttgatgatcttgctgttctggtgaggcagggcttcgattcttgcttggagaagcttcacggctcctcggggaaactttcaaagggttcggttgaggctgagggtctccggaaatggctggacacggtggccggtgctcgggtggctcgggcgggtggcgtagagctcaccggagctaaggatggtgtctgtccagcgaagatcagtgcggagtgaggtatggcgcgtttggggtggtcttaaaggcgcgggcgagcatgactgaggggtcgctctgacacgcgctcagggtgtgcgcgggcgagcgccagtgcgcgatctggcgcctagatacgacgtcgagcacgaggcagtgcaaagagaggtcaagttcaagcgcagattggctccaaatcttcacgattatggccatgatcccgttgagagatctcttcccctaacattcctttgtcgtttgtgtgtggaggcttatgggtttagctgactggatcaaaagatatggagggatgaagtttggtttgtcccactgctgaactctgagaggaaatcctagatttgacgtgtctagggcacgaatctcgatgccaacttcacacacgttgtagaggggttagtttagaacaattttttcaatgggga

SEQ ID NO: 172726 - DNA, 396 bp, Zea Mays
aattttctagtttggattttcggggtgctacaaggggctgacgtcatagggctgagaaaatagatgtaaggatgcgacaaaaaaaaagtctaacaaggaagtctaactatcatgatcgtgccatgtgcccccaaaaggtcctaatgaccttatcgttactatttgcgaggagtctccccaatcgggtgacctcttgcgatcgtcgcttgatccaccctcgttcggcgccacctccttccctttctgggatgtttcttggcttgcagcaccctactcctagcgggcaacatcggctttaggagtcactttcccctgatgaggcatgtcgcatccaaaagcctctagcatcagtctgagtggacatctggaaccaccttgagcatcaggttgccaccg

SEQ ID NO: 172727 - DNA, 312 bp, Zea Mays
ggagggtgcctggggtggccggtccacggtgcggtggcgggcgctcgcggcggtgaggtcgccggcgaggctgccgagcgcaataggaggcggggatgggtgcattgtgtttgtgagggaatggcgaagctcaagaactatatgaattagactagaacttagcagagggagaagagcgaggctcaccggagcaggggaaggacgcgacggcgctggctcaatcgagctcggggaaggaggaagagggtggccaaggctggtgtgaggaattggggagctcggggtggtccttttataggcgcccggggcggg

SEQ ID NO: 172728 - DNA, 1102 bp, Zea Mays
aagcattggtacatgggctacacatcgacgatttacttagcgccaaggggctgatggtgtaggactctctagtggtgataagccagatcaacaaggactatgcctgttccaccaaatctatgggcaaatactatgtagtcgtctgatagatagaaggtaaatttgagggcctgaagttctgccatgtggaaaggggctgcaatgtggaagccgatacagtctcgaagcttggttatagcagagctcaagttcctccaaacgtttttgtgcaagaggtacgacgtccaagtatttcataggagtcagaagaagagtgcaaggcagtagggaacaccatacttatcacggagctagacccgagcgactagaggttgcctattattagatacatcaagaatgaggaagatccagatgataaggcgactatcgagtgactcatccaacggtctgctaaatatatgcttattggcaatgacttgtacaaacgcagagcttcaagggttttcatgaggtgtattgacatggctatgggaaaacacctgctggaggaaatccattccggacaatgtggggttcacgtagcatcaagaacactactgggaaagctttcagagcagggttctactagcccatagcaaagaaggatgtagccaacctagtccagaggtgtcaggcttatcaattcctagccaaacaatagcacttgtcggcttagcgattgtagaccattttggttttctggccctttgcatgctggtgactggacatgatcgggccattcaagaaagcttaaggaggatacacacatatgctggtagccatcgataagttcacaaagtgaatcgagtacaaactgattgcatcattagcagcagccaaggcaacataatttatttaggagatcacattttggttcaaggtaccaaatagtattatcactgacctgggtccaacttcacaggggcagagttctttgatttctttgagcagaagtgcatccttgtcaaatatgctttagttgttaatccaagggcaaatggtcaagtagacgagcaaatgggatgaccctggaggcattgaggaaaaaagtctttgacacgaa

SEQ ID NO: 172729 - DNA, 273 bp, Zea Mays
gcagaggtgcaaggcgtgctcagccgaaacaacaggcaccccagaaggaggtagctagctcagtagcagcattgccaccaccacccccgatgacagttcagcagatgttcatgatgcaaacttaggcagtccaagcaattggtcagaccctagtagcaatgccgcaacggccacccccacctcagcctcaagtgcaagttcagatgccacaggtgcccagagacaagcgggtagaattcatgaggggccatccccctgtctttgcccactctg

SEQ ID NO: 172730 - DNA, 520 bp, Zea Mays
gggtcggatgcggggcagctggctattgtcccgtctccggtggcggccacttcacgtgcggcggtggttcgagcgaaggacacttcgcaggacccatggtccaacttatgtgccagcggccagatttcgtcggccgccgccatcaaagacgtggcgggctctgtgtccgagcagctgaggcatgtgtcgcggcagctgaagcatgtaagccgtcttggacttcgttagtttgttgtttttatgttgttgcaagtctaatggatgtttcgtggcaggcggctgccatcgccaaccatgttgagtcgggcaccctgacttcggagttcgctgtcgagagacaacgactcgagggcacgatcgagcgcctccgggcgcagcatacagatgttgttcaggacaagtcagctgtggaaaataagagacgcaggttggcggagaggctagcggctgcggaggccgagaaggaggatgtcaggcgtcggttagcggaggagaggagggacgcaaacaaagcttgtgc

SEQ ID NO: 172731 - DNA, 1298 bp, Zea Mays
gaataaagaaaaagaaataagaaaatcgctcttgggccttttcctttcctctcggcccattcccacgcagcccacttctcccccacgccctaaaccagtcgaccacttccatgtgtccatagctcaggttctattccgcgacgctacgttagccacagggcagtggggccatctcgtcggatctatccccttcgttctgttgcgattgtgtcgcaatccctgcagccggagactacgaccggatcttcctggcttcagggtataactaccatggacactttcccccttgaaccccaagtctcggccagtgcataccccaatggtgaaccgccgcgccattaggaccctgcattctgcgttgaatcgaaaccatgtgagagagagtcgccccggtggcgcgtgtactccagtccgcgccatcgaccgttcgtaaaatgactgcgctgcgggatcgacggcgggccttgaagcttgcggtgtcatcagtgggaggtcaagtgggtgctcgccggagtccaagaaccatggcggagaggcgccatcacgtggaacggagcccctgcgctgccatcctccagtaaaatcatctccgaatcccctccctcatcactaggttgcgtagccatcctgcatactcgacctaggtagcgctgttgatgggaatcgttcatcggagggaggtgttgccgtggtgatggctggaacctgcagagagtgcggagagttctgcctgagagagagatgtgagtggtgattgattctcgccttggctatcggttcggccagggggacccactcgggggaaatcgcggagctcaagaaggttgtgtggggcacctacggctgggggaaagccttgccgccacggggattccacgccggagtcaacacgccgccgcaaatccgccgatcgccatggacgagctcggttacctcttcaatcgccggtgcgtcaacgagttgttgttcaatagggcccagacagcgtctagcaccacttgatttgagaataggggtcttggagcgctagattgggattgctccggtgaagcttccgctgtgctatgtgcacgctggcgctctgctcggtcgtagggaaggcgatcggtagccgtaggatctcaaacggatgggtggccaggattgtggatgggagcggtctgaccagatcttatctacagcgttgatcgactacttcacggctaggattagatcctcagaaaacgtttcggtcggctggcggtggtcgtctgatcgtggatggacggtggagatcgaattgaagcatacctcttcac

SEQ ID NO: 172732 - DNA, 1318 bp, Zea Mays
tagccccgcgtgtgcgcccgcaacccctgacaggtagaccccgcctgtcagcgctagcccgcgcccatgttctctctctctgtctcactcgctctctcgctcgctgccagtggggccgatttgtcgatgccaaactcctccacgcgcgcatgctttctctcgctgtcctgtgggccccgctcgtcagcacagaagcccgttaactcatccgtttttgctgatccgtgggtcccgctggtcagaatcgtccccccgaaccgtccgcgctcctctccgtggatgcgccgacatccacgcttttcccggccatgactcacacgcccgagccttttctggagcccacccacactcactcgcttctcctcgctcagttgcgcactcagccgagcaccatcgccctctccctcgctctgcgagcgtgcccagggagctccgccgctgctcaccgaagtccgccgcctgttccacggtcgccgtcgaaccctcaccgtgcccattgcctcgatgagtttctcctcaccgtcagcaactcaggacacccctcggttcacccccagcccctctagttcgcccggtccacgcttaccaaagttctccccgtgctcccggagctccgccaccgtcgacccgaggcgtccctgtgtctccaccgttgctccggggctccaatgtttcctctcgaggtgagcaacttccccgcgcccctatttctctgtttattgccctggtcttcatgcgattgctcgccggagtagattttgcgctgccgtgggaccatcccaccgcgttctgcgccctctggtgccttcgcggtggcgttgtgcccacggtcgtgttcgccatgttgccctgaatgcgcccgagtccttccccaagtccctagagccctgccgtggccgttgccctcgtctctggcgagatcccgccgtgaggtcgagcgatgctgctgcaccaaggacccgccatcccggccgtgttgtctgatggatcttggatgtccacccgagatctgacggccatgatttaattagaaccaatctaacctcgaccgtctgatgcaaacccagtcgtccagatccgctcctctcacccgcgctatgcccctaggccccgccggtcagtgactgcgccccctagcgctggacccggctggtcagcccgcctccctcctcagtcgctgacaccgtcggcccacctgtcagccctcgcctgtttgcgcgcgcgctcgtccgtagatctaatctcagccgttcatctgtgatcgagcggtcgagattatccgataccccttcgcatggcggttttgcttaagaaaccc

SEQ ID NO: 172733 - DNA, 442 bp, Zea Mays
atgaggtcggggcattgtggttgtcgtgtgtcgtacccccttgtgtcgcgacgtggccacgcggccgtcacggtgatgatcgccgttaacccgagcacgccacgctactgagcttgttactatgccacagaaggtcgcggtagatagcccctctatcgccggggacttagctcagtgaatgccacattgagcggtctacggtgactcctcccctttcttaccgccagctcttctccgcccaaattcatcgtactcgcgatcgctctctataaattgatgccctagtgagctccactaggttataacgcgctcagtacaccagtcctcacctccgatcatccaccaccgtgccccaatttgggatttcccccaaatcggttctccaccctaccgtgagccaccgtgccgtggaccaccgtctccaggtccgctcttgccctcc

SEQ ID NO: 172734 - DNA, 539 bp, Zea Mays
cgagttcttcgggttcctcgaccagatcgctctctatgcgaacacaatcatacattcacatttcaaaacagaaaggttaacaatacaccatacaaaaaggtgaatcccataatcatacacacgacatatggctagcgctaacgaccatttgaagtagtgagaataacataacccttaccatactcgacaactcgctatgttcatgtttggtgagagaatgaacttaaacacttcatttcatgtagttataataaactgatatttaatgcaggtgcaactatggttaatatttaagcataattaattctacgcttagttaatgtgtcgccccctaacctaaaccaatcaatgttagcaaacttaggtggtgtagggagtcgccgtgcgaaactacgcataacgagagccaaaacatgtgtattatcacgtgcacaaagctaccagccactacacatgggattatcgcgcgaacgggttggccgtgccccgtacaagccgatgcaggcgagccggggatggaccagccacgcgcgcgagcg

SEQ ID NO: 172735 - DNA, 1241 bp, Zea Mays
gactgcgggttgaatactataaatattaggggctcttatgcgaaaacacacgaccgaagaggtatgaactgatttcggccgttggatccgaaatccacggatcggattagatcccgaaccggtatgcactgagcaccgctgatccccagatctgcggcccagattttatgaaacccaatcaacccaccaccgccagattcgaaatctacggcccctgctgtccagaatccagccaccaatccccaccgttgattaaccccatcaacggccactggttttcttccccaacgaccccgagcagaggcgcggcctccaaacaacgccggtgagccacccatcctcacccgacgccggagtacagtctccacggcagcgctactcgccggcgcgctggccatcccccgcgccattgcccaaatctcgacgtctactcgttccagagaatactgtgacaagagcggggcttcttaccgtcaatcgggactgcacagtcgctggaccacgacgcgaggtgggttcacggcaacccatgaacgtcgtcgagaaatcgccccagccacgacgcccagaccatgcgaccgaagcccgagcggcgcatgcgtaggttgcaacgcggcggccaaatcttctccctctctctcctgcactcgccctccctcctctaacaccgctcggcgtggcacaaggtagatggcgagatggtacgggggctcggtcttatagccgcgaggtgaggacacgccaggccggcccgagaaagtgggggagaaaagatcggattcacgacccgggagcttcggcggaggttgttccgaagccgcgcctgtgcccggattccgtccgtttcggtggagaggaaggagctgacgctccggtcccacccgcagcggcacaacgacgcgagagagagcaggtcaccaagccgcgatgggcgcccagccaagtcgcagggagacagacaagtgggacccgcgcgacggcgagccagagaccgacaggcaggccccaccagtcggcgcaggctagctgaagaagtgggctgcgctggtgaaggtttctggtgggccgaatttggtacagaggcccagttaggggttcaatatcctttttctttttatttcctatttccttttctcccttttcaaattcaatttgaattcagatctaattcaaaccttttggcccttccttacaattttatattgtgccattaaagtactgactttgaagatacttatttt

SEQ ID NO: 172736 - DNA, 563 bp, Zea Mays
gtgaggagttaccatagcattcattgccattgcattattgtgtcgttaaaaaatttaaccatagccgaagcttcgtgtattgcattttcgagcaaacgcttcgtcacttgagatcagcttcatcttaaaaaagcgtaaacattgaaatggccagggtacgatccaccgctagggtgtctcgtgagggggacgaagccaaagtgaccaaaacggctccaatatcagaagtgatgaggcaatcaggtcttgttgtgctagaggaggctgttgcctaaggtacctcgattgctgaagatgaactgatcatagctgaagaagaaagtgagaacgaagatgaagaggattacactattctaagcccaatgaaacccaaccacattgaatttggtaaatctactatgacggcagacgacatggttatgatcaagaaattaggctactttggggccgagagcaagcttgtctggtttgctggggaagaggtgattccagaaccaaaagatgatgaaatcgtagtctttaaaagcttcttcagggcaggacttcgtttccccctgcatgag

SEQ ID NO: 172737 - DNA, 521 bp, Zea Mays
ttgatctacctcccaatcgacacactcggaagatatttagacaaccacaacaacaacaacatgagatggatcctccacagcctccaccagccggagctgatcctgtagttgcagcccagatgcggataatgtaacagatggcagacaccatggcagataagaacgcgcagatgcgacatgaacgccaggagatgcgccaagagcgagaggagatactccaagagatgcgccaagagcgagagcagatacgccaggagagaagggcgcaacagcagcaacaacaacaacaatagcaagcaccactgcctccaccccaccaccagttccaccccggaacaagcaccaggagttcatgagccataagccatcgccatttgctaactctcctgatccactggacgcagatgaatggctaaagtctgtagagaagatgctgaatattgcttagtgctctgaccgggagaaggttctatatgcttctggtcgtctaacgggtcctactgctgattggtgggattcat

SEQ ID NO: 172738 - DNA, 384 bp, Zea Mays
agtaaaaaaactctgtttaacctacctgccccatgtacccacacttatcccaactatgtccctagttatggtaacaccaatacccattatccttgatgataacaccaaacttgaccaatataataggttatataacttatccaaccaatctagaagcaaaacaacaagacagactctgcttaaacttatttaactcataaccacctattaacctattttgtttacctaagaatctaccttcactacatgtcccaaattcaaataacaacttcaagaacgaagattgaagatgatcgacctcatcaaatcaaggaaggataagattcaagccagatcttcaaaggaatccagatccacaatcttggatggagtgttcccttacgc

SEQ ID NO: 172739 - DNA, 335 bp, Zea Mays
atcaagtgtcctttctcaaagcattcactacaccttctacttttcttagtgtgaagtgtggcttgatcattaccttggatgttaccttgtatggaagcatggttgaggcttttggaagaggtgttgattttcttcttttgttccttcctcttggcaatcctcaagtccttgacattttcttcaaggaagttagtgcatgcctcggttgttcccgtctcaagcttcttcaccatgtgatcacggttatcttgagaaggttgaggaatgcacttcccttttagttgtgtcaagctcatctttagcctctcattttcttttttgagcttttgatatgt

SEQ ID NO: 172740 - DNA, 544 bp, Zea Mays
gttttattgtgctgacgttgctcagtggtattgggttagcctcgcctttcccatatgggtctgcttgccagagagttggtcggcaactccgcctcgtcgtgttgctcggcaactccgtcttgtcgatttgctcgtcaggcaggttggtcggcaactttgtcttgttgtttcgctcggggggtgagctggtcggttagtgagccgtctttaggaggctttcatcgagcacccggttactaggtacccgacaccatcattttgatgaacacagtctagttgtagggtgtgtactagctagtagctagctagctgccgggccatggattgcattttgatgaatgcacaagaaggacagccggaccggcgtcgtcgtcgttgtcctgacactgccatatatggcagtcaacaggtacatatatactgcactgcactgcaggatatgatgcatgttcctctgttccgtattactaccttttttatttttttttgtgggcagcaaatgaatggccacaattgcatatgcatgcatgacaacgcattatag

SEQ ID NO: 172741 - DNA, 484 bp, Zea Mays
gagccatcagaacatgcagggagcagtttgattcatcagtatcacagtacgtcatatggatcctcatcaaaacaaggaaaccgattggctacactacaactcaacaatacaggatgctaatcaacatcacaagttcgcaacacaagttgcccacattatacactatggaaaccaaactcagaatcagttgtgactacacgcaagtgatacaaatcagcataaaggcacagaatccgcttgattatatcacagttcatcaataagggttgtggatcaacatcgcaacacaaaactctgatgtacactgtagataccaagcaattgggaccagaggcagacacaaattatatagaatcggcatcaaaatgcagaatcggctccatgacaccacaattcatcaatatgggttacagatcgacattagagatgtcaatgaggaccaaatacccgctaacctgtgggaaattcccctattagggttagt

SEQ ID NO: 172742 - DNA, 654 bp, Zea Mays
cgcggcggggagggcagtgaagcatagaggcgaggtcttaccatagtttttccatgacgaagccccccgacgacggcaatggcggatgcggtcgtgatctgctaactctggcaggaaatccaacagcccccgcctgctgccctagtcttgtgactccacaaatctgaccacccggttcaagtgaatcacacaggccctcaggagaataccgagcaatccctagccaagagtttgactacggcggcactcactctccccctgggtctctcttcctccgatcagcgtgtgcgtggacatggtaaaaagggaagagggcaatgttggggtggtgccttatttaccagggaggcgatccctcaagaccccaccaaagcgcaatggcccgcgaatcttatggcggagttggtggcggcttcggtcctgctcatggtcgcccagggtgcgaggaagacggctgactcgtagtgacaggaagccacgcacgcgtggggtgagcaaatggaccagcgagcagatattcccacagggttgtgcgagttcgtgggctggcgccaagtgacaaaccgacccaaacagcgctgatgggaatcaggtggagctaggccgaggccagggattcgacccagtgtatgttggggacttgttctcaaatgc

SEQ ID NO: 172743 - DNA, 344 bp, Zea Mays
ggcccaggcgcacattgcgctggcccccgtccggtactccgacaaccctgctccaccaatggcagagcagggcggctgggatcaggctggcctcatagccgcactgaaccagatgtccctccaggggtcctctccttgggtcctcgacaccggcgccacaactcacatgtcgtcttcggctggtatactcctgtcccgtctcccccctccctcattaggcatcacagttggaaatggcaccaccatacctatcaccagtcgtggcacatccacactctcctcccccacctctacctatcgtcttaacaatgttctggttgcacctgcatttgtgcgcaatctcc

SEQ ID NO: 172744 - DNA, 1350 bp, Zea Mays
ggctcggcgaccaccggcgaatccgccattgtaagcgccaaaactggtgtgctttgcacctgcgtgactctctagggcaggacctgtggacagggtcatcgcggccagaggtggtgccagcggcgatcctgtcggttgaacaggttcttgttccaggagggcgagccgttgagcatgggcgtccaggcggttgttcattgtggccaactgtcccagaatacggtccagcttctcggagtcagtcatcttcccaagaccttcgtcgctgccggacatagatgtcgctgcagctttggaatctgataccaaattgttgtgaacccggctgcgatgcgcaggacggggaggagtgcaccgcgaagggtgggatatcaaggtggattgggtggaagagcgcagggaatagggtatcctgtgtggcggctggggacttaggtcacctgatggcggaaggtctgccagggtgatcaagcagccgcacccacaggtacaacttctttttgatgatctcctagtacaatctaaggccacctttatagcttaggtgcctaaccatattacagattttctaggggataagataactcttccgggaggataagcctccttaattattgtctaacttttagtacttcttaacaaactaaatctagcacctagcataatgccttcccacaaaagaatctacaacaatttgcctttcatatgctacaacagtaataaaagtatagtatttttacaccaacctcaacataataactgaaggcgagcttgcatataagcagcaggatccagaacgtagtatacctggttttatttaaacaaaaatagtattagatacagaatgataagaatggaaagaataggtgacaagaaaatgtgatgtttacttaagaagtgagcaagtgtcttcatacatgcctcgagcaacatataactttggctgattaggaaaaaagatttgtgagatgttatgtataaacagttctgctaagaacttatgtaaacaaaaccttacctgtgtccaccataaaaggaacctaataatgcgagaatttgagcgctctaaggcccgtcgaattggtagaaacatgaaaaacagggcactgaatatgtttggtaacatgtaaagggcaacagcataattataaattgattcattctgcaaattttgaatccaattgctgagaaacttcacaaggcctgtgggattttgaatagagcttgagtacgtagtaggaagaattatcaaccaggcaacagctacagcaaattttaggatatatcttatcctttgtgagcactccaggctcttccaagctttccagttgagaattaactctagcgtgg

SEQ ID NO: 172745 - DNA, 439 bp, Zea Mays
ctcgggagaatctatgtctcgaccgaggtcacctcacccctgaacgatgatgtccacctcgcctgagctcacctcgagcgggttaggcaagctcaggacaaagcctcccgaaggccactaggggacaaccacgttcaatgcgcgtacctacccacatatggctgcaggtgtatagtggtgacaagatcgcgggcccctgacgggacatgtaatatgacagggacacagaccagtcctcgggcgcaaattctatctcgcccgatgcagagcttgccctcaggacaaactccacctcgcccgagcccagcctcggccacctgctcccccacaaatctcgcagaaggccactccttcaaactgcggcacacgtcatcgaatctcaatatgggctcggtcacgaccttgggcggacttgcgcctcgcccgagcccggttctgc

SEQ ID NO: 172746 - DNA, 683 bp, Zea Mays
cggggatcggctctcgctggtttttaggcctctgatctggctagcattctatcatttgtcacgcttgctaggcccgactacgcgcaggatgttccgattagcttgatgtgagtagggcatggtttcgaatgccatcaactctgtgtgtctttgatacatagaccgaatctgatcccgagaaacaattggctctttatagccgatacagcccgaggagccgagcatagctcaaatcaaagtttgcatgtgtctgtttgtgcaagaaaccgattcgaagcacattgacatcttcctgaccaggtatagatcaggtggcacgcctagcgaacttcaaagccaggtcgtgtactagaatctgggtcactgaccgagggaccggtgcccaccaaccgctctgaaagcctcctgtcccctcgtgttgcatgccatctctcgccggcaaagtcggaagacaacacattctggcacgcttgggggacattctacatcaactcccgctgtctagatatcgaaggctccggcacagacatctggtttgacacaagagaagcccatcacgtatgaagagctgcctcaggaacactaagcgagatatgatcaagtcaaggccctcttcgaagccaatctcatcggctcttttgagaggaaccgtaaccatggcatcaggtggaaggggttctcac

SEQ ID NO: 172747 - DNA, 687 bp, Zea Mays
gaactatctggtcaatataaatttttgcatacttttctgccctgtgggtggtatgtactcgcaagaaatgcgctgttttggtcaacctatccacaatgacccaaatggaatcgtggtgtcgggaggtattgggcaatcccacaatgaaatccatgcaaatatcctcccatttccacgagggtatgggaaggggctgtaaggtgcctgccaccttcaaatgactggccttgactctttggcaagtgtcgcattccgatatatacttagcaatctccctcttcattctggttcaccagtacaaggacctgagatcatgatacatcttgttactgcctgggtgcatggagaatttggaaaggtgagcttcatccattattttctttctgagctcggggttcttgggaacaaccaatcggtctccaaaccatagaattcctttgctgtcctgacgaaaacatttgtatttgtcctccttctgttcgatcatttccttaatgacttgaacacccttgtcaccaatctgtgccatgactatttgctcatgtaaggtgggctccactgaaatataacttaaagcaccagaggaaatgacttctatgttcagcttgcacaactcatcacacagagtggtgatttttgcatcaatattcacacagttgcactgggccttccgacttaaggcatctg

SEQ ID NO: 172748 - DNA, 500 bp, Zea Mays
gcttgtctttctgagttgtgcatgcgcaacgatttggcttgggtggtggtgctgaattcatcatgggataagctaagcttgatggacacgattctttgttggctatgatgggtccgtttatttgtttttttttgctccgccctgtgctgtgattcatggtgcaaatcgagttttcttaaaaaatgactgacctaataagcttctgaaggggtgcgttaacgctcattgggttgctaaccgatagttcttttgttatgagattgttcatctttttctatttagattaaagttgttgtgatcttggtttaacgctcatatataatgttgaggaagtgttggagggtggaaaagtgctcccagcaggatttcatatttcgttacaagaccaggatcgagcttttggtgcaagtttgtgatcggtctttgatggccgctgcgctgaggtgcgcgaaatcagggcaaatttggtttggctggcacacctacagcttggtacggag

SEQ ID NO: 172749 - DNA, 355 bp, Zea Mays
ctccagcccccaagtctccaccgactacaacaccacgctctctagctccggctacaacgagctcttcgccaccacgccatccagccacgactccggctccagcgagctctccatcaccacgtactccagcaccgacggtaccctccccgggaacatcctctctgacgccagctcgtgtcgaacatgacccagtggagctcgtgaccccgctctcccacgacgaggagcgcgtcgacgcgtgctaagacggcgagccgttgcggtatcgaaaggtggagggccttctcatcgacccgtcagtgtcgggcccggcgtctcgcattttggcagaagagttgcatcttgcatgcgacga

SEQ ID NO: 172750 - DNA, 1019 bp, Zea Mays
ctagattgcttgaagcatttgaggccgaaggcaaatgtagccttggctcctgtgactgaggttgaacataatgcgggacatatggtgaacattacgaagatgtactgaacacctccttcggctgggaaggttgagcagctgacgaagcaaattctttttgcttgttgattgtatggtggcaattttttgtcatgtggcccttgtcgtcaccacaaaacaagcaaaatggcttccttggaggcacattaaacccgccactaaagcttcagcctacccttccctctctcagagcaggcgacaaaatgtgatgtgggaaggctgctgttgagagcttgtcttttgttggcctgactgaccctgagatggaactgtcttttcttcaccctgcaccaggttgtgaatgcttcgtacatacctcgggtagaatcttcctccgaagcccttggcgacttcgatgtatctgtgcagctcctctcttctttggccaaaatcgttgtcggcccttatgtattcacccatcttctgtaataatttatctagagagtgcggagacttccctgcaaagtattgggttgctgcatagcccacatcctaatgtgtcacctgtttgtcactttttagagcaaagggtcatccaatagtagtaccacccaataaccaaaacaaatttgcatagatgtaatgcagactcatcttggttagccacagtatcaacttgtttagcactgcttgttcccccaaatttcgcactgagcaaacaaactgcatcatttcccccagatcccgataaaaccaccaatggcacgaaactaactcgaacaggatggataacatcaaatacgttatcaaactggccacttttgatcaaaaatagacaaaaacaatagacacaggcaaagcaaaaaaatggacagagaaaaggttaaggcattagaaaatagaagcagagcaatcccaaaattttaaaaaacggagtggatcaaaaataaagtaaacagaaacaaaaaatggacaaggtt

SEQ ID NO: 172751 - DNA, 474 bp, Zea Mays
ggggtgtttattgtttttgtagtggtgtcctagtagttaggagtctattgaatttttcttaccatttttgaaatggttcttatatttttaatcattgttttccttggttccttattgcctaataaattatttaaccctggaatagtcttggacttgggttctttgtatttttcctaggttcctcatcacttaagtatactaggaaaatatgctccttctctgtttattattttccacaacctttcttaattttctaagttttggatagatgtagtttttaatagcaaaacttgagttaatcttgtatactggggtgctcagtatttttaaacagtgtttaagttgggcatgcatctctacaaattttcttaagcctagcacagaagtatttctatttttgttcatattaataaggtttgggtagtttccttatttaatttgaaactctaaaaattaatacagaaaacatggggt

SEQ ID NO: 172752 - DNA, 467 bp, Zea Mays
cggtgtggtcaccctacacggtgaggatcccagcgggggacggcatcttgaggaccaagtacccataatgggcaatggccatgaaccggtacagggctggcctcccgatgatggcgttaaaagggaggttgacctccgcgacgtcgaactggacgttttttgtacggaatttctcttctgtcccaaatgtaaccgagagcgttatgctcccgagggggtatacgggctacggacccaccccagaaaatgggcgagaaggcaccaaccgcgaccctggaacctgcagctgtctgaatgctgcgtggctgataacattgaggccggcccctccatcgatcagcacgtgatgtagccgcatgttggcgacaacgggggcggtgatgagcggcagcacgccggctcccgccatgttgtcggggcagtcggatgccccgaaggagatggtagtgctcctccaccgttggtgc

SEQ ID NO: 172753 - DNA, 394 bp, Zea Mays
gtggtattagagcacataggactggccgtagaccgcaaccttgacctaaaaagctttcctcaaaaggaaagacctcgtaacctcttaaagaaccttctcttctttcctcgatattaacaacccttcttctcttgctaccatatggaaggctcctttgtcattatgacatcctattgctcggaggtggaaggattccctcaccttcttcggagctgtgtgcttcgtatggggattcgcaagaagccagagtatgtctggaaagaataccacgagaacaggattgagaaatgctctatggcagtctacctgggagaaagccgaaactacccaaatcaccctccctttcagatcaccgctactggccaccgcttcccagatacctgccagaatgcta

SEQ ID NO: 172754 - DNA, 913 bp, Zea Mays
caacaacgccaccacgacagacccgcctggttctcgcaaccgccctgccagctgagtcggacctcccgtgcggagtatatacatgtcatcctgcccttgaccttggtgcaaagcgaaatcaccgaaccacataaccgccacgtgggagaaaaaaagccaaaaaatcgccgccaccatcaacacccatgtactccattgcccaagctctgtctaaggttcactgggggttcgcgggcactctcaaatcgttcgcacgccagtgggtgggcactgggcgcaattgagcatcccgaatcgctcgtcggagtcgtagcaccgccgcacgccacgtaccacacagattttgcctcgatttctggtaaggcttcccctatcgagttgtccattggttccgcactcctttgcgttgggttttagggccgagtggtgttggtcagcgcacttgggcgcattgccggtaaagttgcgactgtcgcggtggaagcgctgccatgttaagtgccagtggtggaagaagacctttagaccgtaggatcaaaatccagcaatcatcagtggaccgagtcgtggtagtacctgagccgtagatctgggtggctatggttcagatcggtgagaggcagacgattcaatattttaaatctgggccatcgatgctagatccgatggcgtaggttattgcatggcgcgggtaatctggaaccttggatctatgatccgagggccgatgttgctcgtggcgttagttagcaatagagtgacctgaaccgcgggatcttgatcgaacggtggagattgcataacggttcgtttgtactagattttaatctgaacccttgggtccggatcggacgaccgagatctaacgatacccttcgtcgtgtacttttacttaagagacccttcgtttttt

SEQ ID NO: 172755 - DNA, 303 bp, Zea Mays
ctacgatccagtgtttgcggctgcaccgattgttgcaggacctgattctacagtggagagcttgattcaggatcggttggcttactcttctttgttgagagagaggttggctgcagctcagaaccgcatgaaggtgcaaactgataagcatcgggtggagcgtgtgagttggtgatcaggtcttactcaaactccagccttatgttcaaaattcggtggccagtcaagctcacccgaagctcgctttcaagttctttggaccctttaaggtgcttcagcgtatagcgtcagttgcatacaagt

SEQ ID NO: 172756 - DNA, 356 bp, Zea Mays
gacgcggtctccgtcgatgaggtctttagacgttggttcgtcgacgtcggggaccgctgatgtgcttgttcggggcgacccatgctttatctcctgcggcgtcatggcctcggatccatataatagacgaaaaggtgtgaatccggttgcccgacattcggtcgtgtttagggcccagaccacttcaggtagttggtcggcccatttacccttcttgtcgtcgagaagtcttttcttgatggcagtgaaaatcttgtcgttggcgcgctcgacgacgttgttggattgcgggtggtataccgaggtgaagactggcttggtgccgatggagaaacagaaatccctgaagtcctggc

SEQ ID NO: 172757 - DNA, 383 bp, Zea Mays
gcaaaatgacagaccaagtcgtgacagagagagcaaaatctcatgtccccgaagccttagctgaggatactgattacattgttcgacatgcttcggggaagaaattatctcaagaagaaatcttggaggccaaacactacgcctaaagactgaaatatccgaagggggccttagtgttcaatggtagtaacgaagatgatttccagtactgtctcccggataacaaagaaatatccgtttgtcgggagatgactaagagtatgggatttcctaagcttgaagaaggcctttcagtcttgtcgaaggatgatcttgccgatagcctcgcgtacaatagcataaaggtataaaagttgactttgaagtttgaaacgaagtatttt

SEQ ID NO: 172758 - DNA, 1202 bp, Zea Mays
ttactcggacgactcgatggggttgtcggtggtggagaaagcctacatccgatccatcgagtgagcagggctcgaggagtcgaatgactcagaggaggactcttcggaggaatctgagggagaggactctgaggatgtggatggtggtggtggcgacaagagcggttatgagggcgacgacgagggtggcaacaatggcaatggaggcaacgaaggcggtggcggtgcgagcgacggtgacgacaatggctacgacgacggtgacgagaacggtggcgaggtgccgccggcataaatattagtatattatagtagtaggtagtggtagtagtagttgtagtagtataagaaatggaagtgaagtgggggtgtgttctgccagggttggttcttaatgaggcatccctcttcttttgtaatgatattcccttagcatgaatgaaagtggctattgttcatgaacctgtgttttcttttgaggtcatccttgttcataccgagtcttttgctttgttcgtttccatgtccagattggcaaatccgactgacgtgtgttctttccgacttaatgtgcttggttgaggacttggctatcttaacagtgtccgacttaacgcgcccgacttagcgttcttgactcagagtgcctgacttagtgggtccacatcgtgcacgtacctatactcactggcagttatctggttgaacaaaccctagctctgcttttctctgccattagtgtccctctgaaattatcgtttgcccgcagttccacgcctgattctgttgctttgtggagtccaatggcacccaagaaaaagaagcagaggagtgttgtgcccatcattcccccaattgatcccaatagccaagttcccttctgccgtaattatgcctctatcgtctctgaatccgacttgcttcacctggttgagattgatgttttgtcgtcaaagaagtcgtgctcctggcgggtttggcaagggatcaccgtactcatggaggatacccacgagtcagtagtttttgttcctttctttatccgtggtctaggtttaccaatttctcctttcttccgtggtcttcttgatttctactctctcaacttaacacaaatgaatcccaactccgtccttcaaattgccatctttattcatctttgtgaggccttccttgggattatcccacattttgggttatgg

SEQ ID NO: 172759 - DNA, 965 bp, Zea Mays
aaaatttgaccatagccgaagctttttcaccgcattctcgagcgaaccgacactttgaattagcttcgtcaaaagggggagcttcatcaaaattgtaaaaaacatcagcttcgtaaaaaccacaaaagatccatcagatggccagagtacgctcgactgcgagggtgacccgtgaaggagaagagactgaggctaccgagacagctccgatttccgaagtcatgagataatcgggcttagttgtgacggagggagccattgaagaaggtgcacctgctgccgaaactgaacaagctgatgttgaggaagaaaatgttgatgaagaagaggaggattatagcattctgatcccaccaaaacccagccacttggattttgaaaaatctactgtgtatgaaactgacatgcccatgatgatgaagctaggctactttggagaaactaaaaagaagcttattcgtttcgccggagaagaaaccactccaaagccaaaggacgacgaagtagtggtttacaaaagctttttcagggcaggattacggtttcccttgaatgagatgattggagaagttttggataattttgagatttttcttcatcagctgactcctaacgccatcgttaggctcagcatttccatttgggccctttgaagccaagggatggagccaaatgctgaagcttttttgccgagtgcatgagctgcattaccaaacgaagtccagagaagatgggctacatgaaaattttggttgttataacttcgcgtatcgcaaggatacgaaggctccggtcctcagctatcacaccaagtggccaactggctggaagagcgagtggttttatattaaggctgatgagaagaaaagagggaaacttatgacgatggtgctgagcccgctatctttaagcttcgggatgaccagacccttatgcaacatgaagccagggtcagcatgtccgct

SEQ ID NO: 172760 - DNA, 954 bp, Zea Mays
actgaccccgaattgaatccctcccaagcatttcccccaatataatttcaagaatggcgatctaatttgtcctggccacggtaaccgtggatgtcacgaacagacgatcacgttcccgatgatcagtaggcttctagtccaattgagtgggttggtgagtatccagggcatgcatgggtactgagacaagaacataaatggcaagatcgaacctggattaagcagaccgcggcgaggttgcttttatggtggcagaaaaccgaattgggggaaacgagaaatttgcgagctctaagcgatgattcgaggtgcgagtcgcttcactggttgcgtaattacctaacggagcgaacggtgacggaaatttatagcctctaacggcggtggcgtccaatttcaccagggtgtgctggcggccggagaagagaaacggtactggcgcaacgaattcgtgtcctacgccgtggcagtcactccggtgatcaacagggagcgagagcaggtcacggcgatgcagtggaagtgcctggacacgcggcgcaagaccggaaggcggcggtcaccggcgtgcttatcggattccgccgcggtgagcttggtacggcggccggaatattttactggccggacttatccacggcggtgatctttacacgacttcaagtgttatccagtcgatctggtcatgaatcacggcggcgagggcacgaatctacgcgcggcgatcgtcggcggtgaactgaactgagctggcagcttaatccatttcagtttactgtaccatcgcgaattgcattcagtcggtctgacagagtagattcaaggcagattttctctaaattttctatggcaacttacctaaaactctgcagcaaagttgtagaccaatgattcagctataatcttgccataacaattatagcccaattcccactcgatcatgcttgatttcct

SEQ ID NO: 172761 - DNA, 579 bp, Zea Mays
taaatcacaattaccctaagactcaggctaacccttagtgtggactgcgggttgtttatatggttttacgggggctctttagaaaatgttacaccacgaaggggtacgctctaatttggaccgtcagatcgattccaacggtcgggattagatctatctctttataaaccagcatttgaccagagcccttggatcccgagatcaacggtcccgatcacacacgggcaaaggagcatggctgcgccaatctggaccgcccgttaggatcaaacagccacaagcgttcttcaatttcccccacccgagtcgcactgaggcgagcagagcacggcggcgaccatcgccggcgtacagccacccggagtcaccgcagctcgattcgatgcaggtatgggagaaacacctagcgcatgccatggcaaatgacggtggcggcgtcctccactgtacctcggcgagctccacgtccggcgctacggtgttccgattcgaaatgggcatgtgcctcgcgatccccggatgatgaagaagcaggtagtggatttcttaccgggaatgaagaggccgacagggctgtcc

SEQ ID NO: 172762 - DNA, 1087 bp, Zea Mays
caggactgtgggttaaatccaaagaaacagaggggctcttatgcaaatggtgtgggccgaaagggtatggtgcattatgggccgttggatcatacatcaagggctacgattagatcggccacaataacgaatcagcatctgattttgaccgtaggattgaagatgtgtggctcatattaggtcttcacccacgcgatcaggtgaccgcaggatcaagatccaatggtcgcggcatccttctactacctccctgcgcacgacacggcggcgcgcacctagagcggcggaagcacaccggcgaacgcgccctacggtgaaccccatccgattcacacacccgacttcgttttcatgaatgcttgaccaccatgaatctcatggctaacccctatccatgaaacaatgtgcccaggcccctgcccacggcgaagctccgattcacggcggcgccattgccgggaaagcgcaatccaaggcagcggcgcactaatatccgaatcccggggttttacgcgcaattaggttgtccgtgaagctaaggaaggtaattttatgggcacgaacgacttaccctggacagtcgacgatcggtcgcggaggaagcctacgcacgcactccggtgagggattaccgggctgctagcacgccacgcaccccaattgtgagggtaacaccccgtcgtaccctcctccattctcttggatcgtttcacaaggctaggtggacgacgcgcattaagattgtctacggcggcgacaacaccagaacacaccgcagttcgctcgatagggcagaggacgcaaggcaaggtcggttgtggggttgggaagagctttttgccgccgagagattgcaacccatgcggtatcgtggcccgagcgagccccacggtgattcgttgtggatccagcggacttgcggcgcagctccacagaagtcgccatggttgttgaggtagtgggcgagaacggcgctgacaccgtggtcccatgcggaagtggctaacgagaggggaaggctatactgtgggtcccacgcgacagtggttaacagaggaggcacgagacggggcggctgacgcgtggg

SEQ ID NO: 172763 - DNA, 428 bp, Zea Mays
ctaggataggctcacctcgagtgaattcagcctggccccggagcgaagcccacccgcgacatatgatctcaatctatctgagggctaattttatctccgtgcgacctggcccagcagcggatgcaactatccaaacacgggttgcatgcatccgtggagcctagttcgattggatgtaggcaaccaatcacgcagatagggtacgaatggaatcaagagattagaccatatacgaaaggaattctatggacatagtagttggaaaactgagtttcgagttgtatttgtgcttcatttgaggggtgatagccgagggacgtcaaatgtcaaggtggcattgcttttgtgtgaaacaagtcacggtagtcaactattttgctgcttttctgctataaaactatcttcaacatagttattaaggcgagcgc

SEQ ID NO: 172764 - DNA, 1009 bp, Zea Mays
aataaacccacaattcaacattcacgaatacagcctttgttcaaatgcacaaagtgatgaaaacaagacatttcggaagaatcggaagctgcctacagatacgctggaatacaagttccacgatcattttatatacataaaaacttacttacaatgcaagacttcattctcaactttgggatcaaagatccatagccaatatacacaaccaggtaaagtgacttcatgacaactcccatggctggacttggccagcataacgatgaaaagggaaacctggagcacccgaaaatccatcatctatcagcagtcaagttttttcttttattcgaacatcatcagcggtcaagttttcagcaagcaaactggtgcaaatatacagtatgttggaccaagaaccaaacagaataaataaaaaggatcaccaagctctgaaatgataaaagaataccaatctagaagaaagaacactagaaagattctgttatgattatagtagtatgtagccacagtctgtcaaatgtacacaacatcttagttgaaaatacaaactaactgttaagtcccttgcatccaaagaccaaacataactgattgccgctgataaaattatatccatcaaaccacacactttaacaaaactcaaccttttctaaagccgtcagtaaaagataatgtcagaaacttacatcgtcagagcaagaccaacaaaaggttatagcaccttccatgacttcacttactacacctcccttcgtaccttttcccccctttttggcctacttgaatgattccaacacagcatttcagcagaagatatccagtagatttctgagagttacaagcatcactccgtgaaaaatattaaagacatctctaaccaacacagcacttcatttgcagagtgaaatttgttccaccaattgtgcattatctgcttaacaagatacagaagtcccccatgtagacaaatttaacttaacaatggcatattctgcttctgttcggc

SEQ ID NO: 172765 - DNA, 597 bp, Zea Mays
gtgacgtgtaacccgtaaattggggaagcgcatttaaacagacagtaacgacaccgtaaatgtatgtataaaattgcataaatggttgttactcccccgatcagagcgcccacgatcagcgcggccacgatcctaaaattcagcgggtaatggatatgcgccgtgaatttcgcgtccatgatattggatatacgcatggtacagggaaaaaatcataatcttccaaaaaaagtggagagtacgcatcatttgatagttcgcggctgggtgaagggcgtatttgctctggaagatggcggcaccatggggaaacaagtccataagtgagtatacgacgccgacgtctgttcatcgaccaaatcaatgcttggatatcgtaacaatggtgcaggaagaacaacaaggagggtaccagttagcgtcagatggaattacgcatacagaatcagctactgctgtagatgcaattactccaccagcagctttgagggccccgtgggttgatgaacagaccatatttgaggcatcgaggatgacagtaaatcaaggaggacagcaccttaatactatgcgtactattggtgatcatgaacagga

SEQ ID NO: 172766 - DNA, 920 bp, Zea Mays
gagatgactacctggaaagctcacacgagaggtgacgatccaggcaggacgggagacggcacacggtcaaacaaggtcactgaaatgacagaagaggtgagcacgtattagtcacatagtcataagcatatgaaatgtgaataaatacatacacagagagatatggcacgagacgggacgatcaagaagtcaaatgatgtgaaaacgatgtttgacggataaatagtgccataggaggtttggaattcgaattgaggcacgaaatgatatgggatggagccgagacttcacgaataggtttatataggtgaatatgagtgaagtgtgtgcttggtttgaatttaggcgaagaaaaagggatttgggcactcggctcggaaacgatcgctctaaacgggaaatttggtaaaatttaagcctgggatctcggattggcgtgaaatttggcaaggaggttactggaagtgttgtgaaggtgcctgaaaattttggattcaattggagcatttttggctggtttgggcatttcaccgagcatgtggtgtgcggggaattagggttttggtgaaacggccatttgaggagtgaaaaccctcccgaaggagctaggatcctgcagggatacataatggggacaaaggaacacatttcacaacatggattcactgggattctcaggatttggaatttagcacaaaggggtgtgcactgcctaagagacagagagatagagaggcaggggagaaaacaaagctgctcaccgagggggaagaagagcctggcgaggtcgccggaggatcgtcggagatggtggccgccggtggagggagttcgccggcggggggagaggaaatcgccaggagcagagggcaaagggagctggcggtgagaagtgtgcctctggctcggctgcgggctgg

SEQ ID NO: 172767 - DNA, 550 bp, Zea Mays
aattcccatcagtatagggttaatccctattggctcttgggcgacgggaattactggtcagggtttagttaattcacgacccgtcaactatacagtagcctacatggattaactaattctcgtgggcgaggccgggacacggcgggggcgtgccggagcgatgaggggtgagctgggtggcgggctggcgtggaacagtagggcgaggccggggtatggcggaggcacgccagaattatgaggggcgaggcggctagagtagcgacatgtgagagacagggacgcgatggctaagggaaagcggttgggcagtaggtccttaaaattcgtaatccttgtcggcctacaggcttagccgatgggagttaaggctccatgcgtatctggtatcgaccacgtttctagaaaactaatcctcatcggctaagccaacgggagttatttcaaaccgttatccccgtcggccacataagacaaccaacgtgggttaacttatccccatcgaccacgaagaacgaccgacgggagttattgcaacgcgcaggctggc

SEQ ID NO: 172768 - DNA, 386 bp, Zea Mays
taagttggtgtccccactaggagaagaagtggtagccgagctagtctcacctgaaccaaggaaaggaagttgtcatcagatggctattgatagcaaggagccagattcactcgagattatcaaggttgtgtcagaattcctagatgtgtttccggaagacttaccaggtatgccacctgagcggaaagttgagtctgccatagagcttcttcctagcactgcccccatttctaaaagagcttacaaagtgtctggaccagagttggttgagcttaaggagcagattgatgagctgtcagagaaaggttatatcaggctaagcacctcgccttgggtcgcccctgtcctgtttgtggagaagaatgatgagaagatcagtgaaatcc

SEQ ID NO: 172769 - DNA, 498 bp, Zea Mays
gcagatcaacgacactgttccgttgtgtgagatctaatctgcaccgtctaatccaggatggagggttgtggggtcgtcttctcccccccgatggccgagtgtccctccccgcgcagcacagccgcgacgacaacacgctggtgataggctaatttggtaccccgcccattgccagcttgactaacgactttaaaatgtagtagggattaacacgagttcgtctgagaagttcttaccgacgttgatggtgcaccgtgcaacgtccacgggaagggggaaatccgccatagatcaaagccccggtgagaaattccgcgagcaccgctggtcacggatccccaccgacaccacggttacttctgtcgcactctggtgaagcctcccaaccacctcaattgaccggagtggcagcaagatgcgatttggctgagcacgcggtggccaagcgccgacggtgcgctattccctccgattcgggtggtagtggtatgacctagc

SEQ ID NO: 172770 - DNA, 409 bp, Zea Mays
aaattagtcaatgtagaactagcagtagacaataaatcaagaattgatgaaaggtggtcaattacttggacatagctgttgtagtgctcattatcaagtgtaatcatgcaattatcttcatcaaataaggcagcactcaacttcttcagtttaattatctttgcataccttttctgccatgtttttaaatggttcttaacttgttcaccattgattctagtgctgaatttttcattaatagccctggcacaaccattgtacatatgtttcttgaagccctttgatgttttcaaaccagcagccaccaagtcattgaggtgacagagcattaaagaagacattgctgatgtccaggtggcatgaccactagttccccccagcccttcaactacttcttccattgttctag

SEQ ID NO: 172771 - DNA, 633 bp, Zea Mays
gggaaaacggctccctggccacgtccgccatgggctgcgcgaggaaaaaggtcgccgaagggaggggagggaggaagcgacggggaggatgctcaccttggcggacgagtggtgatggcgcggatccgacgaacgatgacgcaacaggtagctctagagaggggaggatgagccggttgtgcagggagagagtcggggcaggcagtttcgagtttatggggtctaggacgtgcgtcgtggaagaagattagagaagcaagcaagcatccggttggggcactacgcctacgggcccactagccagggggtggcgtggagacgaggcacctgcacgagtccgcgtatggcggcggtggctacagccgcgctttgcttgccgatcgttgggccgctgtgggccagcagcggggtgggaaaaatgggcctgcgggggcgctatgcgtgctgggccgctggtgctattggtgggccccatgtagggaggtggctgggcgcgcgcaaacccgcagcgagagcagagccgctggcgctgctgggccactgaggccgagcaggtcagagggggagcgggtgttgcgcctgggctggctggaaaaaaggctaagtggcccttttctattttcttctttttat

SEQ ID NO: 172772 - DNA, 589 bp, Zea Mays
gtccgtcgcacgtgatcttctgcggcgattgaggggcacacggaagggtttccctgaacgaggactcaggtttccttgaaaaaggattcaccccgcgtgcagcagttacccttttgcattctcttccaatcgactgcgcctcttttccttcgtgctcctctgcacccctttgccttcatgctcttatgctctacacccgcgccgccgcacaagccatgacttcgctcggccatcccgaccgctttcagtctaaggaggcgctcaatctggtgcgcggcctgcttgggtggagtgcgctagggctcgccagaagaatccgcgccgacgccgtccccctcgacgatctcgtcgccgaggagtttgtgctatttacctcctacatctcctgcgggttggcgctaccgatctcgcccttcttcttgctgctgctggaggagttcgagcttcagcacctcacgccccactccgtcctccaagcggccatctttgtccacctctgcgagatgttcgtgggtgtggctccctgcacttctctcttccgccacttcttcgtgctggtcaagtccgggaagactagggaccacattgg

SEQ ID NO: 172773 - DNA, 436 bp, Zea Mays
gagggatgggtgcccgcttggcccacgggtttgcggcatttttctccatgtgccggaacattgctgcggatgtccatgaggtggcaagacgtcagcgggagacggacgacaaccttcgtcgtcaagcttcctctctgggtactctcttcgccccccgctcgcctgatgtgcctctccatcctcctcctccggagatcaacgagtggtaccagcaggcatacggggtgccttttatgacagcagacgacgtcgaagaagaagaagaagcttattttgatgatcgtgagcagtttgtcccgcctccgtatcacggggatccgggccaatcgtcctctcaccctccgcccgaggatccttctggcagtgctcctcccccggatcagtctggggaggaacactttgcctctcacctggcgcaccacctctttgctcctca

SEQ ID NO: 172774 - DNA, 351 bp, Zea Mays
gactaaccttcctcacagggcgatgggctcaagcgtcagaggagagatcatatcgctttcgttttctagctcgccgaacggggagtcgaaggttggcccttatggtggcgaacttgcatcgctggttccgtcggccggtgttatcgacacctcgatcattgtcggtcgtcccataacggtcgtgaggttggtttgtgctggcccctaacctggtcgtgttatcttatgccggagagtcgtagctttctcctccctcgtccctcatgtgtcgtcttgcgaggttggtccttgacccttccactgttagcgatggccgagctgcggggtcgactggaaccatctcgatcagtc

SEQ ID NO: 172775 - DNA, 431 bp, Zea Mays
aaaatccacaaataaggccatcagatcatctttaatcagattccaaaagaattgataaaattcagctggaaaaccatcaggtcctggtgccttattatgctccatttggaagattgctttcctaacctcgtcttctgtgaacacagaaaccagtagtgtgttttcctcatccgaaacctgaggaatgtcatggaatgtattttcatctaaagacatctccaaaagctcttctggaccaaacaaccccttataataattagtgatatgtttctttaaatcagcatcaccctcaattatttgttcgccatttttcagctggaaaatcctcgatttcctatgttttccactagctactaaatggaaatatctcgtattcgaatcaccttggagcaaatcttttgctttagctcgctgataccactttaactcct

SEQ ID NO: 172776 - DNA, 1292 bp, Zea Mays
cctcactcggtttactcatttgcaactcaccgagtgccattggtagcccatcaaggaaagcatggttcggctccccttccctcatcaccgcagaagggatgcgcgggggagagtaaaacaaaaggacaggatgaccccgctagacggatctctacatcgagtagaggctcgaggcttgccccgcatgggtatggtgaatgggagaaagtcgcatgaatagcgcccctcggtctgagaatgatcctaggaccaacaagggcataagggacctaataaccatacacgtttcaagaacaattgggccacgaaacaaagctatgggggatcacagattatttcctccaatgacaccaccccgagcacaacgtttgccacgacatcaaagttgcttgttaggagatccaagtctgctgacgttgtcccggcaggcaggccgacaacatcatgagaagtcatcaccatgacctagtgaatcctgaattccatagcctcagaaatacacttcagaacatcaaagaggcgcaacctctgattcctccctcgcgcatgaacaaatcttgtagctcgatctacacatagaaaacccagcgctttaggcctaggacctgcgataaacccatatgtgataaggagtctaaagaaagactgtgagcccagaggtcggaccaagatagactgcctgcccccgggtcgctgagaactgctagtcgtgattgcagatgtcgcacctcagcattagccaactttagggctgaatgagccacacttaaatccctcaaaaggatgtccttcgtccactccaagagggccagtgaagacatggagccatggtgccttctcgctctaggggaggcgtcatccaccctgaaaagcaagctagggattagctggcaaggggataagagcaaaccgtggaaaaagggtgggtcggtcgcaccgtcccctcgaacagtccccctttcggagccactctagtccataagcttaggaaagcaccagctagcgaggacttctgtggatgggggcgcttgatttctctctctctagatcacttttaaaggaggagggtacccggacgagcccgcatagagagaagagggaaaagactcgatggccccacaacacttgaaatcaaagagaagaagtcatatatatatattattgatacagggagacagcgtcgaggcgttgtacaccatgtttagcggacaacacgaatgatgtcgtcaccctaagcacgacatgactggccacatcgtcgtagcgttccagcaggtcctctatcctctcat

SEQ ID NO: 172777 - DNA, 376 bp, Zea Mays
tgctggtccgttttgtcgcggccgggtccgctcggagttggctaatgatccctaggcttctgtgtagaagattaccgcgtgagccacgactggcgccatcgcaaaacctcccatcatctcacccatcgcaagccaacaaacaaagagagggttaccgcgtgagccacgactaaccgggagaaaagcacagagcgtcgccgctattcaagccacagtagctcgctgccagctaagcttacagccataatcgctgccagctaagcttacaaccataagccgtcatgaccagcaacaacgagggagtaaagaacttgattggaagataagttagtgatagattaggaatctttcctgtatgatagacatgacacttccc

SEQ ID NO: 172778 - DNA, 953 bp, Zea Mays
cgagactcaccggcggcaaaatagctccggcgaagtggtcgatgacgtgggggaggtcgcggcggtcacgtcgatgtgcgggtcgacgtcggggatggctggtgttggtcggacctcatgcacaggcgggggagctcgtcggcggcgaggatttcggcctaaccacggtggcatagttcaatccagtgagctggggagcttcacagggagctagggaggttgtaggcgcaggcaattggataatggtttacctggtagcccggtctacgtgcggtggtgggcggccgaagtccggcgagggcgatcccgctgctccggtgaggcaaggtcttggttctcgcttgcaaaagcttcacggcttcacggggaagctgtccaggggctcgggtgaggctaggtgtctacggaaatggctggccacggtggtcggcgctcgggtggctcaggcgggcggtgcagtgctcgccggagctaagagttgggtcgggacagtgagggcaagtgcagagtggagtgtcgcgcgtccgggggtggctttataggcgtgagcaagcatagccgagggccgctctgacatgcactcggggcgtgcatgggggagcaccagtgcacgctcggcctcctgggcacggcgtcgagcacgagccagcgctgagagtggtcgttttcaggcgcccattggctccagatctttgcgattatggccatgatcccattgtaatatctcatcaccagacctccctttgtcgtttgtgtgtggcgacctacggattttgttgactggaaccgaagatatggggtgctctagtagggtttgtctcacggcgtgaacccgaggtaaaaccctcgatttgacgtgtctagggcccgaatcccgatgccatcttcacacatgttgcagaggggttaatttaacacaactttgtcaatgggagcttagggttttgagttag

SEQ ID NO: 172779 - DNA, 425 bp, Zea Mays
gtctaaaatagctctagttcatctgttagggagaaaccataccttcgtttagtggtaaaacacccttcaagtctttattagcagtaggtaaacccataatggatctagcttggtgtcagttgacatccttggggcattgtgtcataggggccaaggtatgtgctagctaggttttatagctctacaagacgaagatgtgtcaactaggcctagaagctttataaggttgtcgttagtagattgtacatgtggttgtgcacatagttattaaggcgtcactaaagcggtaaggcaaggctgcagggcaaggtgtcgtgatcgccttactcgtcgatgtaagacgtccgccttagctagagtttcgccttttaggcgcaaggcgtcagtaaggtgttagataatgtacagatggaggagtggactgc

SEQ ID NO: 172780 - DNA, 500 bp, Zea Mays
ccagacttggtccctgctccaagcgtctgcccctccctactccattccaggccggcccttgcctccttgagctcacctccaaccctagagccagccgccagtcgctcgccttgaatgtcgcccatgcctgcagcctctgttgctgcagcgccaccattgtgctcacctcggcgtcgtcagctccttggtcggccacgctaaggctccagccacgtgcctgtgacctcgtggttgaccaccagctcacctatcacttgtgctcgctgcatgtcgtctaccccacccaacagctgctcgatgatatgtgcagtaagctacacatcgttgttgaccacccgcggccgtgccaaggccatcacaacaccttgctcaccgtgtagagcaggctcgaccaatcccctccaccatgctacgccatgcaatgtcaaccttgctttcttcctcgctgagtgtttaatgaaaacctcaagttcgacttggtatggtgagctcaattcctt

SEQ ID NO: 172781 - DNA, 376 bp, Zea Mays
tgcactttaggagaggacaaatatgtttttttagaaaatgctctttgcataactactcctgactttcacgacgagacatcttctatcaaaggtggaccgtgtaaaatagaagatgtgtattatagatgacactgtttacagagtgaagtttgaaatagaggatgtcatagaggagttgatgggatagccttacgtctcaacatatttatcgttaggtgctctgacctagggatagcgttacgtctccacatatctatcgttagctgctctgacctctattgctcgtccatgagttcgtgccactgctagcaataacgtcttcctctgcaaaacaaagatacacaccatatgatccaatctaatagtacatccgtca

SEQ ID NO: 172782 - DNA, 1204 bp, Zea Mays
gtcaagcccatgtcttgtccatggagagtttttcatgtagaagataatcccggtatgtcgccctccagtcgttcaaatggtctgattcactacgctcatcagtgtccttgacaacaaagactacgggggcatgctgggggccagcccctatggaggtagggtgggtcgatattgctagtagggaaacgaggatcattgtcgacctaccccgtctcctcatagtagacaaagggttcaataaggtcgttggtgaaaaccctatctaggattgtttcacatccgtataccacctttgccagcatgccgatcacctcgttgtcccatcagtagtcagagtggttagtagtctcttctacagggatcatttggccttggggcggcagcgataaccagagtgtcatcatgttgctgcttgtttttctcttctacttgctgacacggtcaatagtggccttatcgatatccatgtcttgcttggcctttttttagagcggtcgaagatcaccacaatagcatcctcgtgcggacgcatgactgattgcgatgtcgagaagctcctttgtgatgcgggggactttgccgcccagcttgtgcgaaagggtctcactggtggtcccaaagatgaatgcactaacgacatcagcatcagcgatgttgggaagctcgttgcattatcatgaaaaatgttagatgtagtcccagatggattatccacgcttctcgcgacaattcttgatgcgccaagggtttctcgggtcgcacacacatgaccaagatgttgacagtattagcccaactttggatgcatccgggtcttaggtgttctagccaagaacaggccaattcggctaggtagggggaggttacagataacgaaatagccattatccacccccagtctaacactaactagtaatcttcaagccacaaactggagttcgattcctgagtacttgatgacattagcaagtgcatggtatgattggggtaccaatgcctagaggatgtggtgctcaaaagcttggggacgtggcaacggtgggctcagacttcgatcctcattagggatgaaatgccccccatggcgtcaaggatagccatggctaatgatgagcctcgtgggctctcgctcacggctacgaacatcaagaatgtttcgagcgagaggtggatggtacccctgacattgtgctttggttgtcgg

SEQ ID NO: 172783 - DNA, 436 bp, Zea Mays
tgattaatcttgttggggtcactggtgtggttgatgtcttgtgcgtagtatggggacacgtatgtgcgtgtgccgtggtgtattgtagtggtggtggcgtaagatatttgattgaggtgtgcgggtatatgccgtaatatggttatactcgcgacgaagaaagatgcatgtattgtgtaacccaacgtttaggttgctgtcgtataatcatgcgaaggatgctcatgatggtcgtgtgattgaggaggtttgtagtggcaagcgagaagtaagttgagtttttcaaacggttagtggatagtatctatcggtgttgtcatgatttttgttgtatggtaatgtgatgcttcactttatccatcattacattccatgcccagtggataaataaatgtcttgttgattggttaaaggttttatatgagcgttatcgcag

SEQ ID NO: 172784 - DNA, 325 bp, Zea Mays
gcttaaaccagattcaggacctagagaacgtttcccctaggttaatttcaggaacgacacacagagacgccctgaccatggtgaccgcgggtgaggcggatgatcataaacgttctcggcgatgggtggtggtctaattcaattgggcgggtctaagagctttaggagggcctagggacgctagaacaagcaacagagggacttggactgacctgagttgagctggccgcggcgaggtctttcctacggtgttcttgcgcggatttggggaaagttctaaattcgcacaccctggtgaacgatcgaggctaatttttggtggctg

SEQ ID NO: 172785 - DNA, 349 bp, Zea Mays
gttcgaatagcttttaatccatcaggacgcctaggagactgacagggagagaccggcaacgctgcctcgactacaaggcgtagtttgtcttctagcggttccataagttgtgcttttaattgtcatccttattttcttgggctcctaccaatttgcatgttgaccgatgagagtgcaaagtgcactgttgtcaaacaccaagtccacatgaagagacacctccgtgagcctgtggattcatagggtagagtgtacctaaagttgcccaaaatgagccccatgtcatattggaactactccgatggccttggcatgacaccctactgccagcgtcgtttgtcatcaaaac

SEQ ID NO: 172786 - DNA, 278 bp, Zea Mays
tgaaatatcccttattcttgccccccttcttgaacttatcctttttgtattccttcttggcttcttgttcctttttgtttggacaatccgctatgaaatgaccggtttggccacattcataacatgccctcttctttccttctctttgatacttatcatttttcctcacaaacttcttgaaggttttgatgaacatagctttgtcttcatcacttgaactatcttcatcacttgatgtttcgaccactttctttgccttgtggtctttgttcttcttg

SEQ ID NO: 172787 - DNA, 576 bp, Zea Mays
tttgtcgaacaaccctgcgaggcagagctacagaccaagtcctcaccgagcaagcctgcgaggcaggacgaccgaccaagtccccgccgaataagcctgcgaggcaggacgaccgaccaagtccccgctaagcaagcctacgaaacggggcgcccaaccaagtccccgtcgagcaactcaacggagtggtggggtcccagccacgaccggacatacgtgtagcataccaaaggggcgccaagaggtcaccatcaacacgacaggatgccccacgaacgatctcaggcgtatccccactaccatgtggagtcaatcaaccccagtcgtaggaggacctcaacaccggagtctctacagtgacccgcataccaagaaagacgggacagtgcgccataccgaatgtatacctacgcttgtaggccggtgacgcgaggctcatgacaacggacgaagtcgcgttacgcatgaccgcaccataagactaactagtgggacccgctacgtactactgcgaagacaccagcaatggactcgcttgtagttcggattgttgatgagtgattgtcaacgagtagc

SEQ ID NO: 172788 - DNA, 550 bp, Zea Mays
gtatggtgaaaggctgaacatcaacatctcaagatgctcgctgttgatctcaagcggtgccaaaacagccgcaccgacgccatcaggaaggcggcgggagcctcaagaactttgcttgaggttaccaccataggctcccaccctggctccatcatgcccggggtcgaagccaatatccccaaccaggcaatgctcacctctcgaagtcagaggcgaggaggagctcagacggtttaggttggccctaaaccttacgtgtgaaaggtagcattacatttgtccaaatcctagtctggtaaggttagcccccatgaaacctagtttttggcgccatccaaggtccagcctggttagagttgcccttatgaacacgatctcgggtaatacatgtaccccatcgcgaaggaaaggtaagttctcatccattgatttcttttcctttttatgcatgttaattatttttactccttttaggattcaagcttgtgtggtactcagaaaaacaaataataatgcctattgttacagctggtttgaagcatcgtttgac

SEQ ID NO: 172789 - DNA, 597 bp, Zea Mays
ggaagagagatgacaagggggacccacctatcacatagcgctcgaacgagcggtcccagacggtggggtcatgtccatgagcgcgcagcgggaggaggttcgctgacgagcgggaccaccggtcagcgacgttaggaatgtctggttgtgacaccggtcacggggggtcgtaaactgggcccgtaggtcagaggaggtcgcacgtggttgtgacaccgagaagcgagccccgcatggcagagaccgcaatggaagatttgagccggccgaaggtgggctggcggtggaatgtctggttgggcccgcgcgggagagagttgggcccaacaatgctgagaggagaaaatggcctacgggtttgattcttcttttatttttttcagtttccttttcttttccttttctattttcttttcagatttttgttttctaatttccaaattgaattgtaaatatattttgtattttcaaactcatataagatgcacaataaaaaactcagcatgtgatgcagtattcctattattttatttattcatttatttattatcctacataagcaaatgcttttggatatgtagctcatacataattatt

SEQ ID NO: 172790 - DNA, 694 bp, Zea Mays
cggggtggcccttgtcctggctgttgcttttgatcagggggagggtgtctagatcctgtatccgtgttttgaccaagcagagagccgaggccagggttgggggctctgatgcgtacccaagcccatcctgtggacgagacgttcgagcggtagttgttgaaatagcgatcagcatggtaaaaagtgcatggtaattaatgtagcccgtgtgtcagacggaatggtgtaaagcagacttgacaccagccttctagtttctgtagccatcttgtcgtcagcggtttttgtgagagggtgttcttctattgatgttgttggccgaggccatgttcgggcagacggagacttctcccgaggccgaggtcgggtctatgcatgggtacacagtcgtgaggcgccactgccagggcagttggtgagactgagcttgggcgaggcgtagtttcctctcgaggctgaggccgacctcgggcgaggtggagtttcctctcgaggctgagcctatgtccagtcgtcgtatgtcatgtccgaagttgttgaagatagtgaccggagcgagggaatagtgtccagtattggcgggtgcacgtcatcaagggcggtgaaagtagatttgactgtggtcacatcatcctttgttgaatgtggtgtcattggtggagcaggtgttcgtgtcggctgcatttaatgtgca

SEQ ID NO: 172791 - DNA, 1096 bp, Zea Mays
gaaaaggctagcaaggaacaacttccggatctgaggacagatgaaaagggggccctttggttcagaaaccatctatgtgtgccgaagggagaggcacgagaaatcctgctagacgaggcccacaactcagcctattctatccacccagggtctaccaagatgtacctagacctcaagaccagatactggtggagaggaatgaaaaaggagatagctcaatatgtggcccggtgtgatacttgtcaacgaactaaggcagaacatcagaggcctgcaggcctatgcaacccctcctagtgcccaaatggaagtgggaagaaataggcatggatttcgtaatcggactgccccggacccaaaaagggaacaattctatctgggttgtaattgaccgtcttaccaaggtagctcacttcattctagtaaaaactaccttcggaggagccacccttgcccggatatatctcaaagaaatagtaagacttcatggcattccatgaagaatagtgtcagacaggggatcacaattcacctcaaaattttggatgagccttcagcaagctatgggcaccaagctagacttcagcaccgcctaccacccccagtcagatggacagacagaaagagtcaacaaagtccttgagagcctgtgtgctgacctttgacaaaaactgggagtctagtttgccgtatgcagaattttcgtacaacaatagttaccaggccagcatcaagatgtcaccttttgaagccttgtatggaaggaggtgccaaaaccctatgatgtggtctaacgtaggggaaaataccctagaagggcatgccttcatcaaggaggcagaagagaaagttgccctgatccgcaagagactactcgaagctcagagtcggcagaagagttacgcagacaacagaaggagagaactcagtttcgaggaaggagattttgtctacctcaaggtctccctaatgcgtggagtcaaaagattccaagcaaaagggaagctagctccgcgattcgtcggcccctatcctatcatcggcagaatagggccagcagcttaccaccttcagttacgagagtccatgtcagata

SEQ ID NO: 172792 - DNA, 382 bp, Zea Mays
tgtgcgcctagctaaggggatcgccgaggtcttttccatgtgccacagtcgtgctgttgaggagcatgtgcactggtgccagactcaggcgcttcatgatgacatgtgaagcttcgcggcttccatggaccacccatgccttagcatcctcctcctcctccaactcctgcctatcctaagacactccatgaatggcactagtaggagtatggtgtgcccttcgtgactcctgaggatgaaggtgaggaatttgatgattccttttctagtctactcctgccgtcgctctaggacctatccctggtgaccccaggccttcaggctctggtcaccctcctcctccaccaacactttagggtccttcatcttcttctgcttttcc

SEQ ID NO: 172793 - DNA, 478 bp, Zea Mays
cgccggtgaatcgctagaaaactgagcgcagagctgcccacaagctcgccaagcctcggcctccgtggtccaaccaccctagcccctccccgcctagtctagcttcaccattacctcccccaaaggctagtgaagctcccaagaccctcagaccaaacactaatttgccggagacgctgaatcacctggccgaacttcctccacccataggcattcgtggtccaggtaatccagcaatccattctttgattccttgcacacacactttctaccacctagtgaagcttcccgtgcggtttaatgtgtcgttgtgttttggccggtacaggcgccaccgatgagaaccgtcgcctgagctcgtggccagaccaactccggtcacctccaacgacgatgcacacatcgacatgactgctagaggatccccaatctcacctaatccttcgctgaagctctattgtcaccggtaagctgctcc

SEQ ID NO: 172794 - DNA, 433 bp, Zea Mays
gcgaggagcatgttgccatggccgggagagggatgggagaagaacgcgtggggagcgagaggaagaaggatcttgtgcatacctggtaaccgttgtccttcacgcctgtgatctggatctagggaaagacaggaggttttgcaacggctagagcagtatttatagaaaagagaggatgtggaaggcggttgtaaaatttgtcgcaggtcgcgtcctggccgagcgaaagcgacggtcgcgcgacgagttgcacgatacagtaatcgacggagactgagttaggcagaggtaggcgatggtagatgaaatagaagggtaacaggtgtgcgagcagcacaacgttcacgaggaggaaatgtggtttgacgacctcgcgaaaatgacacaaaacatagaacgagttcgacgagaggaacacacatatatataatcc

SEQ ID NO: 172795 - DNA, 301 bp, Zea Mays
cccagatggttaatatcaggaggggaggaggtgttgatctacccgcacgaattcgtcgaagaagggttgtagctaatctagaaccgaaaatgaatcctcctccaaatcccccacctgctgatgacgtggctgcagctcaaatgcaactactacaacagatgcctaacaccatgacagagatgcaagcacaaatctatcaagagcgtcaagaaatccatcaagagcatcaagaaatatgtcaagagcgttaggaatgacagcagccaccacctccaccaccagcaccatccagggataagca

SEQ ID NO: 172796 - DNA, 370 bp, Zea Mays
atacttagcaatttccctcttcatcctggtccaccaatataaggatctgaggtcgtgatacatcttgttacttccggggtgcatggaaaattttgagagatgagcttcgtccaagattttcttcttgagttctggatttttgggaataaccaatcggtcttcaaaccatagaacacccttaatatcctgacgaaaacatttgtacttatccaccttttgatggagcatttccttaatgacttgaacacccttgtcgctaatctgtgccaggattatctgctcttttaaggttggctcaactgaaatataatccaaggtacctggggaaaccacttccatgttcagcttgcgcaactcgtcacacagagtg

SEQ ID NO: 172797 - DNA, 428 bp, Zea Mays
taggatttctgtaacgccaatagaagatgccgaaggggtcttaggggcctgcttcggaggtacaagtgctttattgtcagcacgaccaatcttcgatgatttttgtttcttaggggcaggtgattttggccccgattgtgaaggctcaccttcatcagcaaccttacatttcttcgaaggtacctttttcttcttgtcctcttgaactgacctcatagcttgtattttcataatactcacaattatttttcctttttactccaccaacttctttttcaaacttttcgtaatctggataatcaaacaccagcgcgtccatgacccgattcaaccttcgtttctcctgattgccgaaggcagcagtcattagctagtcctatttctttgtgtaattacctagaatctcattacacattgcctcaatcatc

SEQ ID NO: 172798 - DNA, 712 bp, Zea Mays
tgctctagccatggtaacacctgaggtgttacatgcgcgggatgcctcgaatcactacatcggttttgaaaatttatctccttaaccttctgcgacagcctcgagaaggtgcggtattggcgcgagtggtggtgcgactttcctgcacccaggaaccggcgcgccggatgtatgacatgtgggcctgggcccccatgccagaggttggaccaccggttgcagtgaagctgagggggcgcgcaaatgcggggcggttacatgctccttgtgcggcggttcacctccttgaccgctggctgtggtgaagatggaagggcgaatgaccacaggacggttgcacgctccttgtgcggtggttcgccttcttgaccgctggttgcggcgaaggcgaaagggcgtgtaaccgtagggcggttgcatgctccctgtgcgacgattcgccttcttcgcgcttcgggccagcttgtacgacatgtgaggcctggccccgatgtcatagaatgggaaccctagcgcacgtcgggggagaccttgcccgtgacgcttcggggcacgagcggggaaatctgcctttaaaaaggagttcatccatcgggcagtagccatgcctcgcttttcttgcattcactgcgcccttccgccttccgtgcctctggatgaggcgtgccggtgttcgttggagggatccgcgtcagggtcacccccctagcgg

SEQ ID NO: 172799 - DNA, 620 bp, Zea Mays
gttgtcctctaataaatttttatccaactcggctaaaaatccctgtgtccaatctaaattcgaaaatcaacatcggcaatgaattttattaatccgacttgttttatttcgataaccaatccgaagccgatcgatctcgattcattttattctacttgtgaacgagaatttaatttccaagcgacacccaaataaaatatctcggttcattttaattcctctcgttcatccgtacgtcagttcgctctgttccctgcgtcggtctcagccaacgagtgagcgctgcgcgaatcggctaacagatgacccctcctctccaaccaataaattgcccgtgtcttaatatacaactcatacgggagctcttgtctcagagaaataaaataaatattacttagctcctaagtaatcagcccctcctcaattacagcctctctctctccattttcccgcacacgccatctctccttcaccctattcctggcatagtctgccactgccagcctctggccagtagatggctgccgcccgtggtggcaaatggattgccagcaacatctcgttaaatcaaccaacatccttatatttaaattcccacccgctttgctcttttctctctg

SEQ ID NO: 172800 - DNA, 373 bp, Zea Mays
cgcggggacggcgggttgtttacgaaaaagaacgggggttttttgagaaaaggggcgcgacgaaggggtatgctcgatcctggaccgcacgatagaaaacagatggcccagattagcccctgcttaatccgaaccggtacgcgccggccaccgtaagatcacagatctacggacagaaggcactctccccagcattaaccgcgctagccattagatcacagatccacggcccggatcttcacacgcaaaggggtacgccggatcgattctccaccacacatccccggatgaacggttcagaacgaatcggtcacgatctaatcacaggcgtccattacggatccaacggccctgcgcccttcttcctcccttc

SEQ ID NO: 172801 - DNA, 441 bp, Zea Mays
aacaaatcgcaagtaaaaataaacatagagacatggcgatttgatttactagagttcggttccaaacgaacctatatctctatttaggtgtcccaaaggacgggtctatttcaaccctctcaaatgattccaaagatcatgcttgagccctctagaccttctaagatgagaggtcgtagtcaccgcaaggcactccacagactcgaagcctcttgctagcttttataacgatggaacaccaaacacaagagcacaaaatctcagcaacacaacacactcactcaaggcactagcacaagatgctctagaatggctatcatctgcacaattctcactaattgtcagttaggaggcttttgatctatatggagtgttgctctagcttgtaggagttgattcatagctcttgcatcttgaatggtctggttggggtgtatttat

SEQ ID NO: 172802 - DNA, 283 bp, Zea Mays
ggtcacctttggggaaagccacaatgatcatttgtgagtgtggttaaaaaccctagagctcccaccacttgtgttgagatgcaactaagatgcgctggcagacgtggcggagctggaggccatggatctggaagcagaactacaagggagaatggctggataagagtagaagagggtcctctagtgcacagaagaaggcaatggatcaagctgatgaaggggatctgagtgaaaaagaggaaatatgtcatcaagatccatgggaacaacagaaaagaagtcg

SEQ ID NO: 172803 - DNA, 607 bp, Zea Mays
cgtcatcacacagtactatgaataattatgtgttatatacagaagaaaatacataatattcagatttaggttgaatatagtatgtggtagttgatatagagggaatacatataaggatatgaacacggaggattgcagtatagagtaaaaaatcttgctgactagactataaataacagtgtagagtaagaatatggagtaacctgcactgccggtagcctcacactcaagtacaagcacaacattagtgaaagtagcagaggcatcacaggattcccatgaaaagagacgaggtgccgacggcaaaaaaaaaaggtggggggcgagctattcatctaaccatcttgattagagtcctctccagcccaaatttagatgcctattttctctttaataaaataaaacccgtctacttatttcaaagttaagaatttactaagagagctgtgttatatagttttgtgttaaagaagtgcctttgatacaaaagaagcataccaagagtatagtggcacagatagccaaatccacgcccacgttagtacacgcgtatagagcaaggcacgaagtcgtactctcatagtgatcctagcccggccgcgtggac

SEQ ID NO: 172804 - DNA, 619 bp, Zea Mays
ctcaggcctcgagacttgcatgggaatcataggggttacctagttaattactcgacaagaaattatttagaaaccaaaattcccttcagcataatgattagattacaagacctaggttatcacattctataaagaggagcagacgcacaacatgcctaacattagagctttggcttctaggctagagtctatagcatgtgatagttggctccatagcatagggtaagggtcagaaatagaatccaagggacaaactaaactgagtcatgagtcagctcaaccatggtgggtctctttctccaaaaaatggattcaatcctcctcttatgtctagtcacctcgggggacacaactgtcatgccactcatcggcaccactgacattaagatgtacaacctttaggtctaacattcttaggggctctccatgaagtgtataggcaaaaaaatggcctgcctataggatcattctagtggcagacctagggggctctatcagtgcctaaggaagaccatacccacggccgtcgttaagacacacataaggattctacctaggaagactagcttcagagaccactggtgggaccactccacatgggcctcaagtcccgagagcc

SEQ ID NO: 172805 - DNA, 552 bp, Zea Mays
gataattaggcccaaagatgggctgtcagactgccctaggtctgaattcaggctgacagtgtgattgggcaatctttggacttggattcgaccataatctagttagtgtttggctatggttgctatagtaagaatgtagctagatcattaggctacaactttgctacagaacaatggtcttgttgccatgtaaaaccaggaggaaatccgccccaaacatggtatgtcaggctgactgaagaacaatcccatggtacagtaaacagataggatcaggttctgatcccctcgccgccgacgagccgcgcgcggattcgtgctatcaccgtggtgattcgcgctcggatcagttggatagcaccaggggtaagtaaatatcacgccgtggatacactccgaccactattttactccggccaccgtacccgagcagaccacagttgatttggatgggtttgccagagatagccacttcgcggccttgcgccacatgccttggcatgttaacctcaccaccatgactcacattagctcgtccggtggtcgcccggg

SEQ ID NO: 172806 - DNA, 564 bp, Zea Mays
ctagaccgcttgagctccattgtgcatctaactctaagggtgggcatcgtcccttctgttaccttgaacaccatggagcttgtggtaggcgagttgggtctctatgccgatgtaaaatcccttcgaagcacaaggaatgcccctataagggtctcccatgaccgatgagatgtctttgtcgcggcaaggttgatgtcgatgtagtcgtcgttggcctgacaccctttttgccttgtcgggttattgctaaccttcagactggaagggtaagcatcagcctacattgggtcggtgacgagtgtcaacaatggcaaacccagttccatgggtcctgagctactgatctgcacagcattccccgaacgccatgagttagtgtcgctgctgataagtcatgcctcggtgatgctcgagggcgaggttaggcgacggtcacttggctgccgagggcggagaggtggttgatgttctcttctacccccgttgggggtgcggcctccctccggagtcgaagggtaagcaacatccttttgctccttggcgatgcccgaaggcagtgctgag

SEQ ID NO: 172807 - DNA, 532 bp, Zea Mays
tgaaaatttggcgtcactatctgctgggaaatatctgtcacatttatacagatcataaaagcttgaagtatatcttcacccagtcagaattgaatatgaggcagagacgatggcttgagcttattaaggactatgaactggaaattcattatcacccaggcaaagccaatgttgtggcagatgcactaagccgtaaggtttcttgtcactgtcttacggtgaagacctctgacaacactttatgtcaagagatggagaagctaaacctgggaatggtccaacaaggaactttgaatcagctaaagcttgagtcagtcctcttgcaaaggataattgatgcccaaaaggataatgagggtatgaaacacattcgtgagaagttaagggctggaaaagccaaatgtttcaaggaagatgatcaaggtattgtatggtttaataaccgcatagtggtgccgaagaatgaagagctccgccagcaaattcttgatgaagcacatcttagccgctactctattcatcccggaagcac

SEQ ID NO: 172808 - DNA, 687 bp, Zea Mays
ccgaatcattaccgcaacaccctcgggggctgggtaaccgccagcaccaccatggaggacttatttctctacaatagccacctctaaggctgaaggattctcagtcacctccatgggaatcgagcaatcttgaccaacatcttggcaccgaagaccgccttccaaggtcgatgatgcgcgagatgctgcccgggatacctctaatcccacatctagagtgtcagagcagacgtccatcatatcaccatcagttggctctaacagcatatcctcaggaacaaaatcctcgagggcctgatcaaaatctgttatggataattcttgcaggctaacaagagcagacagagctggagaaggaatatcgctatccccaccactgcctctgtaacgtcgactattcttctgaattagtaggacttcttcttcttcttcgtcgtcatcaacaatacggataatagacgacgcatggtcacacccaattggatcagcttcagcagggtcacacccattgggatcagcttcagcagggtcacacccattgggatcagcatcagcagggtcacacccattgggatcagcattagcagggtcacacccattgggatcagcatcagcagggtcacacccattgggctcaactggcgcacgaatacgttcgttggggtcagttggtgcacagccacaccc

SEQ ID NO: 172809 - DNA, 384 bp, Zea Mays
aaccagaccttcacaacaaccatttcatctttggagctgattgatgggtaccacaaattccttcatgcacttcggccatggctaatatagcatcatctgggcccaagcacttaagcaggacgtcgttgactgttcggcggtagagttcatcactcatcaaaacatacttgaaagctatacgccgaatgttcttatctgtcctgacattgggatttcgtaaataatttgttatgggcgtcctccaatcacttgcatcggcttcattatcagccgaatcgattaggagaaccttcttggtaaccatgtacggtccggcgccttcacgcggacggtccacggcctggtgatttgcccctgcactggttatcagattttcagtgttgt

SEQ ID NO: 172810 - DNA, 509 bp, Zea Mays
gtcgacggaggatgcaacgtagttgatgcgggagcagacgtttacgtactccctctagtcctccttgagcagcaggtgggcttagatgtggagcgtcatgtggattcgacaataggtcgggggaggaagaaggtctggcctcagggtggtagtagattcggttggagtggacgaaagtgaaggtttaggtgcggagatgagagagtactcataggcatattgagtgctaggggtggcttctattttgcacttcaggatagggggcctgctggagctatgaacagttcatcgggctgcagaaaaagggatagagagcgtgatagggaggctgctcaagttggtcataactgtggatttattatattaattaaggatatacttttacagtaaatctatgacacatgcacatattgatatgtttttatataaagttggtcaaatataagaaaacttgtctagaacaacaacggtcagatgtaacattctttgggtcactagatgtcgctttg

SEQ ID NO: 172811 - DNA, 611 bp, Zea Mays
cccatatcgcgttttaaaaaaaggcctccagcctgcatccgagccagaggctcatttactcccccgccagccgtcctctctgtctctctggcacctccctctcccccgccggcgatctccctccaccggcggccaccgtctccgactgggctccggcaacctcgtgtccctctccttccctccttggtgagcagaccactccctcagttctcttctccctctgttctggtgagcagaggctcccacttctcccttttgtgcaaaaactccaaatcctgagaaatctagtgaatccctgttgtggtatgtgtgtctctgtgtgtattgagtatccctgcaggttcttagctccttcgggagggttttcccacctcaaatagccgtttcaccgaaaccctaattcctcgcacgccacgtgttcggtaaaatgcccaaaccagccaaaaatgctccaattgaacccaaatttttcaggcatcttcacaacacttccagcaacatccttgccaaatttcacgccaatccgagtttccaggcttaaatttcaccaaattccccgtttcgagcgatcgtttccgagccgagtgcccaaatctctttttcttcgccta

SEQ ID NO: 172812 - DNA, 1116 bp, Zea Mays
tactttcttgactaaggcatccgcttcagggtaaaggcgtcgccttggcgccttaatcccaattggggcaacactttgtggataccttaccggttgtaggaatcaaagacaccagtttacccaaacacagcttcgacgccgacgcttttgaaatcccgacgcaccagatcaatttgctgctctagcggtggggatctcccagcggcgacgcaggcgacctcccccagcccctccgcgagctcttcaaggcggcggcgcatgggacctctccaagccggccagtccccctccacgagcggcgttgtccagggctccaggcagaaggccgtgccgacgagttccgccgaagcgctgactccctcagtccctcctcttcgagacgagcccctcctggattcccctccgcttccggtgagcacctcccctcccagcctcccttccccctagtgcgctctgcgttgtgcgctctattcctcttctctgtgactgttgttccgtctgttgtgattcatctagccatctttcatatactcatctagtcatctgaaattgattcatcttagtaggaaggagccacaccatcgggcaccatcgggcgtagaaggtggagttgacgtcgaggaagagcgatacaagagctcggatgatgggcacaacaacagcttgagcatggaggttgagcagcgtcgagagttggggcaggagcgtcgtcatctgcggcatcgttggagaagacgtcgtccgccagagaggagacggtagtcgttgcttgtccgtcggagacgagacggcagtcgctgctcgtcgatggaattaggatccatatgaacaagcacaaattgataataatggagtaaatcttagaagtattgagatgcacggtacccaaatccatgcatcaagaaatgagcaaaaataacttcattggtgctcgacataggatatgtctactaaccggtgatttttcactggtttatcttcttttcttgaagcaatcctgccacaatcgaagctctatggtccttggattcaatggtggaggcctcgtactcatgcggatgagacgtggtgttgggagccatgatttggcagaagcatagatttggcagaaacgtt

SEQ ID NO: 172813 - DNA, 302 bp, Zea Mays
aaatgggccagcacaaagggtggcactttacagtagccagcacctgacatagacaaacttatccataaaaacacgtcacagcactcaaacacctaaatcaggcccatatcccggctaactcagtagccccagcaagggccaattcctggcatcctctccgatatctcgcagcacctgggacacatccgccacgccttcttcgaagatagtaattgcgatgtttccacaaccaccaagccactaaaatcaccacagaattgaactcatttccctgcggtttggggactcttctctctgcttga

SEQ ID NO: 172814 - DNA, 313 bp, Zea Mays
ttcttaatcgaagccatcaggtccctgctcagttcgatagttcgttttggttcttcgtcagcttggcagatttcacaccgcgccggcgttgcttattttccttaaaatttgggggtctaagtgaattcagcgcctctcctaggagattccatgcccgcaccccggcgttgattatttagtggcggcgcctgttcttcttagtctcgcacccactcctaatgtgatttgtgcaaatggtaggggattattgaacaaaatttccaaactcgaccccttcctttttcagtaccggccttgcttttggtgttagttg

SEQ ID NO: 172815 - DNA, 1197 bp, Zea Mays
ctaggccatgtctatgccacagttgtgtgcctgtgttgtcccttagtcatgccatgcgctcagacctgatcttcttcagcccatgctgcctcccctgctcatccttgtgcatgtgtgactggatgtttgactgtgtagtcgtgccttgagcccacgctagggtcacaccctctaacatgttgttgccgccaaatcttagccaaattggtgcaacaatgcgctcaatatttcatcgcttagaatctacaaacaataaaaatgtacatttcctattatcataattagaagataaatgtttccaagtagcatgtgtttctcatctgttcgacatattgccacccctttctaagggttccaagattagcttcatgttgccctaatgtagtctctactagatcacattagggttgtgcggtgctccgccttattttggtagatcttgtactaagcgttgttgttggcaaggtctgctagttatcttgtgtcgcatcaatttactatttctttttaagcttcatgctatagatcaattttacatgaccagatttgtatcgatcgcctggttgctacattccacaaaaatgcagctgcaacatgtgcatactacaacccaagagtccaatatgcatctagcatcctgcattacatgtcttagtcacgtcattcattctacatggaccttcttggaggtcctaatccgtgttcgcgcacatgggcttctactcgtggttatggatgttcctatggtcataggtttgatacatactgtagatttgatctggaatattcctatgaatgtgtcggggaaatgggcccctaaggcccactagtcagagagagcattggggaaaaggtctccggactaccagggcccactagtcaataggagggtaacaaaaccgtctacattggaagcacctgccctcgaataaacgtcaaggcaccgagcccggggtcgggcgaggcagagccaaaaaggggggctgatgaaccgagaggaagtcacccgagtgaattcctcgcctggcccaaaactgacccaccataaatgaccggtcgcattaactacaattggtgtcgagccacagtaggagagtcggtctgcctaccactcataacctacgagcccctcggtctgcgacacactcatgacctttgagcccctcggctgtcatagaaccttccaagttatcgggc

SEQ ID NO: 172816 - DNA, 949 bp, Zea Mays
tcctctccagccttaacctcagcggcaccgagctcacggggaacatcccagctagtctcgggaagctgccacgcctactctccctcgatctctccaacaattacctgtcgggcgccgtcccagccacgctcggcaacctcaccgcgcttgggatcctcagcctcgactccaacaacctcaccggtgaagtcccacacgagctgtccaatctgcggagcgttggcttccttaccctgagtaggaatgacttgagcgggccgctggcccagggcctgttcaacgggacgtcgtcgactcagctgagcttcctcagcctggcacacaacagcctgaccggggacatccctagcgccattgcttccttgcaaaacctccaggtcctcgagctgtcggggaaccagctctcggggcagatcccgtcctcactgttcaacatgtccagcctgctaggcctgtacctctcccggaaccacctctcggggccggtgccagacaaccagagctttaacctccctttgctggaacgcgtgtacctcagcaaaaacgagctcaccggcacggtgccgccaggctttgggacgtgcaagtacctgcagcagctcgttctgccatacaaccgcttcaccggcgggataccgccgtggctgtcaaccctgccggagctgacgtggatctccctaggtggcaacgacctctccggcgagatccccgccgtcctgagcaacattaccggcctcaccgtactagacttcaccacgagcaggctgcatggggagatcccgccggagctgggccgcttggcgcagctgcagtggctgaacctcgaaatgaacaacctgacaggtaccatcccggcctccatcaggaacttgtctatgctctccatccttgacgtatccttcaactcactgaccggacctgtcccgcggaaactgttcggggaatccct

SEQ ID NO: 172817 - DNA, 368 bp, Zea Mays
gtgccccaagtggattctgtcagcgtggctgccactcgctcgcgcccagcagcctttttctcctctctccctttctctcctgcaaggcctgcaaccaaggaacctgatgtgctcgtggagtggagggatctggaatactagaagcaaactataggcgttagattctgcgccaagttggtgttggtttcatcgcctctatattttgcgctgcatcttttggccggaccgaataaagcgatccgatcgtggctcctgctcccacacgcacactctctactcttctctgccctggttggaatggataaagccagcgcagcgtgcctccaagtagtccaagcatcatactacatatacccttcaccccgccc

SEQ ID NO: 172818 - DNA, 557 bp, Zea Mays
tagacaggaatttcccccatccttcccttacctcagcccagtaccatttcactcgtgcggcccactaccacacgcgcgcctgaacccttctcctgggcgcggcctgctccctcgcgcccactttgtgtgtgtggctgacgaacgggtcccacttcgcgggttcatcaccaacctcgtggaaatacacaacaatatcgtgcgcatctcctccatgccaaaatctctgggcaccaaaccaccggggcgagtgttgggctgggaccccgattcctccggtcgtgctcctcggagtataagaatcgaagccgctcctccataaacaacggtgcacagggaaggcaagacaggaagaacagagaatccgagctcgacactgggcattacgacgacacgtcaccgcttggtcctggcgcgtaactattcagcatcaccggacttcgcggagcgagggcacatccttaggagcaattcgggacacgagagtaaaaaggaattcttcaacgacgcattagggctgtcgcgggccacttcctgctctggacaaagcttctgggcgc

SEQ ID NO: 172819 - DNA, 318 bp, Zea Mays
tagcaatcgttcgtcagagagcttgaattttggttttcccctaaccaagtttccgccaccgcgaagaacacctcgccatggccagccacttccaggtttgttcatgccctctgctaccttgtttcagcattagtatgcttccctgatgctcatccatacacccaattgagctagaccgccaccaatcaccgggaacgcattgttctatgggttatccacactgtcaccgtggacagaggcaattaggtagccattcatgcaattgacttaggggaaacgctggttagggcgtgaattcggtttcggccgaagtagggc

SEQ ID NO: 172820 - DNA, 365 bp, Zea Mays
aagacaagctggaatttctgggccacattataagtgctgcaggggtagctactgaccctgaaaaggtgaaagttattcagagctggcctattcctcaatgtgtgaaggatgtgaggagctttttgggaatggctgggtactacagaaggtttgtggctggatttggaatgattagcaaacctcttaccaatttgatgagaaaaggtcagttgtttgtgtggaacagtaatacacaacaggcctttgatgccctaaagacagctctagcacaggcaccagttttggctctgcctgactttgccaagacttttgttattgagactgatgctagtggcagtggaattggagctgtcctacagcaggag

SEQ ID NO: 172821 - DNA, 379 bp, Zea Mays
ggcatcgttccaactgccgcaatgccctcgagcttggggaagacctgggggtcctgctggtgttctgggcccaccttctgcagcacgcgtggatatggcggctagcgaggctatgtcgacagaaagcgtggatggcgtgcggggacccgaggctgttctagttgtgccatctgtggagaagatgaacaatcctcaagttttatcctcgttgggccgtcttggcttaactgggtcgggtactgtggggcctgtgtatgggtcgccgaattctgccctccctgtttcgccccaacgatacatttttgttgctgggccgttggaacaggctggcgcaaattcgccccaacctaacggtccatctactgttgaagctcctctg

SEQ ID NO: 172822 - DNA, 342 bp, Zea Mays
caggttgatggattgataaaaaaagaacatgtatgtccatgtcctccggcctttcaacgggaatgaaacatacagatcacaaggtagcacattgttttcgaacaacatacattgtcaatgccacaattaaacatttcaaagggtcagacaggtaggcccaagtcctacccagctacctcatgcctcaatgaacacaagagacagctgcactcaacggtatggcctcaaaggggtggtcctgtctgtcaaaagcgtgtccccaaaactaaatcacagccacattgtcaatgcacatccacctagcgcctccagctaatgctccggccacttggtgtccccgat

SEQ ID NO: 172823 - DNA, 452 bp, Zea Mays
gttggctactgttgctgccccatatggcttacctcctagtttcatctgtcaccgccctagtgccaaccatgtagtcgcatcctgcactctgcagcaggtcacaacattgccttggaccaattcttgggatcaacaatctctggctaagtcatttagcacaatggctctcaaccctcccccattactgactcggtgatggactcaggtgcttccaaccacatgacacctgatgctggtatgtctccctttttcaacttcctgtttgcacatcttcatcatttttagcaatggatccattctccttgtcttgtctatcggccctatagttcttcctggaccattttatcttaataatatccttgttgctcctaatattattcagaatctcctttccatttgttggtttaccattgacaacatgacccatttggcctctctgtgaaggatcttca

SEQ ID NO: 172824 - DNA, 425 bp, Zea Mays
gcagcaggataggcaccatagggttcgatcttttgggttcccttccaaggggtcaaacctcaacaagccagcaggatccgctccgtcacgtttcaaccagcctggtcaaagttccttccacacccagtctattgcaagcagccaacctccagctaatacttgttggcactgtggagaccccggtcacttcaagaataattgtccgcacctgaagacatccgtacctgcctactccaactcggtgaatggccccaagaatgtttcggcacccgcctccaaggcaccctccaccaacagccagttaagcaagactcagttccatggcagggctcgagtgaaccacgtcgacgcccaagaatctcaacaagcccctggagtagtactcggtgagttcctagtcgaatttacccccgctgctgtctttt

SEQ ID NO: 172825 - DNA, 465 bp, Zea Mays
gaacttagtgtaatatgcaattagtgatctgcttatctaacaaattgtatcaattggtgtttttcaattgatattttcatacatagtcactagttgtataatccatacttgtgcaattttcatgttgtctcttgttgtgataagaaaaatgctagatgacatctagactctaggtatcaagattcaccttcgatttagtatgacgatcttcatttgatatcttggacctatgtcacaattatgccaacaagagcttgcaaatgaattctaaatccaacacaagtctggaaatcccttgaaaaggtaaaatgcaaacgtacatcacttatgacacttatccattacctttgtgccatctaaggatcattttcatgatagtgtgttcacatctcgcttaatcataatttctatcctttatattctttatatctttttttggagatttatgacaaagggggagaaatt

SEQ ID NO: 172826 - DNA, 643 bp, Zea Mays
taaccagatacgccctttgaaccggataatcccttaagttagtgagtagttgtcaatgctaccacaagtggctagaactgccaacaccttttcagccaaagggtcctactcgtagccttgtgttacttggttcaaccaacatggaatcaataagaaaaccgatattgcatggagttgtgtagaataaccatcgtcagccacgtttggtcaacgagacaaagcgtctgccacccggttctcactgcctcgatgatacatgatgtgtaactataagcacatgagtttggtaagggccttttgctatcaaggggtggaaactctctggtcatccaagtgaatgaggctctaatgatttgtttcaataatgaaatcaatgtgttgcaaatagggatgccactgttccacagcaaacagaatggtcaagcattccttctcatatgtgaacaaacctctatttcttggtcccaaaacctagctgatgtaagccacttggtgtccctccagctgcaatacgactcctataccttccccactagcatttatctatattgtgaaagttttgctaaaatttggaattaccaggacaggtgctcgggctaaagttattttcaaagcctaaaatgattattcaataggttcagtc

SEQ ID NO: 172827 - DNA, 546 bp, Zea Mays
ttgaggcgcccctgtccccgataaagttttgtctttgatgtagtggaatcctctcctacttcagaggcaaatagatgatatgaaggcctcaaactttggttagtgaatctgcagcttccctttgctgtttattgcttctcttgttttacatcttgtatttttcctgttgcttcaccagctctgactcaacggtgttccgatgctgaggaaagatatgcccagagtcaagctgatctttaccaggtttctgaattcttggacagcgctcagaccctgaactcttccttgaatgcctcactcgattcagagaagatggctcaagagttagattttcctggctgcttctgttctgcccctttgcttcgatgctcagtgctcttcttgcctgtaggagaggcgaacgcttattgattctcgtgacaatctggatagattatatcgtgatgctagcaattccctcactgaattggagaggagccatcgctttactatgtcggaactggaccatcatagggatgagttgcggacttcccagactgaagtgtc

SEQ ID NO: 172828 - DNA, 1081 bp, Zea Mays
tgtatataggactacaagtttactacaaacagattagcaagttgtcatgcaaaaattcaagaaaaatgcctctgaagatcctcggttagaacaactgatgaagcttccaatgatacagtgcactgaaatatcccagggttcagtccccctcgccgccggtgatccacgcgcccggattcgcaccaatcgtcgtgattcgtgcctagcacgccgtggatattcgcagggaggtaactttggatgtgtcgcgacctcgcggacctagcccgagcctagtcggtgaaaattcatcggtggccatcgtggctcggtcatttccatctccgtgtcatccatgcctcgctcctccctcactgtgtccctgctttacgtggtaaccatgcacgaacggtgtaatccacggctgtggatcgttagctggaccaccgtgcctttaaatagccccaccacccacggcgaggtattcacatcttcaccagtgaactcggttgaagcacaaatccgtgaaatcctctccacctctcccaaaattggttgtgtacggtgaaaccatagtcctttgcgaccatgtagccccaacctcacctcctaattccacctggaaccgtcgcgacgtcgttttccccttttctatcaccagcgaacaaatatcctccgcgctccgtggccagctactcccaggtctgttcatgctctctgctctcccgtttcagtgtccttaggttctcctgatgctccttgacccattcaattgagctaagctgcaccaggtcgttgaaaacacccgtgttcatccgttgttcgcgttgtctccgtgggcaggatgatttagagctctgctagtgcaattgatcaaggggaaacacttcttcggtgttgaattaggagtaaaccaatttagagcactggtcgtggcgtatttcggccagagtgagctcacctgagtgcctgctccgccgctccacgtcgtggaccgagctctgtaaagaaatagaacatgggggttgtttttgtagatgtcagtgactctaggaatagtactgcgaccccgtttcaagttattcaaatcagcaggggcctt

SEQ ID NO: 172829 - DNA, 585 bp, Zea Mays
acatgcacaggagtaaatgtcgtattgtagctttataatcacatttgagcaaatttcatgtgttggagaatgtcatattgtagctttataaacatacttgaacaatccctttgttaagtttgtggatctcaatttgtgctaacttcccatcatggattagaaatcaaaactgaagtatgttgataaactgatcaatggattggcacctgttaaatgaactgagcaggaatgcatcgatacattcagaactgtcattttcaggtgcttggagtttacaacgaatgactatgtagaaaacaacaaatgtacatcctcctatcaaaataaaaatgtatacccgcctagtattgtgtcgactgccattctgccatctgctcccagtcattatgagacacctggtctgtcatggtaaggctgccaatctttcaaactaagatctcctctgatgatatccgcttcgaattgttaatactctacaatagtgtttggttcataaatttgtaatgccatttgattacaggggtaacagatattgctagattctgtttgtttcagatcagcagtaatctgatcacactgagatgt

SEQ ID NO: 172830 - DNA, 560 bp, Zea Mays
ccccgtctctggtttgcggtcgagaagcgtcgccggggcccggggaagacgttcgtgggtcggcatcggatcggtagcgttctacaccggcgaattcttcaccggagcatcgccttggccgcggatccgccgcgcttcgacgctaggaggcgtcgcttcgtaatcctcggtacagatcttctcctccgtttcgatggtccttcaattcggttttcaccgggtagcgatggcgatttgggctcgggatcgagctcgggcatggtacagcgatggcaccgccgcgatttgggtgccatctgtcgtcgccggcggcatccagggttggggcgctgtgcgccgttagatccaagggcagcggtggagattagatcagatctttccggttcgctggattcatctaggccgtttatctggccccggacggatgcgatcggacgcgtttattttaaatctgggtcgtgcattaaggatccgatggtgtctggtgagagcgagggtttaatattgtttgatctaatcgtggccgctagcagtcgatcggacggcccaacatggctgat

SEQ ID NO: 172831 - DNA, 369 bp, Zea Mays
gaacaacccagtgatacttgcttgtggagttgttgggtgtgaccccgctgctcgtgtagtgatggactcagaaggatcgacaatgccaatacagtgcttggatctgggctgtgtaaacaaaactatatataggctgtgtaaatttgtagtagtattgagctgtttcgttattataatcttgtcacggtttatcttactttcaacattaagtatccatcaggattcaggagtgtcagcaatgtgggagaagcaaccatgcccaagtgggtgcgtcgacccaatgtctatgtgcaaggccgaagtgggcctaaatgtgtgtgtggcgtagcacctgcgtgcgtgaattggtgtggcgtctgtgtgtgtgat

SEQ ID NO: 172832 - DNA, 461 bp, Zea Mays
actctggtccagataccctgtaagctcttttagaaatgggggcggtgccaggaagaagctctatggcaaactcaacatttcgctcaggtggcatacctggtaagtcttctgggaacacatctggaaactctgacacaaccttgatagtttcaagtgaatctgcctccttgctatcaatagccatctgatgacaacctcctttccttagctcaggtgagactaactcagctaccaattcttctcctagtggggacaccaacttaattctcctcttatcacaactgataattgcttggtacttatctagccaattcatccctaggatgacatctattccctaagtacccattactatgagattagcgggaaactctatcccccttatttccacacttacattcaagcaaatactatcggctcgaactctaccaccggctgagtcaatttgaatgggtgttgac

SEQ ID NO: 172833 - DNA, 708 bp, Zea Mays
tctcctggcgacatccatccggccgaacgacggcgcccaggttcctctcggtccggagcaccaggacacgatctccgcgccacagagtgagggggaggaggagagcttggcgcggaaccatggatggctggacgcgacagaggaggtgtcgaggaggacgagggcgtacattcagatccgcggtccgtgattcccggtgcctggagtgcgcgcgatcatgattcccggtggctggaggctaggtacggctgcggcggaggttgggtcgaggagcggatgaggcggtaaagcgcccacgatttatacacccacgcgcggacgtgagatgcggttagggggtttgccatgacccgagatccacgcgaggtccgccattcgcgcgcgatctgttgcggagtgcggcggaaggggtggttgcaccaacccggaaatctcggctgggcgagaacagcaacgcgacaccattgaagtccgaccctggtgcgcgcgagctgtggagaagaagacatgcctagcagtggtggcccacatggcattgaagctacggagcgcaggcgcgcgggagtcacgcggagcagccgtggagggaaaatgggttgggtttgcgctgaagagtggagtagagaagggggaaatgggccataagcatgggattaggcccaggtagcgcatcaatcccttgttattttataattctttccaatttca

SEQ ID NO: 172834 - DNA, 324 bp, Zea Mays
gaatgaagagagagattgctaagtatgtatctgagtgcgacacttgccaaagaatcaaggctagtcatttgaaggtagcaggtaccttacagcctctccccataccatcttggaaatgggaggacctcagcatggattttattgtgggtttacccaacacatcccggcaccacgattctatttgggtcattgtggataggctaaccaagacagctcatttcttgccagtacataccacccatagggcagaaaagtatgccaaaatatatattgaccaaatagtgcggttgcatggaataccaagaactatcgtatcagacagag

SEQ ID NO: 172835 - DNA, 625 bp, Zea Mays
atctttgtgttcctactggctgttgctgtgtctgagtcttgagtccgagtgtagctgctgtttttataggagccgctgctgggagttgcatgatgggctgggttcttttgttgctcggatgttggactgcaggggagtacgggaatcgcggtcgcaaggaggaggatagcttgaagcttcgtccaaggaggtccgaggagtctgtttggcttttggccaaggtccctcctttcggccattgctttccttttccccccaattttgatctttagtattttttgaggagatatgatctttagtattttctaaacttgaaaaacttgtctggctcttagggttgatgcatatacatgtgttgctattacttgcttgctccttgtcgacgatggtatagatagcagtagcactgtacacaagcagcaagcaacaccccacctccttgcattgactgttgcattttttatgaaacctaaagttgtgtttccatctgattgtaggcccatttgactctagtctccggtctctatctccactccaactacagccggcccgcgtctcctcgaccatcaccaccttgacggtctccgtgaaggtatttttcttctttctttgatgcatattatta

SEQ ID NO: 172836 - DNA, 342 bp, Zea Mays
gtcatcttcggtaggatctctccctgatagggcctgaagtcttttcctccaggtgggggtatttttgttgcgaggtgggaagtaacgaaggggggtttcaaagacctctctgctgtagttttggcatagctgtttaagggcttttcgggcaacactttggcaagtgtctgggaagcggtgcccgatgaaggtgacttggaagggagggtggtttgggtaacttcggctttctcccaggtagaccgccatagagcacttctccactccattttcgcggtattccttccagacatattccgtcttcttgtgaatccccatgcatagcgcgcaactctataagag

SEQ ID NO: 172837 - DNA, 680 bp, Zea Mays
ggccaatcttagaatagtagggatgccctagaagcactcctctcatcggcgagaagacgttctttccagcgtgcatgcattataaaacatgaagaacttagaaactaaggaaaaatgcatctaattatgaatttaacaagcattgttaataatgaataacgaaatgggttggagtggataaatctaattttaacccacctccttttaacaacccgcacacacgtttctccttaccactaccatgacacttacatctaaccctattttcacagatgacttcacccacccccatcaatggacgagacactcgtttcagttttgactacctttcccacgagggttttccctccatatatgtgggaggtgctctgctccgccggttaccctacaccccctctgtatactgtgcagctatacgaggagcatcgggtgccacgttgcaggtttggctaaccctggagtctcaccctctacagccgggatggcgttcccttgactctgagactgtcgggtttagggcggacgacaccactgagcccacagcgctaaaagccctgacaaccttctgcgaatatcatcccctagagatgatgatgcacccactgggactcttccccgccgagaagagggatgaccttatgtggtgcaatagagtgagccacgtgaaggacgtttgggcc

SEQ ID NO: 172838 - DNA, 361 bp, Zea Mays
atttaacgatcggtaatcaatacacatcctcatgcttccatctttcttagagacgaataggactggtgctccccaaggtgatgagctgggacgaatgtatcccttttgctgaagatctgcgatttgaagcttcagttctgctaactcggtcggagccatgcggtatggtctctttgcgatgggtgttgttccagggatcagatctatgtagaactccacttctctttctggtggcattcctggcaattcttctggaaacacgtccatgaattcttctactactgatatactttccgttgctagattgaacatcattgggtcactggcgggtggccgtgcctgacaagagactgactttccc

SEQ ID NO: 172839 - DNA, 1526 bp, Zea Mays
accttcagtaagataagcttgtattgcaaatgaggtatctctagaataaccttcaatatccagaagaagcacattattgggttatagaggatttcaaaccaagccccactgacacggacaagacttagagacatctatcaaaaggaatgtttagcaccaaccataagcacatttgttcaaacatttatatgactcgaaagagaaacaagatcattatgataacagagttcttacccatgcaataaactgggagcatgtgaagaatagttcataatttttaacatccttcccttcaaatttcttcttagctagcatagtcaatccaagcaaagaaaggcaggctgcaaaaccaggcacaccgaatgcaagcaacttctccgataaacttcttgtgacgttctacaacagtagaactattattatacataacaaggtacaaataatgaagaacataaattaaataagataattgtcaggtaacaggcattaaatgtaaacagagccactctccttgggcattgcttctatatggtgttaaaatgtaatttgttgtttttacggtttgccttgtgtcaagttttcttgtttcattaagtgctttaatgcaagaacatataatattattatgtagtactggatctggatggtatattatgctgccagctgcttgaatcctcctagtattagtatgaccaccaaatttctgaaatcttgatccagtttcaattatcgacttattcatgagtaactgaaggtgctaattctacaattacatagctatctccagtagagcccctaaacgggtgcgtatgtgcattttgtgtgctcgcgagccacaatagccccttccagcagagcgcagatgaggacgcggaaaatgtgcgctcaccctccacatacaccaaatctatggtttctctctcctccgtgggtttatttgagcgtctacatgcccggtctattcgaagcgtcctctcatttgcgtgctcgcatatgtaccgtgaccgctcaaaatgcatattcgcatatggcacctactagggatagccttatgacgaaatcggtaatgcaacatgcaagctttacttgaatactccaaatggtctaccgtaaacaaacatgtgaaatatataatgcgatataaggcctaatacattgacaacggacagcaaggtattgctttgtaggcatagaatgtaaacataacaatgaataatcagaattcaaactgagcagcagtaagtatagtagatggcacttggcacccttatttttaccccctctatgagcacaacgcacttacataaagtacgtctgaacagtagtcccatacaattagtactacagcaggaggcaactatctccgtcattaatgtgtcacatcaggtcaaaatatgcagatagaaacaagtaaaatgcaaataggaacaagaaaagctattccaaaatagttgccgctataatatttacattggttagaatttctcaaatttaactagatttatagaaaatattatcaacatgca

SEQ ID NO: 172840 - DNA, 1061 bp, Zea Mays
tctaccgttcacccagacctcagagtaaaatttcccatggagggcgatagcttcagctgaaggttccttgatgtcatccaccgaaactataaattctggcattacagccttcgcgtgttcatagccagctttttcaagcaatgatacggcccctcgggcacctacataggcacagaaatcccctctactagtgaggacttcgtcaaaggcttcaacttcaccttcaatccatctagctactccttcgggatcaccgcagataaaattttacttagtcaagaatgcaccaactttagcaaatgtgctctttagcttattacaacattgcatacaaacagaaaacattcttccttcgattaacgaagctcttcaacattcttttgaactttgttccgctcaaccttggatatttcacatttcgctttttcgacttcaaaattcttgttagcttcgtcaagcttcttttctagtcttaaaacttcagacttatggagctccacttgcgcagataaagcatattccaagtcagctatatgccttgcatcatctttcttttcctttaaagcttcaaaattttctgctccgcctcggagaatcctactaaatcaacttggttttcttaagcttctcaattaaagaaagacaaattttgtctttttcggtggcttgatgtcgaagcttaataacttcgtatcacagatttctgaaggctatctgggtgctatcatcctcagcatctttctgtgcctttaaaaccttgctgaggataagtccctaaaaaatcatcacaaataaatactaagtactatagataaacattcgccaaaattgaaagaaaaattaatatatgggaaccttcacgttgttataagcaaggcaatctgcaaggtgatccttccacattgcggataacccaagttcaagtttcggataacccatgctatccatcattttccagcaaacatcaatctctttgttgtccggcaggcggtataggtaatcatcttcatcatttcccccgtaaaccaaagagccccgagggtacttcaagtctcttgcac

SEQ ID NO: 172841 - DNA, 969 bp, Zea Mays
cagcttccaacatcttttagcatccacccagtctttcatgtctcccagttgaaaccctttgtctcatcgagctcccaggtaccattgtcacttcttgatgatttgacattaccccattttctagaacacatgctatagacacatatcacctccaagaactccctgtcggtgcaacaaggactcattcagtggtcacaatggccgccggaattggcaaattgggaagatcttaccagcctcaagcaagcttttccttttgcgcctgcttgtggacaagcaggccttcaagaatgggagaatgttagtactgctgaaccagtcgcacagcaagaggatgaaggacaacagcagcattccaatgagcgtgttgccaggcccaaaataggagctcgtacgagaagacccaacattcatgtctgtggtcctgaatggtgtgtgtcagtgcttgaaaacactttcaggccgagttctgagcccatgtaatggagagtatttagcctaaagagagtgtgaggaaaagatcatcatgtaacagaacagaaattctatccctctaagttgtcctcatgatgtatctttctgttcctctattcttctacttcctcacgtctccttttgctcctcagatccctactcctcctaacacaaagatttttagtaaaatccactcgacagggagggagggcattggccacggagagggagaccattgaaacagcagtgaaaggaaaatggaccctagccttgcgctagtgaaattttggtggtttaaatgacaatactaaccaatgggactaatttgtttgctagaatatttgttttaagttctacggatgcaagtgattgacttggggaacaaaacctcaaaggagcattcaagggaacaagaaaagaacttgaagaccaaccaaaggacctaagacatcaaaagaaagatggtggcgacaacagacgaagataggatgacgg

SEQ ID NO: 172842 - DNA, 626 bp, Zea Mays
ttcgagatctaggcattgcaattcggcctgtcaggcactctgaatcagggcttcgatggtacagtgtaaagatcagatcgccagttctgataaatcatcgccggttggataacgcatagtggtaagaaatatcgcgtcgtggatgaattccggccactattctactcccgccgccatacccgcctgagtcacaaccgctttggatgggctcgccggagttagccacgtcacaaccttgcaccacttgccttggtgctttaaccacgccgccgtgagtcatcttagcccatccggtgatcgttggtgagcttgccacggtaaatgctaccaatcgcttgcgccagtgcacccccttctctccgaccgccaccgcgcgagctcaaattcacgggccaccgctcaagggccctataaattgagaacaccctcggctccgctaagtattcaagcatcgaatccacccacttgtgcctccaattactcaccagagagccccaatttgggatttcccccaaattggtctgaaacaccgcacatagtgacctcgtcgtggctagctcgttccaggtccgttcatgctctctgctctcccgtttcagtgtccttagattctcctgatgctcctc

SEQ ID NO: 172843 - DNA, 395 bp, Zea Mays
atttacgaccactatcccaccactagacataacatataatgactactagcaaagcattaatttcctcaaataaactaaatcggcataacaacatcgttagaacctataagctagccgggtaaaatacttaatctatctttttatattattaatccacttagacactcctcacctaaattatattaccatcaacctaaacaccaaaagtaattacacatcttctatcacgggtttttctcggattttagctaacttcgacttgccgaacacaaatcactcaatacatcaaacaaaactcatacacatacacacatacttaataacagaacacaaatgacggttaataaaatgataaagctggaacgagacctcaccagcacgaacacaaggcacat

SEQ ID NO: 172844 - DNA, 578 bp, Zea Mays
atctgacggctacatgctacacgtgaagttgcttcgccttgacgcactcttcgcctgataccacatgacgcccccgttttgctccgggacgtaccaccttgccaagttgcttggttgggagttggtcggtccgtctgtctcgctcagttgctcggtgggagttggtcggtctgtccgtctcgttgagttgcttggcgggagttggtcggtctgtccgtctcgctgagttgctcggcgggagttggtcggtccattcaaaccgtatcaccgagttttgatgcccaaacttagcaaaaccctacgtcaccactgaggtgtccaaaaaacacaaagagagacacgacgatttgatttacccgagtttgtttccaacaaacctacgtcaccgttgacgtgtcctgaaggatggggtctctttcaaccctctgaagcgattccaacaatcaagcttgagccctctagatcttctaaaataagagataaagtctctgcaaggcactccacaaacttgaagcctcttgccagcctttacgacgatgaaacaccatgcacaagagcacaagattgcagtaacacaa

SEQ ID NO: 172845 - DNA, 523 bp, Zea Mays
agaaccatggcaattctctcccttcacagtcgggaagacagccggatgttcgtactccgagttggactgaatcccccagtgatcaagaggtggctgaggtaggggctttgctagctgaagttggactgctgaaggagaggggtctgactgctgaggctgtggttgctgattttgtcttcaagaatattcagccgttgaaagacagggcatacccggcttatctgtaccgaggcctagctgactcgactcgggttaccaacagaagaattccctctgtagacttggtgaaccggattgagatgattcttagaggtaaggtatcaaatgttggtgccccagtggcatactcagcctggaacttgcctcctcccaaggccttcactctttttgtgtcgaatccacctatcactgacggcagtttgggccttagagtgcgaccctctgctgaagaagttagcgtcttggttgcctcgctcggggaagttcctgatagtgaacggcaggtccactttgaggtgccctt

SEQ ID NO: 172846 - DNA, 429 bp, Zea Mays
agtgggtgattaggagtgcataggtatccagctacttattatgtaggatataagagatggataggttagggcaagaatagcctagggtgagaaagtttatagtgggaaagaattcttggtgttgagtggtaaagtatccgaagattgagtttgacttctctccttccttgacgaggttgatattgtccttttctggtctttgtctcattgagtcggggtcagtgtatatcatcgaagttgggggaatatggttaagataaatataggtgagatagactacatgatgtaggttaaaagttggtttgatactaggtggggatgattatacaattcttcatgactctattggttgggttaactcttatgctcacgattgagttggtctaaggcactagtttagttttaagtgcatgaggggtatggttttat

SEQ ID NO: 172847 - DNA, 821 bp, Zea Mays
attggcacatgacaatatccatagtctgctagaaatgtgaatagtataatgtggtctcgtaaaatacgcatccacaacattttgcatgagttgctgaatatgttctaagagataagatgtttggtcctaatgtcatggaggataagttctgattgttagatttagaccagaagtaatgtataaaaaatataactatctactcggtgtatttttcagtaaaacaaacgtcttatatttacctcaaggaaacttttcttcattggtgctgctttttgatttgttatagccgggaggtctggttcgtcgttattcattggagggatttgaagggaaaaatgaactaattttctcctcaatcttctctagtcctcctcaattctctagtcaccaactcacccttatttttttttattctgcagtaattgttttgaacaaatagtttaagatatataacacatacctgggtatttccactgtttctatcaagcacttgattccaaattaaatgctgaaagtttataggaggctttaataaatggacaaaatacgtggtgcaaaccacgcaatagatgtgtctgacatatcctgctatcttgacatccatgtattgtattgtatcccatagaatgataaacatactctaaatttgtagcctatttgcaaatggagcaacacgttttcaaaaccacgcagcactgtagcaaaatcaaattgggtgacgcattagtacgacatatctactcacgaaattgcagccgattgataggtactccgcattgataaataatgagtgtattttttaacttggtatagaagagtca

SEQ ID NO: 172848 - DNA, 836 bp, Zea Mays
gaaaaaaagataaaagggattatctaacaaagtgtccaagagctgaaaccagaaccgattgtcaagttcgcatgggtgttgtactagatcaagagaaggagaaatataaagttgctgatctagttttggaacacaatcacatccttcagttgctagaaacgtcgcatttgatggtgtctcaaaggaaaatttcagagttacaaggttttgaaattgagacagccgatgatgcgggaattgggcccaaagcggcacatgagttggctagtatccaagttggtggttcaattaatcttagttacacccttcgtgaccacaagaattatttacggggcaaacgccaacgagagatggcatatggtcaagcaggaagcatgctcatgtattttcaaaacaaaattgctgataacccatcattccaatatgcattgcagatggatagtgaggaacaaatagcaaacatattttgggttgatgccaaaatgattactgactttgcacattttggtgatgttatcagctttgacactacttttggaacaaacaaggaaagcagaccttttggtgtatttgttgggttcaatcagttcagggaaactgtggtttttggtgctgttctcatgtacgatgagacatttgagtctttcaagtggttatttgagacctttctaaaagcgcataatgacaagcaacctaaaacaatctatactgatcaagatgctgcaatggcaaaagcagttaaggaagtatttttagaagcatggcatggtttgtgcacttttcatattatgcagaatgctgtcaaacatctatttgaagctggcgatgaagaatct

SEQ ID NO: 172849 - DNA, 875 bp, Zea Mays
cttcgctcggggcgtcgcacaacctgactggccaacgccggagaaggaatgtgttgtgagagagagagcagagcttgatgagaggagagaaagggggagctggttccgccattgctatgatcacatgagcatgctgcgggatggccacaccttggtgtgacgattgggatcatatttctagggcgaggcggtcgtcagagtgtttctcctgtgtgggtatggcaagcagtggtggcagaatccgcgttgccgccgacaatctttggcttcatagccaatccgactgtggctgttgctttgggagcttcgtctgtgcccaacggggtcgcgtgcgcaagcctcttggtgcggggatcttaggggcctagcgaattcctcatcggagttttgggggcgccaatgatccacagggcgccgtggtcgtcgtccttccaccacttttatcgccggtaagtcaatgttgccaagtcgccttgtccttctcattacatagcactcgttagtcacggattagggcatcggggcatctgccaggggctcgccggcaggctgcgccgttgtggatgtttgaaggagacacgtgtgggctgttggatcaaatgaggatgggcgagattataaggttgtatacccctttgttcgggccatcgatctcaaatcggacggatccaagacgatcgcatgtatttaaaatctaaaccgtggaggttagatctgacggctggggtgtgtataccggttcacttaaagcaccgtctaatcgtggtcgtagacttgtgatccaagggatcaaatcgcttgccagttcgttgttttaatctgagctttccatctcagatccgacggctagcgatcaccaataccccttcgccgag

SEQ ID NO: 172850 - DNA, 278 bp, Zea Mays
ttatacacggctaggttgtttgttgggatttagttggatcacacggctagattgtttgttggtgatttgggtagattacacggctagattgtatgttgcgtttctcttactcaataacctgaaatagccttggatatattacttgttgctgaaaataagattggacgctaaaccgctaaaccaatcacagcttataatcttcttttaactttagtttggttgaggtgcgtttccactacaaaggtgattgttcagagcataacattagtttggttgga

SEQ ID NO: 172851 - DNA, 773 bp, Zea Mays
gtcaaatggaacctcaattttgcaaccgaaatggtagctccaagctctgcttcttgtggatcccaaaatcatgaacagttgctagaataacgaagacgctgttcatactgcaaggtcggaaaaccggaccaaattacaaacacctggagtatgctagaagcagcacttgccctgtggcaggcataataatttattacattaatatatgactgctgcatatcggtttctatggatctgtctgtccagcagaagagcggctgtcgaaggcctttctgtgccaaattttcaaatgatctagaggatggggccttggtggtgtaagcctagctgagagcaccacaccatcagcctctcctaccaggctaccactgatatctgcttcgaagcttcaggtaagaagaaagctgctgcaacacagggcactacaaagcgggtgatgtttcagaaactgctgggcataacctgtagtggaagtgtggaactccatgccaatctaacaggtggttgatcttcccaggattgaatcaatgcaacggcaacttaatctttttatctggtttcggagtagcatgagtcaaaacacgcaaatgacagtatgatcaacactttatcctcagcaacctgcttcacaactctctgtgcttgctgaggcgcgctttgcgcactgcttcttggatattcttttcatgctccttgagcatctgctccacgtttccttttgctgtaatcattgaacctgagtgctgatatattctgctcttgcccttgttctg

SEQ ID NO: 172852 - DNA, 641 bp, Zea Mays
ccttaatctaaggcacttacccttgtacctctgctgcctatttaaatagttcagtttatgtgtctatgaccttcttgtcttctgagatcctttcttattttgttgttaagacgctatctttcgacaatttctattaccttggtcttagtacgctcgtatcttttgagtcttgcatactcttatattttcgtgtatgcttatcttcatgccccaatgcctgtttaagacatttcagttaacgtgcccttgatcacccttgtttcttaatgatccatgagcggtcattttattttgcacatccttggtgatctcattaattccttataacttccctcggtaataatttcttttactaagccattctgttggaaccttacccgtgattgttttctccatctcgccatttcgtgagtcttgccttagctccatcctttcctatgctcttcgttattatcacctttacccttgacacttctatatattgcattgatgttcatctcatacctgccctttaaaatcgccccttttctgtctcataccttctttctcttggttgtatcctcttctttggctcgcgagtttgtaacctcatcctttgttgtgcttttgcttcttattgcctttacccttctcatctctca

SEQ ID NO: 172853 - DNA, 775 bp, Zea Mays
ccacaaaagcaaatatcttgatgcctatgtgttgcacgtcgtcatttcctaaataactgttgttcgcatatctgtcctctcgatgcccctccgtaatcatcacttagattctatcttcaaccagaaaacctcactccggctcctctcctcttcatcctccgtcgccgcgctagaggtctgcatctgaggttgattggaggtgggtgtggcggacctgcaggatgggaggatcagcaagcgttggggccatcaggcggacattcaaggcgccgacaagtccacctccgcaagtgacgaaaggtacgatgacaacccaaccccctccagttgctcctaagatcatgaatctggttgatttcgtgtgctaggtactacaacagtaatgggtaggtcgtgcttgcttctagttatgtctttactggactcaattttttggattgcatggtcgttcgaacacatgatcggcgacaccagatcagaaacagagattgtgtagttgagatgccaaggggaattaattctggaattcacgaattatgttgaggtcgccttgcttcagggatctagcattttgttaggttcatatgattcccggtaatttcatctgacaacttagggccatatgttttaggattctagtacataatatcttatggcatatgttataaattgttagaaaaatccaatgcatactagatactcgacagctgagttatatcaatatttgtcggtactcggtatgctggtccacaaataatgcagtagcactagcaca

SEQ ID NO: 172854 - DNA, 757 bp, Zea Mays
cagtgattaggaggatcgtggcaggtgtgttagctatgtggaaaaaagttcttgacaacataacatgcttggataggaaattcagcccaaggcctatgaggttcagtcttctgtaaccagagccacctgacccttgagtcccaaccaagatttttaacatcatgaataccaaaaccttccaactcctttggtctagtgacctttggccaagccaaaagacagtgtccacccttgacatcttttccacccttccacagaaaccctcatgcagcttgtcaatagctttaatgacccaacctggaaggtccaatgccatagccgagtaaataatcctagctgttactacaaactgaacatgagtggcacagcctagacatcaactccgccttccaacccagcatcaagtcagccacacggtcaacagtagcctacaggctgcagctgggctgtccgtctgtgttcaattttcccaaggacaggggaagacctaaatactttttttttgcacgagaactccaagatttcacaaggcaggagctcctgaactacattaagatcatcctcattacacctaatggggtagaacctacttttctggacattcgttttcagccctaacaccttgccaaagagagatagaatgtctactttcaagttgatgtcagcaagaagaggacaatggctcaaggccttttggaaaggaaatgggtggatgatattagggcccccctcatagtcccagtgattcaagaatatc

SEQ ID NO: 172855 - DNA, 1351 bp, Zea Mays
aaatcagtgtgattggctcaactttggagctttgcatcttttaaattatagggtttttgccctaggtcaccacatcaaaattatagcccaatcataggagaacaactttgcttaagagtgtgagcatagttgttacgaaaatactggagataattgagcctgaagttggactgtcagactgcttgaaatctgaaattcagattaacagtgggatgacatgaacttagggcttgattttaagcaagatccagtgactttttgtgggagcacattgtagcaaagttgtagctggattgtagctctacaattttgctgcagagcatggagcatgtttccatataagtttgagagaaaatcaagctcaaaaacggtctgttagactgactgaaccccattagcgatggtacagtgtcccaaatggatcagactgccagcgtcggatcctcaccgccggcgacctctctgcgcaaagattcacgccgccgccattgcgattcatgtcgtcggtaactagataagtctgccacgtagtagctcgacggctggggatagctccggtgactcaccgtcgtagcccccttgctctgcggcttgagcagataagctcgccggtgaaccgccgtcgcatggccttacgtcgcgtgtccgagccttgccaccgcaacgccacgattcactttagcgccccgttgatcgccggaatagctgccacggcgtggaacacgtatttactgcgccagggttcttcttcatctccggccgccagcataatctgctcaaattgctcgtcatcgctaccgctccctataaattgagtcctgtgttagcttcgcagcatcatcacacaccaccacacctcgtattgctcacagccgatcaccagcaagcccaaatttcgaacttcccccaatttcggtcttcgccgccgtgaaacacaccccgttgtggtcagcccaactcaggtcagctcttcccctctgctcccttgtctaagcattctcatgcgtctgtgatgctcaccgacccacccaattgaaccgggccgccagggatcgtcgggaacacgactgccaagccgcgatgctcacggccgccgtggccagagcttattagttagtcgttgatgaaattaggttagaggaagtgatctggggtggttcaattccatgcccactgctcgggagcaccggtcatcgccccgttcggccggtcagatagctcgccggagcttggctgcgtgcggagcgccgtcgaggacgtattgggtaaaggaatagaagattgaggacctatctgcaatctgtcagcgactctgtgaaatagtaaaagaactcgttcccagttaaccaaa

SEQ ID NO: 172856 - DNA, 488 bp, Zea Mays
cttaacataaaacaagagcactaagccgctttaattcttgcatggaaccgtcacccgtgaccgtgactcgcgaagaactccatgaccaccacctccaaagactggcacgtgacgaggatttgctgctgtgtctgtagtagtctccaaaatccgaaccagtgtgtgcccctgaagatagcatgtataattgacgatataggtttatgattaaacaccacatcattacgacaaagccaaattgaccaaaacaacaccgtaacgccaataagaagcaattttttatgcgtgcaacctttgttggattctcaatcccctacaatatgattaatattaacgggttggtctaagcaaagtaaataattgtccaaacagttttacctaggtaacagtcaaagaaaaggtgttgtatgccctcgttctggttacaaaagccacacttcaaacttccttgccatctacgattagctaagttgtctttggtgagggcc

SEQ ID NO: 172857 - DNA, 273 bp, Zea Mays
aaagaaagcaaaggatgtctgaacttctctgttctcaaattgtcattgtcaacacaacagcaagcagaaaacaaattgcaaatcagttatcctgggcagaattgtcaacacaacagctacagctacatgtgtactttgataacgtcgtgatctcaagggtagggtagagcgcgcgacgaccaccacaattcgacgagaattacgcaccgcagaaaaaagagagtgatcgaaatactagtgatgaactgaaccgggaacaaaaaggaaaggtgc

SEQ ID NO: 172858 - DNA, 765 bp, Zea Mays
cttgtgacatttacaccgatcataaaagtctcaagtatattttcactcagaaggagctgaatttgaggcagtgtcggtggctcgaattgattaaagattatgatttgtccattcattatcacccggggaaggcaaatgtggtggttgattctcttagcaggtctggggttccaaaagtggccttgtcattgatcgctgatctggatcgtttggggattgctttgtgctatgtcggcaccgctagtgaggagacttgtttgcttattcaatcttccctcatggagagagtgtgtgcggctcagcagcaggattgtttattgcaggaagctcgaaagagggttggcgatggtaaatcccgggagttctccattaatgagaatgatttggttcgtttcaggggtcgcctttgtgtgcctcagaataagaggtgaagatggatatcttgagagaagctcataaaacgccttacaccgttcaccctggcgaaaccaaaatataccgagatctgaagcaaaacttctggtggaagcggatgaaggttgacgtttctaagtatgtggccgcctgtgaagtatgtcagcgcgtgaaggtcgagcataagaggtctgttggtttgttgaagccattggaaattccggagtggaagtgggagcatatcaccatggattttgtggtgggcttacctcgttctcctcggggcagggatgccatttgggtggtagtggatcgcttgactaagtatgcacactttattcccatgaagac

SEQ ID NO: 172859 - DNA, 838 bp, Zea Mays
ggcgaccagaggatctcttactaaattaaatggattgtcgagcatcaccgagctatgagaagacttaaacaagggagagaagaagatgagctgaccgggagggggctggccgcggtgaggttgagttctacggtggcggaaagagaattgggggaaaactcgaattcgagctcactggtggatgattgctaacgattagcgggggctggctagctgatgactttgcagaactggtggggggctcaatttatagattccagaggcggcggccgtgaattatgagcaagacgcgcggcggtcggaggtggagaagaacactggcgcgcgtggattggtgtcccatgccgtggcaattgctccggcgatcaacggagagcgggggtaagtcgtggcgatgcggtggcgcggttaggacacgcagtggacaacggagatggcacgacgacggtgaccaactttacccgcgggcggtgagccaggggagaggcacagcggctagccggagtggtgtccagctcaccggcggcgaagatttttaaccccacgacgttatccaactatccagagcacaaagtggaccggcggtcgcacgaatcacggaggcaatcggtcgccgggggtaaggtagctgcgctggcggtctgatccttaatggactattgtaccatggtgaacacctcatcagagcagctgacagagaaacttcagagccatttttctccaaattcctagtgacaacacaagtccatccctgcagcaaagttgttcctatatagtagctctataactttgttatagcaatcttaggtatattcctactggatcttagtctaaatag

SEQ ID NO: 172860 - DNA, 302 bp, Zea Mays
ctaaaggaactaaacgaggtcttactccctatgcaatttgctttagttaagggaattagccttttggtgattttgataatatactgtgttgagaaagctgaagcctcttcttcctttgacctgatctcacacacctttctatacattactctggaggtttcttcattttctgattgttgctgtaacctctcttctgccatgactgtagcatgtgtactatggttcagtttttccttcttgctgaagtcgtggttcagagttcagaacgatccgctcaagtaatgccttcaagttataactaa

SEQ ID NO: 172861 - DNA, 540 bp, Zea Mays
ctgaacgctggggcgagcgcgcgtgcgggttgggcgagcgccggcgtgccgaccagggtcgaacacctatgcccgttcgttctgcccaagttctggcgcgtgtggtcactcattcgagcctgctctcgccttggtcagtgcacaaaacctcttctcctccttacaagctaccgatcttgtgtgggggtcataggattttgcctactggttttagagatttggagcccagaaatccagtctgtctctctgctcaaacccgaggcaaatccaaggttttgttgtgtctaggtctcgcatcccaatgccatcttctggcatgcgacagaggggttagtgagacacgtttttgtcaatggggtcattaggatttgagctagggatcaaggtgaacacgcttgatctttggctcaaggtctgaaattcggaattccctattgagtccccatttgagaagcttgcttggggttttatttaacttattttggccaagcttcctcaatctttattgttgcttattaattatacttcaatgtttatatt

SEQ ID NO: 172862 - DNA, 944 bp, Zea Mays
catgtctctcactactcaccattttgcgctccccgaaccaaccctcatttgaatcaactcctttcccaacttaccccggtcacttgctcggtgatgtccaccgtgggcctagctttcacgtcatgagtctagggcgaagtctacggaggaggcctccaaatccacctctcctgagccggcggacggagtctccatcgatgtatacgattgagtaggcacccccgccggtgtcctcattctcctcttcgggcgcaccttgtgctcttcatacaccagccccatttggataaaaacacgattcaggtggacttcgcctccgcgtggctctatacccttctcaagttcatgatctgaaacaggaccatgcatccaggtcctccgctttcttctcagtctccaccacaaaaatgtctcgggagcggtcacccaaatccacaacaaaagcaagacttaaaatctgcttcagaaagcttgaaagtccctttagtataactggtccaacagacaactcacgactcaacgaccagatcccacaggtcagatactcctcgaccaagtctctgccactacaagtcaccgcggaaacactgaaggctcggtcttcacgacccctctccgcaacctcgtagcatgcaaagacttcaaattttaacaaagagataatactcggttgaggccagccttcgccctccggacaatgcacataaaaccagttctctgtccatccacttcacttgttctttgtgcatgagattaactctaccatgttccccttggtgttcatatctttagggtaaaagtacagctgccaaacttatcaacgaccccattcacagctcttttctgctagtgcaaacaatagtgcttggcaaagacctcaattgatggagcccgccaaaggtggacttgctcagggccccatcgcattcggagttagccggtga

SEQ ID NO: 172863 - DNA, 677 bp, Zea Mays
aaaccatcagcttccgagaagacaatgaactaggggacctcctcgagggacgtgactcgaaccctaagcatagtcctattaacattatgtttgtcctcctcccacaagattaatctaccaaaggagccaatagcagcctgcaagtactcagaggaacgataatcgagggggaatcccaacaacataagccagcaatcgcgattaaaaaaaagtgccctgtggttccaagcatcattatgtcgctgagcagtaaaggtggcatcgagatattgctgcgggccaagcaagaccaaattgtctctttcaagcacactgctaaactgaaccagaacctaacccaggtgtgaccgctggatatcccgcaccgcaagccgccgatggtccaccaaatattctctgaccacatccctcaccgccggaaaaatgacttcatgatcaggtaaaggttggatattgataatagcccaatcctcatgcattggcggaagacgcctagtcactgacctggccataacctcacggtgcagaaccaccgaagcgctgaagctcgacggaaggaagggctcaggatcaacatgcctatacgccattggagaaggaagcgaggatcgccagccagcagtcgaagaaggagcagtttggggttttgatgaagtgacacccaaagaaagcgtcag

SEQ ID NO: 172864 - DNA, 494 bp, Zea Mays
ttcgcttgggtctccattggtcgcaccattaaggtcatccagtgtgacagcggccgagagtccgataactcctctcgtgctttcttcctctcccatggtgtgagctaccaacgtcctactcgtacacctctccctagaacaaggctaagcgtataattcataccactaataacatcatgtgctcattgttgttccaggcgccagctcctgcttggtattgggctaaaaatcttcataccaccacctacctgcttaactgcctccctaccaaggcgatcagtgctcccacatccggctttgtcctctttgagaccactctatcctaagaccaacttcacatctttggatgtgcgtgttagtgtgttacccaactctatctgctacaaccccacaagatgtcaccttgctcctcctgctatgtcttcctcgggtactcccctgatcacaagggatccagtgtcttgacttcatcacccattgtttgttgatctccc

SEQ ID NO: 172865 - DNA, 375 bp, Zea Mays
cccaaatctagtgtctgtagatggtatcatggtaacatgctgcgcagggagggagggacagtgctggtggcactatcctatttgcaatggtacatcatcctagggggctttcttggtggctcggcgtcgtgtgtgggggagtgggggaagagtggtgagacgcggggaggagcggagcgtgcggtggcagctctccacggcttcgccgttcgtggccccggagaaggctgccacggccgtgtgccaggagagatgacagggggcgctcctggcagcacggcgttgtgtgggggagtggaggaaggccgtgaggcacagggaggagcggagtgcgccgtggtggctctgcacattgtcgccgcccaaaaggcaggg

SEQ ID NO: 172866 - DNA, 375 bp, Zea Mays
gccaactaactcccttccagccataataggaggacctactacaattcggttgtgttgggagctgaaggacgacgctaaatccaatcgggctcggggaggtcgcttgactgacagcgaaggtggaaggaggatggcggcggtgcgcacgcaaggcttgacccctgaatttgcccacttgggcagggcaggcgtgcgatctgacgagcccacatagtggcgatctgattcgcacgaagaggacccaaatcagcctgggcagagctgagagcaccctgcctgaggaaggtgaattttcacacgcacagtgtacgctgtacagtgagattcaagcatcgaatctgcgattggttggctgggacagggctgcacgcttgc

SEQ ID NO: 172867 - DNA, 412 bp, Zea Mays
aaggagctgaatttgaggcagcatcggtggctcgaattggttaaagattatgatctgtccattcattataacccggggaaagcaaatgtggtggctgatgcccgtagcaggtctggggttccaaaagtggccttgcttttgatcgcagatctggaccgtatggggatcgctttgtgctatgtcggcaccgctagtgaggagaatcggatgctcagtcaatccttcctcctagagagagtgcatgtggctcagcagcaggatcgtttattgcaggaagctcgaaagagggttggcgatggtaaaccctgggagttcaccattgatgagaatgatttggttcgtttcaggggtcatctttgtgtgcctcagaaattagaggtgaagatggttatcttgagaggagctcataaaa

SEQ ID NO: 172868 - DNA, 674 bp, Zea Mays
ggagccgatctggtgttccggctttagtaagtgcttaatctggtgcttgttcttgtgatctatgcttgtgatctgtgttcgaaccctaaaccctaatctactctactaccttcttgttctctgattgtagctacccgtgaggggccgatctagtgctctggctttggtaagttcttaatccggtgcttgatcttgtgatctatgcttgtgatttgtgtaccaaccctaaaccctaatctactctactaccttcttgttctatgactatagccacccgtgagggaccggtctggtgctccggctttggtaagttcttaatccggtgcttgttcttgtgatctgtgttcgggccgatctagtgctctggctttggtaagttcttaatccggtgcttgatcttgtgatctatgcttgtgatttgtgtaccaaccctaaaccctaatctactctactaccttcttgttctatgactatagccacccatgagggaccggtctggtgctccggctttggtaagttcttaatccggtgcttgttcttgtgatctgtgttcgaaccctaacctaattgccttcttgttctgtgattgtagccgtgagggaccgatctggtgctccgactttggtaagttcttaatccggtgcttgttcttgtgatctgtgttcgaaccctaa

SEQ ID NO: 172869 - DNA, 930 bp, Zea Mays
attgctccgtttgtagggcatagtggtcaccctgagttaagtgagcatgagcatgttgcaccgccttaagtcactgccgacttaagtcgattgctccgtttgtagggcatagtggtcaccctgagttaagtgagcatgagcatgttgcaccgccttaagtcgctgccgacttaagtcgattgctccgtttgtagggcatagtggtcaccctgagttaagtgagcatgcaagtcaatcgtaaatgaactgagtatccctgaagcctcttttttattgatgacatatttccactttacagagtacatcgtgaccccagcagttttgagatacagctaaggataaaactttctgaggtgttctatgttccaggagttcccaacttctgtgccatccatctgggtgaggcgatacgatccgggtcgagtgacttctgctaccatgaaaggtccttcccataagggtgataacttgtgccgtccctccctagttagaattcggcggaggacgagatctcctactaagaaggatcgttgccgcacagccttgtcgtgatagcgccttagagtctgctggtaccttgctgattggattactgcgtttagccgttcttcctcaagtacatctatgtcctccagcctggtggcctcagcttctgctatgctttcaaagatcagccttggcgccccaaacttgagatcagcaggtagcactacctccgacccatagaccatgaagaaaggagtgtttccatgcaaagctcggctaggttgggttcttaggctccaaacgacatagggtagttctcttatccactttcctgcgaatttttcattcttatcgaagacctttttcctgagtgcatccaatatcatcccgttggctcgctcaacttgcccgttggctcttggatgggctacagatgcatacttg

SEQ ID NO: 172870 - DNA, 438 bp, Zea Mays
cactgcagaagcaacccacgcaccaaggcgatccgtcccagcctctcacgagtcccggagcggcggtgcagaaacgagtcctcggcagcggcgagttgttcgtgtgggtcacggcggcgcaagagctggcgcggagtggcgatggcagaaaagcaagaggggctcgagcggacgagttcgtgggatcgatgcttataggcaaggcggggtactgagcggttaaatggtaccgaagcttgcggatggcacgcggctttgccggcgtttgttgcggagtccgcgcaggtgaagaagactctttcctctgccactggtaagccggacccaccagtcattcacgtcaggcgcgcaggaggaaaggagccgtgcgggttcacggagaatgaccgaggtgtgtaggagccggctgccaggcgggtcccacaagtcaggcgcgtg

SEQ ID NO: 172871 - DNA, 697 bp, Zea Mays
ccaacgtcccatatggtctcacttcggcattaagagaccatcccttgccctcgggaacaacatacaagcgtgccaaaccgcttataacacagtatgcacctacataggcaccagggacttagtccaagagcacattgcctacaaagtatggccactcaagagtaggtgggagatgccgaaggaggctgctgctgggtctagccaaagtggcttgatttacttgaagtatacattcaaatacaggagccaatttgatgaaccaaacgatgactgcctagatgccattgacgcaaccagtgatgagttgcttggtgcctactcaagggccaaagatgatgtcatgacggcggtcttcggagggcgacgcaagaaaaggttgaatagggtttttgatgtcattggttttgtatacccagattactgctacccttcgcggaagcaaggaaagaaaagaagagttgctgcttcggctatctctaatacgctgaagccaaagaaagttaaggttctgacacatcgccccaagcgcgctgaaatagtggaagagccaaggcctgctgaagggtcttctgcttttgagtcaagctaccccgctcctgccgaagccaagacagagtcggacgaagagccaaaaccaaagatagcagcggagcagctgaaagccttgagtccattgcaagaaatagaactaccgaag

SEQ ID NO: 172872 - DNA, 508 bp, Zea Mays
caacgggccactcagcgcgttcccgatgatctaaggcagctcggttcaattgggcaggtcgataagtatcacgggcatgtgagatcactcaaacaagggagcagaaggtttgaactaacctcagttgcactgaccacgacgagggtgttcttgcggtgggatgaaccgatttggggaaaactcgaaatttgtgagctctggtgaacaattgagggtgggagcgggtgcttcggcttcgtgataacatagcgcagctgaccaggccttcaatttatagagggcttacgcggtggtgcgcaatttgaccgagcagtgctagcggccggagagaggggagattactggcgcagtggattcgtgtcctccgtcatggcgacttcaccggtgatcaccagatatacttaacacgacctactgcgacgtggtaagatgcccgggtacgtggcaaccgaccggcagtcagccaacaccggcgaccttatctgttcaggccgcaattcatgggggc

SEQ ID NO: 172873 - DNA, 462 bp, Zea Mays
agggcgtcgagtttcagtactaggagaagggtgtcgcacatcactagtaggaggacgtcgcacatcagcgggagacggtgctcggtgcatctcagcggaaggtgattgaaggatgtctatggcagtgccaagaatgtcggcaagccacccatcgtcttgtacaactgatgtgtcgacgtgagtagcccaattcgcatccaaagacccggcacttgttggtaccacaccctcgcccacagcaccagtggaaccacgacctactccggcattggatggttggcctcggccagatggcggcaacagctggcgacgtagcggattcatggcgacctacagggaggagaatgatggtcagctgcagggagagagatttggacaccaagggatggcgatgtcttgagggtggattgcggcaaaatggagggagggagcagtacctggcggcgcccttcacggatgtgg

SEQ ID NO: 172874 - DNA, 668 bp, Zea Mays
ttggtataattcccaagtatctcattgcacatggtctcaatcatgtctagccattctttgcaaggcttcttgaattatttttcaaatttgaaacggtaaccaagacgaacaagttcacgcttcttccctgcttctttcttcttcggcagtccccagccactggacgtcggatatgtcctgtttgccaagtattcttgcaccaagtccctagtactgatctgctcagctaccactctaaattctacatcagccaactgataaggtgaccccagttgcatattgcataagggcttggtcattctgaagctcaaactcagcggactcataaccatggtcatcagcttctccctccttttctcgtcagccttcatatagaaccattcatttttccaaccaattggccacttcgtgcggtagctaaggactggtgcctttgtatcctttcgatatgcaaagttgtaacagccaaaattttcatgaaggccatctgcccttgcctttgtctgataatgcagctcgtgcactcggcataaatcttcggcatctagactcatcccttggcttcggagggcccagatatagacgctgagtctaacaatgacgttgggagttagctgatgaagatatatttcaaagttctttaaaactacccctatcatttcattccg

SEQ ID NO: 172875 - DNA, 528 bp, Zea Mays
acaagcgctccttcgcaattcaccaagctcatcgcccacacctggccacctcagcggtgggggctcgatgttgtcgggccacttcccatagcccaaggcaacctcaaattcaccttcatcactgttgaatacttcaccaagtggatcgagactagggtcgtatccacaataacatccaagacgacacaaaattttttctggcattatatcatatgtcggttcggagtcccatccgaattaacagtcgataacggcaagccgttcgacaaccaagacttccgagaattttgcaactccatcggcacgaaggcagtgttcgtctccgtctaacacccacaatccaacagagtagttgagcgcgccaacgacaagattttcagcgcaatcaagaaaaggctacaagacgacaaaaagggcaaatgggcggaccaactacccgaagtcatatgggcattaaacacaacagaatccagagcgactaggttcacacctttccgcttgatgtacggatccgaagcaatgacatcg

SEQ ID NO: 172876 - DNA, 909 bp, Zea Mays
tttttgtttgcatcagctgtaatgttgcacccgtacttaatgtcttttgtgtaggagacgaggaaatgcagttgggagagatacgatgagaaagaagaggtgacacatacaataaagtccaagagactaatgggacagaagatgcgttgtggatctcagctcgtcgattcatacattaaatattgcagagaagacatgcgtaggttcgcgtaatcaatgtggtttaacagcctgatgcgtgcagagcggaggggattgaaggcggcaaatgagaagagagcacatgatgcaagggaatgggaggcggctagagccgagtaacagatgttgggaaatcttgtaggtcgtctgagtggaagtgtcgcttgtacattttatttttcctgtctttgcaaacttacttgtcccattatatttgcagagattggatgtgtcatgaactgtctcgcagatgaggctcatgcaagatacgttcaggaaaaatggcgacggtggagctgatggaggaggatgacacatcaaggttgagtgagcttatcgcgctcgctgaggtaggattacatggggaagaggaggatgacacatcaaggttgactaagctcattgcactagcttaggaaggattacatgctcaggaggaggaggacgagtttatgtcttaggccgtcgaagaagtagaggcatcttattacaagcagaagtgtggtgaggctgaggctgaggaccagctattctcccaagctacagatgaagcagaagccaattattacaagagaaaggcggaaaagtatgatgcatgacaatgtagcaagtggaacgaggttgtcgttgaggattgtgcgacagatgactctgatgatgacttgcttataaattgtgattctgattgaataagctagtagtgtgtta

SEQ ID NO: 172877 - DNA, 415 bp, Zea Mays
ggactggggactacaggaggaactctgggggccacatcagctggctgggggccaccgaccggtgcaccaggaatgtggatccctcggtggggatcccgaccaccggtctggcggaccgccacaccactctcatcaagggtcggcagtcgggccagcaccgttgaccgcaaccctggattgtcgcagagcggcgaaatgccctgaggaggcatcaaggattcggggataaaggcctcaccagtgatccccctcaccacaatttccaactcctcccaggtcagatcagtcccaggcccgcgctggatcctaccaatgtcgctggggccggtaaaccaacaacacagacgcggcctcccctgcagcggcatgactcggcgcttcaggaaatccccgagtacgtgcattgaggtcaggc

SEQ ID NO: 172878 - DNA, 727 bp, Zea Mays
gaaaaaagctagaaagcgggccgccgacgtagatccacagcctcaccgtcgtcacggcctcgatttgtggctaccaagcttcggcggatggctctggtggtgactgtggcctcggcgtgctgagaagatcaccagaaccccccccccctcaatttctcactggaggaggatctccgccacaacaccatcgctcgcgtgaccaggaacccccaagcttcgaccttcggtaagatatcgcgcaatagttcgtcgtggtcttgggattgttttacaccaggccgttgtgattagctcgccgggatgcatggaattggtcaccgggagggagaatccgctgctgggtcgctgttcacgtgggcaccgtactcagggtcttaatcaggattatgaagcatctagggtgattcacggtgtttttttccttcgtgtgggaccttgccgtgcttcaatctggtggccggtgcaccgtggtgcctacccaccagtgagtccgccgccgtgagggccggtggtgcttctgatctctgctggcgagggtaggacgatgggccatggccgttgatcggctaatgattggccacgattagattaggagatgttgcgttgttgattaaatccggagcgtcgatcttaaaagttgtggtcctagtctggtctacccgtatcacttaggtagagctgatctgcaccctagatcagaaatcccacgatcccagttgtgtacccc

SEQ ID NO: 172879 - DNA, 556 bp, Zea Mays
accaacacatgttgtatttaaacttgctagagccgaagccactagttccatcaaacttgcttacttccaaatgtacatttagagataataaccagatgcctttgatatacacggctctgataccacttgtgagggtcggcgcgtagcggaagtgggcaccaaagcagcaagctaagttgacaatagtaattcaccaaacaccttgtgtgcatgaaccaaaagaagcacttaagctttagattagacaaccacaaactgtctagcactacaacaatgtatatgcacagcaatcggctcactacaacatcaacctcatcactacaacgttgttgggggtctttctcttccgaaggtcctcaaaaaacatgactaactatgtacttttagtataatgatgattatcacagggagctttgattcatgaggggagtattctccttcatcgaaggacttcgagacaaaggcatagcccgaaagtgacgacaatgaatgatcgaagctatagccaaggggaaacaacttcggcttaaaagcaatgccgaagatcaaacatgga

SEQ ID NO: 172880 - DNA, 864 bp, Zea Mays
gtcgggagtgccattaatgctggaggcaaacttatgcccagaaatctcctggtgttgcttcaatatcttcttgggccaccaaattaaattccatgaagcccaaggccgaacacgggagccccttaatgaaagccgaatgttaagcctcacaaagcggccgttactggagtttgaataattttgaaattgtgaacgcctagcaaatttcacagaagaatttgaacgaaaagccaactgatcgacgaagtgatgaacagggtaagaaatctgattgaacaccgaagatctctgccgcaaacctgaggaagaaggcccagccttgaccagacagccgagtggaaccaaatttgctccagacaaagctggctttcgaaccacatcaacaaacgtggcctgcagattacggtgacaggaaaccaatttccaagaacttgattcttcatcagagtagagctgccattctttgatccaattagggccactagaattccaaagatgaaggtacactttgaacgatgaacatatataagagtgacgtctatagactgcaaaaccaacatccttgcaggaaagcgagaagcgaaaaacccagtacgacaaaggaataactctgaatagctccgctgatccaccaatgaaggattgaagaagaaagcccactgactctgcgcacaggcgcaaggaacacctgccgaaagagatgactaaaaagaactcatgacgatcgaatttacccgggagaagattgatcgggcaattgaacttgcgaagaatccaatcttgaaagcgaaggtcgtcggagaaatccagagcagatggaccagagccaaccgaggggccccccatggccaagagctaggaggc

SEQ ID NO: 172881 - DNA, 555 bp, Zea Mays
tatttcattgatgacatctatctaattgatgtcaacctcaccaataactaaggatgaaccaccaacctcaaccgagatacacgctgccttgaaacctcatgatcttgtacctaacacaccaccactagcaaccaagaatccaccctccttgaacaagaccaaagatgctcaacaaccagaacttctaccatcaccaactaggaatccccctcccgagcaagaaaagtatgctcaacaacatgaaggaactaaaaccaaagagaaacatccagttgttccaaaatggttatgacctacttgaagacatcattgttgggcgcgaggaagtggatatccggaactagaaggataaaggggagagaaaccagtagtgagagaggtggcaagaagtctagctcctgctcaaagaccatacaaaaaccaacaacaaaggattacaaaatgtcctcgctcactatatgtagcatgcctctactctagtgggaaatactcctcaaggttccacctttcatgaagaggatacatcattagtatagggaaggcaatttaatccac

SEQ ID NO: 172882 - DNA, 334 bp, Zea Mays
agcaacagactggagttgaaaccgggccttcagaaccaaccaaggtaatacctttggaagcagaagaagcaaaaattgcaaaggcaaccgaagaaatgaaaatgtcagagcccactttggtcgaagaaattgataccgctgcccccgaagcatcttccaaaatatacgattatatcatgcgacatgcttcggggaaaaagttatcggaagaagaaatttttgaagctaatcactatgccaaagaattgaaatatccgaagggggcactagtgttcaatgggatgaacgaagaagatttcctatactgcctcctagacaacaaagaattaaccgt

SEQ ID NO: 172883 - DNA, 2389 bp, Zea Mays
ctatgtctaataattatgttggcctgttcactgcggctgaattaaaactgttcggactattgtagctgaaatctttagagattaaaaccgcagattaaaacaaaagccggcagattaaaaccgcagtgaacatgctcgtgattcctgatttaacaaatagtcctaccctacacatccacaaacgttgctttagttttaaatatgctctgacatttctatatattaaagcaggaggaattgccgcttccacgtgcgtccacgtcggtaaaaaaattattggccgtccgatcgttcaccaatggtgacaacgtccaccagccggctcgtgtagtctccatcggcctgacgtctagccaaacgccacgaatattccagagaaatcgcattgccggcgacctctgcatcctctgtcttctcctcagcacaccggatgctgtcgcagtccacgacgctgtccgcgccccctagcccccagggcctgctgtccctgtcggcatcctcgttcgctccgcccgcatgggtagacgacctccttgcactcacgctcgccgaggggcaggggcactcgccggctccggcgagggctatgccatcgccgcccacctcgacactgcgcgtcgcgctcctcgacacctgcaacgccatcgccgcgcgcctccaccgccttcacaggcgcaacctcctcgcgcgaccatctcattcgccggtaggaatcacaagtctgtaaccaaacttatgtgtgcgagcgcgcctcgtcgtcttcatcattcatctcttctgtccaatacgtgctcagactaggaaccaggctagacattcttctcaccattcatgctccagctagaaaataggttcacattcttcccctctttcttattcgtactcaactcacttaatactgagcatattaggctgatcccaacaattccccctctccatattaggccttatctaattttctaatttaaagggccccttttcgtcacaaatgttgtctcacaacgtgctcaaccacagaatcacatttactgtctgactgccacataatttatatttcttatgctgagaacgtataactgatgcacaaaaaaatacatatggattatatatacatataccgcgtaacaattatgcatactccaaactgctccctcggccctaggatggatctacagagcagtgttgaggcaagcgatttgaagtcagaccaaatctgcatggagtataagtatcatttatctttatcaatgtatgtatattcgatcgtggttctcatttcactttaaactatgtgcatataaggcctgatctaatttaaacttttccctttgttacaaataaagctccctacattcacaaatatatgacgtttgagttttttaatcataactttgactacttgccttatttatttttttagaaattttactaatttttactgcaatttggtttagtatagagtatctaaccatgataattgatgattgtctatcacttagtatgttcaggatttttttttaaactgcaacaaaaaagaaaatcacacacaaaaaaattccctatagaatatgcacaccagcgtatcacaaatgtgtatatcacaaccggttacacatgcatggtgtgttgtgcatatggtcactttatagattttccccaaattttgtttacagatataggtatgcacttagtaacctgttttgtaattgattctgtaggcaaggtcatcgcgctggaaaaggagatattcagttatagtccagttgcctacacataaagactttgaacaaaccaggtaaaagacatttgctgcttaaaagatattggatcaatctcctatagtttaaatgcatcgctcttctgtaaatactcatattatctgcctgcatgaaaaatatatcatttatcatacttacacctaccatactgactagcacagtagcactaggtctgtcataaaacatgctttggagtatgcctcatcggattgaaacatgttaagaattcgtcttgaagccttaccatcaaatttcaaagctactatactctcagaagcactatgtcataattcacaatgcttttgatagatattatgccttcgtattcacgtgcaggttgagtataatcaacacatttttgtttcgcgtatcaagctagcaactcaggatcatgttaaataagaatccaaccggttccacatggtgtcttatcccttatgtatgtggccgacttatatacttctccataaaatttatttactgatattagtatggacttattaatctgttatttaattgattccgcatacaggtcatcacgctacctccaattctagcgattgcgactccaaagacaatagatattgccaattatcgtaataaccctgcac

SEQ ID NO: 172884 - DNA, 545 bp, Zea Mays
caaacaatactggggaagcccatggagacctgctaggcctaatgaaacccttagccagcaaatcatccaattgccgcttcaattcaacctactcctttggggccattcgagacggagccttatgaatgggctgcgtacccggaatcagcttaatctcaaaagctacatcgcactcaggaggaatgcctagaagctctgccggaaacacgtcagcaaagtcacacaccacccagatgtcctgcgcccacaaggcagcctcaccctccaccaccatggagaaaaagattcctgacttcctggaccggtgatccggaagcaattgcgctaacaaggataacgtgaacttaggggaacttcccaagaataccacctccctacctaatggcgcttgcaataacactgtcttccaaaaacaggatataactgcgcgatactgggataaccaatccatacccaagataacatcgaatgcccccaaggaaatcacaaccagattggccgaaaagacctcatcagcaagaatgacagaacacccctaacaaact

SEQ ID NO: 172885 - DNA, 343 bp, Zea Mays
tatttatatagggttagcacatcggcggcgctccctggaggacctatcgaggccagccatggcgaaccacagcctccgtgcgttcctggttctcctcgtcgcgaaggtctgcttcgtcatggcgatggtggcgacggcggtgcagggcaggcctgggcctggacccacggccctggagtctgttcccgcgtgctgcttctaccaccccgagtgctgctacgacgctgccggccctccggctgatctagggtgacggtgattgttgtttcgatgcccgtaatgagctaatgctgtttctggctccgtcattgtactgatcgctcgcgtaataaaatgagagtta

SEQ ID NO: 172886 - DNA, 426 bp, Zea Mays
gaaagcccagaagttgctgaaatatggagagtgtactttgatggctcgttgagactgcaaggagcagaggcggggattctctttatcgctcttagaggtgaacaactcaagtatgcactccagctcttgtttccagcatccaataacgccgcagagtacgaggcgctggtgcatggactaagcatcattgtttcactcggcatcaagagattaatggtgtacgacgactcactggtggtcataagccaagtaaacaaagactaggattgctcgaccgactcaatgaacaaatattgcgcagcgatgctgaagctagaggaaaaatttgaaggattagaattccaccatgtggaaagggatcacaacgcagcggccaatgcactatcaaagctaggatccagtcgggtccaagttccacctgggatt

SEQ ID NO: 172887 - DNA, 354 bp, Zea Mays
atagcccacaggtctacaacaacctgcagctccaccgcggcgtgttctccgtcgatcagaacctctacagggacggctctacgcgctggatggtcgaccagctggccaaggttctcgttaagctcagcgaggtcaacgtgctcaccagcgtgcagggggagattcgaaaggtacttatgcagcaggtttaactaaccagaacacccgtacctccattgtcggctctcctctactacatttattaatttcctcttgctataattttggtttagtcaaatttgaatttcaattcattcccttttatatatatcatttgaatgaccaagctctttgagtagtaatgaacaaactgtt

SEQ ID NO: 172888 - DNA, 499 bp, Zea Mays
tctagaagcatgaacgtgtcatcaccctctcctaagagcataaacacaccacgatggatgctcttgcttggtagcttgctgaggttgagtgtcatgtcactggcttttcctgccttgactctcccctaaagcccctagtgattgaccccttgctgtatgaggccatcattatcaccaacttccatgcccaagcgatgggtgtccagaacattcactctctagtccctgtcctccttgacccgacttcctccacctacgtccgttggcatgacctcatacttctcaggttgcagtgttacaccctagatgatcacgtcctcactgacacaatgtccctcactatcccctccttgtaacagatggatagtgcggtcctcttctagatcctctagacgatcaccattgagatgcatggcattgtttatgagtgtggtggaaatgccagtcaagtctagatttccaataaggagtagatccttggcaacagtgaggctcatac

SEQ ID NO: 172889 - DNA, 864 bp, Zea Mays
tacctactgagattttgattgctgcattaagatttgaatttaaatctgtgaatcagaaatggatttgaatctagaatagaaaacataaaactgaaagtgaaactaaaaacaattggagagctggctggctgggttacattgcccacagcccattcattttccacgccgctagcctatgtctccatgccatacgtgtttttttcctatttgtttattcaccttgtcgcgtatgacatcagcatgacatcaagcaagcaacttcagcggtcgttctgttcgtgcgtgaatctcgcgcgggatctcgccagcaaaccatgcgggtcgccatagtcattgatcgagctcctccgccaaaaaaaatcggacaccgttcgtaactaatcctcacgaatttagcggtccgttgtaactccgcgcgattcggggatcctggggactataaaaatgaacaccgcttccagctttttagttggtggtcggggacgtttgtggcatcaccgaggagctcccatggccgcgtcgggggaaatctgctatctgggcaaatccaattgctcgccggaattgagtttttgttccgggactgccatatgtcgtggccgagccttcagtcgcctccaccactggtacgatcgggtcccagctatttgcctcttcctccacatcgcgtagagcctatccatggtagaaatcgtgcccccgtgtgcttgagagaggtcgagatggtcgtttggggcaccggtgttgctctattgctcggtatctggcgccgccaccgtttctggttaatcagaggttgaagaagcgctctggccgtccgatctgatgtggacgggggagattagatcagtacttgaggcatcc

SEQ ID NO: 172890 - DNA, 895 bp, Zea Mays
ggaaattgagaggaatttggtcctaaactgcgactgtcaggcacactgaagaagtctcccatggtacagtgctctcgggtggatcaggttgccagcgctgcttgctcgtcgacggcgacctccctgcgcgaagattcgtgcttccgccgcctggattcgcgcgtgtggctaccggataatatcgcggggcaagtaaattttcgccgccgatgagctggactccactccggctagccgcgatacccctcccctttctcaccgccctcgaattggaatctcatcgccgtcatgccatcaccgttgtccaccgcgtgtccgagcctcgccaccgcatcgccgtgaacccatgtgcctcttcgtggctcgtcggagtgactgccacggtagatgccacggattcacgtgcgccagtgctttgttctacctccgaccgccgcgcgtccttcttcaaattcccggccaccgtctaagccgcctataaattgagccctcccctagctgcgcaacatcattgcgcacccccgcacctagtattgctcccagccgatcaccagcaagctccaatttcgtattccccccaaatcagtcgaagaacaccgtgaaaccaagttcaccgtggctagagcaaaacacttgatcattagtgaaattaagttaggggaaaggcttgggatggattcaattaggtgttagtcgctcggagaccctagtcgttgccccaatcggccggcgtatgagctcgtcggagctcggccgcgttcaccgccgtcggggacctccctctgcgaaggaatagaagtttgaggactcttctgcaaagcgtcagtgactcaagaaaacagtgaaagaacccgttcctagttagccggaacaccgagggcttttctgcaaagta

SEQ ID NO: 172891 - DNA, 473 bp, Zea Mays
tttggggcttgccggatattatcggcgtttcgtaccaaatttttccagcattgctgagcctttgaccagactcttagagaagggtgttcctttcatctggtccagtgattgcgaggtcagttatcagacattgaagaacaagttggtgaacgcccctatcttagctttgcctgagagtggtaagtgtttcacagtttatacggatgcttctcgtattggtcttggctgtgtgttgatgcaggaaggcagagtgattgcttatggctccaggcagttgaggaagcacgaggggaattatgtaactcatgacctcgaattagccgcagtggtctttgccctaaaatcgtggaggcattatctttatggcgagtcttgcgacatctacaccgatcataaaagtctcaagtatattttcactcagaaggagctgaatttgaggcaccgtctgtggctcgaattgataaaggattatg

SEQ ID NO: 172892 - DNA, 326 bp, Zea Mays
cgactacttcatcttcaactagctcttcttcttgaatttcatgttcacctggttcagcttctacttctgcatgatgggcttgtccccggttgacagataggggctgactctttcctgccgaagcctgaccttgtttcattggagctagtgtagtgtaggcagctctattgggacagtagttagcgtagtgtcccggttgtccacacttgaagcatgccctgttggtggttgtgttaggagcaacgggtcccgctggggcgcttgcttttggaggagcagttggtgcctgttgagtttgttgtccagaactgccactagctggtgta

SEQ ID NO: 172893 - DNA, 339 bp, Zea Mays
gacgtccggaggtgctgcgctacgcgccgtgtcctccttcctctggcctctcgccggctcttactccaagaccggcgaccactcaacttccctccccggcgtcggaggattatccccttggtgttgtgcacggcggaagatcgaaggagcagcgctggctggaggacggtggagcttgtgcctcctctgctgcgtcactagttcagggtgacgtggggaagaaatcctatagggaggctctgttttctcccaggcctgctgcgtccagggacgttggtggttgggtgacggtggttcgtcggcgttcgaacaccttgaagtccctccccagacctgtcc

SEQ ID NO: 172894 - DNA, 602 bp, Zea Mays
tttaggttttaaaggctaggaaccgaacccaaactaatacctcgaaatatagtacatgtaggaaccgaacctgaacctcaaaacccaaatagatcgataatttggtttattcgggttcgagttcgggtttggtttttggttttaaaatgcccacccctagtctctagggacccattgtagagggtgcgactcggatggtgtggccatcccctagtggcaagattgtagagggagcgacttggatggtgtggccagcccctagtggcaagattgttcatagtgaggagcttgtcctgtagaagaatccaaggacaaaccttacatgttgggtcaacccttacctcccatacaagactagatttgatgtggctgcaagatttgatggattgcactttgtaggctaaattaactatgaagacactgtcaaggctccatttccatgtaatggagttcgagacctacagttgaagataaaaatcttggagtctaatccaaagggagacaaattcttcaatttgaaccgacaatgtgatcttgcttctcaaagacccgatccaattcccaccattgaactcacaggcaaccgacctattctttcttgg

SEQ ID NO: 172895 - DNA, 386 bp, Zea Mays
gggaccatccaccgttaggctggacggtctggttaaaggttaagattgtccggccgtgcgtagggttatggattttacccatgtaggtgatggaggttgcagttgcccggtataggaattcatcgactttccacaaagtggcagggacggtgagtgcccatttgcggttgatgaaatcttgagtggcatcaatattgtgcaatgggaaattgcagatttatcaaatatgtgtgccgttcttttaaactcatcttgcatacacccaattttttgttataattgctccttctactcatctagataaaccctaagagagtggacatcgtcggatttacttgcattgggtgcaagtgttgtgggtcgaagagatgtcaggtcgcactcca

SEQ ID NO: 172896 - DNA, 592 bp, Zea Mays
gttcgaaggggattggaggggactacatctcagcttcattatgtaagttaattttatgcatgtttatgcttgttgattgtgttgggggttatggttgtttctaaaaatgattgatgatgcagcatggggacttgactgacaatgtggtttttggggaggagatcaaagttgccatgttctaagtggagtctgaaaaagaggctctatctacagaactggagcaactcctggttaaggccaccgaccgagagagaaatcatgaggcgactgagaatgagagacatcacctagcaacatttgtgaaggaggattaaaaagggaaggatgctcttcaccagaaggtggactatagcttaaagctgctgaagtgggttattgaaaggatctaacctatgcggtcaaggagctagaaaaacttaggaaccaaggcgagcaattagaggctgcctttcatgtggctattgaggtagtgcatgaacaattctgtttgatgtagtttgctctggtgtggaggccgagccgttggaccacattggtggagacctcattgaacgttttttggcatggttggaagcagagtttagaaacccac

SEQ ID NO: 172897 - DNA, 743 bp, Zea Mays
tagactgctaaaaccaaggtcttaagtttaataatttaacattacatacagactgcgggttgatttcatagtaatccgagggtttatttgtaacagagatcagtgaaggggtatcgtactatcgcagcggtccgattagcctcggacggtcacgattagatcgccacattggaatattcctacgccattacagccacacgcgatagaatcaatggctttgatttaatgtgtgggagagaatacagaaacgatcgattcggccctccgtttcaagatctaacggcccagagtcaagcatgaagcggtacgtggcttctaatctgcactgttaattcacatccgacggtcacccgcattcttcctcccagctaactcccaggcagccgcgcgcctgctcctgcggcggcgccatggccggcctatctgccccgcgcacaccgcgcggtgatgggcacgccggagtaaatgcgccaagctcgcccgtgcccctcccacttagagagtaacaggtgctacacgtaaaggatggcatggcaaatagctcgatgaaggcttactgtgtattacgacgtcgaaccgtcagatccgtgcggtgtggttctcggcgtttggcgaagtccgacgagcccttccttggtgcaacgtcgcatcccacgcgtggtgatcacccagaaccctttgaacactcccgaacgaatccctccaactaatccccatactccgagcgctgatgaaggttcgcg

SEQ ID NO: 172898 - DNA, 485 bp, Zea Mays
gttttaaaggcgcgggcaagtgtggctgaggggaggctctgacaagcgctcggggcgtgcgcgggcgagcgccagtgcacgctctggcgtctggcacaacgtcgagcacgaggcagcgcagagataggtcgtgttcaaacgcggattggctccaaatctttgagattatggccatgatcccgttgagagatctcttcccctgacattcctttgtcgtttgtgtgtggaggcttgcaggttttgctgactggatcaagagatatggaggggtgaagttgggtttgtctcattgccgagcacagagagaggatcccaggtttgacgtgtccagagcacgcgtcccgatgccatcttctagtatgaggtagaggggttagttagacacatttttgtcaatgggagcttggatgtttgatatagagatcaaggtgaacgtgctcggttttggttcaaaggctgaaaattcagaaatctgaatttcagat

SEQ ID NO: 172899 - DNA, 537 bp, Zea Mays
cagatacgtgtcgcaaacatgccttggtggcgtagaaggtgcgggaccgttggattaatgggcttggcccaaattaagcaattcaattaaattctaaaaattatgaaaagactatgtatatgagagatggcaagagatggtgggaaccatagtaccatattgctagcccagattgagtgagacctgtttatatgtggtgacatccctcttccttcaagtcatagataaagggagagaggatggaataccatacacgcgcgcttgcttgcctggcctggcttgggcacgggagaagggcacgagcgtgaatgttctgccaaaatctagcccctcgtcttgtgggggcgcgacttccttttgctattttttatttttatttttgatgtggttgcttggatgttaagtttagagtcattatccgatcacgaccagatcgagacgtgcgtccttatcagatcatgtataggtcttgatgcgagtccttatctccaaatcgagggactacatgtagctctataagagcaactccaagagtct

SEQ ID NO: 172900 - DNA, 729 bp, Zea Mays
tattttgaagttaaatcgtcaactttgtatgttggtggatcccaaaaggttagttaattcccttcatatttctgtcacatctgtacatttccccactctaatggtgaaacgaaacaattaaccaagcacacatgctcaagtagcttccattccaagcacacataaccaagttttctagcattttttgtatgttctggcatttgtacaccttttgcaataattgtttattcagctagaaacaaaactaagacaaattattattaattttctagtaagtgcttcgctcaaatctttccttatgcacctcaatcttctagaaaaatacacaagttttcctatactagagtcatcagtgtgcatacctataccacattgaatacgtagcacaaggaatagcccttgcaactacccaacttattctggcattaattatctgcaacactactggggactgaatactatatcgtatttggtgtttgcaacctgtactatgtcttactaaggattaaacgttgtaatacttgcagaaattaaaaatgtttgcttatgtcttggtgatcaaatttgagtggttctgtctttgcacgaaagaaaggtgccatgtacaaatgtgacataaataggtagggaattaactattgcaacactactggcaagggataaggttagtcgtcttaagcatttgaaaaaaaatgctactgcaattaacggctaaaatgtttttgccaa

SEQ ID NO: 172901 - DNA, 487 bp, Zea Mays
tgggtaagctggtggatacatagaagcataattaggtgcaggtgtccataatgctcgtagtgtggatggtttggttggaactagctggagtacatctcgagccgattgattcggccttacctcctgagatgatctattttctttcgcctgtctccctagggcaggcaaatgtggttgttttgatggctggtcacgtggaatagcctttttgttgacatatttagaatggagttgatcaaaagtaggaccgagtttaattagccaaccagtgccttaactacattcttttttcgcgtacctatctcaggttgtcatgggttgaaggtgcgttgtcgtggttgtgggcatctctggtcgctcgcgaaccatcggaccgaagggcctggactatctgtcggctgcccagaccattcgatatgtttgctggaccgttcacacggcgctagactagaagccttgatcagtggtccgattgggcttgtccccc

SEQ ID NO: 172902 - DNA, 393 bp, Zea Mays
ggtcttcggaagaggactcggattattttgcagcgttggatgtggctgcggcggagactcctccacgtgtgatgggtgctaaggatcatccgggtgcgagtgctgggcgtaggtggcgaagagcggtggcgaaacggagagtgggtgagttgtcgcgaggtgaaaggcgtcatcgtggtgagatggagggtggtcgtcttcgtgtggatgagactggcaaacgggaattgttgtcctcgccggctggggcgagtgtgggtgagggatagctacgaagtctgtttgcgggtgaggaattgagaataatgttgttcaactatagggagatgggtatcatcccaaaggttgagccgatgtaatgtgtgatgccctcgttgtatgtgtgtaaccata

SEQ ID NO: 172903 - DNA, 500 bp, Zea Mays
catctacgtgttgtttttgatgctttgcgcgtcgcacgcttatttgctaaccttgacaaatgcaccttttgcaccgcacgcgtatcgtttcttggctatgttgtcactacacagggtattgaggttgatgaggccaaggtgcatgctatttagagttggccaacgccatcgacggtgacacaagtacggagttttcttggacttgcaggattttatcgtcgtttcgtgaaggatttcagcaccatcgctgccccattacatgagttgaccaagaagggtgtttcatttaattgggggcagtcacaagaggattcttttgatcttttaaaagagaagcttactcacgcgccactactacaacttcctgactttggtaagacttttgaactcgaatgtgatgcaagtggagttggcattggtgctgttttgatgcaaggaggtaaacctgttgcatattttagtgaaaaattgaatggtcctgttcttaattattctactta

SEQ ID NO: 172904 - DNA, 542 bp, Zea Mays
cactatcagactacatgagcagcaaagcgctcaacaggtacgaaatgtcacaaatgacaacaactggaatatgcagtaacatactacatgaaaatgcactaactccatcaatattcagtttctccatagatttgcagtaactccatgccatgctggccaccacccaagaactaagttaaataaacatatctcagaaactaagttgaaggtgtatcttcatttctcatgatcttagcccgtaagcccatatagtatctccttagctcttctggcatagcagaaagatctagggtcataattctctcttcatccctctgtttctgcaattctatctgttgtttccgcagttcgacctcttctttcctcacctccagaaggagcttttcatttgtaactcgctcctgttctagtgcaaatgctttattgaatctctcctcttttttaacttccttctccccatcagtgtctttcttttgtgcacacatgttttctaaagttgttgtcacactttttctcttttcttgtataattgctgcttttga

SEQ ID NO: 172905 - DNA, 567 bp, Zea Mays
cgaaggggtggggctcaaacttctcaaagttccgcgtcacttgacccccaagggtaagggttagatgctttgcatgaccacccatgcatgggattcttaggttcgactgcttcaaccactatggatgtgggaatgtgcaagcctggctctggcacgatgtagagcccaatgtcgacataggagtaggtacatcagagtggggacaccatccatcaagacatggaaactgacatcagttcaaccactccctcaccgagaagtcaacagaggacactatataacccattgcaggacatgacggggcataatggtaggctatagtatcctgactgaaggggaagacatcatccacaacatcgtttgaccagtaggaatcccagtggacaatgaactaaacgaaacatgacaatactcgacccccatctgcttcactcgacctcagactcttgtaatagggccctactcccaccttagcctggaaaaggatgggagaggcccacactcaaggcacgatagaaatacaaccaaccaaacagtcgaatgccacagcacgtgtaaacactagag

SEQ ID NO: 172906 - DNA, 300 bp, Zea Mays
catggttggttaattagcttaggctatctcctacctcattttctagtttattgtcagcataccatcggcttcagtacactttgaacaccaatcggcaagcgcaggaacgaatgaagctgctgttggaaggatgggccgccgcgtgcgcaggcctaatacgcgggtgacgggagccgaatggatgacttgactaatgggccgtggaccgtgtccagtatattgttgtacaaatactcgataggatgctgctaatagagttgtcgaataacagaacaatattcgtccattccttctgttctt

SEQ ID NO: 172907 - DNA, 403 bp, Zea Mays
tagagtgctgcagaagcaagccacgcccacctacaggcatacagctgctccactatacaccgcggtacacgacgacgcccctacatatatatatgcagatgtactagtagcggctttgaatacccttccctgttgcacgtctcccctaccggctttacccatcgccattcaatgcctcggctcacgtcacagcctgcacacccaacggcctcgcttcaacagttcaacgtgcgtcgtcttgctctctactctgtcctcatcccctagtatatatatcttctcaaggcgatcgcttccccgtcctcctgtcttccgaagcgcaccacaactagaactaaaagtttggaccggatcatttagcgccagcacggcaagacaccaaaataagaggtcaaaacatgat

SEQ ID NO: 172908 - DNA, 747 bp, Zea Mays
aaatcgtaggtgtgacgatatgtcgggtcgacggtgatcacgcctgctagcgctggcatctttagcttcaagtacgtgtagtttaggacaatcatgaacttggcgtagcatggtctcccaagcacggcatggtaggtgccttggaaccccacaacttcaaacgtgaggacttcctttcggaagttggtgggaatcctgaagcagacaacaggttgatctgcccgaggggatgcaccctcttgccgggggtgatcccgtggaatggcacggcccctggccagatctaggattgcccgacccccatgagctccaaggtgtccacatagatgataatgaggctgctgcctccatccatgagtaccttcgtgaggcatgtgttgccgacgatggggtcgacgacgagtgggtacctcccagggtttgggatgtagtccggatggtcatctcaattgaaggtgatggcatggtccaaccaatctaagtaaattggggtcaccaactcaaccgagaaatcctcttggcattctttcttttgctgccttgaagaaaggttgacgtagtcaccctcgaaaatcatgtagcaattgtgcacgtcagggaagccatcgcccttgtcgtcttctccataaccgggagccttcttgtttcctccttctgccgtgggggtcgggcttgttgtaaaagtgtcgaagcatgtcacattcgccaagcgagtgtttaatcgagcccttttggtaagggcatgac

SEQ ID NO: 172909 - DNA, 743 bp, Zea Mays
ggttgcctcgcttggggagattcctgatgatgaacggcaggtccactttgaggtgcccctgaatcctagcgatgcggagataagcgctatgcttgatttgctggctgaggattcttctgatgctgctcctgctggggcactggtagtggcgcccctcccagaggctgatacaactttggatattcagaagcctgccagtactcgcccgaggtgcccttgccgagccaatcagcctgatccttctgctgatgagcagaaaaagaaaaagagacgcctccggcgagtatccagtttggatcgggatgctggtacttcggttcctgctgttgaagaaatgcctgtgactgaatttactgatgctgaccccaatgggtgtacccaatccgctgctgatcccaatgtgggtgctccatctgttgctgatcccaatgggggtgctgcttgtgttgccaatgtggacgacgaggaggaggaagatgaagttcctttgactcggaaaaacagtcgacagttcatcgctagcggtgaaagtagtggagttccctctcctgctttgtctgctctcattggtctgcaagaactgtccctggccaactttgatcagactcttgaggatatggttccagaggacatgttatcagagccggtggatgatggtgtgatggaggtttgcactgatgtgcttgatgctgggttgaggtcatcccgtgcctcgtcgaccttagagcgcgatctcgagggtc

SEQ ID NO: 172910 - DNA, 319 bp, Zea Mays
attgctagctaaggcatccaacacaacatttgaaagagcctgggcattttgtggagcttgaattgagagaccagcccatggccttgaagggtctgtcttttgtgcccacaacctacatattcttattgtccagccaaaaaggtcaagattatgaattccaagtcctccatattcaagaggccgctgtaccctttcccacatgaccaagcagttgtcaccatttgtctattcttgtcccctccatagaagcccccacttctttttgtctattgccttaagacaccattttgaaagatccatggagatcaatatgtattat

SEQ ID NO: 172911 - DNA, 673 bp, Zea Mays
ctggccttcgtcctctccctctcggtgagcaggctcccctcttccccctcagttctcctctccctctcggttctgtgagcagaggctcattttccctccccatttgcatcaattccgatttcctcgaatccttgtgaaatcttgtgaatccagttggtggaatgcattcaattatccctattgtgtatccctgcaggcttttagctccttcgggagggttttcccacctcaaatagccatttcaccgaaaacctaattccccgcacgccacgtgctcggtgaaatgcccaaaccagccaaaaatgctccaattgaacccaaatttttcaggcaccttcacaacacttccagtaacctacttgccaaatttcacgccaatccgagattccaggcttaaatttcaccaaatttcccgtttagagcgatcgtttccgagccgagtgcccaaattcctttttcttcgcctaaattcaaaccaagcacacacttcactcatattcacctatataaacctattcgtgaagtatcggctctttcccatatcgtttcgtgcctcaattcgaattccatacctcctatggcactaattatccttcaaacgtcgttttcacgtcgtttgacttctcgatcgtctcgtctcgtgttttctgtgccatatctctctgtgtatgta

SEQ ID NO: 172912 - DNA, 752 bp, Zea Mays
cgggggtcctagtgcccggacgttggggtaaagcaccctagcgtgctcggcatagttctaatttgcgtttgcactgtgtcccggtccaagattgtccacctggttgcggctccggtgaggttctgccgccgcagggaaggtacttgcgccaccgcaaacagccggtgtttggggaacgggtactatggccgttggatctccatccagcgcttagaattaggtcgggcgtagcgcttccacgggtgtgcaattggccgttggatcgtgatcccgtggcccaggattggatcgtgggtgaaagctccgtgtaccatccgattgtggatgggcgtcggggatcaaacgctgcataccaatttggttggaccaattgagaccgtggatcgtaggatggaggggcgagattagatcgggagggacccttcagtcacatgatctgagtcgttgaagtttggtctgagggtccaaaatgaataccggttcaaaggggacgcagatggaatctggaccgtccgtggatgatcggatgaatagaaacaaccgataccccctttcggccagggactttttcttatgagcccctgaactccatataaattaacccgctatcctaagtgactatgcctgggtcttgcagattcttgcgccagagcccctgcgctttctaggatttgaggcccagtcccgagatcagataaaacagggaaactaatttaaaaatagatttttagtacaaatttaattgcagaaac

SEQ ID NO: 172913 - DNA, 1040 bp, Zea Mays
gcagattgcggcattgtccaggtggttgggatggcaaccatcgatcacgattgatactgggattgcctcggtcttttacttccatgaatagatgcatgtatttcctttatatagagataacaatcaatagagaatatgtagcctttggcagctccaaataccatcgtgtacagtgtgttcgtgtgaattttgcctccctccgatcggtgttctaacaacccagcaactcgcttaccagccgaccagccgccacaccacatttgcatacctctgagccccttccgtcgagcaccgagacccctgtcccagcctacctgggctccagccattcgaccgtcacccgccctagcatcaatgcctcgcccgctgggtcgtcgctcgcatcgctctcttgcctggcgacaccttttttagtgcagattgcagaggacatgtcgccttggctgtagaataatcgagtaagcgatagaagccactcgtatggagaggtagtaggaagaaatcatgaaacatttttcaccgtcagaattagatcgagcgaccaagaaaaaagaagacatggcattgcgaggtatcagctttgctttctcctttaatatatagaaatataaattggtgagttctatattgatgtactaccaaattttagaaatatatttctctttttcagtacaattattgttggatgtaaagaaaacattgagaaatctttatatgcgacacaattttttttcacagatttattgggttcaattgtgctctacatttcaaagctgagctgtgatgattggttgctaaacaaagtaggttgagatcttataaacagttataattaaattctttgctatgtgatatataaaagtcgtagcaacgtacgagcacttaactagtggacaataacgcttatgtagacatttgttttgcagccctcgcctttataaatcataaatggatctggaggaaaataacacttcgtgtacaccatttggagacctgataaacaccaccaatgaaggtaaccatttatctatatggatcta

SEQ ID NO: 172914 - DNA, 460 bp, Zea Mays
tttagatggtgaatctggtgaggatattgagattgatgaaacccaagatgcctttactgtcaaccctgacgtacctgacttgtacgacaaggtgtatagtaacatacctgaagaaacacatttgctgagcactgttgctgactgcaattactgcaaagcgaagaagtttcagtatgaaccacctggattttgttgtcataatggacagattaatctagccgcattggagaccccgccccagcttaggaggctgtgggagtgtgcagatgcttatgcgaggcatttccgtgataacattcgattttttaacggccatttctcgttcacttctctatattgttgccttgacagtatgactacaaacatggattgtggtatctacacgtttcgtgcacatggcatgattgtgacaccccagtgtcacttagggttcttccttaagctaaccccaacccatgat

SEQ ID NO: 172915 - DNA, 1636 bp, Zea Mays
agggagaacccactcggacaccctcgggggctgggtcacagcttgcgctacccatccgagccggatcatctccggcaacaccctcgggggctgggtaagcgccagcaccatccttgaaggccgagttctctgcagcagccacctctaaggctgaaggtccctcagtcacttccatgggagcaggacaatccaaaccagcttcctgaccctcaagaccgcgttccaaggtcgatgaggcgcgggacgttgcccgggatgaccccaacccggcgtcgagcacatcagcacaaacatccatcgcgccactatctgccggttctgataacagatcttctggaaccatgtcttcaagagtttgatcaaagttcgccagagataattcttgtagaccaatgagggcagacaaggcaggagaaggaacaccactactttccccactagctatgtaacgccggctgttcttccgaatcagagggatttcgtcgtcttcttcatcatcctcatcaacaacacgaacaacaacccattggggtcagcgtcagacgggtcacacacattgggatcagcttcagtaaattcaggcactggcacttcctcaacaacaggagcagaaggaccggcaccctgatccaagctagacacccgacgaagacgtctcttcttctttttctccccctcagcaggaaaataggcttgatcgactcggcgagaacgttttagacgaacattgacagatttctgagcgtccaaagctttgtcagcctcagggatgggcgccaccaccaatgtttcagcaggagcgacatcagaggaatcctcggctaacatatcaagtatggcacttatctccgcatcacttggattcaaaggcacctcaaaatgaacctgcctctcgtcgtcaggaatttctccgagcgaggcaaccagagcactaacttcttcaggagagggtcgcactctaagacccaaaccgctatcaccagcaggaggatttgacacgaaactattaaaagcctgggaaggaggcaaattccaggccgagtatgcaacaggggcaccgatgttcgataccttgcctctgagtatcatctcaagccggctcactaagtccacaacaggaatttttctgttggttacccgggttgagtcagctaagcctcggtacagataagccggatatgctctgtctttcagtggctgaatgttcttaaaaacaaagtcagcgaccacagcttctgtagtcagacccctttctttcagcaatccaacttctgctaacaaaacccctgcttcagccacttcctggtccgtgggggactcggtccagctcggagtgcgaacatccggctgtcttcctgaccgtggggggagggaattcccatgattctccacgatgaaccattccaggcgccatcccttgatgttgtccttgagggggatgtagaggtaatcagtcttccttccgcggcgcatctccaagctcgcgcacccaccagctggtgctgcccctcggccatcccaggccgatagtggtacaaatacttccaaaggccaaagtggggcaaaactccaagaaaggcttcgcataaatgaacaaaaacagaaacttgtagaatggaatttggattcagatggg

SEQ ID NO: 172916 - DNA, 276 bp, Zea Mays
ggaaggggaaaaaatgatgtccagtgctgctgcttgttggtgttggagatttgtagtctcattcggtctgtcttcacccctgagctccccattagtgtggattttggagccatgacagaaggtggtagaaaaagctagatttggcttgtgcgcattgcatgattgttgtattgtctgataggttgtttggaatggatgataaaaaatgatcgagtgcattcttcaggtatgtagctggattgcatttttagtgcttagttgcatccaggaaattct

SEQ ID NO: 172917 - DNA, 282 bp, Zea Mays
gtagacagatggtcacagagagggtgagtatggggtggagaaggtggtgggtccattaatggtgattcttgtggcagagacggtgggtcaaaaagagcatgtggagcagcaagtgaagtttgaggaggtgatgacggtttagcaataggatatacaagtgatgactcttgcgttaggggttgggcatgcgacgatgatagtggaggatcaaccaattggacatctcatcgaggccaaagaatgaaattcttgatagtcagtccaagtgttccaataccttca

SEQ ID NO: 172918 - DNA, 609 bp, Zea Mays
cgagggtgtgctcaatttatagtgtgcttgagcggtggccagtgaattttatggagacgcacgacggccggagaggaggaggggcactggcgcaaacgattagtggctttcaccgtggcggactcaccggcgacgagccagtgatatagagcggcttacggcgacgtggtgaagcttcaaggcacgtggcatccgatcgacgggcggccaactccggtgaacttatctgagccggccgcaaagcaaaaggggtatggtggccagcctccggtgttatcctgtggcgaagatcttttacccaaaagcgttatctggtcatcggtgagcacgaatcacaacggtggcgtgaatccgggcgcacgactcaccagcagcgaggttctctgaacttgaccgtatccattcactgtaccattggaaacgtccaacagagtgcctgacagagcaacttgcaacgcctagatctcggatttttgtgccagaacataccaatccgtctacaacaaacttgtagccctttatttcaactataattctgctatagcaactaccctcaatcgagcaatgaatctaactctaaatcgagctctaagttcatcctactttact

SEQ ID NO: 172919 - DNA, 1110 bp, Zea Mays
tcgactgtgattccatctgatcagtaggcgcctacaggtggtactgcaaatgaaaatttggcccgttcgactgaggtttttcccccttctgctcccgcacatcgctatggaacaagacttcaacataatattcgacgaccaaaattgaggattgatggtacagtgtcttattctgtggcctgggtttcatctgctgaaccgacatctcatgttactgctttaaagcatcctctatggaggcaggctatggctgatgagtttcaggctctccttaaaaacaagacttggcacttgattccccctcgtctaggtctcaacattattgactgcaaatgggtcttcaaattgaagcagaaagtagatggttctattgatcggtataaagcctgattagtttctaaaggatttaaacaacagtttggcattgattactctgacacatttagtctggttgttaaacctactactattcgtttattgctctcgttggcttgctctagaggatggacacttcggcaaattgatattcaaaatgcctttttgcatgggtttcttgaagaggacgtttatatgaagcaacccccgggctttgtggataaggcccaccctaattatatttgcaaattggataggtcactttatgggttgaaacaagctccgcgagcctggttttctcgtctcagcaagaagttggttgcccttggcttctccccgtctaaagccgatgtgtctctgtttatttttcacaagccaaatctctttatgtatatgctcatatatgttgacgacatcatcatcataagttcattttcatcggctattgaaaatttgcttcatcagttgcgaactgactttgcggtcaaagatttgggacctttggcatattttctaggcattgaagtgtctcgtatgtcctctgggattctactgtcacaacacaagtacatatccgatctcttgacacaaaccaacaagctgacttctaaaggagttgctatgccgatgctgcccactgatcggctcaaactgacagatggggaacctctctcttctgaggatactatgaaatacagaagcgttgtgggggctctacaatacatattattgact

SEQ ID NO: 172920 - DNA, 276 bp, Zea Mays
gtcttgctgctgagctcggagaacttggaatttcctcttgaggtgacctttttcttcttcttttgccctttccacttgtatggctttgttggagaggtgcgagaagctgaggaaatcttggctggcgaggatggtcttgagttctggtcttagccctttcagaaaacgagccatcttcttggtttctgtgctgacatcgtcaagcgcgtaacgagccaactctgtgaatttgtgcatgtactcactgacagatcttccaccttgagttagttcccg

SEQ ID NO: 172921 - DNA, 325 bp, Zea Mays
cagctactggtctttcaccttacgaagctctgtatgggtgccggccacgttagtttggcatctcagagaaggacaatattcagtccactgatttggcgtcgtggttgcatgagaggcaattgatgtccgaactgatccgacaacatttggaacgggctaaactcagaatgaagaagcaggccgacaaaggtcgttctgaacgggagtttgcagttggcgactgggtgttcctcaagctccagccatatgtgcagtcgtccctggcagttcgtgctcatcagaagctggcattcaaattctttgggccttttcaagtactacaacg

SEQ ID NO: 172922 - DNA, 302 bp, Zea Mays
ccactccatggaatgaggagattcaaagtcaaggacaaattgtcccctcgctttattggacccttcagagttttttaggcgagttggagagatagcctatcaactcgagctacccgataatctattcgatgtgcataatgtattccacgtatctcaacttaagaagtgtcttcgtatccctgaggaacagttaccaatggaagagctcagtgttcagggtgatttgacttgcacggagtatcctatcaagattctttatacattgactcgagttacaagaaataaggtgataaagatgtgca

SEQ ID NO: 172923 - DNA, 478 bp, Zea Mays
gggagattaggaagtagcagagtatgcataaaaattacagagaactcgagcaccttgggaagcaggacaacggtcgccgagcgtgtagaagaacaatgtgacgcgtgcgcggaggattgtcagcggcgggcggctccaagacactgacaacggcggcgccgattagggttgagggcaagtggcggcggaggacggcgaatcgccctggcgggagggcagcaaggggaatcgccctggcgtcgcctgaataatcgcggcgagtcgagcaggaaggttgactgcgcgggggttagggtatagaaatgtttgaccgagtgggaagtggggtagtgggccaattcctgaatttcgggaacgtgggtcggctgaagtatttacgctaattctctattgtgtataaacggacgaatggaataatgtaaactcgtgctgactaaggaagatatggctgatcacgtggaaagtgggcctaatccgc

SEQ ID NO: 172924 - DNA, 568 bp, Zea Mays
gtcccccggccatcccgggctagcaatgatacaaatacttccaaaggccaaaatgggggagaatcttgaggtaggcctcacacagatgcacaaagatggaaatttgtaggatagaattagggttcaaatgggttaaattcagatcatagaaatcaaggaggccgcggaagaagggagaaacgggaagagcaaggccgcagataagaaaaggaacgtagatgacggactcatgtgtgtcctctatcgaaacagtgaccccgcgacaaatccgccaagagtagagctcttttggaagtagaaccccaacgtcaacaagatggaaaagatcggattttgaaacagcagacatgtggttacccgcgaacggcaactaactgttggggtcaatgggaggaatgatcgccacgacggaactctgcctcttctgtttcggtgccatcgcaatcttgctggcggaacgaacgagagcaagatcccagggaagcagagagtgtttcgaggcggaaaagtgaaattagggcatagaaatcaaaacgcacgtcgacgcgagtataaatggggttttctc

SEQ ID NO: 172925 - DNA, 813 bp, Zea Mays
gaacaaaagcacaataagtgtgcgacatcacccacagggtgcgaagtcttcacggaaagacacgtccaagcaaaagccatcaaagggtgcagccggacaaaagcataagtgcgcgtcaccatcgacagggtgcgaagtcacctacaaaagcaactcccaaaacagatatcgcctaggggcgcaaccgataattaaagtgtcgcgcagtcatccttacgacacaaacgcgattacaaatcgaagccaactcgcaataagcacaacatacaacgtgcaatcacaaataaacaacaaacgaagggctcaacggcaccatcgcacaataatatgaatcacggttgttaccctcacaactctgttacaaatcgaagccaactcgcaataagcacaacatacaacgtgcaatcacaaataaacaacaaacgaagggctcaacggcaccatcacgcaataatatgaatcacggttgttaccctcacaactctattgcgaagaggaggagggcagcgctttcactcactatcgcaacaagagcagtgagggcaacaaaaatgtcacataggctccgccttcggaataagacccacctcccagaaattaaacaacatcatccttaactcttccccctcaaacaggtcccgcaagtccccctctccaatgcacgttccaaacatcgaggaaagtagctcgcgctgaccaccctgatccagtcaaagatgagacctttccatacccattcggcgacgtcttccacttcgtgatgtctcaccggtgctctgtttcgacacaaccacccttcgcctccgtgagtct

SEQ ID NO: 172926 - DNA, 1047 bp, Zea Mays
agaacacagaccgtggtgggaaaggttctgcggcggcgcagctagctccagtgagcaattacgcaggcgcaggggcaacgcttggtgaaataagggcatgggaaggttgctcacctcgagtgcgaactccaggggcttggagaacggcggaggtgcgatggagattcgggtcgacggcggtggggctctggctgcgcaagaaatgctccagtgagcgtgggtcgggcaaaccagagggagaatgagggaaccagagggtgtcccgagtaggtgacagtgaggcggaacacaccgaggcaacagacggggtgcgggctcgacggcgatcgtagaatggacggcgtcgacggtgggcggtggcggagctctctggtcacgcacgcagagcgagagagagggcgagagggtttggctgagggcgcaagtgagcgagtggaggtgggcgagcagggcgcggggctcaaaaggggcggggacgtgcgaagaaggccggagatcgtgtggtcatgggcgcgtccacagcgggggatcatgggcgggaggttggggacgagctgataggtggggtcggtgggacagagagagaagcgagcacgcgggcgagaggaacgacgtcgatagacttggcccacggggcagcgagagagagatagggagagagggcgcgctagttggcgcgaaaagcggggcccgcctctcaagcaccgagggcgcgcgagcgcgggcgcgcgcagggggttgggcttagtgggccgacttgggctaaattgggttttctattttccagggaatttctaattgcttttctatttattttctctagggttttcaattcaaattcaaatcaagtttcaaattcaaaccaaatcaaacatgtgcaacaattcaaagaatatttggggttcaacatgatgcaacatttcatgactgatatgttttgtcaaaaataaaataaataatccctcactaattaagctaaccctaaccaaaagaggaagagagagagaaactagggagagatagaaactagagtgagatagagaagag

SEQ ID NO: 172927 - DNA, 421 bp, Zea Mays
aagatggggagtgactggctcaatcataggatggtatgctatattgaacgagacattttttcaagtattccaaatgataagattttataccagtttcaagaaatgaagtctcacatgaaaatgttgcctaaacaacatcaggctactagtgttaatggtatgttcagtttattaaataattgaagtttgacacggtcttaaaattgttatatatataacttgtgttcattttttatgtaggtctgcggtctgattcgattgttgatgcagaaacaagaagctaagtggaacaaatacaataattcttcatcgattaggtacttattcttgtctgtcaattagtctgtgctaaatttttttcgaatggccctagtcctgtcgtgagcaaagttccgccactggccccaagggcaccctcttc

SEQ ID NO: 172928 - DNA, 625 bp, Zea Mays
catcctagagcaaggggcacaaccctcctaatccacgaacacatggatcacctcggggacatccgcgacgctcggcacttcatcgataaatcggcgtcaggagcaagaagaggtcgagcaaccgcgcgagaggaggcatgagcgtagccccagcccacctaggtcggggccacgcacctttggacgcgtgatccgcaaggcacaatttcctataaaggtaagggcgccaacaaacatttccaaatatgacgggtttctgaatcccagtgtgtggttgcaggcttaccacctagcttgtcgcatggcggaaatcaaggacgaccacctcataatccagttcctccccaaacaccttgtggaaggggcgagagcctggctcgggcatccccaccgaacacaaatcttaaatcttattgtcccccagtgttcgaaaccatgattgttggcgcgccaggtaggggaacgttagcgtgctaattgacatcctccactccgatggcccagtcttcaccattcaccggacacaatactttcgctcctagaagccgcatcatgttcggctccctcaacttccttgccaccaccaccggagaacaccgcctcaccaaccgcaacgtgcctatcg

SEQ ID NO: 172929 - DNA, 654 bp, Zea Mays
tccattttgagtaaaaaaatgcagattacactgaaaacacaagttttcctcagtcaagcgtctctatgcactggtgagctaaattaaatcatagaaaaccaaacggcatcataaatgctcattagtacagtagcacaaaaaacagacattttgccttaagtgaatgatgatgcatctgtcagcctccttgttttcttacagttccattttgcatggtccgactcattagccttatggtcacacagccatcttgtcattcccatgtaaaaagaaaagcattgcacgttccaagataagcctttcttgattctatgattcagcacgaattcatgatgatagtaatctagtgctgaaacattatgtttgacataattcaaagagttagttacaccatctataagccccacggttggagggatgattctttgagtccttcaggaaatggtatggaacatccctatagatcaggttggggtactcatccacgttgaccaaactttccaaactgcacattgccctccctcttcctatttctgtgcagatttgggtaccttgcgcactgaaatcaacttgcagatgtcgatgtctagctgaaacttttaggataatgagtccattttctattattgaaaggacaatggtgtgctacttacc

SEQ ID NO: 172930 - DNA, 661 bp, Zea Mays
ggcgagcctggaacctagctgttctagggcctccaatcctcacatagtagttggtggagcaggagcctgagaaagggcccatccgagatgttcggagtccacctagggggtctaggactcctagagagatcataggagcacatggcctcatcagaccatgcgaagggtagagaccgaccatgacatgtggtggagccggggccagccaacatgcatgcgaagagcagaggccgaccatgacatgaggtggagccggggccagccaacgtgctgacgttagtcgttgtaggaaggtgccttttgaaggtttgagtggtgagccccccatatgtttagcctcgtggaagggccttagccacgcatattgatgactccacaatgtgatcttgtcatctcttaaaccaccttgagggtgggtcctattgcctatttttcgtgtagagtctagggcactcgtacccaagggcactgatagtgtctgggtacactataagaccttttaaaaatctcccctatagtgtcattgcccattctaggtttatcctatcaccaagtaccagagtcctcctaatgggtgaatgacaaaacaacaaataaaccaacttgcaccttcctatacaaggagagcccttatgccttcattcaagtaaacaaaccacaa

SEQ ID NO: 172931 - DNA, 670 bp, Zea Mays
gaaaggttcaaaaattatattaactaaattaataaaaacttacttggcacattggattatcttataaagtttcttcgaacattctttgatacagagatattgagtatgttattaatatcgacagatactatttcaatcttgatgatatgatataaccatatatgtggacgtaatcgtagcttgtctctcatataaccgtaattacttggcaagaattagggcactttggaaataggaaatgacgtataccgtatactagtaaagtgttcgtacattgctacgttttctatttacgattaagtatataatataaaacataaagacatgtgtgttctattggctaagtgagtgtaaatgttggtttaaagccaacaaccatggtttgaatcctcattgtacataatgttagcatttttcatttaaatatagaatgcacaatgacagtggaaatcatggaactagaaaaatggtgtttaaatatagtagagacgtgaacgtgatcataacttggcttagatattttgatcgatcaactaacaaagtaaatgttgtttgtttagtctgatttagtcaccaagcactataattaaatatatatttagtgggggccctaacattttaggggccctgggcggccgcccggctcgaccaccccaggtccggccctgct

SEQ ID NO: 172932 - DNA, 822 bp, Zea Mays
gcactgttcaccccgtgataaaacatatgccaaaccatgtcaaacgaccctggtttggtttcaaattttttagggatgtgccttgggtagtttggctactttttgttatttggaccaaatggttttggtgccagcaaatgggtgaacacttctgatctttaggttagggctgattttggacttagagaaaaatggattgccctagtgcgctctccacttgggggcttgatttggggtttttgttgggcctttttgcaatactttccttactacattttgtaggtacattaatgtactccaaatttggtaaagggttcaattcatgaatgagtcatttgcataatttttcctttaatccaatgtttggggtttaatggctcaagaggggaaattagggttttagaacctttttcataggtgaagatacatgaaggctagggtatcccttatatcatgatcatcacttaattaatcaatggtttttaaagtcttggtgcctccttctccccatttacacacatgagataataggccataggtgcatatattgagccagggccttgggtaacacctgagtgttacacgcgcggtgagcagggagcgggaggaacgctggtagaagagctcgcgcgcacggagaagcagcaggcgcggtccggtggtggccgagcaggaaccagggcatgcgcggagataagggagagagagaggcacgactgtgagggagatccgagctggggcgcgacggagaagctcagttggacgcttggccatgggaggtccgcaggagggagggagatcgagcagatgatttgttgcgca

SEQ ID NO: 172933 - DNA, 473 bp, Zea Mays
accctgcctcaagtgcggtaagaaggcctctaacgagttcgctgctatctgttctacgcatagcgctaggcaatcgagaattgaatgttgtgggcactggattgggaacacgtcggcgatgccccgccgtggtgtgctctgcgccgccggtgggtcagccgatggggagaagaagctgggtgggccgttggatcggcaatggatgggcgaggggtcgcggaccggtgatccatccgtgaacggtcgagattaaaacgtcgacaccgtttcgagttgatcgcttccacaccattgatcttcacgtctagggtcgggatcgagtccatgttactttgaatcgccaccctcggttccggatctatgggttcatataagcatactacggtgatctaatcggggtcgttcaattctggtcgggtggctgataataaaccatagctcttcagcgtggtaatcttgctaaagagaccctg

SEQ ID NO: 172934 - DNA, 307 bp, Zea Mays
aagggcttgtatgatgaagttgtgtgccctagcttgtctatgcctgcgagggcgttgtgtactttggtgtgttttgttgtgctgtgctggtgcaattatagttggtcttggcgcggacggtttgatgttgtcgtttctgcttttgttgtgctagtccggttgcacccttaggtgtcttctgcacggacagcctttgaggtagcctttggttttttcgcacttgttgtgctagtccggctgcacccttaggcgacttctgcgcggatagtcttcgcggtagattttggttttttcgcacttgttgtgc

SEQ ID NO: 172935 - DNA, 373 bp, Zea Mays
tatctaagacagaatgggagaacgagcgttcgtctacgagtgtcgtgtgcatgttgatgtcgtcgatgttgatcccctgtccatggagggatgaaagcctatttatacaccaaagggagcgtccttagggaagctgggtcttgtattcaaagaagagctgcatggcgtctaacatgacaacatactatgcagtagattcatgcctgctgacttcccgtacagagccgaggccgagaatgagggttgtccgtacgcttgagcccccgagggagaggccgcccatactgtagtggttgtaacagtgccggggtatgggtcgaaggctgcttacagggtgtgtcatcgtcctggcgtgtgatgatgtcgagattcc

SEQ ID NO: 172936 - DNA, 282 bp, Zea Mays
gaacttttgtacgagacgaaggccaccgacaaggagcagtatcacaacaacttcggttgttacggattcattgctcgctctaatgcaagctacctggttccaacataccgaaaaagatggcccggggcctggatggaggaatggttttatgttaagaacaatctgattgagaggaaggatattaaggaaattatccagcgccccatctggtctcgcttcggccttcgaaggccgaaggtagctattgaaagtaatgtcgaagcgtgtcagaaggcttttagc

SEQ ID NO: 172937 - DNA, 839 bp, Zea Mays
attccttggctctgcttagctgcaattgcatatatgttttttgccgcttcttcgacagtgggatcatcaaaagatacaccagactcagtttcccttggttttctagcacagatccaattagctgtcctttcaccaagttgctcggacagcgtcggcaaccctgcagcctttttctcggcgtcttcttgtctccatttaggaacctgacgcttgtaaccacctgtgccaaggtggtggcggtatttgttcttcttagatagttccgaatttgcctcacttagcgatatgaaatcagggctgctcctctgctctagaaatactgcccactgacctgctgggattttatttttttcgtcgggtctaggtctttctttgcaaactttgtattcatctcagacctccagtttcggaaattgattgcaaactgcttcatcgtgtatttttcacgagttcttctgaaccccgaggcaaaacgaacctcgttattagcttatttcacatttgattcttgacatcatctgatacatctctccactgtcggattgtgatgtcaagattatctctaactaagaacccaagtgcattccagaacttaggcagtgcctcttctggagctaggggctgaccattcgagctcacgtctgcgattttatatgtcttgtcaggaaacttgtttagccccctgtcacctctgtttcgatcgctctgcttccttttccttgacctctcggtggttgtctcggtcgattccggtgtgccttgggtcggttccggtgcgccttgggtcggttccggtgcgtcttgggtcggttccggtgcgtcttggtatcgtgccgcag

SEQ ID NO: 172938 - DNA, 685 bp, Zea Mays
ggaaggtatctaggtgtcagcagtggtgaagcctaggtgtgaagattcagttatggttggctggcactttggatcttgaggtcgcacacccaaggaaggggtaggcagagcagcatacaagatactttaggacttaatggacccttttcctcgagagattgctaccgtcatacctaggatctttcctaggggtgatcctttcaaccctaagtgggaccagcctgagggtagagctctgatagggggtgatagtgagcagcagtacagtgacactgtagcctccagtgctatgtttgcagttatgcaactgtataacagctctgagcgcaacttggagatggtcaatggctctcttgccatggcttagaatgagttgcaccggactcgagaggcacatgctgtagagatagctcaagtctagatagagttagcccaggttaccttagacaaggatgaggcaattcaggttagggatgtggatgtacttgacaatgcgttgtggattgacaaatgccaggactaccaggccatggtagtagagatcatcagggagaggaatgtagcctggtccaagataacctagcttagggcaacacaggtcaatctgatgcagcagctgaacaatgtaaaggcttggaatgctaacctgcatgaagaggtttttcagttgcatggccagctaaac

SEQ ID NO: 172939 - DNA, 636 bp, Zea Mays
tgaatacaggggtaccacgttcctctggtggccacttctcctttattgcgggcaataccttgttcacaagataatcacggctaacatctttggttactgatggcagcaccttagtaaccattgtacctgtcggcctattgacactactccttttagctggctccactgtaacgaatgcccaagtaccaatctttcctgaaaatatacagttcccatcactatcaaacctaggcctagcgactgccgtcaaaaacatcaccttctctataaagttcttgctctaggttgttctctcgggtacagtctcatctacagccaagtagtacttctgagttttcttagtgcgataaaaccatttctcatcaatgtgcacaatgttgtacattccattaaaacttggttcatgtggcacactagatggttcgagcattgagagacaaaaccttactctagcctttttgttttcttcattcaatgttggcttgattgcatttgagtgacagtctaaactccccctctttgaatctcctatgaagtgttgacagtgacataccgagcgcattggataaatccttgaaagttgttatgttttccagtgctattgttttgattatttctgggtcaaatggctttttt

SEQ ID NO: 172940 - DNA, 1028 bp, Zea Mays
cgggccacatctggatggccccagtccaaggattttggagggagggccataggccggaggcaccccggtgctgaaggggaacatggccgctgggactagtgcttgagattggaaggagacccctggtggccttggccacccctcttgctgcgacggttggggtggccgaaacgtggagccgaagacgcgttgttgacggcagcaggagccttgttggaggccgtcgaagtcccgctttgtggaggcttggtggaggtaagccaggcggcagatggagcagacgcacgatgagccatcgtgagttcctccaacaggagagtggcccggacgtcatggaacgtcggaaaggggcgaccgaggtgaagatgacggtcgatgtcggagaaacgatcgctaaggctgcgcagaacgttgaggaccaattttcagtcggagactggttcgccaaggcatctgccatggttttgaagcggcgatagtaatcagagataggtagatcaccttggatgaagtgccgaaactgagcgtcgaggtggggggcgcgagtctcccgattcccgagaaactggttctcgagagttagccaagtggtgcgggcactggcgcctcgctccatggccatttcagcaaggtccggggagatggaactggagatccaggacttgacaacgcagtccatgcgtgcccagtcggggaagtaaggcgcgggagtgtcgtcgaggatgtggctgtccagggagtatttgccaacgacgaggaggaactcatcgcgccagcgggtgtagttgttgttggcgaggtcgaggacgacgtgaacgagactccgtatgttctagacaacgacggtctgggagtggaggttgacgatagcagcagcctcgtgaaggaagatggtgtggtggatgcccttgtcagcaccacccgatggatcagagaggtgggactgattgtcgtcggttggaatgccatcggtggcagcctaagcagcgagggcgcggccgcgcgcgcgtactgcgcgctcgagagca

SEQ ID NO: 172941 - DNA, 831 bp, Zea Mays
aagttttatcctggttcgggcaagagaaggccctacttctagcagagggggatgagacttacttgcacctaagtgcttgtagtagggggtacaagctggtcgggagagggagaggatcccaagtccctcatggtgattaaggcgagtgccaatatctgtcgtgggggatgaaaactagtgaagtgttctcctcctgtcatttgaagccccagactccttttatagcctcaaggagggttcccaggagcgcctaggcttgtcgtattgaggaggggagacgaatccaagcccctatagctggcattgccgatgtaatggccttgtcctagcggttgacttgaaacagggggaggacgcatgacccttgtatctcacatcttaaccgagcagagagtcgaggcctgggctgggggctcagacgcgtacccaagccaaccagatggaggtgtagtccgagtcgtagttgttgaaacagtgataagtatggtgaaaagcgcatggtaatcttccccgtatggtgtaaagcagacttgatgtcgttcccgcagtttcctgtagccatcccgttgtcagcagtcttcaaggaggagttggtggagtcctctcgtcgatgttatctaggccaagaccaagctcgggcgagatggaggttcctcctgaggccatggttgtacccatgatggggcatacagtcgtgcagggagtggtagtacatgtatcggagtggcctcctacaggatgcggggagttgttgccggggcagttggctaaagccaggcttgggcgaggcggagtcctctcccgaggttgaggttgtcttcgagtgaggcg

SEQ ID NO: 172942 - DNA, 321 bp, Zea Mays
accgcgcgacgcttgctgctctgctcagcgcgtgtccgtaaccgctctccccacgacctattccggcccacgacctccactcccacacgcttccttctctgcacgacctccacttcgcctgggtcagcatgtatccgatgaagataaatggggagcctgcgcatactctgttttgttcaagcacgtgtgtgagctctgtgtgcgagctcgagcacgcatcccctcctcgacgcattgccaggtccggtaagtcctccgatgtccctttctaccacctgcgttcatgtatcatctattttgttgaattcgtagtgcaacaga

SEQ ID NO: 172943 - DNA, 797 bp, Zea Mays
gagcttttagatattgaaggtccatgtaattagtttgcaggtcttcatagaccttttcaacaatacatgcagttttgtcaccttgaggcattagaagaaattcttcgggtatttgtatccatgttggctcatcttcgccttctcgtgatgtagcatgtatctttccctctccaatgtcgagcatccatttactaaactgagacaattcttctcgatcttcttgtgacaatgatgttgacgaaagcctcatattatgggtaagacataggatatgaacatgaggccaaagagaagagttgattattgctgaatttacaatctgtgaacgattacccccttcaattactggcaaaatttgccttaaatctcctccaagaacaacaacctttccaccaaagggtaaattggtagccataggagatgaagatgataagatatcccgtaaagatctgtctaatgcttcaaatgcaaatttatgtgtcatcaaagcttcatcccatattattaaagatgtagtttgaactagttcacacaacattgtgccacgtttgatgtcacatattgttccttcatctaattcacatggtattttgaaacgagaatgtgttgttcgaccacctggtaggagtaaagaagccacacctgaagaagcaatagataacactatgtgtttgcggctgcgtaagaatgttatgatggagttccatagatacgttttgcctgtaccaccgtaaccagagacaaagtagaagcctggtctctttgttagaacagtttctgtaatagttttgaaagca

SEQ ID NO: 172944 - DNA, 869 bp, Zea Mays
cgtcggactgtggatggtatgcggtgcttaaattcagcttagtacccaaaatcttgaacaattgagtccaaaaggcactggtaaagatcttgtcccgatcactgacaatagacttgggaaggccatgtaaccggaccacctgatccaaaatgacctgagccacttgggaagcagtaaatgggtgtttcagggcaataaaatgagcatacttcgtgaaacgatccactacaaccaggatagtatcacatccaccagattgtggtaacttctcgataaaatccattgtaatatcctgccaagcaccttgaggaatgggaatggggtgcagcaaaccagcggggtgtactctttcgcctttggcctgctggcagatttggcattgttgcacaaaatcagccacatcagatttcattcccttccacacaaacaacttcttgaggcgatgataagtggcatgcatcccagaatgacccccagccgcgctgtcatgaaccgctgccactaatttagtgcgaagagcagaattctgtcccacccaaatcagacctcctttcctgatcaccccttgagataaagaataaccgtgttcatcaggattatggacacataaccgagccaggagagattgagcagcaggatcagtcacataggaatttgtaacttcttggatccaaagtggttgaacctcactgactgctgttaatgccatcactgcccccacccgagaaagtgcatctgcaaccttgttctctttaccttgcttgtaaaccactttaaactgcagacccatcagcttagccatcgcctttcgctgcaactcggaatgtaaatcttgactgcccaagaaactgagagccttgtggtcggtc

SEQ ID NO: 172945 - DNA, 455 bp, Zea Mays
gtccgctctaggataagacgacacgtaatggcaaccacaacgtcgccacagtatcgtgacagaagaaggaaaggtcatcaacaggagtccttcggtcgataaaaaccccataggacaaggggctacgcaacaagacccaacccccactagttttgcccaaccactcaggcttatgtaacgagccctcctctcgccttggcaaataaaaggaaggggatggtcacgatctaagacacagacaacaactcacaccaatagcctacagacttgtaatcatgtagagcacttttctcctcgctctcgcactatagactttgggactcctccctctccgacagtttgtaaccccctattacagatttagtccagagtaacacaagttacttaattggacgcagggacttgcacacctagatgtgaaaagcaattgaattactagtcggtgagttcgaaat

SEQ ID NO: 172946 - DNA, 448 bp, Zea Mays
ggaaaattcctgctgaggatttggtgagccggctagacatgatcttgagaggcaaagtatcaaatgttggtgctcatgttgcctactctgcttggaatctgccacctcctaagtcctttttcagtttcgtgtccaatcctcctgctggtgatagtggtctgggtcttagagtgcgaccctctcctgaagacattgaagtcttggttgcttctctttgtgatcttcccaatgatgagaggcaagttcattttgagatgccaacgagcccagatgatgcagaaataaatgttgtacttgatatgttggctggagaatcatctgactcggtctctgctgaaacaatggttgttgcggttatactagagactgtcaaaacagtagatacccggaagcctgagggtacttgcccaaagcgtctttgccaagtcagccgcctagttgcgcttgc

SEQ ID NO: 172947 - DNA, 391 bp, Zea Mays
gcggtgtatctcccctctgtgctaggagaccttgggagagagatccctggttggtcttgattgggttcagcagacttctgaaaaggttcgggaaattcgtcagaatattttggccgctcagagccgtcagaagagttatgctgatgtgaggaggcgggatttgaaatttgcagtgggtgaccaagtccttctcagggtatcacccactaaaggagttgttcggttcggtgtctccggaaagcttagcccgagatatattggaccgttcactatcttggcctgggtgggcagcttggcttatcgcatgcaattgccggattccatggcaggggtacacccagcttttcaagtctctatgctgaggaagttcttgcgggatccagaccatcag

SEQ ID NO: 172948 - DNA, 290 bp, Zea Mays
actattgtacccattaaagatacccgaatggaagtgggaagagattggtatggatttcattactggattgcctcgcacctcgaaaggatatgattctatatgggttattgtggatagactggccaaagtggctcatttcattccagtcaagactacttataaggtatctcaattggcagagttatgtatagctcggattgtgtctctacacggtgtacgaaagaagatcgtttcggatagaggatcacagtttacctcaagattttggagaagcttccatgagaatatga

SEQ ID NO: 172949 - DNA, 645 bp, Zea Mays
cgctcatgcacaattcggcccatcttccccctcacctcgccagcccgccattctccctgacgctggcaacaatgccccactgcccaacaccccaccacgcgcgctcctgtggccactgaaaggtgggacccgcgggtcgggcgcttgacgttgtgcgcgcgatgacaatgacatatggggcccgattatctgatgcgtctccttcaccgtaacaaacctcaccggaatccgcgcgatgatctcgccgtgtgctgcgcgatgcctgctggcgcttgctcgtctcgcccatccatgggacccgctcgtcaggatcatccccaacccccctaaaagaaacaccgaacccgccgctaggacttcggttccaatcgcttggtccgcgcatggcgtgctcgcccctgtgatctcggcgaccgtttcaacaacccttggtcaccgggttcccccatgccctataagatagatccgtgaccgtgaccgtgcccgtacttccagctcaaggctcgagctgacctcaactgcggactctggtgccgcgcgggtcaaggtcgggcgcgggattcgccaccggcgtccctcatctccgtactggttgggcacgcacggcgcgttcgggggcgttcgctggtgaaccccgagtgtgtt

SEQ ID NO: 172950 - DNA, 672 bp, Zea Mays
ataaagtacgtttatagctagctagcatcacgtgagactcacagaaatacagaattccctcagcctgtgacttctccatctgtttcgtttctccatgcgacgacatactaggtctgtaagcggggccgcgcatggcgggtgtcaggtgagcagcaaggggcagaagtgccggccatgtggacgagcagcgtgggcgagaggcgaggtacaagcagcagcagtgcgggcatgcaaagagccagggaggcagcagccatgcgaggtgtgctacgtgcggtaacgacatcaatttgcttccttctttactctgcttgatttgggatttcttctacttgcttcatttattctttagtttatttgatttggggaaagcaatccgaactttagtgaaaaaccgaacaccacaccaaaaaagtcgacactgaatcaatgtgtgctttctctaaattctatcagtagccatgtaatatagttgttacatgccatgaacttacacctgcaatttttgtgctgcaaaaaacctagagaagaggcccgtaatttacacttgtcagaatttctatacttctctctatgctggatccagatgttcatgttagatatgttggtcgtacttttgatacggtaagcaagattgctccactagatgactgtacagccaactcacctatg

SEQ ID NO: 172951 - DNA, 364 bp, Zea Mays
ggagatctgcaacgattttgtctatcgactgtgtctgtgagttgtattgtttcatttgaggaagggttgccggataggcccacaactttcggttggcttcaatttcagtttgtgcccttgttgaagttttggagtcttttgctcttgagttcttctcgtcccttccctttgtgatcttgtgaataaccatcaagttcttgtctttcgggtgttggtagtatttgttgatgggtgagatataaacctaggatcactacttacgccctattggtgcagtttgtggttgtgatctcagctgatctcgttttgagttcgttcaacaaaaccccaattctgttagtatttttagatctgcagttgattc

SEQ ID NO: 172952 - DNA, 1163 bp, Zea Mays
ccagttcagtgatgcggacccgggccagattgcatcagaaacaatctaaacgataccgcatgatgatgacgtcacgatcccgttccctcgcgctgccaggtgtaacggctgcctctatataggaggaggaagactggaagaggacaggcagtaggtcccacgacccttccagggaagagagtgttcgtgacgcgggcggcccccaaatccgcataacaatctctgttgcccccccgccaaaatcctcagatccccttgctgcagtgcagatctctctataatccgcgctcgtggcgacctctcctccagcttccgttcctgaaatccatctctagtttcgccatttgggttttttctcgagggtttcgctcctcactcatctgatttaacgaagggagctgggtcacacccacaggccgcggcttctgaaattcgatggccgtggctgcagcgcgcctgacgctcccagatcgattcgacgaggtttacatagcctctgcccggtgaaaagatgggctcgtgggttatacgcgcctcgcacatgcacgagctgaatttcttctcgccttttcgatcatgacgtctttcgtttttttgacgtatatgattttccctggtgctagcgccgagcgcaactgtggttgagatccaatgctcctcgttactccgtccacctttacctatggaccagtttgcatgtagttgcagtctttttctaatgtcgataatctgatgttgtggctagttctcctcgagtggcaatataatattctccggatgcacatgatttggatcatccgctgtggagtttagggttttgttcaggttttacaggctctgctttctggtatctagcagtgtttgtttctttcgttctgaatctcgcttttcgttctgaatcatctctcgtttcgggacatcctgagtcatctaattttttccttttgaataacgtctcctactaagacgggtatacccttttcaagcattggatttatcagttattattacccatgtctctcctttttcttttcaagaatatatctcttacttattatttatatacatcatgataagcctcagcactaagagacaatgttcatatttgtgtgtataaatagggaagtcaatggatcaggatccaaatgttttttcacaatatg

SEQ ID NO: 172953 - DNA, 533 bp, Zea Mays
gaaaattcttccaaggaaagacacttgtcccattccttcccatagtgtaacacacatgccctcaacatgtcttccaaaatctgattcaccctttctgtctgaccatctgtttgaggatggtatgctgagcttcttattacatgggtcccaagtgattcttgcagttgctcccagaaacgtgccacgaatggtgctcctctgttagacacaatagtccttagtattccatgcaaacgaactatctggtcaatataaatttctgcatacttttctgccctgtgggtggtatgtactggcaagaaatgcgctgttttggtcaacctatccacaatgacccaaatagaatcgtggtgccgggacgtattgggcaatcccacaatgaaatccatgcaaatatcctcccatttccaagatggtatgggaaggggctgtaaggtgcatgctaccttcaaatgactgccttaactctctggcaagtgtcgcattcagatatatacttagcaatttccctcttcattctggtccaccagtac

SEQ ID NO: 172954 - DNA, 1036 bp, Zea Mays
gtaaaattggtttggcatttttagcattttctataattttctggaaattctcaaagtctagaagaaaaataaaaaggaaaacatgctacaggattgggctgaaactggcctgggtcggcccatttactggtgaaagcgcgcccgcgctgctggttttgcggaaaggtccctatctgtttgaataactggaaacgagtcacgacgctatttccatgtctcactgacacgttacaaaaacatcccccgagttctatttcttcaccgcacgaagtccacgacggcgaacagcgcagggtcgagctccggtgagcttgtaccggccggattacttgatgacgggcactctacttcagttgaaaccaaattcaaggcctaacaatcgtttcccctcaactaatttcatgaacggcgctctaacctgctctatccatggtgaccgtatgatcaacgaccaaactaacgcgttcccgacgatctaaggtagcttagctcaatcgagttggtcgaggagtatcaggggcacacaagaacactaaaacgagagggcagagggtatgagcggacctgagacgagctgaccacggcgaggtcacaccgctcgatgttcttgggtgatttgggggaaatcccaaattggggagttctagtggatgattcgaggcactggttgctctgctgggtgcacaattacttagcaaagcaggcggggtcggcaatttatagcaggcttgagtggtggccagtgaatttgacagagacgtgcggtggtaggagaagaagaaggttactggcacgcgcgattggtggcaattaccgtggcaagctccccggcgaccaccggacgagctaacatgagtcacgacggtgaggttaatgtgtcaaggcacgtggcgcaagaccgcgcagtggctagctccggcgaacccatccaactcaaccgtggtctgctcaggtacggtggccggagtaaaatagtggccggagcgtatccacggcgtgatatttatggatcccagtgttatccaactgatccgag

SEQ ID NO: 172955 - DNA, 751 bp, Zea Mays
caatcaacaaacaaactctagggctggcgtcacacgatgcagggggcgttagagtcctctctgtgtgagtgtggactgttcgcgactgcgtagagagtttcggtcttctgcgcatagaccgttcacgtatgagcgacggaaagtacgcgaggcgcgcagagggcttcttggatcttttgcacctgaatctcgctatccggaagggatccattagggagaaaatatcatagggttgtcctgtggtcggcaggtcacccaaaacatatctaaacgacgtaaagtcgaggagatgtgaagactgcagatgagaaagactaatctaattaggtggtgcctcaatcggtcgtacctctttatatttataggggaggtctggacccgttcctaggtgcatcccaaccgattcccacgcgatgagttgaataagcacgcgcgaggaaaaggactctcgcccgaattaatctaatcgcggaccgtctggggctagctcgtctagccgtgccaaatgtcaaatatggtgctcaacacatgcctcctaccttttggataagcttaagcgaaccaaaagcacctagtacaagttgtaaacaactcgatgtgaatctatcggttctctaagcatcttaccatatactaggatgatatcactttagaaagcgatcattcaatgcattgggcaacttatctccttgcaccgtttgtaatgtgttaccagagatcacctgtgtaactttataaggcccttcccaac

SEQ ID NO: 172956 - DNA, 701 bp, Zea Mays
gtgatgcattatttgagctaagaaccgccgatagacacatatacgtgctatgaacctgtagcaggtagattagttgtagttatataattatgttctttttaccatattatttgtatatgtgatcaactataatttgctagctaattatgtgttgcatatcaaagcgttgtatgatttgaagtgtttataggtggttcaatacaactattgtagaactgtcggctgtttaaccggttcttaacagttcaacaagttgaccaatttgatgcccgattcagttctaacaactatgctttatatcgtatcatatatatacagaaacacacaaaggctgaaataatccaaattccatccgaatgacaaaacggcaaagaagaccaagaattacaagggcacgcgcaggagcaatacagtgccaatttgacatggaatttttggtgtttttttattctccgtctatagtagactagctagtagagacctccgcctacaagaatacgggatacagtactctatacactatgcaccgtctcaacctgctgcgtacatacatgcatatatattcctacatgcccaagtggtacgtatatgcatgcatggatacgtatatatagattatagagacgtagaataatcctactctgctaggtacataataatatatatatacggctacgcgtagatggcgtagcgcatgctct

SEQ ID NO: 172957 - DNA, 824 bp, Zea Mays
agagactgcagaatgcactggtgctgtgatggtaagaaccaagaaggcaagaactagagatgatgccggtgatgatagaaaagggggaggaggtaggatgggagcaggggcaaccttcagatgacgagctcatctcgtcaatcgtcagttcgtcttcgtcactggtgctggtcaggagacgacgctggtgacctggagtcctggagacgccagaagtggatgtggagccggcgcaggtggactggaggatccgccgatgaatacactggagactggacggccgccgctggacgatgggcaggggcacaggcaggtcttgagttatggctagggtttcagttgcactggatggccgccactgtttatgtgactgtagatgggccgaaaaaacaataaagcccaatagtaaaccctagccatcactaaaccctagccgccactggactggacgtccagaaaccctctaatcggacgcttaattgacgatctggacgcttaatcggacgatctagacgaccagaaagtccaatcgagtcgtccagctaattggccacttttaggtgaccaggccgactaatagcagaggcgccacgtccacccgatggtgacacgtcgttcggccggtgttctccgaccagttgaccggctggttctcatggccaccactgctccgactccctcacatgtccccttctccgtctgtaccgtgctcgctgatccccactggcgtcacgctatggagtacgcggccctgctggccaaccacatctaggatttgatgtgtccccctatcaccaacgtggtcatcagcaaatggatcttcc

SEQ ID NO: 172958 - DNA, 490 bp, Zea Mays
aagatgcccccatggggcaccctcgacctagcgatctgggcgcggaatgtcggaggagtgtagtgtgttgcccgagggcatcttgtgcaacgacaatgaaattagcgatgtcagatcaacactattgcttggcctccggacccacgattgggcctaggggttgtagagtagcgtttgggcaattgttggggctacctaaagtcaaggggacgacgatcgtcgtggagtaagcaggacagacctacccttgctactgaagaggcaactcaatgcttccccttttagcttggcattgggccaccggagttctgggcattagaggcgcccaactgttgtgaaggcatgtcatggggacgttgtcatgcatggatggtgctcccccaactaggggtagtgctcctgctccatcagggcaaaggtagaagagatgggaccaccaaagcagactgatggatgcgggagtgcaaacttggcgaggatgttgatcgtg

SEQ ID NO: 172959 - DNA, 763 bp, Zea Mays
tgatatgctgagcttcggatgacatgggtcccaagtgattcttgcaattgttcccaaaatcgtgccacgaatggtgctcctctgtccgagactatagtctttggtatcccatgcagacgaattatttgatcaatgtagatctctgcatatttctctgtcctgtgggtggtgtgtacgggtaagaaatgtgcagtctttgtcaatctgtccacaataacccaaatagaatcatggtgcctggatgtattgggtaatcccactacaaagtccatgcaaatgtcctcccatttccaagacggtatgggaaggggttgcaaagggccggctgccttcaaatgactcgctttgattctctggcaggtgtcacactcggatatgtacttggcaatttcccttttcattctggtccaccaatataaagacctgagatcatggtacatcttgttgctactagggtgcatggagaatttggaaagatgagcttcgtctaggatcttctttctgagttcagggtccttgggaacgactaatcggtctccaaaccataaaattcccttgctgtcctgtcggaaacacttgtatttttctgccttttgcttgaccatttccttaatcatttggacacctttatcctcaatctgtgcccttactatttgctcttgcaatgtgggtttcaccgagatataacttaagtcacccgaagaaacaacttccaggttcagcttgcacaactcatcgcacagggtagtgactttggcatcca

SEQ ID NO: 172960 - DNA, 456 bp, Zea Mays
ctggggtgttacaacagagaccgagggggactgttcttttaggattgttgtcattccttgcagtggtagggactcagtggaggagtttctggcgtgcggcggcttattcatgggtggtcggttggggtcatggcccgcagagacttcgatggttttgaggggcaaatttcgagtctggcgttcactgttgagttggacaagcgttcctgcgagctttttattgcagagacggtgatggaagtggaggaccttgttggtccagtgatgaaggctgaggttgagaagggtgctgctctatgtgggggttacgttagcgtgaaccatgtttttagcatgatggatcatgagtatgagaagcatagggccaagccaaagagggggagaaaaacaccgactgtggtccccgctcagtcgcatatgtcgattgagactgtcggtttgttcggaggaggtaga

SEQ ID NO: 172961 - DNA, 666 bp, Zea Mays
ctcgagctagtccatgccaaggatgatatcataacacgacagtgggataactttgaaagtagaagaaaactacatgttttgtacaaaccactgtgcttctggcaattccatgacacttcagtatacaccatttgccacttggactgataaaggagtattcatatgtgtcaaccccactaatgaagaagcatggatattgctcacaaaacagtgatagcttcctgagtcgagcaatatgagcatatccaacccttgtaactgaccttggaaccgaaatgccttggattgagtttttgtagaaattgcttcagtagacaataaaatcatgaactgttcagccgagtcttggaatccggcctcaggttttgtggaatcggaagagagcatgtcctagagcttctgaacaacatgtaactggattgttgtggcacattgatggcccttactccacttctcggtgcaatattgacacaggccacgggctcggcgataagcacgaagagatgccactttgctatcagcagaagatgctggcgataaccccattttctgcttaatattgtctcctgaaggtttctcccattgatgaggaacattagctgcagcttgcacaggagctcggccttgatagggacgaccaccatgtccagaatccttccgactgga

SEQ ID NO: 172962 - DNA, 277 bp, Zea Mays
ttcatgactcatattctccagcataccggtgttcaggtccctccagtgcagtctactctttaggttgccgttgtgccaggtcttcagtcacgacccctcctccactcttttggtccttctatctttccgctcaggccggtcaccttggatttctcgacccaggtcgtcggacctgtcagtgctcagccaccagtgccaccagcgtctgctattaccactatcgccgtggttgtttctgtgactgctctagttccagcagatcttgcaccacagccag

SEQ ID NO: 172963 - DNA, 510 bp, Zea Mays
ctttttcatacttacatggctatgcagaatgtgaggtgtgtcctgatcatgcgcatcaatatgtctcataggaatgcgttgatctgctcctaccatctctgtcgctcctgtgttgttgtcagcaacaattcctggcgccctcaacgcagctggtggaataacagctacaatgctcgttcctccggtcacatcatccatggctgacgactccattctcttctgttggtgtcccccatcaggtacagatatgatgtccatgcccgtcgacgtacccggatcatctacgagcactgtttctcctcgcgccgccataggtctccgtccagcgaacaaaaaacccgacggatgtggtggctatgcgctagccttcgtaatggaaagactaataccatataacaccaacgtatcaaaaggatatgtccttccttattttaatgttcctcaaaccgcaacacgagagtaaagcggtaactatcccacatccaacgcgattttctagccttattttcc

SEQ ID NO: 172964 - DNA, 733 bp, Zea Mays
ggagtatccagccgcgaagggtgagctcgacggagggtctacgatgtgcgtggagttcgccgctttcgttcttcgcgctcgacggcggggttctgggcatgggaggtgaaggaccgtgccttgacaactcgccaagaggattcgcgctccgccacaagtccaccagcgaccatcttccccgtcaccatccgaattctggtgcgttaacctccccgtaagtctcataaccgcgtaacccgcgcctagctactacagtagttattgcctgtccgtcgtgggcctagtcaccggggtactcatcgccgtggaggggtgggggcaaccggcgagcatacaaccatgaggagagagaaaaggggatagaaggatgcagagaggaagaagacagccggtggtccgttgagtggtagatggacggtggagagagtatacggtgtctgggccgttggattcacatggagcggtgatgatttggttggtgcgtaccacttccgggcgcccatccgagccgttgattgagtgacgggtggtagagattagatcccgggggtgacgacaccacatccgtagatctgggatcggccggtccgcaatgcataccagttcacagttgatgctgatctaattaggaacgctcatccatgatccatcggccgaaactaaaccatactgtttcgaccccccgctttgcagaaagacccccgaagaaatcactaaacaacccgcggtcctg

SEQ ID NO: 172965 - DNA, 1401 bp, Zea Mays
acggtggacagaacacagcaagcagtttgtaaaattcataactcctaaactatcaggcctatggttatgaaatttttacacaagcaagatgaggaaagcatctacaactttattataatcgacaaggactgattctaacattaactcaagcaaacaatgcagtttctaaaatctgtacataatttggacagattcagttactgaatttgtaaaaagcataactcctaaactgtcagacctatggctgtcaaattttaacaccagcaagacaataaagttatctaccacttttctatagcacatatctacagaaaacacaatttagttcatccaacatacaacacaccaaaaacagtacgtgcagcccaaaacagcaactaatacatttcagcttctatataattcaaggattgacatgatctagagacttgaattattctaacactttaccatttgttagagttaacataaccaagggagaactaacaagtagacttactaaatttttatccgtgtcattttgtacgctagaatcaccacacacaattaacaacacatccaccacaataatcggacccggtacatatacatgcgtcgatgcgcccttcacacactaatttgcattttagcttagacatcatatgagcgctgctacttttcatccgcgaccataaccatgtatattggggctacaacaagcaatttatggtgattacgtgcttaaccaaaccatctgacaggtcggctaactggagcaacgacatagcccgctaaataacctacacatcggctagcccattattatcgcaatccgagacacaacatacactaccacatttttataaacacacataatcacaagtattttcgcacatcgaccaatctatacgaatcgtaaaccactaacccccaaatcgcaatcgctatgtatttactttctaaatcacgaacacttacatgtttatcatacgagccgagtatttcaataattatcctaaaaacaactaatctccattacacacttgtatctacttggcttacttgaagcgtctactcgaaatcgtgagcacaatcatacactatatgcgaagccttatttattaaacacacaatacgcatcgtcacgactcggcttataaatatagagaatgcggcgactactttggcatgtcaccacctctctacataagccaaaataatttctacctacaacgaccaaacattcatgtcgagcacactttattttaccatgtctcgcatacaaccatatggtggcgtgcactcgagacacttcaatcaatgcggcgcgaccactaatatatgaactccgatactcatgttttaataattcatcctctacgcaactagcattttctaactactcgtcacaacaataaatat

SEQ ID NO: 172966 - DNA, 411 bp, Zea Mays
gaagaaaggctgcggatcgtccgatgtggcttgggcggtccggattagaagtcgggtaaccattcgcgccgtagcacctgaaccgtcgatcgctgatcgagcggttgtaatcgcgcgatagttcataaaaaacgtggtcagatcctggacgtagattcttgatccaacggttgaagggagagcgggagacttgaccaggttggttctaatacggggcatccatttctgatctgacggctcagatcggctgataccccttcggctagcgcattttactaataagacctcgcactttacatgaatagaacccgccgtccagcgcctgtgctctatgtcggagatgtattacacagaggcccctgcctttctcagatttaatgcgcccagtccagagcctatttaattgtataa

SEQ ID NO: 172967 - DNA, 570 bp, Zea Mays
gtcttggtcaacctatccacaatgacccaaatagaatcatggtgccaggaggtattgggcaatcccacaatgaaatccatgcaaatatcctcccatttccaagatggaatggggaggggctgcaaggtacctgttaccttcaaatgactggccttgactctccggtaggtgtcgcattcggatatatacttagcaatttccctcttcattctggtccaccagtataaggatctgaggtcatgatacatcttattactgccggggtgcatggaaaattttgaaaggtgagcttcatccaatatctttttctgagctcagggtttttggggacaactagtcggtctccaaaccatagaattcctttgctgtcctgacggaagcatttgtatttttctgctttctgttcgatcatttccttgataacctgaacacccttgtcacccatctgtgccatgactatttgctcttgtaatgtgggctccactgaaatataacttaaagcaccggaggaaacgacttctattttcagcttgcacaactcatcacatagggtggtgacccttgcatcca

SEQ ID NO: 172968 - DNA, 705 bp, Zea Mays
gggagacgctcaggagctgggctcgtgaatccggaccccgtcgacaagactgatgacgtcagacccggacccagacccacacatggagggacaggttcgaggccgccacatttcctggaggggaagtcgctaagagttgcgcccgtgagtccgtaccccatcgacaggactgatgacgtcggacccggacccacatagggacaggtctgggaccaccatgtgtcctcgagggaaactcatccctaccacgcgcccatgagtcgagaccccatcggcatgattgatggtgttgcagatgaaaacttatccctagacccgaactcgcaggggtccgatacccggcgggggcacccgtggacccaaagtatataacatattacatgtacaatgagataatgtccacaatttatagatctttctctctcaactgcaattgagatcaggttcaaaggtgtgaaagagactgttgtatgtgcatgtcatggaaaatttgtagtcgctacccttacaacaaaatgtttgttgtcgcccaacagtgcatatgctgctctggggtcgttgtacgtagatgagacgcacatcagcacatgacatggttgattggttagctacttcgtggctcgtctcatcaactcgccaacctattggacaaatcacaaacgtccagctcggtggctctagcacaaaatcttgtccctcgtggag

SEQ ID NO: 172969 - DNA, 515 bp, Zea Mays
ccggtgtacggccattctttcgtagaagatcccagccgtcatgggagggtgtgagagagagcctagttagcgtggggacgactgaccatgactggtgggcgggtgtgattgggatactatgggcctgcagccgttagttgcagcgtgcacatcgtctgatgcatgcaccacatcccatttgctatttgcttgcccgatcctcgcataataattagccaagctctaccgctcacttgattaaccaaacccaccgacttgcatgatttgtcctctgacaagcacaagcgctctggctaacccacaaaaaccaccggtactaataatctacgcggcacagacacatgcaagccactactgccttgtgctgctcatcagcttttgggagcttattaaaaaaaacagaaagagcttttgggatcctaagtgatctagctcccagcccatcggtctccaaggaccacagagagtgtgtccttgctagttgctacccatgtgctgctgactgagagaccacg

SEQ ID NO: 172970 - DNA, 390 bp, Zea Mays
tgggtttcactggtcaaaaaagacgggataattacaatgtatcagtttagttttataacgatagggggaatgaatggtggctgaccagtgtttatggtcctcaaggaggcaatgaaaagattatgttcctacaagaaatcagagaaattagggctgagtgtcctggaccgtggatgttggctggcgacttcaacctcatttataaagattcagataggaacaacaataatttcaataaagcaatgatgggtagttttcgaagattaattgaggatatggccctaaacgaaattcccttgcatggcaggcagtacacttggtccaaccaacaaaatgtgcttgtactggtcaagctagacagagtgttttgttcagtggattgggagttgc

SEQ ID NO: 172971 - DNA, 429 bp, Zea Mays
tccctatagttaaacaacattatcctcagctcctcaccctcaaaaagacttcgcaactccccctcacctacactcgccccaaccggtgaggacaacaattcccgcttgccagccctgtccacatgaagacgaccaccctccacctcactcactctatgcttcaccaccgcccttcgccgcctacgcccagcactcggaccaggaaaaacttcagcatccgtcacacgcggagaagcctccgccacagccacatccaacgccgcaacataatccaagtcctcatccgaagactcttccgtccacacaaccgaactcccagaatcatcagactcaaaaaacttagacacagaatcatccgattcattttcagcaaccacggtcgaagccgccacaaaattagcagtgtcagtagcggttgcgtgcgcaggc

SEQ ID NO: 172972 - DNA, 468 bp, Zea Mays
gtttggccgtttggatggtttggagtcgggatttgagattcgtctccgttggagcgtcccatggagctgagtggggaggattccgggagggacgtgttttttttgtttcatggaagtcagttgagtcagcgtggaagttgatatgagtaactctagtgtgtgtatgtaccttgcgcatttgattcacaagttgctatctgggacattttgctggatgtgctactctgggcgcaatatcgttgtggtgtgccaactgcaattatatgctagcctgagatctgctagtaatgtcattaagtgatgtgttcaacgacaaaaccagtgtttgatggctgggttccgttatcatcatgctgtggctgctggttttgcttgtagtagggctctaggatctgatgctcataatgtttcacattccttgttgtagatgtcatacttgttgtattgttgcatgtagctttgttgatg

SEQ ID NO: 172973 - DNA, 1005 bp, Zea Mays
gtggtggtggtgctgttgctgctgctccggcacgagcttggaaatctcccgcttgagctccgcctggccttcctccagctcccgtaacttccgcagcagctcctccgccgccatcaccggcagcagagcgcccggttgctgtgtgtcaaatggcaagcatcaggggagggggagttgttgcttccggcgcgcgcgaggtcggcggcgaaaatggcgcctttggaggcttccgcgacccagctaactgcctgcctgcaccttctatcggtttctcgaggattcctcgtctggcccaagaagcataaagcggctgcttttgttggtttcccggcgatccggggagcgaacttggctcaatcccgccttctggaagcttctgtgagctgccacacctcaggacggaattcagaaatggggtgaaccgtgaacccagcccaacaggagttcttcttgctcccctgctgctgctgaccgcgtggtctgttcttccgcggccttgttgcttggagaggcagcagtgacgaggattgggagagggagttggagttggaattggaactggatggtggtgccaggggatgatctctgtcgacccaagtgagggcatcgcatcgcacaaaagtctttgtcttgctttatttattaatcatcaatccaggatcgtgtggtgtggacgcatgtgtactgtttgtctggactctggacgcttgtttgcttcttggtgtgcgcagaaaagtttacattttccatttaactactagcggttgacgacggccacaagtcagaaaagaagaagaatgatgaaaagaccgcatgtcggcgaggaggaggaaggcgcaaagccgaagcaaagcaagacggaccctgagtgacacatggtggtcggccgcatgcatgtggcggttcacattgcgccatgcacgcagcatgagacgacggcacggacccgtgtcgccggtggatgacgttgcgttgcaagcttgcagctgcaggagctgtttagag

SEQ ID NO: 172974 - DNA, 763 bp, Zea Mays
tctgtacgacgcgggtgggctgctgtcacccaaatcaccggtgagatcacttcccataagctttacttcgcctctgcttcgtgttgccgcatccgagggatgagccgtgaagcaccgtcaaatccggaggagagagataaacaaaaaacgcttggtgtggatcttcgttgggcgcgaggtgtagagatggatgggctcggttcgttgctcgccgggaggaactttgccgtggagcgcgaacgagtggggatcgccgggcggaccggtcccctggtcggcggacaccaccgcaggcaggagcgaccgcggctccgtctacctcgcgtgaagaagacaaaggagaaccgttggatccgcgatgttgggtcgaggtaagagaattcaaatcggccgttagattctagttgaagggcagggattggatcgcaccttaataaaatcctagccatcggatcgtgatcccacggctcaggtttgatcataccccatcaccttggcatttattctaaagaccccctcggcttttctcaaatcaaccctccacccgagtcagtcttaagatcattacagagaagacctcggatttacaaaataaaccctgaactcctgttaaattgagcctgcagtacacttattcgctggaattaataaaatagacctagaaaatgatttcttgtgtaaaggaaatactaaatgcttacaaaattcataacttctacgttttacctctgatttgacccgttcaagttgcgttagctttgta

SEQ ID NO: 172975 - DNA, 614 bp, Zea Mays
ggggagggctgtaacaccccaggtgttacttagggttttcactcaagactacacaagtaagccatcatcacctgtgacttaagttgggaaaagtacaccaaagttggagctcaagatcctaagtaagtgcaacccaccttaaaagtcataccttggcttgttatgcacatataatggggagaattgcccaaaccctaattcaacccctttggacaagtggagcactagaagtaagcatgaacaaaagggtatgaaaaccacatgatcatgacttgggccgattataaaaaaggtagtacacttgataccccacaagtgatagtaagaaagtgaccccaaaaagaattcaaaaaaaccccaaaaggttcaccaaagggttaagcacaaaagaaaaatcagaattcttctaagtccaaaaccacccccttttcaaagatcaaacatgttcaccttaatcccaaacttaaaaccatttggccccattgacaaagtggcgccaaaatacctctagaacaccctggagaagtttgaacccaaccctaaaccatttgacatgacttggcacaagttttgtctcggtttggacggctaggatagagacaacttcccacccc

SEQ ID NO: 172976 - DNA, 645 bp, Zea Mays
cctaatctgttcttctatgtgatgaactcatgaccttgttgtcattacttaatttgttggaacatgcttgttgttatttgattattgtgtctagtacctcctgtcattacttaatgtgagtgtgcctgatctgttcttctctgtgatgaactcatgaccttgctgtcattacttaatttgttggaacatgcttattgttatttgattattgtgtctaatacctcctgtcattacttaatgtgagtgtgcctgatctgttcttctctgtgatgaactcatgaccttgctgtcattacttaatttgttggaacatgcttgttgttatttgattattgtgtctagtacctctgtcattgcttaatgtgagtgtggctgatatgctattctctgtgatggactcatgaccttgttgtattttggtaggtcgtgagggaacggtgtgcgccaccttgatggtgacgaaaccggtgctccgaccctactgcttacgccattaacgagccgcgtcaagcacagaggtgagatgttcttgatctggctcctcgtacacgatatgctcctgatctattcttctctgtgatgaactcatgaccttgctgtcattacttaatttgttggaacatgcttgttgttatttgattattg

SEQ ID NO: 172977 - DNA, 499 bp, Zea Mays
agggttccaaacgttgggttaaattttgggatgttacataacttcaccgaagacgtgctacacagagaaaagattgatgtgcacttggacgtaggttccatacccaaagtgatggtgtagcagagccagtccccagtgcggtgcggttggcggcggcagagaaagtacgacgaggaatcgtcgcctcctagagagcacaacatgcacgctggagtttcgatgggcatccacacacactggcgaacgatcatgaccaatccgaggactctaaacgacgaccgaggcggagaacgtcaatggcggtaggtcctttctccctcggtatggtggctttggagatgtgtgctcgaggaggtaaaaagggttggtacttatcagcacaagcggacacatagcttaatcagttgtagccgccacgaaatccacattcccataagcaggttcggtggagatgaggtggggcgtggccgaaatcccaagcggatccatcggattcagg

SEQ ID NO: 172978 - DNA, 512 bp, Zea Mays
agaaaaaattacacggccaattagcagatttagctagctagatcaaagaaaaatcaaagtttgtagacctcccttgttggttctatatgtaaggatgaatgatcaggttcaccaccgaagctagaaaaggtaactaatttggccaagttttgtcttggtctcgtcacatcagcaagcattctacctttttatcgatcttatcatgcgtgagctgcttgatcttttctaattaaaaaaaaatagtttcagtacctaaggatatcgtccgtttgcctgtctagttggtccactataaaagggtttgatcaatcatgccttcattcatattataagcgtggaatgtcaattcagaccaatcacaccacacttggttagggaatcacgcattttgtattggttgctttccggattgtgtatttaataatggaattttaaggaatcaaacaactgactatacattattacaaagtacaaactaatggaataaagattaatcaactatgcatgagaag

SEQ ID NO: 172979 - DNA, 397 bp, Zea Mays
acggtggttaaagagattagtcgatctatctatacttgagagaggagaaaaccatgtcagctatttatgagccccgaagacctagaaaatcaagtaatagattggtcttatttccctctacttgtccacccataacctttctcttgggaaccatgctaaaaggggtcatggccacgtccgtgcaccacacacatctactgttcgctctgttacatccaacaatattcaaactggatttctattcttgtgcaaaaaatgaattggtttctgttccaacttccagcaccaaaataaagtgttagttgttatggtttcatagaaaaaggcaagtataatacttacacggacaacatcatttttcctaaaaaatactccacatgtagttcatcaacaattg

SEQ ID NO: 172980 - DNA, 404 bp, Zea Mays
gaagcaacactcaaaccggtcaaaggtctagtgggcaacatcagaatcgtcaaggaagcgtcgtgaacataccggccaagaacaacaatgcaactaccccaattcaacccaatggttgtttcaagtgtggcgaacttagccactatgccaacaactgcccaaggcgtaatcaacagacacctcagaagaacaacaacgagaggactgaccagaacacacctgctcgtggatctgcacagaacaagtctcagcagaaccagagtagaagaagagtcaaccatgtgacagcggaatcagttcctgaggatgccgacgtggtgtatggtatgtttcttattaactccatacctgcatcagttttatttgattctggagcatctcactccttcgtaacaaagtcattt

SEQ ID NO: 172981 - DNA, 373 bp, Zea Mays
gctaactccagatcatgagtaggataattcttctcacgaatcttcaactatcgggacaagtatgccactactctcccttcctccattaacacatatcccagtctagtgtacgaagcatcacaatatactgagaatgacctatggacatctggcagaatcaatattggtgtttttgtcaacttctctttcaatgtctcaaaggacttttggcatgctagggtccacttgaactcaaccttctttgccaacaaggctatcattggcctggcaatcttggagaaacctttaatgaaatgtcgataataaccgaccattccaatgaaactcttgatttctcgggcgtctttcggtgctttccagtccagaatagctg

SEQ ID NO: 172982 - DNA, 592 bp, Zea Mays
gatcacgcgaggtgtatgtctaaatccttacctggaagaccctgggaacgtccctagaaaggatttccatggtcgtccgaagcgacctcatcgccgcctcggtatattcacggaaattatcccggaactgctcctccagctcatcgttaagggaaaggaggggctccgaggtgtcgcggctccagaacaggagtggctgcccacaccactcattgggattgagctgcatggggataaggccgctgctcccccaagacgggccacggttctgcgtgccccgcaaccgaggcgtcgggtccccctgcaatcgattcatcgggtgccaccgcagtcgacgtatcgggcctctcctcggccaaggtgacatgcctccgctcaccgaccacggcaacaacgaccgccccctcctcatggtcgaaaatggggagatcagggatgaccaagggcggaggcgcctcagccatctcaacatcggcggtgatgggcggctccgcgggcgaatcagcgacggccccggcaggaatcgatgctggcgccgacaacaagactggcggactcggggccatggccacgtcaacggcctcccccggtt

SEQ ID NO: 172983 - DNA, 646 bp, Zea Mays
ccatgtctctccaaggagcatccggctcctcccgacccgtgggtgggagggcaggtgccgctgagacaccttgctcgacaccgtgggggaatggtgattcccccattggagcaggcggtgccaggaatgttggcgcaggcgctcgaggtgaaatgttgatgctggccaagtcccttgagagagactcaatgctgtcatcattcccggtggcatcttctgcgcacagagtgccccgtggggcacgattctggttactccgtctttgcctcctgcaacgagaagggtggtggcgagagctttgatcctctagaggggcaggcgggaggagtaccaagtcgtactcgatgctgagagacatgaactcaagactcctgaacctgatcatcatcccgagcatgagtgggtggtgagaatctgccatctaaagcgctggcgattattagggacgtttcacacgactaccccctacctagcgcgccaattgtcggtgtttggaccgtgggtccttaatcaaccagtaatgtgccgcgtggccggctctagatggtgtgcgagatgacacaagcgattatcctggttcgggcttctcgaggccctacttccagtagagggcatggggcttatattactcacaccatggtgcctg

SEQ ID NO: 172984 - DNA, 385 bp, Zea Mays
tgaaacctgaaacactaacgaccggggaagtccacaaatcacagagtacaagttcaaagggactagacacacgagatgatgatgactgaaatggaagacgagtgtaagcccaagctgacaagcatgacacaaagtactaggttctttattgctgaaaggaatgagatgggcgacttttgacatgacatcaggccctgcatgacctagacgatggtgccagagcgaggaggtggaatcaatgctgagggcatgagcactgggaagctgcatggggtatagtggctcgaagctattgcacctgagaatctctcgccgggacgttagatccttcacagaacaactagaagggtcaaattcaacaacacaattgttgtcaatagtgaac

SEQ ID NO: 172985 - DNA, 378 bp, Zea Mays
taattaccaggggagaaaattagcttagttcattttgttgctgccatatgggtgaaaaaataatgagacatctaaatcagtaaattagaaatatagcatcttaaacctgcaggtatttcttaaacctgattctagctacaacttagtacaactactggtagtttcttaaacctgattctagctacatgtttcatattgtggcacaagaacttttaagaacatatgctgatgcccactgtatttagttgctacttcaagaccaactgtattttagttacaattgtgttttcaagattgtagaaatttgtagctgaaattatccacaccatatttatgaactgacatcatttctaagaatattactgattagaatctttc

SEQ ID NO: 172986 - DNA, 780 bp, Zea Mays
gaaagaggtggtcgcgacaatttcagacaagggaaagaagattgatgaaacctcttcagagggagcaaatttcgacctacggtacctaggcggccaacaactctctaaagaggacaaatcagagttgaaagaatttgcgatctcgtgtggttaccagccggggtcagtgctctttgacggggtcgacgaagaaatcgtgggatgcatccgcgaccgtgctggtgcaaaaattataggtaccctatcaaagagtgttgaattcccaaatcttgagaaggacatcagctgctacatgcgtcagcatatcataggcagcctgttttattttaacttcaaagtaagaacctttctacaagttaccgctgatatgtttgtattagcttaagtattctaattttgagttcgtttttacatagcttgttattgagaaaagctttaaaaatacaacaagatgatgaggatagaaaaacgaagttattgtcaaaggtttagaggataaaatcaaagaacttgaggattctctaacagaaaaagatgagttgctgcgctcagccgaaggatccctggtcgaagtgcaagtccaataagaaattgagcaaagatctggcggatgcgcagatacttttagaagaaacttccagccgattcaactgagaatctgaaactttgaaaatgtcacttaaggttgaggctaagaagaatacgaagctcagtgaagcattgaaagctcttaaggagaggtgctttaactttgcaagccaatgcaccactcgattgaaa

SEQ ID NO: 172987 - DNA, 709 bp, Zea Mays
ggaaagtatgggttggatagaattggctagaggttgtgtggacaggaagagctcgagagccgagccacaggtttccaagaaaaagatccaatgcaatcgccagtagcctcggccaaggggtagcacggctcaccaatgtgcagatgcacacatggcgtagttttttttttaagatcctcaagcttgtggcctacgcacggtggctgaccttgctcggcagcgcgctgacgctggtgcgtcactgccagtgccactttgctccaccggtccacctctatctccttgctgtttgaatttctaattctataacttgtgaagtgtgattttatctttattgattattgtatatcaattgattgtattcaatgtgtgtttctttcaaatttatagaaaatgaggagattcttggtttctagaagttcagcgtcggaaccacaaggtggtgcacaaccaacacaaccaaatccaccataaactcaatctagagggggcggcgagatcaatatgcactaccccagaatcgctcaaaggtggcatgactgtcttgtgacactagctaaaaacacgtcactaacaaaattatctttatgatgtctgttgtaaaaacacgtcattagcaaaatatggtaataacacagtgacgtattttattttacatgtctctactacgattagtttagtgacatatatttaaaccaatggcacttat

SEQ ID NO: 172988 - DNA, 579 bp, Zea Mays
cgcgttcgcgggtccgcctccgacgggatcgttccggttgttgagcggcgtcctgcctgagctcacgcgcaagcctcgcaacaactctgtccgctatcgttgggatcgattaccaactaacctcgcaacaaaatccacaacgaaccccgttttcttcggctgatggggggggtcttcgttgggtgttcaaccgcccgcgctccccgcaaacggttcaccggccaactgtcacctcggacctgttcctcccctatatagttacgaaggccatgattcctgagccatggtcaacgcaaaccgtggatcacgctggatgaggtccgccgaagaaagcttgacccgtagctagtactagagagcgaggaagacgtgcgccaccggggtgattgacgggttgccgtgatcacctgagtggggactaccgcagtcgggcttgctacaggctggtgctcgggaatcagctggtcgagaaggactgcgggacgctgggacctgggcggggtttcttgtggcgcagcggtggactgagctcaccggaatccaactccacagtggagccacacctcaccgagttctggc

SEQ ID NO: 172989 - DNA, 282 bp, Zea Mays
gggtactcagacacgccgatcaggctgcgttggtaatcggctgagttatgacattagctgaatattgactgcgccctggcaacacgacacaatatttgtgctgttcgaacttggttgcgtcatgtgattgctatgtcgcgctctccattaatcggatcgctctcgttgagtcggaccgccatcgtcgagtcgcatattttttgcatgccctgtaggcactgtctgtctgccacgagccacgattgcgcctgttgcggatgttgcgtggttttatcgtgtacc

SEQ ID NO: 172990 - DNA, 486 bp, Zea Mays
ggacgcgtcgtatcgtggtctggacacggtgttaagtgagcaaggactgggtcgtcatttccttagcgacgcgctacatcggcgcccggatgtagtgaaaagtgagcaagggtcttcacatctctctcaatgggtggggtcttcacatctctctcaatgggtgtgaagggtaaggaagctagtcaaagtgtcaaaccaactaggcttcatgtaggtagttggaacgtagggtccctaacatgtagcttacaagagctagtggatgtagcaattaggaggggtgtaaatattctatgtgttcaggagactaaatggaaaggccagaagacgaaggaggtggaggatactggcttcaagctttagtacacgagggcaagttcaggtatgaatggtgtcggtatcttgaaagacaagagccttaaggatggagtcgttgatgttaggaggcaaggtgatcgaattatcctaatccgactggtagttgga

SEQ ID NO: 172991 - DNA, 342 bp, Zea Mays
tatggactagcttttgggagacgttagcatatatatactctgttagttgagtatataagacgaagggcaacgccgcttaactcatccattcacaccaaagtaagcagtgttttatggctttttttcttctaaaaagagacaactttgcgcgtatcatctacgcgggtctgtttctctgccttgtactgcaccgagtatttatcattgaaaagttagttaacaccgggaccacagtttgtaacatgtgtccaacaggagtactccatctttgcttcgcgcaccccatcgtcgtccatctcccactccccaaatgcaccttcctgtttctttaactctacaaca

SEQ ID NO: 172992 - DNA, 454 bp, Zea Mays
gggaagtactcgagcatcgcaagatccgggcggggctggcgcgtaaaatgggaagaatgagatggcgaggtggtcctgtgtacttgcgatgggatgcgggccgatggtggtcctgtgcgctggatggcgacgaggggattgggttgcgattccttccatggcggcgaggcatggattgcgtttgaggcgtggagtatatgggcggagcatctgcggtgcatgggaagaacgattgggcggggtggtcctgcgcgtcgttggcgatgggattcctgcgtgctggattgctgcgaggcgtggatagcagcgaggggatgtgtttccttctgtggcagtgacggaattttttccttccatggctgaggcattaatcgatgaggggattgcggcgaggaccatgcgaatgcaggggtagaggggagagggcgcacacggggaagaagagagacactaa

SEQ ID NO: 172993 - DNA, 1279 bp, Zea Mays
agggtccaaacaaacagcaactgtgctcccaggattgctcctaagaatgtcagcctggcactcaaatatcttggcatattgtcctctgcacgagttatatattcttctcatgacaataccctttgctctcttgatcttcgaaattgacacatcagcacccatgtcaagcagcactgtctgctttatatacgaactttccaagatgggtttgctttgattatgctctcgtatctatcagctatccttgtccctgtcaccaacctgttgtctttccttctcggacaaatgtgcacatcattaaaagtcttcacttgaaaccactcacaatttgtccgttgtgaaccaaaaatgaaccaagggcaaccattccatgaacacctagctcttattctgtttttcccatcctttgggaaaaataagtgcctcctggttgccagcccatacttgatcaatgcattcttaaattgttttctacccctaaaggtcattccaagacaaaacttaggagtgacagctttactatcataccttacaaacctgctcgccctccttgatgcttcatcctcatcatcatcatcatcataactagcttattcacttgagtctatcattggagggtctgattcaccaaaatattcatcttctatgtcagcctcttcgatttgcaccctagaaattgttccaatgtctgttgcagcagcagtagtaattcgattctttctctgattcgttgctacggttctaaactcatttgcttcttcgtcatcttctgatgtgtcttcatcccttggaatatagttgtgatcttcaaattcactctcatcttctccagcatatgcctcttcatcaacaaattcactatcactttctcccgcatccgtgtttacattatcacctgaaatgttgtttgtctgcacaaaaatttcagttacaccaccctctggaatgcaattagccatataaatgcacgttttattctcattcaacttttgcaatgcattattcacatcacctccagaaaataaccaatagaaatcaacactatcttcctctgtcaaagtgacatgatcacacaagtagcctctcaattctggcagtgaaatcttgttcttctctatgtgcaataattcaacacgaccgtcactgccaacataaatcacggagtatccatcaaaatcaaaatgtcctcccaggtgaaatcaaataggaaccatatctccatccattttcgctgtcaacacaatacaacaaaacttcaggaataaaattttaccctgaa

SEQ ID NO: 172994 - DNA, 319 bp, Zea Mays
gggtgggctttatagccgcagggcggccgagggtgcgcaggggttcgcgtgcgggcgtgctctgggcgagcccctgagtgtcagtccacgtcgaacacgttgggtttacttctgtcagggttcaacggccgatttggtcgccatagcgtgcagatcttagcaaaacactcgtgtacggtctcgtctctgcaccaaatcctaccttttccatgtgagttccaagcaaagatatggtttgggtagagagatatggtggtgagaagttggctctgttcgagctgtccacaccgagacaaaagccatgtcaagtcgtgtcaaa

SEQ ID NO: 172995 - DNA, 757 bp, Zea Mays
ggtatttgaaatgtgtggcaggctctaaaaaacggtactgtgatgttacttttcagaatttacaagttacacaagtgctttgcctgacaatggataaggcctaaaaataatacgaggtgaaaataaaactactttgcatctgaaaatgaaattaccattggaactactatcaatttgagcttacaagtaatgtgcatcgaaaatgaacaaaacaaaactactttgcatctgaaatgaaattgtacaatcaaaatgtacaactgaattcttaaaaaaaatagtacaacttaattataatcactgcactgcattattaccactgaataaaaattgtagcactgcattatacaagaggtcttcaagattggttaaggaataagtatcgatctgcctagattgaaagatagataattcccaagatgagtacagacatactaggaaagggtttcagttaatattgactgaaactagttcattctcatctctctcactctctatagcttctaaaccagttggcaaaggttcaatatgtttcagcaaacatttttgaagtacatccgtgcaccctttgctcggacgacaagacaagcatgtccccaggcgccaacgtcaccacatgaatggctggcagctgccccacgtcttgagctcaaggcaaccaatggtgttctgtatggagtacgatgaccctcatccatctcccatgcctgaccaagaatgtcgcagttacgaactcgtcataccttcaatcgaagtc

SEQ ID NO: 172996 - DNA, 432 bp, Zea Mays
atcccgtcaattcatggcatccttagatggtgtttatgtccactcaagtaaaacaccacacaaaaatagtgtgaatacaatgcccacaatatcatagaaacgtcatttgaggtataaaaggtgatctatcattttgaattctttatattccaactttttagccactgtatggtggaaaaaggtgtcttacaaccttaacctatgtttggacagttcactcacgaaatttggctaaattttccgtagtctttattttattttgagaaacgatgtggtatattgatgtgtggtgttttacttgagtggacataaacacaatctaaggatgccatgaatagacgggattatagttaacatattatcacaaaaggtcattagctagcccaataacgtcttcatccactagttgtactctaataccctctagtgtga

SEQ ID NO: 172997 - DNA, 525 bp, Zea Mays
gacggtgcagacgttgccttggacgaagaggaaggagatggaggcggcggctggaatggtggtgaggctgcggtggaagattgggtggaggtggtgggagaggatcgacgagactgagataccaggttgtcaagggcagtgagcccgaggatagggggaccttggctacgtagatcgtagccggtgtccgtgatggccggccgggttatacccccttgccgccgttcttcgtcggtgggttattcccctagccgccgacttaggtagaggaagagagaggattagatagtaatatctttcttaatttccaagtgtttgattacaacatatttatagcctccggctcaaccaaaaggagtaacaaactccactaattaaggaccaaccaaaatagctaaagatctccacatttatagcctttcggctcaaccaaaaggagtaacaaactccactaattaaggactaaccaaaatagctaaagatctcctacttttcctcctagccgctgctggaggtcgtgccctg

SEQ ID NO: 172998 - DNA, 467 bp, Zea Mays
agtacatcttgtccaccagagtttcgaggtactgctacgggtagaatttcctgagttgttcaatattccatgaattcctcactttagttccgtccatttgggtaagtcgatatgatcctgaccgggtatcttctgcaacgatgaatggcccttcccatgggtgtgacagtttgtgttgtccttctcctgtcagtactcgatggaggactaggtatcccactgcgaaggattgatatcacactgctttgttgtggtagcacctcagggtttggtggtatctggccgactgaaagaccatattcaaacgttcttcctctaatatatcaacatcttccagcctggttgcttctgccttagctatgcttttaaatgttagcctgggtgctccaaagatcaaatctgctggtaatactgcctccgatccatataccatgaagaatgtggtgtttccatgcaaagcccggctt

SEQ ID NO: 172999 - DNA, 401 bp, Zea Mays
cgtggatgccctgcccatatcccccgcgccccaaacgcaatccacgcctcaccgctatggaaggaatcgcaacccaatcccctcgtcgccatccagcgtacaggaccaccattggcccgcatcccatcacaagtgcatgaccaccccgccatctcattcttcccattctacatgccagcccgcccggatcttgcgatgcttgagtacttcccattctacgcgccagccccacccagatcttgcgatgctcgggtataagatggaagacacctctctgagcactcaaatctgaataccacacctctctgaaacacaaacatacttggtttacgaaatagagaactactcgtgtggttgttcatatggcaatttcaggtttgtgtttctaagttttatatatg

SEQ ID NO: 173000 - DNA, 1285 bp, Zea Mays
gttcttgtagttgcaacactatgaacgaagtggcaggcacattacaaaaatggtttcctactgtgattttcacaggtaacattttcttgctaatcctaggttctcttttgttctggtcaatcatctcagttcacttagcggttctcttttagttttttttcagtgaccttataactaatcatgaggtttagaagatcttagaataaagtccagttctgttatcttgattagtcatttgtaaaagtggcaaataccctgaagtagtaaatgctacaaatatatgtctctgacacctgatatgtaatcgtttttcctttgtagtactcctgacccagacaatgtgttgatagtgaagacacctgaaggtgttttctctacgaaattttttgtccaaaatggtgagaaacagacagctgcaagactcgccaggaaggaaaattaccaggagaaagtgcttcctcctatagtttctgactgtctagtcgcaaagtgcctgacctatgaaatgttgaaatacaaggtaggtttcttgcatctgcttattgctcttaattgtcttcattcctaattttttagaacagatgttgcttattgtcctggatgaaatttgaattcttttttaaacatttacttttactgattatttcttagcacatcagttgtatattacattttttccaatctctttgattgttcaactacttggcttgtatattacattctttctaatctcttttgttaactgcttgtatttggaacaattgattctctagcatttgtatcaatcattttacatgtatcacacatgctttcttaccattaacattgatgcaattattgctagtttctagttatcttgtgattaacttgtttcagtttaaataccatttattgtgtcctatggatctttgtcttggtctcatttttggttcctgctgctaagtctctagggctttttttactaaatcctaaccactaaaaaaaactcggtcggggagggaaagaccgccctctagggcttttgtactaaatactaaccactatatctcaatttttcagaaagaaccaggagaggctattgcccaccggattatgggacctcgacaccactcccaggattttattgatggccttaacgcatacatggtaattgtctcattctgagttctagcacttcttccactttagcaacttttgaatgcagagtcatttattcaccttattttgttgttccttgttaacagggtcataaggacgaccaatccttttcaacgtttaaagagcg

SEQ ID NO: 173001 - DNA, 524 bp, Zea Mays
gaggagatggaggtggtgtttgggcggcgactccggtcgggtgccaagcaagaagctgcgccagtccccctcccccgcatgttgtcccatgcccaccaggtccttagtgacactggggcaacaatcttgcaggagtgggaggcgcttaaggctgagcaccagcgcctcagtgactggcgcacccaactggagaagcgcaccaagacggcgtcccgacagttcatctccgagcggtcctaacttgagcaggaccgcaaggagtacaagagggacctccagagggtgtcgctagggagtcggaggcgtcccggagggagaagaaggtgaccaggagggaggaggccttgacctagagggaggccctcacaacagagtaccaggccaagctgagcgccctggaccagactctggaagcccagcgggcccagcaggtcaaggccgtggagaggctgcaaaagtggcagcaatatctcaagggcaaggctagcgatgccgccctcgccgaggaaaactttaaggcgaag

SEQ ID NO: 173002 - DNA, 603 bp, Zea Mays
atctcagtatagttccaagcaaagcaatcagaatattctttcaatagacccatcatttcatctctaggatcgatctccagggtcttgttcacaaaagtcggtcttgaagttttaccatcccctatatcgatctcctccaaaggatcggccgatgtaaacccctgtcctaatttatcgagatctctgaattcctctattatgtctcccacgggggaattagatgatctctgtgtgacggtggatcgtccggtctcgagagttggatcgtctgcgacactggttttatgttgtggtgactgctcggccttgaaagccgaaccgttctgcgatagaccggaccgtctggtctcagaggtcagaccgtccgcgaccagggactcattcattctgtgtgtactcatcatttaaactttatttaggatttagctgattctccatcggctctagcattataggaatgaaaccctttttatctatacttatgaactgataatcagaaaaatatactcctgcgagacacgtagcagtctcataggtctaaagtacaggggcatcagccacagcgatacaggtcgatgcattagcatgcacttgttctatatc

SEQ ID NO: 173003 - DNA, 564 bp, Zea Mays
agcggtggccggtgaatcgagcgataacgcgcggcggccgggaaagaaaaaggcactggcgcaagcgctaggtggcttctactgtggcggtctctccggcggtcacgggacgcccctagcgtgactatccgcgacgtggtaaagtgcccggacacgcggggcaagaccgagcgacggcggttcaccggcgaagttatccgcagtggccgtggcaacttggtacggtggtcgaacttgtttatggccggagttatcaacgacggtgatatttgtgtgaccctgagcgctatccaaaccatctgaacaccaatcgcggcgacgacggcacgaatcacggcggagggtcgtcggtggtgaggattccctgcgctggcgatctgatccatatggggtactgtaccatggcgatctccattcagtcgacctgacagagcctagtttagggccgattttctcacaagtctatacggtaacatactccatgctctacaacaaagttggagaactataaatcatctacaagtttgtcatagtagccatgggcagattcttgctggatcatag

SEQ ID NO: 173004 - DNA, 541 bp, Zea Mays
ttccctccaaccctgcccttactctgaataggctgacccatcgctcgacgagcagaacataccatcttgtctgctgctccacctctcggcactcgctgatggcattaagctcaagcaccaagcttgcaccctcgtcatcgagctccacccacatcctccatctagtcaacctttaggttttttaggtacccataggaggacaaagtgagagcctgagaggggccgaggatatgggaggggcagatgacaagggtgcatacgcactgcatgagctaaatgccgccaaggagtgccgtgaggtgaaacaagagactaggtggtgctcatcaggcggttgggcaagccttaaaagagtagaggaagggaggcaaccgatgggcctccattcaagcatgtgagcttacgcagtgtggcgagatacatgtccaaactgacctacaaagtcatgggaagggggtcatctgaatattattagatactttaaggtctacaatatcatattttatcgttgagaggttacatagttagcccttagtatgtt

SEQ ID NO: 173005 - DNA, 648 bp, Zea Mays
tgtctggaaggagtatctcgagaatggaatggagaagttctctatggcagtctacctgggagaaagccgaaactacccaaaccacccttctttctaggtcactttcaccggacaccgcttcccagatacttgccagaatgttgcccgaaaagtcctctgacagctatgccagaactacagcagagtagtctttgaaaccccccttcactactttccacccagcaacaaaatacccccgcctggaggaaaagacttcaggccctgtcagggagagaccctaccgaggatgaccccaccatcgtctacatggctggatacctccacactctcgataaccaatatgatgaccttgcctcccactgcactcacctaaactctcgggtggaaagcctagagcaacaagttagggaacttacaaaggaaaaggcgtccctccaagaaagtctcgagatagcggaaggcgaggaaaccaacacccgtgaagcctaccgaaccctgaagatggattatgacaagaagctaaagaagctcgcccccgcaaagaaaatctgcaagaagaccagaagccaaggatgccagactgagcagaaggaagaagcccctctagccctacctcctaccaggatagagaactcgtccgacaccgag

SEQ ID NO: 173006 - DNA, 567 bp, Zea Mays
cggcgttctatgggacgactgggtgttccggagggtgggctttggtaaagttcaattggccggctccgagaacaatagaaggccaaagacaagctagaacaggaatcaatttggtaggtactaacccgaggagtgctggccatggaggggtccttcacggcggtgctaagaacagggaggaggggatttgtggaatttgtgagttctccagtgagattgagtcgattgcacaagtgctcgtgtgtgtgatgtggtgaagaagcagtgctcgggctcaatttataggcagatggccggagatggatgaggttcacggagctgtaaacgcgctggcgagctcacccgcgcgagaagagccacgatgagggtccgatgaccgccgattaaccgggcagcgccacctcaagaatttagcgccacgtcgcagaagatttttaccgaggccgcagacccatcctcagtcgtggtggcggtcttatccccggcgagatttttctgaactccggtgaacagtacgccaatcagcccgatttcaaacggcaatttcttcaaattttatgtgacaac

SEQ ID NO: 173007 - DNA, 568 bp, Zea Mays
cccgcgtccgtccagccgccgctcgccggctcgccgtcttggggcctcgtcgtctccgcctctcgccctctctggttgtggactcgtgtgcgctggccccgcaggcccgcctccggtcgtgggcgctcgccatctcgccgtcttcgctcgccgtctccggtcgtggcctcgtgagcgctcgccctcgctgtgcaggtccgtatatttttttactttcttccctcgagacgaagaggatcaagggcgagttcgtatgtttgtgtggatgcaggaaacccatcgattcgtgttgtttccccttccttgcatgcttcaattagcgagccttctggtgtgggtttttcgaataggctcattttctttacaatcacatttggagttggagtaggcctttagttctagggtgtcctactttaattcgaaattagatcatcagacatgctcctgggatcgagagtacgacatctatgggatagagtgatccgttaggttgttgtaattgtggaaacacatgcaatttgggtttatcagaagagggtagcaattaactcaagtaatgttcaagtaa

SEQ ID NO: 173008 - DNA, 423 bp, Zea Mays
ggcgccgcagagtgtttccgagtggccattcaagcggcccttactaccaaaccatcggcgatttcttctgtgcaggcgaactcaaagcctgaggaagacctcgtagtacccgcgaatgaagctcaagccgtgacctctatgcggtcgactgaagaaaccaagagaatcaatcttgggttcgccgacgagcgcaaaactgctatcatcagttccagtctggatgacaaataggaaggcgcgctcgtccagtttctgcaagataaccgagacgtattcgcatggaaacctgcggatatgccgggagtcccgagagaactggccgagcacaaattgaaggtctacccccaggcgaggccgatccgggagaaattacgtcgcttcacgcccgataagagagaagccatccgtgctgaactggctcgc

SEQ ID NO: 173009 - DNA, 546 bp, Zea Mays
cgagggtgaaggctgacggcgacgagtcggtggtggccgccgcgttctcggcgacgcccctgctgtgtgtgtgaggagtctgatgtttgtgttgtttggggattgaggaagaagaaggtcgggggcttcctcgtaaagtgaaatagggggttgcgtgggagcgtgggtggcttctttgtgaaaagtgcaggcaccgttggatgttggttgtgtggtgtggatgactcatgcgcatgggagcaccagatagctgtgcgcacgggatatgaatttgcctataaacctctgtaacgctatagcgacatcacacgtacgcgttaagaaaacatagttatttctttcgcgagcctgccttggcatgcgttgatgctctctaccaaaaccacagctaattggtcaagacatcgaactaggtctggctccaccgaccaaaactctttaattgacttcgtcatcttctcgcattctttttcgactggcatgtgtgtgcctagcctgcatctttggatgggtttgtgtagcatctactactactacttgaagcat

SEQ ID NO: 173010 - DNA, 422 bp, Zea Mays
ctgggatcgtgcgggccgttagattgttcaattgtggctcggatttggtgtaggataccgtttcggagttatggaatcgtaaccgtagggattgaacccaaaggtcaggcgcggattgcggttcataaaaccttggccgtcgatctcagatcttgcgatccttaacacgtaccggttcaggcaagtggcagtctaatctggaccgcacatcatagatcggatggcccgtgatgcttcataccctttcgcgaatgcatatttttataagagccccttcgttttctagaaaataacacgccgtccaccgtgctatggactgagtcttaggaatcttgcgacttagcccgtggattctctgtaaatagtgcacccagtccatagctctgtaaattcagttatttaattttagaaattacttttta

SEQ ID NO: 173011 - DNA, 748 bp, Zea Mays
tgtgcacgttgccaaggctgggacatcgaaaaaccctacacacatcaatttgtgaaatcttgatgagtttttaaagggatatgaaattgccatcaactatgttgatactagtgaaacctatgatagaaaagctatcattgtcgacttatatttctccgagaaaattgttgaggaccttcagtatgatctagatcctaagaccatggtagagtgcaagaagcgctcagattggatcaagtggaaagatgcaattgaagcggagttagcctcgctttacaaaagagaagttttcttgactgtaatgcctacaccaaatggtatcttccctctaggatacaagtgggttttcattcagaaacaaaaataaaaatggtgaggtagtgagatacaaagcaatggtagtagtgcaagggtttacacaaataattgacgttgatttcaatgaaacttattcaccagttttgagtgcaataactttccgatatttaatatcattggtagtacaaaatcgtttatctatttagttgatggacgtagtgactgcatatctctatgggtcactggattctgatatatagatgaaagttctaggtggaatagatgtaccagatccaaagacaaatcgcaatatgtattgcgtaaagttgcagaagtcattgtatggcttaaaacaatcgggcagaatgtggtacaaccgattgagtgaattccttctacggaagggatacacgaaaaatgatgattgctc

SEQ ID NO: 173012 - DNA, 738 bp, Zea Mays
ccactggccaggagctccttccacgcgctcggactctgtccaccacccgtgtcaaccaactccgcgcatggcggccgcatcccgggatcctctccatacgcgatcgcccacccataaaagtttttccgagacccgttctccccctgctactccctcgcgcatgcgccgagccaaactctccaccatcctgccgccagacaccgccgcgagggagcgattcgcgttgctaccgtcgccatgtgttgcgtcgccgtccgaggtctgctaggtggtcagggtcaatcgagttggaagtgctggtcgcgtggaagtcgggcgtgggcgcaatcgaagaggggagctcacgaaattccttgccggtgttggagaatccgcaggttcccgtggccagggctgtccgcgctaccaaccgtggtgagaaccccctttccgtaatcgccatcaccccctctaggtttggcaccgaccaattttgagtttggagcgtccagccgtggaattacgcgtccgccgatgatgctccgccgtgggcggactgtgcgtctccgtcatgtagaatagggggagaagaagaactgtgggccgtaggatctcgggttgacggttctgattagatcagtgatactcccttcgttcgggccgtcgatctcgaatcggacgataggcgcttacctctgtattcattaaatggtgaccgttgatcttagatcgtgtggatcccatggcgtaccggttcgc

SEQ ID NO: 173013 - DNA, 1507 bp, Zea Mays
gtcgctcagcattgagaagattgtttcctttatttcttcgagggagaacggcgcttctagcgatgagaggtcatgctgcgttaaagctagagtcggccagttgagggtgatccctctctccggggttgtccctaggtgaaatttgaagtgttcctaaatgattttttctttttcctcatgggctactactaagtttccaattgggggctgcaggcaatggatgaagtttttacgtgctctggagctagcagataggtggaagaacttagtgttcgcgtcgcccaacctaatgcgagtgaggcgagcccgttgacggatcctcgatttttcaattatagcaagtcccagtgccctggctttgagtgccttcaagagatccagttcctcttgggtgaacacacactcctcttgagcagtttcgaatcggatgattaattctttggaaattgcaagttgtaatctcgtgtctcccactttggtcttacaccatagtttgatggcctttgttgcacgcactagtttgatatgaaggcgcttcatgggtgtaaatgaggaacgaagtggtttcagccaggcagtctgaaccgcctccttgaatccctccatctttacccaaaaattttcgaagcggaaagaggggctatgtgtcgttgtcaattctccctggaggagaagcggagtgtggtcagacatgagggagggaagggagtgcagatagcagctaggaaaaagcagctcccattccgttgtacagaaaaatctgtcaattcttgttagcgttggattcgcttgcccgttgctccaagtgtagcggcggccattgaggtggatttccttcatctgtaggctgtccagtgctgatttgaacgcacccatgaggcgccgattcaagttacaattatttttatccgaggcttgatatatgagattgaaatctcctaacgccaaccactttgtccaacgttgtgctgcgaggccacttagttcttgaagaaaaacaagtttctcagcgctcgactgtggcccataaacccctgtgatccaccaagctgaattgtctgccttcatagtgatcatggccgagacagtgtgtgaggtggtgtacacttgcgaaagtgagaaaaagtcattcgaagctgcaagcagaatcccacccctagatccaattgcaagcagcacaacagtgttgtttagaaaattcggacccaaggtacgaaggatggttgcatcgtcgactgtagtgagtttagtctcctgcaagcaaataatggtactaccagtatcccgaactagttcttgtatagaatcacgcctggccacttcattgagcccccgcacattccaactcaaaattttgcagttatgttgagacattggtagacaacttgaagttcccagaacactgcagatagtagacaggtccttgtaacgacgaacgacgatggctaagctgagtggtccagcagaatcgcagcaattgaaggcccctggctgctgccatgattct

SEQ ID NO: 173014 - DNA, 366 bp, Zea Mays
atttgcaaacagaggcaagcaacatacgtgaggaggtgagtatggacaagcaacgacgggccattttgagtctatagagcaaaaagtggtgggaaaatataattacaacaatgacaggtgtaggcgtagaagatatgtgggaaccatggaagtggaaactaaaataaaattagaactatgacaagtgaagacgtagatgatatgtgggaaccgttgaagtcttgctaacagaggttgtccgtagcggacgccccttccttccccctcccctatgttggaggctacatgacacctctaagcgatgtagtggttgcctcttcgatgccctctatcgtattgcaatcgtctctcccctctctccccctc

SEQ ID NO: 173015 - DNA, 819 bp, Zea Mays
tgtcactgtagacaagtatgtcatcaaagaacactagagcacacttgcgcaacaatggcttcagcgtggtgttcatggccccttgaaatgtagctggagccccagtgagaccaaaagccataacacgaaactcaaaatgcccatggtgcgtctagaacgttgtcttgtactgatcaaccagtgccattttgatttgatggaacccaacgcggagatctaaagtggaaaaccaacctgccccatggagttcatcaggaaactcatcgatgataggtactcggaatttggccttagctgtaagggcattcaaatggcgatagtccacgcaaaatctataagttccatccttctttttgaccaaaattactgatgatgcgaaaggacttttgttgtgctggattaggccggattccaacatctcgttcacctatttgtcaatctcagatttgagagcagaagcgtatctatatggacgcatttgcaccgggttagccccaggaatgagaggaatctgatgatcacagtccctgacaggaggaaggccagtaggcaactgaaacactgaggagtacttgtccaacaggattttaaggtctatggggagctctctgaccagttcttgatcagttgctggcaatacgtctaggctacatagttgtactaaagcaccatgggtctgtgatgtctgtacaccaaaaagtttttgagaattaccatttgttgacatggatagccacttatctgcccaatgcactaccataggactatgagtggaaagccaatccatccccacaatcatatcataagttggaatatcca

SEQ ID NO: 173016 - DNA, 1182 bp, Zea Mays
aaaagacctaccagcgcgattgggccgactcccctcccacggcacagccaatcgattttgcgcggcccaatttcccctcccccgtgcctacgtacaccctgacgtcgtggacccgtgatatagccgctggcggcctggacccactaggcagcccctcatccagcgcacctgcgacgattaccacctccgccatgtggggccggaccgcagaaccctcttcctcgcgaatccaaccgaacctccgtaccgactgccgcgaaatgtcgctgaagtccgcggagatcgggtagtagttgttggccgcaggtgggtataaaacacaaccagaccgccccccgaggacctaggccatagccgcatcttggattagctcgagctcatggattcacctgcgcctggaatactgctgggagaggatgccgccggcgctacaacatcactgcgcttgtggtccgttcttggatgtggggtcgggggggtgtcgctggggccttaggaagtcgtccatgccctcggtggtgatggggtgccagtggggcacaatgaaccactcaccggtcacttagcgcatgcgaggtggtgatgtgcgcggtggacaacacttctgcgcgctcgattcatggtgagtacctaatccacctcttcgcaatgtatcccgcaccgcgtatcatgtctcggattggaaaataatgcgcgttcgggcacttattgtgtggctccggcaatggctcgttgtgaccactgggcggcgccgccgtgctctattggccaaggtaggagaagcataggtcgccatcgatcgtgagttggacggcgcatattagatcccagttgccggttcggccagaagaaatccaagccgtagatcgatggatggaggggcgtgaggtgatcctagcattttaaaatccaggacattgatctcagatcctaaggctctagatgcgtaccccttcttcacctaatcaggactcttgatctttgattgagcggccagggcgcatccgagttacaccaccttgacatttttccaatggagccccttgtcttttgcgtaatcaacccgccatccaccgtagttcgattaatattgcagagtgacctttttctttacaaataggaccctgcgttcttagaaaatgatggctgcagtcaagaaaattcataaaatgaatatagaaa

SEQ ID NO: 173017 - DNA, 794 bp, Zea Mays
atgggatgcgtggagtttcgcagctcggtgaccggcgttgccctctccacggcggcgaaggcacaggagacaaggcagacacggtcgctgggggatctagagtcgccagtcagggctggagctgattagggaggtccggtgaactcattggcgagactccagtcgcgagaacgggactacagacaggggaacagcggaggaaggtgctccaggcgggtcggttaactccggcgaggaatctccgtagtgggtagggggtttcgggcacgctaaggcctagactagcttcgacaaggtaaggagaactctactaaccaacgtaggggcacgacgcgaggctaaatcaatcggtcttcgtgcgagcgctgcgaaccagcacgaccgaactccggtgaggccgaaaatagctaaagcagggaggaattagcataaactggcacagaaacgagttcctcacctcaggatggagcttggtgtggcttggcacgacttctgacgggctggacggccgggagcgcggccgcggatctccggcgagcacgagcggcgatgacagagcgcgagagagagcgagagtgtgcgaaatgaggcaggggagagagagcgggtgcaggtgggactcaaaaaggagctggggcgcgtgggcgggcgacgtgggcggtctccacggtgaatgcgcggacgtgggtcaacggcggttgcggggaagacgaaactgacagggctggcccaccgcgcaacgagagagagagagagagcgagggcgcaggcgaacggttcgcggcgctgacgag

SEQ ID NO: 173018 - DNA, 471 bp, Zea Mays
gataagtatatatacatgtccacatgaggattagatgtagatactatatattaatacattaatggttgggaacaaacttacccacaaacgcatgtccgtataatgctttctattctttatgatttcttctttcggcctacatgactctttattggcaagcagtcgaacagccatgtcaaaacatcttagagtcatatcttgatttatcgttaatatgttttgcaggtctttgatagatatttctatcttaaaaggattgaaacttcgcacccatgtcatcctgtaatgtagcatgacgaaagtctatatcaagaatctaagtagttgatatacataaaatagataaatcaatgagcacttactctagtgtcgtatcatcttctattgccatgatataatcacataaaacatctattgatgaatcagctttggtcactggcatgtcctttgtggaaagaccaaccattaaaa

SEQ ID NO: 173019 - DNA, 704 bp, Zea Mays
tggacttaattgcaaaatggacctcatttgagttctttactaagtctgaaatcagtgatatgggctcaactttggggctttgtaacttttaaattctaaggtttttgcccaaggtcaccacaacaattttgtagatctatgaaagaagaacaactttgcttaagagtgtaagcataattgttgagaagaaattggagataattaaacccaaagttggactgtcaggctgataaagtctgaatctcagactgacagtgacctagatccaagtttgagagccatttcgactatgatccagtgagaatctacctagggttgctataacaaagttgtagagctattatagaggaacaactttgctgcagagatctggatgtgttgccatagaaatttggaagaaatttggccctaaaccttggctgtcagacacactgaatcagagttaccatggtacagtagcctgatcgggttcagtaaacctcaccgccgacgaccgatcctccgccgcgattcgtgtcatcggcgtatggattcatgctcgtggcagatggataacatcgtggggtaagaaaatcttcgccgccggtgagctggacgccactccggctagccgcggtacctctccccttgctcaccgcccctcggacaaggattctcaccaccgttaagccgtcaccgttgtccaccgcgtgtctaaccctttc

SEQ ID NO: 173020 - DNA, 613 bp, Zea Mays
tgttcatcaagttcatgaagaaggctggtgcattggttagaccgaaagacatcacagtgaactcatacaacccatacttggtaatgaatgttgtcttcggaatatctgaaggtcagatcctgagctgatgataacctgacctcagatctatcttggagaacacgctggctcctctcaactggtcgaacagatcttctattctgggcaaggggtacatgttcttgatggtaacctcattcagagctcaataatcgatacacatccttttggtgccatctttcttctccacgaataggacaggggcggcccaaggcgaggtgcttggccggatgtaacctttctctaacagctcatcaatctgcttcttaagttcaaccagctctggtccagatactttgtaagctctcttaaagatgggggcggtgccaggaagaagctctatagcaaactcgactttccgctctggtggcatacctggtaagtcctttggaaacacatctgggaactcggacacaaccttgataatatcagttgggtctgcttcactgctatcgacaaccatctgataacaacttcctttctttggttcaggcggcactaactcggtcaccac

SEQ ID NO: 173021 - DNA, 284 bp, Zea Mays
cttagatcgggtagaagagtgcaatgttctgagccagccagagtcagattctgatgactggagggagccaatcatcagatatataaagaatgaagaggagtcggatgacaaaactgcagcagaacacatcgcaaggcagtcagctcactacactctcattggggaagcactttacagaaggggcgcaacaggagtcctcatgaagtgcattctttcggctactgggaagcaactactagatgagatccacgctgggcaatgcgggatacacacagcatccagga

SEQ ID NO: 173022 - DNA, 359 bp, Zea Mays
catgcacaagctatgacaattgttttgtaaagcgtaaactgatacagtattatcatcctatttatatatataagcctgtctatgatggagcctcattgcattcataattcaatccatctgaagcaagggcaagtgattctcgatgatccaactcagtgtatttcagaaaagaagcagcacgccaacactgaaacaagtaataaaaaattatcatatttggtaaattcaatgtaaaagcaaacaaagtaacaccggttggtgcctagcttaccaaggctaaggttgaacgcatgcagtatgctccgtggctcccgcacaactaaatgattatttaaaagatattcaaggaactggttggc

SEQ ID NO: 173023 - DNA, 513 bp, Zea Mays
aattttatggagcagtgaggcgtgggttcgagtttgctctgcattatttttgtgtggtgtggtaaatgcgcgcgtggggtcgggtgctggctgtgcaggcgctgggggtccacaggacagtagctgagagagggttgcgtgggctgatgcagggcgtgtcagcgcggagggtgaagttgtgtaccaccagatgcccacattaggttcttaatagagtagtatagattgtgctcgagaggacaaaagtgctcgagacaccttttattcacaacattgccctcaatagccgagcgccacgacctatcaaagccatcctacaattacaaagagcattttggtgagtgctaagagcatctccatttgttcttaaaaaaagctccctcaactcatgtttataaagttgctaaatagctattgagagtaaaaaaacagtttggtctccaacaattcctgatatttagagactattttaattttgaatctagatttggtgggtccattttctgctttttc

SEQ ID NO: 173024 - DNA, 413 bp, Zea Mays
cgttcgtgcgttcctgggactccctcaaggtaaccgttctagccccgcccttatttccccctgtctcgcatttacctgcctacgattgctcaccggagtatcctccggccgaggactcccctccgtcgtctggccgcctcacccccgttcacacaaaaccgaccccgccatagagttcgcacgacccttcccaacccctccagctacctgaaccgacccttcacgccctagggggcccagtctgcctcgcctccagcgatggcgccaccgggcctgcggggagcgccgcccctggattcccggtggagacaaacccccctggcgcgcatctagcccgcccaaacccaatcggacggtctaatttcaattaggctagaactaatcccgaccgcccgatctagatctaactgttc

SEQ ID NO: 173025 - DNA, 295 bp, Zea Mays
atcgtgtgtcatgagtttctcatgccacgcgtgtgtgaaggcagtagacaagtttggtgggatgtcgaggaatgacaggtggttggtacttgatagcttgcatatggagaaggccaagaggaagtatgttttatggcacgagtgcagatttggtgcccaagggggttggtgccctccttggctaaaataccatgttgcaatgtttcaaaaatcaccacaaaaaccatgtacagttaaatatagccgcaacaattcagtttgaaattcatctgagatgtcaggaaacaaaatggac

SEQ ID NO: 173026 - DNA, 280 bp, Zea Mays
ggcttatgaaaagcttaggttcgtgatcaattcagtaagaaatgactttattctcctttggattggggatcttgatctgttggttactatagtagtagcaggtttcccatttcattttcccttttcaaattccctttatatctgtattatttgctctgacatgcagtccttttccttggatacgatatggatccatggcaaaagccaattccaaagtgcacttcaacaggggctacaaatgacaggcaaacactttaaaaagatctatgggacatcagtg

SEQ ID NO: 173027 - DNA, 621 bp, Zea Mays
tggaaagataagacaaagccctacatgattatcatactggttatcactaattacccacgaaaaattcccagaaactgctattactactgctgttcacccacctgaaaaatctgttttttggacagcaacatacccggattcaaacaacgatatctcctaaattataattcctaatcgagcgcataagtactcgttggaaaggtatgataaagctctacatgattatcccactgattcccactaattaacccacaaaaattcccagaaacggctaatactactgctgttcacccacctgaaaaatctgttttttggacagcaacatacccggattcaaacaacgatatctcctaaattataattccgaattgagcgcataagtactcgttggtaaggtatgacaaagatctacatgattatcctactgagtcccactaattaacccacgaaaattcccagaaatccctagaactactgctgtccacccactcacaaaattcctggacagcacatctaccgattcgcaaagataaacgcataatccaattgattgcagcacaaaaacaacaaaagttaaacacaaattcaccttgggttcttcccttcctccttcctttttcc

SEQ ID NO: 173028 - DNA, 349 bp, Zea Mays
cacggatagaaataaggacggtagcagtaaaagttacgaacaacaatctagacaatactcggtcaaacatacctcaggttacaaaatcactctcatttaacaatagatctagaaacgtgttggacaaatatccagatttccttaaatcccattctaggtcttcaaaccccatgaaattcaacagagtgaccgtaaggcataaaaattcccacccagcatgtacctgtggttgttgttggatacttgcctataattatggctgaagcattacgcttcctaaaatagattaggccccctttgaaatgctagaaattttcctcttttctatattgtttttatttgaaatgcc

SEQ ID NO: 173029 - DNA, 758 bp, Zea Mays
tcgtcttgtcacttcggggtcaaaccaatgacatttgaatatcactagagtaagaggtttggaaccatgaaaattgagttcatatatttctttgattcgtccaaaatactcgacctcgtcaagcccgggcgtaaagactccagaacacgtgtttttcgattgggccgactttggtcgtagcttgttgtgcgaaaacggtatccattgatgtcatacccataatatttcctgaccctataagcaaagccattggctacttgtgtcaactcggcactcatagatggatctctttgccctgcaagtattcaaaagttcagagacgctaaattgagttcatagatggatatctttgacaaactaagcacgtaccttatgtttgaaccaggaaatgaaattggacaatccatttcctacaccctttttaatatgggtatcatattcctgtggagttgggtccttgatcgacgccagaattcatgaagaaattgttccatgtatggcgtcacctcttcaaggttggtcaatacatatagcatgatatgtcgccactcttcatgtctcagggtcttggtggtcaaaccacttccacttctgagttggcctctaaatatgatgaggttcgattcattgccgccatcattataacgaggggtggattatgcacgctcggtagtttgtcaccatagtaagttgttgtgaagtttgacacctcctctagaatgtatgcctctgcaatggaagcctcgattttgcattta

SEQ ID NO: 173030 - DNA, 916 bp, Zea Mays
gctgctcttcgtttctttccagttccagctgaaagccttctcgccgtacccagttctgttcttgtatctgttgtttctggtctctgtttcgatgccagttttggttcggttctaggctgctagctgttgattctgctttctgtttcgcttctgtttacgacacctgaaccagtttttggtaccggtgggggagcactgtcccaatggctggccgccgttcgccgtcggcggatcccggtctcggtcactgcgaagctcccgaaatgagatccggtggcgctttagagccctcgtccgttccaatacgcagtcggatgctgggttacgctcgcctctaaatctaagcttattatttatgcctttgcttcgtattcgtcagatctgatttcgtatttctgtctcgaccgaaattttgcgcggtgcagtgattataaaaacattcctcgtactgatgggtcatcctcgtgaacgactcctatacacccatagaatctgagcacccaaaacacatctccaaattttttttactttcgtgctctattttgtttgtttgttatactatttaggttttttaaaagaaacttgacttccgcgctgttttgcaaatctgtatttttcttatttgctttataatttgtattggatggttttgaattacttggatttatcatgacaatacattgttgtagcactcaaaacactgctagatttatcttctagcctgtggtcaagtcgtcacagcgagtggctctatcgttcatctactgcttgcccagtgcccagttgacacccgtccttcctgcgttgctattgtcgatcgacgaattcttcatgagatcttctatctggtcgcaaggtggaacttttggttccgatgctaccgcaacgtcagcatcgcatcaacttttgtattgac

SEQ ID NO: 173031 - DNA, 1148 bp, Zea Mays
tcggcccatctcggccagtcgacccactgcagcccatccccgcgccacgtctctgacttgtgaggcccgcgcctcgggtcttctcccacctcctgcggtgctcaacagaatgccgtgggcgccgccggaatccgcgcgatgatctcgtcgtgagccgcgcgatgcctgctggcgcttgctcgtctcgcccatccatggcacccgcatgtcatcactttccctcttctttaccgcaacagaaccgcacgtatctccgtctacctcggtaccggcggcgcggaatccgcgcggatcgaacgaactcggccaggaagggcgcggttcgcccgccagcccttgcggaacccgcggcactataaatccgtcgcgcccctgcttctgccctctgcccgaccgtgcaccgtggtgaactgagctttcgctgcgccccgccaaggacaaagaaatgagagaggtgctgccgtggtggatttgaagcctacggcgttgtcgtgtggtcagaatcggaccggtgaagctcgccatgccacagggaatactattgtagcttcgcctatccggaattgcgctctgcgctgccggaatcatgcgccggtaatcatccctccgcctaggtccgtcgaccggcctcgccaccgcaccagcgccggtatgaacccctctattgagttctccatcatctcctctctgcgtagcatctgtctaatcgaagttcggtcatcggggtcgtccctcggcgtgctccggcgatggcgccgccgtgcctgccgtcgggctggcaccggtgggggagagagagaaataagggaagaagagaggcctcgggccattggatagttaacggacggttgagattaggcgtctagagaccccttcaccagttcggatccggtccgttggatcgtgatctggcggccaccctcgaataccagttcgcttataagtttgaactaatcatggccgctgttggttgatcggatggctgcagtcgcttgatacccctttggctggggaaatatgcataagggcccctgcggttttattcaatcaacccgcggtcctacctggtcttaagaaccatcacagctaggtcctgaaaacttgcttgcgaccccttgagcttcgctggaattgtggcagcggcccag

SEQ ID NO: 173032 - DNA, 487 bp, Zea Mays
ctcctcgcgtcctggccacgaggctgatcaacacccgaagacttctgtgactccatggtgtactggtgttgcatctccacacccaatgcctgctccactgtagtacgaaaatccaccaacggaaaggcgcccagagcatgcctgatagaaggtttcaggccctgacggaactggctcgccttctccatctcattgtaagtcacatgaggaacaaagcagaccatattgttgaagtccacttcatactcggtgacagacttcttctcttgcttgaaagactgcaaatcaatcttcattttctccaggaaggtgaccaggtagaacctcctctcaaactgcctgatgaaaacatcctaggacaggactcctggtgaagaggagtgagctgcctacacgcctctccaccaaatctgagcctctcccttcagcagttgtgtgccaaagcgaacacgatcaccatacacaatctcaaagacgtccatcttat

SEQ ID NO: 173033 - DNA, 858 bp, Zea Mays
tgccccacctcctgcccccagttcgctcctttccgctgtgctcctcgccgcttgacctagccatgaccgatcgtccgctccctatactcgcgcttgtgttgctcctggcgaggttcactggctgctcctgaacaaaatgttgctcttggattttgttggattgcagtagtagtgaggaatagttcgacctggtgagggtcgtgaagattgttacacacgctaggttgttcttgatcctacgcatcggggcttatgtggccaccaggtggaatcatgggtcaccttcctttcttcactgttacatgattaattgtaatttttaagagttttttgggtttccctggccatcaatctggccattgtctatggagttgcataagcgtgctggtgtggttgcactacatgctaggaacattttcagcgaccacactatcattgacttgggcatcgcacccaaatgatattaccatattgatatttccacgcacatttataatcatccattgcaacgaaggtattacaaacaaatcaactgtgggtagtgcttgttaagaaatacgaagtttttctcatcaagacatgtaaaactttaggatgacatgagaaaaatacaaatcaaccggtcaaatcaaaggttagcaggcaattaaaaaactacagaaaaagggcttggtacaatacagtactgctaaaagaagatttgtggtgcaaagcctgctcaatgcagtctagacatcatggcagccaccagcggcagtaccaggcaatgccctggcagtcacaagcgatgttctggccttctgggtgaacagaaaaaagaagagggtattgctgagtcctgaccaggatactttaggc

SEQ ID NO: 173034 - DNA, 691 bp, Zea Mays
atccttacttctttatcatgattccctcctgtgtagtctcttggacatgggattgtcccaacgactaccacttcattgtcatcatgaacatcattcctttcctcggaaccattagtctctgaaatagtctcatccacaagagatgggattcttccaacaattgtctcttcttgtgtactattctctccttctttagaatcacttccaccctctctacaatcactttcattgactgaagagaactcatcaaagaagtgatcaagatcacacttgtttgagtagtatggttcaaactcacagaaagtcacatccatacttacaaataaccttcttctaatagggtcccaacatttgtaccccttttgtgtagatgcataaccaacaagtacacactcaacggcttgcggatccaatttacccactgaaggtcgatggtcgtgcacaaagcaaacacaaccaaaaactctaggtgggactttaaactctcgttgttccaataggagttcagcaggtgatctcatacccagtaccctagaaggcatgcaattgatcagatatgcagttgtcatcactacctcactccagagatacttaggcacattcatttgaaacatcggggaccttaccacttctaataggtgttgattctttctctcggccacaccattctaagaaggtgtaccaggacatg

SEQ ID NO: 173035 - DNA, 462 bp, Zea Mays
ggctagtgcaaggtatgccaggggtggtggatcctccagccagagggtatctcaagggccacttgataggatgatgtgaaggagtagggaacaagtacctgagagtgttagagactacaatcttgctcaagcctctagaccaaggcaacagaggacagatactggtccctggacaagtaagggaaggagctcgaaatagattcttggtacggattgggcaaaggcttgtcatgccattggcatcccgggtcgaaaggtcgataactcatattttagggccgcaattatggagtcccaaaaacaaggtaacaaataacgcattatattttgttgtatttgatctatgttgttgacataatcttgttgccttaaatgcaggtgtgggggtcacattaccaactggtcaagagattgatggcaagtatctgatacaatagatcctagtgagtttgatcctgcctt

SEQ ID NO: 173036 - DNA, 748 bp, Zea Mays
tcaattaaaatttgcattcaaactaagttaggggaaaaacaatagtgtatgagtgtttagcaaatgttgacgaacaatgtgcaaataatgctacggtagtgtggtggttacggcactgcagtgctttttgtctattgtcttagtgatgatatgctagcccttggtgcttgatcagggctacagggctgagagccatctgaacttagtccaggtgttgttaggtgttggtagttcttgtgtttatagatggattcttccgtgtacctcaagttttggcaccgtagggtggttctatttgtactggtctattttagacccacttatccttcttcctaatataaagatgcgcagttttcctgcacgtttgagacaaaaaaatgtaaccgatatctatttaattctacacttgccttgctgctgcctgttgtcctatggttcttcgttcttgtttcctgttattaaccccgttcctatgttatttcagctatttaccaacagcattcagcaaacaataggcagcagatttggataacttctctccctggacaggtaagtagagctatggccaatttccaatttatagtattctgtgataatacaatactacatacatattgatgtagtatgtatatagatatacactaccatacttgtatacatagcactggtgttgttaggtgttggtagttcttgtgtttatagatggattcttccgtgtacctcaagttttggcaccgtagggtggttc

SEQ ID NO: 173037 - DNA, 409 bp, Zea Mays
ttcccatcttatggagacatggcgcgtacaagcaaaactgcacgcaagtctactggaccttttggcgtgcctcgccatcagctagccccagacatgaagggagtagtagtggcaacactaacccgattggagacttggaggccaaggtggaaccacttcggtcagagctacgtcaccagaatagggcatgggcgcaggacagccaacgcatagctgaattgtcagctgacgtcagccgcttgcaatatgagatatcagaacgggattcggccattgattgggccgtcaactcgcattcgatcgcttgggaccgcgaagcaaaagctcgagctcgtgtggcagagcttagtgcggccctcgacagcttgcgagtgtactgtaatactttacatgaagaagtacatgtact

SEQ ID NO: 173038 - DNA, 381 bp, Zea Mays
ttaattagtacagagcttcattcaggatttcatcaaaacttttcttgtttacttgtacccatgttccatgtcttcctccaagaacgactgctcacggcggaaacaaaaacaaggcatcagaggaaccgtttccatttttagcaaatcgttcgttcgtgtcttcctctgcatcattcgttcacagaaactgcgggaggccccaaacaatgagcgagcattgaggatccatggaccagctccgccaggtgggcgaggccctcggcggcatccacacgctcatggccttcgccgacgatctccgcatcaacccgcgacaatgccgcctcctcgccgacgcctgcgcgatggccttcgccgccgtcgccgccgaggtgcgcgccc

SEQ ID NO: 173039 - DNA, 408 bp, Zea Mays
cgccggtggacgacgcccggagtgtgtagagaggcccaacgctgtcacatcaggcgagtggggtcctggtggccagatccttcacagaaaaaccagtggggtcaaactcaatggaacaagaattgtcggtggtgaaccgacagacagaaaggagattttgtgtgatgtgaggggctacgagaacgtcgttgaggtagaacggtccagggagaaccgaggcacctactgaggtgactggaagagtggatccgttgccaacgataatcgaggtagggtgtgtggaaggaggtgggtgggagtgagatagcatgcctgtagtgggagtggtgtggtaggaggcaccggagtcgattacccagtcggaggatgggggagccaacgccatggtgttgtaggcggcggcgaggg

SEQ ID NO: 173040 - DNA, 912 bp, Zea Mays
gggtccggaatagtcgggaacggaaacgggagcgggataaacggaattgcgaaaacgaacggaaacggaaatactaacggaaactcataatttaatacaaatagaaatgttattgatgtttgactagtgattgattggcagaacaataacataaaacaaatagatatagagaggcaacattctactgttgtttggttgctaaatgtgtacatttagctacatctgatgttgtttaagactttacatcacttgtcatttgaaaagagccggtggttacaatggccaattgtgctataatttatcacctaaatacacgatgatttagtttatatactaatacatattaggctcgtcccatatttgtcaaatacggaataaatacgggttcaatccggaaaaaaacgggatcccgcaaaaacggacggaataagctctctcccgtttccgtcccgtttccatatttttccgtaaatacggaaacggtcgggtcaaatgtagaaaacggtacgggtcgggacgggattttttccgtccgttttcaaccctagtgtcaatctacctgcatgcattcgccgatagaggacagtagctaatccagcaccggagatgaatctacctccgaatcctccgcctgctgggactaacgctgtggttgccgcttcaaatgcaactattgtaacagatgtccaacaccatggcagagatgcaagcttagcaccgccaaaaccaacagcatccaccaccaccagcactacatagggataagcatcgcgagttcacgagccataagccatccaccttctccagatccactccaggctgatgattggctggttagtggagaagatgctcaacattgcccaatgcattgatagagagaaggtcttatatgcatcgggtcgccttactggc

SEQ ID NO: 173041 - DNA, 433 bp, Zea Mays
gctgccgaagctgcacccgccgaagccgaaagtgccgaagctgaaaccactgaagatgtgaatctagatgccacgctctctaaaattgatacaatgcttctagatgcggccgcggaagaagctgttgcagccgctgaagagatcccaggcacagtggctggaaaaggaaaggagaaagccgaggatatttcggaagaagaggactttaacttccgagatatacttgggcaagaattgtcgaaggctgaaaaagaagaactgaaagagtatgctatatcttgcggatacagaccaggtgcgctactcttcgggggagttaacgaagaaagcttacgatgccttcgggaccacactggggcgaaggttgttggcactatatcaaagagtgttggcctcccaaaggttgaagcagacctcagcaggtaccagcggc

SEQ ID NO: 173042 - DNA, 724 bp, Zea Mays
cgacgaagggggctcgggtgagacgaaatccaccatggtaaagcgaaattggtgcaaaatagggacgaggaagggtcacttaccctgagacggtgcttggggcggcttggcacggcgcgaggaggctccagttggccgaacgtcgaagaatcgcggcgatagtgagctccgacctgtgtagggaagaggctaagcgcggaccgggaagaagagttgaggaaatgggaaaccatcgcgggttcctggtgcgccaagctcaggcgaagctcaccatggccaaagcgcttgcagaagtccagcggcgacagcagaacagtgaagagatagcggggggaagcggcactgcggctgggtaagtacgagtgtgggggaccgtgaatgtgaagcaggggcaagctgagggagtgtgcatggtctttacctagtgctcgggcgacgtgcgtgggtcatgcggacgtgggcgcgggtttgacggcgcaggtctgatgagccagtctgagcgggtacacgcgagtgagcaacggtgctgatggggcggccccactgggtagagagataggtggagagcgagcgagcagggcgtggcgccgataggtggggcccgcctacgagggacgcaggcgcgcgcgggagggctaacttggccggcttgggctgaaaggccgaggagggagggaattcgggctgatttcctttttatttttattttctatatttctaatct

SEQ ID NO: 173043 - DNA, 595 bp, Zea Mays
ctgggtccctctaagctggcaaccaagaatccacaggtacatgtctgaatcgacgtacccgggcagctgtgactcactgaagataaagcagacgaggattagcagcaagcggtcgcaccttggtctcatcacgctccctgaagcgaggtggaggaataggtggagcagaagtgggagctgtggaagctggagtggtggacgtgctggacacattgggtgtggtggacggctcgagagcgatagaagctagtgaagtgggaggtggagtggagactgggtcaaaaggagtggagtgagtagtggaggagcgaggccgagatgcgaggcgacgaacgtggtaggcgatctgatctgaggagatcctcaactgccctccctgctcatcctgatctgctgctgctaccgctgcaagtgctgcacgagcggctctgtccatacgcctcttctttctgccctcttgttgctcaagatagacagtcttgcccttgacctgtctgaaggggcgaggagggtcctcgtcatctcctccccctgatggtgtgacattcttcgtcctcaccatcctgaactgactgctgcaagataaggagaaaag

SEQ ID NO: 173044 - DNA, 863 bp, Zea Mays
gctccaagaagctctgtcaggtcgactgactgaaggaacgccatggtacagtgctcggatatggataagactgccagcaccggatgttcaccgccggcgacctctttgccgggattggtgccgcggccgtgtggattttgctcaccctgaaaagatctcaccgtggataaacttggagcacattggccactcggtcactcctccacttaccggcgacgtggccgcacggccatcaccggcgtgccgccgttctttgctgttatgccacgccgtcggtcatcttaccacgtcgcagtggattaccatacgccgtccttctattacctaaggccttgccacgacgttcgccacctatcgcacgcaccagtgaactctctcccctccggccgccagctcgccgtgatcaaattgtgagccaccgcccccggagtctataaattgagtgcaccatcagcttcgttatgtattcgagcatctagcgcacccttctgcacctcaaatcctccaccataaagcttcaatttgaaatttcccccaaaacactcaggaactccgcacagcttgacctcgccgtggtcagcccgattcagatccaatctcaccctcggtttccttgtttcaacatccttgcttgctcttgatgctcaccgaaccgttaaatcaaactagaccaccccaatccgcgggaacgtgtgctcccatgctcggtttccgccgtgcacgtggaccggccgttctcggggtgttcgggtcaaattggtgtatgttccgaggccttcgtaggtcagtgaagcctcatagatagttagcttgagcagtcttcgccggccatggccggtacggaccgcgtctgggacgatctg

SEQ ID NO: 173045 - DNA, 845 bp, Zea Mays
acagtataacaaatacatgggtattcgatgaacttacatggctttggagaatgtgtggtgtgtcctgctcatgatcaccaattgtcctcatgggtatccgttgaggagctccaaccaaacttggatgaactgtgttgctgtcttcaaggattcctggcgccggtaacgcagccgggggagttacatcatgccgaccatctgacctacagggtaatgtcgatgttgtactctctccacactgcaccgatccgctagccatcgccatggtgtatgccctaaccctcccaggtcaatgaactaaagctgcggctgtgtgtaaccctgttttattttttggagttatgctcctggccgaaaccatcgtggccgatattcatggtttgttcaaaatatcccgcgtgatttgcatgtggcgagatttctgtgtcccgacccaattacgattacctgcctattctgttacagcaacataaactcatcaccccacgcgcgaccccaccacaaatccacgatcccggtagacccactcgccacccacaccacgatatgcatgcgtcagatcgttatgcatttgttatcggcaatttaaacaagcataaacgcccaactacaacccgctcgcgtcccggcataccactatgctaatttacgcatccactaacggtaaaatacacatacataaacgcgcaaatcacgcctgaccccaccatgatcccgatgcacccgcgcggcacccctctattccctattacgcatccgtttcagccaaattccttatgcacaatcactgcagtccacacgcccgaccccaccacgtcccggtgcaccgcgacgtcgcatcacgc

SEQ ID NO: 173046 - DNA, 476 bp, Zea Mays
gatgaaccaatattctaatattggttgctgaacatgggggacatgatttaggctggtggcgccttgtcatgccctgatgtttgttgtattgcccatgagtcacagacaaagcatcctttcttattaccctttggaggtttcagctcagtgattttaggtcagcaaagcgactgtcagcctcaagtcccacccaaccgtgcaagtgacggatgaggatgtcttgcactacatccatgtagtgttcattatctgttgtaacatataaaagcttttagctgaacctaaaataggataaaaacaaattattggttaactgcacatgtagtgttcatgctgccttcccctatgcaccaatgcttttatcgatttggttcataaacgtcttttatgcgtcgacaaacaaagggttgctcctaaatgctgcacttatattgtctttgatactaaatgtggtactaccatgagctaatttcgcc

SEQ ID NO: 173047 - DNA, 1095 bp, Zea Mays
gttctgaagttgctctgtcaggcgtcataaactgaatttcccatggtacagtaaatgttaaactgaagaagatcccatcccttgcttgtcgccggtggcccatcgccgttgattgtcgctcgccgtgattcgtgcgccgtggccatcagataagcatagcccagtaaaaatcctcgccgccggtgagctggatgccaacccggccagccgcggtacccctccccttgctcaccgcccgtggataaaggggctcaccgccgtcgtgccatctccattgtccgccgcgtgtctctgtccatctaccgcgtcaccgttactccttaccaccgtcccatcgtcgccggtgagctcgccacgactgtggacacgcactcacgcgcgccagtgccttcttctacctccgaccgccgcgcgtcgtcgctcaaattcgcggccaccgctcgcggactctataaattgaccacgcccccagctccgccatgtactcaagcagctaccgcacccacctgcatcccaaatcccccactagcgagcgctaatttcggattccccccaaatccgctcaagaacaccgtaacagcagcctctccgtggcaagcgctcctcaggttaaaacatacccaattgcttagtgttctagcctctgttaagtcccttattgctcatgaatctgtccaattgtgctaaaccaccttgggtagccatgaacgcgagtgaatgtcctcgcggctcacggttaccgtgggcagagagctgtagggcagtaatctagaaattggtttgggggaaatgcttgggagggattcaattcggggtcagtcgcttggggacgccggtcttggagcgattcggccggtctgtgagctcaccggatctctgccgcgccgtgcaccgtcggggactttaaaccgagaatagatagaagttggaggacttttatgcaaactgtcagcgactgtgttaaacagtggaagaacccatccccagttagtgaaaaccccgagggcttttccgcaaagccgccagcgagggcgcgcgcgggcgcgattcccttctgggttgggccgactgggctggaactggcccagttctgtt

SEQ ID NO: 173048 - DNA, 654 bp, Zea Mays
ggatgtatgacttctgtggttttttaagtcaaattagggtacatggtttatagatcatattttagatttcgaccatgatcggtgcattttttgtatcaagcattcatttatgatgtttctgaattaccaatgtcgttttttgtttctagagttatctttttttgttttcattttcgaggaaaaatatgaagacgaaaatggttatagtgtttatctatcgtttctgaccgttttcattcctagctgtgttggatttgtggctatataagaagagattgagtctacgtgataggcttgggtagcaccagttgcagaaaaacttgtccaacaccagctaagatagtttgggcatgattaacgtataccttcagaggcatcagtgcgcagtgagaacctaaggcacggtagtaatggaagagaggcaggggaaggctgaagttgacatgggaagaggcattaaaagatttgaccttgaattggagtgcatggaaaataactatccacgtgcctaaaacttgactgtgcttttgatttgttagatgctatctaagcttttcttgtgcattgtgtccaccattcaacttgattttcttgggggatgcagtaatgctcttgcttggaaagtattaggaacctctattagtctattatgtc

SEQ ID NO: 173049 - DNA, 802 bp, Zea Mays
ccactgcgaaggatcaatgtcatactgctttgtcgtgatagcgccttagggtctactggtatctggccaactgaatgaccacattcagtcgttcttcttctagtatgtcgatgtcctctagcctagttgcttttgcttcaactatgctttcgaatgttaatctgggtgctccaaagatcagatctgctggtaacacttcctccgatccatacaccatgaagaatggggtgttttcgtgtaaagcctggctgggttcgcaggctccagaccacatatggtagttccctgatccattttcctgcgagcttctcgcttttgtcaaacacctttttcctgagtgcattgagtatcaccccgttggccctttccacctgcccattagctcttgggtgtgccactgatgcgtacttgatctggatgctcctttgcttgcagaagtcaaagaactctgaactggtgaaattagatcccagatctgtaatgaagctgttaggtattccaaacctgaacattatttcctgaatgaactccactgcctttgctgaggtcaaagaggcgatgggtttgtattctatccactttgtgaatttgtcaatggcaactagtatgtgtgtatatcccccttgagctttattgaagggtctaatcatgtccagcccccagcatgcaaacggccaggtcacaggaatagtctgcaactgttacgcgggtagatgttgctgctttgataggaattggcacgcctcgcacctctggactaactcgactgcgtcattcttcgctgttggccagtagaacccgg

SEQ ID NO: 173050 - DNA, 919 bp, Zea Mays
cgctcggccccatgagagatcattacaagtggttacactacagagaggctaggagcttctcttctttctctgttcggccattcatctcttcctctagggccacgacctaggcctcggcaaccgctttccttcactctaggatgcgaagatgagagttcacctttgcactctcgagatgggcgatggtcgccgactctgtgaacctccccgccgcaccgaccaggtttttgcattcctgctagtgtccctgcgagcgactagaaacacaaaaggcagatgatgggggattaataggaggatcgtttccagcacccagctacccacacatggcttaccacaagtttttggcacatggttaaaatttgatcgaggccatcacacatcaccctcctcagtcaactccctgcacagggccaggggcttgtcacccttagtagagcagtctggagcaagtcggaagccaactcgaacattaagccttagtggcgcaatctaaggctccccgtgagtggggagagacgacatcctctaagaatttgcggtctccaccatgctgacgaggtcgacttctaggccctctaaaagaaaagataagggtaaaatccgattaccctcgccaagcccaagtagctcagaggtgtcaagagaagcgaacctagggtctcgaccctggaggggccctgcagaagcgttggcaagaaagaactcgatggcaccactgccccaccgcctttgtcgacagtgggcactatcctcctcctcttgaaaatcacctttcatgcgcacgacattaaggcgataggctagggggagctgttgaaaaagatggaggagatcatgagttatgacaacataagaagtaagatggcagggaccgataaggcccccgcccgactgatcacgcaccgacaaacctttg

SEQ ID NO: 173051 - DNA, 444 bp, Zea Mays
tggtaggcatttagagaagaaattttataccctaaattcaaggcgttacatgcacggccgaggcacgccacatgcgactgatcgggctgtagggtggcgaggggcatgactgtgagctagcggccaaggttgcgaaataggtggtggcgagggggttgcggggagggtgttgtgcagcgaggcttgggggtaggtggcgacgacacggggggcggaggtcaggggacgtcggtgatccgaagtagggacggtgcatgccatgcttgccgtaattctccggtagcagccacgaatcaaccagcatcacctagcagacgaagcaatcaccagttgaagaatcatgaatccaaaggtctgctagaattctcgtcacttcctccacatggcccacaagccgaacatacgagaagtcgaaacctcatgtgcaacgccagtcgacttcca

SEQ ID NO: 173052 - DNA, 989 bp, Zea Mays
ctacaatgcccattaaaacgaaggctgtcgcgcctgaagatgaagctaagcaacaaactttagatactggcatggcagtggggcaagatatgatggaaaaaccaaaatctcctacccccgaagctccggccgaagatgttgattacattattcgacatgcttcggggaaaaaattatccaacgaagaaatcttagaagccagacactatgcctagaaactaaaatatccgaatgggcccttagtgttcaatggcactaacgaagatgatttcatgtactgtctcccggacaacaaagaaatatccgtttgcagggagatagctaaaagtatgggatttctgaagcttgaggaaggcctttcggccatgtcgaaggatgatcttgctgatagccctgtgtacaacagtataaaggtataaagttaactttaaagttggaaatgaagtatttcattgttatgcttaattctttctttttcttgcagggcttaattcttagcaatgccttaaggcacaaaagagcgccgaagacgaagctgcacaatagctctcagcaaccttcgctcagaggtaattgagctgagaaatgaaggtttggagaaagacaagattttaatttcattggtgaataaaataaaaagacgaagctaagtacaatgctcaggtcgaagctcaaaagccgaggttgaagaccttcggaaacaactagccgaagccaaagaaaattgtgaagtcgcgaaggccagccaagagacaagtgaatggtggaaggccaggttggagaaaatattgaggagctccgcgaatccaaggaaaaatgcttcgaaaaatccttgaactgcgtgaaaaatttgaaaaacagctttgcaaaagttggtgtctactcctctgaggagaacttcattcaaggcgaccccgagggcgttattgagtggataagcggagaagccgaagcttttgagaaaattctgaacgatcgcagagatatct

SEQ ID NO: 173053 - DNA, 739 bp, Zea Mays
gcctctagctctccgcgccagcgcagcgaaaatggttaccaccactagcggcagggctcgaatcccccgaggtggcgggctcttcagatatctgtgtcgtcagtctggtgttggcgtctgactgtttgccatgacacgtcgaggttagacgaggacacggagatatgctggtcggtggctgtggccatgggctccctcgctgtagcaccggcgacgaggaggctgtactcgagcgacgtggcgcgggtgtcgttgcacgtagggaggcgctatccgctctacatcacggcccattgttccatggtagttaaggactcgtgccaccaactctctgactctaacgatcaatcgatctgcttaggctgggaggtctcgattggtagctgcaagtggagtgctggcgatattgatgtgaacgaagcttaggagtcatattggtgcgtatgggggtgagcgatcaacttcttgcttgcccgtttctaaattgatggagcgtggaattgagttgtccgtgtttatggcggcgacagtggccatgaggatgcatgtcatgtatttatggaattgcagcaaccttcgttgagtcttggagagctacttttgcggtcgtgatctgaagaaggttctcaaagcatggacatctcttagctttgtcggatgattctaatttacatatgtttccatttcaatattaatcttattctgttaacaacatattttcttaagtaacatcatgttt

SEQ ID NO: 173054 - DNA, 655 bp, Zea Mays
gttcgtcgttgccacaaagccgtcgttcaccgtgggcaaccctctgggcgccgtgtccagcgttggtgattcctcaagcgccttcgccgcatgcataggatcacgtaccatcataaatcctcgagatttgggctggaatcgctggttggctgcgccggccatggcgccgtcgggtgggagctgcgccgctgctgtctctaatgttggggtgaatacgcagtggccgcaggatgtcgagtgtgcggccgggcttagatcaagcttataccagttgggaggaaatgaccggatccgtccgatcgagatcatgcggagggggtttgaatccaacttaaagtgatctaggttgatcatgggccattgatcgtagatcctgcggcccaatgtgcgtaccggttcggcgttgggtctgggttttaatctgagcccttggctcgagatatggcggtcagtatcgacctacactgttttagccgagtgattttgcataagagcccctgtcctttctccatataaacccgccatcctcgtctgtggggaatccttacatcgggctctctggtattttcaatagggcccctggtatccacttttagtgcaaaataaaccttaaaatgccctaaaactcattagctcataacttttgcatcttaac

SEQ ID NO: 173055 - DNA, 735 bp, Zea Mays
cacaaggtgctgcttcaactcttgaaaggctcgttctgcctcttcggtctaagagaatggctcggacttccgcaatagcttgaagaagggtagtgccctctcatctagtcttgagatgaagcggctaagggcggctagtgaccccgtaagcttctggacgtccttgatgcgggccggaggcctcattgtttcaattgccttgatcttctctaggtttacttcaatgccccggtgcgaaaccaggaatcccagcaacttccctgcagagacaccaaagacgcacttgtccgggttcaacttcgtgtgtgttgcctgcagcttgtcaaagaccaggttaattcttccaccagggtcgaccctctcttagtcttgaccacgatgtcattaatgtacacctccaccctgtccctaatcaggtcaccaaaagtcttactcatcgcccatacaaatgttggcaaggcgtttttcagatcgtaaggcattacaacataacagtagagcccatccacagttacaaaagcggtatgcttcctatcctgcctagacatatggatctgatggaaaccagagtaagcatctaggaaggacaagaggtcgcacccagaggtagaatccacgatttgatctattcgtggaagtggatatgggtccttaggacatgccttattgaggttggtgtagtcgatgcacatccgaagcttcccgttagccttgggaacgatgactggattggcc

SEQ ID NO: 173056 - DNA, 834 bp, Zea Mays
agcagatggagcacccccattggggtcagcagcagatggagcacccccattggggtcagcagcaggtggagcacacccattggggtcaagtcagtaaattcaggcacatgcacttctgcagcagcaggaactgaaggaccaacgtcccgatccaaactagatactcgccgaagacgtctctttttctttttctgctcatcagcagaaggatcaagttgattggctcagcaagggcgttttgggcgaacactgacaggtctctgaatatccaaggttgtatcagtttttgggagaggcgccaccaccaatgtcccagcaggagcagcatcagaagagtcctcagccagcaaatcaagcataacacttatctccgcgtcactaggatccaaaggcacctcaaagtggacctgtcgttcatcatcaggaattcccccgagcgaggcaaccaagaggttaacttcttcagcagagggtcgcactctaaggcccaaaccgccatcagcaactggtggattcgaaacaaaatgagtgaagactttggaaggaggcaggttccaggccgagtatgccattggggcaccaacatttgataccttgcctctaagaatcatttcaagtcggttcaccaaatctgcagcgggaattcttctgttggtaacccgagttgagtcagctaggcctcggtacagataagccaggtaagccctgtccttcaacggctcaatgttcttgaaaacaaaatcagcaaccacaccctctgcagtcagacccctctccttcagcagtccaacttcagctagcaaagccccagcctgagccacctcctgatttgtg

SEQ ID NO: 173057 - DNA, 950 bp, Zea Mays
ctagagatggtctatcatgttctggccacggtgtcagtgcgggtgttcaagtggattatcgtgttccggatcaccgaaggctgggctggctaaattgaagctagggaaaggttcctgggttcaccagagatgacgcacacgctaagctttgggctaggcccgagcagaaaggtggggcgacggagagggtgtcatggcggtttttgacagcgcacggatgcgttccggtgatgggcttcgaccaaactccaaattgccgcatccaggagcaataagggatcaaagactaaataaaacagagagtaatttggtaattactgaccagaggagcgctgggcccggatgtttcttctcggcggagctaagaacagaagagggagggaattggggctacgtgggttttccggtgagctcgagtcaagtgcttagtcacagaggcgcgtgatgtggagaagaagccaagcccgagcgcaatttataggccaacggccggaattggatgaggaccgtggtctttagattgtgcaggtgagctcgccgcacggcggaacccggtgatggcacgatggccgccgtttaaccggagcccgccaccacagtgagttactttcacgtagccgaggatatttaccgtggccgccagcccatcccgaccgctgtggcgttcttatcgccggcgagggctggcccttatccacggcgcgatatttctgaagacggtgaacagtgcgccagattcagtaaaaagcttgtttgacagaccaagttggagcttgattttctcccagattcctgtggtaacacaagtcaatctttgcagcaaacttgtagagcattataccaactacatctttgctatatggtgttgtcacaaaagccagcagatcaggcataaacttgggcttgaagttgatgtcagtctactgtcagcctgattttcagacttaatc

SEQ ID NO: 173058 - DNA, 488 bp, Zea Mays
ccctcgggggctgggttgcagcttgcgctacccacccgagccggatcattaccggcaacaccctcgggggctgggcaactgctcgcaccatccttgaggactgggttctccgcaacagccacctctaaggttgaaggactctcagtcacctcaatgggaattgaacaacctcgaccaacctcttggctccgaagaccaccttccaaggtcgacgaggcacgagacgctgctcgggatacctctaatcccacatctggaatgttagagcagacgtccatcatatcaccatcagttggctcggacaacagaacttcaggaacaacatccttgagagcctgatcaaaatttgctatggataattcttgcagaccaacaagagcagacagagctggagaaggaatatcgctactccgcccacttactctgtaacgtcgactgttcttccgaattagtgggacttcttcttcttcttcgtcctcatcaacaat

SEQ ID NO: 173059 - DNA, 874 bp, Zea Mays
ctacggtgacaaggccaagccccgggcgtacgcggcccgctttgcatctccagataggtaggtaggtaaggcctcactctactccatcaactgcggccattccagttctgtactgtacatcaatttgtgattacatttgtctcactttcacaaggatgctgtaggaaatgaattttggtggtgacgtgttgcacatgctaaatgcggagtgctctgctcctttgtttgatgtagggatgagctcatcagtgtggtgattaagccgtcaaatcagctcaaaatcacattcctagaggttataagagacttgccattttattgtttttgccagacatatgtaatcccccttgaatttatctgttctctgcaatatatagtaaaaaatgacctggcatttcataacaggcctcgtgatatgtgttctcacatcagcttagagcattctcttgtatccttgaaacatagaagatataacatatacaagcttgttaaaaggagttcaaacgtaggcaaactttgttagattcatagctttcttagtaattatatctggcatcagagtgagtagtttgtaagcttacctatagctgatacgacacccttatagacaagcatttgtctcatcagttgaacttgctcttattactttttattagtgcgatgaatttccaaagtatattgagtttgtgggtttgacaataaaagggcacacacgcatcgctatgactatgaccaaaaccgtctttgcaacgagagagtcaattaataaggcctatattatcagacaccgtgattctgccgtgattctgccactgatttgctcaccatgaaagaactttatggtctgtgcacgaccatttctaaatgatgttct

SEQ ID NO: 173060 - DNA, 733 bp, Zea Mays
gcgattcatcccgtatatttgcatgaggcaaagtctccccaatcatctcacacccgcacatcccacctgtttgccgcattcttttcgaccttgagagccatggcgggagaagcaagctcgaagtcgccacgatgaatgtgtcgcggttcatggacaagcagatccagagccgtgtcacctccgtctctgcagatgggaggtgctgcagaccatgcccccgccggtgtagtgaaattgtggttccagggtggaggagcaccccgacgtccgttgcttttgtcctactggagtagaagcataccctcttggtggagtagaagcaacatcacttctatagtgatttattaagtagtagtagttcagtgcaaatcgcttggcctcttggctcctgtcgccggaaaaataaatcaaggcacatggaactaagctagaaggacagtaggaaaataaaagggcagcaaaccaggctcatttagctgtgatggcccacgtaggatgtttcaaaaaatattagggtgtttttgtttagcagtctgctgtgagattaatatttttttacgaatcttttttttcagcagtccccaatacgagatttttggaaacaaaattttagcaatctcttggagatgctctaagacattgccgtatttgcaacaaaatatagggacgtctcaatttttagtagaagagcaagctttcgtgtgaccctaccaaccctcgaatcaaatgttta

SEQ ID NO: 173061 - DNA, 599 bp, Zea Mays
cgcccgcctaatcacgattagacgctaagcggcatgttagcgctgcgcttaggccctgggcggtggtttccgcggtgggcgcgtgtaggcggcgcatgatttgcgctatgcgcgttgaggcggaaacgaggcgtgtggaagcggggttcgacgcgcagggaaaagatgagcacggaagctgctgcgcgggaatagaaagtgaataggagggaaagaggcgggaactgttgttgcccgggagagagtgaaacaggttgggagctgcagctgctgttgcatgggagaggaggaaaatagggtcgccgccagaccggtcctcttccccagccgtccagggccgccaccatcggtgtcctcttccccttctggtcaagtcgtccaggccgccggggtcatcgcctctctgctccttttccctagctatccaggcgtgctctccctctccctcctttgcttttgctctgctcctccatctcttctgttctatacttttattcattattccaggtaagtacccctaattcctagctaaaacttttttttctgtgcaaatatatattatattgtatattcctacaaacgcttaagcacgattaatc

SEQ ID NO: 173062 - DNA, 456 bp, Zea Mays
cggcagcagcaacagaaagatggtgatgaacaacgaaacgaaggaggaggccatcagctgttctagtatgtactagtgggtagggtagtggcgatcgtgactcagccgtccctatcgattgatgtgtggttgttctagtatgtacagtgggaagggtagtgacgattgtgatgcagtccctgtcggtctattttatagcagcgcagagcagatcagtggagcgctagcctagtagcagcagtagattctcatcatgattctacaactaccagcccggctgtgcactgcctgcagcagcgcatgtggcgttgttggtcagaagaaggctgcttcgtgctattaaaacccggctggtcgggcatcatgtctgtcggcttcttttccactccactccactccactcgccgggcgcgggacacggcgagaaagattctcctcgtctgtcgcgtcgtgcta

SEQ ID NO: 173063 - DNA, 1088 bp, Zea Mays
ttttgcgtgtgttgctgctaaagtctgctctgccttcaaagcttacttcgattgtatatccatctctagaccagccttagctagctgaagagtacgcttttccaatatgaaatggcaggagagcagtctggtgttggtgtgcctttggcaccttcgtcaagcattcaagagaagaaggttgagggagtttgtttcaacaatagaggctaccgcctcttaggacaaagtcggctctgtgaatccatccaaggatagtgacaatattgacattgaagaggatagcactaccatacatcctacgaagcctagccatgtggacttcagcaaatctaaaatcaaaggacatattgaggtacttaacagctttggctatattgacaatgttgattgggtgcggttaggaggtgatgatttagtaccgaatatcgagagaggacgaagtcgtcgtatttcgaagtttttttgaaggctgggcttagatttccacaagactctgaagtccttcaagtggaaggtatagtcaaaaatatgtcacccaataatggtgacaagactccgaagtccttcaagtggaaggcagagtcaaaaagatgtcactcagtaattgtgacaagactccaaagtccttcaagtggaaggcaaagtcaagatgtcacccagtaatggtaataagactccaaactccttcaagtggaaggtagagtcgaaaagaatcgctaagtaatagtgaaaaggctctgaagcccttcaagcagaatgcagagtcagaaagacttcttaaagctcttcatagtgaggcatgcatgcgcaactgaaataagtgtagtgttttcatcattcatctcaaataatgcattattaattgttcccatctttagcaaaatgcccacacatttttctatttatggatagaaatgtgacattgcaacggtttatcacctcctctaattgtaatcgtacgatcaaccttcgtagtaattgtaagaaagtaatagactgcagcgttaaggttgtttaatgtttttgttgtgcatgaaaataagggaatgtgtttttgccttcggctaaaaaatactattttcttggtt

SEQ ID NO: 173064 - DNA, 658 bp, Zea Mays
tccagtagcactatcgaagctctctgcagtgcacggatggatcagctctctcctgtcctaatgacagacacgtagcaggtagcaaccgagctatcgtagctttcaagcagacgtcgttctaaatagagacagttggggggggttatgttattacaattattccggatcggactctgcttgtttaacgatacgatcagtgagtgcggttagatagagacgagacgtcgctgctctcccttttgcgcttcttttcggctacaataacaaggcaacgtattatatacgtactgtacgcagaaggcaagagtgagtttttctattcttctccggaaacagtcttgcattggaccatgtgacgtttccactgattatcgtgcagtgcagtgcagtgcatgcatgttccatcaggcatgaatgaatgactgactgactacattctgattgccttgctagctaccaccaatgcaaaagaagaagacagcagcttttctcggatcacccatatgcatgcatggctctggtactatgttattattactgggctccccgttttttttcttcttctaatgatgatggaaaattagggtgtagctatcttgttgggtgcttaattaggcaaagaggagcatggagtactagattccatggcgcaccagct

SEQ ID NO: 173065 - DNA, 624 bp, Zea Mays
gccgagtactaaatacagagaaccgcgggggtcgaacgagaaattttccctagactcagggaacacctgggatggactgcgggttgtttctataatattccaggggctcatatgaaagacggccagtcgaaggggtatccaatgatcctggtcaccccatcaacttcctacagttcagattagatttaggtttaaacgaagcggtatgtaatcctgatccttgtaccagaggtcgacggtctctattctatctaactgagatcatcccgcatcctttggattctcgatctacggtcacggttggatgcggtcgaatcggtatgaagatctaatccaattagtccaaaacgcatccaacggcctaacgtctttcttccctactcggcgtcagacggtgcggtcacgcccacggccgttcgacggcggttactctggcgagcccccgttggccgtccgctgctccaaaaccctccccgtagagtcctacgcgaagctcacggtatggtgaataagattgggtcatttttacctgcaataggatggtgccgcagctcggctacaatagcaggcgcactgcggtgatgaggagcaaccagcgagaaattccccgggctacatctaggc

SEQ ID NO: 173066 - DNA, 730 bp, Zea Mays
ccacattggcatagctcaccacaatggacacacggatggatttccatgattgacaactcaccaacctcaaggaaccaccataggagaactccacaacccttatgggtgtggcccatggctcggaaggccactctggtgacagaactaaccgatagcggtagataggcacgagtagtggtaggtttgccgatgctagtcgtggccctaggggtggcggtcgttgccctagagcggcacttatagcactagtggaggtgggtggcttggatggttatggagttggcagcggtggccagtccatcagtgagcaatatgatggccataactttcatcgcccaaagatcaatttccccaacctacaatgtgacacgcacccgcccgagcttacgagcgatgtatgtttgtatcctcaggcgtaacctcaccaatatctaccatggcatcagctagaaagaccctagtatcttttcctttcatataggcgaccttggaaacatctaagccatgtttctaatggctatccctaaaggagttggcgaccaaatgggaaaacagggaatgctaccactaccctaaaaagtacaccagctaccacagatgtgtgtccaaggtcgtgtttctgttggagctcaatgatgaggaggaaatagaggccacatttgaagagccgagatctccttgtatgccttgatagggatcaacgtcaccaacactatggagctccatgtcc

SEQ ID NO: 173067 - DNA, 601 bp, Zea Mays
ctgaatagaacttctgatggtacagtgtctgcactggatcagaccgccagcgcggctgtcctcaccgccgacgacctgtccgcgccgcgatttgcgtcggggtcatgatgatcggacgacgagcatctctgggcgaagatctttttgctccgggtaagatcggtcgtggtggagggcactaacaccggctgccacacggccatccctcctgccggccgtgtccggtcatcggcgccgctcccctccgttcaaccacaccgcactgatgtgactgcgttactgtcgcagcggggacgtggcaagcccgtaagaatggctatcgcttgacgccgccgttgatcgccagcaaagacttgcaatggttatcaccatggccatggcagtggcttactgcgcctataaattcatcgcctcctcactctctccgttcaaatcaactgagcacaactcttcgtctctaaattgcgaagccgtagcacccgcctacaccctcaattagccaccatagccggagaatcgctcacttcccccaatcacagtttccgctgccgtgaaaccaacctcaccgtggcctgtgcaattgaggtcagttcaaaccttc

SEQ ID NO: 173068 - DNA, 3334 bp, Zea Mays
tataatgcagtggtgattagaacaataaactaaattaacatggattactcaatatgagtgatcggaaagattatgcatctttgaattcaatacctcattaacctttcgagaatgtttctcgagggaccttgaccatttcaaacttgacccgcctatacttaacactccagatttccgaagagagaatccatcagtagagacagtgtaaatagtacttctcttccttgtttgcaataattttctgataaatgatagaggatcatgacttgctattaacaagttgaatggaataaaacaatacagaatatgggaagttaaggcaattctcgtattggttacctcattattcctatagagcttgtattcaacaacgaagaataactgcctctaaagttctggcagaatatttttcttttccatggaagtatacgaggtaagaccttcatatgactagctcccacataagatttctttcgaggattttgtccattaagtgtccatacatgagagaaacttctgacagtatttgttgtctgaagagctgcatttagaaattttacacaaataatatttcaaaataaattagcattgctttattatccaagtacatgccctcagaaagcaaaggtcaagagggaaatgaaagaaaaggctggcagtaacgtagtttagaacaaagatgctgtctacacaaaggttgaagacaagtgatgaccaaatcttgtaggaaaaaacaatgtgaaatcatcaaggtaactatagggaaaaaaacaggagaaaggtgttcatgtctcgagctgcagaaggtgaaagagtaggataccaaaaggaaaggtcatctataaggctataaccaggtgtgcatagtttggcaataatatcattcatatttaattattgttctcaatttttcaatttagctaatgtaaaactactggattcatagatgtgaaatacattatatgtaatttccaaacaagttatagcatacttgagaacgctgaaatgttaattaaataacaatttagttaaaggtacaaggaacagccaaacatgtattttatatagcatttacctttgtgcagcctgtcctttgccacagtgatattgttgttggaagatgaagacattagaactttactctcacctgactttatattttcagcctgaaatgtatcttttgaactcggggcatcagaagtagagggacccaaaataatctgatttttccttttcttgaaatagagatcagatgttgcggaaggctgcagcaacgtcactttatccaaggaaatgttactcgactcaccaagatgccgcccctgtgcaactagttgatttaactttggcctaacataaattgctttaccagcatcaagggcttcagacttgtgcaaactaataatgcttagattgtcagcacctgagttaacctgcccactggaatcttccttttcagtttcaaggacctgttgctgcaaattttgagacaatggctccaaaacattcacagcacaactgatggatttggtatgaagtggcaaaggtggggtcttgggtctttcaactgaaatatgagaatgtgctgcgtcttttgaatcgacattcctgacaaagttcatgcttctcctcataacaggcttactcaacttattttgagaatctagactagaagaagaatgaagatgatttccattggctggatttctaattagggcattacccttgcggatataagagttttgacttttgctgttcttttttaatggcagtttagggggtaatcctgaagtctgtgaaacatgcaatgacgaattagaagatgatgcattgtcacgacgccatgtcctgttccttgcattctggtttaagcgagggggctctagcaatgaaccaggcaaagctacctgtttagtaggtaccttcaatactgtggagcttgcaatattaattcgaggaggagattttactacagagttgactactgaatctgacaacgccttcttgctatcctcctttggtgctgataccttttctgaagaacagataggaagtagagaagatttgcatgattggtgttccttgttagcttctggtacaatggcttcaatccaggaggataccgaatcaggtgttgtacttgacatgcccacaggatcctcagtacttccatggtaagtgtgatcagaatcaacagatatctgagaagctaagtctcgacctggtacatcagcagattgtgaagataagagaatgggtctactaagattatctataggtttacccactgtgcaataactatatttatctaaaacatttacagaattaatagaagaacctgggcgaacgatctcatcatcaacatccttatttctctcttctgttgccaaaaggactgcttgaggaatactgataccacatagtttgaggttgtgatcctggccagacaaaacatcaatactgccccgctggtcaatatccagcataatatcatgatcctgacagataacagggacaccttcatccacaatctgctctaaacctatcctcccattactaacagcagaagcattatccaagcagctgacagtaagtggtaaagtcaaccaattctgactgcctgcattcattaagtcattgccagattcaccttttcttttgacaacattaccaaattctgtcgttgtcacatcaaatcctaagtttacatccaataggttatggttttcctcaggctgtccctcactctctgcactactgaaatagatattattaccaagtgtcaaagctgtcggaacagaatgctcactgttaccagatacagatggtgaatcatgggaatgcaaggagaatggattgtagtcagcaggcgggtgggatctatgaagatgtgtcagttcggttacttgagatgaagtgctcctccctagaccattattcagagcaccagaggaatccttcataggatcatcaccgaatgatggcagaattgtgctctcagtatttctggatgactgcagatcatgggtatctgtatccactacttccaggggaagatttggcttatgtaaagcagctttcgcatcatgaaaatcaacttgcatgcttctatcctcggttcgacctggtacagcaaactctgaagtgtacaggatgttatctgaagtcccaacatttgtcaaatttaaatccatgggactatcgcatgctacattcagagcaaacttactactaacaactcctgtattaggagcttcggcacattctattatttgaaaagcacttggatccatgggcatttggctttccttctggatattctcaccaatactaa

SEQ ID NO: 173069 - DNA, 1261 bp, Zea Mays
gtcgcatgctttctttccggggatcagaagccccgagtgtgcataagcgcatcaaaatgatgtagcctccgagcccccgagtaatccgtgaggattgcatggggatttacttagttcttggcgaagccatgggcctgccttttgccgacctcttctgaccttctggccatactggatacgcttccattttgtgtcgtggctattgagctggccctttgggttggtcgccggagcggagcgttgcctcggtcctgcacagagttgcccaggagcagcgatcgtcgaagtgggcgtagtctctagggacagacccgtatggagttcctcagaggtggtgcccgctggagcgtggcttgaatgtgcgccagtgcatcagtatgatgtagccctcaagcccccagtaatccgtgaggattgcataggggtttacttagttcctagcaaagccatgggtcaaccctttgttgacctatcctgtctcagtcccccaagtcggttgttgacgcctattggttctttgttatgcatgcatctccattcggaagggcctttgggcccctttgggagagggtcgtcttttccgacctagtcggcgtgagggaaggggtcattgagcagcaaggggttatccaagtgagatttgtccagtccttcatagggtgtggtctcggcgagtactccactagggggactcgacccgttgggggcatctcatttagtccttccttattctatcccgtattggccctctggtcagtctgatcaatcgaatggggccccgtagccacccgtcaaccgggtttccatacgagaatgtgaggtacgaccttggacgtgggacctagcaaatgacctatgggccagtcatctggcttgcaactcgctgggagcttgctcggcccacctatcactctacgtggggaggttatagtggatttcagtatttacctagtgcgaggcggttgtgatggtagtgcggtaaaaacagaatcatcattcagcgtgggcggctttgatgggacgtgaaatagcatacttactttatcgtgtgcgggtggcgtgacagtgtggtcaaccgctctgatcaccggtgacaccttttctcccctcgcgctccccttgcgcgtcgtctgaagcggcgcgagcctagcaaacatatgtggtctcccttcctgcgcccgaggtagggggaatactgatgcgacggatccccatatgtggtctgtggggcccatccttcaggcatctcttcacgcccccg

SEQ ID NO: 173070 - DNA, 1032 bp, Zea Mays
cggagggtccagagattattcttaggcgaccgctccggtctggcgacaaacctggagcaacgctgactcccctcccttaggtgctggctcgcgctcaccaggccctctaggaaatcgaggcggctatccggcgagagtgggaggcgctcgagaccgagcaccagcgcctcggcgactggtgcacccaactagagaagcgcactaaggcggcgtcctggcaatttgcctcagagcgggccgagcttgagcaggagtgtgagaacttcaaggaggacatccggaaggtgtctgaccgagaggaggaggtgacccggaaggagagaagcttggtcaaaaagaaggaacacttagaccaaaaggaagaggctgttacagtgctccatgataagctgaaagcttataacacagtgctggagaaacagcgggacaagcaggttgcggcagaggcgaagctgcagaagctgcagcaggaacttgccgacaaagacagcgacattgctcgtgccgaggataaccttaaggcgagggaagcttccttggcgaaatgggcaactgacctcacctggcaggaggaggacctcgccttcagggaggagatgtgggcaaggcggaacaagctactggatgagcttgagctcgaggtagaggagaaagggaagcgtttggaggggaaagagcaggcactggaggagcaggtctgccagttccaggcagcgcaagctgtataggcgacacagatggccccgggcccctaggcggtggaggtgatgaggaaaacacttgatgacctccgggctgagcaacgcgccggggctcagcgcatcgccgcctgggccagcgaggcaagcacgacgctagtgccattgaggatgagtcccatctcggcattggtgcggccggcgtccatcttcgacgtgctcccgatactagattccgtcgctgaccgcctccgacgtctagatcagattcttggcgcccgcttggaggccgagggcagcagactctgccggtcggcaatcgagtacatcttga

SEQ ID NO: 173071 - DNA, 401 bp, Zea Mays
tgtgacttcctctgcaagcgatacctactatatctatgcctaagttagtaccagatacagatagtgacaaatgagagtttgaaagcgcatccccttgccccagctggtcggctgtatttagatacaaagttaaaaacaatcaggcaaaactcagttcctttcttcattagatatataatttacaactgtaccatttcatttgacgaatagagaaatgcctaatacatattgatgccatatgttcagagttgatcgatgtatcattgtacagtacacttaactacatttgtatatgaataattgacccgacaggctgcctatgaggtgtataatctaataatcccaaaaatgtttgttcaatcagctcatccctgcctctaataatatagcccattgctggc

SEQ ID NO: 173072 - DNA, 479 bp, Zea Mays
gtgatcctggggtcgcggacctgatgttttataggtcggggggtgcgaggctgggcagttgcgatggttgagaaaattccaggtggagatcagcaacaatggcgggattttttttgttgaggcgagaggataacagagagtgattttttttcgctagctggttgcatccgcaagttgaagaaagcactcggctgaaaggtggaggagatgtctggcgaacggcgatgagctcaccccgttcccacacagcgtcggtggtggtgcctcgctgctcacgatggatctaatctcaactccggctccgtttgttacgcaggtgctgctgggagtttgcttgcttatgtcacccatgatgatacggtgatgtcattttcggcaagggaataaagaaagggaaaaatcatgcatggcaaggacgtgtgggctggtttgcccaagagatggcccaacggatggagatttttttttctcatttctat

SEQ ID NO: 173073 - DNA, 602 bp, Zea Mays
ggccatcggcgaggacaatcgagacatcaccattgctgcagccgagtgcggagcgggagcagagagagaacgtagagagagaacgtgagggctgtcgccaagcgggtgttcgacactgccgcgctcggggcattccggtgcttgccagtgcgcgcggcgtggcggacgcgtccctggaagcggaaggaagaagaggcctgcggtgatcccgagatttcttgtcggagtcaagctgttccgccgaaccaacatcatagcgtgaccaccaaaacctaggtaacaatccgaggtatgtgttcccccacctgcttcgccttgatctcctgtacgctcggcgctaggcggaatgtagagttggggccgggttcgtcgagttatcgccgctgatgaggtgtgcggctgcggcggctctcaccgtcgtgcgtaacctcggcgagagaacgaagatagctcgggtccgtggatgtattgaccgacggcccagatcgatcgcgcgtctggaccgcacgatttggatccaagggtagcgtcgcgtgcattctgtggtgagcgtgatctaatccggacgctcgattcatcatccgacgaccagtgttggctga

SEQ ID NO: 173074 - DNA, 551 bp, Zea Mays
tattcggtatcccaaacctaaatattatgtcttgaataaactccactgctttggctgaggtcaaagaggcgattgacttgtactctatccattttgtgaatttgtcaatggcaaccagtatatgagtatagcctccctaagctttcttgaaaggtccaatcatgtctagcccccagtatgcaaacaaccatgttacaggaatggtctgcagctgctgtgtgggtaagtgttgttgctttgataggaattgacatgcctcacacttctggactaactcggcagcatcgctctttgcagttggctagtagaaaccaaatctgaaagccttcccaaccagagtccttgatgccgcatgtaccccacactgcccagcatggatttcatccaacaattgtttcccagtagttgagtgaatgcatttcatgaggactccttttgcacctctcctgtacagtaagccccctatgatggtgtagtgggccgactgcctcgcgatgtgttttgctgcagccttgtcgtccggctcttcttcattttttatgtacccgatg

SEQ ID NO: 173075 - DNA, 735 bp, Zea Mays
ccccgtccgacgggtgcacacgtgatcacagggaaatggatcttcaagaagaagtaccacgccgacggaacactggaacgtcgcaaagcacggtgggtggtccgtgggtttttgcagcggcctggtctcgactttgatcagacctttgcgccggtggtcaagcccgccacgattcgtgtcgtcctgcacctcgccgccgccaacgactggccggtccaccaacttgacgtgaagaacgcatttcttcacggcgagcttacgaagcgcgtctactgtcatcagccgaccgaattcgtcgacgcctcccgccctaacgacgtctgcctgctccggaaatcactctacggcctcaagcaggcgccgcgtgcttggttccagcgcttcgccacgcacctcgtccatctaggcttcgtccccagcaaagcagactcgtcgctcttcgtcctccgtcgaggcaacgccgtcgcgtatcttcttctatacgtcgacgatatcgtgcttacggcgtcatcatcggctgttctgcaacacatcgtcactcggatccgcaacaagttcgcaatgaaagatcttggccccgtccacttcttcctcggcatccaagttaagtgctcgacgaccggcttcttcctctcgcaagaacagtacgccgacgacatccttgatcgcgcgggcatgagtgactgcaagcatgcgaccacgccggtggacacgaaggcgaagcttccaagcgac

SEQ ID NO: 173076 - DNA, 656 bp, Zea Mays
tgggcatctctctgcgttgatggacccactggtcagccagtcaccgcgcgtgtagctcttccgtgactgccaccgacacatggaccccgttggtcagatcggtcttccccatctcacggacgttctgttggagcggctccgtttggtgcggcctgagaatcgggtgatggagtccgtgcgccttgggatagagtcatggcttctcgggccataaatacgatgcgtcgaggttgacttcttcccttactcaccataccgcaacaaccgaaaccattaagagggtgcaccgtcgagtcgggcggaacgagggtgtgtgtgttcgtgtattcgcgcgctcaaaggtgtgggtctcggtcagtggggctcagtggggagcgcaagtgcaaccgcccgtttgtagcgtagtggcgggcatcggcagcgtccagggtgttgggaatttctcgctggagcccaaccaatctcaccaatccactactcgtcgtggttgggttcgtccgcggtgaattggaaggtacgtgcccgttcgtagcattcgccagacgatgggcatcgtgtagtgtcctacgagttagtgttttgcgtgtggtaccgagaaattgggagatccgatcatggcgccaccgcgctggacggcggtgttgccggtaagcctg

SEQ ID NO: 173077 - DNA, 1111 bp, Zea Mays
atgcagtacgatgccaggcatatgatataccgagtgagttcagtgccttttccaatcattgaggcacatgataatttgccacccttgagcagtagtcactggcaatgggccagggtggcaaaacctttccactcaatcgagtgccaaattgttataggacaaacatacaatggtaagcatgcaataactgaaatgaatcaagtttatctttataccacagtagattttttgcattgtgaaaagaatgctcgcattctaaatccattatcacaggtaattccattatattataggaactgagcctagctcagttgattgagaatgtggatgcacccgtaagccacccaagttcgattgtgcctatttctccttaataagaagtcacctagttcctaccaggttggtcaatgtttttttggttgccattacagtatttcaaacacagttggcctaggaaataagagattaggaagaataaattccactgaaagggtatgttgatgaacagcttttagagacaataattctacctttgcaaaatgagcatgcatcaaacaggcctgcaaatatgtagctttccttgcaagacggaagaaggaaataaagttccccattctgcatgctctgaatgtataggaaatgtaggcattagatgaaagctagtacaaatatgataagcacaaaataatgcttaatggtatgactaccttgcaacttctcttgcaaacaagatctctggactgcctctaatttcacgagacatcttagcaagatccagagataactcagcaggttcaacctaattcagatgtatctatgagtcagcaaatatcagaacgcaaaagaccagatctgctcaagttgcctcaccttgtaaccaggatgtttgtctaacttgagcagtgcataataaccccgaaactccttttctgttgagaagagaacaccttctctcctatggtcatcatacatttgaaatagctcaactgatgttttattcatctgctcaatgttgaggtgtgcatcaaaaccctcggaaaaaccttctcctttgttgtattcacataattcatgcatcgcaattatgtggagccttatctgctcaacaaaa

SEQ ID NO: 173078 - DNA, 325 bp, Zea Mays
tgagcattgcatctattgcttcttgagaggaactagcaacaatgatgtcatctacataaacaagcataaaaatagtgatgcctcccttgttgtaaaagaacagagaagtatcagatttggaagcctgaaaacccagtttcaccaacttttcactgagtcttgaataccaagcccttggtgcttgtttgaatccataaatggccttatcgagtttacaaacatgatttggtctcaacttatcttcaaatctcggcgtctgtttcatgtaaacatcctcctctagaatgccatgaaggaacacattctgtacatctagctgtctcaa

SEQ ID NO: 173079 - DNA, 398 bp, Zea Mays
caaaaacagcgtgtgcagcccaaaacagcaattattaaaattcagcttctatttacttcaaaaattaccgcgttctagagactcaacttattctaacttatagcaaggcacacttaagcatagtcacatgatagatgacgtgacggctacgtagtcatgccatcacttcaccccacaatcccaagtaacaaaataactctaaccgaacttggcatttagccgatcgattcctaacccattttttataccacgactacacgacatgcctaatacgttaaatgacccattcacaattcacctacatctttaccaaaacattcccacatcgcttgaaactcaacccaagcttcactgcacaattttaggacatctactttattcatgaatatcatcgtcac

SEQ ID NO: 173080 - DNA, 528 bp, Zea Mays
tccacgtgtcggcggtccatgggccttcgcgtagatttcgcccagcagagtacgtgtatcgagcccacgaatccacccacgagcacacagttattcagctcacctcacccgtaatgcacgcggcggccgaaccctagcattatcgccgtcgtctgcttgttcttctccaccgcggcggccgaaccctagagattctacccgctgtcgccttcagcgtctccaacgcagagaccgaccgccatcgcctttagcttctccaccgcatagatcgagcccccgtcgccttggtcttcttcaccggagagggacccggaatcgcggagaccgagccgccgcccccttgttcttctccaccgtagagaccgagccgcattcgctccaccgcggcggccgaacccttgagattctacccgccgtcgccttcaccgtctccaacgcagagtccgacccgccgtcaacttcagcgtctcctacgcattgaccgagccgccgtcgccttggtcttcttcactgcagagggacccgaaa

SEQ ID NO: 173081 - DNA, 404 bp, Zea Mays
gtacaattagacaatgataggggttgggccctcttcatatggatttcacgatttgatctcgttatagaaaaccaactaatcctgtgaggggctactattggagagaagtcttgccaaaggtcctcaaatagcaaaatttattgtttttgatccgtttcacgcaagtcaattggcgctcaagtgcttgcttcggactaacgaaggcggaaacgaagcttcgtcaatctggacatgcttcagcaagagtaaaatcaagcagtgcttcatccagcacgagtggtgggaggacgaaggaattcatgagaggtgtacacgacaagtttcacgggcgaaaagtcataaatacccttcgttggtcccatagattctatgtatgagggtttgtgtcattgatgtaatttcat

SEQ ID NO: 173082 - DNA, 925 bp, Zea Mays
tatagaacgtgtataattttgttatgatgatttttaataatatttagctattgccaaaatattagcattttcttgctgatgatatctctatattttagctgttggaaactgttataaaaaatgtgggcatcttaaatgtgcaaaggtgtctcgcgtgccgtaactgtaaaccagccgcgcccttttcctccccacgtcgtcgccgctaaagcgtccgccccaccatgccctcttcctccttgcgccgccaccggtagcaccgctccccaccctgccccgataacaatgagtggggctaggcacgctaaaagaatccaagggttttactaagcccatggctacgccgaccctcaaattagttgcattttcttaactatgcaaagtgatattagtttcgtttctgatatcttggtactattagataaggttatttataagtagttgaacttctgtagcctgtgtcgtgtggtacatatgttgtacatatgttcagctattcagatgtgagttttcttgatttacagtacctccttttttcttagtatatctattttggaagtactacatctaggtttttttcctgtttttgccttgttcaaaatggagtgaacacagccacctttgttttatctgtcacctcacaatctttatggaattctgatttctaatccagtgaggtagaatgtttttctgctcaattcaattggtacgttagctatgagttctagacggatggggtatgtgcatgtttcttgcctaatctgggattacagttcatgtttcttgcttaatctgggagtcacattacattgtcctttccaattttttctttctaaataggcatagtttccaagctaggtttcatataactttccatctgtcttgagttattcttgtataagatgcatcagggagttgttgtcca

SEQ ID NO: 173083 - DNA, 456 bp, Zea Mays
ctggcacgagacgtgcggtgcggtgcggtgcggatcgccattgctttcggggcagctgcagtttcggtagatcgacagggaggaaaatgaccgcccaaccttttcctaattcctatttccgccatctcgccgcgggctcctcccgttgctgcgagagggatggggaggagagatcaggtccgggaagagcatgttcatgctgtgctgagccgttgcattcgttgccggttttgaagccgcgaaaacgacgggcggttgtggtggagtccgtccatggggagcaaaacgtgcgggaaaccatccttcagtgaatgggttcggtgcgcctgtgcggctacgaccgccatcacaattaatcaacgccaagttgacagcagggcgagaggacacgctggagtgctccttggcaaccactgcagccagcgctctccagcctgccctggaattccagagcca

SEQ ID NO: 173084 - DNA, 1647 bp, Zea Mays
gttatatttcatagtataaaagtaaataaagaaaactgtatatagtatttgtgttatatgatccatgtattccaacatagtcccaaagtaaatatgtagctaaaataacagctaagtaccatcgctattaacagtagtacagtactttagcatttaacagaacagaactatgttgtcttaaatttatagcatcagattcgacaagttcagatcatgtgaacatatttcattccacctatgattctaaaagtatctaataagttacaaaaataataacatttctaaagcttatagaatctatgtaaaacttccagaaatttggttgcatatcagcgaaggaaccttcccaatttgccctctattaagatgttatgccaacactgatgtagttaaaggaagtaagaatcaagaaatagcttgaaagaagatggcatccaggtgaaagaatttggacttacaggaccagggccctccgtagatggaccaccaacaaatgccattatcctagcacctgatccaggaacacaaaccccaaggagattggctgcaacacttaaggcagctccagtgcacctagatgcacgctgatcagctggaacaggccaagggtccttttgtatttcttctataacctacatacaatgaaattatatgatagattattaatattcaacacaaggctatgctatatgaaatagacagtgatatctcctattttaattgtaattaatgtaattggcccttaactgagttcaatacaaactcgcattcagaagcaggcagcagaaatctagagatgctctcagatgaaaggccatctctggtaccagcaatcacgcctgtggtaggcattttcttccccgcaaaaaagcacatttgttccaatatttgctccttggtgacctcctttgttcctttgaatacatatgattttggcaataagccaaaacccaattcatgaacctgaacatgcagatggtacatgctactaaactaaccaatttcatatcaaaaagaacaattatatggagcattagaaagcaaacaatgggcttttacctgcacatacgtcccgaacgtaatgaatccaacaagagaattatctggcaatagctcaacagcttgtgccagtgcagacttcaaataaccaatttcttcttcaatcatgcaagtatctacaacaaaaatgaaaaccggtggaactataggaccagtttcagttgaagatatgtactcgacggtggtgtactgaggaaagagttccgcagggagattattttctgagatcgaagagtagtgttgagggaactggttgcgttgaaagcagaatgaacagacccaaatcttagcaacatagtcaacaatggagaaagggttgaggatggaacgacacatgcgacagcgaagaggtgaatatggaagaacagggatatcagaaattggtttcaaaggtgtgtagatagcggaaacaggaatcacacagttcacagtctcctgttttgtgcctggaataacattccagggcatccttatcccatcttgtagctctaggtcaaggaactcagacatcttcaatacagcagccttgtacaatagttgtaagaggcttccacaagtcagacaaagaaatctggcctgcaaataaac

SEQ ID NO: 173085 - DNA, 797 bp, Zea Mays
gcgactttcacttagttttttgaggctattaatatcttgtaaaactagcatgaacaaaaactgtcgagtatgtcattctatagagactaattatgagatcaaaatcttatcccatctaatccaacgaaaagggctaattgtattgcctaaatctcatccaaaataagtaaaaacatccatggatgctcacctagggtttccacttgaaaacaatagggcaacgacgatggcgacgacacctacaatgatccccgttcggttcccttccccttagtgacgaacattgctaaagcctcgtcgattgccacaaaactacaccacacacgacaaaaccaccatgaacactgaggtaactccatctagtgagaaaaaacagagagagggaaggaaatccaaccaatttttgaagagaaacgacgacgggcaacagtgtgccctaatctcccttcattattcgcccttgttcttctcttcccttaaggcattaaagaaagagggcggtgaccgtagaaatgggatttgatgctttagggttgggggtattatagctcatggagttgtgtaccgtagcacacaattactgtagcactttgggtgaaatctcgtactaccataactttgtgatccaatatccaaatgagtcaagtaagtagtcaaatggaaaggattcaacgagatctacgcaactgcgatctctgatccttcatccaaggaacgattacaaatgttaatttttgggtcaacttcgagcatttaagaaaaaatagtttgtttttatttgggatattacaaaaatg

SEQ ID NO: 173086 - DNA, 1141 bp, Zea Mays
acaacaccgcgtaggccatttcgaccccaatgggagctgaagcctgagcccgaccactggggcctcgagccttcagtcatcgtatccttcgagcatcggtgccacaatgatacagggagaccactaatattgcaaaatattcgagagagtcaaaccccaacctctagctggggattaccggctagcatgccatgcaggaggagcggatcatgacaacttcataatccgtaatctcccctgtacctggtagactcgacgagagcatggttggaaaacttgaggcctgactgcattcagaactgagtggacctcaaagagatttttgtggggaacttccaaggcatgtacattcgccctaacaacccgtgggacctaaagaaccatcaacaaaaaggccgatgagaccttaagggactacatacaacgcttctcacgataatgcaacaaactagcaaatcttgccgacgccgatgtcatcaacgtgttcattttaggaaccacgagcgaaactctagtgcataagctagggcgcaaaagctcacaaaccatgaaggagctcccggacatcgcaagcactcacgcgttaggagaagatgcagtgggagtgatttttagtcatcgcaagcagaaggccaagcgtgacaaggagcccgataggggccttggtggcggcccaataagagaaagaaaaaaaggtggcggcacgacgaagagctagtggcgacgatgggttagaagagaaagagaccgccgatcaaggaagctaccgaccattttcgagaagtcgctcgaagccctgtgtccaaaccaccactacctggtccaacactcctaaaaggactacgggttgctgagaaagttcctaggtggaggaacatcgcccgagaagggagcggaacctaggcagggcggcgagcgagagaaggcaggagtcgccttcctagacgagaccagatgcctgctgatcttcggagggtcggattactacgcgctaagaagacatcagaagtcagaacaacgtgaaatattctaggctcaataaacatcttcagtttcctcgactggtctaaccacgccatcacctacgatctcgccgatcacctagagcatatcccccgacccgaacgatacccgctcattg

SEQ ID NO: 173087 - DNA, 320 bp, Zea Mays
ggccactatttcagaagagtccagggtctaattcataaatttcaggaccctgctgcaattattttctaacaccagaggatggcgggttcatttgtgaaaagggcaggggctcatgtgcaaatcataacaaccgaaggggtatcggctattctgggacgtaagatctaaaacggacggccatgattaaatctgtcactctatgaaccgttacgccactgagaccgcaggatctgaatccaagggtcggaactcggatctaatcccacccctccatagctaatccaacggtttggagtgctccaaccgaagcggtacaattc

SEQ ID NO: 173088 - DNA, 742 bp, Zea Mays
gaagagcggggcgtcaagaaagagacgggtcagccgacgtcttcggtcgagagccaggacgctggaaagggggcaaggtcagacagcgtctagcgtcgggaaggaggcggcggtgtcaggaacagggcatcagggtgtattggctccggtggcgtcaaaaaaaatggacccgatgaatagatgtgaggactagaccaaagatgagggaagttgagagaagtgcacatggcaattttagcctatccaaaccttcatgtttttatgtactttgcagtaagtaaacatttggtataagaagttataaaaaaaattgaggagggaccaatcatcgtgtatgaacagatgattggttgtctacgggagcaaaaggctggcatatacgcgctgctgcaactaaggcacctttttacctgctcgcctgcatgcgtggggaaatggagaccagacatcactagccatccatgccaatgcgagtcaaatcccttgctacctgtcactaagctccagacgctactgttaccctactcgccatatttcatgtcggtcgcgtgttgaccatgtgtgagctgataattggttgcctacgggagcacagggctggcctatacacgctgctgcaactaaggcatcttttttacttgctctctttcatgcgtggggaaatggagatcgtacatcgctagccatccatgctaacgcgagcccaccacgatggagcatgcgaaccaatcacgaattagac

SEQ ID NO: 173089 - DNA, 725 bp, Zea Mays
gaggattcttctgacgccgctcctgctgaaacattggtggtggtgcccatccctgaggctgacaaagctttggacgctcagaagtctgccaatgttcgtccaaaacgttctcgtcgagctgttcaagcctcttttcctgctgaaagggagaaaaagaagaagatacgtcttcgtcgggtgtctagcttggatcagggtgccggcccttctgctcctgttgctgaggaagtgccagtgcctgaatttactgaagctgatcccaatgggtgtgatccgtctgacgctgatcccaatgggtgtgttgtccgtgttgttgatgaggatgatgaagaagagggcgagatccctctgattcggaagaacagccgtcgttacatagctagtggggaaagtagttgtgttccttctcctgccttgtctgccctcattggtctgcaagaattatctctggcaaactttgatcaaactcttgaggacatggttccagaagatctgttatcagagccggcagatggtggcgcgatggatgtttgtgttgatgtgctcgacgccgggttggggtcctcccgggcagcgtcccgcgcctcatcgaacttggagcgcggtcttgagggtcaggaagctggtttggattgccctgctcccatggaagtgactgagggaccttcagccttagaggtggctgctgcagagaactcggccctcaaggatggtgctggcgctta

SEQ ID NO: 173090 - DNA, 520 bp, Zea Mays
gtccggtgattcaacggcggcggcacctagagcggcggaagcacaccacggcgaggaattcccggtgtaccacgaccccaaaacttatagctaactggcggaacgcaaggaggagttcgatgtgggcgcagtggagtgttcataccatggattggggtagcagacgatgctggccacgtgccgtgggcagccccgcgatcttcaacgcacgacagagagctccggtccgcccaactccgcacgaacagggaagttccaggcgctcagcgcacggtccagtgtgatcttgagaactcctgggcgcggtttcgtgcaccgaaccatgccgagtcctccgatcaacccccggcttgctcccgtgaagtcccggcggtgggcaagcaacccacggatgcaccccagccccccgcgagtggtaaacggctgcaccaccggccatctactatactcccagcgccacatcggtgaggtatcgcctgcgttaggccagttcacggagccacacgacgacgtatgcgct

SEQ ID NO: 173091 - DNA, 538 bp, Zea Mays
cgaaggcatcactagccaaatcaggtgagccaaaggccattaatattgaagaggcagaggtcgaaaaaacaaaaatattagaagttataagcccttcggcagaggtgacaatgccgaaggcgcaaaaggatcttacaacgacccccaagaggaaaaggatggtcaacgtactagatgtgctggagaaaataaagacttcaagctctactctagggaaaacagccgaagcttcaaaaacgcgaattgaaacaaaacagactgaagccgaagctgcacaaagtcatgccgaggccgaagctgggccttcagagcccgccaacgagaaatccttggaaatcggagaagaagaagcagaaaaagaatctacagaacaaattctgtctgaaaaaactgccattcctattcccaaagcatcttccgaagctcttgattatattgtacgacatgcttcgggaaaaaggttatctgcagaagaaaagcgagaagctcaatattatgcccagagactgaaatatccaaaaggggcgttgatattcaa

SEQ ID NO: 173092 - DNA, 778 bp, Zea Mays
gctccatctacggtgttgttcgttcctgttgttcggattaggagcctcattgacaaccatggaacctgctcatcacgtcttcaagaggaatcacggtcgtgagcgatcggaatcgctcgctggaattaaggagcgccatggttccgccctgcaccatggccgcacccactactgcatcaagaccccgataggaagccctggacccatttactccatgctactgcatcgcgtagcaacgctttgcactcgtttttgttcacaggatcacttggctgggtgttcgtcggggtagagccgccgtgggagatcactgcgccgccatgggatcgggcgtgggggtgagacaatcacgtggccgctgatccggtcatggatggccacgattagaagtaacataccagttcggctaagcgcgcggtggccgtggatccgggtatggacggttgggattagaatagggaggatcacgtcgtagccatccaactctgatcgggcgggtaagattagatcacatcattttaaaatttgaaccttcagatcatgatcggatgaccacatgtgcaataccggttcgtgtagaaggttggcctaatccgcgccactggtttatgatctgatggtgcagatcaaagcatacccctatggtcgcgctgatatgcaaaagaaccctcggacctctatgaaatcaacccgcagtctgtatgtagtgttagaatattaaacttaggtccttgattttagcagtttagtccctgatatttaaataaatgcaaaccgc

SEQ ID NO: 173093 - DNA, 771 bp, Zea Mays
tgtctcaccttttgaagcaaacacaaatcaaaccctgtgacttgtaccatttcaccatatatgagttcaaatcatggcttcaagtcaccttactgatgcatcaacatattataactcttcatagctgattagttaattgacttagtacaagtactctcttcttcaccttaaccatggtacctcgatccacaagccgtcacttggccttcaccttcgcttagttcctcgaagccctttccttgctatcttcaccctatcaagccattcttgagtcacatcatattgagcatccattgagagaatcatttcaaaagtctttttacacttagttacataagactaaaggtaagctttaatgcacaatttctccccctttgtcatacatatccaaaaaggatacaaagaatataaatggtagaaattatgattaagcaagaattgaacacactatcatgaaaagggtccttagatgacacaaaagtaacgtagaagtgacatgaagtgatgtacctttgcgtttaacttttcaaggggtttccagacttgtgttggatttataattcatttgtaagctctcattggcatagttgtgacataggtccaagatatcaaatgaatgttgtcagactaactgaaagctgaatcttgatacctgtagtctagatgtcacctagcattttcttatcataacaagaggcaacatgaaaattgcacaagtatggattatacaactagtgatcatgtacgaaaagtaacaattgaaaaacacca

SEQ ID NO: 173094 - DNA, 448 bp, Zea Mays
gaatttccgagtcccatcgaacacatgcgtcatgtgtgccaatcaaaaccatgccgtcggatcggagcacaattttaggcaaatcaaacacgcctactccggcgtcctacacctcgagatcacatgcctagcatgtagtagtagcctagtaggatccgttacgcactcaagaaccacatgctcgttgaatcgcgtaatcatttccatgcagaggagcgacatggtcaggtacctgaactgtgccaggttcaccgggttagccatggtgccgaactcttgaacgcattttgaacgaaatctgaattggaccaaatgtgtttttttttccttcgcttttcgctgtattatgggctcgtcacctcgttcacggctgctgaatctcgttgcatgtcaacacggtacaacataaaaggctacctaacatacctgtactctgcttctggtaata

SEQ ID NO: 173095 - DNA, 565 bp, Zea Mays
cttgaacaggacccaggcgggggtctggtgccgacacgtgtccagacctagtctggtgggttccggacctgtccgcatacactcctgccccccgctcaggcggagacccgttgcagtcacatggcatactgcgcgcggcttaagacaatgggcggaacctagcatgacgcctctgggttacgtgcgcctcttcattcattacggataacacgtgcgcctctccattccactgacaggtggcatgcacagtccatgatacgcgggctgtgcttttattcaccattacacgtacgtttcggctatcaatgctgcatggactgcggtcatcaagactcccggtgattgctcagccgttactagcattagttattcacataatgtattctttccattatgttcctgggaccacatatcggggcttagcattcttgtatgtgccttcccttagactataaaatggaaggcacacaacgttacaaggggggctctcaagcacaaagacacacgctcatactcatactaaatacaacatacacatagtggaggtaaggtattacgctccggc

SEQ ID NO: 173096 - DNA, 603 bp, Zea Mays
ccctctgccggcgaagcaggggacgctgtctggccatatcggcggctacatcgggcccgacccggagaaggcccctggcctcgagagcctgcgcatctccgaagccacggacgccggcaaagtccacgccttcgctgatctcgtttggcccgacgatgggaacgccgctttctggtacgcaaacgcgggttctgatgcgtggatgctgccttgtgtcgaggatacactctacgcttaatcctgctatgctgatcggtgtttgcagtcagacgataggagcgtttgccaagggcatgctggagctggaccacgcggtgcagaagatggtgctggagagcctgggcgtccggaaggagcgcgtcgactcgcacctcgcgtcgctcgtctacgacgtccggctgtcccgctacggggccctggcgcctgtgaccgccggcgacgacgacgaagcgacgacgtacatggtcgcgcacagggactgcagcatggtgaccaccatcacgcagcacgaggtggagggtctgcaggtgcgtggcagggacggcgcctggatcaccgtggcccctgagcccggcacgttcgctgttgtcgccggcgagatgt

SEQ ID NO: 173097 - DNA, 687 bp, Zea Mays
ctgctactgacaatgctatttttgtggcggcttcgaccgtggctgctgatgatgattcatttggctctgtgtctaagtgttttgagtctgatgattctgggagttcgattgcatggtcggaggagtctttggatgaggacttggattatttcacagcattggatgtggctgtggcggagccctcgccgcgtgcggagggttccgaggagcccccgggcgcgagtactgggtataggcggtgaagggcgatggcaaaacggagggtgagtggattgtcgcgaagtggtgggcgtcaatgtggtgagatggagagtgggcgtcttcgtgtggatgggactggtaagcgagaattgttgttctcgccgattggggtgagtgtgggtgagggagagctgcgaaatctttttgagggtgagaaactgaggataatgttgttcaactatagggagatgggtatcatcccgaaggttgagccaatgtaatatgggatgccctcgctgtgcatgtgtgaccataatttgtatgataaggctgcgcgtcttcgttgatccgaccacgcttgtaggcgacttctgcacggcgaggcttttggaaaggcttcgattttgcgcccttattgtgctagtctggctgcacccttaggcgacttttgcgtggatagtcttttgaaaaagacttcgatttgcg

SEQ ID NO: 173098 - DNA, 740 bp, Zea Mays
atcattctagaggctgctagataaagctctcgctattgaacacaagcgtgttcaaatgggagacttgaagaggaaggccattgcacaaggatagggtagcagcagtgttcgtcctcgctacgttccaccctagtgtaccccagctcgtctaggaggaggaccacgtctagctcaatatgctccaaaggggacaccacagacgccccacactcgtcaggctgcccccactggcaccctagcgaggcatataggacataagaccggccctacatgcttcaagtacagtcaggttgggcattatgcaaatgcttgtccggtggggaattctagtgcaccatctcagaacaagcaacagactcctggcaagggattctctattgctagggttaatcaagtcagcgctgaggctactactgaaggagctgacatcgcacttggtatgttttatattaatgcaattcctgcaacaatattatttgattctagtgctacacattcattcatgtctgctcgatatgccaacacaaatgagctaccactgaaaaatatgaaaacaccaatgttagtaattacacctaaagggcctgttgaggcaaattatatgacacatagattgaccttgacaattatgggaagagaattctggtctacacccatagtactagaagaaagcaatatagatctgatactcgggatgtcctggttaaggaaagcaaaggcagttatacactatgctaagg

SEQ ID NO: 173099 - DNA, 412 bp, Zea Mays
gtgaaaataggtagtagcctgaaaaaggaaagaaccataaatcgatggtttataagcaaaatttggagaaacaatacaaacacaaggtgtctcacaactgatttgataaataaaacaaatagttcatcgtccatgactctaatccaaacatgttgttcgtttaatccataactcaaaacagtttcataaaaaaataagcatatatgcagagacataactgatgatcatttgactgatgatgattagcaagcaagcaaatggcccaagacacgacaacctactagtatacttattaggccaccattgggctatccatggacacaacaaacgacaaagccaaggcaaccgacgatggactgatagtgcccaggctctaattgtcgcctggctccgccactgatagtcaggaagg

SEQ ID NO: 173100 - DNA, 957 bp, Zea Mays
ggcaggggctgaggtagggcgacccgctatcgcccctgccttttgtcctagcaatggagcctctgcataaaatgctcaacctagcaactcaagttggatttctgtcaccaatctccagtagcggatcgcaacgtcgcgctcaatgtacatagatgacattgtcattttcatcaaaccaatcaaaggcaagttagactccctgacattcatttcacagggatttggacatgcatccgttttacaaacaaatttgccaaaatggtcctttgttacaataagatgtgatcatatgaaactcaatgaaaccatgtagagcccatggctagagctttttccccagccagatacctcaacatcccactgacagtttctcgattgagaaagattgatttccagtatctgttggacaaggtgcaaaacaggatggcagctagaaagggcacaacatcacccacgctagaagacttatccttacaaaggcggtgcttttctctcagctgacgcacacactttccgtcctcaacgcccctaagtgtgtgctacaataccttgataagatcaggaagaggttcctttgggcaggaggagaaaacctaatggagggaaatgcgaagtcaactggccaatggtgacacgtccaataaacctcgatagcctaggaatgcttgattcagaaagatttgctagagcgttgtgattacgttggttgtggctagaatgggctaaaccagacgctccgtgggatgggcttaaacctcccctataccaagactgaccgacttctctttgcgacaacaacaagaataatgatcaatgatggagcaaaaacttcttttgggcataatacctgggcacatggccgacgtcgaagagacatagcacccaaagtatttgtggcatcgggcaaacacaatttgaaaatcaaggaagcaatagctcatcatggatgggtgagag

SEQ ID NO: 173101 - DNA, 803 bp, Zea Mays
cttttgcacttttgtgttcatcaactgacaagtgataagagaactcatggtattatgttgtggcctgaacctctctaaattgtccgtgtgctggtttttggtggtgtggtgtctaggttcaacctatcacttacctgctacacctccgatccactctctctaatgagtttatattttatttttgtgtacttgtttacatactccggtgtctaaggataattagcgggaatgtaggtttccaagagcaccgagaaagaaacagcggagtttgaaaggcgggcgggcagtgggcagggagtacgagagatttgtctttggggacagaggccactgggctgggtataccccgtatgcatgtgcatagccataggggggcaaaggcaaggaatgatggcctggaaatgggcatcagtttgaggcatggcgtcgacgcttggttggctgcagcaaccgccttttgaggcggcggcacagtcagaccagagtgacgacccccatgcagcaatcatgcatgcctccctcccagtcccatagaatagaagatcattattgttgttattacaagtttctatgatatcttgtctaggcgctcagctcgtaccgtacgtggggtttaggaggacgagaggggtgattatatatcttagtaggatttgcattgattggggacatgagcggcacggtcttccatcgacgatgatgcacgcgtcgttggaacagctatagtagtaatactcgtgtgcgtggccgtacgtggttgaccggtggtggggtccacgctactcatcctgtgctgtgcccgg

SEQ ID NO: 173102 - DNA, 692 bp, Zea Mays
ccaaaatctaggggttattttgtaaagctggctggctgaaggggtatcgttgtgctggggccgctagatcaattatggacggtctggattaggccgcgacttttatgaaaggggcatgttgaacccaccgtgggatcgagatcggatgcccacaattaactcaaagcccaaacgaatcggtacacaatcccgatcgtacgatccgagatctacggttggcaacgcgcccaactagcttcaatccgagccacccataattgattgaatggccagggggcctccttctttccccagacagggaccacggcggagctcgcccaatacggcggcgctgttgtcggggtaggtgggccagcgacatggtcttcactcctacggcactatccggtcctacacgaagaggagggcaaggcggacacagaggaggacttcttaccgggcatggtggtggctgcagtcctgcccacggcttgaggcgggtccacggcggggctaagcgacgacgagcaattgccgatcctccggtcggccgagcgcttggcagcccaacggttcacgtagagggttcacaggcgcacacccctgaacacgcagtggatgccaacaagcatggaggcgcaggatgacggtggcggatctcgtgcttctgctggcgacgctacacggccaggtgcctttcacttaccttgcga

SEQ ID NO: 173103 - DNA, 974 bp, Zea Mays
tcggttctctacggaactaagcacgttgaatttgattcatgaaaggaaggcgcatgaagttgggataatatagaagatcacggtcgcacctcaagaacggaagatttggcccgcaacacgacgaatccaagcgggcaagtccggatctgaggtagccgtcgaagctcggagaaggaaacgaaggatgcggtggcgaagaacctcggcggaagcagatttgtggccgcttcatcttcggtcgcgaatgggattgtctgttcacgaactcgacttcgtcttcctcgcagccgaccgggaccggctccgattcctccttccgccggcagatctgccgccgcgttgcgggaacgcggcctccttccacagacgcgtcgagagggagagaagtggagtgcgaacattcttgggtgtggcgcgggcggcgtcttccgcgagaagcaggtgaggggagagaacagtgaacctcttcacctggcgtgagagagaaggggagcgcgtcagaaaggagacggtagcacgcgccgttgctgaaagaagggtgctactatagctcctaaacaatgaacagtgttaggggaggggaggggaagggttgcgcactgcagatagtctgaagagggccgtggaggaggactacaggacggcttgcttcgacgacccgtcgaccaacagcagcctggatatccggctggtccagagcctggaccagatcaggaacccggccgtcacgtgcagggctgccaggtacgggagctgctgaaccggtgcacccgtagcgctatttttcttcttcgtacagaaattcagtcccagggcgatggcgtggagagagagagataaaggaataaaatttgtttgttacatataccgtgtggtgtggcccgtgccgatggtctgtctgaatctgaactcacgcctgccgtccaacgggcctccaacaaacttttattattgcgcgcacgcacgcacccgcc

SEQ ID NO: 173104 - DNA, 544 bp, Zea Mays
gggaaattgaggcgttcttagtgatttagggtgatctagctcaatcaaacgggtctacgagcaacgggagacttaagaacggctagaacatcaagcggagaagcttgaactaacttgtagggggctggccacgccgagatgtcccacggcggcgcggagaacccaattgggggaaacttgaaattcgcgagctacattggctaatcggaggcaagggctagtgcactgggcgtgtaacaatttgacggagctcactggggcatcaatttatagagtccatgaatggtggctctgaatttaagaagagaagcagacagccgaggagaggggatgagtcaccgcggcgatctaccgtggcattcactgaggcactgtcactggcgatggataggctacctactatggactattgcgacgtggtaacaccacagattacatggcgcacgagcggcaagcggccaacaccagcgaggatcattttggtcgaccgtagagcaagtgggtacggcggccagcacccgacctcatccgcggtaagatcttt

SEQ ID NO: 173105 - DNA, 471 bp, Zea Mays
tgccaaaggacactgtcaccgagtctggcgaaggtgacctggttcgactgaagtatacattcagatatggagataaatttgatgaaccaaatgacgactagctgaaatgtatcgaagttacaagtgatgaattgcttgggccatattccaaagcagaagataatgcattatccacatccttcgggggccaaggaaaaaagagattgaatagagtttttgatgccattggttttgtttaccccgattactgctacccgctgcgaggacggggaaagaagaggaaagctgctgcttcagccaaaactgttgcttcggccactccagatgaggccacgcctacgagcaaaaagttgaaagtccttacccaccgaccacgctatattgagccggtcgtggtgcctgagtttggcggggagacttcttcagctgctgaaccaaaggagcccattcctcctacgcagaaggctgaag

SEQ ID NO: 173106 - DNA, 481 bp, Zea Mays
cgcacatatgaggcgcacccgggtttgcccttaaatccgggtgtgacaggagttcaagaagctgaaacaaccgctgaaagacatgaagaccccactctatctgagttgctaggagaggtatacgaagttgtccgcttcactagcttctccaattgaaggcaacgcatcattgggctgacaagagcttcagagaattgctagaaccacttatggatatgcttcacaagggaaatgggatatccaatactacatatgaggccaagaagatcgtttgtcaacattcggtttgcactgagcatagatggcatgaaacaatctggtaacatgagtagctcacatagtgtgtggcatgtgttgtcaactatccacaactttccaccctggttgtgtaataagaggaggtacatgatgatgtcagttttgatctctggtccgcatcaaccaggtgttaacatcgacgtgtttcttaggccgcttattg

SEQ ID NO: 173107 - DNA, 429 bp, Zea Mays
cgaaagctcaaactcagtggactcatgaccatggtcatcagcttctccctgtttttctcatcagccttcatataaaaccattcatttttctagccggttggccactttgtgcggtagctgaggactggtgcctttgtatcctttcgatacgcaaaattataacaaccaaaattttcgtgaagaccatctgccctggtcttcttctgatagtgcagcccatgcacttggtagaaagcttcagcatctgggctcatcccttggcttcgaaggcccagataaagacgctgagcctaacaatagtgttaggagtcagctgatgaagatatatttcgaagttctttagaactacccctatcatctcattcaggggaaatcgcagccccgctctgaagaagctcttgaaaaccacaacttcatccttcttcggct

SEQ ID NO: 173108 - DNA, 555 bp, Zea Mays
cgagcaaaaaagcattcagatcaagtatgcttcggtagcacacccaagagccaacgggcaggttgaacgagctaacgggatgatattggaggcactcaggaaaaaggtcttcgataaaaatgaaaagtttgcaggaaagtggataagggaatcgccctacgtcgtttggagcctaagaacccaacctagccgagctctgcatggaaacactccattcttcatggtctatgggtcagaggcagtattacccgctgatctcaagtttggggtgccaaggttggtcttcgaaagcatagcagaagccgaagctactaggctggaagacattgatgtactcgaagaagaacggctgaacgcagtaattcaatcagcacgatacgagcagactctgagacgctatcacgacaaggccgtgcgacgacgattcttttcagtgggagatctcgtccttcgccgaattctaacgggggagggacggcacaagttgtcacccttatgggaaggaccattcatagtagcagaagtcactcggccgggatcatatcgtctcactca

SEQ ID NO: 173109 - DNA, 532 bp, Zea Mays
ccttagcttgatcgcaaccagccttctccaagatggacgtggccccataggaaccaacaaaggcacaaaaatctcgtcggtcactaagaacttctttgaaagcttcaacttcaccatttatccattgaatgatatcatcaggatttccatgaataaatctatgctcagaggaataggctccaacctttgcaaagctattctttaagttcttagcgcattccaaggatatttcacaacatttttctttggcggcacaaagctcatcggcattcttttgcgctcttgatctttcgatttcgcatatctcatgcttcaccacttcaacttcaaacttttaagtttcttcaacaaccttcatctttagttcttgtacttcggcttcatgagcttcggctttagaggaaagcctagcctcgctagatttcaatatatccaccaaagagagtaggatcttatccttctcaagagcttcgtttctcaatgttataacttctgaacgaaggttcccaagagctattcagcagctctcatc

SEQ ID NO: 173110 - DNA, 637 bp, Zea Mays
caaagacatggcgtcggcatggcacgagcagcagaaaacgacgcagaacagtggagcggcagtatagggcagtcgacgagcgcgagcagagaaacaattggacgacggcgcaacagcatggcacgagagcgagtgtggcgcatgagaacgagcgagcaggagcaaggacgaagggctcggtgtgaactatggctgtgaatttataggccgtgtggggagagcaagctagggaaggggaagagcaaggccagcagctggcgtcaccattaatggcgcagggagaaaaacagttgcgagtggagagaagatacactgatggcggggagaagggtcagacggctgccccatgatatgatggctcaggcgtggggagatgaaggcgaggcgacgttcgtgcttgaaacggtcgacggtcgacatcaccattgatggcgtagtgagaaaaatgccagcgctaatggagggaaggagaggggtcgcgacggtttacagttggcagcagagtggtgcgtacgttcctagcagcacgaactggaaacagaagacaaattagggaggagattagaggactggtgggtcccacatgtaagggagagaagagacaagggagagtgggatcacgtggggaggggctgag

SEQ ID NO: 173111 - DNA, 353 bp, Zea Mays
atggggctcggccttatgcgacctggctaccgccttggggaagaaggtcttgtggccgttgatctggccagggacggttacgattagactgggcgcttacctcttcgttggttgagtatgtatcgttgatctatgatctaacggttgtgatgcgcgcggggttaggcagccgagccaactttacataagagccctcgagatttaaggtaataatcccgccgtccatttttcagtataaagaaagtaaaattaaatgaagactttgcgttttagcccatggggtttgtttttaggcacaaaattgatacaaatatgcacaaaagctaagaaaatccatatgtttgtaataaaat

SEQ ID NO: 173112 - DNA, 397 bp, Zea Mays
caaatcttccctgtattatggttaaaatttaacaatacaagtattttgaattacacaatcagtttttagcaaaatatttgaaaaccatattgaattaattaaataattaaggtattattttttgtttccctcccattattttatttccctccaatttagtttactgacatactatatttccctccgttgttttggatccctccagttcttttcgtagtgggcccactctccatagacatagcaaacttctttcatcttctgcagacctccccaccacttttccttcatccgcgaggggcacaacggagggctctccatccatcgtctagggggctccatccgcgccgtagtcgctcgtccaggtcgcgacccctctctggttcgccgcacgaccttg

SEQ ID NO: 173113 - DNA, 402 bp, Zea Mays
aattttcgcacatgtgtctctaattcctatcaacatcgactccccatattctcgaagttggtgaaatctcacatcctgatctcatctttagaccagtcacctcctctgattttcctccctagatctcgtttggctctaatgatcccaaatctcatcaccaccagcacgtgctccccctccaaatcccatcaacacaacccccaaatcttgtcaacccaaattcccctcctcaaatacgattttcttaggcagcccctagacaaggtcccaacgcgagtgacgtcgcgcaagtcaccgatgcgagtcccttggcgtggtagtgtggtacgacactggcgtaggcccctagcattgacaagctggcaaggcaataggctcaaggcacgacggctactctatgga

SEQ ID NO: 173114 - DNA, 866 bp, Zea Mays
ctcctcccttctacccacgccgaaatcctgtccgcagaagtcgctcaaccactcaagcttggtggccgccatggccgtcgccggaaatctcggggtcttcccttccccgccaacgagcttccctctgcgcggactcaccctcctctataaatggatggccgcgtaaacccaaaatatcaagccatagactccaggtgtgagagaagatggagggagcgccgccgtgcaggatcggtcgccaccgccgtacctcggcttcaccggcgttctgctcctagaagagtgggcgggagtagcgcctggggaagttgttcatagcatcgactggatgggagcaccctctgcgcctccgcgattgctcggcagagaagctcctccgccatactaccgatgcgtaccgtgggcagctccctggcgtcgtctctgttcacggtaagctctcccctttcgtacgctttgacacctatgcgcgttggccgatcaggtttgggggcatggctctcgggtgttggcttagccaactccggcgagctctgccaccgtggtgcagggcggcgccgccgcgtgctgtctgcggtaggagagatgggcgggagaatggattgcgagcgttgatattgggattaacggtcgcgattagagggcgcatactgcttcggcgtgattaatcctagccgttgatcgatagatggagggttggggggagatcgcggttgtttaaatctgaggcattgacacaggatccaacggcatcgggtggttaccggttcacataaaatggcgatctaatccgagccctcaaatgtcgatccaacggttgaaacctctttgtaccccttcgccgagtgacttatgcataagagacc

SEQ ID NO: 173115 - DNA, 843 bp, Zea Mays
tcgtcgacgacatgagccgctatatgtggctcaccctcctgcgttccaaggcggacgcaccggcagcgatcatgacattccaagccaaggtcgaacgggaaaccgggaagaagctgaaggtgcttcgaactgataatggaggtgaattcacttctgtgcagtttggtgaacattgtgcaggggaaggcatccagcgacacttctcggcgccaggcacgccacagcagaatggcgttgtggaacggcgaaaccagatggtcgtggggacagcgcggagcatcctgcgtgcccgcaacatgcctggtcacttctggggagaagcagtacacactgctgtcttcctgctgaacagggcgcccaccagtgctcttgatggcataacgccgtttgaagcctggcatgcaaagaagccacccgtgcacttcctgaaggtgttcgggtgtgtggcctacgtcaagaaagtacgcccacatctcagcaagcttgatgatcgtggaatcaaggtcgtcttcatcggctaccaggacggctccaaagcgtatcgcttctacgaccccatcgccaatcgagtacatgtctcccgtgacgccatcttcgccgaggacgagcgctgggactggggagcatcctcggacgtggactgcgagcatcccttcaccatctcggaccactacatgctggaacgccagcaccaggagactgcagatcgggagcagctgatgtctgatcaccaaggttcgccatcgcactccctgtcccctggaggtgggagctcccaggacgcgccaccatgttctgcgacgcgggcagcatctccagcagcgcaaagcccgcagcaagccg

SEQ ID NO: 173116 - DNA, 509 bp, Zea Mays
agatggctggccttgactctctggcaggtgtcgcattcagatatatacttagcaatttcccttttcattctggtccaccagtataaagatctgagatcatgatacatcttgttactgccggggtgcatgcaaaattttgaaaggtgagcttcatccaatatcttctttcggagctcagggttcttggggacaaccagtcggtctccaaaccatagaattcctttgctgtcccgacggaagcatttgtatttttctgctttatgttcgatcatttccttgataacctgaacaaccttgtcacccatctgcgccatgactatttgttcttgtaaggtgggctccactgaaatataacttaaagcaccggaggaaataacctctaggtttagcttgcacaactcatcacatagggtggtgactcttgcgtccatgttcatacaattgcactgggccttcctgcttaaagcatctgccacaacattggctttaccagggtggtaatgcacctc

SEQ ID NO: 173117 - DNA, 614 bp, Zea Mays
gtggtagactgatgcgaacacaaccttcgtgccgatggagttgcaaaattccctgaaatcttgattgccgaattgtttaccattatcgactgtcaacttggagggaatcgacagacaatattctgctagaagaacttttggttgtcttcaacattattgttgacacagctctagctttgatccaattagtgaaatattcgactacgatgaagatgaattttaaattgccttgcactgttggtagtggtccaatgatgtcgagtccccaacgctgtagtggccaggtgtgtgtagtgagctttgcaaactgcgaagggcgctcgttcgaggtgagattttttggcatgcttcgcacgaatgggccactctgttggctagccagtagaaacctttgcgtatgaccttagctgcgagagctctaggtcctgaatgcgatccacatgttcctctatggacttctcggagaagttctatgccttcgacttcagttatgcattttaacatgggttaacttatccccttcttgtatagctgtccgtcaatcacaacgaagtctctacttctatgttttaaccttttagcttcgcgttggtcagaaggatgatagtggcttt

SEQ ID NO: 173118 - DNA, 918 bp, Zea Mays
cttacaggaccataaccaacaactatatgagatcatcgtccagcttgaaatgatcaccagcagctccagcttcttcttctgcaacatcgttctaaagtaacacatagtaagtatcacttactgctgaaaaaatggtccagtttctccggcccctgggtagccgccgatgagacaggtcacaggagtgtccgagtccgagggaaagataggtgacagaggggggagagcagagaagagtgaagaagagaatggaaatggagctggagccgccgtcctggcctcagggaatctgaagagactgggcggctaattaatattggcttcagggccttaaacagctgttggactaccctgagcagatttaagttgatcgtctgattgcccactaggacgattaatcactctatatcgcgattaggctgacgataaggccgatcagttcctctgatcgaatcgacacctctgatcgagtactggtagccgatcagaccgactaatcgcggttagttggaggatatgtaatcactgctccctccaatactatttcttaggccggtgcagtttgagaaatttccctcttgttaggcgtcttctaggaaccaaagcaggcattaatggccacatggaaaccaaactgttggctgcaactggacactagcatttttttgtgatgtgctgagtagcaaccacatgcatgtatgcatgcatgatgcatccaaggagtgaatgcagtgaaacaggaatccaacatagggctgtgaccttgcaagtatgagctcacaatactgcgccatttaatgcctcttggtctatggtgtttccgtgatatctggaatttgagcccctgctcctaagaaacggtgctggagggagtaattacctttgccttcacattttatccaaacggtacctgaatgg

SEQ ID NO: 173119 - DNA, 346 bp, Zea Mays
atcaagtgaaaactgacctgaagaaaaagaattgcttcatgagaggactcaacgaccgggtccaacgaaaaatggccacctgcctagatcttacttacaacaaagctgtcagcacggcgctggcattagaagccaagaatacaggccaaggaaaatcaaagggatttggaggtgacaggtccaatcagggacctaagaagcgaaccaggttggtaatctgaccttttcattagaatcattctttgcctcgtccaccctcctatccattcaaacagcctgttttcattcgtcctaccactgcccccacttctacaaatcagccgagtgcccctggtgctcgtttccc

SEQ ID NO: 173120 - DNA, 533 bp, Zea Mays
gcatggtcgtgtgggaggctggcgacagagtcacgaggaagggagagagatgaagaatgatccaaataattttgtccattagatttgtataaggaatgagctatttagcaatctgaactgtcggtttttacggtatgttgaatctaggtgtaatttgttcggtggatttagtataggttaagtatgttgaagtgatttggtttggtgagttttgtaaaattgaaactgatagattatatagtgtatagattaatagtgtggagatgacgaggtcattttttctttagttctcaacaaaaattatcctgcgtatgtgccatgagagggccaggaattgtcgacacatacccagcagcagcagcgacggcccataaactgtgtacgtccgcgggcccaaaacacggtggtaaacgtatccacctgatttttcttctttaccttactctctctttagagacgggtgcactgcagccgtagttgctgcagctataataaaaaaagacaaaatattttagaagctggattaaagtcat

SEQ ID NO: 173121 - DNA, 577 bp, Zea Mays
ttcatatttctatcacaaattatcatcactagtagtctagctagtggtcaagacatatgactcttctggcttcgaggaccaaggacatgttaatgtctaatttggcttcaagttctgttgtgatgtgggatttcatagttatttgtctactcttctcactgctagtagatcggaggtagataatggtaagcatgccaaatggtggaattcaatgtagttcggctacataaaccccaggtatgtgtccattcaggaccgacctttaccatttagcttacaatgtataccaaacttgtcaaaggactatcccgagtcaatttagtgacaataagtatttacaattctgagagatgtatgcgacacaagcatagaggttctagataaaacgagtaaaatggttcgacgggaacacactatggttttcacaccaacatagtgaaaaatttatcagaataacctctcggtatacttgcaacttcgtgttgctggcaattacatgtccttttatctcatagtttgcttcatgtcatttagcgacaaagagagcaatgtgctaacatctagttgagcaatgtat

SEQ ID NO: 173122 - DNA, 504 bp, Zea Mays
ggttacctgctacagacttggaatattccccccctacagggtcattacaacgatgttaggtacagcctgatcaaatacacaattaaccctaacccagggaggggcttacaaatgggactaatgacagctggacatggcatgggccccaccattggaacccgtgtgtggtacccttcaccctgaggcactgggtcttcgatccttgccaaggctatagctcaaaaccgcccgagctgatagggtcgccttcgcgaagtcatgaggatcccccgccttaaacggtagatccattcgcttcaatgccttcggcggttcttggacaaagacatcgactttgataacagtcaaagtacccttcgcctcctgtgtccgcaataaaacatgtccaattgatgttaaagtaaaattgatcgaggggggcgaatggccttcgctctaacacttgttgaatatggtagagttaattaagtgtttgttttagtatgaatagcaaaaaaactaata

SEQ ID NO: 173123 - DNA, 578 bp, Zea Mays
aaaaccttctccctatcagtgcattgagcaatgttcaacatcttctctatggactttagccaatcatctgcatccagtggatcagaagagcttgcaaatgtaggtgccttatgactcatgaactccctatgcttatctcggggtggaactggtggtggtggtggaggcaatggtacttgttgctgctattgttgttgttgttgaaattgttgttgttgctgctgttgcgccctcctttcctggcgtatctcctctcattcctggcgtaactcctagcgtatctcttctcattcctggcgcatctcctggcgttcctactgcatctgagcatgcatatccgccatagtgtccgccatttgttgcatcatcctcaactgagctacaatcagtgggtcaactccgcccggtggaggattaggaggattcatctctgctggctgtggctggggtcgtctatatatccaccgagtgtgtcgattaggaggcaaatcaattccaccaccccgcctggtattgaccatctgagttagatacatatggtaagggaatagtagacaaggcaggtaattacgaatcat

SEQ ID NO: 173124 - DNA, 512 bp, Zea Mays
ggacaataaggtttgtgttagatggggatgctagcgcgaacttactccgaatggtgactcgctgggactcgaatgtgggaattgagacaaagggtttatactagttcaggcttgcgccctagtccagtgtagtgctgattgtagtattgatctagagcgtgttacaactggtgtgtctatgtgggaaggaagggtccctgggtttttatatctcaagggtaggaccttatagtgggacttgtattctactaaagagggatagaaagatattggctccacgggatggcatggtgggcccttcgtagggttgcgtgtagtcgtactcccggtaaggcttcgctcgtcccctcgctcttatagcgagtctattactgacgtcctcataatggccggttcctcagatcagtctcacggcgcagtcgtacgtggcatggcttctctagtcgtcatgagcccttcgtcacgtgtcagtgtgtgtaggcgtacactcggtatggcacgttgtcctgtcc

SEQ ID NO: 173125 - DNA, 811 bp, Zea Mays
tgtcttctttaagagcaggcttgactctatggcataacaggacaatttcactcctaaacatagccctgcactcaggaaccgaagggggaatttcattgaagatccaattatttctacacctccaaatgcaccaagtcatgatgataatagcttcaagcctccaggggacttgcaaacgtcttctaattctcattagggtatgcagaagatccgtagcacatggcggtaggaggcctaaaagaagccaacatctcctagcaaagttgcacctgaagaagagatggatatgtgtttcttcaatctggaggatacaattatcgcaggtgtaggagtctaaaggcattgcgcgacgtctgagaatggagcgagtattcaatctatttttgagcagcagccagaagaagactttgtgcttgggctgacatttagacttccataaccaaacaaatagagggagcgtttgacaggtgccagtcaagtgagcataaaccgtctgagaggaaaaccgagtggaggaggcactgcatctccaaatatcattgtgatcaagcaactgaatattaccaagggtgtcctgaagtgagagaagttgctcgaacgcttcagcagaaagggggatatggaacatttcattcggggaagctaatcgagcttgatggatgttaatctctttgacagaggcaaaagaccagagctccgggaacttttgagataaacattgcccattccatcgatcatgccagagaagcgtagatttaccatttccaatttgcacttgggcaatttccttaaaagaataatggattttgag

SEQ ID NO: 173126 - DNA, 979 bp, Zea Mays
tgcgggttggttttccgaaaacagaggggctctttaataaatgtacacggcgaaggggtatgcagcgcctgggatcgtccgattagagattgacgcataggattagatcctatccctatgcgaacaggtatgcaccgctgatcattggatcaacgatcggacggcgccggtttaatgaatcctaaagcgatgtccatcatccgatcttgatcggacggatagtagtcgcccaagccgaatgggtgagccacatctaatctctatcgtccgttcagatcaaacggcagaggcgtcttcttccctccccggcgcactacagggccgcgccagcacacccgaacgacggcgccctcgccggagagcgtgaatccggccctcacgaacgccataccccgattcactcggccctcgccggattgacgacttcccaaactcaatccccaaacaaatttcggccgacatcgagcacaggaaacggtccacggcgcacagatcacgacggcagtatatcagccacgcgacctgaaggaccacacgcttccactcaatacagccgctccccatcaaactggcgggactgcgcaacttgccggagcgagcaccatcattcttccgagcgcccattccccacagctactagcgcaacacgaagaagtgacgggaaaagaaattagtacgaggtgttccttaccgttggaattggggtgcagttctcagcccatggtgctacgcggtctcgcggtggaggaatatcccagcgttgaatccatgacggtgctgaaccggtggtccactccacgctctctaacgccggcacgatcctgcgcaccccagcttttcggttaaagcccttcgatggcacgcgggcggagtagccgctgtggctctcggcggctaccaagttctctgtccttgcgtggttatggtgtttggttccctcaggaatctgcccaacggctggtggcgaggggtcgtagtc

SEQ ID NO: 173127 - DNA, 711 bp, Zea Mays
ggtcgatgagcatcacgggttcatgagagtactcaaacaagaaagtagagaggatgaactgactggaattgtgctggccgcggtgaggtcgttttcacggtggcggaaaaccaaatagggggaaacgagaaatttgcgagctctaggggacgattcgaggtacgagttgcttcactggttgcgtaattacctaacggagcggacggtggcggcaatttatagcctctaacggcggtggcgcccaattttaccaggatgtgctggcggccggagagaaaaaggcactggtacgtggaacagatggctttcaccgtggcggctcctccggcgatcaccggacatgcataacacggttagccgcgacgtggtaaagcatttggacacgcggcggacggcagggatgactcaacggcagtgagatcttatctgatcgacgatgagcaaaggggaaaagtgcggcggctagccggattggtgtccagctcaacggcggcgatgatttttctaccccgcgacgttatccatttaccctaggcacgaatcgagacgccagcggcacgaatcgcggcggagagatcatcggcggcgaggttctgaaccttatcctccaggggcactgtaccatggcgaggatcattcagtgcacctgacagccaaagtttagggcgaattttctctcaattttatgtagtaacatgatcatcacccttt

SEQ ID NO: 173128 - DNA, 463 bp, Zea Mays
aagaagaatcgaggttcagtgaactcaccgccggtgatcccgcgcccggattcatgctggtcgccgtgattcgtgctcgacgcaaagtggataaactaggggagtaaaagatcttggcgccgagataagctcggacctggtcactggatggttcaccgtacccacttactctatggccgaccgtgataatcctcgttggcgttggccgcccgccgcccgtgcgccacgtgcctaggagctttaccacgttgcagtgaaccgtagtagggagtccgtccatcatcagaggctttgccacggtgaaagccacgatagcgctcgcgctagtaacttcccctctctccagccgccagcgcgccttcttcaaattggacgccaccgccgataaattctataaattgcgccccagtgagctccgttaggttattgcgcaacctgtgaaccagccctcgcctccaatcgt

SEQ ID NO: 173129 - DNA, 880 bp, Zea Mays
taaaaacggattatttggaaccaagccatcacatccagaaggcctagaacttgcaaccagtagacagtagtaattggcttccagatccaaaagaaaaaacttaaccccaccaggcaggaacccaataaaacaccaaccaactcatctccttcctggagctccccacacaccctccctgcatgatgcaatcctaaagaaagctgctgaaacctaaagctggtagaaagctgcctcccctcccccctatggtgttgtctgtgtagcagcaaagccaaaaaaacaacactgctcctccaaagaccttttccaccctcactctctctctctcctctcccctctcctcgccctctctctctctctcaaattcattcctagctgtacccacatctctctcccccggcccttttgttttgtttattcacaactctcctccgtcctcgctctcatctggtccgcactccggaggagtgatttacctccccctccggcctccaatcttatatagagatgcctcaattccattgccccattcccatcgcctgacctccagctccaggcttttgaattgtgatcgtgagagcaagtagaacacggagagatttgtttgcacagttgcaggagagaggatatatacagggagtcggttctttggtttgctgatttgcttggggtggcattttgttacccaaccaaagactgatctagcgagaaggagaggcacacaagtgacggcagtgccgtgcgcgcggcgccacccccaccacaccatgttgagttcttgcgcgccaacgacggcctttccgcccccagaggcgggggccgccgcgccaccggagccgttccggtctctgcagatcgccacgaccaccagcgccgccgg

SEQ ID NO: 173130 - DNA, 744 bp, Zea Mays
cgccaatcgcggaggtagttgcgggcgccatggacgaactccccggggctataaagccataggcctaggaccggttctcctctattcctcgtaacccaccaccattgccgtagaaccaggtggattacgccgtcgtcatcacgcacgggtggtccgccgcggtagaaacccacacaccgcccacaatcggaactcacggctggttgtagagcttcgctagaacgcagggaagctgctcagtttttctgcgggcgaagcttggagccggggctctgccaatcgctcgtcggcgtctggcttctatcaccgggccgcgccacatcgcgagacgtgttctactggcagagttcctccccggtaagctttcaatcgggttcgcctcctccttccctttagaacggtataggattcgctaggtttgatccggttggtggccggattggtcgaattccggcgaggtctcggcctcggatcggcggcgccgtgatagtgctgcgttggggcgctgttggtagaagtgggcttgcgaaccatacgtctcgcgttggacggcttagatttggattggcggtaccctttcggtagttgtgatcctagccgtcgatctagaacccaagggctcccgataggtccaggcgtggtgtagtttgggccgtgggatcgggatcccgtggctgaggttggatcccggttcactaaagtgctaggtttaatcttgaccgtgggtgcacgatccagcggccc

SEQ ID NO: 173131 - DNA, 622 bp, Zea Mays
gcttactataccttatcaccagaacaatcagcttaagttggaaacaacttaagacgatgttgcacatcctcgactaccaatcaaagaaggcgcgacatgcctcatcaacaaacatttagaaaataaattgttcaggaaatagactgctctcctacctaatcaacaagtattcaattttatgtttgtacaaagcatcacaaaggaccatctccaggaggaatattgcccacaggatcactagaagctagaggattgctcgaagtacccaatgcagcaagaacgtcagccacgatgtcatcaggtaccacaacgtcaggccttttcatcaagaggcgaccagctcggaccgccttgacatcgccttgttgcaccatgccttcatgatctcacggtcgtcctccaagaccttaatatctcggtgagcaacttataactcctgcgacactagcttcttcgaggcacaaagctctttaatggtagaatcttttgaagacagagactcgctgagcatcaacacctcatcctgggactctttcaggttgttcctcttgtgctccaactcatccatggtgaagcgatggctcctttctagggtggtaagggagctggtggcatcccggta

SEQ ID NO: 173132 - DNA, 1221 bp, Zea Mays
caagtgctgacacaccaaacttgatggtgtacagtctgtttgttgtccttggtgcaactattaataacatatgttcttgatcataaacacataattttccattttcacctccaaacttaaaacctttttattctaattgacccagacttactatgttggtctttaatttgggaatgtagtaaacatcagttaacaccttatgaccatttccactgtcttgcataataactaaacccacaccttgaattctgacgacagacacatcacaaaaccaaaccgttcctcgaacaccttggtcaagctgtgttagcaaggaccgagtgcttgtcatgtgattgcttgctccaatgtcaagaacccacataccttcaagaactgaaattggtacagtctttatcagatgaacctgctgaaccacatcgtgcactatgtcacacgtggccagcattagagcaccattttgttcagctgcaccagggtcaaatttgcctccggtaatggcatctccttcttcttccccctcttcagacgtttgcagtcctccgcccaatggccatagatgccgcaatttcgacactagcctttacaccgcgaagtgccctgggaggtcagcctgaccggtctagaggcattcccgtcgtgatgcaccggtgacttgccttttgatgaaccagtgttggagtcgccgacaccgtccttgtgacttgaacataggtggtgtttgttcttctcaagccagtcctcctcggtgaggagaagacgtcccgccttgtcgatgaggtgtgcgcccttatcattaaaccgatcctcgacggcgcgcagacaccccaccagttcatccaacgatagctgcttcaaatcacaaaacatttcaattgttacaacaacctgggtgaagcacaccggaaccacccacaggaacttcttgatgacgcgaacatcttccacgttcttgccaagcgctcgaaggttgccgacaagatttgtgattcgcatcccgaaatcttcgatagactctccatccttgaacttgatgttctctaattcttggagcatcttctgtgtgtccacctccttcacccgatcggcgctgagtcacatcagcttcactgcctcccacacctccttcactgtcttcgaggcgccaagagactaccacatctccttcggcactaagcgcaggagtgcgctcatggcttggcgatcttgtgctctcttggg

SEQ ID NO: 173133 - DNA, 320 bp, Zea Mays
cagaaatccaacggtgcagtaatgcgcaccactctttgtctcactccttgcgtgcgcttgctttcttggactaggaatcacctgcatctatgtgcaatttctatatattaaagcaggccccgacgctccaaatctagctacgccacgtcggtcatttttctcaaaccgtttgattgcatacctgtgatatatcctgtcgtccacgtgtaacgtgttcctctctattcaaccagtcttctccgacgcggactcctcaccttcctttttttaattgtacacatgatttctctggaatccacatgccctggactcttctagca

SEQ ID NO: 173134 - DNA, 292 bp, Zea Mays
ggcgtgtagcagctttttcaaactgaacgaacgagggtttcgtgccggcgcgtgaaagtttttacctcatgggcagcgtcagtttttatagaccagaaaacgcctcgggaaaccaaaggcccaatagtaaaaacatcgcatcccccaacgatcacatcccgcagcagtcacattactaaaaccccctcgggccacttcaacatgtgatcgagggcagcgtttggccatcccatgtaaaaagacttcgggaccaacgttcgaccatccccctcgggccacttcaatactgatc

SEQ ID NO: 173135 - DNA, 960 bp, Zea Mays
aaggacaagctgaataggttgtgcttcatcgccatagaggcctttacatcatggaccttggtgatgatgcattgggtggcgacgactaggacatcaatgatgcctctgtgtctcaggtatcacatttcaccgatgatcttgccgctgaggtagaagagctgaactactttggcaaatcagtacaagttgcgtaggcttgctgctcgtgcgaggaaagagtttaaatccaagtatgagagcacgcttagggaacttggttctgctagagcttcagttgtggtgttcgacaagactgaatgtgatgggtgtgcccttcacatgttgacattgctactttacaaaccaagtacgccactctgctagatgagtgtgaagagctttagtctatgtctagcttgttgggtgcgtttcagacttgttctggcttgcagactgagctagtagagggatattctaggataaccttggttgagaaggttagcttagtgactgcatctaaacatgtgtagtgtgcactctatgagggtttgtagtctcctcttgagccctgtagacacgacaagactgggattgaggaagaaaacacataccttcaatcagtcttgagctaggtgtcgtgtagtgagccctagttgggcatgatggtcagtcagttcaagagggaaactagcggaccagagttaggctttgtagctaaggaagagagtgtcacttgttttgataaggttggtgagtgtagtggcctgaaaccttgaaagaaaccttcagccaccctcaaacttatcaagcttactccaccaaaatctactaaccctattgtgagatatggagtgcatgtggagcctttgagaattccacctcagaaacaagtgtggtgtccaaaacctaaacatctcaggaaccaacttaacacccttcaagctaccactattgttcctcctctaaaagctccttaggcac

SEQ ID NO: 173136 - DNA, 845 bp, Zea Mays
ggaggataagaagggaaaagctgcttagctagctcgtttgtaaacattgaatctcaaggagggtgatctgtagaatgagggattgaggaagatgggctctgataaggtggaggagaggcatgagaggatgaagagcgagggtcaccaggtgtaggagcggcaacagacggaccaaatacaccgccatcatcaacaacaaaatcttcctctttttgctcaggagtaataaatgggacaccatacttctgttagtgccactagttgatgtcatctagatactgattaagaggagcagcatgctaacgagcagttatctcataccccatggatgcaacaaactagtgtaggttgtcatttgtctcccttgcctcatgacgctgctcaacaatgtcggttgcatggctatgatagatagagaacacttcagcaatacctctagctaggcacaaccacagacttggccttctcccacatcatcttcctcgcccgctgtggtccataggatgagaggaagcaacaacacatgaggaagagccatggggaggcgcctaaggaggtggctcatcatgagatgaagtaggacctctagatccagtcattgccctctttgtcccactagttggattccttggatcaatctagtaaggggtgtatagagtgtttttgcaatccttatcaaaataagtatgagtcacaacttcaatcattttcatgatatagggtgcatgcacacaaatttgatggggtccaggaagcatgaacaatatcttcccaaataagatcaaagacattaatcttatccttcttgttgggcttcatgaagaagagaagcactttgctctcgc

SEQ ID NO: 173137 - DNA, 394 bp, Zea Mays
ggcataaggacctcaaggaggacctagaggaggtgatcaagtgggaacagaaagcgactcgagaggaggggaagctggtcaagaagaaagagcgcttggaccaacgggaggtggtcatcacagagtttcatgagaagttgaaagcctacaatgcaatgctggagaagcagcgggataagcagaccgcaaccgaggcgacactgcagaagctgtagcaggagcttgatgacaaggctggcaaaatctctcttgccgaggaaaaccttaaggcgaaggatgcctccctagaggagcgggcgacggatctcatccgacaggagaaggacctcgcctagagggaggagatgtgggaaaggcgggacaagttgctagccgagcacgagctcgaggcgga

SEQ ID NO: 173138 - DNA, 1107 bp, Zea Mays
tgtagctggtttgtaactctacaactttggtacagagggttgatgaagttcacatgcaaattctagagaaaatggagctctaagatgatctgtcaggcgactggatcagatttttcccatggtacagtgactgcagaagatacccctctttcccctccgccgctgatgacccacacgccgtgattcacgccgtcattgggatttgtgtccgctggcggggagataactttggtgaaataaagatctcgcagggaggagtggatatgatcacacatctgagcttatcgtcgtgattcttgtcactgcgacgtgggcggtctgcctgtgccgccgtggaaacgccggtgaccgccgccctccggccttgtgccgcgtgtttaccttttccaccgcatcgccacaacttacccctactcaccgttgatcgccggagcaactgccacgcctctggacacgtattcaccgcgcccaaggttcttccctatctctggccgccgcacatcttcattcaaattagcggccaccgcccgctagcactataaattgatcccgccccgaactccgtagggtagtaagctgtccagccaccatgaatcagccacggtcgttcactggaatccgcgaatttggaattctccccaaaactgtttccgccaccgtagaactcaaccccgccgtggtcagcccaattcgggtcagctcctctcctctgctcccttgtttaagcattcgcatacgtctgtgatactcgccaacccatccaattgaactgtgtgaccaccaatcgccgggaacacgattgccaagccgccatgctcacggccaccgtggccagagctccgtagttgatcataagcgaaattaagttaggggaatcaatggttggggcgtgaatctggttttggccgaagtaggacgccgttcctcgcatgaatcggccggtacgcgggctcgccggagctctattgtgctgctcgccgtcggggacctagcgcggtaaagagatagaacctcaggggtgtaatcgcaacttgttagtgacactgagaaaatagccgaggacctatttcggtttagctgttagtccaagggcctccatgcaagtct

SEQ ID NO: 173139 - DNA, 551 bp, Zea Mays
gggggcgctgcgcagatcgatgtctcgggcgtcgaaggttagtggcacatgggaccacttcgtctgcacgaccggaccggtgatggcgacgtggttgatgctacggtagtggtcccgcttctgccgcttcgtgtcgaagttggtgctggaccccccagtgatcatgtgaatgactccgcgatacggctgatcagtgaagtcctcttgttttggggcatgggggtggtggatgttttgttgttgctgatgtggaggtgggggtggcggaggtacgatttgtacttcctggtggtgttggtatgcgtggtgcggtggatgcggagcgggggcgtggatgtatggtggagggggctgctgatatgtgtgtgcgacaactctagggttgtcggctggctgcgcccgtgccatcctgtctctggtggccttcgtctctgggcaatctctggtttggtgggcgcagtcttcgccgtgaaacaggcagtaaaatcggcgagccggctgcgcacgtccccggccccgtccgcgagttccgtttccacggccctaggggg

SEQ ID NO: 173140 - DNA, 324 bp, Zea Mays
ctattacttaattgtgtattgtaggcgtccacacagtggtgttctgcctcccgacgctcccctcccgggatctcggtcgcgctttcgtcgccgccatcatcggccccgacatcctcccctccgctccctcccgggatctcggtcgcgctttcattgccaccacgcccatgcccctccattctctgtgttgtgcccttccattctccgcgcagtgcccctccatcgtcgtcccctcgcctccatccgtcgtctccctcgctccgctcggacaatcgccgccttccccaacgccatcgagacaatcgccgccttccccctcgctgc

SEQ ID NO: 173141 - DNA, 630 bp, Zea Mays
ccctggaccaatgggtgggacacgcaatctctcgccagttcgttctccacgatgacgttggccccacccaccgtggtctttgactgggtggttgactccggcgcctcctatcacaccattccggacgcaggtatactgtctttcacctctcccctcacccctcccttccttcaatcgttgtgggcaacggctctgccctacccgtcacctctataggtgccatggttcttcctggtccatttaatttaaccaacgtccttgttgcccccaacatcattcaaaatcttctttctgttcgtcagttcactactgacaattcttgctttatggaatttgaccgtttggcctgtctgtgaaggatcttgccaccaggacccttctcgctcggtgtgacagccccgggcccctctacacgcttcgcctgcctgctccccctacatcgacctctgctccacatgttcttgcagcggccgcctcctctatgacttggcatcatcgtctcggccaccccaggtgtgatgtgatgtccaagatctccagtagtacctctgtttctagttgtaggggatcttttgagcacctctgtcatgcgtgtcagtttggtcgccatgttaggcttccattccccac

SEQ ID NO: 173142 - DNA, 497 bp, Zea Mays
gtactagatggcatctcgaagtgagtttgcttctcagccttgggaagatctcgaaggggagcaatcaaggcctcaatatcctctgggagggccgcactctatggcccgggctaccatattgagcaggaggattggagacaaagtcagagaagggactatgcggaggcagattccatgcagagtaagataagggagcaccagcattcgaaaccctgcccctcagtatcatgtcaagttggcttagcatgtcttcattgggaatttgcctgttagtgactcgggtagaatcgttgatgctagtgtacaaataagtagggtagactctttccttcaaaggttgaatgttcttaaagacaaagtcgacaaccatgtcttcagcagtcaggcctctgtccttcagtgagcaaatttcagcaagcagcaccttagcttcggctgcctctgaataagtagggtactccacccaactgggcgtgcgaacatcgagctgccttcct

SEQ ID NO: 173143 - DNA, 1123 bp, Zea Mays
gtgcattggttaagccaaagggcataaccttaaactggtaatgaccatgatgtgttttaaaggcagttttatactcctctccttctcccattcttacttggtggtatcccgaagtcatgtccaagctagaaaaaaatttggtgcctgccagctcatccaagatttcttccacaaccggcataggaaacctattcttgatggtcatgtcattaagtttgcggtagtccacacaaaaacgccacgtaccatccttcttttgaaccaacaaaactggagaggcaaaaggactaacactatgttctatgaggcctgccttcagtaattcagaaatttgcctttctatctcggttttgtgggctggtgaatatttatagggcctggcattcacagggactgaccctggaatcagaggaatgtggtgatcaaatggtcgaacagggggtaaagttgtgggaatagcaaacatcgctttgaattcatccaacagattctgcaactccacaccaacagttggttcctcagacttgggggttacttccagcaaggccaaagcccagacatcatttccttttaaccatttgtccacctgcatagtagacacctccaccactcttccacactgtccctcagtccccttcaatttgacctctttgccatcaactgaaaagctgatcaccttctcctcccaatcacagtgcattggactgtgttgcttcaaccagtcataacctaaaatagcatcatacgcccctaactccaagactctcatgttagtcctgaaagtgtgtccatctgcccaccattccagtgaatgcaccatttggtcacttctgagaatttcaccattagctaccttcacaatagccggagaacacttggatgtaacgagaccaagtctgtccaccatcagcctattaatgaaactggctgagcttcctgaatccaccaataccaacatcacctgattgtggacaagggccctgactcccatacaatcgtcagagacagccccactgatagcatgtaaagagagccgaaattcctcctcctccacttgctcctctttctcaatatggctcagtgtttcatcagacaacatcattcccagctcctcagtagtcag

SEQ ID NO: 173144 - DNA, 822 bp, Zea Mays
tgggcgcggatgacggcgtcgtcgagcaatgtgtcatagcggtgagggtcttcgctagttgagcacggagacgaacgggaaggaaaaatcaccagaggaggtttctcaccttgatacatggccgggacgccgatggtttggacatgagcgatggtgagcgcggcacggctcctctgcccgacggtgagcaagacgtggggtggctattgtgcggtcgggagatggctgcgctctatgagaccaagggaggggagagcggataccagcgatacaaatatgggcgactgggtgaacggttggtaggaacgtgcgtcgtggccgattcaagcagaagagacggtttccatggaagggattatgagtggggatcgcacagctgaacgaggatgccgcggtgcagctcatagctggtcttgtggcacagaaagtcaggcacggcgtgtaggggcatgggctggctacgcacaacagcagccatgaccgccgtctgctcagccacgtgcagctgcacggcgagaggacaggccgcggggcgacgactaggatagacagagctgacacatgggcccgaaataatagcgagaggaacaagtgttgaaaaaaatggttgcacgcacaatgtgtggacgttgcgcggcgagacaaggaaaggtgaggtagatgaaggtaaataccgagggttagacatggggtagactggggtagaaggggcaggagcatcttggggaattgtcgagcgacgactgggtgtataaggtaatagtgcggaacgaagtgaaggttttacagatcatagagaaactgtcgaggtagacgccgggg

SEQ ID NO: 173145 - DNA, 349 bp, Zea Mays
cttcgatagaatttcttatgatgttagatgcaggcaatctcgttgtacaagcaggtgctagaagcaaacattttgtttggtccataaagtacgcaaacatttactatattgcaatgtggtattaactatattcagtgaaagccccatttatgttgggcaaaggctttggaacccctccaacacccaaacccctcaccaacgtcacctctatgaccaaaagtagtagagaaaaaagattaggacactggcataactgcaatgacatattttaaataaaaactagagtctaaatcctgctgaatagttgctttaggaacagctctaggtgctcaaatgatgcacattgccc

SEQ ID NO: 173146 - DNA, 1170 bp, Zea Mays
gttgtagactgttagggcccgatacggctctggtttgagcttgagcagcagcttctgcgtagagggaaggggtcgtgaacacttttttaaagaaggaagtattttctggtaaatgatatagagtaataagagccacttttagttgaggagccggaactgcaaaaattgatggaaccatgtgttttctccatctctactaactattaagtgtctaatgtagaccacagtcgtgctctcgctccatcctctgcgtgcatgcaatcctttgcgcggcgtccccctgcgtggccacgcatgcagccggtctcagtctgcgtgcaacccctaaacccgcacacgcatcacgcatgcaagtatgcactccatgaaaagcttgtgcaaatatgtaaatgtgaatgtcatttgaaccatggttgtttgctttaaactcacgtctatctagccaatatgacacacatatttttaattttatattttatactcaagtataatatagacttttattaaaaaataggggaaaaattaaaactgggtcgtgttccagccaaccatgatactttttacatgggttttctacatcgatggtttgtatgattttctttgcgtttaatatcaattataactatgataactaattttagtcgttttgtaccgaaaatatagattggttaagtcgtttagtaaaacaacatatcacacatacttgcaaattgttttcacgtcataatgaaatatatatccatatgcaaattagcaagtcaatttttagaatagttcatagccatccgttcagaactttatgcgaaagaatgctggctctatgtctgcttatacgaaagaatgttgtctcttccctttactaaaggagggtgaaataagttttactagcagcgtcgtaccggaggtgccagtagccttagtgtgccagtcgctcctcaagatggcctcactggcaacaaaatgttctctgatgagttgactcgcgtgcttgactgagattgtactttatctcttctgtcagctaagctctggtgaattcctccggcatcaacgttagcacgatggttcgcccaaccgagcatgtccccgattcacaaaactatatagttgggaacctcacagttagattcatagtagttaatagtttgcttaaacaaactgacgtggttg

SEQ ID NO: 173147 - DNA, 645 bp, Zea Mays
tggaaatgtgatcattgataggtgacgtcttactgtgggactattggtttcccgatgtgccttttcgggttcataaaagtcgttccggctactgcgaagaaattttttacccgctaggtttacgggaaaccctagtttcttttgctttagcactttctgtgcatctccttctttttctcgctactggtcaactggcccacatgaagcagaccacccggcactgcagacattacgtgatgtcgtcatcttcttcttcgcaccgtctactacgaccgcgtattcaaacgcggcgtcgtcggagaagacaattagcgagccggtggcggtagtggagttgctatcgggtcacactgttcagcttggaacttcgagggtttactcaaaatgcgtgcaagaaacacagcgtttaggttattttgtgaatggtgtggggcgtgctccagggccgaagaggtctgagagcaggagggtgaattggttgtgttcgaagtgtttttcactgttggacttcgcttgcctacacaccgattcatggttgaagtgctacaaaggagattcatgagctaacgtcgaatgccatggtggccctagcgaagtttgtgtgggtggtgacttcgtacggcgtagccctttggtccaaggttt

SEQ ID NO: 173148 - DNA, 1094 bp, Zea Mays
acagactcagggagacacccgagcggactgcgggttgatttgttaaaaggtgagggttttatttgcaaggtggtcggccgaagggtacatgggtctattttggccgatggattaaaattctacgactgggattggatctgcctgtgactgaatcggtatggagttatgtccgttagattaggaattaacggtgctgatttaaaacactctagatcaattcctggccacgagatcccgatccgacgactcgggggagttctagcgaagggttacgcgtgcgcaaaatcggagtcatccatcagcagatcgacgacgcgctcgaatcgacacgcaccactggcaaacagagcggcgctcgcatccgaccgcggcggaggccatggccggagttgccgtccacggtataagcaccctaaactccaatgctaatcggttcgacgcgttacgggaaggaaagtaaacataaaggcatggttcataccggaaatcacagggcagagatatccccacacgacgaagcacggatcctcgctggaacacgccccggcgagcaattcacgccaagctggagcacttctttggctaatagcggcagaatcacaaccagtaggccaaatcggagcgccacagtacttcgcacgacatcaatttcagtcacaaaatgagttgcacccacggaggcggtgcggtcttgtttgtcatggtggttttaggagggtttgcgggtggaatccttaacgaaggcacccgcacctttatccttgccgaggaaaggaccgcaaggcgcaggattgaccgggcgcaacggtgagccgactccaccgggttcgctgatatcggttgagggcgatggtggggcgtggagcgcacgcgagggagttgaccccatggccccattagtccgagacccagtagtcatcagccgagctggcgtgaccggcaggtggccccaaggcgtcggcgcccaagcgcggaggctgactgagtcgtgggcccaagctgtcggcaccaactagttagctgggccgcgcacacgagagagggagatgagagatgggccgaatagaacggaatcagcccaagtgcccattttc

SEQ ID NO: 173149 - DNA, 563 bp, Zea Mays
gtctcgagagacagttcaagggattcaccttgcagcatgtggaccgggccaagaatgaagaggccgacgcattggccaaggctgccgccagaggcgagtccctgccctccgacgtgttcttccatgtcatcggcacgccagccgtccggagccccgaagggctccaaataaccaatgatagcgagggccactgcatagtcaaccttatcatgaccgaagactggtgggcaccaataaccctgttcctacaggggtactatcatccaaccgacatcagcgaggccaagcacctcaaacatcgaagccggacttcgcactgattgagggccaactctacaagaagggggtcagtcagccaatgcttaaatgcgtcaccgaaaccgaaggcgtccagatcctacgcgaagtccacagtggtacctgcggctcacacgcagggccaagggccctagctgctaaggtgatctgccaaggtttttactggcccgcaatgatctgcgccgcaaatcgggtcacaaggtcctgcgaagcctgccagaagttttctcctcgctcaggcagcc

SEQ ID NO: 173150 - DNA, 347 bp, Zea Mays
gcatgcgatatttatgtgtcttgggtttcagtatccataacctttgatgatcattgcttcttccgtaatcttctgattttatatgatagaagtgtgacatacctcatgctcgtgatttatcagtagcaacagctctttgcagcctttggattggtctctgtccatctctattttctgttacctgcagatgtacaaggagaacaaacaccggcacttatcgtctagttggggttgtcgagcacttgggaaccatgatgggaggtcattatattgcgtacgtgagagcttgcaagattggaggtcggcagcagcagagcagtggctcaaagtcttggttattttacgca

SEQ ID NO: 173151 - DNA, 742 bp, Zea Mays
caaaagtcgcctacgggtgcagccagaatagcacaataagtgcgaaaaatcgaagtcttttccaaaaaactatccgcgcaaaagtcgcctacgggtgcagccggaatagcacaataagtgcgaaaaatcgaagtcttttccaaaagactatccgcgcaaaagtcgcctacgggtgcagccggaatagcacaataagtgcgaaagatcgaagtctttgcgagaagactccacgcaaaagtagcctatgggtgcagccggaatagcacaataagtgcgcgcaaaatacgcctacgggcgcggtcggatcaatgaaggcacgctatctcatcatacaaatcatagttacacgcacaacgagggcatcacacattacaacggctcaaccttcgggatgatacccatctccctgtagttgaacaacattatcttcaattcctcaccctcgaaaagatttcgcagctccccctcacctacactcgccccagccgacgaagacaacaattcccgtttggcagtcccgtccactcgaagacaaccaccctccacctcaccatgacccctatcacttcgtgacaacccgctcacccttcgcttcgccaccgcccttcgacgcctacgtccagcattcgcacaaggatatcctcacccatcacacgcagcgaagtctccactgcagccacatccaatgctgcaaaatagtctgagtcctcatccgaagacccctctatccacacaatcgaac

SEQ ID NO: 173152 - DNA, 581 bp, Zea Mays
gctgtcaccatgatgctgaaataaaaaaacctctctattagttagtaggtacaacagattgcttgttacaatgctgaaataaaaaacctctctatcagcaaacaactgttacctggattataatcaaagttttcaaaagtccttgcaagcttcttgctaaatgggccttctctattctgaaacttctggagttcgatgttggctacttgttcttgcatttcgtcatgataataaaaagtctccacacaattgataaaaccttctgttattttgggaacatcaaagattgatgggtcagcataactatagtgtggattcagcaaataagctgtcaaatgcaatggagaatcaagtcttccagtcatcttcttctcaataacaacaacaacatccttgaaacggttctcaacattgccaagggcctctttgacatgtctctttgccttcaatagttcatatacaaagcccatggatggcttcacatctccatcaaccaaacagagaactttgaacaatggcgcaaaaatagccaatgtcaacttcacatccttccaaaagcttggattcaatatagttgttgt

SEQ ID NO: 173153 - DNA, 477 bp, Zea Mays
gtgcaattgtatgagcatggatgcaagggttaccaccctgtgtgatgaattatgcaagctgaacctggaagttatttcttccggtgaattaaattatatctcggtggaacccacattgcaagagcaaatagtcagggcacaggttgaggataagggtgttcaggttatcaaagacatgatcaagcaaaaggcagaaaaatacaagtgttttcgacaggacagcaagggaattctatgatttggaaatcgattggttgttcccaaggacccagagctcagaaagaagatactagatgaagctcacctttccaaattctccgtgcaccctggtagcaacaagatgtaccatgatctcagaactttatattggtggaccagaatgaagagggaaattgccaagtacgtatctgagtgtgacacttgccagaggataaaagctagtcacttgaaggcagcaggccctttgcaaccccttcc

SEQ ID NO: 173154 - DNA, 470 bp, Zea Mays
accaacaagtcgacttgcaaattttattcaagtcatttagtgcactaaaactactacaaccaatcaacgacgcattctccacgatactcacccaaccatttgcgttttaaattagacatcacatgagcactaatacttttcatccgtgaccataaccataagcatttagaatacaacaagcaatttaccgtgattacaagcttaactaaagtcatctaacgagtcggctagctagaacaacgacacaacccgctagatagcatacacgtcggcttgcctattattatcacaattcgagacacaacatatataacaatcgcttaacacaatcaactcctacctaacatgagttggctaataacgtgactatttcccaattaccatcacacaccacctttcgccatttttagataaccggcacgtcacacagctattgtaatacatctcaagtttagtcaacccatcagtgg

SEQ ID NO: 173155 - DNA, 416 bp, Zea Mays
ggtttgagacagtgggttatattggttcaggcttgcgccctagtccagtgtagcgctaatcgtagtattgctgagggcatgttacaactagtgtgcttgtgtgtgaagaaagagggggtcattcacttttatagctcaacagttagactctatagtggggacctgtattctaccggagggagctctaccggtggtccttgggggtgttgttcttctgacgtcgtccatagggtcgtgtgtagccgtactcccatcatggcgtactatcccatcatctcgtcatttgggtccctgtagcgagtctcccgctgacatccacatagtagtgcgtggggcgggtcagtcatatggagttgacatgtgtcgtgcggtcttgcccatcatcacgagtttgtgtcactcatcggcatgcgtag

SEQ ID NO: 173156 - DNA, 427 bp, Zea Mays
ctggtgaaacccttgctgttgaaacttcgaagcaacaacgagaaactgaagctgggccttcagaacctacgaagataaatcccctggaagccaaagaaccaaaaaggacagagccaattttggatgaggaaactgacactgctgcccccgaagcatcctccgaggccctcaattatattatacgacatgcttctggaaaaagattatctgaagaagagatttttgaggctaatcactatgcccgggaattgaggtatccgaagggagccttagtattcaatggcacggacgaagatgactttttatactgcctcccggacaacaaagagttatctgtctgctgggagatggctagaagtgtagggtttccgaagcttgaagctggactctgcgctatgacgaaggacgatcttgcagatagtcttgc

SEQ ID NO: 173157 - DNA, 523 bp, Zea Mays
caaattcttagggtcgtaccatgacgaccactgcaaacgttagaatgtgcaagtcaggctctgacacagacatgcaacctgaatgacggcataagagttggtattccagagcgcatgttacatattacggcgtggagagtggcacctgctcaaccactctggtaagtcaataaaggacacgagtaaaccattgcaggatgtgacaaagtgtaatggcttgcttcagggtggcattgacgtggctacactaccttgatggcaagagggttcatccacggtgtccatcggccagtgggaaccctagaggacaacatgctatacgacagtacccgacctctactcgcttcgcttgacccttcgactcatgtaacatgatcctcctctcacctagcctataaaaggaaggaaaggaccacggttcaagacacgagcatacataggcataaaccgccagcacaaatcctatacaaagcacttttacccccatgagcactcattcacaagagacttgggagcttgatcg

SEQ ID NO: 173158 - DNA, 519 bp, Zea Mays
gctttttaaggcaacggtggagagcgtcagtggcagcagctcgtggtccgtccggggtttgctgctccgttttcttcagagcagcgtccatccatggagaggacgaagaaaccatgccttggtgtcgtcgctctgcttctcttcctgctcctggcgtcggccgcccatggagctcagcctgcagatgccaaggacatagcaggtatgcagttttgctcgtcttcagggctaattaagagtatgcatgagctgtatcttgtttgtcttccatgtatactataacttttgcttctacagcactgccgcttgctttctgtgattcagttcgattagtggaaaaaaaaacacttgaattggaacacacaaaaaagatcgttctgaaagagacaatgccctgctgcactgcacacccttgtgctttaagaattgccttttcagttcttcaggagtgcgtgcaaagcatggctggtcgaggatagggaagtagcaacataaccttgtaaactgagtcatatatgt

SEQ ID NO: 173159 - DNA, 1625 bp, Zea Mays
ctgaaattatgcagtttgtctcttgtaagagccttggtgaatccatcagcaacttgatcatgtgttgatatcaaccgaacctacagaagtttctgaggcacacgttctctcacaaaatgaaaatcaatttcaatatattttgtacgagcatgaaacacaggatttgttgtgagataagtggcccctaaattatcacaccataaccttgctgcaggtggcgttggaacttttagttccttaagaagtgattgcacctagataacttctgctgttgcattggctagagctttatattcagcttatgtacttgaccttgacacagtggcttgtttttttgcactccatgatacaagattactgccaacgaaaattgcaaatcctcctgttgatcttctatcatcaatgtctcctgcacagtctacgtcagagaaggcactcacaagcatagatcggcacttgtttatgctcatgccaatatcacacgtgagttttacatatctaagaatccttttgactgcagaccagtgagctgtagtaggacaatgtagaaactgacagactctgttaattgcaaaagaaatatctggccgagttaaggtcaagtactgtaatgccccaactacacttctatatcgtgtagcatcttcaggtccaagaggttcaccttccttaatgcttaatttttcagcaaccgatagaggtgtagccatgggtttgcattgagtcatgccaacccgtttaagaatatctgaagcatatttactttgtgataaatgaataccatcacgtaccttattcacctctatgccaaggaagtaatgtaatgtacctaaatcctttagggcgaaatctgacttgagatccttcagcaatgctgacactgcttctgaggaagagctgactactataatgtcatctacataaaccaacaagaagatgctaacattgcctttattaaatatgaacaatgaagtgtcggccttagaggggcagaaaccaagttgctgcagtttatcactcaactttgagtaccaagctctgggggggctgtttcagaccatatattgctttatccaacttgcatacatgatgtgggaatttactatcttcataacctcgtggttgtctcatgtagacatcttcctcaagaacaccatgaagaaacacgttttttacatctagctgcctaagacaccagcctctagacactgctatagaaagcaccactctgatagtagcagctttgacaacggggctaaaagtatcctcataatctatcccatatctatgtttaaatccctttgctaccaatcgagccttatatctgtctatgctgccatctgcctttcttttaattttgtatacccatttgcaatcgataagattttttccttcctgtgctggtactaaatgccatgttttgttatcttgcaaggcactaaattcctcatccatagcatgtttccaatttttattaccaagagctttagataaatcatgtggttcattaccaaccgctaagcatccatagccataccttatagtgccatctgtgtatgcttttggttttctgatccggttggtccggcgtggaagatttgttgctgcagcattatctgatacag

SEQ ID NO: 173160 - DNA, 301 bp, Zea Mays
cgtgattgaccctttgatagtggtcgttcttttgccgttttgtgtcgaactcagagctggattctccggtaatcatgtgaataacccctcgaaagggttgtagcgaagtcctcttgttgttgtactggtggtggcagtaatggctggtttggatgctgtggtggtggtggaggcggtaaagctaggatctcttggttgttgtggcatatattgtgattttgctggtgaggatggaaatgttcattgtggaattggtgctggttgtactgatggggatggtaggtgtgggcgacaactcttt

SEQ ID NO: 173161 - DNA, 1380 bp, Zea Mays
tgcacgtgaagccgacaacagatcacaaagttaatatggcaacatccttcactgtgaatgagattagcagtcagcagagaacatccggaaatagagtaaagtaggtcagaaacaataatgcccatttcaatcacttcctttttttccgtgtagttactcacgcttggataacacaatcagctatacacgccacgctttcacaatcgtccaaaaccccccaaatacattagctacactacacacaagaaaaagaaaaggttagaattcacggtttagcacatgccgcgtcgctgcacataggggactcgaggtttatggggactttacgagtaggtgctcatacagtttggtagggttgttgtgtataattgacgggttcgcgtcttccaggcgctcggcaagggatctgagcatggagaccagatggcgcgtgttcttcgtgcatcggcacactaggtctaagtattgcatggcctcctgaggaaggagaccagtcatgaagaaggggaagagcttcgagtgtgtcatctccattgtagatactgcctccgaagcccatgcagaactggacctgccagaaaccttcccctcctcccgctgcatccgtcttacttgttctagccgtgggagaaggtcgctctcttcttctttgaagtgctctttggtgcgatcctgccaatgttttgataatatcagagatacaccgaacgctaacagatagaggtataaatttacaagctcactgcctaggagttacaatggctcattgagtttattttataggacgcgtccagatatggagtgtttggtattatcagcagacctctttactaaatagctagtaggatattctatagacaaggttctcattatccatgtaagtatgcaccagtctacaatactatattaacaaaaaatatcaaaacaaacttcaaaggccgttaagagcctaaagtttcttagctggttcagagataaattgctggctaattttgcctgaccatttgttaacccatgctatcagtaaccagctcaaatcaacataagcccacacactgaatgcaatcaccaaatttacagtttgcaacaaggactgtctggtgaccacagagatgaagcatccatggaatgagagtgctcgctacgattgcaccatttatggtaaatggcctccggacctacgtcaaattcttttcaaaagcttggtaagaacatgtgagatagggccagctgtaatgagcacaaaatgttgaaacctttattgtcaggtaaagtaatcatttcttaattgcttgggccaggctgcaccctacaatcttccctcgactttcattacacaatacacatcttccaagtttccaataaaaaggagagctgtac

SEQ ID NO: 173162 - DNA, 533 bp, Zea Mays
ccgccaagtggagacaaaacaagacgccacgcttgcgctcgagaactcgcacgaaggcgacgaagtccttatgatcggcagataacaaacgtacataatgatcatcctaaaacactcttacagatactacgataattagtgcatctcgccataaaaatgcttcaatacaagaaaaatagagatttaacaaataagaacaacaccaccctgatcgcaagacacgatcagggtggcatgtcacttacccgtggagaaccctaagaacaggggatgcaatgtgccaaagcttgcggtcccaaaacatgtcaagatttatgatcccctactgaatgaatttaggaacatatttatagtacaggggactctctaatcctagcgtaaaagataaactttatcctcctatatttaagctagtttaacttattttcactaaattcatggctgcttagttcgaaatgttcctgtgtgggggcattctagtgctccttcgggacgctcttcgtgacccaatctacgttctggcccatctttgg

SEQ ID NO: 173163 - DNA, 404 bp, Zea Mays
tggcgacctgctaggcctaatgaaacccttagccagcagatcatccaattgtcgcttcaattcaacctgctcctttggagccatccgatacggggccttatgaatagactgcgtacccggaatcagtttaatttcaaaagctgcatcgcgctctagaggaatgcctagaagctctgctggaaacacgtcggcaaagtcacacaccacacggatgtcctgcacccgcaaggcagcctcaccctccaccaccatggagaaaaaaattcctgacttccttgaccgacaatccagaagcaattgcgacaaccaggataacgtggactttggagaacttcccaagaatatcacctccctacccaacggcgcctgtaataacactgtcttccaaaaacaggatataaccg

SEQ ID NO: 173164 - DNA, 479 bp, Zea Mays
gtttaaagttgcagtttatacattaattaattatttcctgcagtaaataattagtagaaaaaatacatgctttaaaatgagtaaataccttttgcactcgatgtgtttatgttagtgtattaatttcagtattatttttctgctttatttcctgtagtaaatagcagaaaattatttgaaatacatgtgaaggttatactatgcataataaaattgctctaaatatttgtgtcgctttgatctttcggacccacgtcgagcgattaaattgtataatgggtactcagacacgccgatcaggctgcgttggtaatcggatgagttatagcattagttgaatattgactgcgccctggcaacacgacgtaatatttgtgccgttcgaacttggttgcgtcatgtgattgctatgtcgcgctctccattaatcggatcgctcctgttgagtcagaccgccatcgctgagtcgcgtatttttc

SEQ ID NO: 173165 - DNA, 274 bp, Zea Mays
cacataatgaacatgtgggtgtggacgacgaaatcctatatttggcaaatcttgaaccatataatgaacatgtgggtgtgtccagagctcatcagaatgttagtgagggcagtgactctgaatctggatctgaatctgatgaagagtatgaagaagaagatggattaattggaaaagatcctccgccacctatgccaattatttgttatgacaaacttgaccctccaatgagtgtaggaagcatatatcccaacatgcaagcatttaagttggc

SEQ ID NO: 173166 - DNA, 521 bp, Zea Mays
cagacatacttcgccagggccaccacgacattaggtgtcaattggtggatctgcacgtcatacctctgcaagacctccgccacaaaacgatgcgcaagtaggcgaaggccggcgataaaaaacgcctcgaacacaactatctcaccctccggctcaggaatctcttccgcccccggaactcgtccaactccattcccaaaataccccaactgctccatgtcttgcacgcgaaccgaggagatcctcgaaacgccaaactccaccatgtggcccgggtgtaactccaccgccgccaaatcgctcatggtatcctcggacgacgattcgcccaacggcgcattcggagcggacgaagaagaagtcgacattactacataccgtcggcggcggagcgcggtttgcttgacgcgggctagatctccgatgaagaggaacaaggagggcaggcgagtgggcgaacggtttcaaaatgttagggttttgcggcgcacagaaaggtaagagagccagggccgcgccgc

SEQ ID NO: 173167 - DNA, 331 bp, Zea Mays
caagagttcaagtagggggatatagttccccgctgatctaatagtaatgggtactcgggatgtaaccatagatgtcatcctagggataaattggctaaccaaatatcaagcaagctttagctgtgacaagaggactgtgaagttagtgtccttatcaggagaggaagtgttggtggagttggtcttatctggaccaaggaaaggaagttgtcaccagatcactgcccatattgaggaaatcgaggcatcagaagttattaaggtagtaccaaaattcctagatgtgtttctcgaggatttaccaggcatgccacctaaaaggaaagtcgaa

SEQ ID NO: 173168 - DNA, 655 bp, Zea Mays
atcaaatgagatagcagatacaatgatccattgagtctcacataaagaaatgaaaggaacaagaaacaaataagtctcacacaacgagataaaaaacaaacatgtagaactcatatcacatccatggccctctataattgccatacttggttatgtatttccctgaaagccagttgaatctatgttcggtaaaaaaggtcatgaacatctctttttgggtcagtttgacaaataattcagttgtaatgaagtgctcgttactaccataggtggcaccacaagcaagcacatgtttcatcacttcatcaatggaaatttttccttttttgcagcataagaattagttgaaacagacatagatgtaactgcttattgaacgatgattagtgttgtccctgttttctgttttctgcttcttgcctttattttgattgaaccttggcgttggcggtctcttgtcatttggactgaccggtgaaacttcacattcattggtgtcaccatcttcttgtgtcacaattgattgcctcgtgtggtgtacctccttgttcagcaatggtgaaagcagtggccatatgaggagaccagtgatcaacaccaatacttgtgatgctgccaaaacatatttctagttcctccatattttgaagttccc

SEQ ID NO: 173169 - DNA, 818 bp, Zea Mays
agcacatgcatggggtttcatacatacatatatttttactttgtcttttcgtagcatgttatgcacttttttgttacgtgaagaaataaataatattccgtttatgtacctttttcactaatatatactctctttcattagttcaaaaatgaaacgggtttcattagttgaccaccggccgatcgactcggaggctgatgtaagcccaagcgtcctatcctccgggacgaataacctgggctagagcatgcaagtcgtgtcagtcagggagagtacaacgttacagttacataccagtgcagtgccgcatgcaacatgcattgcatggtacgtaccatctcggttgttggttggttggtccaaacattgcccagtttcaaaggaaagagaccatccaggcaggactcaggagcatgagctgagcagcaggaggaacgggcgagtagtggttggttgcctttgttgggttagttagttgcgttgcccggcctccgtcccccatctgcacctgcatcaacgtggcactttaatttcctcatcatgcatgcggccggtctatctttttttttttattattactggaagacgtcagcctccccttggccgcacgcagcgcaggcgtgggcgtgcccagccggacgaggagtcgcagtcgccactagcgtcgtccctggtggcgtgatggcatgcggttgaccccgcgtggaagggaaagggggacgcgacgcaggggagacacgggtcccccaaagcgaaacgccaaccccagtccctccagccaaccaggcagacaaaccgcaaactaaaaccagagcagc

SEQ ID NO: 173170 - DNA, 324 bp, Zea Mays
cacgtactctccgtcggcaagattacagtctaataaatgcaatgcgtaagatatatgtatgatatgatatatatgcttttagaatttacaacttcgaaggtgtatgatcctcttgggttaaacaaagttaactttacttatgtaagaccctttagtggtatacttggtaagttgggttaaacttagctaaggtaagtggtaggtttatttttggggttccactgaattccttttaagtcttagggaaaattgataagttctcaagttagacttattggggtgaggtttatttcttctttccttttcttttattctttttaatgt

SEQ ID NO: 173171 - DNA, 507 bp, Zea Mays
atgaacttggagattgattttgagtaggatcctgcgactatttcattgtggatactataacaaagttagagagggattataggacaacaatttatctacaggccgaagatcatgttgtcacacaagaattggagaataaggcatttcattcagctctgtcaggcgctctgaatgggatcccaatggtacagtgcctgacaaagatcacagattcagctcccctcgccgccggtgacccgcacgctcgtatccgcgtcggcgctgcgattcatgccctctatggcatggattatgatcgaccatggaaaaatcttcatcttggatgggcttagaatcctgtagccgctctgtcacgccgtttgccatgaccatttcaccacctcactgctagccgtaacaactcaccagtgactgtcgtagctcctcaaccagtgattgccacggtagatcgccgcggtgactcctcccctctatccggccgccagcgcacctttgtgaaattggaca

SEQ ID NO: 173172 - DNA, 665 bp, Zea Mays
gggaagggcaaacaaaagggtttcccgagtagctgacagcgaggcagaactcaccgaggaaacagacggggcgcgggctcgacgatggtcgcagaacagatagtggtcgacggtgagcggcggcggagctatctggtcgtgtgcgtagagtgagagagagggcgagagggttcgactgagggcacaagtgagtggggggaggtgggaaggtggggcgcggggatcaaaaggggcgaggacgtgcggaggtggccagagattgcgcggtcgtgggcgcggccacggtaggggatcatgggcgggaggttggagacgagctgacagatggggttggtgggacagagagaagcgggcgcgagagtgagaggaacgacaccgacaagcctagctcacggggcagcgagagagggagggagaaagggcgcacgggttggcgccgacaggcgggacccgccagtcaggcaccgagggcgcgtaagcgcgggcgcgcgcaggctgggctaaatgggccgacttgggctgaattggcttttctattttctatggaatttctaattgtttttctatttattttctctagtgttatcaattcaaattcaaatcaagatccaaattcaaaccaaatcaaacatgtgcaacaattcaaagaatatttggaactcaac

SEQ ID NO: 173173 - DNA, 396 bp, Zea Mays
tgggtggtcattccggatttccagtcacatatgcaaggatgaaacaaatttttgcttggaaggggatgaaaagttcagtgcatacatttgttgctcattgtataatttgtcaacaagccaaagcagaccgcactcgtttacccggcctccttcaaccattgcccgttccatcttcgctttggcaaattatttctatggatttcatcgaagccttacctcgctctcaatcttacacttgcatcctggttattgtggacaccttcaccaaatatgccaacttcttgccgctcaagcatctgtatacagctttgtccgtggcacgtctttttcacgatcaagtgtacaagcatcatgggttgccccagtccattgtatcggatcgcgacaaggtgttcc

SEQ ID NO: 173174 - DNA, 1550 bp, Zea Mays
aaaatcattttctaattcctttttctggattttataatattctggactgggcgccaaataaatcgagacacaggggcctatgcgcaatgtttaccagactcagtgcacaggatctgtggactgcgggttagttctaaactaatcgaggggctcctatgcaaagaggtctggcgaaggggtaagaacctgccttggccgtcagatctcaaatcaacggcacctgcttgcctgcgccaagatccaaactctaccgctgattatcaaatcaacgcaaccaggccatcccctaatcccgaccgctgcttttagatcctgcggtcaggaacgctcccacatcccaggtgaccgggcggcgtcgccaaggccttccccacggtggcgggttcgccggggttggtggagccggcgcccccaatccctaatctctattccgatcggttccacacgatcctacgaatgaggcgaagatgccaaggggcataccaaagttaggggtcaggtctacagagctaattagagtccatggcggctccatggtgaggcttgagctccggtgagcaattaccgaaccaatgacccgcaatccgtttttgttcgaagcgctacgcattgcacagagggaaacgaagacttggcggagatccacaccttgattgacacgggcagaggttttgtccacggagcgaggcgcagtcacggcggcggcgagctaatacggccaccgagaccgttcttctcccctcgcaccgaccccaacgcgatctggcgacaccagagagcgagcagacaccggcaacgcagcgatcaacagggtcttcactccgaacgaattcatgtggtggtggcaaggatagcagtggtggcgcggctcctgcggtcaatactttccgccgagctcacgaacgacttcgtctcccacccgcgacaaccactactccacggtgaaggactaggaccacggtgcggccgacacaagcgcaccgcggctacggtggacttcgatccgcactctccctctctcatgcgttggtcagtgatggttctgtatgatgcggcccatgtgagttgccagcagagggcgcggggccggttttatacaccaggaaggtagagtccgcgaggaaggcggcaaccagatcacgcgcggattccgggctggttgcaacgaacccgcggcgatggattcggctgccgtctattgagaagaaagcgctgacggcgagggtccaccggtcagccaaacggatgagcgcgcgagagaagtggtgagtctgcacgcgggggcccacgggtcagtggcacgcgcgagtgggcggagcgcgcgcgtgaagaagtgaatgtgggccgcgcggggtgaggaaagctggggtgggctgaatgggttggctgccggcccaggtaaggttttaatctttttttttattattttctttcctaatctcttttcttcctttccaaattcatatttccatttcaaatttaaattccacccttgtgtcaagtttatccacagattataagtgcaattttaacatacccaaaaatgagag

SEQ ID NO: 173175 - DNA, 977 bp, Zea Mays
gcgggttggtgagcatcacccgtgtataaggatgctaaaacaagaacagagagggcatgatcattcctgaagagggctggccacggcgagggtgctttcacgacggtggagaactgttttgggggaaacaagagattctcgagctctggggaacgattcaaggcacgaatggctccactggttgcgtaagtacctaacagagcgagtggtagtggcaatttataggaggcttaggcggtggtgctcaatttagccgagcaaagctggcggtcggaggggaaaagagctctggcgtatgacacaggtggcctttcaccgtggcaggtgctccggtgatcaccggacatgcaccacatgattcaccgtgatgagagctagcgcataagcacgtggcgcgcaacggcgacagctcgacggcggtgagagttatccgagcgaccggcggcaaggggggtacgtcaagcttagccgcaatccgagcgcaagttgatcagatgtcgagatctttattcggctgagcttatctgctgaccacggcgcacgaatcatggcgaacaatcaaccactggcgacagatcaccggcgagggggggatcgtgatcttcttcagtttgggacttactgtaccatggcgtttgctcttcagtcagtctgacagacagagtttgggcctcattttctctcaaatttctgtggcaacacatccagatctctgcagcaatattatagtgctataaaccagctacaactcaactatagggattaaacttagttgagcactggatcaaggttgaatccaagtccaaagttagctctgttacactgaaattctgaattccagagttcatcagcctgacagtccaactttgggcttaattatctccaatatcttcttaacaactatgcttacactcttaagcaaagttgttcttctttgtttgatctacaagtttgatgtggtgacctagggcaaaaac

SEQ ID NO: 173176 - DNA, 570 bp, Zea Mays
gtatgatgattgtaaattcgtcgagcatggcacagagaagtgtgtcgtgactgtatacattggatccagtctgcaccatgtggaatcgagtgtcactgctgtgggacacagattcaaagacacctgccaagtcgtcgctcgcaaggcattgaggaccctgtgtcagatttatgaagaagaagtggttgacaccccgctcagattctttccgccctttcagagagaccatcccgtttggatggccagaatgcgtgcaattgaagggcagcagctgcttgaggatgaccccatagtcatgtaccgcactgcatacctgctcaccctggatgcacagtatgatttcttggctcggcactaccgtcagatgattgcccgagcagaagatgcagagaagcgcaaccgtcagctccatgtggatctcacttagctcaagcccatgcaactgccttggaaagtcgtgaagtcattgctgttgaagccttgaagcaagccaaggatgagcatgtctagaagctaatggaggcctacttggtcacccacaaccaacgtagagccctgcggatccaagag

SEQ ID NO: 173177 - DNA, 896 bp, Zea Mays
tggggacagttgttcttgaaatgactgggatctccgtagtgccaacatgcattcgccgggggttggttgcttgcaactgagggggcatggaaggagctctgactctgctgactgaactgtgacggggtgggtctagctggtctactgaagcttggtcccttgggtggaaatccaaaggatcgagttttctggtgccggtcttgctgctgagcccggaggacttgaaattttctcttgagatggcctttttcttcctcctttgccctttcaacttgcatggccttattagagaggtgagagaaaccgaggaagtcttggctagctagaattgtcttgagttctggcctgagtcccttcaggaagcgggccatcttcttgacttcggtactgacgtcatctggcgcgtagcgggctaactccgtgaacttgtgcacatattcactgacagatcttccgtcttgagtcagttcccggaattcgtcttccttgagctgaacgagcccttggggcacatggtgctcccggaaagccgtttcaaattccgcctaggtagcatctctgatggtgacgttgaaggtatcccaccaggctaaggccatcccggaaagttgatgagcggccagttgaacacgctgattttctgggcatccgatggcttccagcttccttttaatcgtgcgcatccaatcgtcagcatcgaggggattgctagatccggcaaacgtgggaggcttgagcctcaggaaatcccccattctgtcttgcggtcttccaccattcggacgttgatttttcagacttcgagtgaggacctcgatgagtcgggtttgattggctagaacttgggctagatctaagggtagttgtggaggtgcggggaggtgggtttcactttc

SEQ ID NO: 173178 - DNA, 722 bp, Zea Mays
tggtgattgtgagttggagactagtagtttacgattcgtatgatttggtcggtgtgcaaaaatacttgtgaatatgaatgtttataaaaatgttgtagtgtatgtggtgtctcggattttgataataatagacaagctgacgtgtatgatatttagcgggctatgtcgttgctctagctagccgactcgttagatgactttagttaagcttgcagtcacggtaaatttgcttgctgcattctaaatgcgtatggttacagtcgcggatgaaaagtattagtgctcatgtgatgtcgaatttaaaacgcaaattgttgggtgattatcgtgaagaatgcgttgttaattggttgtagtaattttagtgcactaaatgatttggataaaatttgtaagtctactcgttagtccttatttaattaatttaactctaagaaatggtaaagtgctagaatgattcaagtctctagaatgcggcaattcttgaattatatagaagctggaatctattgattgctgttttgggctgcacacattgtttttgttgtactgtttgtttgataaaccaaatcatgttttctgtagaaaagtcatatagaagagttgtagataacattattatcttgcttgtactaaaatttgataggcttaagtctgatcgtttaggagttatgatttttacaaattcagtaactgaatctgtccaaattctgtacagattt

SEQ ID NO: 173179 - DNA, 462 bp, Zea Mays
gttggcgcccagaaacacggtgtagccagaggtggatcaacgcgtgtcaggcaaccgactcaatcaacgtctgtgtagacgatcggctcagaagtcgaagagggccgaataagaagaccataatcgaggataccgtggaggtagcgaagaatccacttcgcagcggtgaggtggggctcccgcgaggtgtgcatgtgaaggcacccgtgctagactgcgtaggggatgtcgggtcgagtgaaggtgagatactgtagagcctcggcgaggctccggtatatcgtcatgtcaccgactggggaggcgtcgttgtcgaagttgcttctgttgttgggtgcagcaaagcttggcagcgatgatacattgtgttcaatttctttggaggacaggcttgttagtgttggatacatagaaaccctaaccctaattgggtaggggctgaattagtatatagccaagtat

SEQ ID NO: 173180 - DNA, 638 bp, Zea Mays
gcgctccgcacgggaagcttaactccggcgagctagaccggccggaggggaccaagaccggcgctagtcttcggtttaccccaaaatctaccccagagaggcagttcccctcattcaatttcagaattggagctctacaaccctctgcccacagtgacagcggaaaaacttaagggagtcgcgtgttccaagcgattcatggcggtataagccaattaaaggggtcggggagcatcacgggtacctgaggatactcaattgagggatcagagggcgtgagttggcttgaattgcactggccgcggtaaggctagttcacggtggcggaaacccggattggggagaaaccaaaattcaagctttcggaggcacggttgctaacgattgttggtggctgggtgggtgatgatgttacgtagctaggggagggctcaatttataggcggcttcgacggtggccaggaattttaacggcgacgcgcggcggtcggagataaggaagaatgctggtgcagtgaacacgtgttcactgtcgtggcagtaactccggtggtcgacggggagtttagagggagtcacagcgatgcggtggcgcggttaggacacgcggtggacaacaacgatggcacgacgacggt

SEQ ID NO: 173181 - DNA, 914 bp, Zea Mays
ggcgacccccgtgccatcaccggaatccgccgcgcggaaagcttgccagcacatctgaaatccgcacttcttctccaactccggtcgacaacctataaattgagccctggcgctgcttcttcaccacatcgcaagcacgagtgcctgtgtaattgacttattttaactggaaagcttacacagtccgcaaattcctgttctctatgttcttaactccgtcgcgaagaacccctccgtggctagcattcctcgggttagtacttacccaattgcttcatgttcttgctttttgttagcctcctattgctctcagtgccaaccaatcgaaattcggccgaagcctttcaccggaacacacacctgctctgtaaagcgccgccgtgacaccctctccggagccccgcgtttctattcgtgcccagtccaaaatttagtatgtgtgtcacctctggtaggcctatgaagctttcccaagcttcaatttggtcgttcacgctgtcggttggtcggaacgcttccatccgtatgaccatccgccctgtcaccgtggaccggttgattcatagtcccaatggtgaaattggttgaggggaattgttcggtaggggttcaattgtgtccctgtcgcccgggagctccagccgtggcgtcgtccgaccggaatagggctcgccggagtacagcaaggtctgttctttgtcgtggattggccgatgtaaaagagtagaacccgggggacctttctgggaattgtcagcgactcatgcaatagtgattgaacccgcttcggaatgatcagtaagtcgaggccctttctgtaaagatgccagcgcgggcgcgcgcgcgattccgcgtgggcctgggccgcctggtttgatttcagcccagcactgttcagactttccccttttctt

SEQ ID NO: 173182 - DNA, 359 bp, Zea Mays
gccatacttgggaactcagactctaagtaaataccaagttaccaagcgttatcattatagaatcttcctatgatcattaataaggtaagatgatctaaaacccctaattatcatatcttgagcaaaagagaagtcagacaaagagagctaaatgtaccttactaccatggcttgaccaccacaaatcttgattgaagcttcactaaacaaacacaaaagaagagaaacaagagcaaaaattcagcacacctttctctaaaacttcagatccgatcagaacttccccgtgttcatcacaaaaacaacctcaaatacagtcgccccaattaacaatgtcgtgctaattacctaacctaacc

SEQ ID NO: 173183 - DNA, 662 bp, Zea Mays
gaagaaggccggtgcatttattagaccgaaagacatcacaatgaactcatacaacccatacttggtaatgaatgccttcttcgggatgtctgaaggtcagatcctgagctgatgataacctgacctcagatctatcttggagaacacactggctcctctcaactagtcgaacagatcctctattctgggcaaggggtacttgttcttgatggtgacctcattcagagcttgataatcgatacacatccttttggtgccatctttcttctccacaaataggacaggggcagcccaaggtgaggtgcttggccagatgtaacctttctctgacaactcatcaatctgcttcttaagctcaaccaactctggtccagatactctgtaagctctcttaaagatgggggtggtgccaggaagaagctctatggcaaattcaactttccgctctggtggcatacctggcaagtcctttggaaacacatctgggaactcggacacaaccttgatactctcgattgggtctgcttcactgctatcgacagccatctgataataacttcctttcttcggctcaggcgggactaactctatcaccactttctctcctagtggggacaccaacttgattgtcctcttatcacaactgataactgcctgatact

SEQ ID NO: 173184 - DNA, 647 bp, Zea Mays
ggatgggcttattaccggtgatcgttgcctcagtgacgccagccgcgacgtaaggcggacggtggcggagaaatgaagtccggtgagcgattacaccctgcccagcgatcgacttcaccggtgggcgacgcgtcaccccccagaaggcttggggaagctcctagaccgatattcggggacccgacgtcggcggctacttgatttgaacgcggcggcacgctttgccctcacggtggagatagactaacggcgatgaggatgcgctattgggttgaacggctgagcatggtcaaaaggagcaccggggagtcgtgttatatatctaggacgaggtctggaatccggttgcagtcgtcgccggggatcccgcgtcgtcggcaggggatgcggtgaagtctgttgcggagcctagcgaagcgggtccaggagtcagtggggggggtgagacgcgaagcgggtatcggacgggctgacaaaatggtcccgcaggacagtcgccagagcacgcgcgtgagatggggcagctgacacagagttcccacatgtcggcgccggtaggttagttgggctgcgcggggaaagacttagtgggccgaattggttaaaattggcccagctaggtgtctttggtcctttcttttatttct

SEQ ID NO: 173185 - DNA, 472 bp, Zea Mays
gaggccctcaccactgccacctacctccttaaccgtgtgcccaccaaggcggttgctcaccccactccttatttcgctctcttcggcatccacccctcctatgatcatctctgtgtcttcgggtgcgcttgctatcctaatctcgcctccaccactcctcataagttagcgctccattccactcgttgtgtcttcctcggtactcccccgaccataaggggtaccggtgcctcgaccacacctcacatagagtcctcatctctcgtcatgtcatcttcgacgagttagatttcccattttcgtcttcctcttccactgcctctctcaccgagctcgatgtgttcctcgatctcgcccctgtgtcccccactgtcgccccccttccctgcaggttcgttcaccgcacctcgccgcgtggccccgcctgcgacactctcccccacacagcctcgtgcggcctcggcgtcccctg

SEQ ID NO: 173186 - DNA, 752 bp, Zea Mays
aaaacacgaagacggagggtgagtgcggacctaggagcagctagccgcgatggggtgattcacggcggcgcagtcgaccagtttgggggaaaacccaaattcaacggctatagtggctaatcgagggcagggatgaatgctctggcttggtgataacatagcgtagcagaccatgccatcaatttataagtgcgctaagcggtggtgccgaattttgaaaggggaagacctcatatggatttctactgcgacgtggtagttcttctaagcacgtggcgtggctacgatcgacggcgaactccggcgaggacacctatgtccaattgtgcagcaagtgtcacagtgaatagtccggtgataaggctctacacctttcctgagttgagatctttcattgcccacggttattcgcaagccacgacacacgaatcgcgacgatcgacgtcaatcgtggcgtagggtcaccagcggcgagattcactgaatccgcaggtcttttgtcactgtaccatcaaaggcttcgccagttgttctgaccgaggatattcagaggcatttttcttaaatttttgcgtgacaacatgctaatctgtctatagcaaacttgtagccctacatacaaactacaattctgctatagagatcttgctcagttgcttactccttcgagcatgaatcaagcctaaagttcttcaaaactcactgacagtcaatattcagtctctgtattatctgacagccagattttaggg

SEQ ID NO: 173187 - DNA, 371 bp, Zea Mays
gggcagtccgcctgctcaccggcgctccgccgctggtgcgcgtggttccgtcgtctgcggttggtgagtggggaaaggtgagagatgatggacggaccgttgatacgggttttggcgactaggatttgtccgggtgaccgcttcagccggacgcatttcggggcgttgatctcccatcgggcggtcagcgggtatcgcgcatctcattgaacctgtgccgtgggatcgggatccaacaaccgtgataacataccccttcaagatttaatcaggaccgttgctatctgatctggcggcctagaggtaagcataccccttcgtcgtgtacttctttcaaaagagaccctggggttttacctattcaacccgcc

SEQ ID NO: 173188 - DNA, 1900 bp, Zea Mays
gtcttcggcggcggcgttcctcgtgggcagtggagtggagatccacacgggcgttggttggttttctgtccatttttgttggtaagaaatcctaagctcacttggataggaatactcttgtcataagaattgggttgtctcttattcaaaccaagtagtgatttctatccaccccattcttagttgtggatttgtgtgctgcgcaagtggttgggttagcttatttggttaagttcctattcagcgtatgaggtcgtcattggtttactccataggacttcttggtacatggcagttaaatcgcaggtgcgtttatagtttattttccaacaccaacaccttttggggttcagctgaatccccattccccaaccaagtgcccctgcactggaacaaggtagtatacacagtgacatagagagttctcaacaggaacacatctggaacttccattagtttattttatcctctaaatagcttgtctgcagcaactatatgtccataacaatttggttggggttggtaaggggtgcatgaatgggagagaaggtacaatgttaggatagcttaacatacattcgaagtttcctgttctgtagttggctgatacctaaatgttttatgctgttgtcataatgaaaacaaaccctattgagctggcatggctccatccttgcttagcgctgtgatgacatcctagtggaaaaagtgttggccttgtgacaagcaaggccagttgctatagttgtatccacaatccacttatctcccaagtattctttcactaatctgacctctgctagcaattataatattaaattgataaagtgactaactaaccagacatactgcactccgattttcagtaattataatcacatccttacatgtgacagttaaaatgaccaaccagaatactgcattccaattttcagatatgattgtcacacccttacaccttatagttggttattttgaaatcaatctatttttgcagtgcttttgagatagcacctagaaatcctgtgcagtttgcccaccaacacaaaaaaaatcctgagcagttatatcgacatttcttcattcacatgaaatgtcacttcttagtagattcttctacaagaggcctcctgatggactactggagtttcttgacaggatctatggtatgcatggagaattttactatattgattgccttcttagatcaatgtaacttattttatgacagctcaactaatcacatcttttggcattgtacagtttttgattcatgcttcagcactgaagttttgcctcagggaatgtacccagtgtatttaattgggattcttacagagttgcatgaagagcatgtagaatcctcatttctggcaattaacttcagagatggagataagagaagccagcttgctgatatactacgtgaatacaacattccagtcattgattacccccgtcattttgagggttgtcctgtgcttcctttatctcttattcagcatttccttcgtgtatgtgagcactggttatccagtgggaccaatcagaacattatattactccattgtgaaagaggggcgtggcctttgttggcttttcttttatcttgtcttctcatctacaagaaactgaacagtgctgagcataaaactctggacattatttaccgtgaggcacctaaagggttcctacagcttttttctgcccttaatccaatgccatctcaactccgttacatgcagtatgtagccagaagaaatatatctccacagtggcctccaatggaaagatcactctctttggattgcctgattcttcgagctattccaagttttgattctgataacggatgcaggccattagtccgcatttttggtcgaaatcttcttggcaagtt

SEQ ID NO: 173189 - DNA, 542 bp, Zea Mays
cgtggagccttgtcaggcgtggtgatcgacctaggcctgctgaatcgctcgacgaagtaattgaggcacctcggatccgcaagctctcgtgtacagcaccaactgcgtctcaatcgccagtaagttcatgattatcggatactccttcgttccctattcgcgtaacagtcgttcaatcgggctttggtgcactgggttgcgatgcggttgcctccggcgatggcacggccgtggggaggctcgggcgccgccgcgtttgtacgcggatgtggaagtctgcgctcagtcgttggacagaaagagagtggtcaggattagataaaaggggtaccgattcaatagattaggtcgggtcgttgatcagaggatcaagggtttagagcagtgccgggcgtgattatttgccgtccgtcgatctcggatccgacgcttgagagagaaagtgtgggtttaatagtagatgatctaatctgctgctcacgtttttaatctgacggtcgtagagactccatacccctgcgcggatcaaaattgcacaagag

SEQ ID NO: 173190 - DNA, 592 bp, Zea Mays
cgggtttcttggccatgacgcccgcccactcgcccacctctctttttagagcccctccagtgcctcgcgcacatccctcgcctcatttcgcacaacttcaccctctctcgtgctctgccctcgccgccagccaccgccggagacccgcacccatgttcccagccatctagctcaccggagaccgcgcccagcctccccgagctccaccccgaggtgagacaaccatccccgtgcccaatttcccttattgcgccctgtgttcgtccaatttcgccttcaccggtgctcgaccacggtggtccgtcgagctcgcgcggtggccaccgatttagcccggtctagttcaccggagtagtttcctgtgtcacccctgtctctgctgaagccagcccaggccttagcgcgccttaagtcccctccccgtggccggaatcgctcaccggagtttctccggcccgcccgagaccctctcaccgccgttctcccctctttgcccgtggattcatggccttttccccgccattgagttcgccatggcgccctcttcccctctacccaactccggcgaccccggagccaccctagctcacac

SEQ ID NO: 173191 - DNA, 580 bp, Zea Mays
catcggaaagactagaaatgagagattagattgatcgacacccggtacttgagaatcggttggagcagattacaagacgacatggtagatctcgatgaatgatatagagactcgacggatatggtcacaacatgatcctcaaggaaaatgattaccagattcggacaaaggagaggtaggaaaacaagatctgctaggatgagcagcagaaatactatgaagattcaggacaggatctatggaaagaaacaaggccttactaatgggatatatagggtttgtgcaactagacaccaaacaacaattgtttttgacacaacaagtgcacaaggagacttgggttggtctagcggtcaagctatgggggtctacaagttgtgcaggtgcaacttcaagggtaaaacactcaagggctagaaaaataccaacacaagtaggatatttttaaaagaggtctcacttgctaaattcaaggttgtttggatggggtctttttatgaacagaacaagaaacaaattttttttgcaaaaagggttgaacatttacaataccacctagatagcaaggaaagagaaacac

SEQ ID NO: 173192 - DNA, 388 bp, Zea Mays
ctaacacttcctagccaaagttgtgtgcaggtctaggtcccagtcaaggctacctcctggggaccgggacaccaactctttcttaggtatgctggtatctagcctcaacacgacgagcctacgtcccaggggggccaagtaccaggagaggagttgataaaaccacacacaacaagaacaagcaccatacagataagagttgtttaattgatagttcccaaaagtatcttacaaaaacaaaagttattacattcgccttcaagcagagccctagcctcatttctacaggtatgagctactcgacatcagtaggtcatgctggaagcgtgcggccgtcgtctccacgacatcttgaacgtcctcccaggcgacgtcttcagtatcggcc

SEQ ID NO: 173193 - DNA, 1305 bp, Zea Mays
ttaaaatacaggggctcttttgcattagcgctggtcgaaggggtacggttaattcctagccgttggattagagactggcggtacagattagaccgaccccatccccaatcggtacgcgatccagtccgttagatcgcgatccgatggatccagactcctttgccttgcattaaatcctacgcgctcgccccgcatcggacggtcctaacaagcctaggtcgaaccgttacccggcttctgatcctagccatccatctccgcatcaacggcccaggtgtctcccccaatacccttgtcgagctacggcggcaccgcccagggcacacggcggaccatcgctggagcacagcgcgcacccgatttgaggccccataaccaaattctctgcttctactctatccccatgagttgaatgcaagggcagtgttaataccttgattcgatgtgctgaacgccctggccacggcagcgagcacggtcacggcggcactccgacgtcgttgacgaattcgttggacgccagcccccaattccccgcagagagctcggaaacgccaacagtggactaaccgaagcacctagggtcgattaatggctgcggtagcggggtattttcgatatgcgcgctcggcggtaatggcggcttgaagatttgcgcggctgggaaaatgtagaggagcagcgatgaggagggaaggcgcaggggaaacacgatgcccgatttgtatagcccaggggactggagttcgtgctgaccaaaggatgcggcagcacgcttcgttgcaacggatccccgaagaagccgcgacggatacgggtagtgcgcgaggtctgttgaagtcgtagggagaggaggcaacagcacaccgggtcaatccattcccacgattcgagcgcagagtcggttgtggatctgggagagccggtggagaggttcgcgccagcagaggaagacagacccgcggagttcttgttggagctcgcgtgggagatggacctcactcctagggcccacgagccagtgaagaggtgaggggcgcccatagatgagcaccggtcgaccgacgaaggggacccacctgtcggcacacggtgctgtggcaagttgggccgcgcgggcgaaaatgcgtattgggccgaatacgagttcagggcccagttaggctaggttttctttattcttttctctttttttttctttctctccttttcccttttgttttcaaatcctattcaaattttggatccaaattagtgccgaaattattttcaaatgattttgtgaaatctaaaatcccaatttta

SEQ ID NO: 173194 - DNA, 386 bp, Zea Mays
aacagggacactaattttggtatagaaactttagatttctttgatggtcgtggatcccttgatggctgtggagaaggtggatccctgaagggcgatgtatgtggcggagacgattggccaccatgaggatgaggagaaggagggtcagaaagaggatgaggagcagcatgtgaagttttaggcggagacggttgggcctccgatgacgcctgtcgtggtggatcaaccaatttgacatcccttctaggccaaaggataaaattcttgatagcttgtccaagtgtctcgataccttcgggcccagggatgtctagcatgtcgtcctcggatccttggacgactgtcgtcatttctaccctgaaatattcttctagaatgtcggttcc

SEQ ID NO: 173195 - DNA, 439 bp, Zea Mays
cgcatagtcaacctcatcatgaccgaagactggcgggcaccaataaccctgttcctgcaggggtactatcatccaactgatatcaatgaggccaagcgccacaaacatcgaagtcgggactttgcactaatcgaaggccagctttacaagaagggggtcagtcaacccatgcttaaatgtgtcaccgagaccgaaggcgtccaaattctgcgtgaagtccacagcgggacgtgcggctctcacgcagggcccagggccctagccagaaaggtgatccgtcaaggtttctagtggcccaccatgatctgcgctgcaaatcgggtcacaaggtcctgtgaagcctgccagaaattttccccacgctcgggaagcccttcgcaattcacaaagctaatcgcccacacatggcctcttcagcgctggggcctggacattgtcg

SEQ ID NO: 173196 - DNA, 418 bp, Zea Mays
ggttcttgaacattatcaacctcttcagcaatatccaaagcaaaagcaacattgcactcttgaatcagtcttttgggccaaactatcttcctcctagctcgaccttcagcaagagattgaggatgagactccacaacaggtgacgaggcactgataggagatgaattttcagcaggttcaatagatggtggagcatgatcatcaacatcccccacgtgctccacctgaacactgatagactcaaaattctggttagtagcactggtagatacagccaaagtgaacatagcaaattcattgaacacaacgttcctactataaaatgccttcggtgtatcaggagtccacaatttatatgctttaacaccagatccataacccaagaaaacacccttaattgctctaggctccagtttac

SEQ ID NO: 173197 - DNA, 969 bp, Zea Mays
aagccatcacccgaaattcaaattgtcccaaatgcgtttgaaaggctgttttcgattcttctcctggacgcaagcggatttgatgataaccgaccttcaagtctaatttgctgaaccacttagcttgagtgagttcgtccattaactgatcaaataccgaaactggatattttcctttaactgtgatagcattgagataatggtagtcgatgcaaaatctccatgtcctatcttttttcttcaccaataaaactggggatgagaacggactatgacttttctgaattactccttgggccagcatctatttcacctgtgtctcaatctcgtccttgagcactgggggataacgataaggacgcacagcaaaagggttggcgcctggcaacaatggaatggcatgatcacactgcctggtcggtggtaaaccaatcggatcatcaaatacttctatgaattgtgatagcactgcttgcaccctgtcgtcggtagtgatttgttgttgctcgctggttggtgcttgagaatcagagaacagacgcagttcgatcaccgctcccactggcaaagtagatagcattccttgaagacaaacagtggtgcccgataaggaatagtaatccacttgtgataccaatcaatatgcatgggactataatgctgaatccaatccatgcccaccactaaatccacggatggaagaggtaaaaatatgaagtctaaaatgaactggtaagtagccatagaccaagttgcttgtggtagatgttgcgaataattgatgatttatccattagccaccctgaccgccatggggcattgcaagggctatatgtccatcaacagtgacacaaatcagtcgctaataaaagagtgggttgatccagaatcaataagtatcatcaaaggatgctgttgaatattgccctgaaaacataatgtggatactgcatctgtccctgtccacgc

SEQ ID NO: 173198 - DNA, 885 bp, Zea Mays
gaccctccctctcacaatagtcacaatggaacctcacctctctcttgggtggattttttgtgggaggggctttctttttgggtggctgggcttttggagggggaacactagagatgtcaggaagggtgtcaattgtgttcctgagctggttaagttttggaacccacatttgtttctaaggaggggctctcacaggctcctcaatcacacactctctcacatgggtgataggcttaggtggggtgattttaatatgcttggggtggctataggtttctctgatggtttcaatccactccactgaccaaccttcccaaagcaagcaacactttcatctttagcatcaaagcctaatcccagtccactagttcccctcttgaactcgcagaccaccatgcccaactaaggctcaatgcacgacacccaactcaagtcccatcgaaggtatgtgttttcttctttgatccgagtcttatcgtgcctgtaggactcaagagtagtctgcaaaccttcacaaagtgcacactacataggtgcaggggcactcactgagctagccttctcaagtaagggcgtaaggctatcctagcgtttctctctgctagcttagtttgcaggccaggacaattggtacacgcacctaacaagctagatcttgatctcagctcatcgagctcatctagaaaagtggcgtacttggtctgcaaagttgtgatgttcgacatgtgaagagcgcactcatcacatttagtctcgtcaggcaccacaactgaagctctagcagactcaaactccctaagcgtgctctcatacttgaatttatctttcctctcatgaacagcaagcctaggtagcttatcctgactagccaaagtagtcgtcaac

SEQ ID NO: 173199 - DNA, 633 bp, Zea Mays
ggtgattggtgctgttcttatacaagaacatagcgggaaggagagtgtggtggcttatttaagtcgtcgcttgctggacagcgaaagcaggtatgcgtttatcgaaaaactttgtttatccttatatttcgcatgcaccaagtttagacactatttactcttaagtacttgtatcgtagtgtgtcaaatagacgtgattaaatatatgttacaaaagtcgattcttagtggtcgggtcagaaagtgggcatatgctttgatagagtacgatctaatttatgagtctttatcttctatgaaagggcaagttatagctgattttataactgatcatagggttgatgtagagcaggaaatctcatgtcctaatacttgcccttggcaattattttttgatggttctgtgtgcaagaatggcagggaatcggctatgttttggtgtcaccaaatggtctagtacatgaaacatcaattaggattgaatactgctgcactaacaatcagattgagtatgaggctttgctgtttgggttaatgcatttagatggtatgggaataaaagatgtagacatgttcagggattcattgcttgtggtacagcaggtgagaggggaatttcagtgtttagatggt

SEQ ID NO: 173200 - DNA, 1599 bp, Zea Mays
gtgagcatgtcgcaccgacttaaggcgtttctgacttaagttgattgctccattagtagggtatagtgatcaccctaagctatgtaagtgtgaaggtatgctgcgccggttttaagtcgtacccgacttaggccagttgttgatcgagagtttgtatgcagtagaacatggtagctttattgataatgagaccttttgcttacaaattacaactcgcccgccagagttttgaggtaccgctatggatagaatttcctaaggtgctcaatgttccacgaattccccactttggtgccatccatttgggtgagacggtaggatcctgtccgagtagcttttgtaatgatgaatggtccttcccaagggggtgacaatttgtgccgtccttctcccgccagtagtcggcggaggactaaatcacccactatgaaggatcgatgccgcactgctttgtcatggtagcgcctcagggtttgctggtatctggccgactgaatgaccacattcagtcgttcttcctctaatatatcaatgtcttctagcctggttgcttctgtctcggttatgctttcgaatattagcctgggtgctccaaagatcaaattcgctggtaacactgccttcgacccatataccatgaagaacggggtgtttccatgtaaagcccggcttggatgtgttcgcaggccccagaccacataggacagttctctgatccattttcctgcaagcttttcgctcttgtcgaacacatttttcttgagtgcatcaagtatcatctcgttggctctttccacctgcccattagctcttgggtgtgccactgatgcataattgatctggatgctcctctgctcgcagaaatcaaagaactctgagctagtgaagttagatcctaggtctatgatgctgctgttttgtatcccgaatctgaacattatctcttgaatgaatttcaccgcttttgctgaagtcaaagaggtgatgggtttgtactctatccattttgtgaacttatcaatggcaaccattatgtgagtatatcccccttgagctttcttgaatgacccaatcatgtctggcccccagcatgcaaacagacaagttacaggaatagtctgcaactgttgggcgggtaaatgctattgttttgataagaacttgcatgcttcacactgcatcattcttagttgttggccagtaaaacccgaacctaaaggctttccctactaatgtccttgatgctgcatgcacgccacattgccccacatgaatctcatctagcagctgccttctagtagccgagtgaaaacacttcatgaggactcctcctgcgcctcttctgtacagcagaccccctatgatggtatagtgggatgactgtctcgcaatgcgctctgctacggctttatcatctggttcttccttgttgcttatttatctgatgattggctctctccagtcattgagatctacttctgcctgacccagaacatgacactcctcaatctgctctatggtgacgcttggctggtgtatctcctggacgaacaccctaagtgtaacctgggcccaactagaccccagttttgacagtgc

SEQ ID NO: 173201 - DNA, 415 bp, Zea Mays
gggattgtcacggagaggatggaggaaaaggtgaaggaatcggaactgaacaaggctgaagaggagaaggagctgggcacggcgtgtgaccaggcaattgcatggcgtcgtcccaggcggaggaagagcagaagaccgagaagcgtgtgcggaggcccaacgtgcgtttaagcggcccagagtggcgtgcgtaatgctcctgcgtgagcggcccagatacgaggcgcgcgtgtggctcctgcgtgagcggtcaaatactggacgcaatgaataaatacgctggccgaggggaagtctgtaagcaagattttgatccatcttcaatatagctccatcccgtacctgctcctgcttccttctaccttcttacccctcctccacgttacagggttgaagctggggggctcagtggggc

SEQ ID NO: 173202 - DNA, 889 bp, Zea Mays
ttcatacatcgcaaagaagtgaattacgaatagtttacatatcagattcaaaattatacacatcgaatattacagtcttgttatagcaaagtttcattgatcgtctaaaaatgtttttacaaaaaagtagtagtcctccttcaggaccttctccgcaacttcatttagcaatttgttaacgacttcatcaataacagattcggctatattgatgacctccagtgcttcctttgcttctggatcggccaggagatcgagcggtaccgacgacggagataattcagctaaataaagaaaaagttaatcagtccgaagctataaaaacaaatgccgaagttaaaaatcatgacataatacctatacgttttcacactctgcagcttcttcagcttgtcttgctttggcccgggtctcatggatgtccttttcactctttttcataatttcgtgagccatttctcggccaccatttgcccagatgtcgttataaaatttcccgcctattaaacttgcttcagctgaggggtccttcgtatcatttacggagaaggcaacttcgtcctaggccatggttttaatatggttgcatcccgccttctctaagatagctgaaatcccccgcgcaccggagaacgcgcatacatccccgcggtcacttagaatttcttcaaaggcttcggcctccccacttaaccattcaataacgccttcggggtcgccttgtatgaagttttcttcggaagaataggcgcccacgttggcaaaactggttttttattttcttcacacagtccatagatttttcaaagcatcttttcttggatgtgcgaagttcttcaacgtttttctctaaatgatttgtccagtattcactaattcctcatttagc

SEQ ID NO: 173203 - DNA, 382 bp, Zea Mays
tgtatgcatgccatttcctggactaaaaatcgatcgcagctttggttcttttttgctttcctgtgctaatgatggatgcagtctacttgagacgtcggtaatgctgcctgctttggttgggcatcgggagttggtgccccccagatttagggtcttgtcgagcgaatgaacaggactaggtgcttccactaccccgcgaaagggtcttatcacagtgtagaaaagcagcactttttacctttcccttgcacgaacggcgacgatgagacgctgataagtatttctttggacatgcaggaggatgatggaaagcagaggaacaaagcttgtcaaatgaaggctggcccccgtctcatgccacttgttcttgacatcagaaagc

SEQ ID NO: 173204 - DNA, 789 bp, Zea Mays
tcttcttctattagggcttgggttcaaactcaacctcttgcaccacttttttaatattttacgctaatttaaccacccgattcgttaatgggccggatgtagagggtgtgtgtatggagggatgcaggattaatttgatataaatgtgagaggttatttatagagatgtatatagattatagccctattaattaaattttataatattcgctctcatggagaatcgaactcccgacctgcggtgctgctgagactgttgtactgtgactactaggctacaagcccttttgcgataactcagttgttaatttggaaaaggatggtaaatttgcaatgaagaaatcattgtgttctaaataaaatacagaagtggtttttagggaaaaccaattgcgaactgtcaatggtaattcctgtaccaagaacattaacatttcaactgaaaaattcagacactcacaaatcgaagacaaccataaattgcgggtaaagggtaataggactaatcttacaagcgtttgtcatatattgtcagtttctaccaaggcttatcaccatccaccaatccgcagttcggcaaggatcacacgattaatgtaaacgcaattacaatactacccaaaatcagtaagcagtagcacccacattaaaatcctaaccaaacaaccgcgcgtcgagaaaaggattgggaaaagaaaaggcgagagaccataccggggaagagacgagagatcgctcgcgcatgcggagaagggaattggagctcctcccctccatgggttatctccc

SEQ ID NO: 173205 - DNA, 283 bp, Zea Mays
tgatcctagctgtccagcaatggcggccatatctccaacaccatgagtttgtcatccttacatatcacaaaagtttaacccaactcaacgagcagcgcctccatataccttggcaacataaagttttcaccaagttacttggtctgcaatacaaagttcaataccgtcctggttctgagaatcgtgttgccgatgccttgtctcgttgtgtgcctgctgacatgcattatccatggtggtaccttaatggttattggacgttcaggcaagctatgatcacgac

SEQ ID NO: 173206 - DNA, 497 bp, Zea Mays
ggcttgatgaaggggccggaggagtcaagaggaaaagaactgtcagcattttgagtaggcaggctatccggtcggttaaagaagaccaaatggttttgaaaaagcagaaaactatatcggagccgaaggtatctgctcccaagaaacagaagcttgttaagatatcctctaagaagacgaaggtacaagatgcgccaaagcagactatgagcccttcttcatcttctggtgctgaggtcttagagattttgaaggtaatgactgaacctttcccatttgcactgctaagtcctctgaggttggatttgactagcctcttacagtcaagggaagtcgcttcggctgccgaggggaaaacaggggggcagaagaagcgacgtatgatgaatataatggaagctattgaacagaccccacccttagcttcggtagataaagttgctatacccaccgatgccgaagctactgccagagctgaagccgggaatctcgcaacc

SEQ ID NO: 173207 - DNA, 387 bp, Zea Mays
ggcttgtatgatgaggttgtgtgcccccgcacatttggctatgcttgcgaaggcgttatgtacttggtcaggtgtatttgttatgctggactggtgcgcatatagtcggtcttggcgcggaccgtttggtgtggtcgtttttgcttttgttgtgctagtccggctgcacccttaggcgacttccgcacagatagtcttcgtggtagactttggtttttcgcacttgttgtgctagtccggctgcacccttaggcgacttttgcacggatagtcttcgcggtagacttcggtttttcgcacttgttgtgctagtccggctgcacccttaggcgacttctacacggagttgtcgcacgcgagggtggctagcgctgagcctcgcggtga

SEQ ID NO: 173208 - DNA, 487 bp, Zea Mays
ctccaaatttcacatgagctccaaggcaactaacaaggtaatcaccatttacttgctatctatggtagctaattgtcctcgatagtgggtaaaatgtctcctttgggcccaattcttctacaacaattcttaccacttggcgcttgacatgatgttatgtgtgtgagtttgctcgtatgaatcaggcaagctatgtgtcgtctcggcaccccatgccatgcagaagtgtgccgagttcctcgttgacatccacagttgtcttgagcatgcttagcagattgccaagtgtagttatgatcatggccatcgtataacatcctttgctgccaggaattggttgtcgctccgcctttgtcatcacacacctgtagcggtggcaacaactacacgtctatcacaagagagtgcatgaagggaaggtgctagcaattgacagagtcaagacgtgtgtgtgtccatctacgttttgagggtatctaagtggggc

SEQ ID NO: 173209 - DNA, 745 bp, Zea Mays
cgtgattcttgctgaatttttctctctgtacacattgcttcaatagttgacttgggaatcttcattgagcctagaaatcttgcaaggtatggtatggaaacatctcgacaaatctagaaatctcttcattgagcccacctagaaatcttgccatggttgacttaggatcttctctatttacagtctgcactaacaacaactccatctccttaaagtatttgtcaactgatctcttcccttgcttcaacaattgcaattggtttcaaagatcatgctgatagctagaaggcacaaatcacctcatcattactcgtttcatctctgcccatgtattgatatgtctcaatcccattctaagttgatgtttttgcaattggttccaccaagtaagagcacaaccaaggaactcgactgaagccaagttcactcggtgttgatctgaaagattgtgaactctgaaaatttgatcacactactcagcccaattaagatattcatctgcactttctttcccagtaaatttaggaatatccaacttgactcgggcaatattgtttgggtcatttctttgacaacttccatgataacggtctctatcttcaaagtcagcatgtcggtgatgatgacgttgaccaaacattccatcatttgcaaagggattctcatcaaatcctccctcacaatcatggtatttaaactcctcatcttcaaatcttactcagtgtccgtgtgcacgatgccttcc

SEQ ID NO: 173210 - DNA, 436 bp, Zea Mays
cattggcagagttttcatacaacaacagttatcaagatggcaccatttgaagctttatatggacgacggtgtcgtactccattaaattggtctgaaccaggagaaaggtggttcttcaggcctgatttggtgaaagagatggaagaaaaagttcaacaaattatacataatttgaaagaagcacaagctcggcaaaagagttatgtagacaaacgatgccaacccttatactttcaagtccaagattatgtgtacctgaaagtatcacctatgaagggtgtgactcgattcggtgtaaaaggaaagcttgcaccccgatacattggtctgttccccattcttgaacaatgtgggccagtggcataccgactccaactacccgaaacattgtctgcagtgcacaatgtgttccatgtatcccaattaaagaagtgtc

SEQ ID NO: 173211 - DNA, 870 bp, Zea Mays
ccagccagaccacgcgacggcacagtatccccgcggtggcgcgctcgccggagaccggccctaccggcgcactagagacctattcgctaccccgattggtgctatgaggagagtatttcttggtgagtcacacgggtaaagacttaccgaggtttggagcagtggtaagtccaagtgacgaggaacagcgggttcaagtccaagatccactccggcgagaaattcagtcgacgaccaaggctttctcggccccaatccgccacagacacgttccacgagcccaagcgaatcaccccgacctcctgccaacaccggaacggcggcgaagggacgagtcggcggcggcggtgagctgtctccgcgcggcggtgcactgagagcctaacgacggcgcaaatgcggctaggtggggcgaagagtggtcacggcaccgagcgctcgcatttatatggtcaacaccccaacggtccgagcgggccctgcgccgatcgtggcggccaggtccgttcgcgccgcgcgacttccgcggagaagaagatggcagcgacgcagtgactggtcaaacggtcccaccagtcggtgtatcgggaggaagggagagagctgacaaccgggcccgcaagtcagcgtaacctgactccatgtaaagcgcgcttgagactgactcgctgggcccgcatgtcggcacgctttcgcggaatgaagatggccgcgcggtattcgttggtgggccgagccagccactttgagcccaacatggttttcatcttttataatttctttttcttttctttcctaagtttatgtttttcaaattttgaattcaagtgctgttgtgaagtttattccttaaccaaaaatataagttca

SEQ ID NO: 173212 - DNA, 805 bp, Zea Mays
tacttgtgcagcaacggtgcagctctaggccatgcaggaggtatgggagttgtttacccctgaggagttgccagagcagcccgagtctgaatctgtacatgaagaccaaatgtttttagtggtgttgtctgaggctgtgagtggtggtccagctaaaaaggctttccaattgttgggttggctacaccagcgggaggtttccatcttaattgattcaggcagtacacattcttttgtgaaccagtgcttgattcaacaattacctactgccctgttagtggaagcacatatcaaggttaaggtggctaatggaggtattatgcactgctcttccgttttacctcgagctgaatggacgatacagggttatgtttttcaccaagatttgaaggtccttcccctgcagcattatgacatgattttgggaatggattggttggaggttcacagccctatgcatgtgcattggcgtcacaaatggctttctattacatatcatggatctttcgttacattgtatggctcagactatggggctagtgagagcttgctaattcagatatcatcagtgtctgtacccgagcctgcaagtgagagctccaagttttaccctgagattgagtccttactgtcccagttttcttctgtgacttcggctccaactttgttgccaccagtaagaagttgtgatcatgctataccattattggtgggagccaaaccagtaaacatccgcccttacaggtacccacctgcacttaaggatgaaatcgaagcacaagtcactcttatgttacaacaaggc

SEQ ID NO: 173213 - DNA, 1236 bp, Zea Mays
aataatctaagggcatgaacaacgaagggcacaacttatttcaaatacaagaaaaacaataagcacaaagtgaccattcaaatacaagatattccgttctgcgcacaagttcccatagttgtcctttggcgaagggggcgagggcagtgtttacacttgaattcacaaaagaacgaccatgtcaacaccgacacattacattggctctgccttcaggataaggccagcctcccagaaattgaacaacatcagtttaatctcctcgccatcaaaaagagcccatagatctccctcttcgaaacattgctcggtcgtcggagcagggatgatccggcaagtcccctcctccgaccgcattctttctcgtggacgagacctctccattccgatatgacgacgccttcgagggacttcaatgccttgcgaagggtcgccaatcattcccacactctgtttccaaactccgatccttctcttgccccgtggtgtagtgggggcaaccctagacaaagactccaccgcggcgggggcaaccctaggcgaagactctgcaacagacaaatctagcgccaaaaaataatctaagtcatcctccaaagagtcatcgttcatcctagcaaatgggctcatcaactcttcacctttcgttgaccacgagtcaacatcagaatcatcaatactaagcactatcaaagtttggcacattaacaatttatcatttccattgtcaccaaaatttgcttgtgcaagcccaagtgccggaacctacgcaacagccgattttaagtatcacacaaaacagaaacaccgttgtaccactcctactctagtctttacacctacacagaagtccccactgccgcagagtcctcagcgccgccttttttgagcgaagtctgctcttcagctcccgcctccacctcgacatcctttcgggccaccaagctctctacgccggcgaggtcctcaacttcttcatccctcattgcctacgaagatagcacataaatgcattagacaatgcaaacatacaaaacacccttgctaagggcacaaacatacctgtgctaacgctcggtcggccctctcgtagacgacgccgaggccgtgaggacaccacatcctatcgtaaagcgccccagccgcgcgcttcaacatgtcgtcttcaacctagaatacactagcgttgaagtcctcattgctctggtcaaaggcctcgaagtgcctacagccctc

SEQ ID NO: 173214 - DNA, 598 bp, Zea Mays
ggaagttagtgtgcatgtgtggagttgtgtgtgtgtgaagtagaatcacgctaacgtaacttgtgtatgtcggttgttacattattcaatcaatacaatctgagaaaagttgctaccagttggagaagcaccaatccgtgttatgttccctagcattacgtgcatgtattggtgatcatttgcaagctcgccgacgacctagtggaggttgtttcatcggtgagttgttggcaagcgtagcatcggagcccgttgtggaccgggattcgattgcggcgagatatcataggaggaatcaggatcacatggtcgagtacgccatggcaactccacccagtaaggacgacaacaacaagacctacaacgacgacaactttgaggggagctcgggtggtggtgtgatccaacatgtgattcacgaggtgggaggagggaataactatcccactctcaccaaaatgaattatgcaaactgggtactgctaatgaaggtgaaactcaaggcacggggatggtgggcactattaaaccagatagaggcgatctaaaggaagacttgatggcactttatcgactatgaattgcggtaccgtcggag

SEQ ID NO: 173215 - DNA, 1526 bp, Zea Mays
tagccgaacaaaagtggacccacgctcaatgtgtgatgaccatcgcaaacggggttagtccctaaactgcgcaaacatcaagtaaacccccaagagatgcacatgaatcgctcaggggctacatctaacagatgcgcttgtgcgcactcgagattttgatcgtcggctatagccgaacaaaagtggacccacgctcaatgcatgacaaccattgtagaccgggtcaatccctaaattgcgcaaacatcaagtaaacccccaagcgattcaaaagaattgcttcagggcttggggactacatctagcagatgcgcttgctcgcacccgagattttgaccatcggcagtagccgaacaaaaatggacccaccctcagtgtgtgatgaccaatcgcaggcagggtccgaccctaaaccgcgcaataaacccccaagcaattaaaattgctcgggggatgttgtcgggtacctaggaataggatacccaaaataaggccaataaaccttcttgcggactaaagtcttcctgctgagcaagacaatgaggcagagcggccgaccaagtccccaccgagcaagccaacgacaaggagcgaccaaccaagtccctattgtgcaaggcggcatgacgaagcgactgaacaagtccccgtcaagcaagccagtgaggcggagcggtcgaccaagtccccaccgagcaagccaacgacgcagatcgactgaccaagtccacgcagtgtaaaccagcgaggcggagctgccgaccaaatcctcgacgagcaagccagcgaggcagagcgaccgaccaagttatcacccgagcaagccagcgaggaagagctactgtccaagtccccgtcgaacaagctagcgaggcggagcggtcgaccaagtcctcgtcgagcaagtcagtgaggtggagctactgaccgaatctctgcgcccacgagctatgcccacgaggtggaaatctgaacccagtgaagcgagcccatgcccaccacgaaagacacgtcttcaccacaccacgcctgaacgtgcacacactgcacaagacaagcccagggggaagaccttagcatagtactcccaacagtagcacgcgtatcgagaaagacgagacaacacatcatagtgagcgtatgtatcgtataggatgggaggagacgcaaagcgtgcgacgggtgaagccacgccatgtacgaccacatccaaggacatactcatgggacctgccatgtactgccactaggacatcatcaacggactcgatataagaaccggcacggaggacggagccaagtcaggggtacatatatgcacaaaaatgggacccagttcgttgacccaggcggatagggctgcctttcttcttcttcttcttcttccctctctctctctttgactcttttgggctctccttctcttcagcaaggaagggaccccactataaggcttctctcttgagatataaaagagagtgctccatcctccaaagcaacacatgagcacatcagttgtaacacgc

SEQ ID NO: 173216 - DNA, 1265 bp, Zea Mays
gcacaatacttctccgactatggtctggaggcttgcaatattggcaccatgaccatcttcaaggagctaatcaaatcaatccaatagcaagctcaattaaaatctgttaggatgtaacaatgacatcaagaatcaggaacatagaggggagtgaggacgcacctgcagacctgcttcagagttccctgatctgggtggcttgaattcgttgatgatgtaattctaggataggaaaggctggacaaaagaagggatctaacctttgaagctctacgcgttctgaagtgccaaagatgtcatcttagagaggggaacaaagtaagtgtggccaggacagatggaagggcattgattaccatggaagcgagtccagcgatgatatgaatccgatggaggcgcccaagctggtgtgcgacggcaccttgaaaagagtcctgcacacaactataaggtcctgactctccactcctgtagaggtgcagtctggttcccgcgcaccgatgcacgtcccccgtcccagcctcccgcagtgcttcctattgcaacgcatgtcgcacggctccatcacgcccatgcctcgttcactgtccgcaacacacctacgcgctgtgtgccaccggcatgccgctcggcggcgtgcgcgcacgaagaagaaggcaaggaattaacccaaacgcacaacaaattctaatctgaggaagcacgatggaaggcgttcataaatgtgggaatgggaacaggcgagacgaagacaaaggcagcgcgggggaagggaggcggtggaggggggcatacccgccgtcgcgttcatcgagtttaacagcgtctcctcgtcgcgacgacgatgaagtggcctccgtcttctttttcccaccgccaatcggtgtcgtcatgtggcgtctagaatgctcgagcagccgatagatctctgtatctcgatgaggacgtgggggattcgccaacatcgtcggcgtcgacgtcatgggtgatggagggaagggcacctgttgcttcttctattggtacttggcatcgaagaagcgcgaggcaggagtaggaggcgggactggtcatggaggaggagtagggtgcggtggaaaggtccacgcagtggtgggtggcgttgaagaagcgcgagggaggaggggacgcagtgccggcattggaggcggaggagggcgaagtcctcctcatcggcatctgggaatggccgggaacgcacggggcggactgaggtgtggcgcgagccacgaggagcgttctgg

SEQ ID NO: 173217 - DNA, 566 bp, Zea Mays
agaagcaggatatgagcacgcgagcggcctcacaggtctcacaagattacacaggcccaaaaaactctagctaaaccccatgttccgcgtggccttcaaatttgtatcggagatatataggctggttcaagcggtaggtttgcttttgttacatttttagtaactttgtcgtattgtttttggtcgcatagaaggtctcgtgtgagtcttttactgttttacacaactttcctaaaactttctgacctgaatcttcactggacgccttcctttcgcattgttccttgatgtatatgtatatgaggtgatttttccagaaccaaaaaaaaagtcgcataggctgcccttctccctctttggaacgttcagttcaagcaacatccgttctgtactcatcttctacctttctcgataagaagtcaacaaagatggttaccactggggcatctataacttctttggcgtttgtaagctccctaaacccttttctctgccttctgatgccatatctacgtgggccatccgaatcttgggaaattaagatctgcggccgttttcttttctgc

SEQ ID NO: 173218 - DNA, 520 bp, Zea Mays
ttcataatcaggaatttcttcgagcgaagaaaccaaagcactaacttcttcggcagagggtcgcactctaaggcccaaaccgccatcagcagcaagaggattcgacacaaaatgagtaaaggccttggaaggaggcaggttccaggccgagtatatgacaggcgcgccaacatttgataccttgcctctaagtatcatttcaagccggttcaccaagtctacagtaggaattcttctgttagtgacccgggttgagtcggctagacctcggtacagataggccgggcatgccctgtccttcaacggctgaatgttcttgaagacaaaatcagcaaccacggcctctgcagtcagacccctctccttcagcagtccaacctcagccagcaaagcccctgcctcagccacctcctggtccgtgggagactcggtccaactcggagtacgaacatccggctgtctccccgaccgtggagggagagaattcccgtggttctcaacaataaaccactccaagagc

SEQ ID NO: 173219 - DNA, 477 bp, Zea Mays
gctgaacccaaactttattcttgtttgatgcatatgtttgaaatggtaaaatttgaatttgcggtatgtttgaatttgagttcaaaagagaaaataaaaaaaggaaaacaaaatttagaataaaagaaaaaggggaagaaacccacaaccccctccccctcggccttttggcccattcggtccaccttagccgtgtgcctgcttccccctttcctctctctgactagtgggaccgctttgtcgacgccatcgtcggccgccacgcgcgcgccctctccctctgccacatgggtccgcttgtcgacaccttccctcgcgtgtccgctcgcccgctcgctctctgctcggcaggacccacccgccagtgactccgcccgtgcgcccgcaaccgtctcccctgccccgcacacacgcatgacgagacacccacacccacgtcacgccccagccccctttgaagtctctgcgctcgtccat

SEQ ID NO: 173220 - DNA, 586 bp, Zea Mays
tcatacactattagcaataaataaagtcgtctgctaggattctattatactgatcttccataaagctacagttccctttggataaacttactgtttaaattcagatgcttcttgtttacactagtcatttcttgcactatgttttccttaggcaatatctttgcctctttgttcaatctcacggaatgagcatttatggttctattcttgtttatttcctttcaggattggataacttacagtttgcttcgcctgtccatgtgtggaacatgagagaacaccggaagtagtagaagcccgtacgaactggagaacaccagaagaagcagtagacgccggtacaaattaaagtcaaacgaatagacctaagagtattatattcccagctgaccatagtcatatgattcaggtttattgttgtccactaaaagaaagaaataactttagtttggccaatacatagactttcagactggtactcattttgcaggtgtcactgttccaggtatttgatactgcagagcttggtcaagcaaaaaagtttttcttttgtgcaagacaagaaagggcctacacgtctgttttg

SEQ ID NO: 173221 - DNA, 504 bp, Zea Mays
gcagcccacggtcacagacaacacgagctcttcgtatgcgtgtttgggctgcctgttcgtaggattgctgagcccgtgtaccgacagttttgacgggggtagggttccactcctccggcggccggttttgtgtgccccgcgatgtcctaactctggttgcatccgtcgcctccctcacacaccgtcgtcgccgccgtcaagcactgtctagccgttgccacatctctcattcatggccctaggttgttgtttctctcgtcctcgcctctgctttgtcacccgctgtctgtgccatcaccatctctctcatcctccaccgccaggttgcagacgctgaagaacttgcccttgaacggtgtacgacgacgacaagaagaagtggaggcgatctggtgagcacttcgcttcttttctcccttccgatatatgtttagttgcagttcatggccagtggacgatggcaagttttctcccttctgattcatggccagtggacattgagcc

SEQ ID NO: 173222 - DNA, 863 bp, Zea Mays
tttattcgaagccatctaccagggggagacagttactattatgcatatgccaaactttttttcaaccaagtcattttattcattacatcagttcattacaagcatacagctactacaagtcgcactacacgtgagcgctctctgaggtacttccgaactccttttctaaagtgtccccaaattccttgagaaggtcatcaaggctagctagggacatgtcttcgacgtcggacaaattctctatcctggcgggaggtggtgctggaggggctttcttcttccgctcagtctgacatccttggctcttagtcttcttttggattttcttcgtgggggcgagcttctttagcttcttatcgtaatccatcttcagggttcggtaggcttcatgagtgttggcctcctcgccttctgctatatcaagacactcttagagggatgccttctcctttttaagttccttgaccttctgctctaagttttccacccgggagtttaggtgggtgcagtgggagaaaaggtcgtcgtagtggttatcgagagtgtggaggtatccggccatgtagacgatggtggggtcatcctcggtaggatctctccctgatagggcctgaagtcttttcctccaggtgggggtatttttgttgctaggtgggaagtaatgaaggggggtttcaaagacctctctgttgtagttttggcatagctgtttaaggccttttcgggcaacattttggcaagtgtctgggaagcggtgcccgatgaaggtgacttggaagggagggtggtttgagtgacttcggctttctcctaggtagactgccatagagcacttctcaactccgttttctcggtattctttc

SEQ ID NO: 173223 - DNA, 367 bp, Zea Mays
ctcccgcctgatggtggcctcgggcgagttgtgactgtgtctcccgcccgagggtggtcgggcgagtcatgattagggtccttcgtacggggttaacctcgggcgaggcgtgacttggatcccttgtcttggtaaggtcgggggcgtgttttgctcatgatcccttcttactcaagcgtctagaaactttagggttgtgatctggttacctctaatttatgatacccgacatatatgtgtccaaataactcaaaagaaggttacctcgaacaatgattaaatggatgcactgtgtcagattagtcgatcaggtcatgttagttttgttttcaccgtgtagggcaagacgaaagtgatgtcgtactcg

SEQ ID NO: 173224 - DNA, 670 bp, Zea Mays
ttctcaataaaagtgtaccttgtttcagcatccaccaaccttcggcttagatatgtcaccacatgctccttcccctcagtttcttgtgtcagaacagcccaatgaccttatcttcagctgcaatgtataatcggaatggtactcctgctcgtggtgcttttaatacgggagccgaagataagtattttttgatgagatcaaatgcttcttgttgttctgccccccaagcgaattcgacatcattcttaagccgaagaataggggtgaacgcatcaatcttcctggctaggttagaaataaacattcgtaaataattcaccttgccgagaaacttctgtacctcgaccttacatgttggaggtcccacattccgaatagacttgattcggtcagggtctatctctataccatgttcatggatgacaaatcctaaaaacttaccagctgacaccccaaaagcacatttacgtgggttcattttcaaaccataccgacgcattttatcaaaggctttgcgcaaatcagctatatgagaactaaactcagccgatttgactacaatatcatcaatctaaacttccacagtgtttcctaacaattcatggaagatcaaattcatagccctttgataagtagcaccagcatttttcagaccaaatgtcatgacaac

SEQ ID NO: 173225 - DNA, 342 bp, Zea Mays
acggtgttgctcgtcgccgaggcgatcccgggctgaaggtgtcctgtctcccgtgtgctcggtgtggaccaaggcctcgcacatgcgtcgagaggacactgcatgattctccgaggggcctcctcgccctcgggaggtagagctctcagctcgtcggacagcggcgttttccaggaggcccttgagttcgccctggatacgtcacccctcggtggtggatggctccggcattgttcgaagtagcatcgccgctgcggctaggttctggccggccacgctgaaggccgggggcagccctgccctagcatcgtcaatgatacgacgctggacgtcccgggcccg

SEQ ID NO: 173226 - DNA, 612 bp, Zea Mays
ggtttgcgatgatattggctgcccgattagaaaccaagtgccaggatccgatcccacttataatgaactggtatgctacatgggctcttggatctagatccaacggccaaggttttgcatagcgcagatcgctcagcacccgcctaatcattactaacggttgaaatcatcgatccccgaagatgagcttcgatccgcccaatgttgaatatgcagttcggatttcaaatagcgaacaccaacccagatccgcctgatccatgatccatgctccagatcaacctaacatgaaccattacacagatctaatctagaccgttgccaccgagatcaacggttatgaacccgaccactaaaacatctagcaacccatggctcgcccgcgactcgcgtggtggtgcaccactggagttgctcccattggtcgctccggtgccctggactctatccgaaccatgctatgcgaagtgtaggatgatatgaacagcaggggagggctattaccggctcagaccgcgagttcaagccggtcctcgacgtagtgcggccccaacagcggtgacaaggtacggcgacaaatccagcagcgcccggcacaattttggggttgag

SEQ ID NO: 173227 - DNA, 843 bp, Zea Mays
ccatttctttggtgaaaaccacccaaactctattgttcactcactgggaacgcttgtatgacaaatggtacccaatacctcaaaatatctgctattctgctcgcctttttcgagtggcaaagaggggtgccgcactgaattgtactttggactctaaatcaggttttagtcagttttcagctgttccaaattgtgccataaatctcattatgcagcaatgctggctgatcgtgtggaaataatgggaacggcttaagaccttaagcccttaggttgctgcccatgttcattatatattcagcacaattaatacatgtcccaatatgactttgttacttaagttgtactaggtctaaccaactatatatctaggattctatctttatatctatcataagtatctatagctctaacagatcaaactcatgtttgcaaaggatgggtcaaatgtggtcagccatcagtcattccccaacatctcatctcagggttgggtcccacgaggtcatgactcctgcaaagtacggaagagctgcacatgacagaacaggcccactaactaatcaactaaaacatgggccacctctccagggaaactacaaacgaaatatcacgcattgctagtggccctgcaaagaaaacaagtgctcgtgctgaacactggagcaccacagacagaatgccaggcatatcagtcgtaacattcagcaatgacaagcatttctcattctgatattctctccctctgtatgtggtactacggatatttgattggtagtaggtactacatcggtacagcttattgccctattggctattttatgatcaaccactagatgttta

SEQ ID NO: 173228 - DNA, 407 bp, Zea Mays
acacttgtcaccagttctcttgtaataattggcttctgcttcatctgcagcttgggagaatagctcatcctcagcctcagcctcatcagacttcttcttgtaataagccgcctctacctcttcggcggcctgagacataaactcatactcttcctcttgagcacgtaatcctgcctcagctagtgcgataagctcactcaaccttgatgtgtcgtcctcttcttcttcatgtaatcctgcctctgcgagagcgataagctcattcaatctagatgtgtcctcctcctcctcctccatcagctcaaccgtcgccattttatcctgaacatatcttgcatgcgcctcatcggccaaatagtttatgccacttccaatctctgcaaatataatgagcaaaataagttagc

SEQ ID NO: 173229 - DNA, 752 bp, Zea Mays
ggagagccccatggaatcatctgagtcctcggatgacgctaggggagaagcaggagcaggcaaacgatcagactcggaggaggcctcctctgagtactccgagtcctcgaagtcctccgagggaggacttggagcacgcttgctcttgccttcagcacggcgaggccaaccacgacccctcttacctttgcccatggttggttagagagggagggagtgaagaagaagaagaaagcagatgatcgaaggatgagtgcagagaacaacggggcaagcaggctaataataaaggccaggggtgaccgtccacttcctaccacgctcgccgaacagtcgcaataattcaataagcaattcaagccgcctaaaaatgagtcatgcaacaggcgccgcttcgcgtaacacggcactggttggacctaagtcaactgctcaggcaaatgattacacctctcggtcacatcaagttactactccaggacagtgcggtaaacactctgcgtaccaagacaccccttgggcacacccattgggtgtcgcccagaattttcaaagattttctgaagaagccatatccacaaaatatacgcaatgaatgtaccatgacataaggaggagatcggctgagatggaagaaagtccaaatgtagctactgaagcgcgagtctaatcatcaaaagcattgaagcatagagcggagtgatgtctagctgagaaccatctgcctcaactagccagacgtccaatctgtc

SEQ ID NO: 173230 - DNA, 592 bp, Zea Mays
gtggatcatagccagctcgttcgcatgcttcattgtaggtaagcctctgcccatgctgctaggttctccctccgctttgtgtggctcgggtaagcgtagatgttgaggcactgggggtctggagcacctggctctagcgggtgcgccgctggggtggaagcgcgccgccgcctcattgcggctcggggcaggggtgatgcgccaaaccgttgatcagtgatcttagggcttggggtaggtaccggcgttgggccgttgatgccccagtgggtggttcagattagagttaagacatacctcctcgtgaattaaatctgggacgttgagtttgatcgaagggatgtgggttgagcagagagtggaagcatccggaccgttgatccatcgtttggcgctcgagtattgatctagggtgttttaaatcctggctatcgagtgtggatcggacggcagagactttgtaccggttcagggtagatgccatctaatcaacaccgttcaaatcggatcgactggctgagatcagccaatacccctttggctcagctttattgcataagagaccctaaagaatcttgaaactaacccgccg

SEQ ID NO: 173231 - DNA, 425 bp, Zea Mays
tctccctcgcgtcgtctagctccggcgagctcctctagcctgtgctcggctcctccctctccttccctagtgagctgcccctggttctctcctctctgtctctctccctctgttatttctctcctgtgaagctcatcatccaccttttgaatttgaatcaaatcctatgaattcttgcggaatctaagtgtgcccaaggatgttatgtcctctcgagatgttcccctgcaggtattgagcaccctagggagggtttcgcatccaaaatagccatttcacaccgttctaaaaactcgcacgccatgtgctcgatgaaatgcataaaccagtcaaacaaactcaaattgaacccaaccttttccagcacactccagctactaccagtacctctcatgccaaatttcatgcctatacgatattccagg

SEQ ID NO: 173232 - DNA, 379 bp, Zea Mays
ccgaaggcactttttcaattgagatacatggaacacattatgtactacggataacgtttctggcagttgaagtccgcattgttcaagaatgggaaacggtccaatgtatagggatgccatctttctttttaccccgaattgattcacacccttcattggtgatactttcaggtacacatgatcttttacttgaaagaacaagggtcggcgtcatttgtctgcataacttttctgccgagcttgagcttctttcaagtggtgccttatccgttgaacctttgcttctgtttccttgactaagtcaggcctgaaataccaccgttctccaggttctgaccaatttaagggtgttcgataccgtcgctcgtacagtgcttcg

SEQ ID NO: 173233 - DNA, 710 bp, Zea Mays
cctcgacctccagtaccaaggcaaatgtcgacggggagaaataggaactcgcgctcgtcgccttcctccaggcaaatgtcgacgttttcgcatgggaaccatcgcagatgcctaggatccccagggaagtgattgagcatcatttgaagatccaccctgacgctaaaccgtgagtcagaagcctcgcagacagcccattgagcggcaagacttcattcgccaggaggtccggaagctgcttgacgccggcttcatccaagaggttcatcacccagtgtggctggccaacccagtcatcgttccaaaggcaaacgggaagcttcggatgtgcattgactacaccagcctgaataaggcttgtcccaaggaccctggacccgtatccacttccacgcattgatcaaatcgtggactctacctccgggtgcgacctcttgtcctttcgagatgcctactcaggtttccatcagatccagatgactagggaggatagaaagcataccgcttttgtaacagtggatgggctttactgctatgttgtaatgccctacggtctgaagaatgccttgccaacatttgtacgggcgatgagtaagaccttcggggacctgatcagggacagggtagagatatacgtcgatgacatcgtggtcaagactaggagggggtcaactctggtggaagacctgaccctggtctttgacaagctg

SEQ ID NO: 173234 - DNA, 666 bp, Zea Mays
caagataaagtgaagcaaataaaatacaacaaaaaataacaacagaatcaatgaaacagaagcatcttagcattaccattgatcatgtctatgcagtcaggatgatcatcatctgtgtataataaggaagaacaaatttagggcatatcatctttcatgccatgggcgaactcctcggtgacgcagctggcaatatcttgagaccgtctagtgggagttgcaccttgagaatgacgacacaggcgatgaaagtcattgatgaacgggccaacgaacatgggtgggacgaagccgtagtccacctcagaggtagggcgccagcgagggaggttccacctaattcgttgtggccgctgaggacaacgtcgccaacatgtgaggaggagctgtcaagaatgggaagttaaggttaatatacgacaccaacaacgagaaggggaagcacttgtgaggattacgtggttggttacacacgcaaaagataattggttgttagaagaaacgtgggggagaaaaatagatctacgcacgacgtcttctatgatgatgcgatggtgtgaaagaatctgaacaagtgaggcgaagacgaagaaagatataggaggatgatggagtgctcatggtggttgtatggttaattgcgcatgcaaaggaaaagaattatct

SEQ ID NO: 173235 - DNA, 602 bp, Zea Mays
taaaacttatgcagatttgtggactcccaaaatttactagtctcagatatatggagatcccgggcttcatctctggtgggttgacgaaagtcatgaattttaatcttgtccccagaaatgtcttcatcagagaatccaagaatgtgagcaaaccttcggtagctcaccttgtaccagctgcctttgatatagaaatttagataaggaaagttacagggactttcctcatcggccagcttgatccaaagagtggaataaaactgagcaatgacctcatcattccaatcatattggaaggtcataatattcttcattttcttcctctcacaggccctcaaagcctgtgtcatctccggatctccaatagcttcacatccttcccagttgatgtatctttgatgtagaataggctgatgcttcttgggaagaatcacagagttataaaaatcaacatgctgaagggtccagaaccgattaccatcgatcctagcatcacgaatacgcaatgtagggttctgaaatcggatgtcctggagaagagcagaccctccgctggcagtaaaatctgtgatgggctcattcgcagatcgacgagccaccgc

SEQ ID NO: 173236 - DNA, 355 bp, Zea Mays
ctgcaactgctgtcttggttttgggcatacaagcacctaatctgagatctccaagttttagccgattgcatatttgtccaccgcgtcacaccattctcacaactctagtttaagttctccatcttccacatccctctaattccactaaaaagccttgaactcacggtgggtactgaggccggtgatcacgacaggcattttttcccttaccgtggccaggtgcagtcaacatccctccgtctcttttctcaagttctagtatccttcgcctgtggtgaagcttacgcgtgtgcctgattgatttgtaccgcacagagctgcctggaacgccgccttgacagacggtgaacacccc

SEQ ID NO: 173237 - DNA, 378 bp, Zea Mays
atggtttaggctttttaaccgatcactattgtttggtgaaattgattgcatgattttcggacatcccatggcctgtctaatccttccatgcatatggatgcagcctaataaaaatttgcacaggttaacctaatttgtggttactattgaagacattaacttgagagcgcataaagtactaataggctaataactatcttgttcctttcatagttcataggtcaaagttgtagttggaaaaccagctatctcctaatttatttccagtttttgtgaatttggttcaaatgtagcatgtcccttgcacatatgagaaggtagatgtcctaatagggtgtcaatgtagttcagtgatctgtattgcatattgcctatact

SEQ ID NO: 173238 - DNA, 676 bp, Zea Mays
gagttgtattgcttgagcgtgagtatctagcctgtgagttaggactgagtttttagtattgagtgtgccttccttttatagtccaaaggggagcacatacatggtgatagagtccagacaggtgagcccgaacaggtgggcaatctaatatttaaatgtgttggtgttttggaaaccatgggttctaaccaactagtaaatttgtgttgtgtgtccctgtccagatgggtggtgcaagaagacataagagatttatcctagttcgggcaatagaaggccctgcctccagcaggggagggaggtttttattatattgcacctaagtgctcatagtaggggttacaaacagttcagagagggagcgtgtcctaagtttcttgagtatgattgaggaagagtgccaatatcaggggcgaggagagttgtgaagtgtgtcctctcctgtcccccccgtagaaggccctaggttcctctttttatagtcgcaaggaggagcctaggagtacaagggtgtttgtgttgcttgttgtgatcagaggaggcatgtctgagccctgtagcggcatgatcggtgggatggcccttgtccttgcttcgtcttttggttaggaggttgtccgatccctgtagtctgttctcttgatggggcagagagccgaggctgggcttgggagcg

SEQ ID NO: 173239 - DNA, 572 bp, Zea Mays
cctttgtatctccaattttcttgccagaaacttcggcagtggcagcagttggcgttttcatcgattccaaaatagtgtccaaaacactagccatcctcctcttcttcaaggtcgttgtcacagtggttgatagttttgttaactctggctttggagggcctaacagctttggctattcgtctgctgggctcagcagctttggttgttcttctgctgttttcgttgtttctggcttttctattgcatcaacactagctttggctggcatggcagggacaactttggcgctcttagtaagcttcacttcctctattgtggacaccacaaccatctgttctgaagattgtagcttcggcctacgggtcaggaccttggtcctcttcggcttcggcgcactagaagaggttgaagtagcaattttcctttttcctccttgactcaaagcaggaaaacagtaatcaggataaacaaacacaattacatcaaaactctattcagtcttcttttccctcgagcgccgaaggcaacagtcatggcctcgtcctctgccttcgagtaggctcccagcagct

SEQ ID NO: 173240 - DNA, 858 bp, Zea Mays
actaacccaaggccacgacgcgctcgtcgtcgaccaccttgttgctcggactggccatgaccaacgttggctgcccaaattaactaatgggcaagtattactgacccgaggcgaacctagaacaagctttaattgagttaatccggccctggattcacctacccacgatgacaacgatcactgaggtcaaactgaggcattcccgacgagtaagcgccgtctagctcatttagttgagccgacaagcatcacaagcatgcgagggtgctaaaacacgaataaggagggtgagtgcggacctgagagcggctaccccgacggggtgattcacggcgatgcagatgaccaatttggggaaaaacccaaattctacggctatggtggctaatcggagctgagagttagtgtcttggattcaggataacttggcaaagcggagtggggcatcaatttataggagtgttgagcggtggcgcctgatttgacaaaattgagctcgcggtcgagaagggggtgagtcactgcggtgatcaaccgtggcggtcgcagggcaaggagctatggcggtcactgggcagtcactacagctcatgatgacgcgagaaatgtcctaaggcgtggtgcccccatggtgaatggcgtacacactgtggatggccgctcggccacgtcgccggtgcgaatgaatgaataaccgagtgcatagtacctccaagctcatccgcgacaagatcttttacccgagaatcgttatccgtgtttatccaagcatgaatcgcggcgttggcatgaatctgtgcgcaagatcgccggcggcgaggtacactggacttggcgatctgatccaaacactgtacc

SEQ ID NO: 173241 - DNA, 695 bp, Zea Mays
ggagattctccggctatggtggctaatcgagggtgggagcgggtgctttggcttcgcaatttagagacgaagagctgtgctcggttgatttgaacggagggggtgaggatgcgatgaatttataggcgcagtgagccacttccatggccatggtgataaccatcgccggccttagctggcgatcaacggcggcgtcgagcgctatcctttcctacgagcttgccatgtcccgccgtgacagtaacgcggtcaaatcagtgagggcatggatgaacggagaggagcggtgccgatgactggatatggccggagtgattactggccgcgtggcggccgaaatcatcacgctccaccgcggcgatcttacccggatcaagaagatcttttgcgaggagatgcacaccgcgcgcccatcccgaccctggcgcaaatcacggagcggatcggtcgtcggtggcgagggtcaagcttatcctcccaggcactgtaccatggcaatgttcttcagtgctcctgacagccaaagtttagggtagattttctctaaagttttcatggcaactcacccaaatctctgcagcaaagttgtagagttacaaaccaactacatttcgactataggaactgaactcagttgagcactagatcatacataatttcaattccaaagctcgaccaataacactggtggtcat

SEQ ID NO: 173242 - DNA, 294 bp, Zea Mays
ctcgagccatcgcctctgcctcatattcagctctaactgggtaaagatgtttttcaagcttttatgatctatatagatatgacagatatttcccatcagatagtgacgccatatcttcagggcatgaaccacaacagctaattccaggtcatgagttggataatgctcctcatgccggcgtaactgtcttgaagcgtatgctacaactcggccttcttgcatcaagacacaacctaaaccactgctagatgcgtcacaatacacatcaaatgacttttcaatgttcggttgagc

SEQ ID NO: 173243 - DNA, 519 bp, Zea Mays
agggtttttcccccttcttcaaaaagtagagcgtctgcataaattggcggatctgccgacactcgatcgggtgatagaattctctgctactactacgaccacgatgtcgtatactgatgaggctctacgtcaggtcgtttcactggtcgcgacagtgaccatgaagaggggggaagcgaaacaaagaacttgaaagaaatgattgcgctggtttacctaataattaccttggacctgatgcgggaggatttgatttggacaacagctagcgtggtgcgtgacaaactggcatcggtcatcacagcgtcctgatcctatgattttgtgtggcgatgacgtatccggggaatctaataatggcaccctcttttatctcccaaaatgcaatatcattgtcaaatgacagttttctaagtagcgtccagctccgtctgataagaaaaggagaagatcaaggacaccaaccgagcaggtacaccgtaatttggaaccgaagaaaggcgaaggagtggagagaaa

SEQ ID NO: 173244 - DNA, 583 bp, Zea Mays
cttgaactaccagctacagagccacagtttccccaatttccagactttgctgaataaggcaattggccttgaaaacaaaaggaaagaattgtccgatcacaagaggaagtaccaagggaaaaccagtaggaacactcgacaaaacaactcccaaggttctcagtcccgctccagaaaccagagtgggaacaacaactaccaagcacaacgctctggacaacaaagtcagaggaacaatcaatatcagaaccagcagagaagcaacacccagatcagtcaaaggtctagtgggcaacagcaaaatcgtcagggaagcgccgtgaacacaccggccaagaacaacaatgcaactaccccagttcaacccaatggctgtttcaagtgtggcgaacttggccactatgccaacaactgccccaggcataaccaatagacaccctagaagaacagcaaccagaggactgaccagaacacacctgctcgtggatctgcacagaacaagactccgcagaaccagagtagaggaagagtcaaccatgtgacagcggaatcagttcctgaggatgctgacgtggtgtatggt

SEQ ID NO: 173245 - DNA, 338 bp, Zea Mays
aaagttcttacaggccactagctccgagaggcatagggggaagaagcttcggaggaaggttcaactcccaacccaggaggttgttctgtttattctgcggggaggataaaggacatacaacaaggatgtgccaagtcacgattcaaaatcagaaagagatagtttaagctgaagcaagacagaattagcagaagcaggtcctgcatactgcttcgtgctattctccatacattcccgagtatgtgggtaatcagcagcccacaacatcggttgcttcgacaagtcacactcaagcagcatggaccccactacctcctccaccacccatggcaccaacc

SEQ ID NO: 173246 - DNA, 501 bp, Zea Mays
tcaattgtgtatccaagctctcatgcaacttcttccaaaaccgagaagtaaattgtgatcctcgatcagacacgatcttcttaggcactccatgtagacaaactatccgagtcatatacaattttgctagcttggctcccgtgtaattggtcctcaccggtatgaaatgagctagttttgtcaatctgtccacaatcacccaaatagattcatacccagcaggggtgcggggtagtccaacaataaaatccataccaatttcttcccattttcactcgggtatcttaagcgggtgcaatagtccagttggtctttgatgttcggccttgactctttgacacacatcacacttagccacatgtgcagcaacatctcttttcagtccataccaccagtatttttgcttcaaatcctaatacatcttagtgctaccagggtggatagaataatcagaatcatgggcttctttcaatatagtctcacgaaggctatcaatctccg

SEQ ID NO: 173247 - DNA, 492 bp, Zea Mays
ctacgcccctcagccccagcagatcccggtctacccagtggtagtcgaggaagttccgacggatctccctcccatccgagtggagaatgtagtcatcctggaggacagctcggaggaacagctgccgacccccaccccgttgccagagtccctggccttcgcagctgggtcatcaacgtcagcaccgtctgcaccagccttccaagcacctgcacccggaggcgacaaccccgacgactccggagacgacgatgacaaggatgatgacgacgacgaaggtggagacgaacacgtccacgaggaagctgactacgcccagcaggacaacttcatggggttcggtcctgttgtcgaacattacacatcaatgttcgaaacggggcacttccccaacctgctgcaagaagtgctgcatgcgctaggcacctacgtccgccccctgtacgaaacaaggcgagtgagcgagcctctccgggcttgctattacatcac

SEQ ID NO: 173248 - DNA, 527 bp, Zea Mays
gtcgagctcaacgttgtaaaggcagaccgacggtcgttggtgttcccttcttcatggttgctgtcgtttagtagagccaaaaggaagtgagatttcaaggagcattttatggtgaataggagggaggaacacgcaccgattgatttcatgccatgaagcacaccaccagacaagcaatcgacaaggcgatgtgtgcaatggggcaagctttcattccaactaggggaataatccaaagacgtctctccaataggaggaggtgcgattcaagctaggggaagaggccagagacgtctcttcgtgaagcagtggctgcaaagtaattttctatttactctcagtgcttcctctatagacgtcgtaatgaatggcgttgtacaggccctaatcaaatagctttcagtttctctcataactttaatctcacaaaagtccttttaaaagctatgactcaactaaacatgctcttagagcatctccggctgaaagggaagtgtgcctttggggcatttctgagttattttggt

SEQ ID NO: 173249 - DNA, 651 bp, Zea Mays
cccgagttaagtaagcgcgagcatgttgcaccatcttaagtcgttgccgacttaagccgattgctccgttagcagggcatagtggtcacccgagttaagtaagcgcgagcatgttgcaccgtcttaagtcgttgccgacttaagccgattgctccgttagcagggcatagtggtcaccctgagttaagtaagaatgcagattgaccatgaacaatttgagtattcttgaggcctttttattgatgatatatttcccagtttacagagtacattgtcgccctgatagcttttgaagtgcagctaggggtaaaacttcttgaggtgttctatgttccatgagttcccaatttctgtgccgtccatctgagtgagacgatatgatctcggccgagtgacttctgctactatgaatggtccttcccatagaggtgacaacttgtgccgtccttcacccgttagaattcggcggaggacgagatctcccactgcaaaggatcgacgacgcatggtcttatcatgatagcgtctcaaagtttgttgataccgtgctgattgaattaccgtgttcagtcgttcttcttcgagtacatcaacatcctctagcctagtagcctcggcttctgctatgctttcaaagatcaaccttggcgc

SEQ ID NO: 173250 - DNA, 922 bp, Zea Mays
ggggcctcgattatcagaaagattagggctctcggtgtaagtttcctaaagcacagagaacagcagccatggactgcaggttcatttcttggttagtagagggctcttattaaaaacgtgctcgcgaaggggtattcggagatctcggccgcccgattacaaacaagcggcccagatcaagtacagaaggtagtgtttgagcggtcaacgaggaccgtcgatgccatgatggacagtttgtattttaaaatggctagatccaatcacgctcgtcagatccgaatcgaacgccgcagatttacttggacgaaccattagctagggtctaatctcgaccgcacacggtttaatctacggctagcagctgtcttccttcctcagccgaaccagcacggcggcgcagcacggaccgtggcggcgacggcggccattgccggcgatcccataccccacgatttcgcccatgcaagtcctaaatttctagagcatctcaatgctaggattcaattttagtcgagggcgaggaattaccagagaagtagatgagtgcggtgctatccacgcggacgtggtggagaagaacttcactgaggaattaaggtctcaccgcccgatgatcccaccagatagcgcttcggacaacttttctacttctcggtgcaggtccccgactagctcccgggaccaaaacgacgagcaccgaggcaaaccgtagtggcggcgttggtcaactcgaggaaaggtcgctactcccttcaccctctcggtttgagttccggttgtcaatgcgattgaattggtcacaggaacgcgacgcgggcgggttttttatatgcacgacgaggccagggcggtcatggccgaggatctcgcatcgagcgccggccacccgcgcgatgcggacgattctgttgaagaaggg

SEQ ID NO: 173251 - DNA, 760 bp, Zea Mays
gtcttccccctctcgtggacgctctgtttcaaccaccgcgcgtgaagaccgggtccgagcgcaccgaaagctggggataaaaccccggacggcctgcggacttcccctccttatccgctaatccttgcactagaataagccatgtctcgcacctcatacccgcgtccgttgtccctaacccctcaatcgtggctgccgtgggagaagtgggtgatcaccgtcgttgggtccccaggagttggtcggcgtgcttcttcaagtcttctggaagagtgttgcatcgtccgcgagtggagaaagtctccgcgcgtggagcaattcatcatcggtcttcgcaggcaccaggaaatcgcccctcgccgcgggtagctcccctgcgaccgtctctagccctaggattgggggaattaagggtcctaggtctagatttggcggagctccggccatgggtcgccgcgactccaggcggcgccgtcgcggttggcagggaggaggagaggaaacgtttaggccgttgattttctagtgaacgactaggattagaattgacatatcgatccagtgtgatcaatccggagcgtagatctgtgaatgggcagccttagatcgatcgtgtgatttttcggtccgttgagattgaatccaaaggccggctgcagatcgcgtctcataaaaccctagtcgttgatccctgatccaacgcatggtattgtgtaccggttcgggcgtggacgaatctaatctgcaccgatgatctcgc

SEQ ID NO: 173252 - DNA, 347 bp, Zea Mays
cgccttccaaggttgatgaggcacgagacgctactcgggataactctaatcccacatctggaatatcagaacaaacttccatcatatcaccatcagttggctcggacagcatatcctcaggaacgacatcctcgagagcctgatcaaaattggctatggataattcttgcagaccaacaagagcagacaaagctggagaaggaatatcgctactccccccactgactctgtaacgccgactgttcttccaaattaaggggacttcctcttcttcttcctcgtcctcgtcaaaaatacggacaataaacggcacagggtcacacccattgggatcagctctggtaggg

SEQ ID NO: 173253 - DNA, 564 bp, Zea Mays
gaaagttctagcagagccaaaggattcggctcccaagaaacgaaagcctatcaggatggctcctgcagagatgaaggtacaagatataccagaaaagactattgacacttctctgtcttcctctgtcgatgtttcagaaatactgaaggtaatgagttaacccttcccatttggaatgctaagtcccctggggtcagatctaactagcctattgcagtcaaaggagaagggatttgaacaaagctcgagagaaaaggagactgcttcggctactgagggaaataccgggggttagaagaaacggcgaatgatggacataatgcaagccatccaaaagtccccgccctcagctttggcagaaaaaattattgcgcctaatgatgccgatgatattgccgaagctaaaactaatgaaggcgcacgtgaagttgagaacctcgggaccacaatgtcagagattgacagacttatatttgacgtggctccccgagaaagacatcattgaagtatccactgataaggctttgactttaaaaatgaaagaattgaaaaaggcttcagagg

SEQ ID NO: 173254 - DNA, 508 bp, Zea Mays
gttgaagcccacttcatactctgtgatagacttcttctcttgcttgaaagactgcaaatcaatcttcattttctcccggaaggtgaccgggtagaacctcctttcaaactgcctgatgaagacatcccaagtcaggactcttggtgaggaggagtgcgctgtctgcatgcctctccaccaaatttgagcctctcccttcagcagctgtgtgccaaagcaaacaagatccccatacacaatctcaaagacattcatcttatcctccacgtaagttagccaatctgctgcctcgaccggagtaccactgccatcaaaaggatccagcttcatgcccatccactgcatcagagaaagaccactaactggaagaggcacctcagcctcgccacctagagcagcacccgcagggacaacgcccccgggcactcctcctccaccagcaccctgagcagcacccgcaggggcaacaggaatagcttgcctcagaatggccaactcctgctgcatg

SEQ ID NO: 173255 - DNA, 634 bp, Zea Mays
tgaagcgtggtgtctaatttgcgagaaaaaaaagacttatttgtaataatcttagaacatcggttgatggcgggttaaatcacatagatctcagggtctctttagcaaaaaggactcgacctaaagggtatcctgctatctgggccactggatctgattcttgtgaccacgattatatcggacagactaaagtcgagacgctcatctcaagatcgacaactatgatctaatgaggcctatctcaaccccgactgcacgatccaagattaacagacctgaatcccccctgaacaatcattgctcaatctaatcccatccatccgaaggagaccggacaaccacaactctttctcctttctccgacgtcaagcagcggcggcgcacgacatctatggtggcaccatcaccggccctcaccacttctttgattcctccgtctaaactcaaacccgaagagcgctacgtgaagcagagtaaaggtaagagtatagaaggatcactcaccgagaatcagacagacaagacttctagccacaatgttgggtggatccacgacggcgagcctgtgccggcgagaaattcagtctgccctgacagctatcccttttcgatgcagcaacgagcacgttccagg

SEQ ID NO: 173256 - DNA, 888 bp, Zea Mays
ccaaggggccaaacttcagtagaccagctggacccgccccatcacggttcagccagcagagtcagagctctttccattccccctcagtggcaagcaaccaacccccggcgaatgcatgttggcactgcggtgatcccagtcacttcaagaacaactgccggcaactgaagccaccaggacccgcctactccaactcggtgaatggccccaagaatacctcggcatccgcccccaaggcgccctcctccgtcagccagcagaacaaggccccgtaccaaggaagggcacgagtgaatcacgtcgatgcctaggaggctcagcaagctccgggagtagtgctcggtgagttccttgttgaatttactcccgctaccatacttttcgattctggagcatcccactccttcatagccactagttttgtggaaaagtatggcattccctctacccctctagagattcccttggtcacttgaaccccagggtccgaccttctatgccagctcaaatgctcccaagtcagaatccttttaagtggggtagtattcctagcgggcttaaccatcttgccatccaaaggaattgatgtgatcctagggatggattggctaactaaacacaaaggcatcatcagttgcgcagataagacagtcctcctcaccgaccagcagggaaagtcagtctcttgtcaggcacagccacccgccagtgacccaatgatgttcaatctagcaacataaagtatatcagtagtagaagaattcatggatgtgtttccagaagaattaccaggaatgccaccagaaagagaagtggagttctacatagatctgatccctagaacggcacccatcgcgaagagaccataccgcatggctccgaccgagt

SEQ ID NO: 173257 - DNA, 457 bp, Zea Mays
gggcagcggaagacgtctcgatgtagacaaacgcgtcgatttatgctatggagtcgccagcgaacttcacgtcctcgcgcggttcatcctagtgctccagatgtagcacctccgaggtatccacatatacagggaggaagcgtcgcgttacgaactgctaggttcacgacggcggcttggcgagggcaaggggcgggtggctgctcgtttactggtggccaattagggtactcttaaccgcgcctgtgtcccttattatatagctgttctggtgggcctttaactctgaggcccatcagtaaccctaaagccctgtctaatttcggatctaatacgagttaggcttccttccccttaagtgtgtgaccctataggttcacatacatatagacatgacccaagtactcttacttggcctaataattgacaacgacctctatcaagacatgtcaactcc

SEQ ID NO: 173258 - DNA, 506 bp, Zea Mays
atttgttctgacgatatttgttgtatatgcctcatggttgtattttttttgttggaagtcaagagttgaagttaacatcgaaggttttcttagcaacatagtctttgaatcaaatggtttctttcattttcaaatatataggcggtcatttcctctgtattttatactcttgtattgtagatacttttgttggctgttgccatgttagccgttagaaaaatggccactgtctaccaagctaaaaaagaccagtaagaaattactcatagcatacaaggcagtttctatccaaataatgtgatgataatccatcaaaagtacaatcgactactacatccttataaatattcttctatgacgaactacctattatcagttctattatatagtcaaattcataattatgcagctctggttcatagaaaagaagcaaccaaccaacgagatcagaccaacgttaatgcatggcctaactggctcagaatggcagacactcttaggaaaaa

SEQ ID NO: 173259 - DNA, 546 bp, Zea Mays
gaaggaggagcctgcagcaatcaagaagcctgctgaaaaaaggcgaaggattattactgttattgatgctattgaagaaacgccactgtcggcctcggcgtcaaaaaacaccggctgtcgaagacactgcagctaccaaggctgcccccgtcgaagctacaactgtcgaagctgagacggccgaagatacaaatctagagggcactttttctgatattgataagatgctttttaacatggccgcgaaagaagctgctacagctgccggagagaccctggccccagtgcccgggaaagagaaggagattgccgaagatacttcagaggaaaaggattttaattttcaaaacatacttggtcaaaagttgtctaaggctgagaaggaagagctgagggattatgcaatatcatgcggccgaccaggagcattgctcttctgtggcgttgacaaagagagcttaggatgcctccgggaccggactggagcgaaggttgtcggcactctatcgaagagtgttggctttccgaagcttgaggccgacctca

SEQ ID NO: 173260 - DNA, 469 bp, Zea Mays
cttgatttcctccccaaatccgcataatttcgtcctgagcagcattagcttttcctttagaactagcaaaagtacacagctcctgaatatgacgaaatggaagaagctccaacaaattcaaaaaaataaatacacgcggattaacattgtgatcaagaaagagagtttgaggttttataatgttttctgaactggatgtattggatttacaaccttgcagcaatactattcatgatcagagataaaatccagcagtgagttcacaaacacgacttgaaagttaatcatgggtggaaaaaatgaattcatcattgagatcaatttgaattgaatgatcttcttggttctcgcttctagcaatagattaaggtgtatctatttatccagcatccatcgactctcccattagaatgagctggttaatggtgcatgcatattgttttttgtgagataatgtgttataaaatca

SEQ ID NO: 173261 - DNA, 334 bp, Zea Mays
ggaaggtgtctcgctgccaccaacccatctcattcctgtcattcgagttaacactcaacagtgacttgctgacgtgtccgcggccgttctgcttactactatactgaccttgacctgtggagtgtggactgtggtggtaggctggctcattcgttgttgcaactgtgcacgagaaggtgaaataggaagaaattatgggtaaaggccagttagatttcagcatcgtaaaaagcgataaagctcaagtgagaagtggcccgggtgactgtgctgagcggagacggcatattccgggtgctcccaagtcccaattccggaggaacgcttcatccta

SEQ ID NO: 173262 - DNA, 380 bp, Zea Mays
atacatcaacatcaatgtcttcaaacaacactcttttatgaaggggtaatatgcactaagcacaacccttaccagcttcaataattcattttaatttattggtgaaacatccacacgagatgaatgtataagaagatcaaacacctcacctcaaagaaccacaaatcaagtggttctattgaaacaaaactcctaatcttcctaaaccttgtccttgccatcatgaaaagataatcatgtaatctcacattctttgcaccccacaaaagggagaaagtctacagaactaatggagcaataaagccgacaagaagccaataacattctgcgtggcacagttcatcgaagaaatgccaaaactccacaaagagcactgacag

SEQ ID NO: 173263 - DNA, 386 bp, Zea Mays
gtggtgcactggattcttgggcggaatcgcaccagccatggcaccgccgcctgggcgttgtgcgccgccgttctcgggtgagcgaaggaagaaaggagcagagacgctagatccaaaatctacgacgcggattagactctagagtagcgattcgtgtgggtaaactgtgtcgtcggcttcctgatgtacgacgcagattagaacagcgtggcggattcggcctatttgatccgaaccgaagatcgtggatcggagggttgtgggtagtcctggtttcataaacatctggtccgtcgaatcccgatcctgtggaagccctagcataccggttgattataaagagaaatctaatatgaaccatcggacgttgatccaacggcttggat

SEQ ID NO: 173264 - DNA, 410 bp, Zea Mays
gttgcatccctaggttcgcctttctcctgtcgtcgtattgcgcgcgcatgtggtcggtttgggtagcggagtgcggggttggacattcgccggtgagtacgccgccgggcgagctctgtttctcgcgcggggtgtccgtcgatggcgtggggctgatcctccgtcgatcagtgaacgaacgggcgtgattagttcaccttactggtgcggcggggacgaagtttggtcgttggatcgtagatgaaggagtgggatcggatctcgcacgtattaaatctggggccttggatctagatccaacgatccctggcacctacagattcctcgacggcaggatctaatcctggccacaggacttggatccgatggctctgaaacgcagataccccccttcggccctgaaatcttgc

SEQ ID NO: 173265 - DNA, 735 bp, Zea Mays
ctgcccgggtcactgagctctccaggtctccgaagtcgtcgacttcttcatcattcgccatctacagaaacattacccaggcacatacacatgtcacgcacctgctcaagcgccaggtccgacctctcccgaacagtatcgcggccgtgcgagtcccacatcctgtcgtaaagcgccccagcagaccgctttaacacctcgtcttcaacctgtaagatcccacagtcaaagtcctcactggaccggtcaaacactttgaaatgcctgcacccctcgcgggacaaggcatttgcagcgccttcacaggtgatgagcgaggcaaaggacatgagacccgtcacgatagctgggaggatctccagttcctcctgtagccacatgaggaagcggaagcccacctccttgctagacgagtcaaaaggggtggtacgcacaccaagttcgtggttcgcgtccacgagcaatttatgtgctcggtcgacgcctgtgcgagtggaagcatccgccctgtctagatagccacgaagactcctgtgccccgactccacgtcggtagcctgctggagagcgaggttggcctcggcacgagcagcctaggtctccgcgtgggccctatcacggacagcctgggcctccacacgggcactctccgcgttctccttttccgtggcaagctggcggctaaggtcctccttctcagcctccgccgccgacagcttctcaagtaggttgcgg

SEQ ID NO: 173266 - DNA, 627 bp, Zea Mays
taaagaagttgttcaggtggattggtatgaaaaagatgattcagcagtggtgtcaaaactgtccaatctgtcaacaagcgaaatcggaacgggttccgtacccaggattacttcaaccgttaccagtccctgaaggtgcttggcagttggtctcaatggattttatagaaggtcttccgctctcggatcattcaaactgcataatggttgtagttgataaattttcaaaatatgctcacttcattcctctccaccatccattcacagcgttagctgtcgcgcatcaatttatggataatgtcttcaaactgcatggatttcctcaagcactaatcacggaccgtgatcgcatctttacaagtgctttgtggcaagaattgttcaaactggccggagtggaattgcgattcactactgcttaccaccctcaatccgatggtcaaacggagagggtaaatcaatgtttggaaacatacctccgttgtttcactcaagcatgcccatctaaatggaaaagatggcttgcgttagcggaattttggtataatactagttatcatgcttcattgaaactgaccccttttgaagtgctttacggctatcctccaagacacctgggaattgaat

SEQ ID NO: 173267 - DNA, 792 bp, Zea Mays
tgatgattgaatcaaggtagtatgtaccttgtcaaatatcgatctcctcgaagggaaacggtgccgggaaaggggcagagtcagacgacgtctccagttgagagttagggctcgttggtttgccaagctcactgcccgccgaggatgagttgcattttgcgatgagtgagatccagcttgtcgggcgggccagtgtcgcgacaacgacggagcgaggggcggaggcaccaagaagaggcagggtcgggtgacgtcacgtcaggaagtggctggtgaaaacaagacatcaggggcagattggtttggcgggcctggagaagaatagggtcggacaaatagatgtggggactaggatagagaggaggacatgaggtgggaggagtaggcctgataagttgttagctagttttagtttggttgagacatttaacaactaattattatttgaggggtatatagctaactattagctggttaaatagttgatatgttgtaaacctctcaactaattttagccactagatattagttttagaacatggacaacgacgccgacggacatagctgatgctccagcaacgctgtagcgacctggtggattggcgaggccatggatgacttgaagcgaagactgaagacagacaggggtaactctagagacaaaataatcatgaggccggcccggttagatcgatggttgccgacagcaaatcatggagcgcgcgtatacgaggacttgtacttgttaattttgcaatagttaataaaataaataattgttctctatttttt

SEQ ID NO: 173268 - DNA, 584 bp, Zea Mays
gaaggatcagtgaggcaaccaggggggtgaatgggagccactaaaaattctcttcttgagaacaccatgactttatcccgatctcaaggcaaccccacaaaacaacaaaaacctgcatagcacaataatactcgatctagtgtcgattgaatataccaaaattctacttagccaactttctacagaaattcagaggcataaatggaaggcaaggcaagcagcagtgccgcgcagcaggccgataatgccgggcggtgacagtgctgctcataggggggtagtgccacgcaggcataaacgcacagaagttttcgcaaggggaaagaggatgatttgtgaagtttcaactagagcgaaacaaaactccatgcgcatatcagcaagtcccgttttggttgaggtttgtggggttttctcaaacgagctcaaaatgagatcaactcggaccacgaccaaaaactgtaccaactgggcgtatgcagtgatccaaagagtgtatctcaccacccaacaatccccagtagcacccacaacacaagaactcgatggttcttccacaactcgggagaatgaaggaaggcaaa

SEQ ID NO: 173269 - DNA, 564 bp, Zea Mays
attcatcagacgccgccaccggcgacagtgtcgaaaattgcttttgtcgagaccgctgaagccgaaggcgccgcagccgaagcttccagagtggagatcaccgaagctgaaaccggcgacgccgaagctgctggggccaaagctgggaccacggaaggttcgaatctggaaactacccttgaagttattgacaatattctcctgaaaatggctgaggaagaagctattgtggctgcggtaaccactgcaactggaaagggaaaggagcagatcgatgacactttagaagaagaaagttttaactttcaagacttgcttggagaagagctaacagttgccgaaaaggaagagttgaaaaaatatgccatatcttgcgggtataagtcaggggctacgctattaggtggggtcaacaaagggaagttaagatgccttcggaaccgcaccgaggctaaagttgttagaaccctctccaaaagcgttggcctaccgaagctagaagctgacctctgcagatatcaacgacacatatcgccggaagcctgctttatgctaattttaagg

SEQ ID NO: 173270 - DNA, 695 bp, Zea Mays
ggaaaacttgggagttcataacatgagttgaattgaatttaaagggagggattataaatgggagaagaatatagaaaggaaaaagagaaaatagagaaatcccagctgggccgttttcctcttcggccggcccaactcagcttctctccccgctcagcccatggcgctcactgccgtacacgtatgtggcttactagtggggccgccctgtcatcacctattccttgctccgtgcgcatctcaacagaacccgccatgctcgcatggtcagcactccctcgccgcgatgttcgctgttcggttccctccgctcggacttcaccgtggtgcataaaagccgaagctccgtgacccccttccctccatccaccaaatcgaggctgcatcgagtcgttgggagcctcgcctggcatggagaggagatcggagcatgcacacagagagagatcggggaggtagaatggaatccaccgctcgactgctacacgggtgactatcctcccaccgcgtcttgatcggtcggccgccaggacctctcggccgccatgcgcgcctgtgttgggactcaccgtcgtcggccgggctgagatccaccgccaccatcaagctcgggtgtgggtcaccgccatgaactggagtgcgggatggttgtccgccaccgcaatcctgctcgctcgccggttggctcgctcctc

SEQ ID NO: 173271 - DNA, 593 bp, Zea Mays
atgcactgtagtttactcactattcatgttgccatgaaaaagaaatacatccatcttcatctagctaaatatttgaaggagtatcataaattcttatatgttcagcttattttcttgttagctataaagtggtgcttcccagtggtatgcatgatcatatccatgcattaataggattgtcagaattgggtaatggtataagtaacatattctttttgaaatgtgattctgagcttgtgtagataaatgttcctcattgaactatgaattacacatcaagctctaaatttacatgttgtgctgttgagtctaaactacatgcaacgattgtaattgaactgatttcttaccttgcagcgtctagaatcccaactatcaagaaccattaaaattttatcaacaaattgaggcacacagtaccagtaggttagactgtttgctatatgttttggctaatttacaagaatgatttgtgatgaaccctgcaagttaaggcttgctgtgacaatgttttaagttgggctttggttcagatgaaacacatggcattgttcccttctctttggaaaatatgaagcactatgtataaatct

SEQ ID NO: 173272 - DNA, 930 bp, Zea Mays
tgcaagcgttgctcagtcaggtgtgacaaactgcgctgatccgtataaatgatgaactcagcatgctgcaggtatggctgccattgatcgacagccaagatgatagcgagatattctttttcataagtggaaagtccctgatttttgacacccagcgcgcgactgacaaatgctaaggggtggccatcctatgtaagcactgctcctatgcctgtgccggaagcatctgtttccagggcaaaaggtctggtaaagttgggtaaagccagaaccgacgcaaaagaaagagctgacttcaatgcctgaaatgcttgatcgtgctcgttggtccagacaaacagtgtatgtttcttcaagagggtagtaagtggtttggctagtattccgaagtggcgcacaaacttgcgataataccccgctagtcccaagaatcctcgtagttctttacaattagtaggtgtgggccaagaggtgacaacatcaattttggcagggtgagtagcaaccccttgatgggagacaacatgccccaagtatgaaatttgttgtctggcaaaggagcacttggaaagtttgatctgccaacgatcctgtgagagcagattcaacactagctcgaggtgatgtaaatgatcctcccatgtggtactatataccaggatatcatcgaagaaaaccaacacacatgatctgagtaacggtgccaaggtacgattcattgccccttaaaaggttgccggtgctccggagagaccaaaggccatgaccttgaattcaaaatggccatggtgggtttggaaggctgttttgtgctgatcatgaggtgccagacgaatttgatggaaccctgctcgcagatcaagggtagaaaaccaggctgctccatgtaactcatccaaaaattcgtcgatgaccggcactggaaatttg

SEQ ID NO: 173273 - DNA, 741 bp, Zea Mays
ctcttccttaaatgcccagcttgattaagagaaaagagcccacgaggtaacctctttaagggcttgtaacattttgtgctgtattttttcttggatatttgaaactcttcttatttataggaggaggtgcggaaacttcttgattctcgggacagtctagataaattgtaccgcgatgccagcatctctctcaccaccttggagaggagtcaccgttttactatgtcagagctcggttgccatagagatgagttgaaagtctctcagaacgaggtatcatgacttaacaggttgttgtcttcaagagattccatcatcagagagttgcgtgcctcgaagaaacttgtttcgtaggagctagaggttgctcatcgcgatgcagaggctgttcgtcgtgatatcaaggccttagaggacaatcgcgatattatgaaggcgtggtgcgaaaatgcgatggacaaggccatctgtgtagtccggatcctgatgaagaggtcttgcattgtggggcctgatgatattgtggctgacgtgcttgctgcgtcggctaattcgagtaattattctgctttcggtgattctgcagataaggttcctcgcgaggatgctcctgcacagtaaccgtggaatgaaagcaaacattgatttgttcaaacagaaagcctttttcattaagatgacatttttctaattgatcgcgttgttccgatttaaggcgtttccgacctaagccgattgctg

SEQ ID NO: 173274 - DNA, 369 bp, Zea Mays
gcaccattgactatggcctacttctttggccctctccaacttctgagctgatcgtttacacctacactgattgaaccagctggccccaacatgcactgatccacctctagctacattgtgttcctaggtgctaacttatcttctaatcctagaagcagttgcatgtcctacctatatcagctacttcaagagcttcatagccccctcatgcgtgtcaccctcgtctactatcccatgcagcactggctcacaaagcacaaggagatcgagctccacttcgcccgtgagtgtgtctttattaaagatgctcgtgttctccgtggcctgaccatgtcgcggttcgtcaacatcttcactaaggggttccca

SEQ ID NO: 173275 - DNA, 2048 bp, Zea Mays
tcaggtatgtattaatttgctattgtgttgctatgttttcttgtacttttagttgcacataaaaatcatttcggacactagagtgttacatggtgaagctactaacctgtacctcgtgggactccttaattctttaaggtaggcgtccacaatactacgttctgcctcggttcgatgccgacgctctccatcgctgccacaatcaatgcccacgcggatccccacgatcctccccaccgccgccgcaatcaatgcccacacagatcccccatcctccccaccaccgccgcaatcagcggcatggaaggtccaccattaccgtggcatgcgtcacttggtacttcgggcaggcgtcacggcgtccttggaaggtatgccacctcctcctcgatattctggaattaacaattggacatctcaatatcctaatgcttaatgaattaccctttctttctttttgtgcaggctcacttcataaaagatagacggtgtaatactgcatgggctgtttttgcattggagtcagaatgcaagtgggctctgagtggaacacctttgcagaaccgtgttggagaactttactctcttgtctgtaactgatacctaaatgaacaaatataattccttctagattatggattcttacttacatgttgtttttttcagattcggtttttgcaaatcttcccctactcatactatttctacaaggactgtagctgtgagatactagataccaggtaagatgtgcaatgccttactgaagctctttctggtgaagataacacctattaagttatttaccattgaaaaagacaaagtatagttttcagcttaagtaaatatgatttggcagtaatatacaagttacaataaccaaatagtttaggaagaaagcacaaaacaaatgttatgctcttaatgttatatcaaataggctatgagctggcactcttccatcatatctttatttgttcctttaaattgaggacctgaccagtgtacctccattctcctgtagtatgaagaaacaatgcgactgtggtcactcatctgttaggcacttttgctggtggaataaggtggggtgcaggatctggttatgtaactacagttttgcacattttttatttgtctcaaaagtctgctgacagagccattattttatagtacatatcaacaccaatacagtatgggtcaacaagtttcaaaggaaaaagagccatgactcttctgaaggaaaaagttctgaaaggcatagtgttaaggcgcacaaagaaaggtcgagcggcagatcttgctcttccaccaaagattgtgagtttgcaattactcacgtcttcatgtgtgtaacgtgaagggtgcaaacacaatgttgcaataccctttctttcctcatctgcaaacattttgaggcagttagtttttacatgataggtggcattgaggcgggactcttttgataaaaacgaaatggaattctatgaagctttgtacactcagagtgtcacacaatttgatgcgtaagtgctctgttcggctgttcctactttcgcatatggagttatagactaatcaacagatttctgtggttgtagtgacgacactcctccaaaattagatattcaatttgatctgagcaatgaacccacttttctagctactatgttctggcagttgctatcaatgttccatgttgcaaacaactaatgtcccagtgatctcttcccactttttcataatccttggcaacatcaccattcaccaggattatgtttataggaaattcttgttaattaatggtttataggaaattcttgttaattatagcagaagcatatattataggaaattcttgttaattaatgtttttattccatttgaagtagagtatgatattttgtcctcagcggatggcttttgttaagctgtccttttccttcacttgggtttccatgtagtactcagatttttaccgttgtgccttttatcttcagatatgtagatgctggaacactgatgaataactacgctcatatcttcgatct

SEQ ID NO: 173276 - DNA, 302 bp, Zea Mays
gtgcagccggacaagcacaacaagtgcacgatacgaagtctttatcaaaagacaaatccgtgcaaaagttgcctaagggtgcagccggacaagcacaacaagtgcatgatacgaagtctttatcaaaagacaaatccgtgcaaaagtcgcctaagggtgcagccggacaagcacaacaagtgcacgatacgaagtctttatcaaaagacaaatccgtgcaaaagtcgcctaagggtgcaaccggacagtcacaacacaggaattccccatctcattcaacgaagggtaaccgaccacattac

SEQ ID NO: 173277 - DNA, 555 bp, Zea Mays
atcttcatgttctctcacaagatagttctcaacaatctcgttacacctctcttctattaacttcagccacccaacagaaggagctttgtacgaagcttgttctttgtactcaaatgccagtgtaacaagcccatcttcctttgtcttcacttcctttggcaacttccacccagtttaggtcgggaagatattatatgcaaatgcctcttgaatcaggtcttgagagccgattctctcggcgaccgtgttgaaaattttgtagcacttttcggcacttcgcccatttcacactttagcctctttaaactgaatctagtattcaaaggactcatcagcatgtttttgaaatctttgcagttctcagaattgaccttcgtgtagaaccattccttcgtccagtccacatgccactttgtctggtacgctataaccagggcaactgtgtctttgcgatacacaaaattgtagcacctgaacttgttgtgaaggttgtccggggccctttcctttgtctgataatgcaaatcatgaattctgcaaaatgcatcaacctcg

SEQ ID NO: 173278 - DNA, 735 bp, Zea Mays
tggagacgaaaaaataaacgttgatccagatgatgattctgactggttgcatatcaattatacattccagtcaaatgacattgttgcaatgacagaagttctgacaccaggtacatgacttttcattagactaaacatgcaaaaaatcaggtttcatacggtttaacgtagtatgccttattccagacagtgtgcacgaaaatgttagtcacacacctaagcatactaggaaaaggaccgactacattagcgagcgatacaaaaacttaattcccatcgagagggagtttaggcgtgaacaccttaggttgtataatagaacaccaaggcgaaaagaggcaaaggtacaccacaacaggagacgtagagttatgcaatccgacactttgaatcagtcctccatcgccacggaggacccaacgtatacccctaagtttgtacaccctacagcagatgcaaaggaacctgatggatccataattgccgtctacgactgggttatccctaaattcgtcaacgcacctttcttgccatctccaacacagaccgaggatgtcgcttcgcccgatatgtataccgatccactaaagcataaacatcatgttcctcatggggaaagacaagctatattagctcgtcaaaaccatcaatttgaagcaaccatatcaaggaaggtgggtacttcgattgaggatactagcggtgacgctgttgtaggggatgattggacacagc

SEQ ID NO: 173279 - DNA, 361 bp, Zea Mays
aaaagatcagaccggcgcgcggcactcccttgagtgcttcatgccgccgtgtcaccggcggccgggctctccctcactatgcctctctactacatggtgcccatgctcttgtgtcgtactctcgtggccgtagatagctagccatgccatcacgccattgtctaccatgacgcccgaccgaagaaaaagaaatcagggcgctgctgtgaacgctctcatcccaaattcacgaagcacacaagtgatcactataaaattgaaggctctccctgctccgtcttcttgttacgtgcccaaagcaccactcctcgcctcaaaccaatcaccgtagctcgagaattcggagtttcccccaactctg

SEQ ID NO: 173280 - DNA, 796 bp, Zea Mays
gcctgggtttaatgttacctacatcgatcacaagcgccagatctagatcggacgaaccagattggttcagccgaaccggtacgggtggactaatcctagccacctactccaagatctacggctcaggactcatcgacgaagggaatacgctagagtaaatttaggccatcgatccggtaatcgacggcaacggcgttatccctcaccctctctcactgaatcgttacgttggaactaatctcgcacgttgaactaggatccaacggctgccaacctaccccatcgccaaagccgacagcgcggcggcgcagtacccgcacggcggcgcccctcgtcggagctaggcgaactagccaagcagtcacccacaaccccggttcctcggctctaagtacattggaggtgcttgcgaactacatgaaaggtttcgttacctctattcccagtggagcagacacgcgctatggtccgaggcggcgcagaggatggccggatctccggtgaagaattctcgctgtccccgatcaccgcgatccgattgcgccctcgaacggctacttcgcgacccgtacgatcgtctggtgtcccgattggatcccaaatcgcgctatagatggcagttcgcggtcgcggcgagggagacgaaggcggcggtgttctcagagatgccagccgcgacaccgatattgggagcagataagacgagcgaggagtaatagcgttcggtatttataccccgaggttcagtacggagttcggcaagccacggacttggcccacgcgcggaatccgcggc

SEQ ID NO: 173281 - DNA, 874 bp, Zea Mays
gtccacatgcacaatatccccttccactcccgattcgttctggcgcgtggtggtctcccgactcccccattggcccaatccctcatgccctgcctctacctccagtccatgtctcttccctcctagacctaggtgccagtggcggcgcctccgcactacggcctccagtctatgcctccacctccatgctccactgcacggatccggatccggcaacgacgacctccctgcggtcagcggtctgcgacctccattgattcgcaccacatcgttcgccccttcctagcagtgagcatacaaagcaagtgttctttaaaataatcttttatagagtggcccggggcatcaattttatggagctccgccactgtcgcccagggtatagcacatataatgatgtagagagtgttagagaggagagtctaggctagaggagcaggcgtagcacacgacaacgactgttggggggttctctttgatcgaaggttctcaagtcattaatttgtcaattttttttccaattctatttcaggtataatgaagggttgaccatgtacaccttcgatcggaaataatactcgagcagtgcaagcatgaaaacgaagctgagaagcttcagttccgtgttttggacacgcaacgaaggatcagtaagaggaagcgataagatcttagaggcttggacaacatgtctaatgatggaaaaaacttttatacccttaaaatatcttgtagtttgtgtgcataggactgagtgcatgattgtaatttttacaacactataaatagagatacaatgtcatgcacaggggacactttgtataagatcttcaaggcttcatgattctgtgaattctgtgatgtatatgtgatg

SEQ ID NO: 173282 - DNA, 545 bp, Zea Mays
tgggggtttccaatcggtgggcacctatgggctatggcagcttccatgcctggccacattggtggatccacccctgtttttgtttgataacgattctctctgcagataaacttaagtatatttgtgcatatttaccatcccagggtaatcaaagaacgacaactcaatgattttagcttttcatcactgtattagattcaaaattatatggccagcaataggaagtctatcaagtatcaatagttacatcattagatcaacaaacgaggacctcacaaacaaaattgtgcttcacaagacatgtctagtttcctacagctgttatatgaaagatgtgagtagggaaaacaccatagaacactgagtgggagccaactatcatattcatgccccagtttcacccgttactcaaaaagaaaaatgaactggctaactcaagattctgcaattcctttaaagttcaatcaacccacaacaattcacagtatgggttacagcatataaaaaattcaaacgaccatgcataaccaaaatcaccaatctcc

SEQ ID NO: 173283 - DNA, 333 bp, Zea Mays
caagcttggtcaatggtggttggtgcttcatcctctcctttgggtggttgtggctgaagcccctgagcccccgcaacagcgacttcattccctgctgtaagataagagagttttggccgcgacgagcagcaccaggtatgtctgccctctggtcttccttttttaatgtgcgcaactgagcacccaaaccctagatggagcacccaaaccctaaatggaaggcacaaacttgggcggagcagacgagcttgtcgagcttcgtcgatggtggctggtgctccatccgctccttggggtggtcgtggctgaagcccctgagcccctgcaacagcg

SEQ ID NO: 173284 - DNA, 626 bp, Zea Mays
ttcccttagaaattaattatcataatgattggaaaaacataaagaaacactatcttcacattaaagtacttgggcatcccaatgcattattgaaagttaagtaataatgattggaaaaccataaagataaagctccctttcaagttctcggtaggaggtcggttagtcttgattaatcctgtcctgacaagttatatgtttgtgttgtcttttttttgaagtgcctaagggtgtactagaaaaaatagactactttcgttcaagattcttatggaaaggagatcatcataaaaagaagtataggcttgcatgatgggacattctttgccaacctaaagaccaagaggtccaaaataagtgtttgcttggtaaatggttgtttaaattgattaatgaggacaacctatggtagaagctacttaggaacaaatacctaaaatctagtaccttgtcaaaggtaattagaaaatcaggttactcttatttttggtttgtgctaatgaaagttaaagaccaattccttagccttggtttctttactcttaaagatgggaagcagattagattttgggaggactcttggatgggtaaacaacctctgatgctaaaatttccatccttatata

SEQ ID NO: 173285 - DNA, 545 bp, Zea Mays
tggctagaacgtgggctagatctaagggtaatggtggaggtgcggggaggtgggtttcactttcttctctaacgacttccccttcagctctttggggaaacccttctccaatcccagaggcggtaggcgtggttttatccgaagccatctgccagggaagagagtcactattatgcacatgcaaattgtttttaaccaagttattttattcattacaccatcacattacaagcataagactactacaggtggaattacacgagagcgttccccgaggtactagcgaattccttatctaaggtgtccccaaatgccttgagaagatcatcgaggcttgctagggatacatcctcgtcgtcggaccaatcatctattctggggggaggtagggctagaggggccttcttcttcttcttcttctctgtctggcatccttggttggtggtcttcttctgtattttcttcttgggggcgagtttctttagcttcttatcatagtccatcttcaaagtccgataggcttcacgggtgttggcttcctcgcc

SEQ ID NO: 173286 - DNA, 549 bp, Zea Mays
ggcgcctttcctggggtgaatcgagatcttgcgctatggaatttctcgccgtcgtgcaaacttcgccgcggatccaccatggtgcgtggacagcctcgtcagcatgctaatccttggtaaggacgcctccattgagtttgcctctctctccgcagcgtttagcatccgtccgaattagaaatgggcgctgtagctggtagttgggaggtccgtccatgggtgccgccgtttgaggcctctgcaccgccgccgggcctgtgtggggaggaagaaaggctcctcgccgtcgatccgaattggacgggtgagattagaagttgggatcgttttgggcgagtaagttagaaccgttgagatctgatcggacgattctgagtcaatctcgacttcattaaattccgagcgctgatttttaatccaacggatctggattgggtacccccctttcgtttgagtgggatctaatcaggcccgttgaattttgatcggatggtcgggaattgtgcgtaccccttcggccggtacgttttgcataagagcccctggatt

SEQ ID NO: 173287 - DNA, 345 bp, Zea Mays
tatgtttgttggtgctattttcacaatagctttaatctccttcatgtgacgctgtctagtttttcttaacccggtgtgaattaacagtcattatagaatgaactaattattatgtgcaatcactgtcaaatgtcatgaaaaaactaggttgttattagatccatatttgcagtacattgctcgattttcatgcccaagttgattggtcctcttgtcatcatgaagcacaaggtcacttctgatttacgatgcctgtttttttcttaattataattcatgatgacatcttgaatacgcctctagtcattgtatcacggcgtttcagacaacaaagtacggctaaat

SEQ ID NO: 173288 - DNA, 974 bp, Zea Mays
attttctatgaattatacaaattctaggtattgtttttattttaaaaactcattttctaattcatttctctgatttaataaccctatggactgggcacaatgttctggaaagcgcaggggtgcctaggtaaaaaccccgagacacagagaatagtacagggtggactgcgggtttattcatcaatactacgaggactcttttgcaagatgagctatgcgaaagggtatggtgagttctgggccatcggatgtaaaatacacggcccagattagatttttttataactccaaaccggtacgcaatcgtacccgttggatcttcatccaacaattcagatttttaagtcgcgtgctctgctctacaccgctcatccgccgatcgacggttgagatggcccgagatcgaaacggtacactcttctaatcctaaccgttcactgcgatccgacggtgcacgcaccatcccctaactcctgctcgcaggcgatgccggcgtgccaccccacggcggaggccatggccggggtattaaatccagcgagccacgggcctaatcctcgaatcaaagggggtttctgcgcgaaggacgacgaaataaactactaggatgcggaactcaccgaagaaactgactcacttgggctgtccacggcgcaccaattttccacggaggagcactacgccggtgagaaattcacgatgggcccgatccaatcttggttcaagaaggccacggacaggtgatgttcactctggcgacgccacacaaccgcaatttggcgacagggcgcaagcatagcagagatttcaccgacgacagccgctcgacggtacacacctttgctctgcttcgcccccgacctcacgctacggtggtaatcgcggctgtaggagaaagagggggagatagacgagttcgggggtcgcggcactctatataggcgcgacatggtcagctcaacaacggccacccg

SEQ ID NO: 173289 - DNA, 1033 bp, Zea Mays
cgaaggggtacgctctaatcctggccgcacgattacggttctgtggcccagattaaatccgcagttccatgaactggaaaggaataggtaccgtccgatcgaggatcgtcggcccagatctaatgttggccgaatcaatacagatcgcccgatttaacaccaacgcccaggatcaatgctacccgaaccggtattccatttctaatctgggccgcacctctcctatccaacggttcgcataatctcggccaccatcttccccaactccactgcccgcgcacggcgacgcacaacctcacggcggagcacccaccgaagaccgcgcgttcttcgcccagagagccctattcccttctactgcgagtgctacacgatgcggatcaagaggggatctcggtcgagaccacataccggcgtttggaacagtgacgacgcgcagtccacggtgaggttgaatttgcggtacaacaagcgccccgtcgagaaattccggcgactccggagcaaaattccccaacccgagaggatgtatggatccccggaggttaagcgagtcccgccagactcgcacacgggttcttgaacagcattccggcgcgtggtggtgtaagcgggacacggcggcgcgaaagggtgtccagcggtgctaggggcacagccgtgtgtcaacggtggggcgagtgggtagaggaaagagagggtcgcgcacagggctcctttataacagccaaggcgatgtggaggaggtcgtcagggatcgcattgtccgcgcagctcggcgtcagttgcgcacggaccgaatccagcgctgaggtgggagaagaagctgccgacaagtggggcccgtggatcggcgaccgagtcacgggggagtagcggtgagcggctgtcatgggcgggcccgcatgacagcgtgactacttttctggtcatgcgtgcatgagaggggagagtagaaaggggggctgacagagcgggtcccaggtgtcggcgcccgcgaccgcagtttgggccgcgcgggaggggaaatgcg

SEQ ID NO: 173290 - DNA, 633 bp, Zea Mays
tgtggtctctgcatctccttaaccctctgtgattaagtcttagaccgacccacattgaaattttcgtggcccaacccacctaagtggccaaccctatgagaaacgaagcagcgctcgacgcgaccatcggagcagcggcggcgatcccgctgctcgaaggcggtggcaacgatgtcacaatacaaccaccgctcggaagaggaggcatgcgagtgtacagaggacggtggtagctgacggtcttcaagcatgccaacatggggagtccggggtcgttgtcaccaccggtaacgcagcagcgtcgacgacgaaaagaaaaagtgacagcatacgaaaagtgcgagcaaccgtgttatggaaagcgacgaagcggtggtccaacactaggaccacaaaatccatcatttatagctaaacccctacgacaaacaatactgccataaattttcttaacggtcacgtctagcgctcccacaaggcggatcaccaaatgatcggcagtgttcgtccccttcaaatagagaatttaggattggaccatcagaacgaacaattccctcaaggggggcactgttgggccagatgccgaactagacctcgatcaacaccgcgtaggtttacccctcgtcttga

SEQ ID NO: 173291 - DNA, 525 bp, Zea Mays
ctaagggcggctaatgaccctgtaagcttgtggacatccttgatatgggccggaggcctcatcgcctcaatcgctttgatcttctccgggtttgcttcaatgccccggtacgaaaccaggaaccccagcaactttcctgcggagacaccaaagacgcacttgtccaggttcagctttgtgcgggttgcccgcatcttgtcgaagaccagggttaagtcttccactaaggtcaaccctctcttagtcttgaccacgatgtcatcgacgtatacctccaccttgtccctaatcaggtccccgaaagtcttactcatcgcccgcacaaatgtcggcaaggcgtttttcggaccgtatggcattatgacatagcagtaaagcccatccaatgttacaaaagcggtatgcttcctatcttccctagacatctggatttgatggaaaccagagtaagcatctaagaaggacaagagatcgcacccgaaggtagaatccacaatttgatctatacgtggaagtggatacggg

SEQ ID NO: 173292 - DNA, 630 bp, Zea Mays
aaccttcatagcactgaacaaatgaccatcttcactgatagcttctcagataaagaggaaagtggaaataaatggattacccaactaaatagctgactttattaataactataccaagttacagaggatacccacaccttggtgacaatcattacaaagatccaacttcattacatgtccatcataacaagaatccaacataagataagcaatactaactctaactagactgactagactaagacactaaactaagcattattacagactccgactctatcgatctagggatccaaatctatccgggtcctgtagtctagggtaccatagtcgaagcgaccacggggcggtgaacggtaagggtgctgaatcctgacaggggcgggagaaccaccatccagatagtgccgtgctgcgcactcatcacgcagttccgcaacctccgcccgaacctttcccaactcatcaagggcgtggtccaactctgtgttgagcatggcgaccaagttgaccatgctattcagcctgtgattgccctcaccaactggcgaggcaatcacacctccagcactgccggtcgaacgacgagggtagtacttcaggtcgaggccatcagctaccccgctgaac

SEQ ID NO: 173293 - DNA, 550 bp, Zea Mays
gcagggtgatcctctatctcctatgctgtttgtgatggttatggatgtgcttaacagtctgttcagagcagctgaaagcagggggctgttacaaagtttagaggaagctggggttcgtaataggctttcgatctacgctgatgatgtagtgtttttttgttaaacctatggttgaacacctgaattgtgttagattgattttggattgctttggtgaagcaacggggttggtaacaaatttgcgcaaaagttttgctataccaattaggtgtgatgggctgtatttgcaatgcagctcgggatcctttccgtgcagctatctggggctgcctatctctgataagaagctaaaaaaaagggagtttatggtatgggttgataagattgctgaccggctccccaactggaaggctcgtttgctcagtctggctggcaggacagcgttagtgagacacgtgctttcggcaattcctgtttatatccttatggccatgagtgttcccaaatgggtgatcaaatccattgataaaatccggagggggtttctttg

SEQ ID NO: 173294 - DNA, 1507 bp, Zea Mays
ctataaacatatcaactttatttaggtacgactaaacgcgatatgaacatcattaatttctttctttattttgacattaaggataaccatcgagcttacagattaaatttatctttgtataatttagtaaatataatagcactatgcatatcaaatggcaccttcctttttttgcaatccagattaggacatggtttataggcaacgacatagatcaatataacttttgcatgacctaaaataatttggtgtgtatgtaagtatagatcagtttgtatttcctaggcagaatgagctaattttataatggatgactggagaccaaaagatattgctaacatcttcaaatgacttgatatatagatttttaatttgatcatggcgttgggtgattttccttaggtgtggtatgactaccatgtgcacatagagccagactccggattatacaactgacttaaagcttttaaaataaattggacgtttatttttttgtttgtctagattaacttaggatgatgcacctgacttatgcagtggatttagttatttctgccatggcgttaagctggtggccgcttagtggttattgcataatatagtgcacggatggaatactattggtatatgcactgcataagtggttgtttaactcaattttactcgtgctaaaaggatataatgtagtgagagaaccatataattatatgttaattaggattatttcggatatgaccttggtgatggtcaccttagtggatattatctaaatggtaatcgactgtatgaatcggaagtcaaacgctgagctcaaatatatggttacccatgggacttaaaatagccatattttcttctactttaatttggcataatttcagatatatatattcatttgatcaagcatgttttggcatgttttattactagcgcgttgggttcttaatggtttaaacccactcatgttgcatagacgaagaatttaaagtatacggctcttcttaccggtcattcttatcttgcaacaatgtctctatgagcaatcttttcttgagcctagttttatccagcgtagtgtctatttccttgagaatagtgtctatttcccctaaggtatgccctaggggtgattgttgaagatttattgtgaatgaggagagagcagcaacaacgaacaatgatgctcatatggaaggggtagcaatcgtcgtacgaataaagctgcaacaccggtaatttggcgaatctttaaagcaatcactctgtttgtgatgtttctgaacaacagtctgatggcgctctctggccgcctagcaacagtactctagtctgttactgggcgtcttttgcagtagcctggcggtgcttttgatggcaatagcagtagcctggcgacatttttctcatcctttttttgaactcttacatatatatttattctatctaccttagcatgttgtaggtaaacatacaaggaatacgtttggagttccagcctcaataggtt

SEQ ID NO: 173295 - DNA, 626 bp, Zea Mays
gggatacaattcgtcacctaataatctgttcatacagaggctgacttataggaaaagatttgctatctaaatacagaaatagaaagtatgaaaatggaaatggttcaacttctcaaagatttcacttctagcttcagcacctctagccctaatatatatgctttgaattagacaccatgttgtttactgtgcgggcttcgaaaggctcctttttgtcctgttgatacaagtattttgtactgagtattgagggtgaccttaaggcactttatcataagttagaggccctaggatataaggttgagccccccatgactggattgtgggttggtcaaagaaatggacactgaaggctgaggctttggcttctgatgctagacatgctaagggtgtgggagataggtatcccctaggcccccatagcgtggatagagctcataggccattaaagagaatgagtgggccagacaattgagcccataggttggtcgactaactcagaccaagggaaggcagaaagcttgcttagcaattatccccgatgaagctagcgcagagttctatgtcgcccataagtcggaacaaagcgtcatgcatgaagcatcattggccgaccgaaatagact

SEQ ID NO: 173296 - DNA, 723 bp, Zea Mays
cgctcgtcagtcacgccccgctatcgctctctcgcgcccgctccttctctagcacgtaggtctcggccatcagtcccttctccctcacccgtgctcggcatcgacgcaatcatcgccggccatcgtcctccccctttcctcgccattactcgctcactagtgaagtttggcaccgattcgtcccccgcgcgctgtgaccgtgtacccgcatgccaccgtcttcaccgagccatcccatcgccaccactgtgccgccattatcgtcgtcgttgtgtgcctcgtcggtgcccaccagcctccgctcctccccttccccaagcgcctataaaagggccgccctgagcccatcatctccttgcaccggcctcggccactctcctccccctcccctgagcttaatcgagccagcacaccgccaccttcctctgctccggtgagttctccctcccctctctagtagcctaaggtccaattgagttagctcacaaacttcaccacctctccacggacacgaagcaccactttcgccttccacatcacacccagtggccacaccgcgcgaccacaccatcgcggagcctaccacctcctcatggtcagtccctcccagagcgccaccagccaaattggcctcgccgccatgttcgcctggctctagccatgctatcccacctcccagatccctgagaaacagaaagaaccatcgtggaacctcatcggcgg

SEQ ID NO: 173297 - DNA, 1645 bp, Zea Mays
aagagggtgaaacaagtaataatataaatccctatatagttgaagagcttaaaaaaatgctcgatgaatataatccattagttaaagtatttagacatgcacgtgacctactcgaagaacacaaaaatatagatattagcatccgcattgttggagcaaacaagggcgatcctatacaatatgaaataccacatacagaagaattagcaatgcttatagttggcgacttaaatctagaaaaatatagaagagacataattgttagtacaaaaaataaagaactacaacatataagtatatttcacccagcatatatggcactacaatatcctttactattcccatatggagaaagaggatttcaactaggaataaagtatcaagaaacaaataacagttttatagccaaaagaaaaagatgtacaataacatcacatgaatactataaatatcatatgcattttagaccaaatcagccaaatccttatctatgctacggtagattatcaaagcaagcaatagtcgatgctcgtgcaattgaagatgaagatagacttatgtatatatctagaaatcaagacaagttaagagccgaatatcttcaaggtatatttgatgcagtagaaaaaggacttagtgaaggaaaacaaattgggaagagaattttattaccgtcaagtcatgtaggatcacgaagatacattatacaaaattatcatgatggtatagcaatttgtagagaatatggaccacctgatttatttataacattcacatgtaattctaaatggcctgaaatattattgtctattctacatggtgaacaagctagtgatagagctgatactatagtgcgtgtattccacatgaaactagaagagctattaaaagatatacaatcaaaaaaaatattcggtgaaacacttgcaattttatattctattgaatttcaaaaaagaggattaccacatgtacacattttactttggctagataaaaaacaatatgaaataactccagatataatagatacatggatatcagctgaaatacctaatccatatgaagatccgttaggatatacgcttatagctgaacatatgatacatggaccatgtggagaaaaaaatgaaagtagcccgtgcatgagaaaagaaaaatgttcaaagtattatccaaaagaattccagaatgaaagcaattttaccaataatggcttcactcaatatcgtagacgagatactaatatatacatacgtagagacaatcataacttagataatagatgggttgtgccacataatttatatctcctaaagaagtatcaagcacatataaatgtagaatatgtaaataagagtaaattgctcaaatacttatgcaaatatgttaacaaaggaccagataaagcaaccattatctttgaacatataaaaaagggagacaatgaaaatactgataaagagaaaaaagatattgatgaaatcaaggaatatttagactgcagatatatatgcgaactagacgcaatatggagattgctaggttttgagatacactaccattggccaccagtcgagagactaccagtacatttacctctacagaatatagtaaaattacataaaaatacgagattaaaaaa

SEQ ID NO: 173298 - DNA, 1021 bp, Zea Mays
cgcaacgccagagcacgcccctgcgctcggccccgcgcgcgccgcgccgcgtcaaccccgcgcccgcggctataaagccaaccccggcctcgaccgtacacccctgcgcgctcccaaccctgcccgagcacgagttcacagtcgtttgcccagagaacggcgtgcccgcggctgtgtgagccccgaccaccgtagaccggccacgccagccctcctccacctcgtctgaccctttgactagattccccaaagctcagtgaagctcttcgagccgcggattggacaccacctcatcgaagacgccgaatcgacgtctccggacttcaaccggccgccgtcgcacgtagaccgagccacacggtaagccattcatcgattcctggtgcctacggcatccttgacctccagtgaagctccccgtgccatataattgaactataccgctgtgagcaggccggagcacacgccgccaccgagcccgaccgcctgcgcacgcggccagccctactccagccatcaccgccggtgatccgcccctcgacgtgaccgccaggacctcctggacctcacccaaccatctcccggacctctcccgccgccggtaagccgcgccaccctttttcgcctctgcggtcactgttccggtggggaaggagctcgggatgagaaagagaaatgccagggggttttcgcgatgtcagtgactcagtggaacagttccgcaggggcaccgtataaatgatttagttaaaggaaaacccaggggcccaggtgcaaacctgttttccttaaacccttaagatttattcttttaaattagtacagaacttgaaaaattcataacttgagttttatccaaccaaatttagtcaaaccaattttgctacgtcctaaatatgttgaactatttaggaaaaataataaacaccctaattaatgcaacactttttagagttttaatttaaatgagtgtactgcccaaaactaaataaatagaggaaaaatagaaattcttttggac

SEQ ID NO: 173299 - DNA, 384 bp, Zea Mays
gatgaattggtacgtgcctaggaggaaggggtatggacgtatgactgagctacaaagacaaacttcagaatgcatgtttggtactagtactccatgcatgacttaccggcgtatgggctattatgcgcctggtgtgttcacggtaagttcccatgcccagtttgcaaggaagctctcaggatcatttggttgaaaaagggtggcaaatattcgtccttcgataaacatcgacaatttctccctcctgaccatccattctgcctagacatcaagaactttacgaaaggtgtcgtagtgacagaccgcccacctgcaacgatgactggagctaaaattcgtcaacagatagatgggctcgtggccaatacagaaggtggttttgtg

SEQ ID NO: 173300 - DNA, 920 bp, Zea Mays
catcctcgacccggccacccgggcaacctgcaatgtgcatccgctccaaacctttggccagcgtgacttcacggacccgggcccccagacgactggatttacagcacttgaagccagccatctgctgccaatcgactgacccccatccgcagagcactcgcccaagtacactcctaaccaatttttgatatcctagatgatactgtgtgtttgtataatctacttcccctagacgtataatcattcttacattatacccgaccttaggttaaggagactttttaactccgttattagccttatataccttaacatgctccttgcgggacattggggttgtacctctttttagatatttactttaggcaacctttttccatgcaaatcttcaacaaaatatgcattaccatgcacaatgcctaccatctccagcggaccctcccaatttggtgaccactagccaaacttattatccctagaccctataggtaaaatcgttttccatacacctgtcccagccaaaccttccgttacaccccacgacacctcagtttcataatacgatagcccagacacgtgggggcgagtacttttcgacacccctagaaggtcggaaagagatgaccagacatatgaaccaccagggcaagcattaatgccccacagaatccaaacccgtgggcaggaagacgacataatacctaaacacccacacctatgctggaccgaagggcatatggacgaccatcggccgctattgatatagtaagggaagagatagctaagacgttcggagataagcttgtagttagcatgatcctgggggcagtcatatcggaaaccctatgacaactgatttgatttccacatgtaccgccagggaacaaggatacccgaatttgcaaaaaatttgattgagc

SEQ ID NO: 173301 - DNA, 749 bp, Zea Mays
ggaaggcgaaagtggtgcctcgcttcgtggagaggtagtgaagctcatgagctaattcaattggaccttaggctactagataggggagggggaactaaccggagcggagggggagagcggcgacgctggctcgattgagctcgaggaggggtgagggatggctgaggccggtgcgaggagatgaggggctcggggcggcccttttataggcgtctggggaggggagaggtggaggctatcgggcaccggtgaggcgcgctgcggcggcgataatggcggtacagtggtggcgacgggacgactcggtgcaggcggtggcgagtggtcacccggtcatagtgcgcggggatgcatggcgccaaatcttactggtgagcgaataatggcgaggagacggggcggacggtggccggtgacgatcgcgtcgatggccgatcaagggtgagggagaagggactgacgagcggggcccacacgctagagaggaggggcggtcgtcagagagtggtgcggctgacgggtggggctaggcggcagcgagagagaggggggagagcgcggcgcgagcagagggagggggatgcgggcgcgagagggagggaggttgggccggactcggcccagccaaggagggaaggggttttccttttttctattttctattttccttttctccttaatccgttttctcttctatacaaatattcatttatgttttctaggtgccaaaatgaaatattatatgtgaa

SEQ ID NO: 173302 - DNA, 398 bp, Zea Mays
cctccaaccaccagccacgcttcgccgctgaccccctcgcggcggcttctgttcggtccctgtcctccacgccattctcttcctaacctcgccttcaagttcatgtccccgtcgtcgcccatgggcctgctccatcggcccgtctcgccctcggccacggcctccaaccgtcggccctgtttcaccaccgaccgcacgccctgccctgtgccagctcttgccctcccctgactcgtcggccccgtttcgccgccgaccgcacacgctaccgtgcgccggctcctgccctctcctgacttggtattcgtggttcgagcaagcaccaaaatcacaacattcttgcattatggtaactgcaacttttgttagaatttctgtctctgggagtgtcaagaggt

SEQ ID NO: 173303 - DNA, 399 bp, Zea Mays
ccaccggtatcgccgtggtactccggcaacctcacttatgccacaccatagctctttaccgcatggtagtaactgtggcatgcctagactcaccattttagaaccgttgcaccggcgaacgccacgactgagccgccattgatctcccctcttttcggccgccagcgcgccattccaaattcaagagccaccaccctcagacactataaattaagcatgccatcagctccgctgagtcatcatgaagccagagcacccgctactgcctccaattagccaccagagagttccaatttctttctctccccaaatcagttttccgcacccatgaacacctcgccgtggccagacgtctacatgttagctcatgctcttctgcgtgatgttctagcctctctc

SEQ ID NO: 173304 - DNA, 407 bp, Zea Mays
gaaaagcacgcgcaggtcgatttatgcatgcgcgcgctgggcgtgagcggaagcttccatatattatccaagtcccggccacagcccccctcttgcgctccgctgtcgtctcgtctcgcctcgtcgtcggcaccaccaccacaccccagaccccagacccgggactgagacttggcatctctcgttgccaacttgccattcataatactagtaaactggtaagtactaagtagtagcaaacacgttttcgcttgctgctctgtctcctcagctcacctaccctccggcctgaaatctgaaccacaaccactgctacagctagccaagctgccacgcccgccgacacaacggagatcgagccgagctgcttcttccatactacacgtccgtccaatcagcacacggag

SEQ ID NO: 173305 - DNA, 646 bp, Zea Mays
cccctattttgacgacctgctccttccacacaacattgacgtgatgcacactgaaaagaatgttgtcgaggcactgtgggcaacaattatggacattcctgataagtcaaaggataacgtgaaggcaagagtggatctggcagcgttatgggatagaccacacctagagatgaagccgccaagtggcggaaagacgtggagaaggcctaaggatgattttgtcctaagcagggcccaaaggaaggaagtacttcagtggatcaagatgttgatgttccctgatgggtatgcagctaacctgagtaggggtgaacttatctagtatgcgagtcttagagatgaagagtcatgacttccacatatggattgaacggattcttcctatgatggttcgaggctatgtccctgagcatgtctagctagcactttcagagttgagctatttcttccgtcagctttgtgcaaaagagttatctcggaccgtggttgcagacttggaaagattggcactcgtgctactgtgtaagcttgagaagatatttccacccgacttcttcaatccaatgcagcatttgattcttcatctcccctatgaggcacgaatggggggcccgtgcagggacgttggtgctatccaatcgagaga

SEQ ID NO: 173306 - DNA, 603 bp, Zea Mays
agacgatatgatcccgaccgagtgacttctactactatgaatggtccttcccatagaggtgacaatttgtgtcgtccctccccctttagaattcggcggaggacaagatctcccactgcgaaggatcgatgccgtatggccttatcatgatagcgcctcagagtttgctgataccgtgctgattgaatcactgtattcagtcgctcttcttcgagtacatcaacatcctccagcctagtagcctcagcttctgctatgttttcaaagattaacctcgatgccccgaacttgagatcagtaggcagcactgcctccgaaccgtaaaccataaagaagggagtattttccatgcagagctcggctaggttgagttctcaggctccaaatcacatatggcaactctctgatccactttcctgcgaacttctcattcttgtcgaagacgttctttctgagtgcttctaatatcatcccgttggctctttctacttgcccgttggctcttgggtgcgccaccgaggcatatttgatctgaatgctcttttgctcgcagaaatcgaagaactctgaactggtgaagttggatcccaggtcagttatgat

SEQ ID NO: 173307 - DNA, 450 bp, Zea Mays
caacctaactttcttttgccccaaaagccaagtggccttcccaataattgaggggcaccttaagtcccaatccgaacccttttggccacactacgtgtacgtgagatggctgatgaagcttctctgccctgctccctgtctgtcgtgcaggacagagcgcaagcatctgcagtgcactgcacttccattgcacgcaataattgacgccccatggaaacggtccacgctagaaacgctgttctattatggcctgagaaccaccaacacgcacaagcttagcatgcgcgcgcgtagggatatatatcgaaggatcagcgtgcagccgttcatgcatgggtgcatggccatgcgccggcctcacacctgcttgtggagttttctttgaactgatttggtgattagtgatcacgggaggaacgagaattgatttacagaaaggggatcacagga

SEQ ID NO: 173308 - DNA, 966 bp, Zea Mays
aaagaaaaaaaagacctcgttgcgccatgggccatatcctccccgtgccggcccatttgcttctcatctgcgcagccctgttcctgcaaatagcgccgacacgtgggccccaccattcagcctcacgcatccgccatgcgcgcgccagtcctggtttctctgacgcacgggccttggtcgcaggtccttcactcatactcgcgcggactaccgatctgtgcgcctggcgccactgacgtgtgggaccggtttggctgggtcgtctttccccttttctgcacgctccatgaacggaatccacgcgttcttcgccgccgggatctccgaccggccattgtggcgctgctccctggcgcataagtagcaggcccctggccataaagcatccagtcgaggcttcccctctccccgttcttttgtgcccatgtcgtgccctccccgctccatcgccgcgcaacagcatctgtgaaccacgggatttccgacggggcgagctgcgcctgcgcggatctcggcgatcgttgccattgtcgctaaccccactagtgccgtggcctaggtataaatacctggcgcgttgacgtactcccttggtcccttcatccaatccgcaaacaggtgaaagaaattggtcggggaagactggcgcagccgtggagggattctgtaatccatcgcggtcgcaccctcgaagaccctctaggtgattctctggtatctgctgggtgcgtggcggccttggcgttcgagaatggcggcctgcaccgccgggattgccctatcaccatcggaactggtcatcatccgccgtgcgccgtgaatagctgaatctgctccgcggtcgctggcaagaccctccccaaaggtttgctttctccttcttcatgcgtagctctagtcgaagccaggtttcatggacttgcgcgttggtgtggtggtgctccagcgcgtcgcggccaggatggg

SEQ ID NO: 173309 - DNA, 544 bp, Zea Mays
gaaaaccctagaaaggaaaaaagagtaaggtatggtcagatatggtaagataacagaaaaggtaaggtatggtcagataaggtaaggtaagataacaacaagcaccattgtccactactcgacaacaacaacaagttattaacaaggataaggtaatacaacagcaagcaccattgtccactactcgacaacagcaagttattaacaaggataagctaatacaacaacaagcaccattgtccactactctacaacaacaagttattaacaaggataaggtaatacaacaacaagcaccattgtccactactctacaacagcaagttattaacaaggataaggtaatacaacaacaagcaccattgtccactactctattcagttaaacaaattattaagaaaggttacaaatcagttaaacaaattactctactctgttaaataagttacaaatctgttaaacaagttactcaagcaccaatgtccactactactacacatatcagttaaacaacaagcataaacagtaagcactcaatcacca

SEQ ID NO: 173310 - DNA, 648 bp, Zea Mays
atttgattggtgacagattggacgtctggcagatggctctcggctggacatcactccgctctgtgcttcaatgcctctgctgattagacttgcggttcggtagctatatttggacttcctcccatctcagccgatctcttccttttgtctcagtacattcattgcgtatactatgtggatatgacttcttcagaaaatcttttgaaaattcttggcaacacacccaatggatgtgcccaatgggtgtcttggtatgtagagcgtttagcctattgtcctagagtagtaacttgatgtgaccgcggggtgtaatcatattgcatgagcagttgaccttggtccaaatggtgtcgtgttacgcgaagcggcgctagttgcctgactcattttcaggcagcttgaattgctttttaaatacttgcgactgttcgacgagcgtggtaggaagtggacaatcacccccgacctctataattagcctacttgcaccgttgttctcttcactcatccttcgatcatctgttgctttcttctccctttctcttcttctccaaacgaccatgggtagaggtaggaggggtcgcggctggcctcgtcgtggtgacaacaagcgcaagcgtgcccaagtcctccctcggaggactttgg

SEQ ID NO: 173311 - DNA, 770 bp, Zea Mays
gagatgtcctagtctactaataacaactagcatcaaacttttgtcggcgcctaatttcgacactgtggatccccgtagctactagactaggtggagcgcggcgcaacgttggcccgttgttacacgtagatcagtttcttgcacagaccaaggcacatctgcctgattttggctacaaatttgcttcaagtgtgttcgatggtatttaaaattattgttgcatagggcagtggtttccgcgtcagccaatgtgagcagtgggctggtgccaagccactcctttgtcagcttggctgcatttgcctgctggtataccatactcactaaggctgtcttcagtaacgaacgctaaataatcctatactctaaatttagaagagacgtccactattacctccagcagcaacgggtaagtgaaactataaaatagtggatgacttcgacgaacgttaaagccacagtgtactagttcgtccgctatcctgctcacacgcggtccaacctcttcctctctactttttctcctgcgcagttgtcagatggcgtgcaaatttatctgctattgcttggttatagtcggttttaaaaattaattagtctctaattaattcttagatcacatgaatgatttttcgtttccgtgcgtatgataaggaaaatacataatacatttttttggaaaataatatgaccgatgagtaatttgtatagaaaatgaaaatgtattgtaagaaatatttttatttcgcaacatacgtaattaatttttc

SEQ ID NO: 173312 - DNA, 352 bp, Zea Mays
ggataattggaggcacgacttggtctctcaggtgcttgactaccttacggtcctgacggtgtgctcaatttatagaacttgggggcggtggcttgtgaatttgagttggcgcggtggcggctggagagtgaggagagcactgtcgtgagagctcggtggcatctaccgtggcggcctcaccggcgatgaaccagtagtatagagtggtttacggtgactcactgcgacgtggtaaggcatcgaggcacgtagcctggccggataacggcgaactccggtgatgccagcgcgattaaccacggcgggacacggcgaccgggccggccagcgaccaaattcaccccgcgctgga

SEQ ID NO: 173313 - DNA, 1340 bp, Zea Mays
gcgacagagggggagggcgcactgaccgagcgggcccagcgctaggggacttgggcgctgataggtgggccagggcgtcagggcacgcgtgcgcgaagcggtatcctgcggtccgagccgttcgatccgaatcagacggaggggaccagaccaggggggatgagcggtccgggccgtgcgatcaagatcggacgggggaaatcagaccaggaaggatgagcggtccgggtcgtgcgatcaagatcggacgggggaaatcagaccgataaggatgagaggtctgggccgtgcgatcaagatcggacaggggaaatcagatcgggaagcatgagcggtccgggccatgtgatcaagatcagacgggggaaatcagaccgggaaggatgagcggctgcgggcggcgctgttcgtctccgcagcggtgatgtcgccggagttgaggctggcgcgagctagggtggctccagggtcgctggagttaggcagagagggagagggcaccacggtgaactcaatggcggggaagaggccatgaatccatgggcagagaagggagaacggcggtgagaagttctcgggtgggccggagtaactccggtgagccattctggccacggggaggggacttaaggcgcgctaaggcctaggctagcttcagcagaggcaggggtgacacagggacctactccggggaactagaccgggctaaattggccggccaccgcgcgagcacggcggaccgccacgaccgagcaacggcgaaggcgaaattggccgagcatagggcgcaataagggaaattgggcacggggacgggtgtctcaccttggggcagagcttggggaggcttggcgcattctccggcgagctagatggtcgggaacgcaggcgcgggtctctagcggcggctggcggcatgggcagagcgcgagagagggtgaagctgcgcgaaatgaggtgaggggtgtgcacggggcactggcggggctctatgaagggagctgggcacgtgggcggacgtcgtggccaagaaatccggcgacgtgcgtgagtgcgcacgcgctggtccactgcgagcgcggagggggcggaattgacaggtagggtccacagtgtagggagaggagaaaggggcgtgcggggcaacggctcggcaactggcggaccgagcccaagagataaagagagagggagcgcgcggggaagaaaactggcaccaacagtctggccccactgggtaacgagggagggagggcacgcgcgagggagaactgctgctgacaggcagggtccgcctgtcagacggcacggccgcgcgggcgcgtggcctggctgggccg

SEQ ID NO: 173314 - DNA, 836 bp, Zea Mays
cgggcgagaaacacaggaaacgaaccaaacgagatcggcttggatattccatactatgtcgaatctagttgaaaacacataaaccccatctgtttcgaatatggggatctagacaagacgcaaacgaatatatatatatatacacaattctagcagtatgttttggcgaaatataaacagtttggactaaggcgacttttgggatgtacattttagttttttcgcaattgcaatcaaagaaacggattaattatgaatagtgggtctcggctctaattatctcatcccgttttaattttttgcagcacttctatcgtcgagtccaaataatatttacttgggccaaaatcgcaagagtgggtcggaattccaaattcatgttctctaagcccataagttttaaacggacacaagactcgatatttcgtgaaataaatacgcgagattgatacatcatcgaaattgtgatcctttcggaatcgacgtcacacaatgttcacgtcggaatagatgttttgggcggcgacggctcgggaaaggaagatagggttttggccggctggtatttgggtcatcatttttgcgcgccaacaggcccgataaattgcacacgtttttatggcgactgacagcgcgatgctataggtatgaattaccgactaacaaagcgacactattcgcatataaatataacgactaacactcagttggaatatagacatatgccgactcaccatctgtggccatgtataccgactaacaatttgatgctatttctctatttatagcgacggtcgtcagacactaatttggtgttgtggtatagtggaaccgcc

SEQ ID NO: 173315 - DNA, 513 bp, Zea Mays
ttagaattagaggatgaagggaggggaaaaaggtagattagggtttcaaacctagattaggatttttgggatgctacaaacctaccccacttaaaggaatctcgccctcgagattcagacggggctcgagaaaaggtaagggtattccttcctcagagagtcctcactttcccaggtggcttcctcttctccatctctgctccactgaaccttacagagtctcacttccgaattgcgggtccttctgactgctgagtcgagaatcttcactggcttttcccggtactggagatctttttgaatctgaattgtctctgcctcgatatgggtttctggtacttttaggcatttgcggagttgagacacatggaacacattgtgaatgtctgacatggattctggtagctcaagacggtatgccacgggtcctattcgggaaatgacagggtaaggaccgacgaaacggggtgctagctttcctctcatctggaaccttttgacaccacgcattgg

SEQ ID NO: 173316 - DNA, 415 bp, Zea Mays
cgaggatgggttacagggaggctaccactcatattcagctttggctccttggtgccctggtatcccactcacagtttgatgttgtggactttctgatctgtgagatcgaggacaccgttctggatgggattcgtgctcgtcggcagctaccttatgctcactacttgtgccacatctttgcgcagctgattcagccacctcgttttcagagcacccttgaggcctcacgccttgtgtttggatcttaccgccctgctcctgagattccagtgccagcttctgcttctgtgtttgattctcaggccgaggacgcagctctacgacagtttgacactcagggtacagcagctgatgatgatgatgatgatgatgattttggggttcctcctccgcctccgcctcctatgcctccccg

SEQ ID NO: 173317 - DNA, 430 bp, Zea Mays
aagggccgcagtaagctcagccacacgagctcgagcttttgcttcgcggtcccaagcaatcgaacgcgagttcacggcccaatcaatggctgaatcccgttctaaaatctcatattgcaagcggctgatgtcagctgacaattcagctatacgctggctgtcctgctcccgtgccctatttctgtggcgtagttctgaccggagttgctccaccctggcttccaggtctccaattgggtcattgctaccactactacttccttcatgtctgggggctagctgatgacgaggcacgccaaaaggtccagtagacttgcgtgctgttttccttgtacgtgccatgtctccataagaggggaagatttactagtatattcttaacatgatgcatgcaaattctaataattatggaatcaaacttcgttgatcc

SEQ ID NO: 173318 - DNA, 444 bp, Zea Mays
cgactgcacaccatggaccgtggtggtctggacgtctgttggagtggagaagtgggccttggacatcacgtgtaacacaaatgccaatatgccatggcccatgagcgtgattgtgtgaagcgtccaatggtccaagccaattagccaaggcgtgagcgtgagtgagtgacgctgcaacctgcaagacctagaagaagccagcggccagccgccacccgccaccgccaggcacctttctccaatctccagtattccagtccccctcgtcctcggtggcgcgtggtggtgcctgagccagacgtcggccgcttcttcaccaatcatcaggcccctggccggtacctccatcatcagatcacctactcacctgtcaccagctgccggcgactaggagattgaaggacggcagccacatcggaatcgtcgtgcaatgtatgtatttcc

SEQ ID NO: 173319 - DNA, 377 bp, Zea Mays
attacaagggcgtgtgggccctcagggttagacaaaaaatttggagtgctctaagtctttgccggagggcggtgctagcctgtacgcgctgggggatgccttcatcttgacgatgaatggaccctcccatttcggctccagcttgccccgtgattctgtccgggtggtccggacgagtacgaggtctcctttgttgaactctcttgggatgaccgtgttgtcgcgccaggccttggtttgagcctggtatttgttgagggcctgcagggcgaggacgcggtctccgttgatgaggtctttagacgttgattcgtcgacgtcggggaccgctgatgtgcttgttcggggcgacccatgctttatctcctgcggcgtca

SEQ ID NO: 173320 - DNA, 406 bp, Zea Mays
gtaaaccgcatggaggttgtcttacctcagatcgagcgctgggaggggctatccacgtgatgaggcggtcacgcggcggatactggattccgacaaggaattgaagaccttctggtgatcttcacagcgtactggggccacggctaccttcatagccgaacggtgaagcaccctgacccgccagtgcgcccccgacaatgacgtggatgaagactgacgtcggcggtcatccccccattccacttcctcccggtggtgccccaacgagcaattcggtggggtatgcgctgctcgacagaaggggatacgtggcacggggaggtggagcagagaaggcgagcgcgctagcgccggtgcccagtgcgacggaggagctcagccgccgaagaggtttggcatgggacag

SEQ ID NO: 173321 - DNA, 1456 bp, Zea Mays
taggagagcaactttgtttaagggttcaagtcatgttcttgtgaaaaatctagatataatcatgctcaaaatctggctatcaggctattaaggtctgaattttcagactaacagtgcactacaggaactttaggcacaaattcaagcatgatttaattggaatttggctatagttgttatggcaacattgtagctggaacattggtctacaattttgctgcagagccttggatgagttgctaaggaaaatttagagaaaatgtgacctgaacttgctctgtcaggcaggtaacaaaaaactgaaactggccatggtacagtagatctacactgatgaagatcatgattcacccctcctgcccatcgccggtggccgtcgccgtcgattgccgctcgccgtgattcgtgcgccgtggccatcagataagcatcgcccagtaaaaatcttcaccgctggtgagctggacaccactccgacggccttccatttcttttccccccgctttgcggctggagcggattagctcgctggagaaccgccgcttcccggcatcgcgccgcgtggttttgctttccaccgcgacaccgtgactcgctacggccatctaatcgtcaccggtgagcttgccacggcgttagccacgtattcaccgcgccgccttcttctttatctccggtcgccaacacggctcggccaaattgagcaccaccgcccgcgggctctataaattgaccgtgcccccagctccgccatgtatccaagcacccactgcacccacctgcatctcaaatccctcacccgcaagcacgaatttcggattctccccaatccggttctaaaacaccgtgaactcaaccacgccgtggtcagcccaactccggttagctcctcccctctgctcccttgtttaagcattcttatgcgtctacaatgcttgccgagccactgaattgaactaagagtcctctggtcaccgggaacacgaccgtatagccgccatgattacggccaccgtggccagagctacatagctggtcttagttgcaattaggttgggggaaatgatcatggtaaccccgatttcatgtccgccgctcggagaacccagccatagccccaatcggccggtccaggacctcgccggagcgtccctgcgcccaccgccgtcgtggacctctgcctgtgaagacttagaagttggagggctcttcagcaaagtgtcagtgactaggttaaatagtgaaagggctcgttcgcagatagttaaaaccccaagggcctctgtgcaagtctgccagcgcgggcgcgcgcgcgggcgcctttctgccctagctgggccgcctgggctggattcggcctagtgctattcacctgtttttctttttcttttatctctagagccaaaacaattatagaaaatggtaggaaaatgataaaattgtgaaaccaattttc

SEQ ID NO: 173322 - DNA, 443 bp, Zea Mays
ggagatacatcaaaagtctcaagaaaagggccatcaaagaagacacttggaaggaagaagatgacataaacaacatgtggaagaagatggcaccctatatttgcgaggtgtgtggagcaactaaagggagtggatgcgaagctaaaggtacttggtagtggaagtacatggatgatttgatacttgtcaatacagtgtattagcgcaacagtgtttttcagcctctcgcaatagggtacagtgcgggggtatttataggtaaccaggggacgatttcaccctctcaaatacagttatgcccctggttacctacgttatccctgaaatattcccctctcaagggttattacaagtcattacaacatgattaggtatttcacggacggacacaccattaactctacccacacagtggcttacaagtgggaccaggcggcccaggg

SEQ ID NO: 173323 - DNA, 379 bp, Zea Mays
ggggcgtcctccgttgtggatatcgaggtcagagctgggctcaggtgaggtggaagtctgcccgaggtcacgaccgaaaccgtcttgagattcaaagacatgcaccacggttgaagaaatggcctcctgtgggattcgcgggggagcaggtagccgagaccgggcgacgcagagttttgtgtggagggcaagttatgcttcgggcgagacaaagtttgcgtccgagggctagtatgtgttcctgacgtattacatgtcactaatagtttgttgaagccttgtcatgtggaccagattttgtcataaaatcatgcgtacctgtgatgtggagttgatgtggtaaatggttatgacgtttatcaatatgacatggcacttt

SEQ ID NO: 173324 - DNA, 383 bp, Zea Mays
attctctgtatcaattgctttaagtcgtcttcatcaattgcttttagtgcctaatttgaatccataataagtagttcattactatataacattgttcgatactaaataatacataataagaagtttattactacataacatcatataatcacctagactactgagtgcaacggggccatttgcccttgcgaaaagcatctggattctcccctattgcgtccttttgcacgacgtgcacgctcaagcttcttctccttctcctccctgcattcagcaatatgcctcatttcctgtttgtctacccattgttgctcggccgcaagcttctctcgtcttttctctatcctctctttgtcctctgtatcccactttttaagattctc

SEQ ID NO: 173325 - DNA, 380 bp, Zea Mays
cacatttgtcgtcgtttcactcaaagatcacatgtgatgcttatctttccacgtgatttgtgcttttattcatgctgacaaggcgatttggtctgcagagagggtgatttggttcgcagcgagaagggagaatactacagcaggtttctctgccacggcgcccgcggcgacgtcgacgcccacgctgacaaggatgctcagttcatcacgagcgcgaggaggagggtgaagattagttggagcacgccgctgaccccgacgtcgtcgactccgagcatggagttgctacaaaacagcgaccacctcgatgtatagctcaaagtatgatatgctcctcttctctgctatccttctccgctcccctcatgctccaccttgac

SEQ ID NO: 173326 - DNA, 757 bp, Zea Mays
gcttggatcaggatgccggtccttctgctcctgttgctgaagaagtgccagtgcctgaatttactgaagctgatcccaatgggtgtgacccatctgacgctgatcccaatgagtgtgttgtccgtgttgttgatgaggatgatgaagaagaggacaaaatccctctgattcggaagaacagccggcgttacatagctagtggggaaagtagtggtgttccttctcctgccttatcttccctcattggtctgcaagaattatctctggtgaactttgatcaaactcttgaagacatggttccagaagatatgttatcagaaccggcagatggtggcgcgatggatgtttgtgctggtgtgctcgatgctgggttggggtcatcccgggcagcgtcccgcgcctcatcgaccttggagcgcgatcttgagggtcaagaggctggtttggattgccctgctcccatggaagtgactgagggaccctcagccttagaggtggctgctgcagaggactcgaccctcaaggatagtgctggcgcttacccagcccccgagggtgttgccggagatgatccggctcggatgggtagcgcaagctgtgacccagcccccgagggtgtccgagtgggttctccctcccatacttccatggatgttcacatagggtcttctcctccacactctggttgcatggcgatagctccagccttggatcaaggagtcgctttagaggccagcgcacctgatgtcagagttct

SEQ ID NO: 173327 - DNA, 654 bp, Zea Mays
gttggagaaactgaggatgtggcttctgaactcagtaatgtggtatcagacgagcaagtgctacttcaagagtgtgctgacctcttacatcaagcgcacgacatacaggtgtggtttcactattgctttgatctgggtaaacttagttagttctgttctatcgaaatcctatgcgaagaaacgcttaggtttctcgacatgctatgctgaactgacagtgttaggcattccccaactgtgtacgtaggcgatggaagacagcctcaagagccaagtgatgcagctgaccaaaaacaagacatgaaggcagtgatcttgtaggacagttgaccagtggaggtacataatggtttagcttgcagtgcatattggatgaggtgcagctgttcttggatattttggtataaggaacaaaatagttgttgatggtagttataatcaattttagctgatgtagaggggcgcatatcatattgatatacaagactgagaaagggattggccgatcaagaaatagtgatttggctgtggtagggcgtttgtcttgtctatagtatttgtagtgtagaagcacatgtagtttgctatataataaaagaataaatagcacagagatgtttatgttagaaaccaaacgatcctcacacttcgaag

SEQ ID NO: 173328 - DNA, 697 bp, Zea Mays
gtcaatgcacatgcgccacttgccatttttctttttcaccatcacaacatttgcgagccaagtgaggtaatcaattggttcaatgaattttgcgtccaggagtcgttggacctcgactgcctgagtcttctcatttgacattttgcggagtcgctgcttcttggggcaggcggagggattaatatgcagcctatgttcaacgacgctccggctaaatctgaccaggtcagatgatgactaggcaaagacatctttatttctgcgcagacagtcgaacaagtttctctcctcctgcggggataggccttcgccgattaatatagcatggttgttgagggctgtgccgaggggtaatttcttggcccctttgtcactctggatcgggttctattgcctattagccttcgctgatgattctgcattatgtgttggtgtgctagtgtccaagaaatgaacatttcgctacccgaggacgaagtatctttctatgttatgggccacatgctgattgccgaaaattgtgatgactctgttgggtcttgggatcttcatgcataagtacaacccataaattgcttcttcgaacgcattgatggcccctagcccaagattgcgttgtatgggtaaaccatgtaaattacatcgaaagtgatatgctctgtccatgtatttgcgccgatgtcgaaggacaatggta

SEQ ID NO: 173329 - DNA, 1136 bp, Zea Mays
aattatttggacaaatggacccttcaaaccccctcttattccttgctattcaaaaggtggacaagatttgatcatgctagtgctgctaccctaggttctcaagtcatggcggaatttcatggtatccctaaacatgttcgaaatctccacacaattcataatatgttgtggggttactgttcagatattaagctcttgtcggagtcttttgctaggttggttgctcatgcaaagtgcttacctagggttgcttgcctgaacatatccttgagttctttaaacttctagtgcctgaacctaatgttggatttgatcatgtggatgctgagtccaagcatctgttgtcctatgttgttcgatgctccacatccttcagctcccagtcgttgatggacaagggttccccttggcctccgataggtgatgatcgggatgatgagtcggcagggcaaagtcacgacccttttgcctcgtgaccagctggcgggcatggagatatggactctaatgagcctaccttggatggaggggatggcgcgaccagtgagggtgaggaggcccaatgtccggtgcatgagcgcttgggtcgtcgagcttctccttcccatcacatggaggctctcgacgtatcatgcatgggtggcagcacagaggaggcctctgcccctattttctctagcgaagacgatctccaactgacttgtaagccgccttctccagatagggcgggtccatgtttgggggtggcagtcacgacccctattgtcctctcgtatgatgtcctgaagtcgccagtcaagattgtttactctagaagacctgcgacacagtgcacctccgctgcactcacccttgagacgcaggagggtgcaattgattttggggttgttgatgcccatgtcctaccagtagctttggtggatgatgcgacgcagctgagaggtttgtcctcctcctccctaggacccacttccatggagttggtcgatctccccgttgccataggtaaggataggttcattcaatctattgcttgctggtccaacaagttgttatctatgccgctcctatccaagcgcaaacaaaaccacaggaagttgatcaagtatcctccatgtcgaaaccgctggattatg

SEQ ID NO: 173330 - DNA, 769 bp, Zea Mays
gcttttggaagcacatctcaaggcaggggaaatgtggcaagcactccggcaggtaaaaatgcaaggaaaactgggcgagtctactatacacaagtggctaccatcccggaaggagagccgatgatgatgggtacgtttttcgttgccaatcatctcgctgtcattctcttcgattctggtgcatcacatactttcatgagcaagatttttgctgataagcattgcatacctactgttgaatcaatgaagggttttgttattcaatcacctaggggtcaaatttttactaaggaagtagtcttccacgtacccgtgaaattagctagatatgaattccctaccaatatgactgttataaaggggctagacctgtgattctaggcatgaattggttagctcagaataaggctattattaatgctgaccaaaggactattcagctaagtcatgggcaagaagaggtcaggttatctatccctgaatctgtcccagtcaaagtatctggacaagtttttgaagccgtagtgcaagagatacaagacattcctgttgtgtgtgaatttctggatgtattccctgaagatttactcagattacctcctgagagggacgtagagtttgtgattgagttgaaacctggtacgaccccctatttctagaagatcgtaccatatgcccccaatgagttggcagaagtaaagacgcaattgcaagacttattggagaaaggatttatcacaccgagttcatcgccatggggatgtctggc

SEQ ID NO: 173331 - DNA, 1211 bp, Zea Mays
agaagaggaagatcctgccaacaaacatcgagaagggccagaagaatgtgaaaaatcagcactgaaaactcgaccaaaaggggaaatctgcaaataagatccccacgggcatccaaaactcgagacaagcactttttaaagcgcacttcatagtcgtcctcaaggagttgcgaaactgaaagcagattgaaatgcagattcgagaccaaagcaacatccttgagaataaagctctcgttcacccgaatggtgccacgacaaacaaccttacctcttgacttatccccgaatgtgatgtattccttaccaatcacggggtcgaggctagagaaccattttgagcttccggtcatgtggcgcgaacaactggaatccatgagccacgtgttctccaggcctccgtcctgcatcaatagtaagacacggggtgagcaaatggcacaacgctggggtaagtaaactgtgaagaatactagtgctgcggcatttgcccctgaaaagtgttagggaaaacaccaaacatcccggtcccgaagggaagcgatcaccacaagaaggaaattgtggcccgctggggaagtatgaaccaaaacctctatcacatggtccttggccatatgatacacgaccagcatcccgccaggcatgaccaccacgtggtctcactgcctgaggcctagcggcaagaggcaaaacacctctaggcctcctaggatgtctctaaacaggatgaggatgaacaccatgagaggggcagtttatgtccttcctgctcgactcagaaacttgccgctcatctctcttcctcctaaagcaaaaagaagctagatgcccatccctctcacaatattcacaatggtacctcacctctctcttgggtggattttgtttgtggaagggggctttcttttcggatggctgaggggctctaggaaggggatcactagagatgtcgagaaaggtgtcaagtgtgttcctaagatggttaggttttgcaagccacacttgtttctgaggaggatctctcataggttcatcaatcacaccatctctcacaagggtgacatgcttatcagaggtggttttgataaacttgggagtggatgaaggtttctctgaaggtatcaaaccactgcactcaccaaccttcccaaagcgagcgacactcccatccttagtagcaaagcctaaccctggtccgccagttcccc

SEQ ID NO: 173332 - DNA, 404 bp, Zea Mays
ctaatcttgtctactagttgaactactggcaggtctttgtgatctttgacccagttgttgaaacactctgctaaattaatattgatgtagtcgcattttatatctggatcaaaagtactcctcattcacttgaacttgtgatctctatttagccaggtaatcactttagggtcagaatgcaaaatgggcccaatatgtctatcaaattcagcttgtctatatgctcttgcagcaggatacattcctctgtaactatttccatgaaatcttttgatgaaattttgcatcaaatgtctgaaacattctctcttatcagcttgtgggaaaactagttccacagcagtcgtcaaacccttgctggcatcagtacaaatagctagtttctccatattccctatggccct

SEQ ID NO: 173333 - DNA, 484 bp, Zea Mays
gccatcagtcacaggcggatttgacacaaaaagggtgaaggctttggaagtatgccgttggagcaccaacatttgacaccttacccctgaggatcatttcaagtcggcttaccaagtctacagaaggaattctcctattggtaacccgagttgagtcggccagccctcgatacagatatgctggataggccctatctttcagtggctgaatgttcttgaaaacaaagtcagcgaccacagctttagcagttagacctctttctttcagcagtccaacttcagtcagcaacacacccgcctcagccgcttcctgatctgtgggagactcggtccagctcggagtgcgaacgtctggttgtcttcccgatcgggaggggagagaatttccataattatcaactatgaaccactctagacgccaccccttaatactgtccttgaggggaatctcaagatactcggttttccgcccgcggcgcatctc

SEQ ID NO: 173334 - DNA, 569 bp, Zea Mays
gcagcgtcccgccaattcgcctccgagcggtccaagcttgagtgggaccacaaggactacaagaaggacctccagaaggtgtacgcccgggagctggaggtggcccagaaggagaagaggctggccaagaaggaggagcacttggaccagagggaggaggtcgtcacggagctccaggccaaactgaatgccttcaacaaattcctggaggagcagtgggtccagtagaccgcggctgtggagagcttgcaaaggctgcagcgggagctagatgacagggccagcaacattgccctagctgaggagaacctcaaggagaaggatgcttccctggataagcgggcggcggatctcacctggtgagagaaggacctcgccttcagggaggaaatgttcgaaaggcaggagaagctattggccgatcatgagctcgaggcagaggagaaggagcgggcactggaggagcgagtctgccagttcgaggtggcgcaggcggcacaggcagcaccgggcccccaagcggtggaggcgatgcagaagacacttgaagatctctaggcggagcatcg

SEQ ID NO: 173335 - DNA, 520 bp, Zea Mays
aattaaaccagtctcttgatttatttttaaactaaaaatcattttcctaacttaattacttgatttaatcaatccctgggctgcggccacaatttcagagaagcgcaggggctaaatcgaaatgtttcccagactcaggatttccccagtgtggactgcgggttgtttacgaaaaagagaaggggctcatatgcaaaagaccatggccgaaagggtaaggactgctctgggccgccagattagaagtctacggttcagattggactataccattttatgaatccatatgcatccatggccataggatcaaggatccacggcccaaaactttcgtaaatcgaaggggtacgcgatctaatctcgactgtcaacacagggatcaacgacggggatcggattcagtcaaaccactacccgacccaatccgagccgtcactggagaatccaacggtccgcgccccatcttctaatctcggccgcatagctagatccaacggccgcgagcacgtcaccaacctgc

SEQ ID NO: 173336 - DNA, 405 bp, Zea Mays
cgaagacacttcttcaattgtgacacatggaacacattatgtatagcagacaaagtttcgaggagctgtagtcgatacgccactggtccacattgctcaagtaccaggaatggaccaatgtacctgggtgcaagcttccctttaaccccaaaacgcgatactcccttcattggtgaaactttcaggtagacatagtccccttcatgaaaatacaagggcattcgccgtttgtctgcataacccctctaacgagcttgtgctttcttcatattatgaataattttctgaaccttttcttcggcctccttcaccatatcaggcctaaagaagtacctttctccaggttcagaccaatttagtggagtacgacaccgtcgtccatataatgcttcgaagggtgccatc

SEQ ID NO: 173337 - DNA, 470 bp, Zea Mays
ctcggccaacagctcgcctcgccgggtgagcatttcttccctgaaagcgagttctatctctcgcctagcaagatccgtctcccgcctgtccaaggagaactccttctccttaaggttttcctcggcgagggcggtgtcgctggccttgacctgttgggcccgttgggcttccagagtctggtccagagcactcagcttggcctggaactctgtcgtgagggcctccctctgggtcacgacttcctcccttctggccacctttttctccctctgggcacctccagctccctggcacacaccctctagaggtctttcttgtactccttgtggtcccgctcgagttgggaccgctcggaggtgaactgtcgggacgccgtcttagtgcgctcctccagttgggtgcgccagtcactgaggcgctggtgctcggcttcaagcgcctcccactcccacaagattgctgcctcagt

SEQ ID NO: 173338 - DNA, 395 bp, Zea Mays
tgctgctcctgatggtacgttggcagtggtgcctcttccagaggttgatacaactttggatgtcccgaaacctgtcagtactcgcccgaggcgccctagccgaaccagtcagcccgagccttctgctgatgagcaaaagaagagaagacgcctccggcgagtatctagttttgatgaggacgctgttaccttagctcctgctgctgaagaagtgcctgcaactggccttactgacactgaccccaatgggtgtgcccaaactgctgttgaacccaatgggtgtgctccatctgttgctgatcccaatgggggtgctgcttgcgttgttactgtggaagatgaggaggaagaaaatgaagctcctttaactcggaaaaacagtcggcagttcatcg

SEQ ID NO: 173339 - DNA, 634 bp, Zea Mays
gcatatgcttcaagatagttgcgccggcatgaggaacattatccaactcatgacttggaattagctgttgtggttcatgcccttaaaatatggcgtcattatctgctgggaaatatctgccatatatatacagatgataaaagtttgaagtacatttttacctagtcagaactaaacatgaggcagaggagatggcttgagctgattaaggattatgaattagaaattcactatcacccaggcaagaacaacgtggtggtagatgcactaagtcgcaaggtttcctgccattatcttatagtaaggacctttgacattacattatgtcaagaaatggagaagttaaacctgggaatgattcatcatggaaccttgaaccaattgaagcttgagtcaattcttctgcaaaagattattgatgcccaaagaagtgataagggtatgaaacatattcatgagaaaatagaagccgacaaagcaaattgtttcagaagggataatcaaggcatagtatggtttaataaccgcatagttgtgcctaaggatgatgaagttcgccagcaaatattggacgaagctcatcttagtcgatattccattcatcccggaagcactaagatgtatcaagatttaa

SEQ ID NO: 173340 - DNA, 280 bp, Zea Mays
atcatgatctcagatccttatactggtggaccagaatgaagagggagattgccaagtacatatccgagtgtgacacctgccagagaatcaaggccagtcatttgagggcagcaggtcctttgcaaccccttcccataccatcttggaaatgggaggacatctacatggactttatcgtgggattgcccaatacctcccggcaccatgattccatttgggtcattgtggacagattgaccaagtcagctcatttcttgccagtacacaccacccacaggac

SEQ ID NO: 173341 - DNA, 2684 bp, Zea Mays
gcacttcatgctttggaaacagaagtgacagagcaagttggactcaactgttctggacattcaggcaaatttcttgtaacctcagcttatcattatccaaaagaatggcaaaggcacatttttttggaagttacttactgtgccttcatattctggcagattcttctgtttgcagtggagtgtcaccgctagaaaattcttgtgcaaattgtgaagagaaaatggtattacacagtgcaaatgaccctgttggagtaacagtgcatggtttgcatctttcaccttttaactgtgactgattgttctgttacctctccccttgtatttacgaaaatattctcaatcatataccttttattaaatatgcatgacaacaatctgtcgtacttagggaaaagtaattagatgtgagtatacaaacttgtatgatttagcaaaccacattatggtcctgcactcctgcttgttaagatgtataactggcttactttaacatttaaccacatgtcataaatacactaacctgttttacatttattttgattaagaaaatggtgtacgtgtcctggcagattccactaccctaacccaagaatatcatgtatcttacacattacacatggaacaaatgatagagcaagctggactgcattgttctggacattcaggcaagttgcttataaccccagctttatctttagctatagaatgacaaaggcacatgattcttttttatgttacttactgtgccttaatatactggattttcgcagatatcctaatacacactacagatttttgtaatgcactgctgctagaagattctagcacaaattatgagatgacagtttgcttgcaaccctaccaggcaactttgcctgggacacaagcaaaccggcctgaagtgcacatggtatcaaccatatcatacagtgcaaatagccctgtggaatcaactatacatggtttgcacctctatacttatggaatgtgacctgctgttctattatctctcctgtcatatttaaatcattaaatgcacatcaaagccaaaatgctttcaacagcaaactattctgattcatctcaacttcagagtatttggttacgaagtttcccttacatgattgagcaaaatagtataattaattttatactgaccattttatcctcataatcataccgaccatttatgctaggattaggaagtaggaaatatgatttttacagttcaatacaattgcttcgctagtataatgaaccctactaccgtagggttaaatgctgatatgctagggattataaattggaatggcttaaattgattcttcattgcttgattccctctaaagggtgccaaccgtgtgccctgatccgggtcttgggcctaacttgactaacaaactatagtctttcgtttcacatttgactaacatcaagctgttacaaccatgttactgctatcaaggcgcagggtttattaacaggactacagacaccttccaccaataatagttcgttaatgttgttcacaataacccctttggaggcctaccatgtctccctgaccatttatgctataggaaatcacataacagcttcgccctcaatcaattctgacaattaatcattttattttaggagatatgacagtgactcctgcacataactgtgaccattcctctttctatgcttcctattgcatcttctgcaggaacttgcacttcacatgactctagcacaagtgcgtccagctgtgctgacgatccaagtatgtcgactgacagcatggttaaatctgtggacatggatggtcagaagcacatgaaaaacgacaaaattaaggtgcacctagcccctcaaccagaaaacgcgtcatttaaggtactattatagtatttgaaacacagccgctgtcatggtagtggagaaggaattatggtggcgaattacatcacagtgttttatatctggctaggaagtcgaagtgcccttcttttcagtttaataatgttaccatttctaaagctcacacatgccaagcatgtctgaggaaaaaaaatatttctaaagcttatttcatagacgctcttgaaaatctaagcaagcaatattgtattgctgaacaaatgtctttgaagaaataacaactgctcgcttcttgcagaaaatgcttttgaggaacctgtcgaggaaactcaggtggtcaaaggcgcaggcagacacgcatcagaccatggcgcctggatcccagggcgcagaagaccctggatatccactggtttctccatcggatgatgatctggaggatagttgggagatcctgtaatatataataaaccgccaagaacctccgtgacttttcttttttgagctaagtttatccatgtcaggttaactggttttgagggaaggcacgtggcgtattttttacagatctccttggttacagacacgtgagatgttgcacgtacgtgcggcacatccatcggcataataactgtaattctagttgaggatacgtaaagctgtttggattctgtttcggaccttaactgcatgcagacaagacaatgagacaagcgtgtgtccacagcttcgactgtcagatctgtcactagctagtcctcttcttggcagtgctcactggtagtagtgatggccagttttccgtactgtggaag

SEQ ID NO: 173342 - DNA, 635 bp, Zea Mays
cgggtgtgggcgtaaatgcatactgtcgaccaactgagctacactgagcttcttcaaattttcattttaattaagaacacatgcagcgtgagcgaagggagccacggggcctagcttcggaggctagttgcatgcttgcatgtagcatgagtggatgagggggcaccgtagcttgcatagttgcatgcttgcatgcagtgtgagtgggggagtaggtgcatgccacgtgataaggtgagcgggggcacgttttggcctacgttaccttcttaatagttagtagagaattttaattaagaacacatgcaaaaatttgtctcgacaagaacgcatgcagcgtgagcgaagggagccacggggcctagcttcggaggctagttgcatgcttgcatgtagcatgagtggatgagggggcaccgtagcttgcatagttgcatacttgcatgcttgcatgcagtgtgagtgggggagtaggtgcatgccacgtgataaggtgagcgggggcacgttttagtctacgttaccttcttaatagttagtagagattaaatgagttatatctagcaggccagcctaagacacgatccatttaatagtgtcatggcctagtccgatatgatttaaagtggatcgtg

SEQ ID NO: 173343 - DNA, 787 bp, Zea Mays
gctggttcaaggacagatgctacaactgtggcgatcccgaccacttcgttgtcagctgccccaagaagggaaaatcggagtctggcccgcgcgaccatcactctggtcggtgcaagggcaagtacaagtccaagggaggattcaacaaggaggcgctcaagaagaagtaccttcagaaggcaaagatcaaggagcgtgccttcctcgcctccctcagcgacctcgaccacgactccaatgatgttgtatcttcatcgagtgacgaggagactgagaggagggtcgaggacaagctgaacaggctatgcttgatcgccgacaccgcaggaggcttctgcaccatggcacttggtgaggacacggttggcatcggcggcgacaaagacatcggtgacgacactacttctgatgtactacctttcgtcgatgatctcgccactgagatagaagagttgaacgatgctttggctagtcaggataagttgcttaggtaggctgctcgtgagaggagagagtttagatccaagtacgagagcacgcttagggaacttgagtctgctagagcttcagttgtggtgtccgacgagactgaatgtgatgagtgcgctctacacatgtcgaacatcaccactttacagaccaagaactccaacttgctagatgagtgcgacgagtttagatctaggtctatcctattggggtgcgtgtaccgtttgtcctggcttgcagtctgagctagcagagagagatgctaggatagctttgcttgagaaggctagctcagtga

SEQ ID NO: 173344 - DNA, 594 bp, Zea Mays
ccgtcggcctcgcgcttcgtcgcgctgcacccccgcctctcctccgccacctcggtctgccccatctcctggcgtccccgcgcatctgaagcctgggacggtggttggtgtccgcacgaggactacaacgctgaagacggggcaggttctcgtgctgtggctcaaagccacgatcgtgtcgtcgtctgccgacggatccggctacggtgttgtctacgacggcaactggccgcaaggcgatcccaagagcacggtctacgtcgcgccgcaccaagtcaggctattcagtccgtctccatcgccgacgactccaccgccgtccctgcctccacccaccgccactgccgccgcgactactaggaagaaggacaggccgaggccaaccacggcagggaagagcctgcgcctcatgcgcagcctctttccggagatggagttccccacccgggcttgacgatttaccactgctgcgccattctgtattggacctggacgtgatgcgttgctttgcttgttcgttcatgggtagtcgctgtttttgtttgattagttcatgaatcgttcaagtcgatcccaagtcaccatgcatgcatg

SEQ ID NO: 173345 - DNA, 585 bp, Zea Mays
gcctagtaaaataaaaccctagaggagtcttgaatgttgcatcacatgctggagcacatattttgattgatgaacttatttgttgtacatttatgtgacttgtgtgtcatgctcaggctcgaatctaagcaaacagaaaagaaaatgagtaaggtaaatggaaagaaatagaaaaaggaaaagaatccagcccaacaacccctcctttttccttggcccacctcgcgcgccggcagggagctgccagccagtcactcgcgggtcggcccacgtgtgcgtgcgcgcgctactctgcgcggcccaagccatcttgcctgccccgctcacacagtgcgcaagcgcgctcatccagccgttgtcgccttggtgcgcgttggcactatctcctctatcctataaccgctcactctagatgctcccacgaagcgagaaaggaggcggtcgtttctctgatctgctccccctacacatctcatctcctgtgccgcgctcttgccgcctctgtacgcgcgacatcctcgtcgtcgcctggccaatgccgcactgcaccagagcctcgccacgccgccaacgcgtctctagcgt

SEQ ID NO: 173346 - DNA, 488 bp, Zea Mays
gcgtgtttggatgacaacctggctgtcagctgcctcgcagacaaagcatcttggtcacaggcataggaaattggaagtctggtgccatgtccgggcaagggaaaatcctaccctatcatccaaacacaccctaagtatctagggtttaccatcctgctgccctagatatttttcgacaagtcgagataggtatagtatctgtactcatgtttgagtcctctgatctggtgcacatctacaggctagaatggagattctagtgttttgatgtcaggaaatatatcagccaaattgcactaagtttttatgcaaaagcttgagatgtgtcaggtaatgcaggaaaaaaagaataatgagctttgccaaattctttggatctaaacaaagtggctgcaacataaccgcatgacacattaatatatactacaaagatgacacaatagtaagttgttttgttgtaacaaatactaacggtatctaagtttcaa

SEQ ID NO: 173347 - DNA, 434 bp, Zea Mays
ggaatttggaggtgcttattcttgattatgaacgggccttcccgctttggttctagtttgtctttggattttgtcttgttatcctcataaggacgaggtctccttctttgaattatttttggatgaccactatgtatctccaagtatttgttgttgctagatatttgcttaacgcgtcgatagcttcaacggggtctccgtcgaggaggtcttttgttgtaagctcgtcgatgtttgggggcgcgctggggtcggaccgggacgagccatatttgagttcctgcggagtcattgcttcgactccatacatcagcctgaatggtgcaaaccctatcgtgcgggactctgttgtgtttagtgccaataacacttcaggtaattactccgcccacttgtcctttttgtcttcgagcagtctctattttattcccgtg

SEQ ID NO: 173348 - DNA, 489 bp, Zea Mays
acgtgttcctcgtcaccagcttgctgcgagtgtttctcgccgtcgcaacacctttctcttggagtacggtgtacccaccctattgtggcgtgttcttttcgctttgggctacccagagggagagaaaccgcgttacttcatggaagggaggccacgctttggaggagaaggtatttgggtgtcagctgtggtaaagccatgggcagataatccaatgatgggtggctgacactttggatcttcaggtcgcacacccagagaaggggcagacagagtagcttataagatacttcaagacttgctggaccgttttcctggggagattgtgtaacaccccaggtgttactcagggttttccgtgagtacccacattgtgacccattatcatatgtgttttagttgaagcaaaaggcaccaaacttgaggagctaaaacttaatcaagtatttttcaccttaagaatcataccctgaccatattaagcttaaa

SEQ ID NO: 173349 - DNA, 488 bp, Zea Mays
gatgggttagataaaacacgatcagaaattgtagggtgagaccgtggaacagtagggaaatgctatcatagaggcatatcttgagagggtagttttcctttatagctaatcatgcatgggtgcaggccaacaggccgagtttatgggggcagaccctaccgggttggcatacccgtgtgcactacctagttacaaaaagggaaaaacttcgacccctcagacttgctctatagataaaacttgcagggatatttcgacactgggggaggcattccttcggtcgtagctagacagttgcccttgggtcggggtactcccattaccatgaagggtccttcccaattgggggagtgttacggagcccaaatctggtctggtacctttgtagggttaggtcccgaccctgggttcccatctgcatttgatgaaggaggccccgcctttggctgtggtcattcctggatgaacctgtcagaaagctggacccg

SEQ ID NO: 173350 - DNA, 528 bp, Zea Mays
agctaatgtactaatttttgaatatctgagatgtatttgccatgtgtttcaatctataaaacaatctaacacatataatatatctcttgtagggttcgagttcacgtcgaactccgaaaaacaatatgaactttgtggaccagttgtttaaactgagtggcggaccttcggacgacccatctgtggagtaagaaatgtgtttggactacttatctaaactagattgtatgtcaccaatctttagctttgttcagtgccagacctagaatagcggcttaatgaatgtgaaaggcagcgagctgggggctgtttcggtgctccgttggtttggttaactgatgtacgagtctaatgtcatacgtgtgctttgcggcaagacctgattaagaaaaggatatgtccacattgaacacgaataatagcaggaaattggtgcctcctgacccattggaaagggcattggaaaggagcagtaaagaagacgagatcgagtcggtgacccaaggatgcaatagccacggtgatgat

SEQ ID NO: 173351 - DNA, 311 bp, Zea Mays
tgaaatttgatcatcgacattttgttccaaaccatctgacagatcctcctaaaaatcattgccaagggtggcacaaaaccatcaactttgtcatgaagagagaggaataatctactctataaagaaaaaatgaattttcacactgctggatgtttcagcaaacgatctaggactgtatttcatcaacacacattttcacattgctggaagtttccagaacctttgttttagcttggctcttccacttgccatccgtgaagacttccatcagattcagcagggtcattcatcctcattgaacaacataatct

SEQ ID NO: 173352 - DNA, 455 bp, Zea Mays
gtgttgacaagcatcaaatcatccccgttctcccactattcggattagcttgaccacgtgtcagtaagttccaacatttggcgctcaccgtttgtgcttcgaaaaaacattcccgcgatggctccaaaaaaagcgacttcgaaggctaccacttccatcaaagatgcagcgaaggtggcccttctcgctgagaagaagggcaaggcagccctcactgacgacatccctcatgaggcccttgaggatgatgtagtcaacagcaagcgacatcgccaagagaatccacccacccagagggcaccgttcgcacatgcagctctaaggaattaccttgggcaccttcgcaagggtttcaccccctagaggctaatgacatcattgaagacgatgaagtcctaggcatcttagccgaagaccagctcaagttgcgagccctttgcatcaagaacaatcac

SEQ ID NO: 173353 - DNA, 812 bp, Zea Mays
gccctccaaacatagtctgacatggaagcagaggtcacagcactccccgagggcgaccagctgccatggcctgatgcggaagttaaggttgttgtgtaggaagtctcttgcagtgacggccgcctcccggtggtgggggtgtgtgaaggtgacgaggaagtcgcccagagggcttcgaaccaccttgatgtcctctttcctcaccccaaagcgggagcagaaggcccaccgctccgggctgatgtcagggcggtcacgcccgagccacactaccacaacatgagaactcagccactcaagctccctttccatgttgctggtggaggaggcgatgatgcaggaatgctcctggcggtcagcagggtcgccgggttgagccatgggcggggcagcgagcacgagcgatggaaagttgacgttatcgaggcggggagcttggcacttgggggttggaggtgtcttactaccccttccggagcactgccaggaacggtgtccgttgcgcaggcaatttatgcacctcaccgggtctctgcaatcaatggagaagtggcctctgcccaggaagcgggcgcatttaccttgcagacttaccagcagacggctaggagtcgaggtcgagtgaggcacccttgtcatgcggtctggttccgcacaggcagcgcgttgacgcctacgctgaatcgttgtccacctgctaggagcatcgtcttcaatgcggtcgcagccatgggttgtcggatcgggggagacatcaaggcgactggatttgctggtggattcgagggaggagaggtaagtgacgtctggcg

SEQ ID NO: 173354 - DNA, 419 bp, Zea Mays
ttgtttcatgttttgtgtttcgatggcaagcgacgaagaagaagcaaggatccctacagacttcgatgaatgtgttagccgccaaaatcttgaggcaaacaacaagctcctgaaggagcaaatgcaggagacggtccacaagtcagtgcatgatgccttcattgacatgaaccttggcaagacttacgagaggttggatcgacgattgtccaagatcgtcgacagacttgctgtgttggagacgcaacaacaagcaccgccaccacctcctcgtccacgtcttcccgatgatgcggtgtttgatgaagaaggtaattatgatgaagcagccactagagatttgcgcctctgtcgccgtcttcatcaaaacacagaaggtatgccacaccgccagcaaggtaataacaatcgtgctcctg

SEQ ID NO: 173355 - DNA, 535 bp, Zea Mays
gacttcaccgcggtcacctccgaccaccgtcctctcctcctccccgcctgcacttgccgcacagggaagtttggcaccgccccgtcctcgctgctgtggccgtgtccttgcatggcaccgccccgccgtgcggtctcgtcgccgccgctgtgcagcattaactccgtcgctgtgaacctcactggcgtccacccagcaccgccgctcccctcccctcgggcgcctataaaagggtcgccccgagctcctccttgccccgcaccggcctcagccactcatctccccctcgcccgagctcaatcgcgctagctccgccgccttcctccactctggtaagcccctcctgcattcccccctctctggttgttcagtgaacaattcgctaggctcatcagtttcgccgcaccaccgcgagctcggaacaccactcccctacccccgatccccacacaaacctcaccggcgacggctcccaccgtggagctccgccacttccccacggtcagccccctcccaacctcctctggcaaaattg

SEQ ID NO: 173356 - DNA, 658 bp, Zea Mays
gatttggcaggtttactcaaatgaatacaatgaaaacagaatgcttagatcggaaacttgcaatgtaaataattagcagtacaatgattctgaaaggatgaaggataaaacatgaatgtcctaataggcatatgaacaaatagtctagtagcaggttgtaatgtcatctatgcatatacctcatctgtctctgagtcagcctaaaagaacataaataacacagacaatgaaacggaaaagtaaggttactcagcttaagcaaaaaatgttccgagactccaaacttacttgtgtcatcacattatgcagttggcatagtcagtttaggatagctggggatctgagattccatttccttgtatgttgatgctgctacctgcaacaaaacattacaaagaactggtttaaaaatttgtgagttttgaatgggggatggggtaactggggatcgagcttgacaacagccgaaacgggagaggacatatgattcacaggtatgatgagttcatgcacaaacctgctcgctatggccatgagagaagtacacaacctgagtacccaccgcgggcaaagagacaagcagagagcgaggaggtgttggtgtagctgggagtgagggagggaggggagctcggggtggtgcacgtcgatgtaggtg

SEQ ID NO: 173357 - DNA, 805 bp, Zea Mays
ccctcttgttctagcacttttaattaaatatctcaaatcaagttttgtgttatgagttaaaattttaggttttgtctgttcaccccctctagatgactttctattagtattggagcccaacacttaatttagggtctaataagccaaagtggtgttgggataacattctgggaagaacaagacagtcccacaagaggacaatgagaaggatgaagaatgcgtccactcgaggtcaaagaagactcataagaagaagggctcaaggaggcccaaaaaaattgcgatctccaacgatgacgacacctccacatcaaactcaagtagcgaggatgaggtcatctaccacaagcgatgccatgagaagaaattgattaaatctaattattcttgcgtgttgtttaactacaattgcatcccttaaaacagcactacccctatactattagttttcagttggaaaaccacacaaatttgacgagacaaattattccaagtggaacaatagtatgagaggacacttttacacactccacccaagtttttggaatgttgttgaagtagatattgagatactggatagcgacaacgaagattaatcgcaagcgaaagtggagcaaatgatccacaacaacatccaagcctctatgatgcttccctcctccctcaaccgagatgagtacaagaagattgatgtattggagagtgccaaggagatttgggacatgctcaaggtggcccacgaaggaacaatggcgatctacaaggtgaggaccgagctcctcgaggggggcttgggagatttgtc

SEQ ID NO: 173358 - DNA, 951 bp, Zea Mays
ggtcatgtatgcatcatgttcaaactatactaaatgaatcttcccctcttatggaggtatggcacgtaccaagaccacccaacgaaaggcaaccagaccttaaggtgtgccccgacaccaattggctcctagacatgaagggagcagtagtggaagcaatgatccaataggggatctacaggccagggtggaatgactcatgtcagaactacgccatggaaatagggagcgtgcgcgagatggccgccgcattgttgagctgtcagcggaggttaatcgcttgcagtaggaaattgcggaacgagatacgactattgattgggccatgaattctcggtctttcgcctgggattgtgaggcaaatgctctagcccaggtagcagaactaagcgcatccttgcaaaatatgcaagcatattgtaataccctgcttgaagaggtgcacgtgttatatgaccgtctgcatccgaatgtgccaccagaggttgcagcaatgggagccagaccatctagagcagctaatggaggacctgatggggagttggacctttttggagcccttccttccatgaacctcgcagatgaacgttctcctgaggctgacagtggagcatgagcggccaaggacgaagataattagattagtgtagtttaagtagtgtccttatgtaaagtaaataaggaagtggagttgtactaatgagtatgtataattagtactggtttggcatatgtaataaaggtggtgtattttcggcatgtaataattcaggatgtttttcttcctcggatgccatcaagaactcgtgctcatgacagagcgggaactttctgcgacggggaggaaactccaaacccgccacctgtacctcctgcattggccaaggctatcgctgctttagtcaatgctaccgctgacaacacacgtttccagcgtgaattggcgaggaa

SEQ ID NO: 173359 - DNA, 363 bp, Zea Mays
aggacgtcttcaatcctatcctaggtcaactccctcacgtcacctctccttatctgcatgttgtttttgtttctcctatctagaatacgtataagtctctggaaatgttctatcatcctgtgtctctcaagccatcgatgccaaggccctctccacgcttctagcacatgccagctcctagaagtctccctacgtcctcgcgtggtggcctcaggctgttgaacgccagcgtcgtttgcgtctagctcgcgctcacctctgcgtgctccactacacagcgccctgtgtccgtcaagtcccgcagtgtcctctctctgcctacattcacaagtttcatcgtctcgccgtggtatagctcgccgg

SEQ ID NO: 173360 - DNA, 743 bp, Zea Mays
ggaacatctgccagatcttgaactctgccatgtccatcttataaagaaacatgctgataaaggacggacagagcgtaatttccaagttggcgactgcgtgttgctgaaacttcaaccttactgtcagtcttatgtgactgagcgagtgaatcataaattggcgtttcggttctttagaccctttgctggcaaggttgtttctcaggtactaatacacgctggaccgggtggcctaaggagttagctacttaggagggatggagctgtgatcgggcaaaagacttaccgtttgctattgcttgctagaagggggtaatgtcagtgctcctatctctctactacgaccacatcggaggaaaaggccaacactgacaggctagggagcagcccaggaggagtacgtacgtaacagagtcatcaagcctgttttgttatgttgcaggatcgggctgctaaggagacgtatgagtaacgatctctggtacgtaacaacctgatcgtgcaacataatacaagaacaggctggcagtagagaacgaaagaatggcctgacgttcgtcgccgctcctgaccctgagcaaattccctgttcttcgcctcttctcaaccccgccaccaccaattcccactctgcgagggcgctaacaaatttacctgtgggttgtcactagctagttgctggttcaggagataaggtgccgacaaatcttcgccgacgacgacggtgatttaattaattaaaa

SEQ ID NO: 173361 - DNA, 961 bp, Zea Mays
gcaaagctcatcgtttggacaccgagatggtaggacttgtagaaagggctaacaaggaacaactcccagaccttagaacagatgaaagaggaactctttggtttaggaaccgtctgtgtgtaccaaagggagaggcatgagaaatcctactagatgaagcccacaactcaacgtattctatccatccagggtctaccaagatgtacctagacctcaagactagatactagtggagaggaatgaaaaaggagatagctcagtatgtggcccggtgtgatacttgtcgacgaactaaggcagaacatcagaggcccacaggcctactgcaacccctctcagtgccgaaatggaagtgggaagaaataggcatggacttcataatcggactgccccagacccaaaaaggaaacaattctatctgggttataatttaccgtcttaccaaggtagcccacttcataccagtaaagactaccttcggaggagccaccctcgcccagatgtatctcaaagaaatagtctgacttcatggaattccacggagaatagtgtctaatagaggaacacaattcacctcaaagtttcagcaccgcctaccacccccagtcagatggacaaacataaagagtaaataaagtcctcaaagacttgttgagagcctgtgtgctgaccttcgatagagattgggagtctagtttgtcgtatgcggaattctcgtataacaacagttaccaggccagcagcaagatgtcaccttttgaagccttgtatggaaggagatgccaaacccctctgatgtggtcaaacgtaggagaaaagaccctagaaggacttgccttcatcaaagaggcagaagaaaaagttgccctaatctgtaagagactacgcgaagctcgaagtcggcaaaagagttatgcagacaaccggagaagtgaacttagtttcgaggaaggtgattttg

SEQ ID NO: 173362 - DNA, 633 bp, Zea Mays
cgaggacggcccgtagatggcggaggtgatcggcccacgtgctgctgtaaattaggatgtcatcaaagaataccaggacgaaccttcggaggaatggccggagcacgtcattcatcagtgcctggaacgtggcgggggcgttgcagagcccgaacgccatcacgaggaactcgtacaagccatcgtgtgtgcggaacgcggtcttgtgcacgtcttctggccgcatccggacctggtgatagcccgaccgtagatccagtttggtgaagaatttggcgccgtggagctcgtcgagaagctcctccacgaccgggatggggaacgcgtctttgatggtgagggcgttcagggcccggtagtcgacgcagaagcgccacgagccatcgggcttcttgaccaggagcacgggcgatgagaatggggagtcgctgcgtcgcacgatcccctggtcaatcatggcgttgcactgccgctccagctcgtccttgtgggcagccgggtagcggtacggccggacagccaccggtgacgcatcgggcttgaggaggatgcgatgatcgtgggcgcgcttggggggcaaacccatcggagctgcgaagagccccccgaacgaggcgagaagggcctccagta

SEQ ID NO: 173363 - DNA, 467 bp, Zea Mays
gtaagctattgcctattggtattccaacggcagtgatcacggttggattttgattgctggttttagtgttttcctttccatcctgcatttgtttaacggaggggtacggtcgtacggattccagggacaattgtatacatgcccctcaaatttgagattattgtcgttatgaaacaagacacagtgagtttcgacgaaatagaggtgttggcgatggattcgattttttggagacgcagaggacagacaaacgctaaaatggacatgagacagtcatttggggttgcggcaacagatttcagggtccctttcaccattaccgtcaccgtgctcagacatcgtctcccgtcgtcttcatcgcggctggaggtttctcgcggctggagatctctcgcggctgtgagttctcctcgtcctcctttcccatccatctctctcccctctgttcttcctcttaccgtcgccgg

SEQ ID NO: 173364 - DNA, 559 bp, Zea Mays
ttgttcaaagagggcccctagaatgtctgaaggctagggtgcctccacttcctttgatgagcttgctcctcagccatcgccttcacatgatgttgccgcatctctccccatgaaccatgtcgagagaagaagaaagggaggaattcgagcttttctcatgaagggcttcaatgcaatctttgctatgtgtcgtgagaagtcgattaataattctgagctagcatgacaacatatcttgaaacatatgataatgttcgtcgtgtggtggcctcaatgggagtggaaccaacaaaattatggtgtcccatttctgatcccagaggacatggaagatgacgaggatgagattcgaggaggtcatgcaaaccctcaataccatcctcatcatcaccagcagcatcaggctcctcctcatcctatcgacgaccctctagcttacactcaggacccaaccctcatgctgatgatcctcaatcatttgcggtggaccttgttgcgtagttctttgcacctcctcctagtgctgaatcttatggcggttggtgatgatttcctcttc

SEQ ID NO: 173365 - DNA, 381 bp, Zea Mays
ccctgcccacgcttctaaacgccggtatggtcgcgacctggtacttgtcatcaactctgtgttgcgcaagtcacgtccgtgctccaaacaaagatctcgggctgtgaatctggcgctcgtcgggttcacatcccctggtgcacgcgctgtcacttattggttgacggaggtagaagatggctcctcgtcgttggtcctttgatgaagggccaagattagattacattcaccgtttcgtgttattacaatcgggccgtcgctggtcgatccgagggctagggcgatctctcctcgcggatgggagcacataccgattcgtggaatggagatttaatcctgacgcttggatcagatctgggcggctcagaatccatcgtaccc

SEQ ID NO: 173366 - DNA, 525 bp, Zea Mays
aaaatttatactagcacatatttgttttcaaatctatttgcacagttgtgttattgtataaattttgtcggtcggcccgtgacttacttatatatagcagtactattaccaacttgtgtagggcttgtatcacaattttttgtgtgtatcagctcatatgaaataatgatagatataatccatttatatagatagaggatacatatatattatatagacatacatacagagagagtacgtacaataccggtagagaaatggtagctacaggtagaggtccagccgtccaggtacatgcatgcataagtgaaatatacggcgtcatgcatgccataatatggcttaattcatcttagcaatgatgcatggctggatactagagacatacaataccgtagtaataaggtggtgggatctgaaatggaacgccagcttacgtagtacagtactaacttaagcgcgtcgagcggagcaccgtcaggcgcacggcggcggcgccatgccgagggtgtggtcgtactggat

SEQ ID NO: 173367 - DNA, 1723 bp, Zea Mays
gatcgatggcgccatgatgcagtaacggtagccagggtgccctagaacttcttgaacaacccgacatggaagacattgtggatatgggcacggggaggaagctcgagccagacggcgacctcgttgctgagcttgatgatgtggtacgaaccaaagaatcatggcttgagcttgtcacaaatagcctgaggaagtgatgatgcggtgcgttgacgtagtagaagtagcgccgaatcgcccacttggtagtggactggtctatgcacacggtcgtagtgctgcttctggtacgcctgggcttgttccagtcgatagcggatatccaccaggaactcggcacgctcctccatctgcttggcgacggccgacaccttggtgtcacctggttcatatgaccggatggacgacgggtcacgcccatagaccactcggaatggagtgtccctcagcgatgtctggtatgctgtgttgaagagaaactccacctaaggtagcaactggagccacttgtgtggctgtccccatgaggcatcgccggtacatgagaatgacgcggttggccgactcagactgaccatcagactagggatgaaacgccatcgtcatctgcaacttggtgcccatcaagtgcatgagttcttgccagaatgtggatgtgaatatagtgtcatggtcggggaccatggactggggaatgtcgtggaggtgaacaatgtcgttgaagaaagcatgggcgactgattcagctgagtacgaatgtgtcaatggaatgaaatgacagtacttgctgaaccggtcaaccacgctaaggatcactgacttgccacagacgcgaggaagtgtttctacaaaatcgagtgcgacatcagtccaaacaacctatggtaccgggagcggaaggaggagacccgcagggtgcacgttctcagaattgtagcgctggcagaccacgcaccggtgcaccttgtcctgcacaagttgtttcatattagggaaatcaaaattgcaccagaggcagtggagcatgcgctggacgccctcgtgaccgtccccatggactgcccccaagatttccggcagtagcggggagtcgggtggtatgtacagccagccgtcgaaccgcaccatgccgtccacgaccgaccatggcgttggacggacacctgcggcgtctctgcaacgagagtgaggagggtcaggtccccgagctgagcctgccggagtttgtcgaggaaggcaaaatgtgtagcggactgagcgagcagctcctcgtccactgtgtcacgccgagacaacgcgtccgccacaacgttcatcgtgcctggcttgtacccgacggataaatcaaagcccagcagtttgtcggcccaatggtgttgtggaatggtggccaagcactggtctagcaagtacttcaagttgtagtggtccgtcttgacgctaaaacggcgacccaattagtatggccgccagtgacgcaccacctggaccaagccgatgagctcgcgctcgtatgccacaagcccttggtgtccgggtgccacggcccgactaaagaaggcaagcagatgaccctcctagacgaggactgcgccgaacccgtgagacaaagtgtcacacttgatgacgaagggcttggcaaagtccagcatggccagcaccggtgctgtggtgaccgtgtccttgagcacggtgaaggctgaggcagccgcgttgccccaag

SEQ ID NO: 173368 - DNA, 1163 bp, Zea Mays
agatcatccaagagtccaagacacaagacaaaggaagctcaagcgaagaaacacatagatgcgaagaaaacatgactacttagcacattagatatgtctggtggtgtaccagatattgcaccggataggtgcagtgtcggtactaaagaagggcttgaagatagagtgcaccagacatgttgatgtgcatcagacatgcacaccagacaccacaccgaataggacacacaataagcctcgcaatgtgtacgcatgagtctacaacgcttctgatgtctccagtgaagcaccatgccccacattgaatgtgacactcagtaagggttgcaaacataaccttaccgggtaacactcgccagatatatatggtgtagcaccggtgactgcaccggatacctaggcttcaaggttggcaatagctagctgaagtggaaatcaactgacgtttctagtgtgttgcgtagaaaattttgctacgttccaacggctcttttggagagatgatgctataataccactccaaccaacaatatctcaagtgtgggatctgagaaacattggtagtgagttgagactacaatcctttagctctaaacaccccaatgcttggagaaacacacgatgattagcgtaggtgctttatgaagtgcttagattagttagaccgatattacagtgctggctctatgttaatgcctaggtgttataaggagaaaaggacatctcaaagccttggtgcttgcttacaccattgtatccttcatgcttgcacacgccattgtaattttaccgagagaggttgtatcttttaagatcataccaattgtgtttatggtatggctatgatagtgtactagagaaaacaacacccatgacgttttagcaagaaactcaatagcagagacgatgagaagcatctaagagagaccgaaaggtgcaacaccacttactcgtggagaagatccgagttacctgatcaagagcttgattgccctcacgtggactatccttgtgtgggactccaacaagggttagtaaaaagtgtgtgcactacttgatatctaggaaaataccaaagtatttttatcgtacttaaccttctgcatttatattattgcctttagttgtgaactttattttgctagcttagttatagactaatg

SEQ ID NO: 173369 - DNA, 510 bp, Zea Mays
tctggactggctcaatatttcttaaaagatcaggggctaacccgcaagatttacgcagactcagaaatccctgagttggacggcgggttaatactaataaaacagaggggctcttttgtaaactagcttcggcgaagggggtactgttgtattctgaccattcgatctattccggatggtccagattaaatacgtgaaggggtacacaaagttctaatcctgaacctacaactccaatccaacggaccctatccatcctcaatcctgctcgtggatctatccatctacggcctgggttcaacctccgaatgggtaagttaccttctaatcctggacatccgcatttgatccaacggttctaagctttcttccccaccaacctcgagcagtgtcaccgccgccaggttcacacggcggagcatctcttgtgagcagtgctccggcacccaggtgccccagctaggctacggatctatgctaaacagagcggagggtatgaagaacttaatg

SEQ ID NO: 173370 - DNA, 416 bp, Zea Mays
gccagctctctccgttccaacagcctccgcgagaatggcgggcgcgccgtgggcgtggaattcgcgcaggcgcttcaaccatccgccgtgtcaactataaagcactgtgtccaaaaccctagccgcacatcctatccccgctcccatcttgaaccacaccggggtgcccccaccgttctgaaatctccacacgggaggagtgtttgcgccgtcgccgttgaccatccgctgctcctttgccgtgttctcggaacactgcccaggattgttcgccgacgcctgggaaggttgtccgcggtagcaattgataggagagcgccggcgggtttggtgaattgctcgtcagagcagtgtgcgcgtcgtccttccacctctcactgtggcacggcccctccacctcgccattgccggtatta

SEQ ID NO: 173371 - DNA, 691 bp, Zea Mays
atttctctgatttttctactctctggtctgggcgcaacattactgagaaaagcaggggcctcggggtaagtttcctaagacacagagaatagttcctgtggaccgtgggttgattctctaaaatcataaggttctttccgcaactgcgcaaacgaaggggtacgaagtgttaacggccgtccgatcaggcgcggatggcccggattagatcttccctggttcaggactgacgctcccagataccgcttgatcgcgcgccaacggctcagatttaattaacctagatccaatcgcacccgaacgcttccgatcctacggtcccggttaacctatgcgaaaggggtacgcgcagagccatcccaaccgttcaccccatgatcgacggtcagcaccaaccatcgaaacccctccccgctgacggccgaaccagggcggcgccaccatggttccgcgttggtgcactcaccggagtcacccaatcgccgcacaccggagcccaaacttcaatccacatgtcccacgacgagtacgcgcaaccaggaatcaaatgagggggttctcaccgtggttttcgaagccgcaagaccccggtgacgacgcggggaagatccgccaggcacaccaaattccggtgaggaattactcgccgacggagactccggatcgcccaaggacgccgcgacaacaaccc

SEQ ID NO: 173372 - DNA, 623 bp, Zea Mays
actcagctaatggtgctgccaaatgggaaagccccttggcaccagcaatctcccattttgccctttcctcatccacggctctaagactcatagtaacactagggctgcagccatcaaagacacatttgtttctatgttttcacaagatccaagctcccagaatgataagggaatcaagtccttttttggtgagtccattaacaatattccccaccaattcccaccagcccagatatgagccaacatccagttgaggagccaaagaatgcagaccaaatttcctaagcaacaaataccagaattccctggataatgaacaggtaacaaggagatgatcaatagtttcatcctcttgatcacatacggggcacttctcaggatgagtcagccctcttttagcaagcctatctgctgtccagactcttttttgagctaccagccaaatgaagaagcgacattttgggcaaggcccaagttttccaaattctcttgtgatgagggaaaaccacagaccccaaaaagaacccttcataagcagtctttgctgaataggtgccagtaggagtaatactgaaaacatgtctatcctcaacctcaggcatgggttcttgttacagtacccc

SEQ ID NO: 173373 - DNA, 856 bp, Zea Mays
gaccaagatatcaccatccactagggctaggatatcacatgggcgaagcttgacacaaacttctggcgtgggggccacccacattcaatgtgaactagtcgttcgtctgttcacatcagttcacaccagtggtagacgtcgtacgcctcgcattaaatgcaggtggtgtgtgcagtccgtaaggcctggatgcgccattaactcgcgctttaccaaggcaaaggccattgacccactgcgtcgcacatgagcaagtaccatcatgatttctaccattctcgctgcaaaggcagacgaagagacaaacagatgagataagaaaacaccgtttgcctactcacctacagaagtcgacgaaccagccgacgccgcaacctaccccaaacccagtcttcacttacacattgacaagacagggtgaagacgaatcgaccagaggagtctgcacgacgaccaagagaagattcctacccatcacatgtgaagaccttggtccaccagctccatctgatgctccgcgctttatattttagtattcctaggcctggctcctttatacatgtcccccttagtctatcaaagagagggcacttgcgtagaaaaagggatggacggcaccggaatcgagcccatccaaggactcggggatagggatatatacagtcaaactcgctcggaggcatctcgaactagtctcagactttctcaagttctcatcaatacaactcacaaatatagtatagtattacgctctgacggcctgaaccactctaaacactcgcgtattcttatatggtattcttatgttcgttcatctctctaggcacaaaccctaggctacctccatgttcttaag

SEQ ID NO: 173374 - DNA, 438 bp, Zea Mays
cgaaattctccggctatggtggctaatcagaggcgaggagcagtgctctgtgttcgtaacaaactagcggaacaagccgaggcatcaatttatagagggtgaccatgagtaggacgaatttgaacggagaagtgctcgcggagataacggaatgagtcaccggagttcgctaacgtggcattcactgggcaaagacttacggccgtcactggttatcctacacaacccacgacgacgtggtgaaacggcttgaggagtgacgggaccgaagtaaatggcggcacgacggctgcagtcgtgtggccacgttgccggtcatgtaggtacgaccactgagttgtaacagtgccccaagttcatccccgcatgagatctttcaccgtcagccgttatcctcacactagagcgcacgaatcgcaacgcaggcaaggatcgtaa

SEQ ID NO: 173375 - DNA, 439 bp, Zea Mays
gagattgataagcttttagagacatgagagatccaaagataacaacaacattcattaatccacatggatatgccgtttagagataagttgataaaacaagcgtcatgatcctcggagaagggggtatgagaatgaccagaaatgagagatttaggcagatcaacacctgatacttaggaacgggtaatagcagataaccagataatagggcagaatcatttaaaggatttggagattcggatgataaggccacaacatgattcataaggaaagagatcaccagatccatgcgaaaggagaggtaggcaacaagatcagctggatgatcaacgggaatgctatgaagttttaggggcaaggatttatggaaagaaacatggccttgatagggttcgcgcaactagacaccaacaacatttttttgacacaacaagtgcac

SEQ ID NO: 173376 - DNA, 717 bp, Zea Mays
cccaagttcacagtagttcactaccaagttcagttacataataaggttattgaaatactcagataaccttacacaagctaactcttacacagataacacatccagtgcccattccacaccacccatactactctacttcctctgacgaccccgaatctcttcataattgacatcatccagtgcccattccccaccacccatatcttgatcttcagcaaattggttattgaaatactcagataatggtggcgacggaccagcttcgagatcttctaaacgttgtgcttcctcctcaagtgactgagcaagctcatacacgcgccacattgcgaagttcactgacacctctttggccgtatctggcgaatccataatctcgtctccagccaaatctttcaactcctcccaactacatgcatctttgcaatggcttgggcgaggtcactacgaaccgtttcaaatcaggttatttgcgaaaccacaaacaatgttgttggaattgaacatagtactgcaaaagtttacaaaccacaaccctaaattaggtggaagggaaaccttaccgacactgaacgaggtgccgagcactgcttgaagacagaatgggtctgccgttgggaagtaaattgcatctagctgttgtaggattagggatgttgctggtgagtttgttgggtgtagcacgtacctgatgtggccgcgcaggtgacatccttg

SEQ ID NO: 173377 - DNA, 632 bp, Zea Mays
cgccggcgcacatcgattggccgacacacggtcccatctcgcaatccactgacgctacaccacccacggaagacgacgaacacgcataggtaacacttaccgacgatccaggcgcgcagacactagaccgcggcgagatgcagacgcgcgagtattcccagctccggcgagcaattgggaagcccccaaccaacatcgagctacctgaggtacttttatcggtagaacgcgccaatacgagctctcccccggccacgacggatcccgcggcttgagatggatcacggtggtggtgcccggtatgtccaacagagggagagagagtcgcagcagaggaaataggatcgaccgaggaccacgactcttcatataggcataaggcggtcagagtttgagcaacggaattcccgagtccacggggtgacttccgccattggtggtgaggtagtcggagtggacgaccaacggcctggtcccaccagcagtggttgatagaatttgcgcagatggtgtagtgggtcccgacaggtcgcccaggttgtcacgggtccggagatttcgccgccacgatcaccgagcatggcagcatcagattcagtctttatttgaaggagagggggaaagggatgatt

SEQ ID NO: 173378 - DNA, 637 bp, Zea Mays
cgacattgttcaccatgacttgatggtatgtgcagaagcacgtcggaacacaagagagttatacaagtttgggccaccaaaatgtgtaataccctacgtcatgttggtgctgagtattgagtttgatgatggtgtttgggttacaaatgagtagtggatggcggttggtgaattctctctatcaatctaatgatgtcgaggttagtactagagggatggtgagatgagatcgttttgtaggagtaacccctcagccttatataggttatcggagggatatccctttacaagttgtgaagtctatctaattctatctgagtctattttcgacattgcaggtgatcctgctcacccagagtttggtcgtcattcctcttagttatcctccgagtatctagctcttttggtacatgtgatctatgcacgtgaagcatcaacactccttctgcgtcagtcacgcacagataacactcttgtgccacactttctgggatcatttcctattttgattgtcacccttcttggtccaactcatttagcctagacacggcctaacggtatgccttgctaggcgaactgtcggaggcccattaggcaacctatagaatatttttgtgcttataaggacccatgggtt

SEQ ID NO: 173379 - DNA, 638 bp, Zea Mays
caaggattgaatgacaatgaccctttctcttcctgaaaggaacatactattttaagaagacatttgaaaatagataaaatatgcaatctgattttggagaaaatatgcattatatatcaggattaacataagagagggcccgccacaaatattttcatgctttctgagcagttttgtcaggaaaaaaggttatacatgtatattgggacatttagaatttgatgagaatgaagttgatcagaccttgtataacgatcatttgtttacattatgaaaggaatcatacttgtttaccaccattgacaagtccaagtgcaaaagacgctgcaactagagctctagaggggttaggtgggtcagggaactagattcaataatctgggaatgaactgaaacatagacaagaagaatggacaacacaaggtaccccacattgatcaaaacttgaggattgaagcaagatgccgcgaactcacaaccaaaaatgtacttgtcaatgtccagcaatgagaccactcaatttaatactattattaagtatctaggatccgccaaacaaacatggcagggctcacacctagatgtgcacatggaagcctgaggtgatggtcattatccctgagtgatcagtttcatta

SEQ ID NO: 173380 - DNA, 838 bp, Zea Mays
ttggccacggtggtttttgctctaaagtcgtggaggcattatctttatggcgaggcttgtgacatttacaccgatcataaaagtctcaagtatatttttactcagaaggagctgaatttgaggcagcgtcggtggcttgaattgattaaatattatgatttgtccattcattatcacccggggaaggctaatgtagtggctgatgcccttagcaggtccggggttccaaaagtggccttgccattgatcgctgatctggaccgtttagggatcgctttgtgttatgtcagcaccgctagcgaggagactcggatgcttattcaatcctccctcatggagagagtgcgtgcgactcagcaacaggatcgtctattgcaggaagctcgaaagagggttggtgatggtaaaccacgggagttcaccattgatgagaatgaattggttcgtttcaggggctgtctttgtgtgcctcagaaatcagaggtgaagatggatatcttgagagaagctcataaaacgccttacaccgttcaccctagcgaaaccaagatgtaccgagatttgaagcaaaacatctggtggaagcggatgaaggttgacgtttctaagtatgtggccgtctgtgaagtatgtcaacgcgtgaaggccgagcataagcggccggcaggtttactgaagccattagaaattccagagtggaaatgggagcatatcaccatggattttgtggtgggtctacctcgttcccctcggggcagggatgctgtatgggtggtagtggatcgcttgactaagtctgcacattttattcccatgaagaccacaaattcagcttcag

SEQ ID NO: 173381 - DNA, 1059 bp, Zea Mays
cctcagactcctgccaacctccaattccgtttctcattttgtaactcttccaccactgtgatgctatgccttccaaatttagagaggccacagaaacccagatagacttaggcactcggtagattgttaaatactctctgcactagtctaaccataccacagaatcgccctccgagaactttggaattggtagtttgggtattgcttgattacctaaatcagcagactgacgaggatcacctctcatgcctcactgttggttcccacggtcctgaccaccacgagactgctgctgattccttagaacatctccaccatgttcctgagtagaggtcaatgtttcacccagctctcttcccatctgctccaacctcaattgagacacttctcatcctgtttcctccaatttctggtacagatcattcctctcaaaagcgacttatttagccaccactgccgccagctctgactgcatcaacaactgttgctggactctctccacctcctttagtcttccagtcacaaactccatagattcaaacatacggtcccaatttccttgcacttctcgatctctctcatccatggcttctagcagaaatcgagtctacacggatggttttgtcggggggcgttgcgtcttctcttcaacgatcgctggctccgatggcttttgtttgataccagatgtgatgaccccttggctgtgggaaggggatttccactctgccgtgaaatttccagcgatagtgaggtcactgcagcgatgagccgaggatgtcaccaagtgagtcagttataggtaagtggactttgaatttggtattcgattgtattatttatgtgctcttcttaatcaccaagtacaagtatttataggagtgattctcccatacaaggtcgattagcatgtcctaatcctagctcactgacagctaatccttctgacaatcaactaacagcttactaccagctcactgatagctcattaatccccaacacatagattcccaatgcacatgcattacctaggcttctgatactctgttgttgcgcgct

SEQ ID NO: 173382 - DNA, 741 bp, Zea Mays
cgcgcgtcctccgtcggtccgacgcacgcggacgtgagacctcactttcgacggacgcgaaatttccagccacacaccttctctcgccacagtacaaacgtacagtgcaggcatggtcgcagttgttcttagctaatggcgatgcgggacctactggagatgtctctgctccatgcaggcatggtcgcagctattcttagctgatggcgatgcgggacctactggagatgtctctgctccatgcctccattacttcatgccgtcctccctccttccacgctccttcccgcaagaggagcttccctcctccctttcccccaaacgctcccctcctcttctctcgcgctgaactcgacctggcgtccgactccctcgcggccccgtcgcagggtgtcgtcatgggtgatggtgtcgtcgtccctgccacagtccgtcggggtcggcttgtcctcagatctcgcatgatttaggagcagcgacatcagatgttacggacgcgaggccatcaacgtcgccgccaccagcaccgatgtcggccccggcccggcggacccctccccggtggccctggctgttcttggctgatggcgatgcgggatctactggcatggagcacagacgtacagtgcaggcatggtcgcggctgttcttagtttgtttttctaaatgagagtttcagttttaggattaaatacgaattcctatctgcaggacttaccggagatgtgctcatggagctgc

SEQ ID NO: 173383 - DNA, 806 bp, Zea Mays
ggttaaacggagccgttggatcgacagccaacacataggattagatcagtccgagtgtaaatcccgctttcactcctgaccgctcgatcactaatctacggtcctgatttaagaaacgacacagcataacctgatatctaatcgtggccacacacttgggatcaacggttaggggctcatccacttcatcattctatagccaccgctgatcaccagatcaatggactccatgcgtcttcctgctcccgaccgcatgacagggcggcggaaggagagctccgccccgcgacgaccggacacggtgccacagcgccatcaaagcgcaaccccgacgagcaccgcccatgcagccacagcgaagcacggatcgaattgcctaatcgtgaaggtgacgtcgctctacacggttgggaacataccggtgcccaggttcgaacaggttatccctgggtggagcgactgatgccttgtggttcagtggtgacgacggtgcgccggcccgccgttcttgcgaagcaccggatgaatcccccccgggcagagcggcgattcaccaagaaccgcccccctgactccgctcgactgctctcctccacccacggcggcgatcccacgacactcactctcggcgttctcttttttttctgcgttccccatggtggcgccttcgagtgctaatcagatgagcgagggagaagaaaggttgacgagtgcgtttatagaggcaggggagaagaagtctgtgccgagaaggtcggtagatcggcgacgtagaatcaggtgtttctgttacggtgcccgcgatc

SEQ ID NO: 173384 - DNA, 510 bp, Zea Mays
tccggatggctagcaacgacatcggtctagactcccaggacgaccattcgcttcgggggtattcatttcatcgttaataaagagggagatatggtgagggccatggaattgaagccttgtctcccttggcaagcgacttgcccgacgtagctgtaagtctcggtgacctctaacttgacccacctcaggagtaccatgagccgcagggctcgccactacctgatcgtactgtggtagtgggagtactagaccacgtttgggagtcattcttggatatcctcttatgagggttggaagatggactcaagtcctacctagtgaggcaagttgcgaccctggttaggaatgccttgcagccaataccactagagatcacttccccgacgtggggagcccaggcgagaactggcccaacatcatggagcacaccgcggtgtccaccttgctcagctcaagctgcctcccaaagagctatcgtaggccccgagcctctcgcggagtgagcagcac

SEQ ID NO: 173385 - DNA, 611 bp, Zea Mays
cggcgatacgttggaccccagcgcgatgctccacccggagatcttcaagtgtcttcctcatcgcctccatagcctgggagcctggggccacctgcgccgcctgggctgcctgtgcagcctgcaccgcctctaactagcggacccgctccttctcctccaatgcccgctccttctcctccgcctcgagctcataatcggccagcatcttatcccgcctctcaagcatttcctccctgaaggtgaggtccttctcccgccaggcgagatccgccgcccgcgtatccagagaggcatccttctccttgaggttctcttcggccagggcaaggctgctggccctatcatcaagcccctgatgcacctttcgcaggctctccacagccatggcctgctggtcccactgctcctccagcatcttgttgtaggcattcaacttctcctggagctccatgacgacctcctccctctggcccaagtgcacctctttcttggctagcctcttctcctttcgggtcacctccagctcctgggcgaacaccttcaagaggtccttccggtagtccttgcggtcccgctcaagctcagaccgctcgaaggcgaactggcaggac

SEQ ID NO: 173386 - DNA, 1198 bp, Zea Mays
caacaccattcacttccatgcaggccccatgacccaggtacttcttcctccacatagcagaaaaacggtccaaatgcgcaataactgccaagaccaaagctaccgcaacgaactcgcgtccgtgattttcttacctgcccatagatctctcgtcgccttgtcccgataaccaaggccgtgaaccccgcctaagccttcaaaccctccacaccacatgaatccacaccatggaccgagagctaggagagaaatctcgttggccgacgccaaagccatgatcgtctagagcctgtccttgggttgctggggaatgccatcttcaacatataccacccctcatcatcatcttgccgagataggggtatagacgcacgccgctcaattcctcatcggggtcaataaatctgtgtgtgccgctgcactccttggaacctcatctacgaagttgattggtgtgcagagtgagaccatggagcatcgaggggacactgacgacctatgcagtgcattgacatgcgtgttgatcgatcataacccatggaattgttccccggacttcgaccaacgccgtcaaaccgcttgttaccgtggcccttcatcgccgcctcatagactcaggtaagacccttaccatcttgttttccataggtccctttatgtgtagcactgttttaccgataggattggcacgcgtgggcggtggtaaccgtacgatggcaaattccaccaccacggcatggcggcgccgtctcctgttgttcatcgaggaggtagagggtagaaaggtatagttcgagccgttgaatcaaaggagagcgactaggattaaaaggtggtgtaccgcttcagcgggggtccgtgggtcgttgattggtgatcgtacgggtgagtgagtgtgtcggtctcataaaattaggaccacagatcttgaatccaaaggataacaacacatactgcttcatgatctattgtgggtcattgatttgagatcttgtggccacgggtgacccacgttgtagcaactagggtcattttcttaaagaactttcaagattttaactcgcagtccaccactatgtgaagaacattaccgaacggtcctagattttgcaaactaaaccttaggatcttgaaaaaatagagcgtgtcatccctcggtgattaataattacggacttaaccataaaattgattttct

SEQ ID NO: 173387 - DNA, 369 bp, Zea Mays
gggaaactcaccgtgggccgttcctgcctagccagcctcatcaccatgccagcccagcctgcgcgcccacacgcatctgccccaactgactggtgggtcctgcgggcattgaaaccatcagccgctccgttgacgttttcccctggcgagtgggcctggttggccagacacttcttccccctcgcgcttgatagaatcgaactccgttttccccaccgaaatcgtcgagatcgcctctgctggccgcaacagattcttcaccaaaccacccgcgcgagtttcgggctcggactccgattcctccggtcatgctcctcggggtataaaagtggagccgctcctccccaaacaatggtgcgcagagaagaa

SEQ ID NO: 173388 - DNA, 714 bp, Zea Mays
gctcaaggccttcgtagtctctataacaacttctagtacgctggccatcctcctcttcttgggagttgcggcaggaattttttgcatctttgacaaatttgcctctgctagtgggcttatgatttctgacacttttattactttttccacctgtggctcctcagccttatcatctttagttttggctggcccgactgtaggcaccttcggcactatagtcgtctcttcagcactctgcacaatcggagcagcttgctttgcttcggcagctgaagaggtccccgtgccaaatttaggcaccacggccggttcaatgtaacacgatcggtgggtcagaaccttcatctttttgcccttcggctcagctgcaatggccgaagcggcagtctttctctttttctcttgacctcgtagcgggtaatggtaatcagggtatacaaagctaataacatcaaataccctgttcaatcttttcttgccccgacccccgaaagctgcagacaaggcattatcttcggccttggagtatgccccaagtagctcatcgctggtagcttcaatacacttcagctagtcatcgtctggctcatcaaacttctccctaaatctgaaggtatacttcagtcggaccaaaccaccctcactagaatcggcggtggtctccttcggcatatcccggctctccacaagtggccataccctaaaggatatatg

SEQ ID NO: 173389 - DNA, 419 bp, Zea Mays
tacggtcgcaaagggctactgattcaccgtgcaccgataatttggggagaggtggagaggattccatgaatttgtgcttcaatcgagctcactggtgaagtggtgtgtacctcacagtgggtggtggggctatttataggcacggcagtctagctagcgatccgcggccacgaattgcattgtcagtgcatggttaccacgtaaggaagagacacagtgagggaggagcaaggcacgagtgacacggcggcggaatgaccaagccatagtgaacgccgatgaaatattctgggcaggctctagctaggttcgcggaatcatgacacggcccaaagttatctccccacggtcgatcccttctccaaatcactcgaacacatccaattctatagtgccctggatctttgtcatcgttcttc

SEQ ID NO: 173390 - DNA, 356 bp, Zea Mays
gtcgtgacccttatacccgaggtcagatcatatcaacctcggctagattcacgcagcacttcgcggcggccggtacggaggttcggtgcgcccaacagaaaggcggacaagggaggaagaggcggttcctgacgcccggctaccacggctctccgaagacgggggtctcgcccgcagctaacggcgaagggggcggccagctcgaagtcaatctgcgctaggtggccgcaaatgccgcaccacacgggactgtttcaaccgaacgcccgcgagaaggggaagaaatcgatctaaccccggactccgcgcgtgacaagaaagggtgcccggatgactgggtgacaggcagatggggc

SEQ ID NO: 173391 - DNA, 539 bp, Zea Mays
aggtgaagaaggtcggactcagaaacaacagacatgtggttacctgcgaaaggcaactggctgttgggatcgatgggaggaatggttgcgacagatgaactctgagtcttccgattgggcgccatctcaatcttgctggcgagcggggcggaagcagtatcgcaagaaagcagagaaggtctggatgcagaaaagcaagactagggctcagaataaagaggcatgcgacggcgcagtagaaatggggttttcccgggccagatgccatttctaaaaagtgcccagtcatcactcagctgttatttctaaaacgctggcatgccatgtcatcactcggccgttatttccaaaacgaccgacgtggcccaatacaactcagctgttatttctaaaaacgctgacgttaccagtcttcactcggccgctgtttccaaagcggccgacgtggcctgttgtcactcgatggttatctctaaaacgccggcgtcaccagtaaccgtagggtcgttatctctaaaacaccgacgtggcccgatatc

SEQ ID NO: 173392 - DNA, 291 bp, Zea Mays
ctttatctttgatgtgttttcaaagctctgctcgtcctctaccaaaacattgagatgtgtgttgttcacgattgactaattgatttctctgatgcccaatttgatcagaaattcttgtggtgccgtgcaagtccagagtttcctattcatttgattcccgtgcatttccagctagccggaagtatctttgtagattgatgtggtactagtactagactagtagcacgatctgtcgtaatgctgaataatccataagccaatgcttttcttggtgtgctgaataatccactg

SEQ ID NO: 173393 - DNA, 501 bp, Zea Mays
aaaacgatatagcatcaccaaaacattcgtaatccatgatagactgaccatcaacccaaaagaaattagttatacgaccagttggcttatctatttgaatagcataaaaaatgcaggatcctcaatttgcttgttcttcaagtattccaacagagtctgcgcatcattggattctaaatatttctttcgctctcgaccaatctcatatttgagcaattagtagtctgtcggcttctataacacgtcgttgagatcttagcttgcacgccttatttggactagctagataatggttgtgctcgggtacaatcttttggactgtccaaaccccttctccgctgacaccaaactgaatgctagcattacaacctgtccttgtagtaccaaatcctcgtttgctacaaacaaggagttttgaatatatggtcttatctgctcaacgctttgtatcgctccttctaacactgaatccaaccttaccagcatagatattatacatct

SEQ ID NO: 173394 - DNA, 869 bp, Zea Mays
ctaggtcgcagagctttgggttggttcggcaaacttgggggcgttggtgattggccagcggtgagctgaacttgcgggtccaggtcgcaggagggtgtaggtcatcggcgagcttcaatctaggggcctggtgtagcagctcttcgtggaaatgctcgaggagcttggcagggcctcagcgaagctatccccgagctcggattgggcggtggaggctcggagtgaccggtcctcatactctagcggccgaccgtgagcggctggcggtggcgaggcttctccggcatggtagagttaactcgagtgaggctaccagctgcgggagggtacgtggaatcctctggtgcgcttggttaggcgatgggggtggtcggggtggcctggccacgaaggtgagtttcgggcggcaatggcgggcggtgcggagctcgccggagttggggttttgcttggggaagtgaggcggggtgaggagtgaattgccgtgcacctggggagggatttataggcgctctcgggcacagcagaacgcacgcgcgcggtggagtcgacagtgtgtggggcacgtgcagagagtacccagtgcgcggtcgagcactggagcacgggatcaaacacgtggcgatactcagtgtggtcattttcaatcgtccattggctccaaatctcagcaaattttgtcaggatccttatgtgagatttcttcccttgactccactctaacattttcgtgtggaggccgagtttctgggtctgtgtgaggggtggtcatgtcaccaatgtgggtctgtctggctgcttcgtcccgagacaaaaaccacgccaagtcgtgtcaaccggaatgggtctgttttcaattttcaccaggg

SEQ ID NO: 173395 - DNA, 558 bp, Zea Mays
gcgaggtgggaggcgaggtgtaactggatcggggctgttgcgagtagggattaaaacggacgtaaaaaaatctaatcctttttacatttgatcctttcgttttcgtatttgtgaaaaaatataaaaacgggacgaaaacaagagagcgtctattctatccaccatttttgtgggatctccttattttccaaatttaatccgtatttattccgtatttaagaaagccgggttgaacccaatatacattagtgcacaaactaaagcctcatattcttaagtaatatattataacataagtggtcattctagtcacccgatctcctcaatgacaagtggtctaaaggctcaaataacattgaccatagctatatatacaccactagcaagcaaacaataacgaaatgttgtctctctatatctatttgtttcatgttattaccctcctagttagtcatcaatatcatgtgtgcttgtattaaattataagtttttgcataatatttccgctcccgttcgttttcatacactcgtttatctcgctctcgtttccgttcccgg

SEQ ID NO: 173396 - DNA, 588 bp, Zea Mays
gtgttacttagggtttttcccagtaccccaacttgtgaccattatcacatgtggctctaataaggcaagagacaccaaaacttaagggattaaaagcctaagttaagtcttttttagcacaagaaacatactctaaatatatcatgcacctcaagtgagaaaagcatccaaaaccctaacaccattcaaattggccattcgagcacaaaaagggaattagagaaaatactttggaaaatacaaaatcttaatatggaccaattgacaaagttatagttcattaaataaactacaaagtgtagtaaggaagactgatgattgggatttttcaaaattcccaaaacagccccttaagcaaaacctctataggaaattcagaaaaatccaagttctgaaatttaacctcttcgcaaagatcagctgtgttctccaaattcaaaaacttgaatccacttggtccaaataacaacgtggcaccaaatttccatgaacacactctggcaaggtttgagaactttcctcagccgtatgacataatcttggcatggatttacctcggaacgcggccttgtgacactgacatcttgg

SEQ ID NO: 173397 - DNA, 603 bp, Zea Mays
atctgccttagttggcttctttatctttgcggccattgcctcagcctttttgcggactcctcgagatcggccaaatcaacagtgtatgacgtgaggctccgtccaatccctttcaaaaaatgagctgtgccagcagtggatttactcttctttttcttctcgaacggggacactaattttggtatagaaactttagatttctttgatggtcgtggatcccttgatggctgtggagaaggtggatccctgaagggcgatgtatgtggcggagacggtgggccaccatgaggatgaggagaaggagggtcagaaagaggatgaggagcagcatgtgaagtttgaggaggtgatgatggatgtacaataggaacatcaatttgagaaggcggagacggttgggcctgcgacgacggctgtcgtggtggatcaaccaattcgacatcccttcgaggccaaaggataaaattcttatagcttgtccaagtgtctcgataccttcgggcccagggatgtctagcatgtcgtcctcggatccttgaatgattgtcgtcacttctaccctgcaatattcttctggaatgtcgtttccatggaacttgtgtc

SEQ ID NO: 173398 - DNA, 581 bp, Zea Mays
ccttattgcgcttgagtgtagcattggtgtatccgatgtgcatcgaatatggtgcactcgatggagcacttagagagcttgcagaagtgacctcaaatacatatttagtacttactagatgtgtctagtgtaccacctgataagatactcaaggtggttataaacagtgtctgagaggtcaaatactcaccgaacaggatactcggagaggtctacaactatgcaatgagagtagcttgtttgcattcaccatcctcgttatacttggtaaggtcaattggtcaagtgagagttagtgtttattactcttggcgattgttaacacctaaacaactcattggcgattgggagtgtggtgatcactcgaagagcttctggatgatccaacctaatcttgtacatgattatgaatgtttcctcatgccagagtgacaaagaaccagctcatagagagtacttagcccttgtgtggaccaatagggaatgacactcttgtacgaaccaaggggagcgacactcttgtacgaaccaaggggagcgacactcttgcgcgggtgctccaatgagtattagtagagatt

SEQ ID NO: 173399 - DNA, 689 bp, Zea Mays
gtccaattaacttatcagctataccagagagcctatttgtaagtacttttgtaaaaattttaaaacttacattcagtagacatataggcctgtactgctgaatagttggggcacccctgcattttgggagtagaataatcgttccgaagttaagactatataacgaaaggtttcctgcatgaaattccccgaataaagccataagatcagtcttgattaggtcccaaaaggcttggaaaaactcagccgggaagccatcaggccccggcgccttattatgctccatctggaaaatcgctttcctaatttcatcttcgttgaactaagaagtaaggtaagaattttcctccgctgagacctggggaatatcgtgaaccaggctctcgtcaagagtaatctcagaaatcggctccggtccaaatagccccttgtagtaagaagtgatatacctctttaattcggcatcaccttcaaccacttcattcccgttcctgagctggaaaattctagactttctatgctttccacttgcgagcaaatgaaaatattttgtattggcatcaccctggagcaaatgagtcgattttgctctttgataccacttaatctcttcctccctcaacaactcagctaatctattttgaaggcactgctttaaatctaactcatgtgccagcaagctgtcacac

SEQ ID NO: 173400 - DNA, 598 bp, Zea Mays
catagctggcgtgagcgcgcggtgtggcgaggcggcgagcgcagaggcgagcatagcaagtccggcaagcagcaaccgagtctgggagcacaaggtcgtgggctgtgggttttataggccggcgagggggaagctagagtgcctggcagggagtaatggggaggagagaaaacagccggtttgaagaagattgaaggccattaatggttaattagacgctgttaatagagggaggccactcctcttgattcctcatagaaacggacgagcaagaaacttcagacattaatggtgtcgaagaaaggaagagtaacggctggacaggggagaggaaggggaagaggtaggggatggtggctggcgctccaatcaaacagggaaacgagcgaacgggtctcagtggcacgagctgaagaacaacggctcggaagcacaagcggcacacacaagccagacagaacagaggagctgtacaaaggttgaagacgagctgacattagggccccacaggtaagagagtgaaggaggagagtggagtggagcacggttaggctaattgggctggcgcacagcagatttttttttatttccaattttt

SEQ ID NO: 173401 - DNA, 668 bp, Zea Mays
aaagagtgtggactatcagaatcaaccagaatcagtagtggcttgttctgaatggtgcccacaaaatgcactgtgcacgaagcttcaatacccaaactagtcgccttagagatagctaagaacaactgctcaacatcctcaggagaattactgttggtcacttcccgatcatattctagaaacaaatcccaaacctccaatatagcagtaaatggcatagtcgccggacatttgtgataacgtgaccacttttctacacaacgttggcacagaccatgtgcacggcgatatgctcgtagagccaacaacttgacatcgcctggatgaccacgagcaaattcaccgggtttcctgtcttcagacaacaaagttgttgtagccttgttaattttgggtggcagcgacaggggaaattgtgctttgggtgctgctggccctgaagaccagtactccgacttcacttgatctcgccgtttgtgcacatctgtggcctcatcctgtaatgagcaagtatgaaagtagtatccaaacccaaaggcctttgaataagaatagcaacttttaaatcaggccttaacccctcaatgaagcgcataatgaagtacatcaaatcattactattttcatatgcaatcagctgatctaccaggccagcaatttctgtcaat

SEQ ID NO: 173402 - DNA, 1002 bp, Zea Mays
caggttttatttcagacttagtctatggctgattgagacctgaatttcagataaaagtgtcaagtttggagctccttggtagtcaatctctttgtttttaggctgtagtttctgtagcaaacttggataccaatgttgggggagtaatccctagtgagggacatacccttgaaacttcttagaaatgagagaaaacactgcacaaagttgtgttgtcagataaaagagtattgactgttgtgcagtagcctaagtctgaaatatgtgtgtctggttaaactttggagctttgtggtgcttgatctatatggttttggactgaagttattgtggaaagtttgaagaccatatgttagtgaataagttcctttgagtgtgttgggcgtgaccttacacaaaaagtggtgtaaatactgcccaaagtgggactgtcagtcacacaaactgaatttcattcagtccaatgaaaactaatttcagtgcaatttgctgaacttcagagctcttttgtgtctaatccataaagtgttggaccatggtgtctatagtgaattggtaaaccgtagaaaggtgaacaactctcttgagatggtttgggtctggtactgtatagaaacctgagttaaatgccctcaaacattcactgccaactggtgttgtgaactgcaagtgattcaaaagctaaaaacgaatttcagtaaattgtgaccaactccggagtatcataacttgtgattcttgtgtgattggaccaagaagtttgtagtaaagttggagaccgtatatcaatgaacaaattttattatgaaggtttggcttgacaccatgttggtttgggagaaaagggaggctcaaactgcctcaagcagaaaagaaggaggagggggtgatctgaactcgaaattcagaccagcagcaagttgctaataaaatttggttgatttctggacaccgtaactttggaactgtgaagtttgagtcccagaaccctatagtgacttt

SEQ ID NO: 173403 - DNA, 790 bp, Zea Mays
aacagacgcaacatctatccgagcaacaaatcgctaagggtgcagccggatatgcacagcgacacacgaagcaaaccaccacgcatagaaaaaggaaaaagcctcagtacatttaagaactaaagacatgcatagtcgtccctcggtgaagggggtgagggctgcatttcactcaaatcgttgagccacaactatacagatcttccaaatattacaaaggctctgccttcgagattagaccagcctccaagaaattaaacaacataagcctaagctcttcgcaatcgaaaagtgccctaaggtcttgttcttcgaaaccccatttgattgttggtgcaagaacaatccggcaaggcccctcttctgaccgcaccctccccattcttgaggacgcaggggtgacatgcgaagcacctcacgaagcgacccacgagcaaggcaccccagtcccatatgatgacgcctcaaggagcctttgatgcctcgagatggctcgctagcatttccatgtctccgcttcggtactccaactcttctcttgcttcttgccgcaatcggtgggaccctagatgaagactccccgtcctagattctgcctctgacacatttaacgcaacaaaaaaatctaaatcatcttctgaggaatcctcgttcatccttacgaaggggctcagcaatccttcgctacccgatgaccatgaataaaattaagagccccatcattaaaccctgttggaatccaacaagacaacagtgtaatgcattcgacaacaccaaatatttgcttgcg

SEQ ID NO: 173404 - DNA, 792 bp, Zea Mays
ctagaattttctataagttccctaagcttggtagaaaaaggaaaagaaaaggaatgaatagtaatgggctcaaaccagcccgagtcggcccactaacagggaaacacgctcccgcgcgctcgtgatgtccattttgcgcagaggaccttggtcattcaaataaccggtaaagaaccctgcgcactatttatcggtgtctctgacatttgctcagaggcccttcccttttcttttcttcgcaagatcaggtccccgaccacggacgacggagcagttcctccagcgagcttgtactggccggaatacgcaaagtctaagcttcttacttggtcgactctgaattctacctcgggtgaccctaatccctctaccaattgcaaagttctagctcaaaatctctctgtccacggtgatggcgcaaaccgaggacaacccgaggtgttcccggtgatctaacgtggtctagttcaattggctaggccgataagcatccatagcacacaagggtgctgaaacgagggtaaggaggatgtgaatggacctggaaacaacggttcacgacggcgcggagaaccaaattgggggaagtttgaaattcgcgagctacagtgactaatcggaggcgagggctggtgttctggcttcgggacaacctaacagagctaacgacacactcaatttatagtgtccgagggcagtggtggctaattttgagaagttgcgctggcggacgaagagaggggaaaggtactggcagaggtgatcgtggctttcaaagtggcaaggcctccg

SEQ ID NO: 173405 - DNA, 888 bp, Zea Mays
tcgaagcggtatgccatctgctacgtcggatcggagacccacggtccagatgtcatggccgatggggtaagttgagtcacatccagtctatccatcaggagatcaacgctccggatcttaaaatatgaaattaaatatggcgcattcatccaaagatctgacggctagcgtcccctctcctcactcccacccgtctaaccccaggaaacagcggcagcaaggcagagctccatgctgggaactcgccggagttcccccggaaccatgcatggctatgctaaaaccaaggatttccattgcatgggcaaccccaagccaccatgaatatgatgaagactatcccatcgtggatgatacagtggcatgccctatccccggccaagcgcgaccccgcggcagagcatagctcatgtgaacaattctgggggcatttgtaagctatcctcaattcgaatcaatgtaacacaatgagagtatgaaaccaaagcgaggaatggggtgtttaacacgggtttcgctgtgtcggacctcgtccacggtgaggtgcgagccacgacggtcgcgctactttagtgaggaattccacttgaggaatcccgtgagaacaccgcgaagtcgttgggctaccgcgcactccaatctgctacgtcggtgaagaacggatgcagcggctctccctcctctcttctcggctcgcggtggcgttcaaggtggtgcttcatggggagggtggattcaggcgagagcatacacgcggtcggggtgcgacgcgagtatttatccccaggcgttgccagctggcacaacaaccccagcagtcgtggcggcgtcacgtagttcgttcggccacagctgtaacacccccggtgttacaagaactaaaacttg

SEQ ID NO: 173406 - DNA, 650 bp, Zea Mays
caccaaccttgatgtttggttggaggactatcgcctcgcttgtcgcatggcaggaatcaaggatggcccctagttatctagttctttcccatccacctcgtgaaggggccaagggcgtggctcgagcatctgccgagcaacaccatccatgactgggttgacctcaagaaggccttcattggcaatttctagagaatgtacaagcaccctgaaagctcattggacctcaaagaatgtgtccagaggagcatgaagagtctctaggactacatccagaggttttcccagaaaaagaatgagctgcccgatgctaccgatgccaacatcgtgagtgccttcacctacaaaaccacaaacgaggcactcgtgcatgagcttggtcgcggtcagccaaagaccatcgccgacctccacatcatcgccacaaagtcccccaatggagaggactaaatgggggccattttccgtaaggggaaaaccccgcgcgacaccgacgatacaagcgacgtagagaaagagcaccaggagcaccctaaaaagcaaggggtaaccatgcccgacgcgatgggaacgaggtcgccatcgctgaacgctcgcccaagcatcaggcaaaaactggcggtgaccacttttagaagatgatggacgcg

SEQ ID NO: 173407 - DNA, 339 bp, Zea Mays
ccgaactgaattacactaatagaccgaatgcccagccctaattgtttgatatgccactgttgatattacagacttggagcaacattcatcattagctaacacactaattcaatttagcatatatagagaaaacataactccaaataagctaaacacaactttgagaataatccaatcagaacaaacaagagatgagtttccagtgggtgcttttcagcattgataccctcacttcagagtgctacaggctcattagctcctgcaagcaattaggctaactatagatttcagtgactccgactaaagttaactcctaagaccatctccaaccatttcccc

SEQ ID NO: 173408 - DNA, 594 bp, Zea Mays
tttgcattcaatcctcggaacgaatgtccactacagatgctctcccatttgggttcgcccttcagttggtgccagcaatgcatgtaatggaaaggtttgttctcctcgtgtgcaaacaatgttgccgccttcgatgtctgtacaaattgttgtttgattacaatattgtggaaacatatttagtgtcatatgaacatggataatactgtgtgtaaaaagggttaccttgtcgtcatcagttaggccactttgtttctcccttagaactcttgagtagtagccagagaacttactaacatctgctctaatcttgtcccatctgctgctaagggctctgttaactctacaaggaaacttgcccctctgttcgttgtaccttttttcaattcgagcccaaagcccctccctacgttggccagtgtgcacaacagggtcactgcttatttgcaaccaggtagtgcaaatgagaagatcttcaggtccagtaaagttttgttccttacacttcttatgtttctgcacaggaggtgcattcttttctggactattgatgtcatgaacactgtgttcatcatctgagtccaagttaacagg

SEQ ID NO: 173409 - DNA, 2648 bp, Zea Mays
atcagattggtgggataatcattgtatcgcattgggcctcatgggttgatgattatagagtacataggactaacaccctatgtggacgaacaatgttttactacacctatttactctaacatgcccctgtagtcacagtgggagcatcgtaggcggtgaaactggagaagttgataagctaacatcctcttgtagtcataacgattgatgcatcacttatggagtggctggagaagctgatgagtcatcatgcaagatagtaaccctttgtgccaacgtcaaagtagttgagcgtgagagcgcatgagccgtggttgtggatatcatgatagagatagccatgatcaatgtaacagtcgaggtagccgatgtcacggtggctgcacatgaagccgtaggcgcgaagagatgccatggtgatgacgaagatgcattgaggcagtcattgtggaaggggtcagtgccgggtcgacatagttagggccatcgaggaagtagaagaagacatcgacacaatcgaaagagggttgatgtactcaagctgccaggacgaagtgtgcatcgaggttgcctaggaacacactatggatgaagcacgtaccggtgttgctaatactagaaatacgaggtagagggtctcaaccatgcatcaatgtctaagggaccaacacaggaggtcgcgacgaaagttgtggtgcgcaaaatggtggggtagaaggtgccgtcgcagcccgtggttgttggagtagacgaagtaggtggggaaaagacgacactgagggtatggttgtgctagatgaataagttgtgtagaggcagagacacgtctaactgaaagcgagcaatccaggtggacgtgcttgcccaaaggcagcggttcagacataaggtacaacgacgacgttagcactcaatgttagtaatggaaaactcgaatagcttgacaaagattaggtgctgataagtgtcgcacaagaggcacaacggtcgtcgatgcacataggatgacgaggtagatgtagctttgagtgccacgtggacaaaggcatgcctgtctttgtcgatggcaaccacgggcaacgatgctatggcttaaggaggctcacaacaaccattgcttggagaagatgcctgtagtacttgatgatggatgtcacgggggagccgggtggatcgcacacaccggttggtcaaaccgagtatgcgtgaggtgggtccacgatggaagaagtcagtggaggcgtctcgataagtggtggccgagacgtgcagacaagatgatcgagaagcgacgcaggaaggtgtctccttagtagcgcatgctcgaccaggtcgcatagtcgaaggtagatggtggtatagtcgataccaatggagtagacatgcgtgaggttggcagacggtgggtgactcaaccccgatcagtgatagggcaaaccagatcaaaactgatgacaatggagggcgatggagtagcccgacgtgaggtttggaaggatcacaaattcacagtgctcaacggggtgggtgaattgggcttctctatttttttgcgataattaaatcctaattgcaagcccaacataacccgagtgcctaatttgtacacagagttttgcaccctaataccaaccctatgctatcatggcaattctaagaatgtaaatactcaaagtaagttgcacgaatgtaattgtggaaagtaaagcaagggttgagtagactcctcaagttttcctctaggtctcggagagttgtcactatacgctaatccttattggagcacccgcgcaagggtgtcactcccacttggtccgcacaaggaccaaatgctctctcgggcgaaccgctcataaccttgtataaatcctgagttgggtcacccacaaattctccgggtgatcaccgcactcccaatcgtcaccgagctgtctaggtgatgtcgatcaccaagagtaacaaacactaaactcttacttggccatgacaaggctaatgcgggtggtggatgcacacatgtctctatctatgcagtaatgaggttgttaaccacaagattatcacttctctaatctccttactatgcaaagggtcttcctttctcataaagggttgcttcagctcttgaaagggacaagacacctcaagaagctgatatgaagggtggaggtgtaaatggccccaaagggctcaaaccagtcgttataattccacttagcttctttgggataccagatgtgtccaatgccaactttcccattgcaccagtgttacaccggatgcgttcggtgagtactaatatttccacagtttgttttaagcttcacaaatatattccaataaattggcgatcgagacaaatggagatgggagggactataatcacaaaaaatctgggttgatcgggttgacacttgacagtagtgtaggcatctcattggaatgctgaattccgaatctagctcatgaccccaagatatctagattgatgatgccgaggcaaaaagaaatatatgggaaatagaaatacaatggtgttttctaaacttggcgttgtatcatcccgacccctaaacccccaaagtgcacatctaggtccctaaaattataaagttgtgtcatcccgatctctaaactttcgacgtgca

SEQ ID NO: 173410 - DNA, 667 bp, Zea Mays
ctcgccgccggtgatccgcgtgcccggattcgcgccggtcgtcgtgatttgtgcctggcacacagtggatatccacggggaggtaaaagatctcgcgggggagcagatgtggtcgcgggggaggcttatcaccacgcctgtagccgttgcgacatggccggaccgccggtattgccgtagaaactctggtgacctcggttgtgccacgtcgtggcttgttactgtgcggtagtaaccgtggcacacttaagagtacaatctttaagccattgcgcaggtgaacgccacgaatcctttacgccagtgctcttccccctctccggccgacgcgcgtctcctccaaattagccgccaccactcatgaatcctataaattgagtgtgccatcagctccgctaggtagttgtgcatccagtgaaccagctctcacctccaatcatcccctacagctccctaatttgagagttccgccaaatcggtctagaacaccgcgtgtgtgagctcgtcgcggtcagcgctccacaggtccgatcttgttcgcctcgctcttgttctagcactcctgcgtgctcttgaagctcatcagcccaaccaattgcactgaaccggagtagatcgacgggaacactttgaattgtccccagattgtgcggtcgccgtggacagc

SEQ ID NO: 173411 - DNA, 441 bp, Zea Mays
agagctctcaaagaacaacttctggacttcaggacagatgaagaaggagtcctttggttcaaaaaccgtctgtgtgtaccaaaaggagaggcacgagaagttctgcttgacgaagctcacaactcagcctactccatccacccagggaccaccaagatgtacctagacctcaaaaccagatactggtggagaggaatgaagaaagagatagcacaatatgtgcccagtgcgacacttgccaacgaactaaggccgagcattagaagcctgcaggtctactgcaacccctttcaatactcgaatggaagtgggaagaaataggcatggattttgtaaccagactgtcccagacccaaaaagggaacgactctatctgggtgataatcgaccgtcttaccaaggtagcccatttcatcccggtgaaaactaccttcggaggag

SEQ ID NO: 173412 - DNA, 735 bp, Zea Mays
aggtgataatactaggagcgttctaaaatgatatgaatatcagaaaaccattttggccaccctacagaaaggcgggtgaagcggccacatcgacgcgtcattgtggtgagtctgccttgagatgacgatgatgaggcagcaacatgcgaggggcagcgagggcaagcagttgtaggcagtggcaagcaacaacaattgttgcattgcggcaacgtggtgggaccctggtgacatagtgagggcagatggtggtggcaccatggtgctaaggcaggatcccaccaatagcttgcccaccagtcgatgctgaataggagacaaagtagtggcgctgcgtgtgggatcccgacaacgcgatgaactaacgagtgacgagaagacaaggtgacactggtagcggacgggtctggtcatccactactgatccagtcatgatcgaaggagcgatcgagccatgagtaggtcgagtagctagccgctaggggaaggaatcgaactacttgtatggagagcgggctaagcaatggactgtcgagaaaaagttagattaaaactaggtttcattagatttggttgtacctactatataaagttttttttattttgatgtatatctaaatctaggtataatagcatataaaaattgaggtggggccatggccccctttgccccacccttgggccttggatccgcctctagatggaactctgaacatgaacgcgttatgactacgc

SEQ ID NO: 173413 - DNA, 531 bp, Zea Mays
tatgtccctgctttggtccgtactgttccccacaccctgctggaactagtccaggccttagcgcgccctaaaccccctccccttggctgggattcctcgccagagttgccagatcccctcggagcacctccccttcgtcgttctccggtctccggtcctgttcttgcggcctgaagcgtgccagtgagttcgctagaccttcttcacctgttcaagcccttaccggcgaccctagacccccggcgaccatgtctacctcaccttcgacgacctcaccgccgcggagggaggaacgccggtcaccaagcggtcaaactccccacgcaccctatcgcaaccgtctgtccctgatccaacggttcagatctgtggatatcgattcgcgtccacgcgctctaccccaaggccccacctgtcagtgcctgtgccccctagcgcagggcccggctggtcagcctgcctccctccccagtcactggcacccttggctcgcttgttagtgcttgcctgctcgcccccgcttgcactcgc

SEQ ID NO: 173414 - DNA, 741 bp, Zea Mays
ggttcgccccgccactggaccagcacctgttgaacaccccgggccaggcgagcgcgttccaccagagctggctctggaacaatcgccccatgatggatgttgggtaggggcggtgggggcggatggaggtgcccctacaaacttcttcagggtgcccacgtggaagacgtcatgaatgcgggcctgtggtggtagctccaggcgaacgacgacgttgctgatgagctcgatgacgcgatatggccctaggaagcggggcttcagtttgcccgttgtctgttgtggcagtgaggacggagttcgctggcgaagtcgaaggagcgcccagtcgccgactgcgtatgtcactggccagtgttgcttgtcgtagtggcgtttctgcaccgcctgtgcctgctcgaggcgatagcgcacatcggtgaggaatgcctcgcgttcctccatgtcgcgtgcgaccgcatccacccttgtttcaccaagctcataagagcggatggagggcgggtcacgaccatacaccacccggaatggcgtctcccggagcgaggactggtatgccgtgttgtacacgtatttggcccacgacagccagcgaagccattgtcgaggacgcctgcctgtgaaacaatggaggtacataatgatggcacggttggccgcctccgtctggccgtctgactgtgggtggaaggcggatgacatgtgcagcttagtgcccatgagccgcatgagctcacgcca

SEQ ID NO: 173415 - DNA, 607 bp, Zea Mays
ttcaattacatcaaaaactgtgttcaaccttctctttccacaaacaccaaaggcagtactcatggcttcgtccttggccttcaaataagcccccaacaattcatcactggttgcctcaacggcttcaagccattcatcatctggctcgccgaactcacttatgtaatgataggtgtattttagataaaccaggccgccttcactggaaccagcagcggtttccttcagcatctcccaatcgttaacaaggggccacaccttgaaagcaatgtgctcctggaccaaattcctggtgctaatgtagctgcacactgtgttgaaggccatcagacatgcttgagctttgttaccacctgcaatcgaatgtctcctaattccaaagtgcgatcgtatggggcgctggattgcgcccttcacatccttcctctcactcaaatcatttttaatataaaaccattgcttcatccatgagcccaaccatttttctgaaatgttggcacacgacacctcacgtcggactggtacacgaagttataacatctgaagttgttatggtactggtccttcctagtggccttcgtttgataagacaactcgtgaatgttgc

SEQ ID NO: 173416 - DNA, 960 bp, Zea Mays
aaaccaaacacaacatacatgtagcaaagcttttggtttggtcacgtaggtaggagaggacgagagaagcacgcgcagcgcactacggtgacggagccgagctggatctggctgtagatttgtctggtgctcttgccggtgccaggcctggacgattcctcatcgtttgctagtacatatactttggcgccacggctgtactgtataaaaaagaatcagtcgtctccttttcacatgtgagcttcctgtcctgtcctgcatgccaaggccccaagggtggcacattgccgtccgattgcacgcctcgcatcactttcaccatgtctagcacgcgggaatgaatggctctcctcttttcctatggatttttggcagacacaaataatttggctgcgttgttttttcctgcttccttctcattcacaccggaatcgggaaaaaaacttgagtacaaattgttttccccctcatctttcggcaaagttcaatcatggctcatggctcatgtggctgcggcgtgctcgaaaggctaaaggtgaaccgtgatgggagatctttctgcttgcccatcatttcctttcggatgctgctctgctgcatcggtacaagtttgcgttcgccagctttcaaatacagccgagtgtaactgggcattgttgtgtagcgaatggtggccactctggagatctaggacacgttcggatggttgccagttgccacatttttaccatacctagtatgtttgattactgttcgtgttttaaacaaatcaagactaacagtaattgatgggggggattggtctttgtcctgtggacactagtcttatctgcaatgcaatgggctattggccaccacagagctgagagcatgtggtcaggaagttaggaatttttgttgttgttgcaggaggttaggcattcttggcatatgaatcacaacactaccatgtgtcacaag

SEQ ID NO: 173417 - DNA, 465 bp, Zea Mays
cctaatgtcagtgtcctggcctcacagtggtcatcatccccagacgcttcagctgaaaattactggtgttgttttgctggcttttcggtcttgctacagttgagcccatcagaaggtgaagaagatggcgacttcagcctgaggggcagctactctcagctggtcagcctgaggggttgatggatttgtcttgacagtgaagccctcattccatccttagccagatcaaagataaagcagtgtcccataactcgataagcccagtacactaccaagacatttcacattttaaagacagcaactgcggacgacaaacagacaacagcagcctcatgggatctcttttaggccacttcgtcttcttaattaaaaggtttttaggccgaatgcaaacaactacattcctctcgaaagaatcaacacaaattcgaccccttaaaaagatcatgtaaaaatgaaattgtt

SEQ ID NO: 173418 - DNA, 1025 bp, Zea Mays
gagatcaccaccagattggccgaaaagacctcaccagcaagaatgacggaacacccctgacaaactgaacaactactaatgaagccattagcagatctaaccaaaattgggtgacccaacctctgcaccgaaggaccagcctgcgacacaaaatcctccgaaacaaacgaatagctagcgccagagtcaaaaagagcatgggctacaaacgaattaactgaaatcgtacctgtcaccacgtctcctttctccccgccatccgcagcgggtagcacataagctccagaaatacccgcagaagaggaagctcccggagtgaaattaacagaagaaccccactgagccgccgggtgaggcagacgcggagctccaaactgagacgacataggagtagacggtgcaggagtaggcgcggcctgatactgaggaaaaccctgcatcggcacgaactaagaagtcccaggcacataaagctgctgcggaggaagaagaactaaaaactgctgctcagcacttgacatcatgttgatagtgccctgagaggaggaggaagtcatcggctcccatctgagcttcccattaggattcctcctacacaccacatccttgtggtcctgactgcagatagaacacctgccactccactggcactctgcatggcgatgcgcatcaccacagcggaaacacaccagccccagcccgggcttaggaacaacccgaaacctctgagtacttcctcccgaagtacccgagtcagaagatttgccacggtaaggatggtggcgctggtgctgagacttgcccctcttgtgggctggacctctcgtgttgcccctcctcgcgtcctggccacgaggctgatcaacacccgaagacttctgcgactccatggtatactggtgttgcatctccacacccagtgcctgctccaccgtggtacggaagtccaccaacggaaaggctcccagagcatgcctgatagaaggcttcataccctgacggaactggctcgccttctccatctc

SEQ ID NO: 173419 - DNA, 306 bp, Zea Mays
ttgagaatgaggacgagcttaaggttatgtttggacccattgtctgcaccaatgaaacaacccttgttcctggagttgaggatgcaaattcttcatctgatgaccacgtgcaagccaatttaggtgggggtgaaaacagcacaccagacccctgctcaaatgcgatagggaagcgtaaggtgctgcatgattctcctaaacctaagaagaaaaaatatacgaaggatgaatacatgaaacgccttgtggaggcttttgagtcgcgttccatgaacactaacaagtccatagcatcttttgagaccg

SEQ ID NO: 173420 - DNA, 585 bp, Zea Mays
gacaatgtggaatacacgcagcgtccaagacactggtcgggaaggtcttcaggtcgggattctattggccaacggcaaaaagtgatgctgtcgagttagttcggaggtgcgaagcttgccagtacttgtcaaagcaacaacatctaccagcacagcaactgcagaccataccgatgacttggcccttcgcatgctgggggctagatatgattggacctttcaagaaagctcaaggaggatacacccacatgctggtagcaatcgacaaattcactaaatggatagagttcaaacccattgcttctttaacctcagctaaagccatggaattcatacaagacataatattcaggttcggaataccgaacagtatcataaccgacctgggatccaacttcacaagttcagagttcttcgatttctgcgagcaaaaaagcattcaggtcaagtacgcttcggtagcacacccgagagccaacgggcaggtcgaacgagctaatgggatgatattggaggcactcaggaaaaaggtcttcgataaaaatgaaaagttcgcaggaaagtggataagggaattgccctacg

SEQ ID NO: 173421 - DNA, 996 bp, Zea Mays
gacatgagccacccttgccaccctgctggcgtgggcgcttgccacgcgggttctggctcctagtcgtagtcgcagcgactggagcaccgagcaacgacttctcaccaccgtggttctttttcttattttccttgtcgttgccctgagcagcggcgcctgaggcacccatttgggtagccccgacttgtggggccgagtgccatgcacgaacggcagccctagcacacttgttggtcagagcaaagagcgtggtgataatggaagcgtcgtaccatggagtgataatggagtgatcgtgcatcatcagtttttccaacatcttctcatcacgtaccccctgtaggaaaggagtgataatggaagcgtcggaggtacgaggtatggttccccgtaccatggtgaagcgggagatgaaggctgtaatgcccaaaaatgtaaataatgaagatggagttgaatcatttatatgtttgcctctatttaatataacatgtgaataacctcattttaggtgagtaattagccaataatatataaaatatatcatgcaccatgctggagttgtttgtgtgtgtgtgtgcatttaccaaaaatatgatcacatcattgagaatcattaaggttcaaaatgagaatcaagacttaatttataagttagaaagggaaaataataaagaaaagaggagaaagaaaatactacataatacaaaataaacaagtgaatacataaattcccttcataatggtaaagaccaatttgtatatttaaaattggtacaaattcacagctaaatttaaatttaaatttagaatcaaggaaatataaaggaaaataaaagagaaaatacaaaaaatgagaaaaacctcgctcgggccaagtcaacctatcggtaccctgaatcaggggtaccccctactacagtataaagacgccgtgcggagaacggcacccgaccccaccacatgggcaggtctaggggtaccagcagtggcgac

SEQ ID NO: 173422 - DNA, 445 bp, Zea Mays
tgatgaacgaggttttgcgcccatttattggaaaatttgtggtggtttattttgatgatatcttgatctacaacacttgtttatctgaacatcttgaccatctacgtgctattttttatgctttgcgcgccgcgcgcttatttgctaaccttgacaaatgcaccttttgcatcgaacgcgtatcgtttcttggctatgttgtcactccacagggtattgaggttgatgaggccaaggtgcatgctattcagagttggccaacgccatcgacggtgacacaagtgcggagttttcttggacttgcaggattttatcgtcgtttcgtgaagtatttcagcaccatcgctgccccattacatgagttgaccaagaagggtgtttcatttaattgggggcagtcacaagaggattcttttgatcttttaaaagagaagcttactcacac

SEQ ID NO: 173423 - DNA, 658 bp, Zea Mays
gcttgggctaccatcacgagcaggaggattggagacaaattcagaaaagggcctatttggaggcaggttccacacagagtaagctaagggagcaccaacatttgagaccctacccctcagtaccatatccagtcgactcatcaagtcctcattgggaatctgtctgtttgtgactcgggtggaatcattgatgccggtatacaagtaagcagggtaaactctatccttcaaaggttgaatattcttgaagacaaagtcagcaaccacggcttcagcagccagacccctatcctccaatgagcagatctcagcgagcagcactttggcatcggctacctctaaaaaattgggagactctaccgagctaggcgtacgaaacgtctggttgcctccctgaccgagggggagagatttgtcgtgattctccacgatgaaccactcaagacgccatcccttaatgctgttgtcggtaccctgaatcaggggtaccctttactacagtatgaagacacggtgcccgtacggcgatccctagccgcacggtaaacagcacccattcccaccatgtggacggctcaaggagcaccacgtggcgagaaaagatgatacatcccaggatgtatcagttgggctggacctccgcgaggaagcaccggac

SEQ ID NO: 173424 - DNA, 378 bp, Zea Mays
gacacatcgcatcaccaaggcggtgttgacccgtcccttgtccaattaacaccatatctaggttccaatattttgggtcactaaaagtgtacaccccaacagattttctttggattttgcctccattagaatgactatgttaacgaggctcgccaagtttattacaatcctcctcgtttatcaaggcatgggacctactatgttgacacaacataggcagagttttaaactctaagaactctccacttgaaatatgctagattgtttgacttctttccccgggagtgtacttacactgaaattttctttcattcctaagtaacttttttggacctgtggttagtttcaaatatatttctggaattatctatgttctac

SEQ ID NO: 173425 - DNA, 1022 bp, Zea Mays
gatccagaaaagatacttccaactaatagcttgatctacagctgggaacaaaatacttttgataaaaccatcacaaagccaaacagaggaataagaatttaagaacattaaggcatcgactgtcagataatcagaattttgtatttgaacctttgggcattgttcctgatcagaatcaaacaactttatcaaggccattaaataaattaataacaaatgaagcaaacaaatatggattgttaaatcactttgatctgaaattagtgcaaagcaatgtgcaagtacatgcaggggaggatctacaacatgggccacccaagccgtggcccgaagcatggctcatgtaactccatttgctcccagcccgaaatgatcaagatgaaaggaaagagcgaaaataagtaggctcggcccaaggcatgagaaggttctagatccgcccacaactagttaccaaacttcggtaccatgtcacaatgaaccactagaaacttctaacaattcaaatgttggacatggaaaaacttggaaaaaaaagagcacactagggaacagaagattaaaaaaatacacagtatgtttagcaaactcacagccagggtcaccagactgtagcttttgctgtaaggaagttaagctctgcctgcataaattaccataatgtaaagacatgtgtaagcatataaggaggcacagggcacagcaatatccattaatcactgagtcaccatatatgtaagcatcctttagcttcttgaaagctcagcagtaaatctagtgctttttcaggatccttcaatgagataagtgtttctaccaacaaaaatggacatgtgcattagtctatcagggcgatgaaaaatgtccagaattaaaagaatagaacaccatcttacgttcttgtctcttgtagatattatctgaagtaagatggtgaagtagtagtgtgtcattatccacctcatccacgacagccagagcaatttctcttgacccctagatgagaaaaaaaattgaaaagc

SEQ ID NO: 173426 - DNA, 455 bp, Zea Mays
ctctccttcacttttatagttttatgtaatttacattgatgtttttacatttctagaattgacacgatacaatatggttggaacctagggtataagacattgtgcatagaatagaaatcacactaggggtaaaatgggctaaatgatagcctttaattgttatgattagcccaattaactttctcttgggcatcttaatctttttagaggtatattaataacttatgtcacaagctatgatacttaattgttatgattttgctcccactaattttgatgttctttaagaacataatcccttgtacttattaattcgtaatgtagataactcatttacttagaatccaaattcctatccttagctagattgtacttttgtcttgatgaggttatagtcaaatattcatcaatcggtatgagccagaatgataaaaaatgaggcatacgagtttcta

SEQ ID NO: 173427 - DNA, 731 bp, Zea Mays
cgggcgactgatctagcttcgctctgacccacaatggatacccccaatgtaagtaacatcaatgagctccaatctcttaaagcttacatagatgaatagcgagagcaaattacaacatatcatagggggtatacaaaaggattataaaaggctagtgcgtgcgtttgataaatctaccattgcaaattttcctttgcacgaggttgaattgggggaaaacacacgtgattcatcggccataggttgtcacgactagtcacaacccctttatgggatgccgacagacacgtaccctgggcaaccatagcttcccacgcacattggcgataaattcgcctatctgcacatgtccagaccgtccgcacgtgagcgggccagcgacggccggtcctatttttaatgaattattgagacatgcgccctagctgccatgtaatgcacaaaccctaaactacccagttggaccgtctgcatatagcgacggacggtccgtgtacgatcacggatggtccggccatatggccggacagtccgcgtacgcagccggacgatccgcgtatccgactggacagaccgacatagggctgtttgaggaggattgttacctaaatcctcatatgtcccagcaacacttctcgtcgcactatacaatgcaccaacccattaatacaacaccccaagcccatgggggcgagtattttctggctccgcctagaaggccggaaaggaat

SEQ ID NO: 173428 - DNA, 435 bp, Zea Mays
gaaattttggtcttctgagattccttcctattacgctgttaagtcgttatcctttgcctttttctattcccttgtcttggtatgcccgtatccttggaatcttgcatactcttgtattcttatgtatgctgattttcataccccaatgattgttcaagaccatttcagttaacatgcccttgaccacccttgtttcttaatgatccatgagcggtcattttattttgaacatccttggtggtctcgttgttcccatgtaacatccctcggtaatgaattttaacttcaaccattctgttgcaaccttacctatcttactcttgattgttttctccacttcgccacctagcgagtcttgcctgaactctatccttatgcttttcattattatcacctttacctttgacacctctatatcttacattgatgtttatc

SEQ ID NO: 173429 - DNA, 662 bp, Zea Mays
ctgaatagctctctgataagtcgctccagcgtttttgaggtcgaacaacatgaaggtattgcagaaggctccgaacagggtaatgaatgttgttttttcctcgtcttcttttgccaagctaatctgatgatacccggagtagcaatccaagaaagacaacacagaacatccggcggttgagtccaccacctggtctatcttaggaagtccgaagagatccttcgggcaatgtttgttgagatccgtatagtcgacgcacatgcgccaatccactttattctttttgagtacaagaacatggttggctaaccactcaggatgtaacacttctctaatgaatccggccacgaccaagcgagctagctcagcacggatggcttctctcttatcgggcgtgaagcgacgtaatttttgtcggatcggccttgcctgggggtagaccttcaatttgtgctcggccagttctctcgggactcccggcatatccgcaggttatcttgcaaaaactggacgagcgcgccttcctatttgtcatccaggctggaactgatgatagttgttttgcgttcgttggcgaacccaagattgattctcttggtttcttcagttggccatatagaagtcacggcttgagcttcattcgcgggtaccgccaggtcttc

SEQ ID NO: 173430 - DNA, 825 bp, Zea Mays
ctagtatcatagtcataaaaaaagcaaaactccatagtgctccatcaccgaagcagaatacatatgaacatgtagctattgtgctcaattgctacgtgtaaaggcaaccatgatggattttttgtttgaattgaggaagcacctctcctatatgacatggggaacatcatgatgattgtaagcaacctagtccaacactgaagaaccaagcacattgatacaagcgtaacatcaatattgaaagtattggcaccaatgagtagtgagacgacatcttctgatgtattctctatgtcctaatgtataggtttggaacctaggttgcaaacctcatttgcgatagagatatcaacacttagtcaaaacctttgttgcatgtatgaacaatcagttatctacataggttttgattaagagaaaaatagaggtcatagtttaaagagaaattagatttcctaattcaccctctcttacgcatcaacgttccctactctagtgtttgccattgatagtcgtccgaagatccatataatatgctacagaatctcttaatttagcttgaatctagcatgcccatcaacctcacaacactaggcacacttgatccaaaccaaccgatatgtttaggccaccgtatgggaagacctgaagcatccacaattttgctctagaaccacatacataatatttttaaatcaatcacatagataggcactttgaatagagagtttacatcaaggttaaacgaaagagtatagaatacatcagaagaataaaataatatacttgttgaagcaattaagttcttacatcaagatcacgtag

SEQ ID NO: 173431 - DNA, 500 bp, Zea Mays
cgccgcatcctgctctatctcattgccttccgcatttctctcgccccttccacctaacacgccccatccacatttctcttgtcaacccctaaaccctaaccatcgttggatttgggtcatcgccgacaaccttgatggtgaacataaggaggcaaacaagtcagaaaggtccacaacaagaagaaggttagccacatgcctaatacgggtagcacacctttatgcatacttatggttcactctgcctaattcttagttgctaactattaccaagctggatctaaccaaacctagtgatgctagatacatcattcattcatcgacacacatgtgagtgcatcactgtgtttataaaaatggcatggaagggccaatgatgcagcattccgcacactaggaaagctggtccccatccataactaccgtgagagacccaattaatctaacatgcatgcgaaagaaatcctcaacatagggtgtgtaattgattgattgcgtcc

SEQ ID NO: 173432 - DNA, 537 bp, Zea Mays
gcagaaactggtcgtcacctggtctagcacctgcgtccagccgccggccggagaagaagaagccgccggagatggtcaaagtcgttggccagagatggaggaaaggatggtcggagatggtggaaaggagtcaggcggatggacggatggcagatgggcaaaccctaactaactgccgcctatattcgtgagtggagagctagacgaaaaatgaggagcaaagaggacgagggatacttgacatgtgtttgtcgaattgccggctgtgttcggcaggccagggttgaagccaagccaggaaccaaaccagcccaagattgagtggatcctagactatcacttattctaggtcggcagcccactttcagcataggaattaatccggatagttggtcacctaagttcattctgggctaagaattgaggcagaggagttaaaaccagttagctttgtttctggcccaagacaaacgaacagctctagcaagctacatcagattctaaaccaggctgattggttctgcctagaatgaggtc

SEQ ID NO: 173433 - DNA, 1278 bp, Zea Mays
tcctactaatgctcttcggaaagaaatgtttaatggtatagtttcaaaaacattagctaccgtatcactctttttgcatactaaattataaagggaagggtattggactttaaagggttgattttctatccaaacatcttcccagaatctaatttgttttccctctttgagaataaaagacccaagacctagaaaggtatcctttaccttcataagtcctgaccagaaatgagagtcacctggcttcctggacacttgagatatggtcttatttcttagatatttctttgtcaaaagactttgccagagtcccgtcttcattaaacaacttaaaaagccatttgctaagcaggcacttattttggatctcaatgttttgaatacctaacccaccttgttctttaggttggcaaatgatatcccatttagctaacctgtattttttcctatgttcttccccttgccaaaaaaaatctagatcgatagtagtctattttttcgaggactcccttggggacctcaaaaaaagacaacataaacatcactagacttgtgagaaccgaattgattaatactagacgacctcccccgaacatcagctttcctttccagctacaaagcttcttctcaattttattctcaatgatcatcgagtccttattacccagtttcttaaaatgcatagagatacctaagtatctaaaaggataaatcccacttctacacccaaacagttgaaggtaactatcctcttcatcctttgcatggccaaagcagaaaagctcactcttgtggtaatttatcttaagacccgaaacttgttcgaacgccgctaataagagcctcaagttggatgctttggcaaaatcatggtccagaaaaagaatagtatcgtccgcatactgcagaatagataagcccccttctactaaatgaggaataagcccatcaaattgaccatcctcttttgctctattgattaatatagctagcatgtcagcaactatattaaatagaactggggataagggatctccctgccgcaagcctttgtgagttaggaaattcgctccaacctgatcatttacctttatgcctacatgacccctatcattatagacgtaatccagttgcaccattccaaggagaagcccttcatatgaaggttctgctggacaaaagaccatttggccttatcatacgctttctcaaaatcaattttgagaatgactccgctttgcttttttctatgcaactcatgaattgtttcatgcaaaa

SEQ ID NO: 173434 - DNA, 443 bp, Zea Mays
gtagtaaggtaatgtaatgtaatgtagtgacaagggtagaagaagttgactcataatgagtcggctttgagtttgtgttactccctctattatgaatcaaggatgtagtagctccaaataatcactgtcgttttgcttttcacttgcactcttgaaagtttgtccatgcgcttgacagtgctcgcattttagaggtaatgtccgagtgacgactgaggcttttacttttccgagtggtgatctagcactttagaggtaatgcctgacccaaggagcccatttatactcgtgccgacgtgcatttttgatttccgagccctaacttcactttttcctctgccgcttctttgcttttctgaattcctgagcccgcttgttccgcccgagagattgcaacggctcccaagcggaagaggcagagcatcgttgctccgatcatcccg

SEQ ID NO: 173435 - DNA, 874 bp, Zea Mays
aagctcaacaaaggatgaagttaaggtaagacaagacttgcaaagcgacaaagggaaaggaaacgaacaagagcaggatagggaaaataacactctcggattgaatggaataagtgaggctaagaaataggtaaacatcatggtaaatatggagagaggtcaagggtcaaaggtgataataggcaaggatataaaggaagaggtaaatgtgcataaaaacaaggaatctaggtacaaccaagaatagagataagataagtcttgcaagaggtaaagtataggatataaccacgggtgagataagtaagagaccacgcttgaactaaggtgggagattggaggttttagataacgaacatagcgtactcaccaaggtaagattgagagatgagaatggtaaaggcaataagaagcaaaagcacaacaaaggatgaggttacaaactcgcgagccaaagaagaggatatgaccaagagaaagaaggtatgagacggaagaggggcgattttaaagggcaggtatgagacaaacatcaatgtaggatatagaggtgtcaagggtgcatatgataataattaaaagcataacaaaggatatagttaaggcaacactcgtgaaacgacaaagtggagaaaacaatcaagggtaagataggtaaggttccaacataagagttgaagtaaagattcattaccgagtggagttacaaggagacaacgagatcaccaaggatatgcaaagtagaatgaccgctcatggatcattaagaaacaagggtggtcaagggcatgttaactgaaatgtctcaaacagatattgggatataaaggtaagcatatataaaaataagagtatgcaagattccaatggtacg

SEQ ID NO: 173436 - DNA, 416 bp, Zea Mays
gcgcctctcccggaagctggtacaaccttggatattcataggcctgtcagtgttcgcccgaaacgcccttgccgagccaatcaacctgattctcctgctgatgagcagaaaaagaaaaagagacgtcttcggcgagtatctagtttggatcgggatgttggtccttcggttcctgctgctgaggaagtgcctgtgcctaaatttactgacgctgaccccaatgggtgtgatccatctatcgctgatcccaatgggtgtgctccatctgtcgctgaacccaatgggggtgctgtctgtgttgctgatgaaaacgagggggaggaagaagatgaagtccctttgactcggaagaacagtcagcaatatgttgccagtggggaaagtagtggagttccttctcctgctctgtctgccct

SEQ ID NO: 173437 - DNA, 393 bp, Zea Mays
atcctcactttcattgtaatcatcatcatcattaccctgactgtcaaggtatcctttggttccttcagaacttttcccaatcttcatactatcagactgttcagacaaggacccagctacattgacatgacttgaagaaacctttaagggagattttcccttaacatctctaccagattcttcatcaccacttttggcttttttaacagatttcttaaaagagaggtcaccaaatccttgtctatcaacagaagccctcttgcccaggttaatagactcatcattccacccttcatcagtaatattatcaattttaaagaagatgtcatacagaaaaggtttgacaccaacttcaatgatagggggaatcatggccacactcttaacatgaac

SEQ ID NO: 173438 - DNA, 362 bp, Zea Mays
gccgcgtggggtccaccagtcattgtatcacgtgcgcgtttagtctctgcctcgcgggccctatcggccagctcctgctatcgcgcgcggaccttctcctatctctgacaatccggcccgccttgtcagcacctccttcctcctcgaccgcgaactggaaaccaaatagtgcgcgctcgcgcgggaccgttgaaaccgctcgtcgaaatccatggcctgcgcatgtcgatacgacccggtcgtcttccctgcgtcgtgcgccgttgctggctgtggacccgctcttgtagggctgtctcaccctcaactaccgtgcgatgtgagctccgcggagctcggaaccgaaatcgacctgtgcgccg

SEQ ID NO: 173439 - DNA, 400 bp, Zea Mays
tcgacgtcttcagcatgagccatctgcagcaacagcacactcatttagcaaaaccacacatacccacacatacaaccacacaaaaaacaacctttacctgctctatcgcccggtcggaccgatccttgaccgcctctcggccgtgcggaccccacatcctatcaaagagtgcccccgccaactgcttcaccacagggtcttcgaccttgaagatttcacgttcaaagttttcgtccacttggtcgaagacctcgtaatgcctgcacccctcgcgggacaaagcattcatggccccctcgtaggtgacgagggaggcaaaggacatgaaacctgtcacaatggtcgggagcaccagcagctcctcctgcaaccattcaaggaagcgaaggcccgcttcttg

SEQ ID NO: 173440 - DNA, 742 bp, Zea Mays
gacaactttcctttaactttaaatcttctcataccccggattggtgacaccttcagatacacgtgatcaccctccttaaactccagtagtcttctccaggtatcagcattgctcttctgccttgattgtgcaattctcaaattctctcttatcattcgcacttgttcttctgcctcttgtataagttcaggcccaaagaactgcctttcaccagtttgatcccaatatagtggagtcctgcattttctgccatatagagcctcaaacggtgatatcttcaaactggcctgatagctataattgtatgagaactccgcatatgtaagctcttatcccaactgccaccatgtttaagagcacaagctcttaacatatcctccagcacttggttagtcctctcggtctgcccatcagtttgaggatggtaggccgaactaaaatttaactatgtatccaagctctcatgcaacttcttccaaaaccgagaggtaaactgtgatcctcggtctgacacgatcttcttaggcaccccatgtagacaaactatccgagtcatatacaattctgctagcttggctcccgtgtaattagtcctcaccggtatgaaatgagccactttcgtcagtctgtccacaatcacccaaatagagtcataccctgcaggagtgcggggtagcccaacaatgaaatccataccaaattcttcccatttccactcgggtatctttagcgggtgcagtag

SEQ ID NO: 173441 - DNA, 542 bp, Zea Mays
cgtgtgcttgccacgggtccttggcgatcattttattgtatctccattcgaagttgagcgtgtattgtttcgccagagctaggccagttggaaacgagataaagatggttggtggccttccgatgcaaagcatggacgacatatacatagtggatggttgttgttcaaggcatttagttcattagctcatctatttctggtagctagatcagaatttaccaccgctcgtgcatgacacaagacgatactggacaccgatcaactcatgcgtggctcatgcatgctgcattatgaatccctcgatgacctctgtttgataattgttgaggcacgttttcttctctatcagattattgtgcaaaagccagagacatctttatggttctatatgtccatgaattgtatgtttaatgcgtgtgcctaagagaaaataaaaaacataggttcagtggaacatgttgtgagtctttaaaaccggcaggcataccgtgtgtttatatggagtcaatgtcttaagttataagtcatcgaggttgttacac

SEQ ID NO: 173442 - DNA, 562 bp, Zea Mays
aaatgacaaaacaaacagagattctaacaagtttgctactagcatgtacacagtaattttacagacagaagaagcacagatcttacaaacataaaaatagaaagcacagcggatttaaaattctacatcaaatagcgtgctccaagtgcttagaaacatcggcagtgcttaatttataattcttgagttataggaatcgtcgtgcaattaagagggatctgtaatggttaagtaagttatgcaatgagctaagttcaaaatcctttgaaaacatcttcgagaacatttttccagatcatgaatgcccttgagaaaaaccatttttacttcccacaaaaactccatctttgttctctttaaaatattcaaaacttggttttcagccctggaaaccggttcaaccggtcctgaaaccggttcaaccgattttgggactgctcctctgccatccctgctctgacctgtctgacagtcagagctgtcagaaaagtcgttgcagatcttttgggaaaaccggttcaaccggattttttccctactcaaccggttttgaatccggtcg

SEQ ID NO: 173443 - DNA, 551 bp, Zea Mays
ctcatatgtaaaaaggactagtgaaggggtatgggaggctcttgtccacccgattgacaaccgacggcgctgattaaaccgaactcgccccctatcggtgtcgcgccgattccgcccgatctagaatctacggccatgatttaaaacatctatgacctattcttctccgttcgattcccccacaacgacccaaatccactcacgcgaaatggtatcccactgtctaatcttagttgttcaacaaagatcgaatagcccaggttcgtcttctacctcccccgccctcactaacagcaacgatgagaccaacagcgacggcgcatcaccgttgcgctcaattaccgtcgtacagcacccaaaactcaaatccactggtgctacgccatcctatggcacgagtatgtatggtgcagggtctactcatcgggaaaccacgacgaacgaagctacccgcggcgcaaggtggaaatccggcgaagacacaactacggcgaagaattccctctgcaccatggtctgcacactcgattccttcctggcgcacgatccac

SEQ ID NO: 173444 - DNA, 553 bp, Zea Mays
cgtgtacccatcggagatggatcacgtacgcgtagaccacacgtacaaatataatcattccgacccagtacgtgcaggcgatggatggatcgccagcatatatgcatgcatggacggcgacggcggatcggaacgacgcaaggggcagggggcatgcactgctgctacgtggtgccatgcacatcagcgagcatcgcatctgcacatacacaaaaacgagctcgcgtcccgtccgtccgtccgtcgctgacgaacgacatggccgtgtgttaggtctcacgtccattcgtgaaagctccaacgacgacatgatggccagtacacgcacactgtgcctgctttttctgtcatgctgtgtatagtattagtagtagaagcagaaggccgctgtcagcatgcgacgagcagccctcatcagctatagctgctactgtaattaagtgatgctaccacacgcacatatatacatacatatcctgagttttccgaggtctatagcgtgatcaaaatttgtggtccctcgcattagtcattttaattacacacttgtttt

SEQ ID NO: 173445 - DNA, 817 bp, Zea Mays
ggctcgacagcggtgcgaaggcaacggtgaataattcccggccagtagatgcgttgatacctactgcgggtggtgcaagacgaggctaagatgagggcgaatctcacggagcggttgccaccgattgttggagctgtgaagtggcctgaccacgcaccaccacggcggtagccacgccttgtcgagccgttccggtcaccttggccctgattccacctagtcggcgtcacgagcgacttcctggaaactcggagaagtgcccagaatggtccccgaggacccgtcgacaccggtggcccaattcccccggttgtgggttcctccttgtttaccagtcatcgacgaggtcacgaacgaggcgtcgatgatgtggatccggggtaatgggtttggttttatagtgctatggccggagtccaatcggtggtgcccggccggtaagatttcagtggattcggcgtgattccctcaatggtcatctgttgcagcatttccgcaaacacaatgagtgcacgatcatgttccagcctgatgtgcgggaaggggggtagacctgacgacgcggccccacacggcagtgagcacggtggctatagggaatgacctgcgggaccagacaatcggcgcggggtgtgtgactgcggagtggggctggtcggtcagcgataccgggcgagcagcagcacgccctgcacgaagttgggtcgcgcggcttagttaggtggccgtggaaagtaaatcggcccaggcaccagtttattcatttcctttacttttctattttaatttctttcatattttcaatttctatttcaaa

SEQ ID NO: 173446 - DNA, 975 bp, Zea Mays
ggggtcgatcacttatgacgggtcgatctcgggccaggcgagggatccactcgagtggtttccctttggtttgcttggccctccttgtctggcttcgccacgcttgaccccgggctcagtgccacggggttcgtctgtgggtgcttctagggtagacgtttcctttctcctcatgctgaatgatggcccccggttgccagaggattcctcccagcgccctcgctgactgacaggccctacggggcggtgatcttatcctcgacaagcttaaagaaggggatcgctctctcagccagcctcgatatgaaacgactaagggcgaccaatgatcccgtcagcttctgtatgtccttgatgtgggcgggaggccccattgcctcgattgccctgatcttgttcgtgttcgcctcgatgccctagtgtgaaacttagaatcctagaagcttcccagcagagatgtcaaacacacacttctaagggttcaacttcatgagcgtggcgcgcaacctatcaaagataagggaagtcttccacaagggtcgacccccttctagtcttgactacgatgtcatcgacatacacctctactatgtccctaatcaggtcgctgaatgtcttacacatggctcgcgcaaatgttagcaaggcattttcaaaccgtagggcatgaaaacacaacaataaagaccatccactattacaaaagtggtatgcttcctatcctccctagatctggcggaacccaaaataagcatataagaaagacaacaagtcgcactgagaggtggagtccacgatttgatttattcgtggaattggatacaggtccttggacatgccttatttaggctagtgtagtcgatacacatcctaagtgatgtgcacctgttgggtgattgcccgatctttcgatgagagggtgtggaataactcgattggggaggagacgatgatcacggcccgactacagccttc

SEQ ID NO: 173447 - DNA, 445 bp, Zea Mays
cgagcaagcgcagcgcgacgtatgcgaacggtggacgagcgggtgcaagaactggagatttccttactattaaagtcggatggaaacaacaccgatcggcctatcaacgtcgctccaaaaaatcatggccgttcgatcgagcatcaaacgttgcggtgaacagtcgtcttcctcctactgcaacaagcatcccacgtggtcgtcatcctagaaacatcacgaactcgcttcagacagaaagaagacccgtcggattttatgtgtggcctgcctcggcgcctcgctgctcgccgcagtcccgcatccattccagtccccctcctcttcgcctcgcccctcgcctcctacggcctcactgctcgtcgcggccctagacattagctcgcctccatcccggcctccctcccctttgcacctcgcctcctcctcgacgcttgtacctctg

SEQ ID NO: 173448 - DNA, 1148 bp, Zea Mays
taaatattcaatttctaattcatttataccatttaaataggctctggattgggcctcaaatactgtgaagcgcaggggctctagtgaaaaagagtccaagactcaggctatcactggactggaccgcgggttaattgcctaaaaacttaaggtctcttctgcaaaatgtgcaagccgaaggggtacggaaggatcgtggccgctagattagatttaaacagcccggattaaatcgcaactcatgtgaaccggtgtgcgatctcaaccactggatcccccatcaacggagtagattttaagtgactaaatccgctctaggtcacccgatcacggatcgacggctacgattcaactgaacgaaggggtatgatgtaatctaatcctagccgtccaagaaccgatcgacgacgtctggtccatcttctacccccagcgcgacagagcggtggcatggcatagaccgcggtggccatcaccggcgagcccgactaattcgcgcggacggatcccgacgaccatcccgaagacctctaaacacgacattggatcaacacgaatattacggtgcattattacctgtcggtgtgcagaggagagctccaatcgcggcgaggggcggagaggggaggtcgagaccgcgttggcgagaaattcgcagtgcactattgtactccgcaccaatctactcgcccagccacggcgcagagtgcaaaccgacccactagacaccagataggagcccaagcgaggaggtagaacaaggtcgacggtggcggcgaatctcccatggcggcagccctctcttcaatctgtggcctccgctggaactagcagcgaacgcgggatttcaggtcagctaaatcggggacgacaagggggagttcgtgatggcacaacctatatggtcatgggttagcgccgtgatttgagccacgaagcccgagtccgcggagcgattccgccattgtcgggcgaatcggttcagcgtctgacggcccggacccacgacgcagagaagcaagcgcgagggaggcaacgcgcgcgcatgggaggctgactaggcggtcccgccagcagcgacccggaatggtgcgttcgcgagaggctagcatctggccagtgggccccatctctcggcgcaaagaaca

SEQ ID NO: 173449 - DNA, 620 bp, Zea Mays
gccctcagcactttcctcgcaccgtgcgcacgccccggggagttccgccgtcgttcgctatgaccgcgtgcccattccactgccaccgttgggagctcgacgcgtctattgcctcagtaagctccaccatgtcacccacagctcgggacgccctttggttcaccctcatcccctctggttcgtctggtccacgctcactggttcactgccgtagctccgccgccgtcgacccgtgtcctcaccatgcccccgttcgtgtgttcctgagacttacctcaaggtaaccgtcctagccccaaccttattttcccctatcttgcatttactcgcccgtgattgctcgccggagtgttccccgacccgtcgtggactcccctccgccgtccggtcacctcagtcccattcacacaaacccgaccccaccatagtgctcgccaagtcctccccaacctctctagctatccggaccgacctctcgcgccctaggagccccgatctgcctcgcctccggcgacggcgccgccgtgtccgcagggagcaccgcccctggctacccagcgaagtaaaagtcccctagcgcgcatcctgtccgtacaactttaatcggacgacccgatttc

SEQ ID NO: 173450 - DNA, 657 bp, Zea Mays
aagcgaggggacaactttcctttaactttaaatctcctcataccccggatcggtgacaccttcagatacacatgatcaccctccttaaactctagcagccttcttctattatcagcgtagctcttttgcctagtttgagctaccctcaaattctcccgaattatacgaacttgttcttctgcctcttgaataagtttaggcccaaagaactgtctttctccagtctgatcccaatatagaggagtcctgcacttcctgccatataaagcctcaaatggtgacatcttcagactagcctggtaactattattataggagaactccgcatatggtaagctcttatcccaactaccatcatgtttaagagcacaagctcttaacatatcctctagcacttggttagtcatctcggtctacccatcagtttgaggatggtaggccgaactaaaattcaactgtgtatccaagctctcatgcaacttcttccaaaaccgagaagtaaactgtgatcctcggtctgacacgatcttcttaggcactctatgtagacaaactatccgagtcatatacaattctgctagcttggctcccgtgtaattagtcctcataggtatgaaatgagccactttcgttagtctatccacaatcacccaaata

SEQ ID NO: 173451 - DNA, 622 bp, Zea Mays
gtcatggtgccgccacaaccgtccccaggtctcctgtcgcccggtccaaggttagtgcctccctcgatccgctttaatccccgtgccgtatgggaccaaccggtagcaggtcctggctcggtagcgtaggtttgggcggctctgcaatggcgccaccgtcgcgcaggtgtgcgcgccgctgcatgtggctagccggatgaagacgaagcccttggaccgtcgatcgtgtaggaacagctgggatagattaggttgtgtccattagatcgggatcgaatgcacaatagtctatctcggcattttaaatcccggtcgttgattgtttgatcgacggctctgggcgcgtaccgtctcgatgttaggataatgtaatctgggccgtaggacctgatctgaacggctagatttagacgataccctttcgccgtgcgcattttgcagagaagcccctccatttttaagaaaccaacccgcagtccatatctcagtgttctgtgtctcggtaggtttagcgtcgaggaccctgcgctctttaataattgtccacccagtccagagagttggaaaatcagagaaaatatattagaaatggatttttagtgcaaaaataaatactagaatt

SEQ ID NO: 173452 - DNA, 469 bp, Zea Mays
cacggtaacatccacgaattgcttgcgccagtagctccttccctcttcgaccgccaccgcgccatctcaaattcacgggccaccgctcagggatcctataaattgagcatgccgtcggctccgctaggtagtaaagcacccaatccatcaactcgtgcctcaaatcatccatcagagctcgccaatttgaaacttcccccaaatcggttttccgccgctgtgaaaaggctctcaccgtggccagtgcgcttcaggtccgttcatgctctctgttcactcgtttcagtacactgatgtgcccttgatactccctgacccggccgattaacctagaacccataggatcacggagaacgcgtcgaattgtccgttaatcgcatgggcatcgtggacggagagaatgaggcctcgaaccttgaaattagttgaggggaaatgattgttaggggttaaattaagtgtcagccaa

SEQ ID NO: 173453 - DNA, 481 bp, Zea Mays
gggatggctattaggatagccgaggtagcttctccttcagccgcgaaatgaacttaaatgtctcctctgcttttacttgttgataaatatcattccttgataccctgtcgggatggaatttcagaagagcttgcttgaaggctttaacctgaaaaagataagtaatgtcatcaaattaactactccctctatctcaaattagtatttgttttaactcttggttttatgtctatattcatatggatgaagatgaatctagacacatacaaaactcctaaaacgaattttaatttgggacagaggagtattatgttacaggcattcctaaatctcttctatgtgccgagcagaaagcttataaattagtctctggaaaaaaaattgagttcattgaaccagaacacgggtttataaggtacaggtagccactgatcttcactacccaaaagttgagttcattgaataaatttagcccaacaat

SEQ ID NO: 173454 - DNA, 853 bp, Zea Mays
gtttacattatgctgacatttttgtcaataaaagaaaagatgcatagaaaaaacaaagagcaatcttcttttcggcggttggcattagttttccatgacttccccattgctgctgcgttggaagaatagacaaatacctcatcccacccacgaagggaacatgtcaatatcttaatcttgtggcactgtggggtttaagtggcacagtgctctgtaactcgcggttcaaagtgagttaaggctaaacatcgtatttttttacaaaattacactgggtgaacgtacacatgtaaactctaactatgagcattttcgaaaactgggtcatcgacgaagtggttaatattagaatattagctctcacggagagtcgaacctatacatacaattctacaaatatcatattctaaccacagatgaaaagatcctgcgcattaatgttgcagcggcgagtcaaacgcctaatcttctcacacgcacgagtgcgtccaactaacaatgcattaaagcatccaaagcatccttcaaaaactaaaagaagcgttaagcttaaggacttgtttaacctattagtttgaagatagtggactcagagtgcaggcatcacattaatcttccttttaatgctagtacgaacccaggagtagactactgcaagaaactgacacgttgttagagggaacaaagcattaacccagttgcttgaagatactgccattgaacatcatagcccaacttgaataaacaacacagagtttggagcctccataataccaccacaagtgtcattagttcaagctacagttctaatgtcaacccataggaccactctcgattttattcaatttttttt

SEQ ID NO: 173455 - DNA, 657 bp, Zea Mays
tccgcctcacctgcaccacctgtatggctgcgcttccggagtgtctgggcttccatgtgcaccgccgtgcgctagacctcgttgcgacagtcggcaactcatgtcaatggtggtggaccgccagccaccggatgcctgcaggagcaggagtgccagtgtctggatctgggcggggaacgaacggggagaggaaagagtggagagtggctatcactggtcatcagcttccacatcatcaaccgaattacactcaccagtcatcatcttccaggtcttcaggctcctgcagttctagcagatgcagaccgccttcaagtatatagtttgtaccattatctatcacctcgacaggtttagcatccacatcaacccattcaacagtgcaatgaacttgttaccaagtaatgtcaatccactgccatcatagacaggtttagcatccacatcaacccattgattgttccaatcaaaatcatctaaacacaaacgataaaaagctacctgcccctttctcatgaccctttttgcaaacctcattgccatccttaagttgtacagaacacacgccagatcattcggcctcttgaatggcaaaaatgtaaaccaataaatttttcagcaaacagggatatatttgatgtagtagttgaactccaa

SEQ ID NO: 173456 - DNA, 803 bp, Zea Mays
gtggtttttgctgaatgagtgtgctatggctgcagatggcgcatgccgaagacgtcgaggaccttgttggtttggacggcgcgctgcccgaggccgcggaggtcgatctggtgccgccctcggatgccggtgaaggcccctcggcgacccctgcgctcgctgcgaccggcgaagaccccgcaccggctcctgcgccgacgagcgaaggcaccctgaaggtggtggtcgagcctgctgctgagccggcagccgagaaccccacagccgtggctgggccttcgcaggtggctaaataagtgttgaggagtttggaaattttgtctgtgtgatactgaacctcggttgcagcgcaggttcttgggtttgggcctgcgcacgcaaccgctactgacaatgctatttttgtggcggcttcgaccgtggctgctgatgacgattcgtttggctctgtgtctaagtgttttgagtctgatgattctgggagttcgattgtgtggacggaggagtcttcagatgaggacttagattattttgcggcgttggacgtggctgcggcggagacttcgccgcgtgtggtgggtgctgaggatcttccgggtgcgagtactgggtgtaggcgacggagggctgtggcgaaacggagagtgagtgaattgtcacgaagtaacaaacgtcattgtggtgagatggagagtggtcgtctgcgtggacgggcctggtaagcgggaattgttgtcatcgccggctggggctagtgtgggtgaaggggagctgcgaaatctttttgagggtgaggaattgag

SEQ ID NO: 173457 - DNA, 1131 bp, Zea Mays
atcctgcacgggaaaacaaatacctttttaggcaagccatatcagcaagtttactatgaagaaacacaagaatagcaacattttctgtggttatgtcatggtcgggcgcacgtatgtgaggcgacgtcgtgcccgtgacgtgcgccgcgccctagagcaagcagcggccatgcaggacagctaagggataggataggatagcctgctgttatccagtcccttagattgtggagttgctgttattcagttccttagattagggagttccttagattatggagtttgttgctcctttcggttgggcctctggccatataaaactgtaaccgcaaaggagataaatcaatcaagtattattagcctatctcctctcccttcctctctaggtcggcaaccagggggtataacccggttgacaatagtcggcgacggcgtgggggaaataaccctgccggcgacgacggatcgcgactacgaactacgtagccggggtcctgctgccttgggtaccactgcccttgacaacctggtatcagaggtcacgccgatcctcccccacccgccccagccgctcctccaccgcagctgctgccatcgctagcccaccatccactgcctcagacaccaacagcaacaccatggcagaaccctccctcgccgagatcatggcacagctgaagtccctcaccgcggagatgacgaccttgaagtcagacatggcggccatcaaggacacgtcttcatcctccggcggcaacgttgctgcccgacgtgcggaaggcctacgtgatcaagacttccaccacaaacatagaaagtgggattttcctcgcttcgacggtacgaccgatcccatgctcttcctccacaaatgcgacgcctatttccaccaacacagaactatggcggaggagcgcgtggcactggcgtcgtactacctggacgacgtcgcccagatgtggtttacccaactgcaggatgacgacggcacaccaacatggggacgtttcaaggatctcctgaacctgcgattcggacctcccctccgttctgctccgatgttcgaactctcggagtgccgccgcacgagcaccgtggagtactcaaatcgtttccaagcccttcttccgc

SEQ ID NO: 173458 - DNA, 824 bp, Zea Mays
gttttggatggtcttcgggctcggcgtcagctgccttacgctcactatctgtgtcacatatttgctcagctgatccggcctcctcagttctaggccacccttgaggcctccagactgcagtttggtttctattgcctagctcttgaggacacatttccagctctagctccatcatcagatattagggttgaggatgaggccatcagacaatttgaggatcagggtgcagttgcagatacttcttccgatgatgatgaagatctggggattccgccaccacctcctgtgccatctcattcatgatcacgcggctggtagctccagtgctgctcctccgtctgctcctccagcgattgaccccgctctggctgccattctctagtcactcactcagcagtaggctcatttgaccgcagagcagactaggcaggcagctattcagcaacaaatgtctgagcggatgctatcgatgtttcagactattcgcagacagggcagagcacatggcgttcatgactcacattctccagcacaccggtgttctgatccctccagtgcagtctgctcctcctctagctcttcaggttggtgttgtgtcagctattcagttaggaccccagctccactcttttggtacgtccatctctccgcttaggccggtcactctggacttctcgacctaggtcatcggacctgtcagcgctcagccaccagtgccatcagcgtctactattaccactgcgaccgtggttgtttcgtgactgctccagctccggtagatactgcaccacagccagcgtcagagtcagcactagctccaccct

SEQ ID NO: 173459 - DNA, 1219 bp, Zea Mays
tagaataataccgcacacctattacaggtggggtgacttcattatatagcctgataggctagggttacattagggttacaatgtacatgggccaatgggctaggcgccccacatgggctgtcatagatacattccaacaccctccctcagtctaatcgggagtgttacgaacgcaaagactagacctaaaatcagtaaataactgtacaggtaaccctttggtcataatatcagcaaactaaagtgacgatggaacacggagcacccggacctgtcccaaagcaaccttctctcgtacgaagtggatgacaatttcaatatgcttcgtgcgacgatgatggacggggttggcagtcatatagacagcattgacgttgtcacaaaagacgattgtcgccgaagagatgggtgcatgaagctcctggagtagctgacgaagccaacaagtctcagccacagcgtgcgcaacagcacgatactcagcctccatgctcgaacgagaaaccgtagtctgtcgtttggaggaccatgagactaagttgtcgccgaggaagacacagtaccctaaagtggagcgctgagagtctggacagcccgcccaatcagcgtcggagtaggcagacaaacctgtaatgctgcaggtgccgatgtgaagtccagtggagagggtacccttgacataccgcaggacccgcttgagcagggccaaatgaggctcgcatggatcgtgcatgaataggcacacctgctgaacggcataggcgagatccggccgagtcagcgtgagatactgtagagctccggcgagtctgcggtattgggtggcatcggccaccggggcgccatccgtagcggacagcttggcttgagtgtcaacaggagtcgtcgtagggtgacactcagccatgccggcgtgttggagcaggtccgcagcatactgacgctgggagaggaagaggccgtccttggaacgcgtgacagagatcccaaggaagtggtaaaggtccccgagatctgtcatggcgaactcagagtgaagaagctcggtgaggcaacgaagaagctaggtcatcgaggttgtcaggatgatgttgtcgacgtagagtagcaagtaggcgatgtcaacaccctttttgtagacaaaaagggacgtgtccgaagctgacgcagtgaagccagatcactgtatgaagctggagaagcgctggtgccaagcccc

SEQ ID NO: 173460 - DNA, 276 bp, Zea Mays
agaacaaccaagtgggcatgtgaactcggagctcacgatatagagttccgactttgcacggcgataaagactgaggcactggtcgattttgtatcagagtggactaagcactaagtcccagaaagcccagaagtcgctgaaatatggagaatgtaatttgatggctcgctgagactacaagaagcaggggtagggattctcttcatcactcttggaggtgagcaactcaagtatgcactccagctcatatttccagcatctaacaatgccgcagag

SEQ ID NO: 173461 - DNA, 545 bp, Zea Mays
gggagattttgaggatgaagaaaacaagtaccaccggccatggtggtgccctgatggtctcagtcatacccaaaaacatagagtacagcgactacgaaacctagaagaagccgaggccaaataccttgaagtacataggaaggcgcacccaaatttgctagtaaaagtatggtgccccaggagggcagagcagcgctctcagaagaaggaatggtgtcccaaacaacaggaagctgatgcggaggtcgatgaggaggccgatgagacaccattggctagtataaacatggtatttgtgctccctctagaattttcacgcaccaaagcctaaagatttatttgtggctcgaattgatctcggcccacaaccagttgtgttcaaaaagtcaccagagaaaggttatagacatatgaaggccttgtacctcaaggagtatatcaatggcaaacccctcaacagaatgatggtggacaacagagtagcagtaaacatcatgccatactccatgctacgccgtttggggcggtctactgaggatttaatc

SEQ ID NO: 173462 - DNA, 525 bp, Zea Mays
tgaagatacaggaaaaaaagatcgtcattctcatttggtggaaggtgcttctccaaaggtatatatattttgttgtatgagcccataactgtttactggtatgactatgagcgcataattgtttattgctatgagctgcactgtttacttatatatattttgcttcaacctgtgtatgttggacagtgacaggatagctagataataagtgtgtctgtgtgcaaccggtgttgcctgtgtgtttgtgcatatccatgtccccctttggcgttggtgatctccctgtctccctgtgtgcaagtgcaacactggaagtctacaatcggtgctggcgtgctacactgctgcctgtgtcgactgtgtctttgtctgtgtgtgcatgagccatatccctgtctctatttggcgttggcgtcttgggctcttggatcttggcgaattgagattggcgatgtccctgtctccctgtgagtgtgtgcaaccggtaatagcagtagcactactgcagagaacctgaatgtattt

SEQ ID NO: 173463 - DNA, 371 bp, Zea Mays
atgttggcaatcagcccagatgcctctccaaagcagtcaaggatcaacttggtacaaaccagatcatcatccagaggcttgacaaagagaactacatcatctgcgtacatggagagcctggacctgacatttgcagcccccaagctatgcagcagccctctagattccgcatgcctgaataagctgccaagcacgtccatcacaatgataaaaagcataggggacaaaggatccccctgacgcaaacctcgccgatgccaaatatgatcacctgggaccccattgagaagaacatgcgtagaggaagaggccaataggttagagattaagttgcaccatttcagaccaaagccaagatgggacaacacctc

SEQ ID NO: 173464 - DNA, 728 bp, Zea Mays
agacgcggagggctattggcaactactcacccaagcggcaaaccactttctcccctcgctcacccgccgaatgatctacaccacgccatcaacagttggcgagacgcacggagcaacatctatgctttgtgtgatcgttggcatgaggaagagatgaggcggcaagaagagtatgaccgggatcatggtgcgccggcacacagccgtgccaccaggatcgagtcagcaacagcctccaccaacagtccggctcgagtcgatcgacgcgaaacaacgcccaacatgacttgcctcccaggaccatcaacgtgatcatcaccgagaggaccgggggacatgtggagtctctgcccttacccccggcttcgagcgatccaatggtcgccaaacttcaaggtctccaacgtcgacaagtacgaacctaagaaagactcgggcggctggctagccgtctacacgacctctgcccgagccgctggggcgacgaaagaatcatgacagcgtacctgcccattgtcctggggtaggacgcactgcaatggctccgacatctacctcgacattgcatcgatgactgggacaatttagccattgatttgtagcaaactttcaatgcctttccgacaaatcgacgcaaccctaggacctcaagtccatcaagcgccaaagggacgttgccctccactcgttccttaggcatttttagacaatgaggaaccgcatccccg

SEQ ID NO: 173465 - DNA, 969 bp, Zea Mays
tgaatgtataaacaccatctcttgaacttgcaagattttggtcatactcgcagttgaatgtggtgaatgaaaagtgaccattaaaaaatctagtgttatccaaaaaatgttgtgaatcagcgtccctagttgtgtacaacaagtgaagctcttcgggtggatgtggcatcacaagtttgacctttccctgtttgcaacagaaaccaggagactcgtactggaacctttttgctccacaatgtggacaatctgactgaggttgcaacatttgtgtggcgtcaggtaggtttctatatacaacatcgatggtaccaaaatcatctgaggccacgaccgaattctgataggtaatgtttcctccctcaagattatcaaggttacgttgatctcttcttctggcatatcgctctcgagcgcgtgcccgtgtattctcgagctgttcagctgtcatactcgcacgtcttgctcgatattgttgtcgacgtgcttctgcgcggtctactgatgcgttaataatcattttaattggtatgggaatcattaagaaaggaatggtaagtagcatatattgtgtcgtaccagctatgtttgcttggacgggatatgttggagcaaagtgtgaaggttcaagtaagcaactattgttggtcgcactgacatctagtaataataacaagtcaaattattattaaatcaattgcatgtaagttatgcttgaaccttgtatacaagtgtaatctggtaagatttaccattgtttggttcgccatgaggtggtgtatcgcctaacggttggtctcttttacgtctcctttgttctggcgtcatattcacataccgttctctagcacgggctcgtcaactttcaatttggtcaagtcatgctcgcacgtctggctcgatctcgctgtcgacgcacttccgcgcgatcatctggtacttcattaaagtatgtttgcaagagaatgg

SEQ ID NO: 173466 - DNA, 308 bp, Zea Mays
gtctggcacgcgtgtagtcggtctttgcgcggacagtttggtgtagtcttttccgcacttgttgtgcttggtccggctgcacccttaggcgacttttgcacggatactctttgcggaagacttcgatttttcgcacttgttgtgctagtccggctgcacccttaagcgacttttgcacggatagtctttttgaggaagacttcgatttttcgcacttgttgtgctagtccggctgcacccttaggcgacttttgagcggagtgtcgcacgcgagggtagctagcactgggcctcacggtgactttgta

SEQ ID NO: 173467 - DNA, 322 bp, Zea Mays
tgagtgtatcctccttgagctttcttgaaaggcccaatcatatccagtccccagcatgcgaacgaccaagttactggtatggtctgcagttgctgcgctggtagatgttgttgctttgacaagtactggcaggcttcacacctctgaactaactcggctgcatcactttttgctgttggccaatagaatcccgacctgaagaccttcccaactagtgtcttggatgctgcatgtattccacattgcccagcatggacctcgtccagaagttgcttccccgtagatgagagaatgcatttcatgaggatgcccgatgcacccc

SEQ ID NO: 173468 - DNA, 359 bp, Zea Mays
tattgaaggaggcacatgactcagtttattctatccaccctggtagtactaagatgtactaggacttgaagcagaagtattggtggtatggactaaagaacgatgttgcttcacatttttctctatgtgatgtttgctagagggtgaaagcggaacatcaaagacctgctggtttactacacctgcgtaatatacctgagtggaaatgggaagagattggcatggacttcattgtgggattaccccgcacatctgctgggtatgactctatatgggtgattgtggataggctaactaaggtagcccattttattctagtaaagaccacgtattcaggtgccaagctagcagagttgtac

SEQ ID NO: 173469 - DNA, 370 bp, Zea Mays
ttcctcaccctcaaaaagatttcgtagctccccctcacctacactcaccccaatcggcgaggacaacaattctcgcttaccaatcccgtccacatgaagacgcccactctccaactcaccacgttgccgcctaccacttcgcgacaatccacccacccttcgtttcgccactgcccttcgccgcctatacccagtactcgcgcacgggggctcctcggaaccctccgcgcgcggggagggctccgctgtagccacatccaacgccgcaaaataatccaagtcctcatccgaagactcctccgtccatgcaatcgaactcccagaatcattagactcaacacacttagacacagagccaaacgaatcgtca

SEQ ID NO: 173470 - DNA, 1323 bp, Zea Mays
ggtcagcctgcttctctcctctagtttcactaacggctgggtcccacccgccagaagcttcttcaccaaaccaacggtggcgtactctgaagtctgaacacgcgcgacaggcgcttgggcgatgaatgtcgcgcgcccgtgatgcacagaaatcgctaccgcgacttccttcggtgcgaaaataggacagcggcatcaccggataacaaacctttcctctttccccgtgatccgatccggtatccttcatccccgtaccaatcgggatttcagttcctgacagcgggcggaacatggtcgccattatcgggtccccgtgaaccgcgccatggctaatgcggagagagataagctggagagggtccaccttgtgctcatcggattgcagagagattgagagagagaacgtcgtggttcgtgcggctggcgcatggacccgccttgactgcggcaccttctccgcgaattcgttgcaacagcgcgcgcaatcgtgggggtctgttgggattcaccctcctcgcatccggatcgtgagttcgttcatcaaccaaccccctgcccctatataaccatcaggccatgattccttgcctcccagctccgtctccatcatcttctaggcagagcgagccaagaagggataaaggagttctgtcccgttgtgtgtaaagggggtcaccggcgtggaaccagggccctgctgccccatagccttcgggacgcaacctgggatgatctccggtgcttgtggcgtctgttcgcggtattggaggaatctccagagttttggtaattgcttgatagtgagctcctccgctgtttcgtcatggtgtgccatgggtggggtcctccgcgctgcacccttcggtaaggacctcccttctgtgcattagcgttgactctagctttgcgtggatttatcgatggggcagggtagggcgtgtgcttgtggtcttggcaccgtgggcgagtttccggcgattgcctgtgccgtggttgcgtctgccggttcggcgcgcgattggtccctggtctgggcggcgcaaggaagaagaacatgcccttgccgtcggatcgagatggatggtcgagattgaaacagccataccctttcgcttcaagaaaccgtgttcgtggatgacgaaatcgacggtgtagattaggtctggatttaccccttcgcgcgatctgatctggaccttcagaatctgatcgggcggctcacgagtagccatacccctttgggcaagatattttgctaaagagtccctagtgttttgtggaatcaacccgccgtccgctatagatctaagaacattacat

SEQ ID NO: 173471 - DNA, 739 bp, Zea Mays
tgtctgggaggcaatataagaagtcatctttgtctgtgccattaaacactaaggcccctttcgggtattttagttctcgagcatagtgtttagcttcaaaaatttcttcttcagataatctttttcccgaagcgtgtcgaataatataatcaaggacttcggaagacgcttcgggagcaggagcggcagctttttcaggcaaaatctgctctataccttcttctgctgctgccttttctccagtttccgaggatttctccttggcgggcactgaaggcccagcttcggcgtcagcctggctcagtatagcttcggcttcggtcagctttgtctcggtttcaatctgtgtttttgaagccttggcaatttttcctggagtggagcttgaagcttttatcgtctccaacacatctaatacactagccatcctttttctcttgggggttgttgttagacctttttgtgtcttcggcacctccattcctgccgaagggcttagaacttctaatgttttcgtccctttggttcccggttcttcaatttttcagtcttcggcattgcagccggctcttcaatcttctgcataagagcatgtcctttgacttcaatagctgaagaagtctcaccaccaaattcaggcactatggccggttcaatgtagcgcggacggtgagtaaggaccttcagttttttcctcttcggcgcaggctcgcttggagttgcgccctttcttttctgc

SEQ ID NO: 173472 - DNA, 604 bp, Zea Mays
aatccattcagtcatatcttggtgtctgcggcccctttctaccctctcctccctcgcattgggatctcatggcggttgatgatggagttgtgatggtctttgtgtggtctatgtcgttccagatagcttcaagggggctacagcagaggacgcggtcatcacggcgcttgggtcagttggacgcgtgctcgacgggccgtaggccgagctggtgcctgctgctgcagccactccgcctcgccatcgagaccaagcacgtcaaggtcgtcgaggcccatgaatccactccgcctccacgtaattactaatcatcatcatcgtcatcctattcatgctcttgcttttgcattgcatgcgtgaggcccatgaatcggattgatgtcgagcgccatgatgggtataataaatgtgtgccaccaaatgggtcatttgctccagcaccatggatgctttggacgttatcgggctagaaacacatttccttgtctagggtatatacttgcgtcgaccagtcctcattttgtatgtgcagagccaagtccctgaattggttgtttgggttgagatgtctagatagttccaagtttatgccattttatgtatt

SEQ ID NO: 173473 - DNA, 453 bp, Zea Mays
gcaattcatcaactgacagtgcattaggtatgagagaatctgttattagttgttcagggggagacatctgtctgtttatgctagaaaataaaatccggttcttctattttgtagtttcactttcgtttgtactgatctggcgacaaggaattccatagtactcacaacaataacatgttccagggtcacttgtctgttggtttggttgtgcatccttttgtgtcttcaatgtctgttcatcaactgttttatttagagtgttgttttgacttgccaacacaccgccttctttgcacttagtgacatcacttgtggttgacattccaaggtctgacatctgtatgggtatggaagaatgggagggacgaaagggttgagtaaagacagattatagagagcagagaaaacccatatatctaaggtttttcctagctaattgatgtcattgtggac

SEQ ID NO: 173474 - DNA, 438 bp, Zea Mays
atttatacttaggtagaaggtcaaaaaagtcacatacaactataaatgtaaggccctcaaggggtataaccaaaaagagtaaagtgttagagaatacttatgtgtataagagatttggatgaaagatgggtccttggtaagacaagtttgtatttctacaataacttaataaagagcgtaaaattatccccatcgggggccacacatacaccatacttgaacctattcccttaagactactcttggaactattatggggccctagcaacaacatagacaaaacaatgggattgggtaagcaaggcacataccaagggtcaacatagaagagagggctagctaggctaagggggtggagacccacgatggcagagctagtttgtaccaaggtatagctatttttggggctctacctataggccttgagctatgttgatt

SEQ ID NO: 173475 - DNA, 975 bp, Zea Mays
tcacttgcgttaacctgagtcagaacactaggtgatatatttgacagcaaataacttagaacccgctggtcctgagcctgccacaacgcataggccaggttcgacttcttctcttccttgtcgtcggctcccttgatgatgatctctgcatcaggagccttgtttgctccagtgagatagtcttcaagcatggcgccgcacacgacagacttcacttgcgctttccatgaggcgaagttcgtcttcgtgagcttctcagccacggtgagtcctgcgagcggattgatgttgacggtcgaagaagaactcgccatggcaggagcagatctacacgatgaactctagtgtttgttggctctggtaccatgtgagaagaatcagagggcaggtggaggaacaccgccccctatgttgggtaccaggcggatgcatgttgaatcaattgatgattggaaaagccccaaccgtggcatacaaataggtgtacacagatcacagtccgtaactcaaggagctatatttggtagcttataattacatgacattctattcttaatgagatcccaaaagtccggactgttctctatatacacaatttgttacacaaggcaagatacgcacaacaaattcttctagaactctttcatctaacatcatgaataaaatgtaggctcataaataaaatgacaagtgacagatattttaggaaaatgaaatcttgagatatgcactggagttcctacgcacacgggcacgtcaagcccaaggcagtccactccgatcactgctgcaatatgcgaaaacaaaaatgggcaatgttttagtgcttcagctccatcattattgtacatagtaattggccgctgcaatatgcgaaaacaaaaatgggcaatgttttagtgcttcagctccatcattgttgtacatagtaattggcctgtgcgttgcaatgggagaacaaagtttcaaagcgat

SEQ ID NO: 173476 - DNA, 494 bp, Zea Mays
cttcgaagcaccaaatgtcctggcttgatgttctttaatctaactttcttgtcccgtcactttgctgtttcagcttggtatttattaatatgatctattgcctgaagtctggcccccttctatagagtcttttgacactttgcaaatgtcttcgtcctctgccgaagctagagtccttattgatcatgtctttgcttcttctagtgttattgcttcatcaccgaacaaaaacttaaacagggtgaaacccgttgatcttaagacgacggtattatgattccacaccacctttactagctcatctagcccctttccctttggcaaattaaaaaatgatctcattattcctgtgataatgattccatttgctcgctctactaagccattggattctggatgtcttactgattcgaagtgtatttttgtttcaatttgatcacagaaagttttgaacgctttggagtcaaactgtgctccattatcaactgtgatag

SEQ ID NO: 173477 - DNA, 396 bp, Zea Mays
gttaaaatatttttatatcgtttgcgcgtcaagcggccggtctccgtctagattttggacgtacgtacgcgtcccttgacttcacactagccagtagcagctagggcaggatattgaccggcgatcgaatcatgcatgcgaataattaactactgtgcttgcttgctggatcattagatatgttgagtttgtttccatacgccgtaccaccaagatggctttagtttactgatttgcagccacaccgcaccccgagacccgagtacaccaggctaggctaggctagggttcatctttcatatatatatatactgccaagaaactggcactgtagtatccttttgcagctgctacttgctgctagctacctagtacgaaattaggaggctagtctac

SEQ ID NO: 173478 - DNA, 436 bp, Zea Mays
ggggggtgctgggctataaatacgcactagaaccaggagttcaattcctgcgctcaccttgctctgcatgcgtgctgcgatcccttcatccccagaggcggcgcattccatttcctggtattgctgctgctcttcctgcctgtgcttcagtagtacgtagttcactctcgaatcatggagcttcgacgactaggtttgacgtgtttatttcacttggcgagctttgaataatccaagtcatgccttcactgagaccttgtttgcactgcactgcaaagttaaattgaatcatgcgaaattcttatgtcgttcctacgaaaacctcactttccaaaagagttttgaatgtgcggtttttttcagtaaaatcgtctagatgtttatcacctctttgtaacagtaaaatcgtggagctttgattatcttacatgatact

SEQ ID NO: 173479 - DNA, 431 bp, Zea Mays
gaggactcggcctaggcatctaactggcagaaccgcttgcattatggacccatgagattatcagccctcttcctgctagcactcgattgcttaggagctccacaccctgattcaagtcacgctgactcaggagattctctagccagcatgtcgagaacaacctcgatctcagagttagcggcaggcgaccgtatcatgatatgattctacttatcctcctcaggcagatcttgttatgcagcaactatggcctctatctcatccaaggaaaaccatactctatggcgagaattgctaccctcttcactgatgggagggttggacacaaactcagaaaaaggactctacaataatgaaatagcacagtcagcacaaatcacataacaactcagcaagcgttaaaatcaagtggtcagaacttaccagtggag

SEQ ID NO: 173480 - DNA, 334 bp, Zea Mays
ataagaagggaacaaggaggaaaggtgtggcacgggcgtgggtgagcgcattggcggccgtcatgggcgagtgcacgcaagctagtggttggttgctggagagggagcctagaggctggcgctacacattagggtttggcatgggatgggtggtgacctagagttcgaacatcatggaatgagatagactgagtctagagcctaagaggctagcgtgacctaggtcatcataggctgaattggggcacgtgaccgggtctagacaggctccgacactgggctcaagaaaaccccagtgaaaaccaacaatatttagaggaagcatgatggatcc

SEQ ID NO: 173481 - DNA, 539 bp, Zea Mays
tatatatatagtttatatattaagagccctgggcttccaataatagaggaagcccaggctagtcaatatgggcattttggttgaaccacaccgagtcaacaggtcccagtcacggtgccgttacaccgtttcctccgtcagccagccacctctcccacgtttcatgtttctaaaaccgtagtcgcgcattcaacggagacaaaccagcgccgatttgaaaaaaaccccagccgcgcagattttcctttcgtcggaggcgactccccaggcgatttccgcgcctccaaaccagcgcagcgccaatccaccgccgctccaatccagcgcccttccattccagcttacatccttcaatctcccatcattggagcccgattcaagaagttccaggtaatccaacattgaaatacaccgagtttgccgtcgattttttgaagcctatcggtcgactgaagtggatttgattgtaacccttattctccagctaaatgtgtgatttgtatccgtttagacatcactataatcgggtcattgcatcg

SEQ ID NO: 173482 - DNA, 714 bp, Zea Mays
gattatcttttcatgatggcaagaacaaggtttaggaagattaggagttttgtttcaatagaactacttgttttgtggtgctttgaggtgaggtttttgatcttatacattcatttggtgtggatgtttcaccattgaattaaaatgaattgttgaagctggtaagggttgtgcttagtgcatattaccccttcataaaagagtgttgttttaagacattgatgttgatgtatagctgcatccaaaattcgatggtgtgaaaatcgtagtgttgattgcatctatgacttgctttgagcttcattgcatgttgtttcatgcttgatatcaggttgtgtagtttccttagacaattagtccgaggtagaggttcttgtgttaattaagaccaataatggacccatgttttgaatggtggtgctatatggggtaccttggatgctttgcttggaagtggtcgaattcgaggacgaattctttttaagggggtagagtgtgataccccaattttctaaaaacaagttaaatttctctttctcttttctttcatgttctgtggcattggggtttggagtttttggaggcattcctcagggaaacagtagatcgtttggcatttttttccgctaggtctgcagctcagatgggagagcaagttcgggccattgatctcgacccgatggatgggagccccctctcctccccaaccctagc

SEQ ID NO: 173483 - DNA, 985 bp, Zea Mays
tgttgttagagtattccgtcgtaaagcagtgtgttagatgtggtaaatttgataaagcgtaaagcatacttggtgggttccgcaatcggctaatgagttggtctaggacaattatatttatgtattcatcgttggtgtaggttaaattaggtgaaaatgtaaattacatgacatttaattggtgttggaaagtgagataggttaatttagaaaggtgggttattaaacatgtgtgccgaagtgcgttgtagtagtgattgcgtaagttgaaccgaagtgtcccaagtacatgctaggatatggttgtatttgagatatttattcgaggtgcgcaggtatatgccgtaatatggttatactcgcggcgaggaaatatgtatgtattgtgtaacacgacgtttaggtcgctattatataatcgtgtgaaggatgctcgtgatggttatgtgattaaggagtgatgtagtggcaggcgagaagtaagtttaattttcaaacgattcgtgggtagtatctcgatgttgtcatgatttttgtggtatggcaatgtgatgcttcgctttgtcaatcatcacattccatgcccctttggataaataaatgtcttgttgatcgattagaggtcttatacgagtgttatcccagcccaataattattgggggcaagtagcgttcatgagtcaatccttgctaaaattgaagaacagtccgataacatatgcacataagtgctttaggtcttcagtagccagtgtaagtcttatggagttttatgccatgttttaatgtctctatgttagacctcctaaaatatggtgttttaagtgacttacgtgttaactaattcgagtggagaaatggttaagaaaaactaattaacttgctcccacctatgtttttgagttgcgaagtctaaaatacttgctaagttttatactggttaaccaacttgttagatgactttagttaagctcgtggtcacgat

SEQ ID NO: 173484 - DNA, 742 bp, Zea Mays
cgtgagcgcgcgcgtagtggtcgtcctcagttctagcttggcggacccagcggtcagttgccgctcacccgtgttcgcctatgtgtgggaccgggagaccagatctccatctccaactctaccgcgccgcgcatggcgggtgggaggtgcgccatcagcgaacgatctgttgcagctcgtggactatttctccccgcctatttaagaaaacgcggccgaagcctctccttcctacatctcccttccctcgcaacctccttgagtcgactgcggaaagaacaatgcccgggcggctgagctcctcgccgccattgaaattcaggcgctagtgccgatttggggccctctggtggacgtgggaagttagcccagtgcttgcgatggggattacgtccggaaacaccgcggtgcgccggtggaactccgccaattcctggtcggagttggtcatcggaggtcgcgaccgccatccctgctgctgaccacaacctcgccgcgccggtggtaagtttgccacggcccagttcaccgcattgtccacatcgtgtaactagtactagatctggttgcggggcaccgggggccggaaatcggtggcgccgccggccgctccgtcgtggggagattctacgccgttgtcagacacactgtgggttgtcgccgattgagtaactgtggatcctcgtttggacggtccggattagaccctgtaggtaccccttcgcagcattaaggagctggc

SEQ ID NO: 173485 - DNA, 486 bp, Zea Mays
gtcgaagtttacactgaagcctccactgatcacattgataatgccgtgaatcgaaggttgacgtaatcgtattcctctttgggtggcggaggggtagttgcctttggtggtgtgctagttgagggggtggtgggagttgtagtctttctgggtggtgaggtagggactggtaattttattgatattgtggtagggttggtatctttcttgatatgactggtggagggggtggagggggtagttatgatttcttgccttcggttgctgatcttggtgaccctcacattctttcggcctccatcctatcattggtttccttggtggcgcggcagtccctagttgaatgatcaacatcctcgccgtggaagacaaggtaaggtctgtgagtggggccacggctatgccccttgcctcttggtgctctaccatcctccttgattgttgattgtgatcatagttgcgtgggcgtaacaccctgaatttttg

SEQ ID NO: 173486 - DNA, 505 bp, Zea Mays
atcctgtcataaggctgaaggatgtgtctagacccactaaggacattacaaccctgaggtcgagacccccaattaaaaggtcttctaataagtctatagcggttgtttattgaataagtattaggtgtgatgtgcgccattacagccctgaaaagcgcggtgttgccatgacttaggttgtagggtactcgagaccactatatagtatctgcattgaccatgtcgccacacatacgcatgtagatgtaccataaagaattatcaagtatggaaggttacacttactgccaactacatcttactaaataacatgggctcgatgtccgtggatatgacattcataacctcccctacgataggtatgtcatgagactactaaaggacatctttgacaatatgccatgaccaaaggcatgaccttgagtatgaatccaagaacatgataaggacgaaacatttgggctttagtcagtggaattcgaggtccatgtaacatctctcctcc

SEQ ID NO: 173487 - DNA, 760 bp, Zea Mays
cttttggggtagcttttgacggccgcgcttcgcacagaagccgcccgcgtacaggaaacgaaaagctgcccgaagcgagcgtcttctgtaagccggggttattcgcaatagggttcgaccgcgcccgcgcctcagctctctcccctcgcaacgaccgccgccgccgcctctccgcagcgggtcgcgggcctcgaccacactccctctgctttcatccaccgcattcctcgtcgtcttctcaggtacgcggttcctttcctccataccgttccgtatccgctcgtcgtcctcccccggctgcctcgttcgaaaaggtccgtgaccgttgatgtcgccagggttttgcccgcgccgccgcaactccgtcggcaaggttggactcctcccgtatcgcaactcgtcgtcaaggttgcactcctcccgtatcccaactcctcgtctttgcaggtacattcgtaacgtccatttctaccctgtctcctcccccatgtgctattacagatccattcctcccccatatactgattagggtttaggttgcatccatgtccatggttaatacttccctctctaatcacgactatttcacaactggttactaacgattatcgtgtgacatttgatgttcagatttcggcgagtcagcggtttttccctgttgcatcagaagctccactcctacgaaggtgatgttcacatcattttctttgttccttttattgctttacttggtgtgtatgtattcgaagatcgagttgca

SEQ ID NO: 173488 - DNA, 514 bp, Zea Mays
cgctcagcccgtgccgtgtcactgcgccgatgacatgcgggacccacggacctgcgtctcgcggtgcgcttggactcaccccattcagccgagacgcttgcacgtgggatcggttgtcaggtccgtcgtctccgcgaagagcgcggatgcgtcaacggaatcccgaacaaatcgccccagctggccacgatctccctctctgtcacatggacccgggcggacagccgcttgaccaggtttcctccgccactgacgcgtgggctcagggccactgtagatctcccccaacaatcgcggggcgttgacggagtaccagccatggccgagatccccgttggagcccgctgactttgcaaccgtccgcctcgcctcggctacaagtacggacgacctgccgcgcttgctaaggacccgttttcgccgcactacaagcccaaactctatcgccgctgtgcaccgggtgcagaggaagccgccaccggtaacccgcctctgtaccaactccccacctctg

SEQ ID NO: 173489 - DNA, 922 bp, Zea Mays
catcattcagttaactcattacaagtaacttcatctacttgcaacacatatgacttatcagataacaaaattaatgtgccactaatattctgcattttcccttaattcttcctatgtttaacatttcaggaggtgatgaaatgcaagttagtggtgcagataggtccgcaatctgttgtggtcgctagagggcaggcttaccctcgaaaggatgttgtaaccgtccatgggattgagcggtgagatgaccacacaaaagtgcaggttgattttgtgtttgacaacttcttggattttccgctccctataccaatcgctggtggtgatatgttcactcttggtgaagccaaaaattcatttgtgttatggcctaagtcaggcatacaactagcagaggtacactttgctaacttcaacctgatgaacttattattgttattcaaaacttggttaatgccatgtacttgtttctgaatttcacataggaaacaacagttcatgcaaagcctcaacaagtcccacacacatcgcctcaggtactccatcacacaccggaaaaggataaaatgccaacaccaacaatgggtaccgaggatatagatgtcacacatagtgcctccaatgtcagcaagaagaggaaacataagcataaaaaacataacaaaagcaaagagaaggagcaaaaaaaattcacaacagaaaaacatagaagatgatggtcttgatcccctttggactcccccctttcatcaacgatctccaccaccagttccaaataataaacaatttgtgctagggcagcctttagtatctagtgcattgcttaagaggatgggtaaacagagccaatgtttccacaaatggtattttgctatgaccacaccaatatctcgaaggcaaagtgccacacacttcatggtac

SEQ ID NO: 173490 - DNA, 360 bp, Zea Mays
atgcaaaccagcaggtccatttcctcacggttctgcctccaaggctaggctcccacgtcagctctgctccctcgccctcccaacgcatgcaacccagcaggcccatttcctcgccaagcaaaacaaatatctacaacattacctaaatcgttctctaccaacgccattgagccgctagcaagttaacatttggggctgcaccaacgcttataagccgttctctgcctgtttcactagccggtatggcactaaccacaatagtaaagaaagcaccacaaacaatgctcgtgtcctgggctaaaatcttcatgtggcccgtattccagcgatgtttggtgcggcccagatagcgaatcggta

SEQ ID NO: 173491 - DNA, 395 bp, Zea Mays
gcaaacaagagaaattaaaaacatgacatcccataacaattctaggtaatattatgtagctaagcaagagctaaaatgctcataccactgcaacatatttttaggtatatcgttgctttcatgtagtatagagctgcatcagttcatacataaaactacacgaccatgtgataagtatctgagctaatagagcaaatacggcagatgctgttttgacgctctcaggaacgtatggagaactgttggagagagtggaatagggtgggtatataccatattcatacatgggcctcatgggccctgtatactctaacactccgccgcagtctgaacttctgtcacagcggagttcacagagtggactcgaagagaagaagtacatcacatcataggat

SEQ ID NO: 173492 - DNA, 452 bp, Zea Mays
cttcaacttctttctcttcggcgcaggctcatctggagtggccgaagcagcagtcttggtcgaagcagcagttttccttttctttccccgtccccgtagcgggtagcagtagtcggggtaaacaaaaccaatggcatcaaaaactctatttaatttctttttcctcggccaccaaaggatgcagataatgcattatcttctgctttggaatacggcccaagcagttcatcacttgtagcttcgatacattttagccagtcatcattcggttcatcaaatttatcttcgtacctaaaggtgtatttcaatcgaaccagctcaccttcgccagacttggtgacagtttccttcggcatttcccagttctctacaagtggccatactctgaaggctatatgctcctggattaaatctcttgtaccaataaaaaagcagacagtaccaaaagcttt

SEQ ID NO: 173493 - DNA, 963 bp, Zea Mays
agtttaactcctttatcgacgaggaccttatgtagatcatgtcctatcatattgcagtttatgaccgttgcgtccgaatgtggagcactgcggaggtccttgtctcttgcatcgaaggctatcgggacatgggaccgctttgtctagaccatcgggccaatgtagaccatcgggccaatgacgacgacgtgatttacccttcggtaatgatcctttttctgtcttttattttcaaattctaagttggaccatccgataatcatatggatcactcaccgaaagggtggttgagcaaagtcttcctcttgtttgggtggtggagggagggatttgatgggcttgttggtttatttgtggtggtagtggggggagtagtagtctttcctagtgggggagttggggaagttgagggggaatctgtcgtggtgcgggttgaattttgggtggtactgggggaagggtgtgtggaggtcttcatagcgagggggtattggtattagtaattatgggctatggccctttagttgttttagggcaccaccctggccatgcgacccttggcctccttggttactgggcaatcctttatggaatgcccgatgtcttcgccatggaaatcacaatagagttttctctgatgttggggcctctgcctcgatcgtgacctcttcctgcaccacaacctcgttcatgttgtggagggttgaactgactgtgagggggcctcgattgactgttgcgggtaggcaatgttgtgtatttgcagctattgagtggggtcttgatgcgtgtggttgtagtgttggcctctagcccatggcttactagagtgtggagtgtctttatgtttatgttgagcctctagtttcctgaaatgtagttccttcgaccatgcatacttctcgaacaattgatacaactcgtaaagagttgtcgaggggtctcttatgcaatggttgtaga

SEQ ID NO: 173494 - DNA, 986 bp, Zea Mays
atttcagcattgatgaatgagtctattagagcaggtgttggttgcgtagtgtcagtggagacccaaaatataatatgtgaatgaggaagacctcgtttttgaaattcagttgtgtataaaactgtaaggaaaatattggaacatgtgttaggataacttaaagtacatgaatgtgaatgatgtacataaaaagtatgcaatgtgagatagcaatgttagtgtacctgcggtacatggaccaaaaattgatccatttcttatatgatgtaataagtcattgagtttcatatggtaaacacgaacaatgatgtcagatctttccgaaggggtttgaccaggctgagatagactttcaagtatctcttgccgatttggattgcatgtgaacgtgaggaaaaaatctggtggtccatgaactcgacaaatagcaatgtcgtcatgataattttggatcatgtagcgtctgcctcctgtgtgtgatgctggtaatgttatagtttttcccatctgttcaccgctgatgcatccacgactaactgcatctgtgataccttgaatgctttccattcgtagattcttttgattattgattatgtagttgagtctattttcatcaatacatgctctagcatctactttggcttgacttgataacattgcataacacaaataaggatttggttgattttttctataatggaactggtagcaataatataattgcatagttaaatgttttcgtgcattttgtccgctggatgtggcaccattgtacaaaactccaacctggaaacctctctcgccaaagggaaaaagcagtgggtattgtagagccatatatgctgggtgtagtgaagatattcgctttagctctttgttctgagtctcaataataatatcacgtttgaatgtgtctaatgtgaaatctccgacaaccagcatagctaattcatctgttgttggtaagttatattggataggatcac

SEQ ID NO: 173495 - DNA, 541 bp, Zea Mays
cttgccccgcgcatgttgcccggacatcaaggtgaagatcccggacacccccagcatgcccctgcccctcatttagtctctccctgtcccttgccctcatctcgctcacaacaccgccgccgccgttgcccagccgttccgccgtcctcgccgggcctttgccatcgcctcggccatggtgagctccgcctgagcacaatgcactaggaacccgcctcggtattccctttcaccggcccctctgccctgtccgcacctaactccttcccagcgtagaccggaggtcgtcgccgccgcattccctcgtcgtccagccaaccgaagcctcccgctgtcgtgtcgagctcccccgagcaccgccccggggtaaggaacctcaccccgcccttcttttgcactaattccctctcaccatggtggatttgggctcgccggaaccctggctcgttgggcctcgcgtcttcatggctcctggccagtgcagtcttaccctgtgcccaaatcccgacctagaatgcccctaccccctcaccgaaactca

SEQ ID NO: 173496 - DNA, 668 bp, Zea Mays
ggctaaccagggccgggcgtcaagcacggcgcggccaattgctcaccggagcaacgatgaccgcggaggacggcacatctccgtgggcggggatctctacgcaaccctcaatggtaagaaccccaccaaacgactcgtgtctgtttccccattgtgttgcgtggccggattggggtatggtgcgcccagggttggatcggtcgctcgccggtgactttcggtagtggtgtagtcatgagcgccgccgcttggtctggctcagggaagaagagaacatcgtggccgttgatggggttaatcaacggtgtggattgggggctggatatcgggccgcgggagccgttggatctccaaccgatggtggagattggattccaaggtacgccctctcgtcaaatgaataggggccgctgatcggccgatgaacaaacctaattgagtagtggcgctgattgtcttgtgccgtggatctctaatcccttggcccagattagatctgtgattcattaaaccatgaccgtaggattttgatccgagggatagcgtacacgtaccggttcatatcagggctgatctaatctggtcggttagattgtgatcgggcggctgaaaatcaaagataccccttcgccgtggcctatttgctaaagagaccccgtaattttcac

SEQ ID NO: 173497 - DNA, 333 bp, Zea Mays
gtttgaccggttccaaaggggtggtttgaccggttccaaaggagtgcatgggagcaatctggttgcacacgtcgctgcactgctggtgcctcgcccgagtaatcggtggcagacgtttctgcgtgctgaacagttctaggagaatctccatagaaggacagagacatcaggagctgcaacttcagcaccgccgcgttggatccatctgttcggcgtgaaccatgactgcgggccaagaccactaccggttatgtacaacgatatagctgcacaacagggctagcaccgaaggctttttcggtcttggcctcgggagctgggtttgcataggcc

SEQ ID NO: 173498 - DNA, 655 bp, Zea Mays
ggaatggctgcccacgtcgaggtgcacccatgacggaacgttctagcggcgagggaccgttctggttgaaaggctgcggtagagatcaaccccaaaggtcaatgagctttcctgggtcccaatggggacaatgcatagaggggacagaacccacctcagctgtcctggccacggtggagctcaccacggtggcaacgacgactatttccgaggaaatctagtgacctcgagcgatggtggacgagaagggatagatggtggggcgctagctttgtaactgagaggcagagattagtgcatggtcaatttggatgaccggggtgaggacgcggtgaattttaaagaaccaatgacacacggtgacagcctaagcgataagcttcatcgtgcctcactgcctttcaccggcgacgtcgggctcgactattttccagggactagacacgtaccgccatgggtaatgacgcgggtagatcaatagttgtgtggacaaatggagtgaagcggcgccgacgactcagcacaatcactagggccagcagccgcgtggcggcctagacgttcacgcgccacgacagtggcctgacccaactcacaaagatcacggcaaagagatgcacgccgagcacgcatccggaattctacgcaaatcacg

SEQ ID NO: 173499 - DNA, 1287 bp, Zea Mays
caaacattgcaggagttatgtccttaatacatctcccatccaaccatctgtccttccaaaaaagggtattagctccatcaccgagcttagtaataacggttgcagcaatcagattttgtaccaccttacaaacatgagtggggaagtccgcccaaggcctactgggatctgttttctgcagccatggccaacaagctctcagagcccaacagaggctctttaactcattaatcccaagaccacccagctccttgggacgggtaaccttaggccaagccaagaggcaatgaccaccacagaactctttcctgcccctctagaggaagcccttcctcagtttatcgattgctttgatggcccatacaggaaggtcaagtgctaaagctgcataaatcatctttgccgtcatgacgaactgcacatgaatagctctaccagccctggtcataagctcagctttccattctggcagaaggctggccactctatcaacaatggcctgaacctggtcccttgagagtttcttaggagacaaaggcaaatcgaggtacttacaaggaaaatctgaaatattacatggcagctgtaaacaattcaccttttcttccccacaatagattgggaacacactactcttttggatattagtccttagacctgaagctgagccaaatagatgaagaatatccataaccacactgatgtccggggcagtaggacttagaaataacactgtgtcatctgcgtacagcgagatacggtgctgcatattccttgtagagagaggttgaagaaacccttcctcagaggctcgctgcacgagcagattcaagacatccattacaagaataaacaacatagatgatagaggatcaccctgcctcagcccgcgttaatgcccaatacattccccgggcagaccattcagtaaaatcttggtagaagaggtagctaatagcccacttattatatcacacaagatctgtccaaaaccaagtttttttcaagacctcgataaggaaggcccatgataccgagtcaaaagcctttgaaatgtctagcttgagaaggatacgagcctgcttctgacaatgtaagaatctggtcgtctgctggactagcataaagttgtcaagaataaattgtttcttaataaaagcagtttgattgggggaaaccatattttgcagccggcctgctaacctgttagccaacaatttattcaccaacttcacgaaactatgaaccagactgattgggcggaaatctcacactagtggcccctcc

SEQ ID NO: 173500 - DNA, 907 bp, Zea Mays
cccgcccctgccgggtccgaaaaccgtgggactctcccccgatcctacccccgtgccatccctactcgggatttacgcccgtgaatccggaccccgtcgactggactgatgacgtcggacctggatttgcatagagacggaccgaggctgtcacgtgcactagaggggaagtcgcttagaagttgcgcccacaagtctgaaccccatttgtgccattccagtgcttccatcttgatctatgaaccccctgtgagtggagcacaagtctttggttccttatgagatttcaatccacccaatggatgtatcccctaaactttgagtcggcttaggtaacaatcgactcgaaggtctcataaaacctcacttcggtggattgtcttgctggcttgacgtttggttgggtggctaattgaaatctagccgttttaattgtgcttgagggaaggcccggccgagcgaaacttggttgattgtgatatgctcaacaagactattgagtttatcgattgaaattcaatcgatagaggcttagctaaattttccagagaaatctatcgtggcacccaatgggtgtgtttgttgtatctttcgtaaaatagttccctgagttgacatagcgtaatgatgcgtgtgagccagtgatcaactcattcactgacctctgatgtcgtgttcgctgcgttgtgccagggatatgctgcttcttggaaatcgaaacgacccttggttacttgtgactgttcattatatgggcgagaaccgaaagggtaccattctgtttcttatatagctcaacttgtcgttctgtgcttctttgcttgcctttgattccacttccttgcaagcccttcttccccatgagaaccccaatgccggaggtaggagtcgcaaaatggggttgtcg

SEQ ID NO: 173501 - DNA, 405 bp, Zea Mays
cttaacatatgtttcgtctatgtctatatagtgaccactacatttgtatcatgatctttccaaagcatggtaaagtcgtggtcttcgactcactaagaatggaaaatgatgcgtataatgactttttaaagattttagagaagtatgattattattgcacacttgtacttattacaacttaacaaatgtattcttaatctcacaatgctattcttatatgcagtgtataccgtttttattagaaagatcttggcggcgaacatccagaggacaagcctaatttatcaatatcattatttccatatggtgacaaacaacctccgggtattatcctgtgcgggtattatgtatgtgaatgctgtcgtgtcaccttctattacatgggcaatcgtgaggatgtaagtt

SEQ ID NO: 173502 - DNA, 409 bp, Zea Mays
tgcaaatatgcaatcgtctgtggaactcgaaaaaaaacagaggtccggcctcgcacgaggttaagggaaaaaaaacgaagcgtttggaactttggttggcattcgcagcatgctgtgctgccaccgtatgtttttatttttgctttgtttgtcttctttgagaaacgtgagggagccgcgtgtccgctcgttataaaaccccccggcgacccaaactaccacgagctcaagcctcaagcaagcagagcgccgtgacatcacgaaacatatagagctagctgctctgcctctgcttcaccaatcacctcgcggaggggaaggtttccccctttgacacagccgagctcccctccatcagcagccagctcctcgtcgcaaagcaagaagatgatgctcgcgtacatggacc

SEQ ID NO: 173503 - DNA, 836 bp, Zea Mays
tcctggactgggcgcactaatacagagaaggtcggggtttaattcgcaaaataacccagacacaggtttcccacgcattggacggcgggttcatttcggtgaaacccaggggctcttaagtaagaatgccaagcgaaggggtacggataagtcctggccgcccgattagagatggtgggcccagatcacatcgggacggcatcgaaccggtataggcccacagtcgttggatccgagatctacggtcgggattagaagcgcacagggggtatacacggcgcgatcccaagcgttcaactagcatcagatggtcgaggcttaatattttcacgatctaatcttgaccacccatttcggatcttgcagccacggcaccgtcctcttccctcagccgatacccagcatgatggtgaacagcccgcggcggcgccgccccgtcgtgaccaaatccagtgcccggagctcgacaaatcaagtggcgaggtgtcaaaatgctcccaatatcatgacggaccaacagagggtgagattaccttaaatcgagatgggccacaagcagaccacgatgcgaggcggtccgacggcggcggacgaatcccccatgtgaaattccttgttgtacctccccttctgccgcacagagaggacacagacgccaacccagtgcggccgcgaatgcccccgatcgatcatcccgagttcgtcggtgtggtacccacggcttaacctacggcggcatagattttctctccctcactctctctctcaggtgcgtggtgaagcttggcgatggtgcgctcggtgcgatgcggggttcggtttatatagtcgagtgg

SEQ ID NO: 173504 - DNA, 717 bp, Zea Mays
cgggtatgggcagctaaggcggcccgcgtgttttggcccggcccagcacgagtaatgggctggcatgacagcggcccgcgtatttcacaagtcacccactcacccagtcaccccaccagccatctagcccatccacccacacggccacacacacaccctatccccgtctctcgcctctcggtctctggcgattcggcggcggcgccgttctcgccccatcggcttggcacctcagcgactcccgacctcgacgctaccggctctagtgctccgtcctcctcctccttcatccatccctccatctacaactggtgactccctaaccctaattcctccggtctttcggatctagtggttctagttcctcatctgtgcaaggtttgtttatctcgcttaatcccctccaaatttggtgtctagctgtagctggtggctgtttggctgtttgtcgacctctatggtgtccgtttgtcactgtggttgtgctactcctgtctgcttgttgttcatcggtgtgattcactgatggttcatcgtcgccacctcgtcggtcttctcggtgctaggcggtgatggtcttcgtgggtgtttgactcgtttctggtgctccggcttttcctggtgacctcctccctcgccctcctaaacccttattcctagtcggctattcctatctggccgtctcccactccagtcccagtactatactcctcgcaa

SEQ ID NO: 173505 - DNA, 434 bp, Zea Mays
catgctcacgcttacttaactcggggtgaccactataccctactaacggagcaatcggcttaagtcggcgatgacttaagacggtgcaacatgcttgtgcttacttaactcggggtgaccactataccctactaacggagcaatcggcttaagtcggtgatgacttaagacggtgcaacatgctcgcgcttactaaacttagggtgaccactataccctactaacggagcaatcggcttaagtcggcgatgacttaagacggtgcaacatgctcagttgctcacgcttatttaattcggggtgatcactataccctgctaacggggcgatcggtcaaagtcgttaacgacttagatcggctcggtaccttcacgactacttaacccaacaccaagcgcgtctacgactacttgtcttaaggcgagaaatctcaa

SEQ ID NO: 173506 - DNA, 397 bp, Zea Mays
tggaaatgtttcggccaaccaatggcgcgaacgaccaaattgaagcttgggaaagcttcacaggccaaccagtggtgacacacatacaaaaatttggactggacgcgaatagaaacacggggctacggagagggtgtcacggcggcgttccacagagcaattgtgtgttccggtgaaaggcctcggccgaacttaaattgattggtattgagagcaataggagactacaaatgtgctagcacagggagcaatttgggaatcactgacccaaggagcgctggccacggaagagcttttcacggcagcggagagctaggcggactggtttttacggacggtgagagttcttctagtgcaattgagtcaattgcctaagagtttgtgtgcgtgatgcaag

SEQ ID NO: 173507 - DNA, 327 bp, Zea Mays
tacgtaaagtaatcattcacactatgcacttgggaaataacaaaccaaagcaatataccaagcatatgcagcagagagatcacaagttcacaatagaaaaggattggtactctggtattccctaggtctagggtagaggactatacaaagtgattcattatccactaatccggtttaagacagtggtggggttaaatcattacatggttttaagtccctgaacttgggtgtttaagtccataaacttaggtgctccaacttttattaaagtctaccatcttctatttatctcaaatagggttccaataaccctaatcctatcctaat

SEQ ID NO: 173508 - DNA, 525 bp, Zea Mays
aatttcttgctggaccttgcgtgaacctggagatccaccgtcgccgcggattggccttcctcactgtgacaactcgggtaacttcccctccttaggtttcgatttccggttggcatcacgtagacacgttcggatcaagctttgggtgtcgggggggctggaattggatgtcaccagcggggtccgtcgcgttgaggggcggcgccgccgtgtccagtgtggttttggggaagaagtcgctcggccgttggatggacagcggatagccgagattaggtcaaggataccccttcgtgcgattatatcacaaccgttggatcgctggcaaatgactcggatcagacctagaagcccatttatgtgatcgaatccgatccttaggttttggatccgatgaccgggatttcataccgattcgcgcggatgttgttttaatctggtgcgtgcatctcagatcgggggcccatattaagcgataccccttcggccgtgtcaaattctaagagtccctgagttctaacaaaa

SEQ ID NO: 173509 - DNA, 773 bp, Zea Mays
tcttcttcagagctttatcagacagatccacttctgacagattgcaaaattttccccctaggtttttgatggccttggctgataaggaaggagggccctcaaacttatgttgacacatcagacagttctttttctggcaagagtcctgcctgaacccagcccgagcatcacgcagtctcttacttctcctcaggtcagattccacaactgtaggcttggagggggaagaggccgagtctgacggagcagagacgttgccagtagattcttctgagaggacagattcaaggaacttgccattaggacatttcttggggatggcaaaagggtgagtctcagactcaggctccagcaaagcagaaggaatatctgaagacaagaaagatttcgaccagttgaaagaatcttcatgtagcaggttagacatgaagaaaggagaccacttcttagggatctgcacagagaattctggcttaccagcgggagcaaaatagttagcccagatcctatagaattgggcattccttttcctttccaagtgactcagtaaaacagggtctggctgccaatcctgggagaacatatagttcaacaccatattgttgggaccattgttgatttgttcctctggctgggcatcagggataagaatatcccccggcacatggagatctccctggtttggtgggccgtcaacctcctggagcccattcataggagcatcacccaaagcagggagggcaggggcattaaagcgtagcaccggcccaacc

SEQ ID NO: 173510 - DNA, 488 bp, Zea Mays
tgggtagccacttagcctggtcccatagcgtaagcctacaccttccacctccctagaataactaatctagtactttctagaccaggtacctaaaaggcctacgcctcattcaaaattaagtgttgtatctcataaacttaactgacacaaatccaattatataattcgatggaatgagtaccacaaagctaggatcccgagggcacactactaagcactacccctgaactagtctcgaaataccatacgctcctaagcgctattcttaaaccatactcaggagtagctccctgaactaaaggcaccccacccccacatctgggataacctctagggagccttagtggcggaggccgggaaagagaaacccttgacttcccaaaaaccggataagcacgggggcgagaccacttcctttatcttatgtagcaacagtagtatgctgacaagtaacccgctcgacatgaaggctatagggacagtgctac

SEQ ID NO: 173511 - DNA, 611 bp, Zea Mays
aaaataatctcgtcctcgagatttaggaagatctagggaaaaggtgaggaatatctatatgaagctcttcttctctttcccaagttgcttcaccttcaccgtggtggctccattgcactttgcacatctttataaccttattcctcgtaactcgagtcaaagtatccaaaatcttgatggggtactcagcataagtcaaatcttcttgaacactaaggtcttccattggtaattgttcctcaggtaccctgagacatttcttcaactgagatacatggaatacatcatgaacatccgtgagatgctccggtaactccaattggtatgctacttctcccactctctttaagattaagaagggtccaataaagcgaggggacaactttcctttgactttgaatcttctcatatcccagagtggtgacaccttgaggtacacataatctccttcctcaaattccagtggtctccttctattatcagcgtagctcttttgcctggtctgagctaccctcaagttctccctgattatacagacttgttcttctgcctcttgaataagttcaggtccaaagaactggcttcctctagcctgatccaatatagaggag

SEQ ID NO: 173512 - DNA, 385 bp, Zea Mays
gccgcggcggcgacggagcccggcggcgcgcccgaggggacggacgacggagacggagcgaggagacagtagtaccagtagagcgtggcgtgctgattgacaactggccttgtaaattgtctcctccccggaccatgaaacgtgcatgccctgcgatcgttggtgtcgggaagttttggaatagcctgtgtacgcctctgtttggaagcgatggatgctggtggtggtggcgctgtttgaatttggcgtgcacaagcacaacggagtggatttgatgttttggttttactactcgctcgctagtcatatacattgcctgcctgcctgcctcattgacattgaagagtcgtcacatattgttgctggacgcgttttccttttccct

SEQ ID NO: 173513 - DNA, 446 bp, Zea Mays
ggggggtgggcctggcaccccccaacgggtatgccctctagtggaaaagtatcatcactttgtgcttccttgaattcaatacttggctcttttgacatagaaaaggtatgctctctagtggaaaagtattatcctgcagatttctcaaatcaagaaagaatgcaattagagtgccaattgccacattttcaacttgatgtttgcaaccatccagaactaaagggtttatcatctttggctgatttaacaagtggattagttaaactggataaagattcttcttatccgatggtagataaattattgagattacttttgactctctctgtgtcaaccgcgaccacagagagagccttttcagctatgaaatttgtgaagacacgtcttcgaagcaaaatgggagatgcttatttatgggattatctggtcgttaatttgtttgacaa

SEQ ID NO: 173514 - DNA, 617 bp, Zea Mays
aaacaatgttataggtcctattattgttctctctgctagttcaccaccatggatcattgccatcatgggcatggccccttacccacccatagtgctaaccatctgcgaggatatgctacctagattgactcttcatctatggtcactaccagcaacccccgaccacatctctatcgatcacctctatgccactagttgttgttagcaactcactcgtggcatgatcttcactcgaccatcttcctttgacactatcctagttgttctacctatttattaatgaccacaccatgttcttctattttatacttcatgcttaacctcaatgccacgatgctctctccaacttcaaagacatgtcctagtgctctcgctgatccgaattgacgaaatgctacaattaagaagtttactactctacaacacaattacacttgggatttgggttccttgtcctcctggcactaatgttgtcatgggaaagtgggtttatcatcacaagttcactcctaatatggctctcttgattcgtacaaggccctttaggggtttactcaatgccacgatattgaggatatgagacgtttagcctagtgattaagctaattactatcaaa

SEQ ID NO: 173515 - DNA, 445 bp, Zea Mays
taggtgtaagcctaattccctttcagagaaattataagtgatgttctttacgaagtcttacaagattggcaaattgagaagaaaatctcgacagtgactcttgacaactgcaccactaatgataatttgatgtgttgcatgcaagataagttacccctttcctctctcatgctagatggcaaattgttacaaatgcgttgtgctgcacacatcataaatcttatagtcaaagatggaatgagtgttatggatgcgggtattgaaagggtgcgtgatagtgttggattttggtgtgccactccaaaaagacatgagcgttttgaacgcacaacaacacaaatgaatgttaaatatgagagaaggatagctctcgattgtaagactagatggaattcaacctacattatgcttagcaccgcacttgattatcaagtagtgtttgatc

SEQ ID NO: 173516 - DNA, 510 bp, Zea Mays
ctttgtgtccaaccgttgataaaggtcgtcataggcttgaccccgggctctactaaccgctcgctttgcagacttcttcgctatcatgtacttctctatgttgtctgcacacttgtcatgatgtaagggtttgtagcaatctttcttctccttgatagccttttggacatcttcgttccaccaccaagtgtctttaacttcccttctatttccttgactcaacccaaactcttctaaagctatcttttggatgcatgtcaccatcttcctccacatgatgtttgtgtctccctcttctacccaagggccctcctcaataactctctccttgaaagtttgggccacatcccctttaagcttccaccactttgttctagtgaccttgttatgcttattccgttgtaaatgaatcttaaaacggaagtcagctatgacaagcttatgttgggttaccacacactctctaggtatcaccttgcaatctaagcaggcatgcctgttctcttttct

SEQ ID NO: 173517 - DNA, 519 bp, Zea Mays
ttctaattctctggactgggcacacaaaaccagaggagcacagggtttaatctataagatttcctagactcagaattcacccacgtggacggcgggttggtttcaaatggacggagggacttatttgcaatatggcgcaaccgaagaggtatgatgacatgtggaccgttagatcaatgatcgacgcccccgattagatccccctttaagtgaacctttacgcgacatggaccgcccgatctgaatccaagggtcagaaccgggatctggtcccacccctccatagccaatccaacggcttgggttgctccaaccgaagcggtacaatccaactaatctgggccacccattctacgatcaatggaccagggccgtcttctccaccacgccatccctatgaccaagcaggccgcgcggtggcacaatccaccgccccgtcggtgaagcccaccggcgatcctccgcccggtacctcggctccccctaacccgactaatcccagaaactgaaacagaaggg

SEQ ID NO: 173518 - DNA, 836 bp, Zea Mays
ccggatctttatgagccagtaccgcaggaatttaagcggattttttggttgctttatcacgtacgacctgttattgctgagaccgagacaaacacaagccacgaagaactttctctagatcgaccgaggagagtgggcgcttgacaggtacgcgtgaaactgactgacacaggacgctaacgaaaagaagagaagaaacagaggggattgggagcttcagagacgacggacatttgcgcagcgggagcgagtttttacgcacgcgggaacatagggatattagatacagtactgctggatggttatttttcctttttcttcctaaaatctggattgggacgaggatattagaatctattggagatgctctaactacccgctgccgtttactagcccatgaagtcatcccagtgctaatgggtggggccggacggctagcctccttgctgtcggggtcgcaagagtgcttgagtccggggccggcacatgggtcccccaagctagtcactgcccgtctcaccttagccatgccagtctcgatttcactgccaagtatacccagcatggcagaagcttcttctacaacaagttgttaaaaactagatcgtcgcgggatctccgcaactgcctgatctcctgtcccatggccgacgcttctgcgcacccctgatccctaatccttgacccctatccctaggttatataattccctggactccaagccactgagagccaccagatactctgttgttgggcgtggacaggagagagacagagagataaatgggatccgccgctggcgttcttcaccagtggcaccattcaggcagctagga

SEQ ID NO: 173519 - DNA, 886 bp, Zea Mays
agagaggtggtataggaatccttcgttcgaaaagctatcacaaacagataagctcgaaaacctccctatacttgagcaactcctccccgcttgtccctttcacgtaggattctcacacactagcttccttaattaattagccaagacgaaactcataatactccttgtggttgcaccgtttttccgggtggtcgctccatatttcaattaaacaaaggatcagggttgtacatgtaacattatcatgatcagtggtcgctccatatcatgcctaagtaaaccatcaataataaatcatgatcagtgttatacatgtaacattatcccataaccaaatagagcaatagcaaatatacccaataatagagttgtggttcgttggtggtgacgtttccttgcaccaagtctccgatgtatcctcaccatcatctcatggctaaggaactttccaaatacttcttcgggagtcattttcttgtacctgggattctcacgaaccaaagatacaagagtagcattgcgagaagtaaatgatcttaacataagttttaccacttcatgattagagtattagaccacttcttgctcccgagattgtagatttgattcactaggctcttaaggcgattgtatatctcttgcatgccttctctcttgaggatggcaaatctcccgagatcccattctaggagcccccttttgatgatctttgtaattttgtcaccttcatgcacttttagtgtcccaaatatcttaggcgctttccaagccattcaccttattgtattcttccctgcagagagaaacaagtaataccgtggtggcttgggagttgcggtgtaaaatttctccacctccacaggattatagttttcgtcgtcaccgt

SEQ ID NO: 173520 - DNA, 664 bp, Zea Mays
aaacataagaaggtttccaaacactggtttacacgttcggtctgaccatgcgattgagggtgataagaggttcccatccgtaattgagtgcctaccaatttaaagagctcctgccacgaagcactggtaaatatgtgatcccgatctgaaataatagatttaggcatcccatgtaacttgtatacggaggacatgaatattttagccactttgaaggtagtgcatgggtgcaacaatggtaggaaatgagcgtacttagaatatttatccaccactactcagatgctattggcattagatgagcgggacaatccttcaatgaaatccaaagacactacctaccatgcctgatcgagaactagttgtggtcgcagaagaccgagatatttcaaacggtcgggtttggattgttaacagactgaacaaccagctacatagtccttcaccatgcctttcatgttgggccatgcgaacaattgtcgaatacgatggtaagtcactggaagtttgtagtggccatctaaaggactgtaatgcagagcagaaaggactttgtgttgtagcgatagattagtacccaaccatatgcgacctttatacctaagaacaccagcctagagacgataaagaggatgactgtcaggttgcaatgccaactctgaaa

SEQ ID NO: 173521 - DNA, 334 bp, Zea Mays
ctcctcctatgttagttactttgcctcccgatcagttgacgattgctgcgacgttggtgcctcggaggtagtggccgagtcactcggggtcacattgtcgctttttggggtgacggccgagttattattgacaacattggcgcttctgaagtagtgtctgaatgatggcagggccatcgatgtttttagaattaacgaccgagtggttactggtgatatcagcgttatagaggtaaccaccgagtgactgatggcaacgtcggcgttttagaggtaacagccgagtgactgatggtgacgttggcgttttagaggtaacggtcgaatgactgat

SEQ ID NO: 173522 - DNA, 711 bp, Zea Mays
aaaacttcctgaggtgctctatattccatgaattctctacttccgtgccatccatttgagtaagccgatatgatcctgaacgagtgacctctgacaccatgaatggcccttcccatagcagcgataatttgtgccgtccttctcccgttagaattcggcgaaggaccaagtctcccactatgaaggatcgatgtcgtatagtcttatcatgatagcgcctcagggtctgctggtatctaactgactgaattactgtattcaatcactcttcttccagtacgtcaatatcttctagcctggtagctttcgcctcaggtatactttcgaagaccagccttggtgccccaaacctgaggtcggcaggtagcactgcctccgaaccagagaccatcaagaagggggtgtttccatgtagagctcgactgggttgagttcttaggctccaaaccacataaggtaattctctgatccacttccctgcgaacttttcattcttgtcgaagactttcttcctgagtgcttccagtatcattgcattagccctttccacctgaccattggcttttggatgtgttaccgacgcgtatttgatctggatgctccgtttttcgcagaaatcaaagaattcagagctagtgaaattggatcccaggtcggttatgatgttattcggtatcccaaacctgaatattatatcttgtatgaattcca

SEQ ID NO: 173523 - DNA, 592 bp, Zea Mays
ctgaaactgaaccctatgtcagaaatggtcccagtgtgatgaggccaagtttgatgcgccatatctttgaatccactcggttttagcccaagaatcctatagttagttcgtagactgatacatggtgaacaaattttattatgggagattgctctgttcctaacaagaattcggagatcaagaaggaagaagatggtcggttcaggcaactgaagatcatcgccatggtacagtgcccgggaggataagcttcagaccctcgccgtcgacgaccaccgcgcacggattcgcgcttctgccgttgtgatttgtgcttggaatgtttggatagcgctcagggtcacacaaatatcatcgccgcggaaaagccccggccagtaaacaactccggccaccgtaccaagctcaccgcggtggaatccgataagtatgccggtaaccgccgccttccggccttgccccgtgtgtccaggcacttccaccgcatcgccgtgacctgctctcgctccccgttgatcgtcggagtgactgtcacggcgtaggacacgaattcactgcgccagtgaacacccccttcctccgaccgtcgtgc

SEQ ID NO: 173524 - DNA, 336 bp, Zea Mays
cgccaggcgccgtcgggtatagccaaaggctggagcagtcctgggtacctgctcctgtcgggcttggcctgtaaacaaatagagcatgccgaaacaaagtcttgtacactcttcttgagacctgaccaagcaaatagctgcttgatgcgcctgtaagtgactggaataccagaatgaccaccgagaggagaactatgcatagcggccacaatggaacactgaagagaatcattccggccaacccagagccgacctttaaagcgaagcagaccatcacaaagggaaaaattgggaacaacagttttgtcaacaaccagcttggtgagtgaaagggaa

SEQ ID NO: 173525 - DNA, 790 bp, Zea Mays
ctggcttgttacgttgtgtacgtgcatatgcccgcccgtccaaatccttgttcaatcaatcatatactacgcggccattgtagctagttctaggtaggcaggttcacatcactacatgcatgagtggtggtactactagtactggctcctggaacgacctgaccaggccacattaatagtgcatgcatgcacgggagagaaaaaaaagaagacaaggagcaaaatgacgcccagtgcttttccataacaactctttgcaccaaccacgcacgaacagtcccatcacgcatgacaacaggctattagctagcagacacatacacggaacggtcgatccatgcacctgcagctagctagcagtgcaccatcttgctgccgaacatgatgcagtagtgttgtcctgtcctgtactaatggagatggacaggaggagtactgcaaagaggagctagcataaattatcataggctcgtgcatggccacactactgcatcagatgatcagatcagacagagtgcaaacgcgcgcatgagctgggggttgattagctaggtacatgtacagcaagagccgctagtacgtactacctgctactgcaagggctagctagctagatcatcgtaagggaacggtacgagacccggcgccacaagactcgatctgcactgcagcggcgtacgtgtgtctcgcggtcgcggcacagcgggatcgaaaagaaaaccaagaaccgatcgatacgatccatctagctaggggggagtagatcggtgaaaaaaaaaacgaaagatta

SEQ ID NO: 173526 - DNA, 873 bp, Zea Mays
ccgggcaccgcgctcccaataaccgaaccagtcagccctatatgaccgcgggtcagggccgccatctctctacctggtgcccccgtgaaactccagcgcatttctcgccgccgcggaaggaaccgaggccgccgtgcgtgaaccgtagattgccgtcgaccgcgccctcgaagtgttgcccagaggctcccttggagtgggggaaagcttcatttggtggcgctgctcgggtttgctcgcctgggccccggcaattcctcgccgcgcacctccttctgccgcggactgcctggttccgtggcccgggagttcttctgcgccgctgcgtgtaggtaatctcccatcatcttcgtctaccgattctcgtcatgtagagcttcgcaggggaggtatttacccatccggggaccatgaatttgtcactggcgcctcatcggcgccgcgacaccgcgccatgccgtgggtagggcattccgctgcacgttttccaaagaacacaggttcagtaggttcgccgttctttgaatttcgattagcaccagttgatttggggatttggggccctgtctccgtcgagcgaggtgcgccggcgggttgctccgccgcggggtgctgttcgccccgtttagccgcgttgggttagagaagacgactccggggcgctggattcgcatctgacggcttagattagattggagataacgcttgggcacatgcgatctcggccgcccatctagatcgaacgactgacattagatcgtggtgtggtgagctccctgccctggattttagatccaacggccgaaatctagagttaaccccttcagccgaacagttttgcaaaagagtcctcggggttctgcgaaatagaac

SEQ ID NO: 173527 - DNA, 1248 bp, Zea Mays
tactctcattacggttgcaaaagcaacaagtcaagctacctttccaatgtcttttagctaaattatctttggtaaggatcgctcctcgacctaaattccacaaaaacacttttattttcagggggattttaagtttccaaatcatcttgttccgattgttgttgggattatacatcaacaaatggtacatagattggacggaaaaaattccattcttatgaccatcccaaacaaatttgtctctagctgggctgaatctaaccgtcgttagcaagtgtaacaattttttccactccactaatttacttcccgtaattgttcggcgaaaagataaattaagattcgtgtctagacaaacttctgcaaccaaggccgatttaatgcgcactgtattaaaaaggttcgggaattgctcacaaaagggacgactggttagccatttatcctgccaaaatctggtgttttgaccatcccccacttgaaagtgacccaatctaagaaactgatccttgatgttcattagacctgactagaagtgtgaatcacctgatcttctagatatttgagtaagggatttatctcctaggtatttatttttgagtaactgttgccacatctcatcctcattaagtaatttgtagagccatttgctgagtaagcatatattttttatagctagattagagatgcctaaacctcccaatgcttttggttgacagacaatatgccacctagccaacctatatttccttttactgcttcctccctgccaaaagaatctggatcggatagcatccagcttcttcaagatgcccaccggtatctcaaagaacgacatcatgaacgtaggtagactacttaacacagaattaagcaatatcaactgtccacctgaagataaaaatttggccttccatgtactaagcctcttttcaaaccgatcaataacaccctgccagtcactatttctcagccttcaatgaatcaaaggaattccaagatacatgaaaggcaatgtcccaattccacaaccaaataaatgtgaatattgcaattcatattccttagctaccccatagcaaaatagctcacttttgtggaaatttattttaagcccagacatttgttcaaaaacagtcaaaagtaatttaatattccgagcatgctcaagattatggtctaagaaaaccactgtatcatcggcatactgaaggatagataaaccctctggaatcaagtgcggaacaa

SEQ ID NO: 173528 - DNA, 728 bp, Zea Mays
ggaatcagatgttcagaccccagataaatttgtgtccggtgttaaattcataaaacatcgtctgtaagtgcatggtcgatattgtattagtctgttcggtttatatctcgaccacgcttaaatactagaactcagatacacacgtatctatttttgtgttaaaaagaagaagaaaagaaaaatatcttgccgtcgctatccctctcacccggttgatttttccagccgacttctctctctaactttttgctaatatagtactcgttttattaggcttctctcttctagtattcataatttcttcttctccctaatagtattctcaagtgacgttatcctttaaaatagcactctgaatcattttaatcattttattttcttatttctcatatctaaatagagcatactatgaatgaatcggagttaaatagttgtaagtaaagagttgcagtcaagtgatagtggaaagtaaagaatcggagtcaaataattgtaagtaaagagttgcagtcaagtgatagtggtaagtaaagaatcagagtcaatcacaattgcaggagatctgctaggcaagcaactcacgaggaggcagttctgaagatgacgacattgggagctgttcatcggggcaaaggaaatggaggctaggatggggaggtaggattctgattcacaccctctttctataaatttctggatttattcacgtacatggatgagttgaaagg

SEQ ID NO: 173529 - DNA, 686 bp, Zea Mays
aacttacaataaaaatctccctcgtctatagctccgatgtcatagacacccggattcacgcctaacatcatccctcctgacctccctcttggtggcattaggtgccaaagagaatcaacaccaccacagaaatgtctcaaattggattctgataaagagctacgacccgtttctatgaaagcaataaagtcgagtctatgttctcgagctagatggaataggtagttatgtttagccaaatcaccaagtcctctacaattccaaaaaatttccttcattttaaactaatcttggagggtgtaacaggctttctggaagggcgattaaccttcccatttaaaatagccctattcgtcttctttctacgcggcgccacagtaagctcacaacatcgatctaagccacacaactcagaaacatcatcccatctatcagtaatatggggtaattcatcatcttactcggcctcttcctcttcatgaaaagtattcatgctaaagggaaatgtagattttgcggcaaccgtgagcttatcaatctcaatatttttaatagaaactacagattgtagcactttatttttagtgctaccaagcataatcccaatcttttcacaatttgatgtaatgattttcgattggaaaggaataaaagataactcactgatttctaggttacgctttgct

SEQ ID NO: 173530 - DNA, 466 bp, Zea Mays
cccggtttatttttttcttcagcttttctaaggatgttgaaatcacccccaataagcatagggacctgacttctcgagcaaactgcagacagttcactaagaaaacgggatttgtgctctttttgagcagccccataaccattaacaaaattccagataaatttttttctctgtgaaggacaagagagcgagtcaagaattcaccagcttcaaattctctgacgtcaaacacctctgagttaaaacccactaaaagacctcccgatctcccattaggaggagaggagaaccaggcaaaaagcttgctaccagcaagcgaggacagaagagaatcattaaaatggtcctttttagtttcttgtaaaccaacgaaatcaattttttcctccctaatgatttctctcaagaaatcaaatttagtgctccgacccaaaccctgacagttccaaataaggcctctcatgat

SEQ ID NO: 173531 - DNA, 763 bp, Zea Mays
cacttaatttttattgtggccggatacttcttttgtggagccattcggtcagaacaatatcctagacccagctaggattaggtgccaacacatgccccctatttttggtagaatttttatgtcggaactaaatctttgccttgtggaagattaacacctctgttagcggtcaagtcatgtcaactgactcttcatcacacaactctacctcaggtttcggtccgacacttccacttcaagttgtttgcctccttatactagtattagtatgcacaagaactctccaaatagcatgaacctgtcgtaagcaatgacacccgttctcccacctagaacaacgactcttcctacttctcttggccatctgatgctcccatcacccctataagtctcctcttccttctccaccctcgctttatttagtcgaggaggattgggacttccactaagacattgaccccttctcgatcgattatgcctcaacgatcgtcgatgagtccgatgcatattcgttgtttgttgcgtgagttgcttgcctcctacatgcccctttgtactctcctcctcggaagatgattgggactgtgatgaggcatacatcgactccactgaggaggaagtctcctctgaggagatcggaggagttggtagagatgtggctgcgtaacagcagctccaccaacgaggagcctgaggaggacctcgactgagatttcagcgacgatactagtgtggagagcttccttgacgtcgctgccgccaa

SEQ ID NO: 173532 - DNA, 337 bp, Zea Mays
cccacgacgaggctctaggggcttagggaaagggtcaggcatgttcagggcgacacggcaaacatgaccatgggtgcagaactggcatggggtgctagagaatgcagaccgcggtgggaaaagtttcgtggcggcgcaactaactccggtgagcaattgcgcgggctctggggcgatacttggcgaaataaaggcatgggaagggtgctcacctcgagtgcgaactctgggattcttggagaacagcgggggtgcgatggtgtctcgggttgacggtggcggggctccggctgcgcaagaaacgctcctgtgagcgcggaccgggcaaactagagag

SEQ ID NO: 173533 - DNA, 662 bp, Zea Mays
aaaagtagtaccataatagcaaaaaaactcgcttgcctgcttatcgaaccacttttactagttggtacagcaaaggccgccatttgcaattcaccattttggtcgcaaacttgcagagcatggctacaaaaaacagctcgagctccatgagtcggttttaccttgctgagtcacgagctgctggtgaaccgagacaagtcggttttctaagctcgaaaaagatacgagtcatctcgcacaagctcgtgagcaagctcgcaagctgactcttgtgcagctagcgcaacacgcacatcgggtcaacttcaatacaaggcttgtggcggcatgtcttggcccaataagtgaacctaaccctaatatgcttgcatccattgatcgacatgtgatcgtgactccatgaccgtaggctggctacactaagggttgtttgtcgacagccgtgacattgagacagtggtgtggcgacttcctctccccaagaccctgacctcgagtcctgagagcttgacgagggccgacctccgctgaccgctacccgtgaatgcgtggcaggtgcgacgacgacccacgtctagtcgttgttgctcacatctgcttcactcaagcggtcaagcttcaggcacctccaggccctccatcgtcatctacttgcggactcg

SEQ ID NO: 173534 - DNA, 445 bp, Zea Mays
attccatacatgggattagaggtatcccgagcagtgtctcgtgcatcatcgactttggaaggcagtcttcgatgtcaagacattggtcaggattgcccaactcacatggaggtgactgctgcagaaaacccagtcctcgaggatggtgttggcagttacctagcaccaaagggtgtcgtcggtagtgatccggctctggtgggtagcacgagctgcaacccagcccccgagggtgttgccggtagtgatccggctctggtgggtggcgcgagctgcaacccagccccgagggtgtccaagtgagctctccttcccacacctccatggatgtccatgtcgggtcgtctccaccacgatctgatggggtgatggcgatgcatgcttcttcggcttcgagcaaacaagtcaccttggaagtcggcgagccagatgcgagaagtctggc

SEQ ID NO: 173535 - DNA, 684 bp, Zea Mays
cgggtggtcgatgtcggccacaaacgttgagggtgaggctccctctgccttctgcttgatggcgacagcgggcttgttaagacgtcgcttgagggtggcggcgcgcctcatgaggtgtcgcttctccgccttgctcctggtggaggtggaacgtgagggtcctcccgcgtttgccacgatgggcgtgtcggagtcaatgaggcggagttctccggtggcggtggcgaggaagtcgagggaagagaatgtgatgcgagtccctagtgagaaagtctcgctaccagcaaaaacggatgactaagccattggagttaaaatgttgcttagcacacaaatagtccccctaccttgtgtaccaacagttgtggttttgaaaatagtggacacaacagaatttgtgttcggtgggggaggctagtgcggactcactccgagtggttaatcaagtgactcgagagggtttatactggtttaggctcacgccctacgtccagtgtagtgttaatcgttgtattactcttgagaacgtgttacactgttacagttggtgtgagtgtgagaatgagagtaatgggggagaactctagttgaatgctcctctatctcttgttcgtgttccaccaccgacttttatatttcaagggagcggcctcatacaaagcgtgggctgatctgaaatggagc

SEQ ID NO: 173536 - DNA, 509 bp, Zea Mays
ctcgttacaatgatggcaacaatgaattgaaccttagcatatttcgaggccaactcggaagcaaagtggctcgaccaccaagaccctgacacatgaagagtggcggcatatcatgctatatgtattgaccaaccttgaagaggtgacaccatacatggaacaatttcttcatgaattctggcgtcgatcaagggacccaaatccacaggaatatgacactcttcttagaaagggttcgagaaatgggttgcccgatttcatttcctggttcaaacataaggtacgtgcttagtttgtaaaagagatacgtctttgaactcaatttagcgtcttttaacttgcgaatacttgcagggccaaagagatctgtctatgagtgccaagttgagacaagtagccaacggctttgcttatagggtcaagaaatattctgggtatgacgtcaatggataccgttttcacacaacaaactacgacaaaagtcggcccaatcggaaaacaacgtgttc

SEQ ID NO: 173537 - DNA, 1037 bp, Zea Mays
ggtggatatgtgatgaagctggaagctgtagtttgtatgccactggtccaaccctttgcacaattgtgtagggaccgaaaaacttgaaagctaatttctggttagatcttgcagcaattgaggcttgcacataaggttgcagcttgagatatacttgatcccccaccttaaagaccagttcagagcacaacttatccgcttggcgcttcatccaggattgagcatagagaaggtgttgctgaatcaatttggaaataagctctcgatcctgcaaccactgtttcagattcgttatctcgacggtagtcactgaatccacaccaaaatgtcggggagcatggccgtaaagcacctcagaaggagaacgtcccaggaccgagtggtagttggtattataccaaaactcggcgacagcaagccaagatgaccatttgcctaggcataaatgaacaaaacatctgaggtagggttcaatgcactggttaaccctttctgtcttgtcgtccgattgaggatgataggccgagctcatacacagctgtgtgccggataagtgaaagagctgttgccagaaagcactggtgaagatccgatccctgtctgaaacgatgctggagggcataccgtgcagtttgtagacattgtcaaggaaaagctttgccacttttgcttctgtgaagggatgagccagaggcaagaagtgactatatttcgagaatctatcaacaaccactaagatacaatccactgatcttgacttcggaagtccctcagtaaaatccatggatactgagtgccaagcctgaggtgggactggtagaggattcagtaaactgggatatcgagcacggtccgacttggcctgttggcatgtgttacaggactgcacataacgatggatgtcacgtttcataccttttcacatgaacaattgtttcacccttccgtaggttaccggcacccccgaatgaccaccgagtgatgaattatgaaacgctacaataaccttggtttgcaacacaacattgctaactaac

SEQ ID NO: 173538 - DNA, 735 bp, Zea Mays
aaaacttcctgaggtgctctatattccatgaattctctacttttgtgccatccatttgagtaagccgatatgatcctggccgagtgacctccgacactatgaatggcccctcccatagcggcgataatttgtgtcgtccttctcccattagaattcggcgaaggaccaactctcccactatgaaggatcgatgtcgtatagtcttatcatgatagcgcctcagggtctgctgatatctagctaactgaattactgtattcaatcgctcttcttccagtacatcaatatcttctagcctggtagcttctgcttcagctatgttttcgaataccagcctcggtgccccaaacctgaggtcagcaggtagcactgcctccgaaccatagaccatgaagaagggggtgtttccatggagagctcgactgggttgagttctcaagctccaaaccacataaggtaattctctgatccacttccctgcgaacttttcattcttgtcgaagactttcttcctaagtgcttccagtatcattccattagccctttccacctgaccgttggctcttggatgtgctactgacgcatatttgatctggatgctctgttgttcacagaaatcaaagaattcagagctagtgaaattggatcctaggtcggttatgatgctattcggtatcccaaacctgaatattatatcttgtatgaattccactgccttggctgaagttagagaag

SEQ ID NO: 173539 - DNA, 890 bp, Zea Mays
ctaaataggaaatgcagcagcttcaacaaatctcccatcacgtcttctatccccatattctttaggagatctctaaatccaccaccatctctcctacagaaaggggacagctctacctctcctaaatcaggataagatttgagcaatctgctgaagcaaaggtctttcatttcccttcttttttgcctatggctagttatctgggagaagaaatagaagatacagtgagatgctcttgtctccttgcccttgcgccagttgatatctgaggttattaggtttatgagttttattttttgtagatgtttcgtgcgtccgtgtgatttatatggggctctaatcccattttttttctttttataataatgatacacaagcccagctctcctgcatgttcaagagaagaaaaggcagatctaagccaatatgaaagagagaggcgagaaaccacaagttaaacggtacaataagcaaacacaaatcccggaagaaataagatatcaaacacagtctagaaagaaggataaagataatatatgatctgtagctatcttggtttaatgtgatatcacaatagccaagaaaacctttgactttacaaaagggaatccctgtccgtgacttttattatgtgaacaaaactgaatgttcaaatattgagcagttcaaatgtcttagtcaaaggtagtctaaacaggctatatgaccaataatcataattatcagaaatgccagaaccctagtaatcaacatggatttatgaatgtttcataaaagaggtggttgaaaattatagcctggtagagtcctttccggagttataaaaaaaacctgcaagacgtaagaccaccaatgcggcattatattaagaagatcttctcatataggtc

SEQ ID NO: 173540 - DNA, 652 bp, Zea Mays
ttcaacctttgaaggacagggcatacccggcctatctgtaccgaggtctagctgactcaacccgggtcaccaacagaagaattcctgctgtagacttggtgaaccggcttgaaatgatacttagaggcaaggtatcaaatgttggcgcccctgtcgcatactcggtctggaacctgcctccttccaaggcctttactcattttgtgtcgaatcctcctgctgctgatggcggtttgggccttagagtgcgaccctctgccgaagaagttagtgctttggttgcttcgcttggagaaattcctgatgatgaatggcaggtccactttgaggtgcctttggatcctagtgatgcagagataagtgctatgcttgatatgctagccgaggactcttctgatgctgctcctgctgggacattggtggtggcgtctctcacggaagctggtacaaccttggatattcagaggcctgtcagtgttcgcccgaagcgcccttgccgagccaatcaacttgattctcctgctgatgagcagaaaaagaaaaagagacgtcttcggcgagtatctagcttggattgggatgctggcccttcggttcctgctgttgaggaagtgcctgtgcctgaatttaccgacgctgaccccaatgggtg

SEQ ID NO: 173541 - DNA, 422 bp, Zea Mays
ttatggatttctcaactttcttagaaaaagaaaaagaaaaactttcaatagtattgggccaaattttgcccaaccggcccagtttaagcagattacacgggcgcgcctgcggcagcgcagccggttttgcataaaagcccatgccagagcccaattagtaacgaagtcctcaactgaactctgcgagtcactgacactttacttctggccccttctaggtttcttgtctttacaaagtgagtccccgatgtcaccggcggcgcagacgcgttcccaccgcgacactacggcggaggagagcccgggcagccattggatagcgaccagaccaaaccctaacctaccccgagcaactacaggcgggagcccagtaccatggcgctcacccaattggctcaagcacatgatgtttcaaattgaag

SEQ ID NO: 173542 - DNA, 311 bp, Zea Mays
gtttaagacatttcagttaacatgtccttgaccacccttgtttcttaatgatccatgagcggtcattttattttgcacatccttggtgatctcgttaattccttgtaacttcattcggtaatgaatttttatttcaactcttctgtcggaacctcacttatcttatccttgattgttttctccattttgtgactttgcaagtcttgccttaactctgtccttggactatgcttttcatcattatcacctttatccttatcacctctatatcttaccttgatgtttatcttataccggcctttaaaatctcc

SEQ ID NO: 173543 - DNA, 564 bp, Zea Mays
ggcgaaacagagagtgagtggattgtcgcgaagcggtaggcgtcatcgtagtgagatggagagtgggcgtcttcgcgtggacgggactggtaagtgagaattgttgtcctcgccgattggggtgagtgtaggtgagggggagctgcgaaatatttttgagggtgaggaattgaggataatgctgttcaactacagggagatgggtatcatcccgaaggttgagccaatataatatatgatgccctcgttgtgtgtatgtaaccataatttgtatgataaggctgcgcgccttcgttgatccgatcacgcccgtaggcgacttctgcacggagagtcttttgggaacgacttcgatctttacgtacttgttgtgttgtttcggctgcgctcgtaagcgacttttgcacggagagtcttttggaaaagacttcgattttgcgcacctattattccggttgtacccttagacgacttttgcacggagagtcttttagaaaagacttcgattttgcgcacctattattccggctgcacccttaggcaacttttgcacggagagtcttt

SEQ ID NO: 173544 - DNA, 623 bp, Zea Mays
gggaggaggtacggtacgtgcctcgtttctttaggaaaaaaatatataatggaccatgcgtgtattcctcctcctcctcctcctcgtcgtcgtctcgatctcctcccgacgtccgtgcgtggtggttgatttattggagccccattttgggctgtcgttagtgggaaagattagttcacaagtgatcccgagactttatggaccgccccctccggcggccgtaatataaaaccccgcgggcgagcacgctgcagatccaccagcccgatctcctgtcgtacgtgcaattctacgtgctctcagctttagctgaaattaaggcaccactgcacagcatgcgatctggaaacaaacggggggctacagtatcaggttctcaaccggtactcaccatccagtactttgcaggcccgaccgaaaacccggtgtttatagaaaacaccgagttctcaatcgatactcagtatcgggttctcaaccaatactcagttcatcgatgtgtttataatcgataccgacgcctttatcaaaaccggatctgagataaccgaaacaaaagttgattgacggaagccttttcgtcatgttttttatacgggttaaggccttgtttgtttgtgttg

SEQ ID NO: 173545 - DNA, 447 bp, Zea Mays
ccttcaggtcccttctcaaattcttcagcatcgaaccattgaacgaggtggagaatccgttgaacaagtaaaggtgctctggtcaggaactgatgcatcgttgtctacttgggaagatgctgcagccctgtgttccaggtttccagcagctccagcttgggggcaagcttctgctcaagtccgggggaatgtgaggatccagaaccagcagggaggaatgacgacgcaagaaggtggcggggaacggcgaagcgcatggaagaaatatttgaatagcaaagtgtttgggccacaatgggccgtgtgattgtaataagcccgtgtatggagctgatacttgtgccgtgcgtataaaacgctaagaacgaaaaggctgaaagcagaaaatgagaaataacagaatcgttcccctgcctgccattctgaccttcttccctgattcctccg

SEQ ID NO: 173546 - DNA, 1125 bp, Zea Mays
ggcgaacctaggggcgggcttaatttggctagaggggtccgggagggggctgtccgcggggaggtggcggagctccgcggcgggagtcgctgtcggtgagcttcgggcgagggattggggtgggggaatagagttctgagttcacggcgatgtggtgaaactggtaggccaacctaattgctcgctggaccaacagagaggaagggagaagagggggacggcttaccggagaggaagacgacgacggcgcttccgcgaattggtctcgggcgagggaggagagtggtggctgaggctggtgcggggaaggaggtgctcggggcgacctttttataggcgcccgagggaaggggagcgacggagctccgcgggcgccggtgaggtgcacagcgccggcattaatgccgcacagcggcgacgacgagaccttacggcgagggacggtaccgggcaaggacgcggtcaagcggcgaggacggggcggtgccaaactctcttgtgcggcgaggggatgggcgaggggacgacgatggaggggacggcggtgagtcgtacgcgaggaggacgacgaagcggctgaccggtggggccggtctgccagcgggagggagcgcgcgagagagagagcggctggcaggtggggccggctcgtcagcgagagagagaggggggggagcggagcggctgcacgcgcgcggtagcaggctggcaatgggccgaaagggggagcgcgggcgcgagggggggaaggcggtcgcggcatgggctgaatccagcccagctagggggagagggttttcccttttactttttattttccaattcctatttccatttttgtttcttttccttttgaacaatttatttagtagataatctaggtgctggaaaataaaatctaagtgaggtgctcatattcaaacaaagtgtatgcatatgatgggaagaatctaagggagttttgggatagataataagaaggggggttagattagagtttcaaacctgggttagaaattgggatgttacatataataattttgtacgaagttgtacaccatgccatcactataaatagaggtacagtgccatgcacggggcgcggatccctgaaatcgagaaccc

SEQ ID NO: 173547 - DNA, 465 bp, Zea Mays
gagtaggctacggcgatgcggtggaaaggtagagacacgcggcggacgccggtgatggcttaacggcggtgagaaccttatccacgggttcagtgagcaaggggggaggcacgacggtgagtcaccagagttatccttaggcgaagagctactatctggcaggcttatccggtcaccggtggcgtaaatcacaacggcggcggcacgaatcgcggcggagatcggtcgtcggcggtgagagctctgcgctagcagtctgatccacttcagttactgtaccatggcgagctccattcagatgaactgacagtcacggtttagggccaaattcctctcagatttctatagcaacgtgaccaacactctacaacaaaattataacttaatagaccagctccaactttgatacatcgtgcatccacaaacagtcacaggatcatgctttgaattgagcttgaagttcat

SEQ ID NO: 173548 - DNA, 388 bp, Zea Mays
caccgggtgcgcagtgaagcccctcctttctggcaaattgatgccaaagggggagagagacatgaatggagtgtttcatacaaccagtgggagctcgcgcatgtggacatttagacatttgcatgtgcatgtttattatgtctatgttttatgcatttgctgtgttgttgaacaaatgttatttgtttgcattcaaactatgtactatgattgataacttcttaaggttctattagttcaaagtatcttatgaatggttaatcgaggtgtggttactcttcctgcgcccatgactcatattattgtacatgtataccttgataaccatgattgtagtaagatctccgccaaaactccaatatattatgtgtgtgaaatcttcaactgg

SEQ ID NO: 173549 - DNA, 599 bp, Zea Mays
acattatcccctcgcgagtcatgccacctcgggcgcggcccgttccaacctcaggcggggacaggcgcattttccctcccttataagcatgggcaaatgtttgcccattgtcaccccagggctttccatccttaggctctcacttcgaatggggtccgcttgagggtcaaccggtggcactaggattgagaggaggccacgtcgcgtcagtctggcccctcggtagggccccacctcttccatgcgactcctctcctttcttccgttgaatcttatccccatttggtgtaggacggtccttgtctcctttgtccaggaggcatcgtcctttgccaactcgtcgcaatcggacctactgtccccgtccctctccctctggaatcttgggagggcaacgaagtcttccatgcggcgcagaacgctgccgaggccgagaccgaacaactccaagctcagctccccgagtctgatggtcgtgtagttggtaaggcgcccaccccttgttccttggtagcctcggtgcctccctcactctttttgtttcttccgattggtttggaagccaagctagagaagcaatgctgccacttgggttaagc

SEQ ID NO: 173550 - DNA, 515 bp, Zea Mays
aggaccactgcaacattcaagagtctgtacgcggacaagaggtcgccgagcatggccacgggtacacgcatggacaacaacccatcctacacaacttgatgcttgtctttgctcggctcttgcagaccccaagccaagctagaggcatgctcgctcatattgccaatggcatcaccaactcgccagaaggggacgtttatcgacaaatccttactcaggcggcaaatcatttcgtgtcgatggctcctactgaggaagacgcacgtaaccacatcaacagtcattgtagggcatggaacaacatcgaggtatcactcacatgacaacacgacaaagagctaaggtgccgagaagaatacgatcggaaccacatcatcccacaacagaggcgcaacccagactcattctatcatagcttcaatgaacatccctacaaatactcgctcggtccatgatcacttgggcaaccgctttccacgatcattgccatgatgcctagaacgtcctgagcatgc

SEQ ID NO: 173551 - DNA, 354 bp, Zea Mays
gccagagttcgctccactactagggttgatcgtgagagagatgagaccgaagctactgagactgttccgatttccgaagcaatgaagcggtctgggctggtaacatcggaggacgtccctgccgctgaagcagagcaagctaaagttgaggaaaccgggtttgaagatgattatagcagcgcggtgccgagcaaacccagccatctggatttcggaaaatccaccatctccaaaggtgacctacctaagatgctgaaattgggctatttaatgaagaaaagaaagagctaattcgctttggtggggaggaaactactccaaagccaggaaaagatgaagtggtagtttttaaaa

SEQ ID NO: 173552 - DNA, 652 bp, Zea Mays
cggcaagggcgcctcgggcgagtactggcaggcttctgagtatccaaagttgtatcagcctctgggaggggcgccactaccaatgccccagcaggagcagcgtcagaagagtcctcagccagcaaatcaagcatagcgcttatctctgcatcactagggttcaggggcacctcaaaatggacctgccgttcatcatcaggaatccccccgagcgaggcaaccaaggcactaacttcttcagcagagggccgcactctaaggcccaaactgccatcagtgacaggaggattcgacataaaaagagtgaaggctttgggaggaggcaagttccaggctgagaatgccactggggcaccaacatttgacactttgcctctaaggatcatctcaagtcggctcaccacgtccatagagggaattcttctgttagtaacccgagttgagtcggctaggcctcgatatagataagccgggtatgccctgtctttcaacggttgaatattcttgaagacaaaatcagcaaccacagcttcagcagtcagacccctctctttcagcaatccaacttcagccagcaaagcacctgcctcagctacctcctgatctgtgggagactcggtccagcttggggtgcgaacatccggctgtcttc

SEQ ID NO: 173553 - DNA, 627 bp, Zea Mays
atgaggagcacgccaccgtctgccgcagtatgcctcttcacctccgccgaaaccaacaacccagtctctggcacgggggcccaggcccatgagtcatcctccatgggcactggttcgtgggtgtagagaagtcgaaccaccgctcgcgccagcaccgcgcctcctcggggccaccgcagaagacagagaaggtggattttcaaaaccaatgcagcggtatcgaggcaccccgcgcatggcccagcaaaaccatcaagtatgaaggcgacgggtcagtcaaccgcagggacaggcgtgacagttggcgtgaccgaaggtggactggcggtaattacgacagcgagcgcacagaagcagcgtgtcaatggccaaccaaactttggccccaactgcaggctcgttccctcccctaaggcaggcctgggggccactgtcggtaccctgaatcaggggtaccccttactacagtatgaagaaacggtgcccgtgcagctatctctggccgcatggtgaacagcaccctactccaccacgtgggtggcccaaggatgccacgtggccagaagaggtgatatactccaggatgccatcagtgggtccggacctccatgagagagcgacggaccc

SEQ ID NO: 173554 - DNA, 327 bp, Zea Mays
aaaacagatataagatttacgctaaatttcgtactcatttacgctgttttagctcacggtttacgctggaatcggcccgagccaggaaccgcgcacgatcggctgcacacgattttcacgccgtaattttagtccccgtttgctgttacaaaacagatataggatttacgctaaatttcgtactcatttacgctgttttagctcacggtttacgctggaatccgcccgagccagaaccagaaccacatactgcatgatttatgctgtcaagtacatgtcattatgcagtcgtaaacgctgtccatagtgtcatattcgttccacgtg

SEQ ID NO: 173555 - DNA, 512 bp, Zea Mays
aaacatcctaatgcagacagcacgagggggtctagcagagcaaacgtggacttacggagtcacagacaatgtctacggggcgacgggcagcaggagcagaccacacgctgccatgacgacggtgggtgcccaaaccaaagtggcgaacaactacaaagacgggctagagaagctatcggttccaggacctaataaggcgaacttgaattgaggagagagggaagaaaatattaaaggggaggaaagtactcaccgtcgtgcagcacagagcgcggtgctgttttcagccatgcctgtcactggtgaggcatgggagcgagggagatgactactggtatggcaacgacggctacgcgcccacccgctctttccttacaggctgcacatggacccgcacggcgtcacggaccacataagcagcgtcatccgacgacgaggcgatgacgaccgcgcatgggaggtaggccaatgccagcgtcaatcaacggaaggcaagccagcgtacaccatgg

SEQ ID NO: 173556 - DNA, 638 bp, Zea Mays
ttgttttgcatcgtaccttatgcactggactactctcaaaggtactccagtttcacgcgaaacagccttagtgacccctctatctaacttagtatttaccgacactagttcgctctaaaagcatgccatagatagattgcttcaattcattgctgtatgtgttcctcctcctaatctctccaccttgatcaacatggtcgacatgaggtccttctggttgtgcgtcacttgagccctcaacatggggttcatggtggatgtcctcctgcctagaagttgcatgaacatgccttgtgagtcctagtctcgcacgactacctacggttggtgtgaacagggccatcgtgttgcccgcgcccaacaatgaaaccagctccacgccctcgaccagccagaccaagcctaccacgaacacgacctgctactgcatctgtcgatggattactcatttgttttcaacataacaagaattcatatggatttcagattttgggaacaccatgcttactttgtgtgtgcgtatggccaccgacgttatgtgttgtgtttgtgtggccggcgtcaacattttgaccttctccatgttcatcgtggactgcacgggatcaaacaaattgttcatttgagtagcaattaaa

SEQ ID NO: 173557 - DNA, 363 bp, Zea Mays
ggccagtggggcggggtgcattcatacttttatgatgctaagctatgatcattgttcaagttgagacgagattttttactcccatcacttgagtcatcgtcataagacttcgtgtaccacttggattaaaggcgaagagcacaccatatgtgctctagcttgaactcgttttctttggtccctttaagcggtatatcatcatctgttgatcatgtacaagtggttgtagatgttgttgaagagggtgaccttctagttgcttgtcgaccactgattcttttgctacttggagttatagtggcaaggagcttctatgatggagctatatgtgttgaccatttgcccctagaacgttgatcctgc

SEQ ID NO: 173558 - DNA, 631 bp, Zea Mays
tctgccattgatcatacactagaggagattatctctgaagaccttttattggagcttcctgaaactgagagtgccaccatccgtgcagaggtacaggataacaccccctcagctagtaatccagtcgggcaagaaataaaccggacagttttccaagcttcttcaacctttcaggctagcctaattcgtgtggacacctcggttcctgatgttacatgcaaaggttatccagctcctgttggtacgattgagggtgattcagcctcgagtgtgccgctgaggataacccagccccagagggtgctgtcgaggatgacccagcctccgagggtgctaagctcggctcctcctcggctgcttctatggatgttcatgtcggatcaccaccagtttagtctgaggagccagtgttgatgagtcttcctactgctcttgttggtccgatcactttagaggtcagtgacctgggcgctaggaattcgctgcactctgtcggagctgaggtttcactgagtgctgccttgggcgctagctctaatcctcctttggggctcgattctgctctcaatattgcttttgctagtaccccaccgtctgatagcacattcgtgcctccgactttgggatttcc

SEQ ID NO: 173559 - DNA, 404 bp, Zea Mays
cggtggaattataactcttccgcttgggcgccatctcaatctcgtcggcgaactgagcgaaagcgagatcacagggaaacagagaaggtctagaagcagaaagtaaggcttgggctcagaatgcagaggcatgcgacggcgcggtacaaatggggttttcctgggtcaggcaccgattctaaaagtgcctagtcatcactcggctgttacttctaaaacgccgacgtggcttgatgtaactcagctgttatttctaaaacgctgatgtcaccagtcctcactcggtcgttatttctaaaacgccgacacggctcgatataactcggctgctacttctaaaacgcagacgtcaccagtaatcactcggtcgttatttctaaaacgctgatgtggctcaaaaggac

SEQ ID NO: 173560 - DNA, 888 bp, Zea Mays
ggacaataaagttagataaagttgtactctatattgagtagagtaaaatacatcagcagttctcgaacttagcatgctatatcacttaggtttccaaactcccaaaaccatcaaaacaagtgctatagtttggcggtccatccaaatccgggtttgctcaaactggatgccaacatggtgtgcgaaactggagcacactataatgaaagttttaggatctaagtgacacaatatgacaagttcggggacctaataccattcttaatgggggttgcattctcattaaataacatgccatataagcaaataagatgacatgacatgcaatttaatgtagaacgatgagagagtttcatgtgagatgagagagtttcatgaggataaaactctacatgcactacttcctagataaatgctgacatgacatccttggaaataatgtgatgaaactatccattgagaatgtcctaagtgacacagcatgccaagttcgagaacccaagtaactccaacgtgacacgacacatcagcatccagtttgagcaaatctagttttggatctgccgaccaagttacaacatttgttttcctgatttatttgagagtttggggacccaagtaatacttcatgtcaagtttgaactgccaatacattttactctatagagtactacattggagaaagcatgtggttggtgttgtccgatccatttctttttatttgtattgtatatgttgttgttaaactattcgtagcgtatcacctaaagccgtttgtaaaaactttaggggcaccctaaaaccgcagcagttgtccctaaagaacaccctaaatttagggtatgtcctattgccttaaatctagggcgttctctctttcccctattt

SEQ ID NO: 173561 - DNA, 440 bp, Zea Mays
ctcctttgccccatggtgcatgagaaacccccacctcttttccttcctcaccaccattgcttatgttccccacttaagttcgatgctggtacacatgtgagtgctcccttgctactaattagggctaggaaagtatattgttgactaattgattagtatcgatgtggagggattcatcatttagggattatatatatgtagtatacactcaaaagtatatattttattgtgtaaaatttgattgattagaaaaatgggaaaatatggtgatggtttcactggctagttccgactttagatgtaacgatgatgtgtataactagataatatatgctataacatgtaaggaaaattggttgttcaagaaaaatctaaaggatatgaccatgggctcagtatcctttgagatccgatagtgacagattgatgaacaaccaaat

SEQ ID NO: 173562 - DNA, 709 bp, Zea Mays
gcaatgtttggactggagaacgcatttttggccgacatgaaaaaaaaatcagactccacagatacaaccaatatatcagaattttcgacaaatatcgtccagaaaaaaaactctgagcaggactggtggcgctctggtatgttactggattgaaattatttctatgcctgaaattaaagtgtacaagctatgcccttttcatagcagtgcatcctgcattgcgtataagtccaccaaaagatcatatacgaactggataaagcacaaaaatgaacatttttaaggaaccaaggatttagaaggcttatgcatgagcagcaaaccacaattgttatcaaacaacctagcaaaaggtggttatgaggagctgtggtggttactggatgcttgcagaccaattttttctacagtgtgccttgtaattgaaaaggggtaactggtgacaatttgtatgccaatgtagttggaaactcatggttgcagcatctgttagagaaacaaccattattactcttttttgaagctccatctgctttggagcatcctaaagtcttaacttaaatcacctagcttttaggttgaaaatcatcatatcaccaaacagtcacttttgatttatctattcagattcagcaacttttttgaggtcctcaatgccatcagtgctatctttattgtgacatgatgatcctttaagttccctttgtac

SEQ ID NO: 173563 - DNA, 894 bp, Zea Mays
gggataaccaatccatacccaagataacatcaaatgccccaaggaaatcacaaccagattggccgaaaagacctcatcaacaagaatgacggaacacccctgacaaactgaacagctactaatggagccattagcagaactaaccaaaattgggtgacccaacctctacaccgaaagaccagcctgcgacacaaaatcctccgaaacaaacgaatagctagcgccagagtcaaaaagagcatgggccacaaacgaatcaactgaaatcgtacctgtcaccacgtctccttgctctctgccatccgcaacgggtagcacataagccccggaaatacccgcagaagaggaagctctcggaatgaaattaacagaagaaccccactgagacgccgggtgaggcagacgcggagctccaaactgagacaacataggagtagtcggtgcaggagtaggcgcagccagatactgaggaaaaccctgcatcggcacgaactgagaagtcccaggcacataaaactgctgcggaggaagtggaactgaaaactgctgctcagcacttgacatcatgttgatagtgccctgagaagaggaggaagtcaccggctcccatctgagctatggtggcgctgatgctgagacttgcccctcttgtggctggacctccagtgttgcccctcctcgcgtcctggccacgaggctgatcaacacccgaagacttctgcgactccatggtatactgatgctgcatctccacacccagtgcctgctccactggcgtacggaagtccaccaacggaaaggctcccaaggcatgtctgatagaaggtttcaggccctgacggaactggctcgccttctccatctcattaaaaaccacatgagggacaaagcgga

SEQ ID NO: 173564 - DNA, 509 bp, Zea Mays
ctcgaacatcatatatgaagaacgcagcagcgcgtctccctatccctacctccaaacccttcctagtgggccctagcagtgcaccccggcccgcttttgttcgtattttgcacaacatgcatagatgttagtagtgctgctgcatgattttttgtgtattaatggaatgcatggtcacgaactgaactgaattgacttgcgcttatctttttattgatcatttacgtattttatgtatatgtgttgttcgatttggcaggaacatcataaatgaagaacgtagaccgacctccatctaatccaaaacggattataatccagtctactcaagagtgctttagtgttgacataccccgtgttccggcggaaactgttagacacgaaacaaggcaggctgctgatgaggacgatgactttatgccattatccaagaagcgtaacttcgacgacagtcctgggaaagtcttgaagaagatagtcacaaagcggaggaaagtagtggacccccc

SEQ ID NO: 173565 - DNA, 767 bp, Zea Mays
gaatggagaagcctagaaatgagcgcacaaacacactacaaagtgtaagtccggtaacgtcgcagtcaagtataggtgggagccaatcatgttcctgtactccttctagtccacgggcttgctgtcctcatcagcaccaagcgccatcatgtggacatgggcgttgaaagaggcttggccttgtccatgtcgaacttcttcaagacgtcctttgtatacttaccttgatgcacaaaggtcccatattgggtctgcttgatttgtggcccaagaaggaagttcagctcacccatcatgctcatatcaaactccttgcccattgtatctgaaaactttgaaacaagagcataagaagagccaccaaagataatatcatctacgtgtatctagactaaaagggtatcattgccatgcttgagaagaaaacaagtttagtccacatagcccattttaaaacccttcaaaaacaagaatgatttcaaacgctaataccaaaatctaggggcttgtttcaaaccatacaaagctttttggagtttgaaaacatggtttggaaacatggaagtcttaaaacaaggggctacctcacataaacttattcctctatgtacccaatcagaaaagcacttttgacatccatttgaagaagtttaaaacccttcaaatcagaaaagcaagaaggatcctaatggcttctaaacagacaactggggcaaaggtttcctcatcaacaataccctctttcaagcagaactcatgggcaacca

SEQ ID NO: 173566 - DNA, 820 bp, Zea Mays
cgacgggcgctgaaggcccagcttcggcttcagcttgagctttcgtagcttcagcttctgcttgcctagtttcggcttcggcttgtgctttggcagcctcagcaattttctttgtaggagcagggctcaaggcctttgtagtctccagcacagcatccagcacgttggccatcctccacctcttgggagtcgcggcagaagtcttttgcaccttaggcagttttaactctgttggagggcttaggatttctggctttattgtcgctttttccacttgtggctcttcggccttatcattttcagcttcggcggtcccgactgtaggcatcttcggcactacagttggctcttcaatgctctatgcaattggagcagcttgtcttgcttcggcagttgaagaggccccttcgccaagttcaggcactatggctggttcaatatatcacggccgatgggtcagaacctttattttcttacttttcggctcaaccggcacagcaatggtggccgaagcggcggcttttcttttcttcccttgccctcgtagcgggtaatggtagtcagggtatacgaggccaatagcatgaaataccctgtttaatcttttcttgccccgacctccaaaggctgcggacagagcattatcttcggccttggagtatgctccaagtagctcatcacttgtagcttcaatacactttagctagtcgtcgtttggctcatcgaagttctccctaaatctgaaggtatacttcagtcggaccagaccattctcactagagtcgacggtggtctccttcggcatatcccagctctccac

SEQ ID NO: 173567 - DNA, 468 bp, Zea Mays
agtcaccttcatctagtaagataactcgtgaatgttgtagaagcacttagcatccgactccagtccctgactcctcatggcccatataaaaaccaccactttgataagagcttcgggggtaagttgatgaaggaatatctcaaatgtcttcaaatcctcaaccaacatcttgtggagcggaaagcgaagcccagctttcttgaagctcttgaaaactactacctcattagcttcgagaaggggaacgatgctctctcccccaaccctcactatggaaacatcatgaaaatatttgcctttcattgttacaatttgcacttgtttgacagttgatttcccaaaacaacatggctcggcctccacagtcgatcttcaacatcttcattcccactctccacgtcaaaactgtcgctatcgctggagttctcagacaacccagccaacatctcattggtgatcttctctgtg

SEQ ID NO: 173568 - DNA, 1360 bp, Zea Mays
atctggatggccaggatcatcaccggaaggcgcttgaagggacaatatctggcaacgctcgctccatcggtgttccagcgctgcgggttgatgacattgtcatatcagcaagccagtccgacatggccaattccctgcgggcacatgttgatgcgcaagtggtggagtttgagtcgtccacttgggagtgtatcgatgccacgcgggtggcggctctagagtcggctacaacgtcatttgaaacatggtgaccttccctcgagcattttatgggtggcatttgttcaaccatcgacgacgctctacattccgatgtgtcccgggctgtcgcgtcttctggagcaagagcaacgggacttcttttgtccaggtgcctacgagtcgacggtgcatggaccatcggctgtcacaaacattgatgaccctttgagggcactgtgacttcacttaccgtcgggagggggcctaagtatgtctttactgagttgactcccgcacaatggtatgaacactgctcctactcctttctcatgttccacccgtttgtcgtgatcatgcatagacaattctgcatgacaacattgggggtcaatcacaagggagtcagtcatctcgctttctagataggctacccaaagtgcattttccgggggtcgatgatgataatcctaagttaagttgtggcagtcacgatgtgaggattatttcaccatgtattcgatcgaccccaatgtttggatcaaagtagctaccatgcatttcagttggttaaatgccagttgtctcgcgtgtcggggactaaatttggccacatgattagaaagcgtttagggagaaacaacatgaggttctaaataggcagccttttcatatcagataaacgactatcattcctaaatatgtggaatgcttttctcagcttgttgatcaactgaatgcttatagtcatacatttgatccactttactacagtatgcagtttattgatggtcttcacgatgatgttaagtttgttgttatggttcaacgtccgcgaaatttggatgctgccttaatttgttttggctcagttgcaggaagaaattggggacaagaagcatgattataggccacttgatgtttcttcatctactaagtcatttcctaacatccctttgtcgttgctgctggcatctcgtgcgtctgctgtttccaagccggaggatccaccgtctttggggatgaggagaggattatttataaccacggatctaactattccgccagagagcaaaagaaatactacatgggttcattttttggattattgcattctatttatcattttcctaaaggttctataaactccaaggcagagtga

SEQ ID NO: 173569 - DNA, 582 bp, Zea Mays
tggctgtagacttgtacgtctccttcacaaaaatcaggcaaacactcaggttcccggaaagaaaaatcccacctgctgcttgttcctgtccgtgctcggcctcgcccaggcagcatcttcctaggccggttcgctccaccagtcgcgagcttggcttccagctgcggtcgacggcgtcgtcttcaaccgccgcaccctgaagtcttcaatgtcagctcgccctaccctcaacgaacccagtcgggaccattctcctgtgccgtgcaggttccgcccctgcgggcttccctatggttcaacacgtcggccgctgcctttgtgttttgcagtgctcggactttgtctccctcgtgccttcacttcatcggtgctcagcttctaccccaccgttttgtccctctgctcgtcgacacctctctccgctgctgcctagtgagcaccacccctcgcctagagcttcatcctctcctctcatgcctggcgtagctgcatcttccactgcatcaccgccaccttgggggtggctaggattctgcaccccaccacaagctcgtcgtctctgttcgatcccttcctagtcgc

SEQ ID NO: 173570 - DNA, 474 bp, Zea Mays
tagatgtctttagagcatagataggtttggttaagaaagtgtagggtaagaaaagactccatccaagattgtggatcttggttcctttaagatccggcttgaatcctatctttccttgatttgatgaggtcgatcatctttggtcttcatccttggagttgttatccgaattagggatatgtggttaaggcagtttcgtaggtaaacaaaataggttggtgggcggttatgagttcaataagtttaagcagaatttgtcttgttgttttgcttctaggtcgggttaggtaggttatgcaacccaacatgtaggtcaagttggttgtatacgaccaagttggtacagggcaccaattttaggttaaaacatgactatagaagtagggtctaatctatttcaccaagattaactagtccagtaagtaactcactttagattagatcatattaagttagatgggatctagattggat

SEQ ID NO: 173571 - DNA, 696 bp, Zea Mays
gctcagaatttttggcatccttattatttcttcaacctttggctcttcagccttatcaaccttatcttcgactggcttgactatatgcgtctttggcattatagtcggctcttcggcgctctgtgtaatcgaagcagtttgtgttgcttcagttgctgaagtggaccctgcgccaaatttaggcactgtggccggttcaatgtagcgcggccggtgggtcagaacttaatctttttgcccttcggctcagctacagtggccgaagcggcggtcttcctctttttctcttgcccttttatcggataatggtaatcagggtatacgaagccaatagcatcaaataccctgtttaatcttttcttgccccgacttccaaaggctgcggacagatcattatcttcggccttggagtatgctccaagtagctcgtcactagtagcttcgatgcacttcagccagtcatcgtttggctcatcaaacttttccctgaatctgaaggtatacttcagtcggaccagtccaccctcactagaatcagcggtggtctccttcggcatgtcctagctttccacaagtggccataccatgaaggatatatgctcttgaatcagatcccttgtgccaatgaaggcacacatagtgctaaaagctctctgacatgcttcgacattgctatcaatttccaccttcggcctt

SEQ ID NO: 173572 - DNA, 1173 bp, Zea Mays
tgatatacgtaatagattaggggtagcatcagttgaagaaaatttggctaatattggttgagatggtttggacatgtccaacagagacctctagaggtagtacgtagtgggattgtaaggcacaatagcaatggaaagagaggcaagggaagaccgaagttgacataagaagatacagtaaaagggtcttgaaaggatggaatatacctaaaaatttagtcttaagtaggagtgtatgaaaaacaactatttatgtgcttgaaccttaacttgtggtttttgttgagaatctgaagaagaataggattggtgtaattggatggttgtactgcgttgggcccttaggcgatttatatagagtacatggcttaggagataaggcagcacatatatacatatggcagtctacgaggcacaatatctaaactactatttgtactctaacatccccccatagttgtagtagcagcactgtagatggtcagactgaagaagttgatgaacgcatatccccctgcagtcgtgacgttgtcgcacagatgcaacaactagaaaagaaaacgatgagtagatcatgcatacggtagccatttgtgtcgatgtcgaggtagccaagtacgaggacaagcagtcgttattaatatgtcgtgcgaaggatagtcgtagttgttgagaccgccgaaaagtaggagccacacaagtcacgagcgcgctagggccgtcatggtgatggtggcacactggaggaagcgccatacatgaagatggtgacacggtcaaggcagacgatgaagaaggtcgatgctgaagtcgacattgtcgaaccatcatggccaaggcgtgcgccaggtttgccaagcccgagaaaacatcggtggtgaaggcatgcaaaggtgttgccaataacggacgtactaggtagagggcagcaaccatgtgtcagtgtgtgaagggactagcagagaaggcctccacgacgttgagatgcacagaagaacaatgaggaaggtgttgatgtagttcacagttatcagagtggattctatttggtttaactatagctatcccatgtactcaagtcatgacttgtgggttctatttggtttaattatatcctaccctaacttgcttgggctaaaaggctttgttgttgtcgttgtacaatagtcatat

SEQ ID NO: 173573 - DNA, 454 bp, Zea Mays
cggccttataatggagctcaatcggaatgattcggacgtctaacacaaaagttaacatatatttaataaatcgcgggtttagtgcgacgtgacatgattttattggccgaaaacaggccacacagagtcacaaggttgcggccacagaagatcccacagaccagaaaggccaatgaaaggttgacacatggccacagttatgcatggggctggttttcctctttagtccatgcgggcagggatttcatcgtgcggaaaaagtacggcatgcagatgggaaattgtaaaggcgtgatgcatgcaagtggggtctactgcacgacgtgcttactgtgggaggcgcgcgcatgggaaagtgcatgcgaacatgcgggtggggtccacactgcggttctctctcctctctgtagctttttccttcctgcatgcacgcacgacggacgaacagggtggt

SEQ ID NO: 173574 - DNA, 530 bp, Zea Mays
gcagtcagtatgtaattagcgcggtgcgttatattgaaaataaaaaatcagtaatagattctcggtcgaggacgtcgtctctgcagcaagagcatagctaaagctaagagcctgaaacctaagaccccttgtctagagcgtacgtactttatctatctagaaagatcaagtagcagcacaaaataataatagacctaagagattgaactatgaatatcgcagtcacacagacaataataccaagtagtagtgtttgtgacaaatgaattgccttttctcgaagaaatgaagtacaaggcacatcaaataattttgcttggtgtagctcaaagataatacattgaaatataagaccgaaataaaactcataccgggttacttcttagaacaactccaagagactttctatatccttaccctccaacaacttatttaattactcattcgaatatatccatcttttactatgaatttttggctaaccattagatagaaaataagaaatactctagagagcgtaagtctcagac

SEQ ID NO: 173575 - DNA, 723 bp, Zea Mays
cgggcacatagctgttgaaggagcttggactgcgccgccaatgtcctcgactgggcgtcgatcgacttggactgcgcctccaacgctgctgcaacagcagggtcagacgcgccagccatcttcgcgcgacgggtgtagtacggcggcgccgttagaacaggatcgttgacctgataccacttgtcagcgacctagtaggtcaccagtctcttcgtcggagaagaagcagaggaaacgagagaagacagacagagaaggaagaagactagttggtatgagttcgtaattcttccttgccttttctccacatcgttctcgttcttatatgtcttttgtcaagctgattacaaggcccacggcccaattactggatccactcagcaccagaaacgcggacgtttggcttccttcgacgtcggcccatcttctgaaggcttgtttcagcagcctccgttcccgcatcctcctccaattgctgcggctgtgctgatgtcctgacagactgggctgggggactcaagcggcgatcagatcagatggcaacaatgcatgcacgttcgggacgacggcctaacaacgatggaaacagcggctgcgcgttcggcaagaaaacatgcaccattgctgagtaagatgctaaatttagatatactgttggttaccctaccttttatttagctatctattttaaatagcattctacaaaactctatgttatctggc

SEQ ID NO: 173576 - DNA, 1314 bp, Zea Mays
caaaaatacaaaactaagaactccttacggaggccagaaacaaacatacataaactagtccataggaacacaaccatcaaccaggcgagacaaagatgcctccaacactcaaatagcagggagaggggctgccaggtaagataatcccttggcaccagcggccatccacctactcctctcgtcttcaaactgattgaagattaaagacagacaaggagacccattttcaaaaacacatctattgcgatgaagccagatcagccaagctcccaagatgataagggaattgagaccctttttggagagcccagtaactgtttctgaggcattttcccaccaatctaaaaaggaggtaacagctggctgaggagctaaggaatgcataccaaactttctaagcaccttataccagaaaaccctggcaaagacgtgtgagacaagcagatggtttatagattcagcatcctgatcacataagggacatttgttcggatgatttaatctgctcttggcgagtctatctgctgtccaacatatgttctgagcaacaagccaaatgaaaaatcggcactttggtggcgcccaagttttccacactcgcttatagtgcccaaaatagcatgatcccataaaaagaccattataggcagcccttgcagagtatcttccatctggagcaatgctgaaaatgtgcttatcctccctgtcaggttgcaactcaaagcctgaaagcatttcccaaagacaaagatagtctggtaaagcttcaacggtgagggctccccggatgtcatcattccatcgaccattggataaagcttctttcacagttcgtttctgcgccaatcttttaggaattataccaaaaagcctcggggccagctcagaaattctttccccatgcaaccacctatcagtccagaacagggtgtttgcaccgtcccccactttggtaatcaggccctggcaaagaaagcacgggctttggtcgggatttgtatagaaaggtcagcccaagggcgtccaggctcagttttttgcaaccacaaccatctcattcggaaagcccagtagagctcctgaagactagaaatacccaggcctcccagattaaggggtctacaaacctttttccatgctaccaaacagtgccccctttaacttcttttctacccttccagagaaatcgttttcttattttatcaatcgcctctagagcccaatgagggatgtcaactgccattgccatataaatagacatgctagtaagcacatgttgcaccaggattcttctccctgatctagtcattaaat

SEQ ID NO: 173577 - DNA, 954 bp, Zea Mays
aatttatatgcatcatcaacatccttgaaagtcatccctaccgttggcactatagttggatcaatgttttttttctgcaaattaattgacattgttgtttgtacgatggaatatgatcataacaatctaatcaatcaagaatcaaacacaacaattgtacttacatgtgaatgcagtatttgaggcgtatccatctccctggagctaatattggacataggaggtcggaccctttgttctccttcttcccctatgctcatctcgtcgattacaggacccagtagagcaggaggtggtgtgaccagtgagttaccatcaactcctccctctgtctctggatcaagacgaacgccacctcctaccatcgccggcgactctccagagccgaccatctccacctccaaatagttatgcaggctttttgtggtgttttttccgatgaaaggaaatcacagatactatacaagtaaccgcatccacgtttctagggtatttccattatttccgaaaccgtcccgatattctagcgatgtacatgtaaaactaatttccctaacataatacttacgcacaatgactcaacattttacgccaaaaagtatatacaatttatgcaacttttgtacattaccggttttatgccatatccttcaacatcttattctacattctatttacccgtcgccattacaccccatgcaagatccataaattccacgcccacgtaacagagtaatcatgtttgcatgtggaaattattccctacaattccgcaccacttccaaatgtttaccgccttgtcattgaaccaaccgcgtaacggcgtcgtctgtcctgcatgccgtctgtctagtatacattaaacataggcgcgcttgtctcagcggaccagaccacgtaaccgacctgggctttctttaatatccgaagcccagggctctcgttatacctgcc

SEQ ID NO: 173578 - DNA, 1046 bp, Zea Mays
gaatgatgtcgcggaggatgcaaaatttatatttgttcggacagaatgtttctacttccagtcatcgttgacttgcgctatcagcaacattgagataaaactcgtagtagcggttagtcggttacaagcactcgagagagggaggagaggctctcaggtctcatgtcgggatgaaagtcgagcttagaagttgaaaggtgaagcttgacggggctctggccttgaaatcctcgtcgacgctccttctcatgttcgtccttgtgagctcgtctccgtctgaaggcgttcaatggtgtccaagagccctctactcgatctcatttgccctaagacgaccctctcccttttataggtcgggacaggggtcgggcggcggtggtttcctcgggaagaagtcgtaaggcaagggtaaaactagtgttttaccctgggagaggccacacatactcgtggggtccggtgctgtctggttgtcgtgtattatcgtggtggatgacgcgtcggcgatggtcctaggcaccatcattctggctacgtcgacccctggcttccgtagcctggggctcggcgcggcccgtcgtgtagtgccctgctggaggtttgcacactcagtcctagaccgatagaccataagtgcgtcgtaggtcgaggggcgcgcgggccattaatgcactgttatccgggggctcgtaggtcatgagtgctatgtagctcgaggggttcatatgtcatgagtggaaagtggaccggcgcccacgctgtggcttggtgccaaacgtggttaatgcgaccagtcatttatggcgggtcagtctgaggcctggcacgagatccactcgagtggttcccttctgacacgcccgaactcccttgtcaggctccaccacgcccgacccctagctcggtgccgcggggttcgaccgggatgggtcgttccagggttggtgtacttggtctttcgaataactaacggtccccagccattcaggggctctttcctcagcacactcactggctggtgggtcccggacctagggtccggggat

SEQ ID NO: 173579 - DNA, 369 bp, Zea Mays
ctccaagaaagggctatccaggtcactgagatccgctacaggcctatgacagcccaataaatcaatagtaacagtccttggaaaatcagtgcctagaaggttggtaaagaaaccgtgcaaaacttattgaatatcatcatgatttgtgtaaacccttccatcctcttctagttttgaaatgaacttcctctttttacggtaaacaacatgtcggtgaaagaattgagtattggcatctctttttaggaattgaattcgggaccgtaaatgtgcgatagttctttgcaaagacgcaagcaccagacaatgctgtttcagctgcccccataaccaaagctcctccctggacaaggatctgatatcttgcgc

SEQ ID NO: 173580 - DNA, 522 bp, Zea Mays
tccatccccatgcgacgacgcctgccgcttcgcgaaaattcacccacactctgttttcccatcacccttcgccgcctacacccagtactcacaccgggaagatcctcagcaccctccacacgcggcgaagtctccgccgcagccacatccaacacaataaaataatctaagccttcatccgaggactcctccgtccaaggaaacaaactcccagactcaccgtcggactcaaaacattcagacatagagccaggcacattatcatcggcgggaactacaattgaagtcttcgccgcaaaatcagtattgtcagtagtggttgcttgcgcaggcccaaacgtcggaacctgcgcagcaaccgaggttcagtatgacacagacaaaagttgacatgcaatccctaacccctattcctacacttgcgaaggctcggccaccgccacggggtcttcggtagctggttcggccaccgccttcgaggggtcctcacatgtcggcgcaggggctggtgcggggtctttg

SEQ ID NO: 173581 - DNA, 427 bp, Zea Mays
ccgccgttagccgatccttccctcgacctataaaaggaaggggttgaacagagggcacactcgcacggacaaaccctagacgagaagacacccaaacgaaccgacgaaaaggaggacgcaccgacgaggacctagaggttggagctccgccgccaagccaagacttagctaggactccactctgtaacctttagctccgcttccaccccgataagagacttgggagcctctccccctctctcacccgcttgtaaaccgtaatatgagctttgatcatcaatgatgtcggtagcgcaagccgccgatgactagaagtggggactttctgcccgaactagtataaatcttgagcccaccgcgcacactgtctggagctcggaacgagcacaataaatttacttgtcagagcgaggttcaaaacatcgac

SEQ ID NO: 173582 - DNA, 557 bp, Zea Mays
gaaagatcgtcgtcgccgtcgagctggaagccaccccggtcagccgcggtactcctccccttgctcaccgccggggataaagctgctcaccgtcgtcgtgccatcgccgttgtccaccgcgtgtcccaacctcgccaccgcatcgccgtgacctctcctaagctctccgttgatcgccggagcaattgccacgacattggacacccagccgctgcaccagtaaactccctctttctatgaccgccgcgcgtctcgctcaattcccggccaccgtcgaagccgcctataattgagccctcccctagctgcataacatcatcacccacccagccaccaacaatcgttagcaaccgtgcctccgagagcttgaattttggtttctccccaatccgggtttccgccaccgtgaactcacctcaccgcggccagcccctccccggtcagctcatcttcttctctccctcgtttaagccttctcatagctctgtgatgctcgacaacccatttaattaagctagaggtcctctggtcgccgggaacacgacgatctagtcgcc

SEQ ID NO: 173583 - DNA, 548 bp, Zea Mays
attcttcaattagaaatgtaattgagaggtcatttggtgtcttgaaaatgaaatggaggactctattagatctccctagatatcctatggcaaaacaaagtagaataattatggggtgtatggcacttcacaatttcattagggagagttttttgggagataaggattttgagttgtgtgaccatgatgagaattatgtgcctgaagttggtgagtcaagtacacaagaacaagaacaagtagcaggttcagtacaaggtgaagaagatcggaacatgaatcaatttcgtgattggatagcagatggcttgttcaacaaactgtaatatttttgtgtgtaataaatattgcataaatgtactgcttcttgtgctttgtgctttgtctgtgctttcgtgatcgaaatgtttactgtaatgttcactgtaataaatattgctttgtgctgtcgtgatgctctgatcgtgtaattaatgttttagtaatgttcactgtagtaaatattgctttgtgctgtcgtgatgctctgattgtgtaattgatgtttt

SEQ ID NO: 173584 - DNA, 1230 bp, Zea Mays
gcgaggtctgtcgggtataatttaaggtcttcgaatgcggttgcctgctctaggtcccatgcgaagtccctggcccctcgtacaacctttaggaatggtaggcatcgctcggctaacttcgagatgaacctatttagaggtacgatacaaccagttagcttttggacttctttgaatgtctacggtgggtgcatttctattatagcccagattttattagggttcgcctcgatgcccttctttgacactagatatctcaggacctttcccctgtggatgtcgaagatgcacttttctagattgagccatagtgtggcctctctcatgttagcaaatgtatccgctaggtcttccaggtggccgactttgtttttgcttgcgacgatgatgtcgtcgacataggtgaatatgtttcttccaacttggtccttaagtatggaccgcgtgagacaggaaaacgtagacccaacattttttagcccttcgggcatcctcacaaaacagaaggtgccgaagggggtgatgaaacaggtgtttgcctttcgccttcgctgaggactatctgatggtaaccaaaaaaacaatcgtggagggacatgacttcgtagcctgctgcagagtcaacaattttttcgatgcaggggagcagaaactcatctttggggtaggctttatttaagctagtgaaatcaatgcacatgcgccacttgtcgtttttctttttcgccatgcaacgtttgcgagccaggcggggtactcaattggtttaatgaattttgcatccaggagccgctggaccttggctttggctgtctttgtcttctcgtctgacattttgcggaggtggtgcttcttgtggcggacggaggggttgatgtgcagtctgtgctcgatgatactttggctaactccaaccaggtcgaatgataaccaggcaaagacgtcattatttcgacgtaggcagtcgagcaagctggcctcctcctgcagggctaagccttcgccgattaacacaacatgattgggtagggccgtgtcgaggggtaatttcttagccccctcgtcgctttggatcgggttctgttgtctgtcagtcttcgctgatgtatctagattgtgggctggtgtgtgggcatccaagcaatggacattccgctgcccgaggatgaggtctctttctatgttacaggccacttgttgatcgccgaaaattgtaatgactatgttggg

SEQ ID NO: 173585 - DNA, 474 bp, Zea Mays
atcatgatataagaaattcctatatgaacttcacataatggcacaataagcctcacagtaacctacgtattacaagtcaccctaaatattacttcttattagaaagaaaataagagcaggaacacacctttgccaaaacaaagcgccctttgtgggtgtgcgaactgcagctggggaggagaggagtaggaggaggatgtagtcgcctgggagaggtgattccagcagctgccttctctgggcggaggggaggaggacctgctcaccaaggatggttgagaaaattgcagtagggcaaaaggaggaggatgtggtcacctgggaggggagatgcttgctgctgcctcctacgggcagaggggagaggatcttggtcgccggagagattagggatgggttctcccgttgctgctgctatgaatttcgaatctgtgcaatggaggagatcgagagaggaaggggaggagatcgggg

SEQ ID NO: 173586 - DNA, 419 bp, Zea Mays
cggagagaagtttggcgcaagttttaactgcaagtattgtagagaaacaaagagcggagggggtgtatccgattgaaggagcatctcacgcatagagggcaaaatgtcaatatgtttcgatgttttaattgttttatgttaaatgtcatttgttataagtaatatgtttttattctactctcgttacatgatattatgtcttgttcttatttatatgaggcatgttggacctagtctgggaacatggagagaaggttagcacaggttttttagtgtaagtattgtagagaaacgaagagcggagggggtggtacccgattgaaggagcatatgcacatagacgggatggggacatatcagaatccttcccacaagaatgagtactatgactggagctgaatacgtgagtattgtaaaac

SEQ ID NO: 173587 - DNA, 444 bp, Zea Mays
cgtcccgaggatcaccggtgatcgaaaaggaaggtagtaccaaaggtcccgatgccagtaacactacccaccccgcacggcggcaccatgtctctggcgtgcgattacctgggctccggatgacaaccccgcacaggaagccctcgcccatgtttgggattcccatgcgccctgctcgaacctgtcgttccgcccggagcggcgtcgcctatgagttgccccgtgcggcggtggcgatgtcctttgactcaatccctcactgtctgagcggatggtgctcggttccaatctcctatgtttcatggtgatggcgtccagattatataggtccagccctaacagaaatagccccaccaagcgcggatcacggtgaaccggtggaggaggtcgcgtcctgcctgccgcgaggaaacagaatcccgatcagtatggggaggaggataa

SEQ ID NO: 173588 - DNA, 642 bp, Zea Mays
tccgccctaagagtcttcgtaggacactccgtcaggaattcttcgggacccttcgccggcgacgagtacatccaccccttcccttcatgctatgctgaaaccaatcactcaaaccctaacttcagctatttgtattcggttcgaatctaattaccagcatgtacatgtattatgcctaccaacatcgattttgttttgcaaattttattgggtgtacatgtcttttactgggtccgcgccttgactcgatttgagtctgtatatggtcttggtggctaattagccaaccacataccgcagccagaccatggcagcaacccctgtgtggattggtcagtaagcacacctatattaactcgtgttgtgccaatcgaaggtgtcaccctgcctagtgtggttccttatctgacaccaactcacaactcggcatgaaacaactgatttttatagtttcctgtagatcaatatgaaagtgttttcctcgcaaaaggggaaaaaagaagagatactgaaatttagtgcctatagtgttcttctggacccagaccctagaccaccccactcaggttggagcctccggcactggctctgcctttttttactgttcttttagacctgatgctgaatgactaattgactatt

SEQ ID NO: 173589 - DNA, 626 bp, Zea Mays
tttgaaagtcccaaccaagtcccacccccatacatcgaatggccaagagatgggtatggtttggagggcctaggacagcatgtctgtctgccacacgtagtattagcaaccttcgcaggtgcggatgatccgctcggcatccgccatggcggtgggccagtagaatccttgcccgaatgcttttccgaccagccattgtgggggcacattgtgcccgcatgtcccgacgtggatttctgcgagcagttgttatccttcctcggtcgtaatgcacttctgtctgattccggttgcagtcttcttgtagagtatcccgttgaggagtgcaaaggattttgcccttcgagagagtcgtctggcgtcagttgcgtcattggggagagctccgtccgtcaaccggtcgatgaaggcccgacgccaatcttgttggtcggtcgttgcgaccaactctccagtcttggcaggcgacgcaccccgggtgtctgcctctcctgtgcgctcttcttgtgtctacttgatcttcaggcaaggttggtcgagatcgaaggcaaagaccccgtctgggatgggttttcgcaccgatgctatggttgagagctcattggctttgccattaaaccgtctgt

SEQ ID NO: 173590 - DNA, 937 bp, Zea Mays
caagaatgcgacttatttctttttgaggtcagggatagattgcttcaggcataggagcaccctcggagcttttatgatggtcgttatcgagatctagaattctctatggatgactgtgtttggctccatttgctcaatctttaggctcactctcagatcaatagtcctaaaggaaagttgggaccatgttattctagtccttttcatgtcatggaacgaattggcaacgtcgtctatcgtctggaacttctacctggagcgcgcatctatgatggcttccatgtgggtcttctcaagccatacggagggcctcccctgtactacctcctaccctaccagcgatggaaaatggtcagcttctgccattcctagaaaaggtactcaaggcacaactccggtgaggtgaataacatgttctagttcaatggtgcggcttacagcccactgatgcttcttgggagccgctacaggagttcaagacctcttacccccagttccagctcaaggacgagttgttcgtggaggggatggagagatgttatgatgggcaaaccctatggaagaagggctaagcggcccctaggttaggcccactaagaggctgacatcagctatccaggaagatagattattgcttttgaataaagatagagtttgttagattaaagataaagattagatagagtttttattaagggagtttgttatgctagaagggatgagatataagtcccacttttgtaatcagaatgtttaaacaaggttaatctaagaaaagagattgtacttgcctccatcctgtcctctatcaccgtcgggcatggagccctcctctgagcactagcacggctcctgcatgaccctcttcctccaaacctcatcccagtagccacacctataacctctgtagtcagggtgatcctaccacatactctcc

SEQ ID NO: 173591 - DNA, 590 bp, Zea Mays
cggggatcgggcggccggcttcggccctcttctccggccagcagaggtggcggcgcccatacccgcggcgggggaactcgccggagacaaggggcgcgggggctccgcgggttcttagggcgaccgggatggcctaggaggttgggggaggcgcgaagaacccactggcgagggctaagtcgtgataggggcaccagagggtggcggcccacggcgagacggctcggcggcggcgccaaccaactccgacgagaaatcaagcacaatagagagcaagggagggaaaaggagagggcaggggaggttccttacctcaaggcgtaccccagggacccctcggtggtggtgaaggcgcgacgacggctcgggtcaacggcggcggcaccgggactgcgtggaggacggcgggtgagcgcgggcagaggaaatcaggggggaagaggagaaattatagcgtgtcccgagttgcggacgtcgaggcagagctcaccgtggcagagggcacggcagggctccgacgtcgacggggagacgggctcggggcggcggcggaccacggcggctcctcctgggcgtgcgcgcagcgcggg

SEQ ID NO: 173592 - DNA, 492 bp, Zea Mays
gcggagcggcgtcgtcttggctctgttttaactgtgacgagaaatactcccgtggccacaacagattttgcaggcgcgttttcttcgttgacggggtggagatcgacaatggcgaagacgtcgtggccggggctgacaaagtggcaccttgcttctccctgcatgccctggcaggggtgcccatggcggacaccatgcagctcgtcgtgacgcttggggccacatccctcgtcgtgctcctcgatttcggcagcacgcataacttcatctccgaagaggcggcgctccgacttgtcgttacgacatcggccatgtctcgcggccatggtcgccgatggcgagcgggtcacctgcgagggcgtcattcgcgccgtgcccctcctcatcgttggtgccctgttctcggtggacctcttcgtcatgccactggccgggtacgacgttgtcctcggcaccaagtggctcggcgcacggggacccatcgtttgggac

SEQ ID NO: 173593 - DNA, 590 bp, Zea Mays
gctctttgtagcttcggcttcggtcagccttgtatcagtctgcgtttttgaagcctcggtagttttccctggagtagagcttgaagtttttattgtctccagcacatccagtacactggccatccttttcctcttgggggtcgctgtaagacctttttgtgccttcggcactgtcacttctaccaaagggcttagaactcttgtctcttcaatattaaccaccttcggctcagctaatttggctgagggtgccttcggcactctagccggctcttcaatcttttgcgtggggagagcagattctttcgcttcagtagccgaagaggtctcaccgccaaatttaggcactatggtcggttcaatatagcgcggtcggtgagtaagaaccttcacctttttcctcttcggtgtgggctcgcttggagcagctgaagcaacatccttcccagaagttgcactctttctcttctgcccccgtggcgggtagtggtagtcagggtacataaatccaatagcatcaaaaactctatttagcctcttctttttttggctcccgaaggccgcagatagtgcgttatcttcagatttgg

SEQ ID NO: 173594 - DNA, 304 bp, Zea Mays
caagactgcgctgctgttgcttcggcaggcacactttttaacttttaagcatgcattatcagagacggcaccaagctcgatgctgttgccatttgccaagaacaagaacccttaaaacccatgcatgcatactaggatggccggcgcgccacctctgttcatcttgttgcatctgtctctgctggtcatggttccctttatttcttgagatcttgcggaatgctgcagttggaatactatggaagtgcaagcggattggcatcggaatttatgtgaagaaaagaagatgcttcgggatttatct

SEQ ID NO: 173595 - DNA, 824 bp, Zea Mays
ccccgcggtggcaaggagcccaccggtggtcaccgacctccacaccccaagccccaaccaccgactcgatcatcgattcgcgcggagaagaacaatgcgaacacctgagggggtacctttttggaagaaacggcaggaacactgttggccacggcagggagcggatgacggtgagggaaggggccctgatgagcgattcagtgagccggtgtgcaaatttgtccaggtgttgccaagacgagcttcagtacgccccgacaacaaaccaggaccacacaacggtctgtaaacaacgatgaagaccccggacggcggtggcggcccgagcacctacaccgtcaatttacggtgaacccgtagagcgaccaaggcaagtcccgggcggaatttataggggcccaaagtccgcggagagatgaattgctgattccgcacggctggcacggaggttgagccccaggatttgcggacggcgttgagaggatctcgcgtgatttggttgatacgaagtctggttggggagagcacccgagcggaactagtccccacgtgcggaatgaggttccaggtcggagcaggccccactagcgatatcctccatgagtgccccgaagaggaggggtcgtttgcgccagttggagccgcgaaccttggagcggctgttacagcggcgcccgactcgcgcggagatggaggaagcggatgaatccgacatccagggcccacatggacgcgaggggagtgagcacgcagtgagaagagacgcagcccacgcgtcagggagaaatactccatcccacgcgtgatggaaggctggccacgcg

SEQ ID NO: 173596 - DNA, 449 bp, Zea Mays
gacggaagggagtagataatctcacgagactgcctttcgatgcccaatccgaatgcgatggcatgcgctagcccggcatatagtcaaatcaaccacaccaacaccaccaacgtcccgaggccatcttggcatgtcctacatgtggactatgtaaagttgtggccgcgtaatggttatgaatcgtgatgaccaactgaatgcttctttagatagcgtttggttccgtgactagtaacgtacgtagcaaggaaaacagatcaaggggggaagtgcgcggggagtcttgagtctcagcaggtgccttgatttgtttggttgcgtatagcaagggaagcagcagtggcagaatgcaacaggactggcggaggagcggtacaatgggtcgatatctgattgcgggctacctgataacggattggactgaaccaagcagctgtgtattgtcagcc

SEQ ID NO: 173597 - DNA, 380 bp, Zea Mays
tcctaatccaagtatgattcaacagcgcttcactcaaagatttgttctttcttcgggacacattgaaaatgagaggcgcaatgtccttcggtcttaacccttgcgcccacgcatcattccaaaaggacacctttgttccgtctcccaccaaaatcgatgtcgttgttgcgatgagctgtcggtcttttgtcatgcaagggagtttcgaggccgtccagaacctagctgatgaagcccattcttgccacagccaacgcaaacgcaaggcccttgcgaatttggttaaatgaaggatacccgagcctccacactcttttggccttgcggaacatatccaatttaccttgcatttacctcccgtaatttgcgcacacccagcc

SEQ ID NO: 173598 - DNA, 1041 bp, Zea Mays
aaggggaaaactacctaaaatgggcaggagacctggtatttggcctagctcggcctcagccgctcggcccatctcgcgcgcccttgacctaattctgttgcatggcgccgacaggtgggccacctgtgtcggtctctacgcgtgcgctcggtaacgctgacaggcggagccgagttggcgggatcgtctccctcccgtgatcctcgccaggttgttgcaagtgccgcgcgcaagcctctcaacggactcgccgtggaatccgcgtcgccctaatatcctcggcggacttgccctagccctataaaacaatcgcgggttccccatcccttttccccattgctgggaacccaatctcggtgagagcatagcacaaggagccccgaccgccaccgaccacatcctcgcgaaagggcatcacgggagcttcgattggtggctctatggaatcgctggaccattacaaatccattgggggagatcggtagcacataggatcagagtgtgatagggaattcgtcgccggtgatggagttttgccgtgagcccgccgtatcgcgtgtgcagccatccacgcgggcttaatagtcggtaaggtttcccctattgcattcgaattggcgttcgctgtgcttagcaccaatctgtgtagcctatggggcgttagcacctagtggtggcgggtcgccggggtttcgccgtcgcgggtggtgggcgacgccaccaggtttgctagcaagagagggagatgtggttgtggccgtgggatccccagccgacgcctgggattggatctaggaaatgatggcatggttgccgttgattctctagccagcggataggattagaataggttcagatttgatatgatccgtccgatcgaattgggcgcgcgggattaaatctatgcatactggttcacctaaaagagttgatctaatcggggccatagatggatgatcgggcggataggattcctcgataccctttcggcctgcgcattttgcagaagagaccctatgcttttagctattcaacccgccg

SEQ ID NO: 173599 - DNA, 379 bp, Zea Mays
cggcctcgccctttatcctggcccaacctacccgcattttggccctctcagcccagcacgcgcccaccgacatctctctcgctctctttgacatgtggggcccacctgtcagatgctccttgctccgtcggtcgctcagccgccacacccgcaatcgtgtcgtgccctacgcccatgcactcactcgccttcgtgcgcctactcacatgccactcccatgacgcctccgtcgttacctccaccgactattgttgtcgcttcccttccctcaggattaactccgacgacgtcaattcccctctcaggtgccgcttcctcccccaccggcctttaaaagatgcccaacgcccgagctctcccccacacaccctcctcttcc

SEQ ID NO: 173600 - DNA, 532 bp, Zea Mays
agattagatcaacatatttagttcagagcttcattgccatatggctcaagcacaatattatatttctagaacgaatacctttttcctccatctgctgggatcgcaacttctagtgattaataattactgatttaattttcatatatcagctaaactcaacatttagtattttactaagcctttgaccggcaaatgcagagacgctgcatcaaactcgtgacctagtgactcagtgagatagctcccaccactataccagcctgtccttcaaccatttagtaatatacttttactagaatttattcaggaactctggccccatcttgtcagtgaagatgtgtacatagatcaaatagttagtttgcagttgaggttcatcatcatatggattatgcacatagtatagttgccagaaaaatagcttctatatcacagttatggcccgctttggcaacctcacttctcatgttatgtttttggacacaattcaacccaaatgtgcagcttatcgtgagcttgtcgcagaagtgct

SEQ ID NO: 173601 - DNA, 804 bp, Zea Mays
gcaataaacgatataaatggagtgagtgtacttgggttcatctaatttgtatatgaaaatggtgtatgtaagttacgatagtttaccccaacattaacatcaagaaccaaactgttcgaactcatggaagtctgctgattttttgcatcatcaataacacattggatgaaacactgcatgaatacattgtctagacacttcccatcggcaaaagattcatatatgtcagaacatgtcgctgaatattcaccataatctattatggtcctggtgaattttttatatcaattagagaggtcgcgtaaatctaccagcatataaacagatttagatttagtatgaacttcatacctgccggtgtcagattgcagaccacacaaatattcgcgtagagctaacacagtttgcatctccgaatcaagagaagcctggccaacctgtggagtgtttgtagtggatcggtttcaacataaacctaaaaatatatatgaaaatatacataaaactctgtgaacaattttgacaactataaagaaaatgaaaattactgagctgacataaagtggaatatacatatgtggaatgaagtgtcataaactggcataaaattaatgagctgacattactgatacagatcaagagacagaaatattcttgcaaactgcataaatgtatgtgtaatttatcataggcagctaacagttatgtaaaaactgcatgcacatctacttagcatacatgtatgtgtaaatatgcataacactgatttgtatgatgcataacctatttagactgtgaagcatg

SEQ ID NO: 173602 - DNA, 563 bp, Zea Mays
tttaaggggttttaaactctcccgaccaccgatcctggaggacgcggcgggtcggaccgtgcgtaggcttgccgcggagaaggacaaggaaaagaaggacgtggaaaaggcccgagctcgcgagaggatgcgagctcgggaagctttggagaagtgtcgtcggaggcaagcaagggatgggctcccgttggagccgtcgccggacacgactgacgacgacgacgatgatgatgatgatgacgaagacgatgacatggcggcccggcttggcctcagtccggacccgaggctgggccagaggtcatcgagccagcctccaggtgggctggcgtcaccaacgttcggggccgggacgccggggtcccggtccgaggagcggaggcgggccgagggggtacttgaccccttggccgagataattggggtgactccgggaggtcagaccgaactgcatgtcccccaagagcaggtgcctgtgccggtcatacaggaagttggtcccccggctatcgcgacgtcacctgggaaagccccctcggcgcctcgggcgtccgaggtggaag

SEQ ID NO: 173603 - DNA, 418 bp, Zea Mays
gcactttttgataggatgtggggggcgcatggtcgggaggctgttagggagcgatccgaccgggcaagagagcaggtgatagttattgtttttttgtggtttgttgtgcgtgggtgtgtgtggtgtttgctgaatgaatgtgccgttgctgcagatggagcgcgccgaggacgtcgaggacttcggaggtctagttggcgcgccgcccgaggctgcgaagggcaaaccggtgctgccctcggatgctggtgaaggcccatcggacgtgcccgtgcctgctgctgccggcaaagaccctgtgtcggcccctgtgccgacggtcgaaggcgcccaggaggtggtggcggagccggcagtcgaaggccctacggccgcggacgcgccctcgcaggtggctaagtagttgaataggtgcagg

SEQ ID NO: 173604 - DNA, 784 bp, Zea Mays
cgtgggcctgccttgtcagatccgccttccccgcgcccgccgtggaccggagcgtgcgcactcgcgcacgtcgccgggtttctcggccacgacgcccgcccacgcgcccagctcccctttttagagccccgccagtgcccagcgcacacccctcacctcatttcgcacaactttgccctctctcgcgctctactcatgccgccagccaccgtaggagaccctctcccgtgttcccggccatccagctcatcggagaccgctccaagcctccccgagctccgccccgaggtgagacacccgtccccgtgcccaatttcctttattgtgccctgtgttcgcccaatttcgccttcaccggtgctcgaccgcggcggtccaccgtgctcgcgtggtgtccggctgatttagcctggtctagttcatcggagtagttccctgtgtcacccctgtctcttctaaagccagtcaaggccttagcgcgccttaggtcccctccccgtggccggaatggctcactggagttctcccctctctgcccgcggattcatggcctcttccccaccattgagctcgctgtggcgccctcttcctctctgcccaactccggcgaccccagagccaccctagctcacgcccgcctcaactcctgcaacctcaccgccgcggagaggagcgacgccgccctcaaccgtctgtttccccggtctgatcccctccaactgattcagattgaacggcccgtaccgcgggtaccgctttgcgcacgtgcgcctgacgccatggc

SEQ ID NO: 173605 - DNA, 584 bp, Zea Mays
cgttgatcttgtgatcaacggctccggttggacgatagtgtgatgagccacggaccgttgatctcgagctgactggtctagattaaacctatgtaccgcttcgtggtagggttgcggtggccgttgatctaaccgtggacgcctcagattggatcgcggtcatttaaaatccaagcccttgatcgctgatccggtggtccagatcgcgtaccccttcatagattaaatcaagccgttgatctctaatcctgcgatcagtgttgcataccgattggattcaaatgatcgatctgatctggcgcatccgttcctaatcggacggctgtggattgcccataccccttcgccgagccagtttcacaaataagcccctgtccgtttaggtattcaacccgcagtccactcgggtgttcccctgagtctgtggaatatttacgcgagaacccctatactttccagaaaatagtgcccagtccagataattaataaaaccaggaaaatcatttagaaaatggtttttagtacaaatttaattgcagaaacttgtttaaattgtagaaaattcatatgaactccaatttggt

SEQ ID NO: 173606 - DNA, 547 bp, Zea Mays
agccctcgcttaatatgaaggactcgatcctaattggggcttgttcatggtcacagcggtagaatgacccggagcgatcgcattccgaaccactaacgacatggatgttgaaattggtgctcggagaagcttcacgggttcaccaggggttatgtacacgcttgaatttggactaggcaagaatagaaaagcgggtcgacagagagggcgtcacgacggcgttctacgggacaatttggtgttccggagtgtaggcttcggtgaagtttaattggctggctccgagagcaatagaaggttgaagataaggtagaacaggaagcaatttggtaggtactaacctgatgagtgctggccacggaggagtccttcacggcggtgcgaagaacagggccgaatggatttgtggactgtgtgagttctccggtgaaattgagtcgattgctcaagtgcttgtgtgcgtgatgtggtgaagaagcaggatctaggctcaatttataggccgatggccggagttggatgaggctcacggagctataaacgcgct

SEQ ID NO: 173607 - DNA, 874 bp, Zea Mays
tataaatttcaaccagggacctatttgcaaatactaagggcggttttgtaaaaatagaggatccaaacattatttcttatgcactaggtggatgtcgggttagttttatagaagcataagggcttatctacaatttaccgaggccgaagtgttattgctgtttctggccacgcgatcagagatggacgccccagattatactcaacatagaataccgatcccacggtcgcgattaaatcacacttaacccaaacgatacactatgctggtcgttcgattccggatcgatggccagatcttaagtccccaacattaaatctcgcccgcacctacgtcaatcaacgacctagatcggatctggccaatcgttacgcccgatcaaatctcccccgcccggccgggatccaacggttgatgggcgtcttccccgcccgaccacgtagcttggcggcgcccaaagccagtgtggcggcggccatcaccgggcacaggaagactggccgtcccggcacaaagctttatcctgatgggctctactcgaagaggaaggatgggtgaacgacatgggtgggttcttaccggccatagagcattcatagactcggaccacgacacgaagcggctccgcggcgacgacgtacattggcgacgaattccgaactgaacgatgaccctcgagccctcccagattccaatatgcgatccatgagcctcggcggacctccacgacccaacaaagaggccggagcaatggtggggattcaattcaacagcggcggcggaggtgtgctaaccacgattcggagctacctcaaatggaggggagaaggggtgccaggcacaacgcaatgaacgaggaaggcattgcggcccc

SEQ ID NO: 173608 - DNA, 978 bp, Zea Mays
ggggctcggttgctaaagggacaagggcggacgacgtgtcctattatctaaaagcgcagtggctaaaccataggattcaatacctatcagtaatgatctttgaactatgagaaacgacgagtaaaaagataataactcaggggctcttttactaatttaactgcaggactcaggcgaacatgtatcggtcgatggtgaccgtccgatctagatctaagctctacagtttaaaacagacaagcggctcgacttgactaatgtagatctgtcgatcctgatccaactgaccaaatcacgcggcttggcatgagcgtgtggctccgtgcccaacaagctggggtgaaggggcgtgataaggggaacacacggcgtgcggcagtgcacgacagacaagctcaccaaagttggccataacggggatccaggggcctatcatgctgggagaatagctcaggagggagcgggggtgaaggcgaacatgattagggcctcaccaagggggtcgaggtagcagagagggtcggcgacgagcgatggcggggagcgtggagagaggtagcgaggcttgaggatggggagccagtgcttggaatcaaaggtggggcttcaggtgatacttataggagcgagaccgaggcatgacaggcaccaaatcgatggaaatcgatgaggagatcaactctgcctggtttccataaacagcaaccacaaaaggaatgaaatacttggtaagggggaggggagattggtcgagatcaaggggaaaaggaagggcatcacggtgcgctccacatcgggcaaggaatcgagcaagggtggcttgatgcgggcggcatggcggtgacaagctccagactctggtgcgagaacgaggaagaagaaaggaaaggactgacatttggggcctggctaacagagagagaaggagaggggaagggagcgcgctgatgggccgcctaggccgaaagcaggcacagg

SEQ ID NO: 173609 - DNA, 505 bp, Zea Mays
tattgtacgcaaggctgtcatcaagatcatcctttgataagaccaaaaggccttcttcaaacttaggaaatcccatactcttagctatctcccggcaaacggatatttctttgttatccgggagacagtacaggaaatcttcttcgttactaccattgaacactaaagccccattcggatatttcagtcttcgggcaaagtgtctggcttctagtatttcttcctgggataatttcttccccgaagcatgtcgaataatgtagtcaacatcttcattgggagcttcgggagcaggagcttcggtcttttctggtacaatctgccctacagttttgtcctcaggcgcgacaggcttcgcctcgatggacacttaaggcccaacttcggcttcgacctgaactttcgtagcttcggcaattttcttaggggcagggctcaaggccttcgtagtctctataacagcgtctagtacgctggccatcctcctcttcttgggagttgcggc

SEQ ID NO: 173610 - DNA, 703 bp, Zea Mays
gacgacctcgactacatcaagaaattgcgtcctcacgatcgtgagacaagctgctgaggagaccaccctccctaatcccagcccatttctggttctggttctgggtgtggctgtcagccgcctggttgctagcccgctgagatgaccactgtcggcatgtggcccaggcttggagctagaggtaaatctgtcaaaatgcggttaactctcccgaccatccatttcgtcggtatggtgaggggaggacatcaggctcagcgctgaggcagtttgtcgctccatattctccctactgtaatttaccaaatggaagcctattggaacaacatttaaaagcatggtccaatctaatatatgtatagttctatagtgccaatgtcagatacggtccaacgatagtattgtacatgggccattatatcggtccacaatgctggtcctggcacgtctgttctatgactctatgaggttggctctgttgtgacaggacaaatttgcttctagttgttggtgtctctcctctactccttctccaccattgattctatttaaaaccctattcattctaccgtgtcactcacactcctgtctttggctctttccttcttgccctccagtggcatcttgagccatctatacgcctcatctttgatctcacattaactatgtagcgtcgtcctcttattgccatcttcgttttatc

SEQ ID NO: 173611 - DNA, 276 bp, Zea Mays
tgatcgttctgcaaggaggtgtagggatggaagacatgcgaagaagatgaatgtcgtgggtgaggaagaatgtgcgagagctcgcattatcgaactcaaatgaactcattctgcattgcagtgatgatatgctgcaggagagcaacagaagatgcagtgagcacaatatcattcacatagagcaacgtgtagcactatgacggaacacaaacagtgaaggatcaaacttggccgcaacaaagccaagtgagtgcagctatgcagcaatccagtgta

SEQ ID NO: 173612 - DNA, 489 bp, Zea Mays
caaaaacatgggtcggagggacacgaatggacctgagatcggctggccatggcgaggtgtctcacggcggcacggctgaccgaattgggggaaaataggaattcgggggctgtggtggctaatccacggtgaggagcggtgcactagcttcgtaacaagatagcggagcaggccgaacactcaatttattgagaccactcgagggtttcgcgaatttgggatgggatgtgcttgcgggcggagcaaaggtgagtcaccggagttcgctcaatgtggcactcactggggtagagtcctagggtggtaactaaccattccgcatgacacattgagacgtggtaacatggtcagtagcctggcgtatccagggtaacggtgaccatcacgacgacgaccgcgcggccacgtcgccgggcaagtgggtacggcgaagctggctctatccactctccttcagatctttttacccctccccccacgactatccac

SEQ ID NO: 173613 - DNA, 545 bp, Zea Mays
gaagaccaccagaagccctacaatacctcgtcggagttctgaaacagggccgcactgccttgtgtcgtggccgacccttgcaccatcgccattgtctggtgagacctgtctattgttcgccatggtctagtcctctagtggcgcatgacagggtgagggttggagaattggggcgcagtattgtataacgtcggcggtgccccaccgtggcctctgtgcaccgccgctcgggtcaccatctggtgagggggaaacagggtggccgagcgatcgacatcggacagctaggatttgatttggatatcgattcactacgttgaaccgtgtccattgatcaatgagttggcagctagggttggagttcatctgttgtaaatcgtcaccgctggatctggatctagtggcaatgatggcgtaccggttcagtatggggcttttaatctcgaccgcaaatcatgatccaacgaccctgatacgctgataccccttcgcagcgaattctttctaaagagaccctagggttttacaaaaataacccgtcgtcc

SEQ ID NO: 173614 - DNA, 734 bp, Zea Mays
tgcgcaaccatttctgtaaagcacaggggctctggtgcaaaacttcgtaagacacagagacatcacgtgtggactgcgggttgatatgacaaaaagacaggggttcttaggaaacattactaggccgaaagggtatgagtttgtttcagtcgtccgatcgggcacggacggcccagattagaacgcgcatcacacgaaccggtatctatttccacccgtgggattagagatctacggtggagattttacgagggctaatccagtatcgtccgtccgatctaaacggacggtgatgaactcccagaccaaagcgtcaagcaccgacccaatcttggtcgttcgttggccaatcaacgatccgaactctatctcctacctttagcagactgggcacgacagcgcccacacccaccgcggcggcgcgttcagtcgctggtggcgccatggccacggtcacggtgagcagcgctccggtgagtccagcaggcgatttcaagaacggatgagatcgaagcgctgctcacagtttagacaacgacgaaacacccaggggcacccttaccttgactggcgcgctcacaagcttttgaccagagcaggaagcggccaagcagcggattcctgacaccgacgaggaattaaggaggatttggttcgtctccagttcccgcgactccgcgtcttccacccacggccgagggggagcggcggcgcgcgtacgggcgcggtggcgc

SEQ ID NO: 173615 - DNA, 1805 bp, Zea Mays
ggcggatgctaaggtattcttggggccattcaccgagttggagtaagcaggtcctgatggcttcagctggggacagttgttcttgaagtgactggggtctccgcagtgccaacacgcattcgctggtggttggttgcttgcaacttagggggcatgaaaggagctctgactctactggctgaaccgtgatggggtgggtctagctggtctactgaagcttggtcccttgggtggaaatccaaacgatcgagttttctggtgccggtcctgctgctgagctcggaggacttggaattttctcttgagatggcctttttcttcttcttttgccctttccacttgcatggctttgttggagaggtgcgagaaactgaggaagtcttggctggctaggatggtcttgagttctggtctgagccccttcaggaagcgggccatcttcttgacttcggtgctgacgtcatccggcgcatagcgggccaactccgtgaatttgtgcacgtactcactgacagatcttccgtcttgagtcagttcccggaattcatcttccttgagctgaacgatcccttggggcacatggtgctcccggaaagccgtttcaaactccgcccaggtagcatctctgatggtaacattgaaggtatcccaccaggctaaggccattccggaaagttgatgagcagccagttgaacacgctgattttccgggcatccgatggcttccagctttcttttaatcgtgcgcagccaatcgtcagcatcgaggggattgctagatctggcaaacgtgggaggcttgagcctcaggaaatctcccatcctgtcttgcggtctcccaccattcgggcgttgattttccagacttcgagtgaggacctcgatgagtcgggtttggttggctagaacttgggctaaatctaagggtagttctggaggtgcggggaggtgggtctcactttcctctctaccggcttctctttcagctctcagggggaaccctgctccaatccggaggcggtaggcgtggttttatccgaagccatctgccagggggagagagtcactattatgcacatgccaattgttttcaaccaagttattttattcattacaccaatacattacaagcatacggctactacaagtcgtactacacgtgagcgttctctgaggtacaaccgaactctttttctaaagtgtccccaaattccttgagaaggtcatcaaggctagctagggacatatccttgacgtcggacaaattctctatcctgacgagagttggtgctggaggggccttcttcctccgctcagtttggcctccttggttcttggtcttcttttggattttcttcgtgggggcgagcttcttcagcttcttatcgtaatccatcttcagggttcggtaggcttcacgggtgttggcctcctcgccttctgctatatcgagacactcttggagggtcgccttctacttcttaatttccttgacctgttgctctaagctttccacctgggagtttaggtgggtgcagtgggaggagagaccatcgtagtggttatcaagagtgtggaggtatccggccatgtagacaatggtggggtcatcctcggtagggtctctccctgatagggcctggagtcttttcctctaggtgggggtatttttgttgctaggtgggaagtaacgaagggggtttcaaagatctctctgctgtagttttggcattagagatggcaacgggcgcgtacccgctgggtactatgttcccaaacccgtacccgcgaaattaaaatatacc

SEQ ID NO: 173616 - DNA, 362 bp, Zea Mays
gaatagcgtcgcttcgttagtcggcaattcgtaccaatagtttcacaccgtgagtcggcataaaagcagtgtgcaatttggggcgccgtgcccgcgcgaaaacacaaaagcaaaccctactccaaccatttcccccttcccccaaatattgagccgccggcgcgcgtcgtagccacacaaacgtgcctcccaaaatccaccagagcgcgcccctgccaaatccccgactgcgtgccctctacccagatccacgagcacttcccagctccctctcaccaccacgccacgcacaggccctgctcggagctcgatcggttatttggcctgctggttccaccgcttggagctcggtaattatcact

SEQ ID NO: 173617 - DNA, 694 bp, Zea Mays
tattaatcaaacccaaatcaaattattacaattcaaggtaaccaacatggaataattgattccatacctttgcctaaaataacttgagctataggttggataatctgcaaaataatcttgatatagcctcgcatgtccttcctctctattacgtcgaacagtttgacggccatgaacagaactgcggcgtctcgattcttcatcaaactgatctccatcaatgaccaaatgcacgacattgaaaaagaattcttcttcgtcatctgaggatgatgaatccaacacctgcttaacaagcctgctctgctttgtcgactcatcaattattattattttctctcttggccttttcgtcgttcctctcacccgtggcgtcctactagcatatcccccactcgatgtacatgtacgtacgtatcatgcatgtatgccatgtcattgcccagtaggacgtccaagctaggacgagagacccaagggcagctgcaataattcatccatccgagacgagaacgacacacgtctcacatgcatgcatgctcccttttttcttgtcttgggattccaagattccaaaatcccaggtggaggttgcattggttgggtgaggcaccgagcgaccagtacaatgtgccgtggtggcatggcatgacagcggcggctagcggccggcagtgccaaggtcgcggcaggg

SEQ ID NO: 173618 - DNA, 765 bp, Zea Mays
ccgcaccaagtggccaaccgggtggacaaatgagtggttctatgtgaaggctgacgagaagaagagggagaagttgatgaccatggttatgagtcctatgcgattaagcttcagaatgacaaggccattgtgccatatgcaactcggctccccgtgccagctggccgaggttgaattcagagtggtggctgccgaaatcagcaccagggatttagtacaggaatacctggtaaacatgacttttccgacctctagcggttgggggatgccgaagaagaaagaagggggaaagaaatatgaacttgttcggttcccctaccgttttaaatttgagaagcaattcaagaaatcgtgcactgaatggctagagatgatcgaaactatgtgcaacgagattcttggcaattacacaaagaaagaggatcaactaatgactgttgccttcggcacccgaccgaaacgaaggctaaatcgagtaatggatgtactgaactttgaatatccagattatgagagacttgacaaaggggccgagggagcaaagagaaaaagagttgtcagcattctgagtagagaaactgcccggtccgtgaaagcagacgaaaaggctctgaagaaggcgaaagtggcaccgaagccgaaggcgcaagcccctaagaaaagaaaacttgatgagataccttctggccaactgaaggtagatgaagcaccgaaggagaccttaaacccttcgtcgcccactgctgtcgaggtggcggaaattct

SEQ ID NO: 173619 - DNA, 403 bp, Zea Mays
ggggtgggctggcaccgctacgctgagtcctgcctgtacggcggcgttatgtgcggcacctgccggcggaaggaccgatgaacaggctagccgagcccgtcagcccgctaggcggtaccgtaccgcggtatcccctgacctttgtccgctcgacaagctcttcttgatatccactccaaccggtcagccgctagcgagcttgctgctatcaccgtctcacgcttgctgcggtggtggtaaaatcgttccccatctcatgcttgagctgaatgctgcagtggtgcaaaaaatcaagtagaggtagttgatgctgaaaatataacgtcaggatattctgatccgcctcgacatccatcaaaacttaaccatagcgcaaagcaacttgcgctgtggttataaaaga

SEQ ID NO: 173620 - DNA, 669 bp, Zea Mays
aaaccaggtacttatacgctaaaacagaggacgacgggttgatttcctaaaaccagggggctcttaagcaaaactcacacgcgaaggggtacggggtaatctcagccatcagatcagagatcagcgtcctagattagatcgcgcgggcgcggctgacaagcagggccagtgtgtcagtgggtcagggtaggctgaccagccgggcccagaggcagaggcacgggtgagggggagagagagtggcggtcagatctaaatcggagggctgggattagatctgctcgggttagctctaaactgtccgatctcatacgaacgaccgagatctaacggtcaggggcaggcgtgggcacgatggcgccgctcggtcccacggcgagaactcgccggagacgagggggctggtcacgatggggctcccagggcttggggactggcctgggcgtaatcagggcgatcttgcgggttcagacatgggcctcacgccggcgcgggagcaccagagggcgctgcacatggcgaggcgggctaacggcggcgcggggcaactccagcgaacaatcgcgcgctaaacaagacagcaatggccaaattaagggcacggacaggttgctcacctcgagcagaagcgctggcgtcgcgaagcaacgacggaggcgcaagggttcg

SEQ ID NO: 173621 - DNA, 459 bp, Zea Mays
gtccactttattatgtaggatagaagatgtctttagagcatagataggtttggttaagaaagtgtagggtaagaaaagactccatccaagattgtggctcttgattcttttgaagatctggcttgaatcttatccttgatttgatgaggtcgatcatcttcgatcttcgtttttgaagttgttatccgaattagggacatgtagttaagataaagtagtaggtggagcagttagtttagtagatggctataagttaaatgatattagtcataatctggtttggctgttttgcttctgaatggtttggataggttatgtaacctattatgtaggtcaggttgttgggtatggccgagttgatctaagtcaccgatttaagcttaggtgaattaggagtacgaccttaacttttgtactagcattaaataactcactctagattagatcataatagattag

SEQ ID NO: 173622 - DNA, 873 bp, Zea Mays
gttactttccgcgaagtggctttgctttttgatgaggagtcttcaatggaatccagcaaacagagtgtacctttcgttactcagactctttgttcacaactttccaccatctagctttcacttgttataaatgacaagttgctaccatatttgggaatcagataatattatttctgtaataaaaatacaggattgcattgaattcatagttagattggtcatttcaggcgatcaaataccagatgtagagaagtccttgctttaaccacctcaaatttctttgttttagattgcaattactgtagcacatgagctggctcatcagtggtttggcaatcttgtaaccatggagtggtggacccacttgtggctaaatgaaggttttgctacatgggtaatcaattttagaacctaacatttcgatgtttcagttcgtaggctgccactatatattgagtaaatagaattttcttttaacagatgagtaatctagctgtaaattctttctttccgcaatggaatatctggacacaatttcttgatgacacaaccgctggtctcaaattggattcacttgaagagtctcaccctattgaggtaaccctcctttgggatttactatgagctatggccctgtccaatagtttgaaagttaactgtttttcatacgttctgctttttcatcgctttgtatacaactaaagacattacatgcttttaagtttgaccacaatctagtggtaaatgtttactgaggtccagcagaaatatacgagttcattgtggtgcacaattgttgataattaaaataacaaggatatatatgataaactcctgtctcctcacattaaaacaattggctattcatgtacc

SEQ ID NO: 173623 - DNA, 579 bp, Zea Mays
gtcaccacatcaatattatatacctatcaaaggtgaacaactttgcttaaggggttcaacatggttgtcatgaaaaatatgaagaaaaatgcacccaaagtcgggctgtcaggctgccttcagtctgaaaccagtctgacagtgtaaccgagccatctttggactaagtttcaaccttgatctagtgagaatttggcttgggttgctatgacataatggtagctggatcattgggctacgactttgctaaagagtgtcgatcatgttgctatataaaatcaagagaaaatctgccctaaatcctggccgtcagaagcactgaatgagggttgccatggtacagtgatctgaataagattagatcgactgcccggccgttcaccgccgacgaccgatctgcgccgtgatttgcgccggggatgggctgagctatcgacaggcatctcctcgcgacgatattattgaagcaggataagatcgctgcggtgggggggtgattattccggccgccacgcggtcactgatctttccggccatgcttggtcaccggcgccgctctcctctgttcatccatgccat

SEQ ID NO: 173624 - DNA, 530 bp, Zea Mays
cggatagcctattgttatcacaatccgagacacaacatatactacaacgtttttataaacatatatattcacaagtattttcgcataccgaccaaagcatacgaatcgtaacccactaatctccaaatcgaaatcaccatgcatttacttcccaaaccgtgaatacatacacgtttatcatatgaacacaacattccaataattattctaaagtgactaacttcattacacaacttgtatcacgatcctacttgatttacttgaagtgtctactcaaaatcgtgagcacgatcatacactatatgcgaagcataatttaacgaacacgcaatatgcatcgacacgactcgacttataaatatagagaaagcgatgactactttggcatgtcaccacctctctaattaggccaaaacaatattaactacatcgatcaagtctcatatcacgcaacacttataatttactatctcactgcaacaatatcacgacatgtacttaggacacttcggttcaacttacgcaatcac

SEQ ID NO: 173625 - DNA, 812 bp, Zea Mays
cagcattctgtcatcgtcttatgctttagaaatcagcattttgtcttctgggattaaaaatctattgtagcccccgagctttgagtggatttttgaaaatgatccactcaaagatcttcatctcgtgctttagaaatcagcattttgtcatcatcttatgctttagaaatcagcattttgtcttcatctcatgctcttgcgaattcaaacaatattatctacccacaccttgttaggtctgaaatttatttgatcggtgacagatttgacgtttggtagatggctcttggctagtcatcaccccgctctgtgcttcaatgcctctgctgattagacttgcggttcagtagctatatttggatttcctccgatctctaccgacctcttccttctgtctcagtacattcattgcgtatactgtatggatatgacttcttcagaaaatcttttgaaaatcctggttacccccccaatgggtgtgaccaaggggcgtcttggtacgcagagcatttagcacactgtcctggagtagtaacttgatgtgatcgtggggtgtaatcatatcgcccgagcagttgaccttggtccaaatggtgtcatgttacgcgaagcggcgcctgttgcctgactcatttttaggcggcttgaattgcttattgaatacttgtgactgttcgacgagcgtggtaggaagtggacggtcacctccggcatctataaatagcctgcttgcacgttgttctcttcactcatctttcgatcatctgttgctttcctctagcttcctcttcttctccatccaaccatgggca

SEQ ID NO: 173626 - DNA, 297 bp, Zea Mays
gacgagcaagaagtggatataaagttctatctatacgaaaatttatgagcttgatgagggatttaccaagttactttccttctactaaattgttgatgaagactttgttgcctttttagttaaaaatcaaaatagaaagttgttttatgaaacttctatatgctctcatgatcttcttataaaactaactaaactttagacaacacatttgaaagagttggatctaggagtgctgtggagcaggattgaacacatcctccctctccgcccgcctagcccttagagcctgcctgcccc

SEQ ID NO: 173627 - DNA, 446 bp, Zea Mays
cagctgtcctcggatagccccaaggcaccgcccggggtcgggcgtggtagagccagacaggggaggcaggtgagccgaagggaaaccactcgagtggatccctcgcctggcccgagactgacccaccataagtgaccggccacattaaccgtgcctggcatcgagccacaacggaggcgccggtccacctcccactcatagcctatgagcccctcgtaccacagagcactcatgacctacaaacccctcggactacaacacatttatggctcgtgcatgcctcgacctcctgcacactcatgacctaccgacactaggcctgagtgcgcagaccgctgatagggcacaacacgatgagccacgccgagccccaggatacgaaggccagaggttggcataccccgaatgatgatggcactcgggccccacgctgcccacatcgtctg

SEQ ID NO: 173628 - DNA, 970 bp, Zea Mays
taaaactaaaacgcgacgaataaaaaagaaacggaggaagtaaagtctaactctgtgtgctgtaataagcgtcttctaccttcccttccagatcttatttcctcaagttgctcctaaacagacatctctctttcctttcgcttcgacagtgtttgtgggctctgaacgccatatctttggaatgccctcacgagtgcctcagccggggagtggcagctgctgtgctgcagttcttggacttcttttcaacgagcaagcaggtaatgacacgtgagcgagtgttctgtggcttgatgtgcttctgcactgttcgtcctcttgcttcatatgttctgtgctcaccaaatgtttgtacaaatgcctacagaaagtggcgtttgatatcctcctgcacatcttcagtgattatgatgaagtgaatgcgcctaaggccatggaggctgtgcctgcactgtgtaacctcctgcaaaattctgatacaatggtaagtatgattatatatgatgaaaagtgtgtgtgacaaaatacattcatgtgttgttgatccttgtggatgctagattcttgaatctgttgttccgtgcttggtatcgattgctgttggtgcttgtgaaaatgataaatacatgagtaagctcatctatgaaacgaatgtggtcaaggcaacattgaccttgatgtgtaatgagaggtggaagagcctcaatgatgccaccttagaggtatgtctcatcatccttccttgatttcgttgctatcttttagctttcttggaacctgaggactcaatggaacatgtctggcagggcattctggggctgtttagagatcttgcttctttctccgcaaaggctgtgaagtctctctttgaattaaatttttgtgtattgctcgaggagatgataagttattacagctatgtgcaccacgatagtaatatggtactctacttcttctctttgtattactt

SEQ ID NO: 173629 - DNA, 628 bp, Zea Mays
ccccgctgctcgccatttagcgccaccaccaccaccacgcggggctcgtgcggtgagacagagtgggagacggcggccgagatcacgggcggggcgtgagcggaccgggggagcacggacgcccgaggattaaatgcggggagggggagggcgccgcggggcccagcgacagcgagagagagaggatgagaaggaagcttggccggcgagcgagttggtgtgggggaagactgaagagcctagctaggacgggacggggaggacgaaggcagagctgggtgggtgggtggagcggagtgagctgtgtcgcggcctgcgtcccccggagcttgccacgtcggcgcagaccccagtcatctcattctgggctagcgatgcgtaggtcccaccggacagtgacgtgggtgggaatgtgggatccgccgactgccctgttccgtgcggccgaggcatgtacccgtgtagacgggtggctggtggctgcgtatgcaggtgggcccggaaactggggacctccggttagcgggcctcatttgaatttggctgggaacgttttcctgcgggtttgggacctgggagttgggactgggagtgggagtgggggaaagagaggtctgatcagccttgc

SEQ ID NO: 173630 - DNA, 944 bp, Zea Mays
tacccttagagggaacaagaactggtaacagcccccctcctcccaccccgctacacaatttgcaaagttttgtaagcaataatctccatatgacaggcattcatggacgcatttcactgcgatgtgctatatttttatgtttaataggatgacagcacgtgaaggtcttctggagtgcaagggactcggtctatcaagggatgaaatgtcaaaacttctgcctatagtggatgttacctcttcagactcaggttccattttctatctacacatgcaagaaaaaggaagtagtaaaaagtgctaggatactagatccatattctatctacacatggcaggttaaattatatttgtcttgtcaaaagcattgattcgatgaaaaatggtccttattcaggtgcatttgataatgtacttgagcttctcatccggtctggaaggagcttgccagaggctgtgatgatgatgatccctgaggcgtggcacaatgacgttaacatggacccagagaaaaaggctttgtatgaatacttttcggcccttatggagccttgggatggacctgccctagtgtcatgtaaaaaatatgaaaccatttgactccttaatattttctgtacaagtcctgatggattgacttcacttgttgaccccattctcacagttactgatggccgttatcttggtgctactctggatcgtaatggcttgcggcctggccgtttttatgtgacatacagtggccgcgtgatcatggctagcgaagttggtgtggttgatgtccctaatgacgatgtgatgagaaagggcaggctaaaccctggtatgatgcttttagttgattttgagaagcattgtattgtggatgatgatgcattgaagaaacaatactctggagctcgcccgtatggggagtggcttgagagacaaaagatacaacttgc

SEQ ID NO: 173631 - DNA, 924 bp, Zea Mays
ccggaagctgctggacactggcttcattgaagaggttcatcacccagtatggctggccaacccagtcatcgtccccaaggcgaatgggaagcttcgaatgtgcatagactacaccagccttaacaaggcttgtcccaaggacccgtatccacttccgcgaatagatcaaatcatggattccacctccgggtgcgaccatttgtctttcttagacgcttattctggtttccatcaaatccagatgtctagggaagataggtagcataccgcttttgtaatagtggatgggctttactgctatgtcgtaatgccttacggtctgaaaaacgccttgccaacatttgtgcgggtgatgagtaagactttcgaggacctgatcaaggacaaggtggaagtatacgtcgatgacatcatagtcaagaccaagagagggtcgaccctagtggaagacttggccctggtcttcgacaggctgcgggcaacccgcacaaagctgaaccccaacaagtgcgtctttggtgtctccgcaaggaacttgctggggttcctagtttcgtaccggggcattgaggcaaacccggagaaaatcaaggcgattgaagcaatgcgtcctccggcccgtatcaaggacatccagaaacttgcagggtcattagccgcccttagccgcttcatttcgaggctggctgggagggtgctgcccttcttcaagctgttgcggaagtctggtccattctcttggactgaaggggaagaacaagccttccaagagttgaagcagcacctggtgtccctaccaatactggtagccccagagcttagggagctgttgtatttatacatcgtggcggctgccgaagcggtgagcatggtgctagtcgtcgagagcatggcacaagaagcccaggaacccaagggctcggg

SEQ ID NO: 173632 - DNA, 733 bp, Zea Mays
gcccggacttccgcaacagcttaaagaagggcagcgctctctcagccaaccttgaaatgaagcggctaagggcggctaatgatcccgtaagcttctggacgtccttgactcgagccgggggcctcatcgcctcaatcgctctgatcttctccgggttcgcttcaatgcctcggtgcgaaaccaggaatcctagcaacttcccggcggaaatgccaaaaatgcatttgtccgggttcagcttcgtgcgggttgcccgtagcttgtcgaagaccagggtcaagtcttccactagggtcgaccctttcttagttttgaccacgatgtcatcgacgtagacttctactttgtccctaatcaggtccccgaaagtcttactcatcgcccgtacaaatgtaggcaaggcgtttttcagaccgtgcggcataacaacatagcagtagagcccatccactgttacaaaagcagtatgcttcctatcttccctagacatctggatttggtggaatccagagtaagcgtctaagaatgataacagatcgcacccggaggtagaatccacaatttggtctatacgtggtagtggatacgggtccttgggacaggcctttattcaggctggtgtagtcgatgcacatccgaagcttcccattcgctttggggacgatgactaggttggccagccatattggatgatgaacctcttcgatgaagccaacgtctagcagttttcgga

SEQ ID NO: 173633 - DNA, 747 bp, Zea Mays
gtaattttgcaaagcataaatctttccttgattcttgacaatgttaacattgtgaaaaaagaaaaggatattgttggtatcctgtaactggggtacccacttctactaggtcaagatagagacctccgtggttagctctaaccacgtgcttagaaactgggcccgccttcctggatcgtcagcctcaggacttgctcctgacagaggggtaggtcccgtgctaccatgaatatcgaaaagggcaatgaccacacaataggcccagatccccacgaacgggtcctaggcctccacatgtaataaccagaccctgcgggcgggtctagaccccttagccttgcaaccggacctcttgcaggtggggcccttgtcttcgtggcagcttgcgcccttgactcccactctccgttataagggggtccggtgccaccatgtggctcggtggcaggtagtaggagccatcgtccggaatcaatctcactgctcgcatttaatgcggacgatagaagtgtgtcgcgccgcatgtcaggcgtccacagacctttgtcaggcatgtgtcagacagcttaggctagaatgactgccccgtgtgttaccgaggcagacaattgtctgatagtaccgcacatagggtttacacacgacgcctcctaacaccaagacaaacagttatgtctttgaagctatctacgaggatggtgccaccataagcaatcattggcttaggcagcacacgctctcccatcg

SEQ ID NO: 173634 - DNA, 532 bp, Zea Mays
caaaactgctgcaacccctcgagcaccggcgaaggcgcagaaatccccacagtcgctaagtatttcgtcaaaagctttagcttccttaccgatccattcaatgactccttcgggatcgcctcgaataaatttttgctctgatgagtatgcacccacctttgcaaaactgtctctcaatttctttgcgcaatccaaggatttctcataacatctctctttcgattcacgaagctcttccacattcttttgcaatcttgaactagtccattctcttatttcttgcttcactttcgccacttcgaaatcctcattcttttcggtaagctttttctttaggctttcaacttcggctttatgagcctcggattgtgcattaagttttgcttcgttgttcttcagcctatccactaaggaaagtagaattttatctttttcaagcgcctcgtttcttagtgtaataacttctgaccgaaggttcccaagggatatttggcagctttcgtcttccgctttcttttgtgctcttaaagcc

SEQ ID NO: 173635 - DNA, 449 bp, Zea Mays
gatcttgtaggtccgggcataaggcttggtttcctaggctaaatcctgcaggtcctgttgcatgaatcaaaggatggcagataccagacgatgggtcctatgggtgtgctactaacacttcctagctgaagctgtgtacaggtccaggtcctagtcgagactacctcctaggggtcgggtcaccaactctttcttaggtatactggtatccagcctcgacacgtcgagcctacatcccaggggggccaagtaccagggaggagttggtaacgccacacacagcaaggacaaatagcatacagataagtgctaatactgcttgataaatagtactcaaaagtatcttacaaaaccaaaaaatattacaaagccgcttcccagcgggacccttgccttctctctgcagatctacctactcatcatcaataggatcccactggaagcgttcg

SEQ ID NO: 173636 - DNA, 710 bp, Zea Mays
cttgcaaagtcgacgacgcacgagacactgcttgggatacctccaatcccacgactggaatttccgaacaaatagccatcatatcatcagcagtcggctccgatagcatatcctcagggacgacctcttcaagggcctgatcaaaatccgacattgacagttcttgaggctgacaagagctgacagagctggagaaggaatgtgactatcccccttactacctctgtaatgccggctgttcttgcgaatcagcgggacttcttcttcttcttcatcttcaacaaatatacgaacgacagccggtgcacggtcatacccattgggatcaacttcagcagaatggtcacacccattgggttcatcttcagcaggacggtcacacccattgggttcaacttcaagacagtcgcacccattgggatcaacttcagcatgggcgcaaccattgggatcgacctcaggaaggacctctactagcacttcatcacaaactggcaccgaaggacccgtgccatgatccaagctcgacagtcgccaaagccgcctcttcttctttttctcttcaacgggtacggtaggccggctcactcggcgtggacgctttggatggacctcttggggttttcagaccctctccattccaaaaagttcttgcccgtccatgatagccattggcttggcatgtgtcgagtcagatgattccccagcca

SEQ ID NO: 173637 - DNA, 942 bp, Zea Mays
cgcgacgccgccgcgcagctcctgaacgggcttctcctcgccttctccgaagaggtaactgacctattcactcgtggtgcctctgattcacacattgctctgtcgatttgtgacatttgttgcggtttaggggccattgagagaggtgttcatggatattaagtgggaggtggaggaaggggaattgctgaaggattgcctggaagtgggagctaaggacttaaagggtttgcttgtcattgccaaagacctcttcgctggtgtttcaaggacttctacgcagcatagcgagctctgaggtttggtgactttaagttgccttttctgatcgtttcaggaactcacgcatgcttgtgtaatttagtttactttagaaacctgatgttgatccgtacagaaactaaacccttgtgatatcactgttgtgtctgctactaatgggctttgaattttgagctgtgcataattttgctaatctgaattcatttgtgatcatggcactaccaataactttggtcctttttttctcaatgcacatgctattttattgatttagtggaaatgttgcgcacgaaactgtcctatgcaaacattggatagagataatattagatgtagttattctccatttgggtatttaaataaaagctgcagatatttgcattgtggtttgtggattttgaatgtaagagcttaggatatgccgttttttggtattaggagctcatactttttatccagaaatggatgattctgttgccaagaatttaatatatataaaaggtgaatcagccatgctgcccacaatatgtcctatagctgcctttccaatttatgtttgctcctttttctctccaaacaaggaggtattgaaagctaagctagtaccaaaacaaacccaacatgtttaaaaaaaaatctgcacttacatttgcatttata

SEQ ID NO: 173638 - DNA, 841 bp, Zea Mays
ccatcccgtggatccgcacctcaacggactcgcctggctgttatagggcagcttagaccgtgattccttcgtcatccctgcttctctctctcgcgcatgttgctgccgcatactaaatcaccgccgcctacgaatctcggcaccggttgtcgtctagcctcggtgtagaacctgggagggtcgtcggcactcgaggttgctatctgtgtccgcaatcgaagggagaggccgcggagccgcggcaatttctcgccgccgatcggttctccgtcgcaaacagctccgctccgcgaccggcccgttgcagttcgtctcgactggtgagaactctactcagaccttcgccaactccttttcggtgtgcaacacagtttaatttggatttggggtagtggctggccgcgtcgcgtgctcgccggcgagccatccaccgtgaccgtggcgacgctgctggtgtcgggtgagggaaaggggatgatgatccctctgccgtccatcctggatggaacagtatagattagaactagaattacgttttggtcgaaaacgaatctgtgtcgtagatcttgtgataagcggtaccggttcgatcacgggctcgtggaatccggaccgtagatcggacgatgtacggataggagtagatctcgggtatttaaaatctgagctgttggatcccgatcccccgatccggattgtttgccgttgcgtataaagcgtgggtaaaatcctggcggtcgaattctaatcggacggcttgaagtgatccataccccttcggccgcgtgttttgtaaaagagccctcgggcttccagagaatcaacccgccgtccatacaga

SEQ ID NO: 173639 - DNA, 472 bp, Zea Mays
tcagttgagcatttacctcgtcaattcgcacccgagggccaagagccaccataccatcagtttcctcatctccactttgggggtcgtgcacacggcacgcagttcagtccttacctaggcaaccttcccaagctaaatttccccacatttgatggcctgaaccctaagttgtggcaagctcgctgcgaagattacttccatatgtatggtgttgatccgttagtgtggattcaagtagctactatgcaattttctggacctgcttcgaggtggctacagtcggtcaaacctcgtttagcaaccacgtcttgggaggattttgggcgtctgcttaaggatagatttgggaaggatgaacacgccttgttactgcatcaattatttcaattgaagcagtctggctcagtctccgagtacattgagcactttgcccaactcactgaccagctcaatgcctaccaaactgtgtcgg

SEQ ID NO: 173640 - DNA, 754 bp, Zea Mays
ttgctcccaatttaataaccttttgttcactcccctttattgttcttcctttgggttttgagttatttggtcttgccaagcttatctcatcgactgcaaaatccagtttctgcaattcaaaagtatatattttttcagcacataatattatgcagtcccacattcagtctaataccattattacctttctggcatgatcattttgttcatggtcaccactctcattcatatccgcgtgatcctgcaaattaacttgtacccgccaacacattttaaagctcaatcataagccaataacacaaaccaataaatcatttgtatgtacaaccgcaaatcaatatagttgttaaagttattacctcttcaaatgaacgtatcagtataggtatttgaacattgtccaaacccccttcaagtatattagatacgtcttgaatttcccgaaaaatttgttcaaagctcagtatacatcagttacaaataaacatacacaacaatataatcaaaaccttgttattcctttcacccaattcaccatctctttcgacgtctctattgtcttcatcatcgtcctgaaattttattgttttatacctcatcaatgtattaggatgaataatatgttaataatatatacattaaaacatcacatacctgtataccatctcccccactagttccacaagtctccttaacttctatgtctgtctccaaacacgaaagtacctcgagaagctcatccattactgctagg

SEQ ID NO: 173641 - DNA, 415 bp, Zea Mays
tggaggagcacgcgcagtaggaagactgatggtgtacaggggcccggagctgttgcacctaaggattgtgttcctggaattgagatccttcacagaaaggccaaataggtcaaattccatggaacaattattatcagtcataaactgacggacataaagaagatttttaatgatatcaggtgtaacaagaacattgttaagataaaactagctagaaagcaccgtatctcctacagaggtgaccgacagactagactcgtttccaacaactatggatgaaggaatagtagaagttggagaacgaaaatgggagatgttactagagtctggggtcgtatggttggaggccctggagtcagcaatccactcagtgatggattggggctgctgaagagtcatcatgttgaaggaagag

SEQ ID NO: 173642 - DNA, 595 bp, Zea Mays
cgcggtaatattcaattggttgggccgacgagctatattaacattcaaggatactagaacatggcacaaaggggaaggaacgaacctgggaacagttggtcatggacgggtgcctcacggcgggaaaatgaccacgatggtgaaaatctcgaatttgtgagctctagtgggtaattggaagcgaggaagggtgcgctaggcacgtaaccagaaggtggatcagggagagcctttaatttatagtagctacgtgagtgcttcgcgaatttgggatgagaagatctcacggccgaaagggggtgagtcactggagcgcaactgtcttggcgctcggtgaggtaaggccccaggcagtaaatgggctgtccagagcgacctattgcgatgtggtaacgtctccaagcacgtggcatcctcgcggcgagtggcggatgccgacgaggacattccgatcggtcgtgaagcaagtggttacggtggccagctcacaaacttatccatagtcatgatcttttcacttgcccggtaatatccgcgctgatccgtgcacgaatcttcacggcgagctcaaatcgcggcacccgatcaccggcgg

SEQ ID NO: 173643 - DNA, 790 bp, Zea Mays
ccaaatcagagttggcatagctacttgaaatgcccccatgacaggggtggttcatcatgcatgagctagttgtaccaagtctatgcggcgccgagcatgtgatatgaagccaaccagactttctcctcttccaacgtgtgttgtccctcgaagaattgttcacatcgagtcaaccagtgcattggatcttcctttccatcaaaggttgcaaactccaagcggtggaagcgaggaacagcagtagatggtggtggagagaaagcactgggtatggtgtgcggtagtgaggaaaaggatggggtgggtgaagtggtgtgtgggaatggtggtaatgatggaatagaagatggtgaatgtggtaacgacagcaagtgcggtggaagtgaggtggtggtgtgtgatggtgccgatatggtggtgcgtggtggtgggaggtggccatcgaccgctgtcatagctggtggcagtccgccatatccaggcatgccataggggtagtctggtggcggtgccatggccgatgttcctagggtggattccactgtgtcaatgcgggagtacatggaggccatctgcgtggcgaagagccccagttggcactggacttcggcaagggcggtggtgattgctgccaactccgacggctgggctgaagctgcagtttcggcttcattagatcctggcatatctgataccaggttggtagaattaccccgactacggaggttgtatgagtggctaatggttggagggttggaggaagaagtgtgagagattgtcgtggtgacgc

SEQ ID NO: 173644 - DNA, 1729 bp, Zea Mays
aaaaggagcctgtcagacaacatatgggccaggctcccccgtttctgaactggtacgactagagcgatccgtggtccatgaaaattctgagcacccagttaagtggaggttgctgacaatctagaaaaaggagctttgttgtcgaagaacataaaacggttaccagatggcaggtgatggttgaagagagagctgctccagcgccaaccatcagtacatgttagctgaagaattgtactctaggtgccaaagaactgtgtgttggagacttggagtaatgcagttgcgatgtgctattgtaagactcccttgtgggcaattagccttcttattatcctcttatgtcatgcccggcagtattggataccacgactgactaaaagcccacctttctaactctgtctatatctctactcctttaaagtacgagtttcgtgcattgtctattgtgcgtcacatgcaaagtgagtaaggtgatctattttctcccctacatctcggctaataaataggttgttaccttctagatagggccgtgagaaacacctaagcctaatatgatacgaaaccacacgcaatacaacgctcttagatagtaccatctcactaggtgaaggaggaaaagcgaccgagcgagctacaaaaaaagaacatgtctctttttaactcatacttttctcgaccttttacctaagataaagtgcaatatctacaatttaatatatggtatgtgagttaatcatgtccactttaattttattttttgggggtctattttaattttaaatttatttttatggagatggtctatcaaactggcttgctactagaccctcgggcgttgtataactattatactatatcatcaaatgcctcagcaacacacgggcattacactataaaacccttagggctagtttgaaaatgatggagatggaaatgaactagtttctccctcaatgctctctaattattaaggggatttgagtttccaaacaagccattatagattagaaaggaaaaccaaacttctcagattgtggaggtgaaagaaaaaaaaaataccaataaggacctacagtacactgatgtggctatgtatgcatgcaagattattacattgaaatagctgggacctaggagtggctttggaacacgaaagaattgcacaaggccattgttaatttgaaaactgtgtgggtcagactagcttttcgtcacctttctttgcccgtcctccaatggcagccgtgactcagactagcttattttgatagtgtactagacaggacctttgaaaattgtgtgtcctccgaactttttcatcacctttctttgctcctctaatccaatggcggccgcaagaaccgaaaaggtagcatatgtatgtgcccctacactacaccaacacacgaagagaactacgtagcctacccagcatgtcttcctcgtgcttttcgttccctcagtgctcgtcaaagaatcaccatgcccatgtgaaagggaaaccgatcgaaaccgcaacagatatagctgctgacctgtcacgtaaacttgggcgacggttactcctcggatgccatgccagtgttcacgttcatgccacgcctacaaatcgaccgaccaaggtccaagctgcagctagcgcacgtacaccaccagcaccatgccgccggaggccgcctcgtcaacaggccacatcgtcgcccgcatccggcgtccgctgccc

SEQ ID NO: 173645 - DNA, 644 bp, Zea Mays
ctttcagcaaggctcatgtcgtggtttcaaaaactaggggacaataagatttgtgttcggcgggggatgctagcgcaaactcactctgaatggtgaatctctaggactcgaatctagggtttgagatagagagtttatactagttcaagcttgcgccctagtctagtgtagtgctgatcgtagtattgcctgagaacgtgttacaactggtgtgtgtgtgtgtgtgcgaaggaggagggcatgttcttttatagctcaagggtaggaccttacagtggagacttgttctctactggtaagagggtgatttgttgccccgggttgaggtagcattcctgacgtcgttcgtagggtcatgtgtagtcgtattcccaggatagtgtaccaccttatttgtctgccatacaggtccctgtagtgagtcaattgttgatgtctttatagtagtgtgtggtaggtccaacagatcagactcatggtgcggtcatgcatggtgcgactccaattgtcgtcatgagccctacgtcacctgccagcgtgcgtaggcatacactcggtatggtgtactatcccatatttaccgatatacaaggcaatgtagagactccagtgctgaggtccttccacgactaaggttggctgac

SEQ ID NO: 173646 - DNA, 1141 bp, Zea Mays
caaccaccaagtggaccgcgggttgatatcctataaatccagggactcttatgcaaaatcacacagccgaaggggggtacgctctaatctggaccgtcagattgattccaacggtcgggattagatcctccataacccgaaccggtaatggatggtggccactggatcaatatccgacggcccggattttatgaagtctaaactgttctcacccctccgatctatgttctacggcagagaagcaccctggccgatctgttagttagccaccagatctaagccgctcattccctgatcaacgctccagctctcatccacttcccatgactctgcccaggcggcgccgccaagccctcacggcggcaacctgagcccacggcggcggccatggtcggtgctagccagcctgttgccccaatgccccgttttcaaacgaataagctagaaacacatcggggaagacagaggacccaagtgcgtacctcacttcccaccacggcgacgcagaacctgaccacggtggagagtccatacgacggaatccccacactccggcaagaaattccccgctctgcagctgcccccacgctgatacttagccaaacgaagaacccacatataatggagagacccagagccatgctaagaagacaagacggtggcatagccaggggttggcattagcggcgtctccatatccttcctggtctgcttgctccgctcgtcgcttcctcccttcttagttatggttaaagcttggttgcacaatggaacgagagaaggcaagtacttatacccggttctggcacccagcaacccgctccaagcgcaacaacccagcttgcctggcgcggaagttacggggaagagattcgtgttcgttatagagggagaagacggatttgtggacatggccccatgtttcaggcgaacccgcggcaaaagaggccccacatgtgaaccagagtccgcgcgcagagctcaggcggagaccgcggtattcgcttgagtttgttacggagtccgttttgctgtacaggagcccgccacgttgattggagatgacgattctggacagtgggccccacacgtaagccacatacgtgaacgacagtgagcgccatgggctgagcggggagag

SEQ ID NO: 173647 - DNA, 673 bp, Zea Mays
tccagatattgctgggggcccagcagaaccaaattatcccgctccaaaacactacgaaactgcactatcacctgccccaagtgcgagcgctgaatggcacgaacaccgacccgatgatgctcaacaagatactccctgaccacatctctgaccacagggaacaaaaccccgtgctcaggtaaaggatgaatattgataatcgcccagtcctcatgcattggcggcaaacgctgcgagactgacctgaccatgatcccacggtgctggaccaccgcggcgctgaagcctggtggtaggaacggctccgggtccactcgtcggtacgccattgccagaatctcagaaggtcaccggagagccaagagcaaaggagcggtttggggttttggtgaagtgacacccagcgagagctccaaggacgtttcgggcgcctgttcgtatatttttagtaagaccgccctggcgaattcaccgaagcaggcaaaggcaggaggagtcccacccgtcagggacccgggtgaagggcggaactaggacccgaagtccaacaggcgagacgacccctccaaaaggcaattactttcgaaggaagggaacaaggagagggggaatccaaattccgatttcttacgattgcagaacaattccaaatgccccctggctttacaaaatt

SEQ ID NO: 173648 - DNA, 338 bp, Zea Mays
ttgaggtagagaggagtgttgtagttggagaacaggtacatttgactctgtcaagcaagtatcatctgtagaggtatagagatgtgtggttgtgccctgccatgaaacagctagacagctatctgtgccagcaatgggttcgaagtcatagcagagtcagtgtagccgcccacgcggtggcaatccgagtggtcggtggcggatgccttttaaaaggaagggggcgtgcgtgttgcgccgggcgaggcagaccgcagacggtcaaacaaacaagtcaggtagccagcgtggtcgttcgcgacacagcattcggcagcatgggcgcggttgagccgccg

SEQ ID NO: 173649 - DNA, 550 bp, Zea Mays
tatgcctctatcaaattcgcacagtcctcctctgcctgtaccaaaggacggattggcaaatagctatagaaattgttggtggcgcgtattatggccatggcgccgccacggtggtcgtgtccgatggtcggagttggcagtagtgaccggtaccattagattccgtagcaatggctcgaatttgatcctggcgtagcgattgggtaagcgagatctgaaccgttatgatccgattatatggatcgaggcagtcctgggacggatgagatctgcgtcgtagatttcggaacctcaggtcgacatcgagtaccgattcattgtgatgctagatctaatgtggcccgtaagatatggatcctacggtccacattccacaacgattcgtttacagcgtgacttaatctggatcgtggaccagatcgaacgggtgagagcatccaataccctttcggccaagcgcttatgcaaaagagcccctgcaaaacacagaaaccaacccgtagtccacggcagatgggttctgagtcttaggactttttgtgtagatgcc

SEQ ID NO: 173650 - DNA, 1071 bp, Zea Mays
atgaattccagcttcaccgtatacgagtgattatcatctatatgaaatctagcttcacaaatgggttctctgtgcgattgtaactcaaaaatcctattcaatccttcagtaatgctgcatgtaatgcatctcaatggttccgatagactaaagcccaaactagcatcatcatcttgaattggaatcacctgaaaagaatgcaagtacatacaagttgcctgtatcatcagtgtgaagtcaatagtgaagcattgaactaaaacacgagttccccaaatcagtgtatatggaggagttcttaaccaaaagaaccttggagcggcggctcgaagctgcgtggggataggttgaggatacgtctctggcaggcagggatgtgatcgatggcacgcccaacggacaacagatggggttgagtagcgaggcagcgacatggaaatatggaatggaatcaaagacgactgaggagatggaatcggcagcaacggccacggcaggagatggaaacagcgacgactgtgccgctatgtcctcggtagcaatggcaacggcgagcagggatggatcagtcgtggtcgcagtgtgtcctcggcggcaatggcggcgacaagagatggaatcggcgacaacagcgacggcccgcggtggcgagcaggaactagccgaagggaagtagctgcaacgatgagccggacagaacgggagccctacgactaggctaagctggagctaagcaaccaacaaactttaagatatgtgcaagtgtacgtgtcgtcaatccagggctggctgcaaagctcccgctttacatacggtctgtatagaatttttttccggctggaggaagcctccaactgatggaagaaggagcgcttggctacttgcaggggagggcgcgcgtgaagataaaggagcaggagacgatggctggaaatatcagggagacgaggggcggcggggataaggctgggcgggattttttttagtttttcagattttttttaatttctttaaccgaaaaatcacatatattttggatcccaatttttctagcgatgtatacgatgtaga

SEQ ID NO: 173651 - DNA, 287 bp, Zea Mays
agagacggcgggaggtggtggcaaaacaaggtggcgggcagaaaaactgagcgggcgggcgcaaaaaggatcgggcagcacctgtatgctgtagtagaaaccctaatgggccattggccgccaacccattaacaccctgcaacccagccacgagatcccactcctggttgcccaattagtcgtgattaggcgacgattaatcgaatgactggacgactagacctcctagtcgcgtcgctacccctaatcgggcataacagattgatcagggcagctgctcctctgcc

SEQ ID NO: 173652 - DNA, 307 bp, Zea Mays
gccaaaaggtgttcgtgttcgttgcatgattgctttgttagtcgtttgctctctcaatctctgccaagaaaatttggctagcagctgttcctcgttttttattgatcgatcggtaagagctactacaatacacagtttgcaagtggtatacgtacgtatttgttcatttgccaatgcctaaatgataacataaccccagcccatagcacggcgactgatggatcaaagcatgtgtgttcgtcttcttgcctgaacccagattgactccagactccaaagaggtaacatgctgatcgacactagctag

SEQ ID NO: 173653 - DNA, 802 bp, Zea Mays
ggaggagggcgccttgggggtgggtgctgaggtattcttggggccattcaccgagttagagtaagcaggtcccgatgacttcagctggggacaattgttcttgaagtgacggggatctccgcagtgccaacatgcattcgctggtggttggttggttgcaactgagggggcatgaaaggagctctgactctgctgactgaaccgcgatggagtgggtccagctggtctactgaagcttggtcccttgggtggaaatccaaaggatcgagttttctggtgccggtcttgctgctaagctcggaggacttggaatttcctcttgagatggcctttttcttcttcatttgccctttccacttgcatggctttgttggagaggtgcgagaaactaaggaagtcttggctagctaggatggtcttgagttctggtctgagccccttcagaaagcgggccatcttcttgacttcggtgctgacgtcatccggcgcgtagtgggccaactctgtgaatttgtgcatgtactcactgacagatctttcgccttgagtcagttcccagaattcatcttccttgatctgaacgatcccttggggcacatgatgctcccggaaagctgtttcaaactctgcccaggtagcatctctgatggtaacattgaaggtatcccaccaggctaaggccattccggaaagttgatgagcagccaattgaacacgctgattttccgggcatccgatggcttccagcttccttttaatcgtgcgcagccaatcgtcagcatcgaggggattgctagatccg

SEQ ID NO: 173654 - DNA, 732 bp, Zea Mays
aatcaaataaaaaagaccaaagctcatatggagatccacaccagcaagcttgaacaaggtcattatgtagattcccacctccccatccctcctcctcctcttggaagatttggcctctagctccttcttcatcagcggatgagtatggcgggtggatcttgattgttcttagcgctctcttcatcttcaattggctctcgggattggtctgctttgaggtgcttttctgttccccctctcttctcctacttggtcttcttcgttttttctggatggatctggcaaaattggatttccggtcgggattactcttcgaggatgatattaggcgccgcttagcttctccagtgtgtcctgggcgtccggatattccttcgacattttggttggtcatctcttttggtcgctgcatcttcaagcttgactcggttgcagtggattatcttcttcaagctgctctgggaggttttgcaaagggtttcaatgtatcccagctctctggtcgggtttttcgcttctcggtatcctccaaggtcgttggttttcatatctacaattctaaatgcattgatcgctcggaattcagggctttcttcaatctttggaatcatggaggaccgaattggacttatgaatacaggaaattcattcaggaagaaaatgccaattggtggattgttaagggcaagaagaatttttttgccaatattgttaagcttcctccgttgtctg

SEQ ID NO: 173655 - DNA, 633 bp, Zea Mays
acggtgtccgtgcaattcaagaataacaccgagcgttcccggcgatctaataggtcctagcttcattggctgggtcgggaagcatcagggacacataaggatactaaaacgaaagagaagggggcatgagcggacgtggagcacactgaccacggtgagatcactttgtgcggtgctcgggaccgatttgggggaaatctcgaattagcgagctttgatggatgatttgaggcacgagttgctggattaggtgcttgactacctagcagagccgagggtgtgctcaatttatagtgtgcttgagcggtggccagtgaatttgatggagacgcgcggcggccgaagaggagaaggggcactagcacaaacgattagtggctttcaccgtggcggactcaccggcgacgagccagtgatatagagcggcttgcggcgacatggtgaagcttcaaggcacgtggcattcgatcgatgtgcagccaactccggtgaacttatctgagccggccgcaaagcaaaagggggtatggcggccagcctccggtgttatcctgtggcgaagatcttttacccagaagcgttatccgggcacaggtgagcacgaatcacaatggaagcgtgaatccaaccatg

SEQ ID NO: 173656 - DNA, 306 bp, Zea Mays
agtttttctctcaaattgtgctcaaagaaataatgttggatcagaaagatgatttggatatcatgctctgtaatctataaggttcaaaagatctctattaaggattacaacacttgtacgctcttgtagtatgatgaagctaggcggaaatctgaaaccatccttggtccttgactaatcttattttggaaataaaaaaattgtgttcgctctctatcttaatgtcatacaagcctcttatgcagtctgtctcactaactcttttatcctctgactagatgatgaaccccaatggaaatgaagtaa

SEQ ID NO: 173657 - DNA, 911 bp, Zea Mays
ggacttaccagagtgtggatgtgcctgtaggccggccgatttcgggatcctctgcaggggagaagcccaaggcgacgcgaggcttagtcaatgcgcaggggacggcgggtcggactgggagttagagacggagctcgcgacggctggtggattgcctagggttcggccgccacggtggagaagaacgagggctcggtctctgcggtggagaagaacgagggggcggtggcactgcctccgtgattccgggccccttccgctgtgaagaaaaacaagacgacgacgtctctgcggtggagaaggcgattccgggtctctgcggtggaaaaggtgaatgcgacgacggtggaacgacggggggggggggggaatctctatgggttcggcagccagggtggagaagaagctcacggcggcgattaatctagggttcggcagccgcggtggagaagaagcagacgacggcgattgagctagggttcggccgccgcgagcgttacgggtgagttgagctgaaaaaaatgcgtcctcggttgctggattcgtgggcccaatacacataacctgctggcgaaatcaacgcgaaagcccatggaccgacacgtggattactgtatcgtaaacggaaacataaaacatcgtattatcaatatttatgtggggactagtacggctgcccagattgcgggaacacaatcttctcgtgggcccggatgcccgaaacatgcgcataccaaaaagtgtgtaaatcgtaacacgaatgagcataacatgtagttataattgacgtaagcaggtagtacagtgagccaaaaggtctgcgcacctggtcggtgcggagcggtccgcacacctggtcggtttctggtcggggcttccaacagtcagagagagcccagggctctaaatac

SEQ ID NO: 173658 - DNA, 393 bp, Zea Mays
gcagaaacaaggcaagggttccactggggtgcggcttgtaatattttctggttttgtaagatacttttgggaagtattaatctaacagtgacaaaacttatttgtatgctatttgtctttgttgtgttcgtcgttaccaacttctccttggtacttggcccccctgggatgtaggctcgacatgtcgaggctagatgccagtatactttaagaaagaattggtgacctggcccctaggaggtagtctcgactgggacctggacctgcacacagccttggctaggaagctttagtagtgcacccataggacccactaactggtatcttttattcttagattcacgaaacaggacctgcaggatttagaccgagaagccaatccgtgtgtccgga

SEQ ID NO: 173659 - DNA, 659 bp, Zea Mays
gccggtcataccgagggaagtcgccgagcactccttggacatccgagacaactcgacgaggagaagtgtagggtcatcggggaggagatccacaagcttttggcggctggattcgtcaaggaagtgttccatcccgagtggttagctgaccctgtactagttaggaaaaagggaggcaaatggaggatgtgtgtatactataatggtttaaataaagcatgtccaaaagttccttacttgatgcatactcaggctaccactagatccggatgaaagagttcgaccagctcatgacttctttcatcacctcgcaaggcaggtattgctacatgaccatgcccttcggattgcacaacacaggcgccatgtatcaatgttgcatgaaccacgtgttcagtgaccacataggctcaacggttgaggcctatgttgatgatatagtggtcaaaaccagaaaggtcgacaacctcatcgccgacctggaaatcgccttcgttgcctctgagctaagagtgtcaaactcaaccctgaaaatgcgtctttggggtccccgaggtatgctactagggttcatagtctcaaaacgaggaatcgaggccaatccagagaaggtctcgacgatcataggcatggggcctataaaaatgtcaagcgagttc

SEQ ID NO: 173660 - DNA, 587 bp, Zea Mays
ctggtctgaagagtgttatgccaggaagacttgttttgaattcagagtgaaggttagggttgaggggattccagttcactgttggggagaagatgtggctgctagggctttgggcaggagctgttctattcactatgtccaggagcgctcgaggcgcagggagcgcactaggtcctatgatctttgggcctggtgctcggatccttgtgatatccccaaggggtctgtttaactgtcacagtacctgatagagagcttcctccttctagtgcccctctgcctctagttgggacgctgcatgactcaccaactgatctaatggatggccatgtgtacaccattcgcaaccacattgaagttgtcgaagatctctccttcatccgaggtagggatgttagagggggtccccctggccgcaggccacgcagagaatttgtatggagctacggtgtgccagactcggttggagaaaaaagagagagatcagaggatcacagaggcagggatttcgttcgacgcggctggggtcacgatgatgacaaggattaccagcagtgtagacgtcttggcacccggaggcatcgcag

SEQ ID NO: 173661 - DNA, 523 bp, Zea Mays
ttttgagtaagatcctgtgactttttgtgggtgcacaatgtaacaaagttaaagctggtttgttaggctacaactttgatgcagagcattgatctagtcaccatacaaaatctagaggaaatttgccccaaacatgatctgtcagactgactgaaggagttcctgatggtacagtaaccagaaagatctgttggttcagtgaaccggccgccggcgaccccgggcgtggattcacgccggtgaggtgatttgtgcgcacttaggcccggataacgcctcagggtagaaaggtcttcacctctattgagccatggtgtccgctaagccccggtcgctttgaatctaccctcgccagagttagacacctcgcggtcttgtgccacgtgcctcagcactttaaccacgccgccgtgactcatactaacctatccagtgatcaccggtgaggttgccacggttatggccaccgatcgtgtgcgccagtgcccctcttcctctccgaccgccagcgcgccaatccaaa

SEQ ID NO: 173662 - DNA, 766 bp, Zea Mays
gggtgcagccggactagcacaacaagtgcgaaaaatcgaagtcttttccaaaagactctctgtgcaaaagtcgcctaagggtgcagctggactagcacaacaagtgcgaaaaatcgaagtcttttccaaaagactcttcatgcaaaagtcgcccaagggtgcagccggactagcacaacaagtgcaaaaaatcgaagtcttttccaaaagactctccatgcaaaagtcgcctacgggtgcagccggaatactagtacgaaaaatcgaagtctttttctaaagaactccgcacagaagcctacgggaacagcctaatcaacgaaagcgcgcagcttcatcacacataattatggttacacacatacagcgagggcatcacacattacatcggctcaaccttcgggatgatacccatctccctatagttgaacaacattatcctcaattcctcactcgcaaacagacttcgcagctccccctcacccacactcgccccagccgacaaggacaacaattcccatttgccagtcccatccgcacgaagacgaccaccctccatctcaccatgatgacgcctttcaccacgcgacaactcacccactctccgtttcgccaccactcttcgccgccgacgcccagcactcgcacccggatgattcttagcacccatcacaagcggaggagtctccatcgcagccacatccactgccgcaaaataatccaagtcctcttccgaagacccctccatccacacaatcgaactccc

SEQ ID NO: 173663 - DNA, 390 bp, Zea Mays
agcttggcctggtactctgtcgtgagggcctccctctgggtcacggcttcctccctcctggccaccttcttctccctccgggacgcctccagctccctggcgcacaccctctagaggtctttcttgtactcctagcggtcccgctcgagttgggaccgctcggaggtgaactgtcgggacgccgtcttggtgcgctcctccagttgggtgcgccagtcactgaggcgctggtgctcagcctcaagcgcctcccactcccgcaagattgctgcctcagtttcactaaggacctggtgggcacgggacagcatgcaggggagggggactggcgcagcttcttgctcggcacccgaccagagtcgtcgcccaaacaccacctccatctcctcc

SEQ ID NO: 173664 - DNA, 373 bp, Zea Mays
ggggcatatgcacttacaatgttcaagactacatcccaaaactagtttgactaggataattctatctccctgccttttgacgtccaccactccatccatgagggccttatcaatgaggatatatatatttcatttttgtttgccactgttcctgagtaccaaagtttgaaaccaatgttctccatctccttcgctttttgtcccttccattttgtctcctgctcggtgcatcaactaactctcttagcttacctgtaaggaccatacgttccaactacctatacggatcctagtcagctaaactagcttccttacccatcacactcgttgagacagatgtgaagacccttgtacatttatcactacacccgga

SEQ ID NO: 173665 - DNA, 341 bp, Zea Mays
gaaccctacaactactctcaagggtggtggtggaacacaagttgtgaagcgtcttaccccgctcttacaaggttcttaccagcactgcaggtggcaaacggtggacggtgtaacaacacttagagcgtgggtgtgattgcaaaggagtacctgttctgctcgagagaaaggtggagctttgggaaggcttactaaatatatatctgtggcacacaagtcagtaacagatagcaatgctgaataagtgtccaaagtactcgtcctagttgctggcctagagaatgtattagcacagttggaggaagacacaaaggaggtgacaaggatctaggaacaacaag

SEQ ID NO: 173666 - DNA, 780 bp, Zea Mays
gttttagattgcatctcctcatcccatgccacttttagacccacttaaccgaacactaaggaatatgaatctttagggaacaagacaaccaccgcctcgttgttgttgtgagacatttcatcaaacaccagaggggccatacctccaacacctggtgcaacaagccacactgacatcctcgttcaccagactgtggatccaaccaaccctattcctcaggccacatctccatatccctagccttggtttccttcatttgatgtgccaacatagtccattctgttgccacctctgctgctaacctcgactgaatcaggattgtttgctggacgtcatccaccacttccaacttctgaattaaacgatccaaccggttcatcaccctatcccaacgccctgcatcctccttcctccactcttccatcacgaacagaatgaatcgagttggttgtttgtacctcgcacacctcccgtcaaggatcgccccggtcctgtttcgatcccgacagcaagagaaggagttctgcgtcaagaagcacaaccgcgtcgtgggatgatgttggcgccgaggtagacgagtgagctgggaaggaggggaaacgccaatgaagaaccgaagaaggtggagccgacggagaagaaatgcttgcaccacgagaacctatgttgctagaacggaatcgccgccaaagaggacgcgaccctcacgcaccctgccaaggatcagagagctttgataccactgtgatggcccctggacaccgtcgtgcgcaaacgcaa

SEQ ID NO: 173667 - DNA, 390 bp, Zea Mays
ccaccacgcatatccagctctggctactcggtgccttgatctctcacttggagtttgacgtggttgattttctgatctgtgagattgaggacaccgttttggatggtctctatgctcggcgtcagctgtcgtacgctcactatctctgtcacatatttgctcagttgatccggtctcctcagttctaggccaccctcgaggcctctcgacttcagttcgacttctctcgcccagttcctgaggacacagttccagctccagcatcatatatcagggttgaggatgaggacatcagacagttcaaggattagggtgcagttgcagatacttcttatgatgatgatgaggatctggggattctgccaccacctacagtgccacctcattccc

SEQ ID NO: 173668 - DNA, 584 bp, Zea Mays
gaaaagggagtatccgggtgaacgtcgtggaagggatttggttcgccgcgactgggatcaagatgatgatgatgtgtatcagcatggtagaagacatggtcctcgtcgtcatcgtagcctttctggttgggttcgttcgtcgcgttgtcggggtgggactgatgactgcatcagctcgaatggaaaatacagaacttccactcccttcagacgtaatgagatggggatgtcacaatcaaagcgttgggtacctaaattaagagctaaagctgtttcttttgctgacccactgatatctgctgtttggccttttgagggggctgagggggctgcaggtgctgataggctcctgctgaacagtggcaataaagatggcaatctggaggctcattatttccatgccgttgggaggtcatcaacaaagcatttggcacccaaggtaaatgctactgcagtctccattgcagattcactactcactgccgggtcgcctgcgatcgttgaggagctggtcgctggtgatagtcccatccaggatgcagtcaattcattcgacatccagaacgacctcgccatacatacta

SEQ ID NO: 173669 - DNA, 763 bp, Zea Mays
ggcattccccgcttctacaagctctcttttccgacgttcgacggcaaagaagatccagttggctggctcaaccgctgcgatcatttcttccgcgcgcaaaacaccggtgagacagacaaggtttggcttgcttccttccacatgaccggtgtagcccaacactggtactacatgctggaacgcgacgtcggcgtcgtatcctggccgcagttcaagctcctttgccagcaacgcttcggcactgcggttggagtgaaccatctatcggaactcgcacggcttccgttcggtggctccgtcgacgcctaccaggaggccttcttggcaaagatggcccacgccggcactctgactccatcgtagcaagtccagctcttcacgggcggcctaccggacgcgatccgcatcgacgtcgaactacaggcgccagaagacctccagcgcgccatggtgctggcgcgcgcatatgaacgccgcactatgccagccccaccaaccggcaacccacgaccatcacggccgccggttcgtccccaaccgcagagcggtgctacctctactccaacatccacgccggcgctgacgatccagccctctacggcggtaccaccccgccctttcaagcgtctgacgccagctgagatgtccgaacggcgttgacaaggcctttgctataattgcgatgagcagtacgtccgcggccacaagtgcccccgtctgttttacctcgaggtcgtcgacttcgacgaggaggcgccagcgg

SEQ ID NO: 173670 - DNA, 524 bp, Zea Mays
gctccaaaggcccagctttggtaccggcttggattactgcagcttcaatttcggcctgctctgtttcaacttcagtttgcgccttcgaggcttcgacaattttctttgaaggagtcgagttcaaagtctttactgtttctagcacatctagtacatttgccatccttctcctcttaggagttgcggtagaactttttttttgccttcggcactattacttctgacgaagggcttaaaatttctaacatttttgttccctcaatttttggctcttcggtcttatttttatcagtctttgactcagctagctcggctgagggtaccttcgacattatagccggctcttcaaccttctgcgtaggaggaatgggctcttttggttcagcaactgaagaagtctccccgccaaactcaggcaccacagccggttcaatatagcgtggccggtgggtaaggaccttcatctttttgcttgtagccttcggcataggttcgaccgaggcggccacagcagtagctttcct

SEQ ID NO: 173671 - DNA, 573 bp, Zea Mays
gcagcgccgccgcgatgtggatgtgtgccgtggcaaacctctgccacagcgccagctgaggtaataatcatgccgcagtattcgcctagctctccagttcgcgtcgccctggtcagccgtgtgttgggagtctcggaccgccgggcgggacatcgccggggggcggcgcatccgtccttgcgtcaccggaggtaggtgatgatatctgggcggtcggatccgagggggacggaccggattagtttgggacgacaggaacccgagtgatgaaccagggccgttagattgtgatccagcgcgcggaacccgtgatcggttcaagtccttttagttgccgttagatcatgatctggtggtcgagaattgataccggttcaaatggggaaaatctaacctggatcttcagattttgatcgggtggctgagaaatgtccataccccttcggtcggaccgttttacagaagagtctctcagttcctttgaaaccgagctgccgttcattgcctgttatagaataattacggttcagtcctgtttttcacgagttaacccctgtgctttccagaaattgt

SEQ ID NO: 173672 - DNA, 738 bp, Zea Mays
caccacatgccttagcgctggctctcgtcacggtgaatcatgcggtgcatgtccggtgatcaccggagcacctgccacggtgaaaggccacctgtgtcaagcgccagagcccttttcccctccggtcgccagtgcgattcagtcaaattgatcaccaccgcttgagcagcctataaattggagcctcagcatgttccgctagggaattgtgtatccagtaaacccactctcagctccgatcatctcccacagcttcccaatttgggatttcccccaaaacggttgaagaacaccgcaaaaccaagctcaccgtgggaagctctcctcaggtctgatcctgttgtctttagtcttgttctagcatcctcatctgtcttgatactcactaacccacccaattgaattagactgtcaccgttcgccgtgaacgcattgttctttgaatcattcgcacggtcaccgtggccaagggcaattgggtagttattcatgcaattaacttaggggaaacattagttggggcgtgaattcggtttcggccaacgttgggcgccagtcgttgccccatccggccggtctacgtgctcgccggagctcggttgcgcgtgacgccatcggggacctcaccttgcgaaggactagaacgtggaggggttttctgcaaaccgtcagtgactcaagaaaacagtaaccaaacccaccttgagttagccaaaacaccgaggcccttttcacaaa

SEQ ID NO: 173673 - DNA, 522 bp, Zea Mays
ttaacgaccatctgtcatgttgcttcagatttcaggcttgcagccagcacaaggccagtgaaaagtgaaaacggtgcgagggcagagccagcattgcctgatagaaggttgggctcggcagcttcggagggttcagatatcagggaggtgtagcaagtctactagagtgaacctgagctgttttttttaatctgtgattgtcaggacagtttgacagtgcattgggatgctactgagcaagtggttcatactgtatatgcgttgtataagatcgtgcagctttctggcggtgtggagtgcttttctcacatgtatcatatttgtattgcagagtgcactttgattgggctagatgtaaaggcaactcccgctgttgttttctgaatgtacggtatctggccgtgcatgtacagacaatgcagctcacagtgttctagcaggttgccatttgatggctgtcctttttactcacaacaaaagaaccttgcatctgattacctaacatgcatgagttttttttat

SEQ ID NO: 173674 - DNA, 877 bp, Zea Mays
cctccgggcaaatgtcgacatgttcgcttgggagccgtcgcagatgcctaggatccccagggaggtgattgagcaccagctgaagatctatccggacaccaagccggtaagccagaagcctcagaaacagtccgtggagcggcaggacttcatctgtgaggaggttcagaagctgttgcacgccggcttcatcgaagaggttcatcaccccgtgtggctggccaacccagtcatcgtgccaaaagcaaacgagaaactctagatgtgcatcgactacaccagcctaaataaggcatgccccaaggacccatatccacttccacatatagatcagatcgtggactctacctcggggtgtgactttttgtctttcatggatgcctactccggttttcatcaaatccggatgtctggtgaagataggaagcacaccgcttttgtaatggtagatgggctgtactgttatgttgtgatgccttatggtctgaaaaacgtcctgccaacatttgttcgggcgatgagtaagaccttcggggacctgatccgggacaaggtggaggtttacgttgatgacatcatggtcaagactagaatggggtcgactgtagtagaatatctggctctggtttttgacaagctgcgggcaacccgcaccatactaaacccagagaaatgtatcttcggcgtctccgcaggaaagctgcttggtttcctggtttcatatcggggcattgaagctaacccagaaaaaatcaaggctatcgagataatgaggcctcccgcccgcgtcaaggacatccataaacttgcgggatctttggctgcccttagccgcttcatttcgaggttggctgagagagcactgcccttcttcaag

SEQ ID NO: 173675 - DNA, 600 bp, Zea Mays
gctttggatacttttcattttacgacttcaggttagtcgttgtggtgtaccacatgtaagatgcaagaaaagattatttagcatgtatcctctctcctttagagcatctacaactgagccctcaaataaagcctctacttttgatttaaagactatgctttagagcgtattattttctaggaaattgcactcaaatcaagtaagctagaaaggtaaacacaaacacaaaagtacacaatataaatgtggaagcttaagtgtgatagagatatggaatcttgttggcggacttcggtatctttgcaaagtatcgagaagcgcacgacattctctctagtcttcatttgagcctctcgcaaggatgtctacacgagagccaacctcatgatcggctaaccctatgcgtaagtgggtcttcagtgtaacctctcttggatgcttccctccatgttcactatcgagttttcggctgaaatgccgcatacctcgttccctccaatacacagtggcagccacaccacagacgcaattgttatgatctcacgagaccacaagcctctctagtacaaaactacattggtgcgcacaagaatcaagagg

SEQ ID NO: 173676 - DNA, 318 bp, Zea Mays
gctttttaaggcaacggtggagagcgtcagtggcagcagctcgtggtccgtccggggtttgctgctccgttttcttcagagcagcgtccatccatggagaggacgaagaaaccatgccttggtgtcgtcgctctgcttctcttcctgctcctggcgtcggccgcccatggagctcagcctgcagatgccaaggacatagcaggtatgcagttttgctcgtcttcagggctaattaagagtatgcatgagctgtatcttgtttgtcttccatgtatactataacttttgcttctacagcactgccgcttgctttctgtg

SEQ ID NO: 173677 - DNA, 1200 bp, Zea Mays
gtcgatgacgtgggggaggtcgtggcggtcacgtcggtgtgcaggttgtcgtcaggtggctggagctggtcggacctcgtgtgcaggcggggaagctcatcggcggcgaggattccggcctaaccacgacggcatagttcaatccagtgagttggggagctccatgggaggctaggggggttgtaggcacaagcaattggaaaatggtttacctggtagcctggtctatgtgcggtggcgggtggtcgaagtccggcaagggcgatcccgctactccggtgaggtagggtctcgattctcgcttgaagaagcttcacggctctacagggaagctgtctaggggctcgagcgaggctaggtgtctatggaaatgactggccacggtggccggcgttcgggtggctcgggtgggtggcgcagagctcgccggagctaagagcttggtcaggacagtgagggaaagtgcagagtggagcgtcacgcgtccgggggtggctttatagacgtgtgcaagcgtagccaagggccgctctgacatgcgctcggggcgtgcgcggaggagcgctagtgcgcgctcggcctcctaggcacggcgtcgagcacgtggtagcgctaagagtggtcgttttcaggcgcccattggctccagatctttgcgattatggccatgatccgttcgtaagatctcatcaccagactcccctttgtcgtttgtgtgtggcgacctacagattttgttgattggaaccaaagatatggggtgctctagtagggtttgtctcacggcgtgaacccgaggtaaaaccctcgacttgacgtgtctagggccagaatcccaatgccatattcacacatattgcagaggggttacattaacacaactttgtcaatgggagcccagggttttgagttagggatcaaggtgaacgcgctcgagttctgagtgaggggctgaaattcaaaaatctgaatttcatatttcaatagagagcctccaattgaatgacctttttggggattttgaaaaattcttttggtcaaactctcccactaatttttgtagcttattaagtttatgtcaacttttataattggcccaagccatgatttcatatttttcattgcttttttacaaatttccccttttgcatttaaatggcttaattttagggtttgacatttttctcactttgaggtgca

SEQ ID NO: 173678 - DNA, 715 bp, Zea Mays
gttgtaggcataatatctgatggtcaggacgtccagactgtcgagaggtaccactcctacgtccattacatcctctcctttgtttgtatatgattgtgtgattaaaggtgttgttgattatgtatactgatgaaaggggttgttgggttgcattctttttttatatggggtactactacgccactttcaagtgttatgggcctgggatgtctccaatggtaacctcaactctgacctatgtgcaagcaataccctttatcgggatacactacatctcgggggagtcgtggatcgcgtccctaccacccgctgaagaataatctattgcaagaagtatttagagtcatatatgctactaggagcacccctaaagtcaaaacaagaaagttgttttgtcagacatgaattctgcagtactaattaaattatccacatttgttggccatgattttaaatttgtattacaccgtccacattatttatcaagggtttcgtctacatatataaattgtatatcgtctttgacttttcatgtgcatagtttttttaccgtgcacataaatatagtgtatgcctccctctctttggtgcgcgtgtgtagtagagagcaagagcagaggtcgtagcatgtagtgttgacaggtaggccggccgtaggtggcataggcggcggccgccgcaatgtcgatggctgaagcggtgcaggccagcccgc

SEQ ID NO: 173679 - DNA, 709 bp, Zea Mays
atgaggtcagtagtcgggatcctgagggcttggagcatcctgggaaggtgacattgatgctgctaccaccgtccaccagcaccttcttgacttggcactcttggatcatggggcgctgtgcgcggccactaggacttggcggtcagttagcttctactgctcttgttctcttgagagccatggcccccgaagatgacgttgacttccctgtcaatgcgagggaaagcttggcctccacccctactgctaaggttgttgctctagagggtcttgacccccctacggtggtggcagtgggagtggttgaaacggtcggccatagccgattcagtacttgaagtccctgtagtttcacatggagtggcacatctctttgtggtacatgcactggccattgagtatttcatccaatgtttgcacgttgtcgccatgtggtgcgccgcaggcccgggtcgttggtggcccagcggcgtgcacctcgtctctcggcctcttgtaccagcgtttgcccagatgctggttcctttccttcttcaatgcttggggcgcaggtttcagctgaccgatttgttccaagcccgttcattgatagtgatgtagatgttcgccttgcagaaaagatgttccgaggtcgctggtaccttctgcaggatggaccagacgaaggccaagtcattggacccatagtagaaatccttgatcatggctg

SEQ ID NO: 173680 - DNA, 877 bp, Zea Mays
gtccagtcggcatcggaatagcccgtgagtgctggcgtagaggagcgatgaagttggagacccttgcacgatgtgccgcgcacatagcgcaagaccctcttgacgaacatccaatgcacgtctttgggatcatgcatgtgtaggcacgcttgctggacggcataggtgaggtcgggccgcgtcaatggttaggtactggagtgcgccaacaatgctgcggtagaaggttgggtcggcgactggtgctcctgcgtcgcttggaagcttcgccttcgtgtccaccggcgtggtcgcatgcttgcagtcactcatgctcgcgcgatcaaggatgtcgtcggcgtactgttcttgcgagaggaagaagccggtcgtcgagcgcttaacttggatgccgaggaagaagtggacggggccaagatctttcattgcgaactcgttgtggagccgagtgacgatgtgttgcagaacagccgatgatgacgtcgtaagcacgatatcgttgacgtatagaagaagatactctgataccatgaaagagtatgagagatgcaactcgtattgtattgatcatctctagtatataaatataggagatggctccgcgcatgccgtcttgggcgggcatcgcggccacgacgcgcgcacggcgcgctggtaagtacggcggactcggtcccctaacaaactaggcaacggcctctagaggataagtgatcagccacttttacacagggacatacataaaattttattaaaaggacatattaactatagaactcatcttgtcaacagacaacagcttcttcaatactaaaccttggtcgaacaccacaccagaatagcaacattaatattggcaaataaaacattaatgaat

SEQ ID NO: 173681 - DNA, 348 bp, Zea Mays
gtgatgacagttgaagtgaggtcatggttgcaaaattctatgtttgatgttgtttcattgaaaaaattgacctgaggcttgtgttaatgtaagatgatctacttgcttagccctatgatgttttctttcaaaatagtgaactgtatactacacttggttttgtttcctgaaaaaatactgagggcatatagctgtttggaggattcagattattggcagtatggctatttgtctgaaaacagcactgtgatgatatgtggcagtttgagggcatatgtgctgaccctaaaccctgagttcagggtatgtgcctgtttgttcagttgagggcatatggctgtcttcttc

SEQ ID NO: 173682 - DNA, 402 bp, Zea Mays
ccgtgtcccttgtaacgctgtgtcccctcccttttatagtttaagagaggtacatacaaggatgctgagctccgacatacgggcccaggagcataatggaaggaatacattatgtgaataattaatgctgacagcatacaaagatctttgctggacgctgtgttgcttctccgactggctactgccatgtcttgccgtgtccgcaggtgggtgatggcttgttgcagtagaatacggagtagcctggtatgcctgttgtgcgtagaggcgtataggcggagccgttcagattccctccgccttagtaacgcatgagtaatcagcgggagtcatgatgactgcagtgcatgcagcattgataggaaacggcgagtaatggtgagttattgtccttgctatggt

SEQ ID NO: 173683 - DNA, 436 bp, Zea Mays
cttttcttgtatagtttctaagaattttgttgcacatggtttctatcagttctaaccattcagtgcatggttctttaaaccttttctgaaagttgaagcggtacgacagaaggacaagctcatatttcttctcttcttatttcttcttcgacattccctagccgctagaagttgggaatgtccggtttgcaagatattcttgtaccaaatctcttgtgctcatatgctcagccatgaccctaaattccacttcagctagctggcaaggagaacccagctgcatgtggcacaggggccgagtcatgccaaagtttagtcgtagtgggctcatcaccatgctcataagcttttcccttttcttctcgtctgccttaacgtagaaccattcacttgtccaactagtgggccacttggtccggtagccgatcacgggggc

SEQ ID NO: 173684 - DNA, 763 bp, Zea Mays
ctgctctgtttcaacttcagtttgcgccttcgaggcttcggcaattttctttgaaggagtcgagttcaaagtctttactgtttctagcacatctagtacatttgccatccttctcctcctaggagttgcggcagaacttttttgtgccttcggcactgttacttccgatgaagggcttaaaatttctagcatttttgtttcttcaatatttggcttttcagctttatcttcctcagtattcgacttagctagttcaaccgaagcttccttcggcattgtagctggctcttcagccttctccataggaggaatgggctcttttggtttagcagctgaagaagtctccccgcaaactcaggtaccacggccggctcaatataacgtggccggtgggtaaggactttcaactttttgctcttcggcgcaggctcatctggagtggccaaagcagcagttttgcccgaagcagcagttttcctcttctttccccatcctcgcagcgggtagcagtagtcgtggtaaacaaaaccaatggcataaaaaattctgttcaatctcctttttccccgacccctgaaggatgtggataatgcattatcttctgctttagaatatggcccaagcagttcatcacttgtagcttcgatgcatttcagccagtcgtcatttggctcatcaaatttatttccatatctgaatgtatatttcagtcgaaccaggtcaccttcgctagactcggtgacagtctccttcggcatttccc

SEQ ID NO: 173685 - DNA, 670 bp, Zea Mays
cgaagttgtattagatcttcactcttaaaacactaaagctaattggatgaaggaggaacaatagaaaatcataccttaaaatttgaataaaacaagatgtcggtaatatgttgtcttctataattgctaatgccctttcaagcttcagaaatccgatactcttggtcagggtattcacaatttttgctccgacgcggtcagagatacatcccaagatttctgcgtctacgccgtcaaagagaacggatccaggatggaaaccaccagatatagcaagttctttcaactctgatatatcctcttcgaaaagctgctggcctctcaggtgccgtaagacgaagcttctattttttgaataggcttcttcagtcgtcttccattttgatgctgaaaattcaggtgcaatcgtcccctcaatattcttctcaggcaccatgtcagcaataattttatcaatctctgataaagttgtcccgaggggaccaccactactttcggcttgttgaagcgcttcagtatctttgttagcaatagagggggcaatcctcttttgaattgtcggtgggggtatcgagaacgaccctcatcacagtcatcatacaacgcttcttctgggtgtttcccccaccaagtgccgaaggacctttttctgtttctgcttcggtagttt

SEQ ID NO: 173686 - DNA, 545 bp, Zea Mays
gggtccagctagtctactgaagcttggtcccttgggtggaaatccaaaggatcaagttttatggtgccggtcttgctcctgagctcggaggacttggaatttcctcttgagatggcctttttcttcttcctttgccctttccacttgcatggctttgatggagaggtgtgagaaactgaggaagtcttggctggctatgatggtcttgagttctggtctgagccccttcaggaagcgggccatcttcttgacttcagtgctgacgtcatctggcgtgtagcgggccaactccatgaatttgtgcacatactcaccgacagatcttccgtcttgagtcagtttccagaattcatcttccttgagctgaacgatcccttggggcacatggtgctctcaaaaagccgtttcaaactccgcccaggtagcatctctgatggtgacattgaaggtatcccaccaggctaaggccatcccagaaagttgatgagcagccagttgaacacgctgattttctgggcatccgatggcttccagctttcttttaa

SEQ ID NO: 173687 - DNA, 351 bp, Zea Mays
ttcttttctctttaaattataagtttgacaattttaatctaaagagaaatgttgtgtttcgttttaaataagaagctgtaaaagagaatttgatgggacgttgtgctgaggtgaccgtaggtaaaggctatgcgcaaaaacacaaaagtagatcaaaactgacaatgatcaaattgtgtcgtcactggtatgactggtagcaaacataaatgtatagactgttagggttgaatccaaaaccctgaaaccttaacatcacgacaagagtgaaggaaggcatgaccgataaaaccgtcttcaagaagagccattaaaccatcttgttacccaaaatttagaggatgttgtcag

SEQ ID NO: 173688 - DNA, 358 bp, Zea Mays
cggccatcgtcgagctagggcggctagtgaagacgtgtttaacggctggaaacgtggcaccatcacggcgcagaacggcaacttcggcgatggccacgaagccacgtcgccggcgtaaaaggtgaagacagcgaggccacagtagttcatacccatcggcaaggagatctttccaagatcagcaaaatccactcctccgcgacacgaatctcgtcgcccaacccaactccggtcacgcggatcaccgacgttgagctgtccgagctggcgtcctaatccgtgcactgtaccatgggaaaaattcagtcaaatgcacctgacagccacggtttagggccatttttctcaaaatcttgca

SEQ ID NO: 173689 - DNA, 621 bp, Zea Mays
gttcgacactgggataggggtagatttgttaacattgtagagaaacagacagttctagttaagctgttcttcatagaggaacatggcatgctagcttcttcacagagaggaacacgacaagcccagacagtaagctccggtaagcatagacatcaaagcaattggtgaggaaggcacacttactcgaagatgtttgagacttcttaagcagcttcttgaaataggtgttgtcaaaacaattggactcccgaatcatttccctccttcctttctcatatatagccagtcgagatgagctccataaaagagaccaaatttgagaactggaatgcatggagatggagtacatataatttgagagaaaaaaggacagctcacgagaagaaatgtttggctgaataatgtctttaagaaagcagcatccagtgtttcttcagaaagtttaccattgggctcagcacaactgcaaaagaacctgtgttcttcatgaaactacaagtcgccatattatatatatatgagtggacatttggtcggaaagaagttgcagaactggaacatcatctaaaatagtagtttctcatcaaactgttattaaaatatcattatctaataaacaaa

SEQ ID NO: 173690 - DNA, 552 bp, Zea Mays
ggagcttcaaaagtatagcaatctgccatggtttcggaaatcaggggcagtaagatttgtgttccgaggagaagttggcgcggactcactccaaatggccaaccaccgggacttaggagatggatttgagacggtgggcttacactagttcaggcttgcgccctagtccagtgtaatgttgatcgtagtattgctctggagcgtgttacaactggtgtgctcgtgtgtcgcttgaagaaaagacctttccttttatatctcaagagagaagccttatagtggcatcccttcctcgtttaagagaaaggccgagagagagagatggagtcctatccgtctgggtcaacgagctgggttctctttcttgtgcgcgaccgtacccctaacatggcattgtccttcatgacggttcatgtagcgagtctattgctgatgtcctgatggcagtacgtggcaggtcccatgagtctttccctagacgatgtcctacgcaacatggctctgtccgccgcacgtcctgtgtctcctctcatcctacacagtacatacacc

SEQ ID NO: 173691 - DNA, 1006 bp, Zea Mays
cttcggacaatttcttccccgaagcatgtcgaacgatgtagtcgatattttcaattagagcttcgggagcagcagtctcgacctttttaggtgcagtctgccctgccatctcttcctcaggcgcgataggcttcgtcgcggcaggcgctgaaggcccagcttcggttttagcctgagtttttgtagcttcgacttctgcttgcttagtatcagtttcggcttgtgctctgacagcttcaacaactttccttgtaagagcagggctcaaggccttcgtactctccagcacagcatctagcacgttggccatcctcctcctcttgggagtcgcggtagaagccttttgaatcttaggcagttttgcctctgttggagggttcaggatttctgcctttttatcgatttttccgcatgtggctcttcgaccttatcatctttagcttcgacgggcctgactgtaggcatctttggcactacagttggctcttcaatgctctgtgcaattggagcagcctgtcttgcttcggcagttgaagaggccccttcgccaagttcaggcactatggctggttcaatgtatcgcggccgatgggtcagaatctttattctcttacttttcggcttagccgacacagcaatgatggccgaagcggtggcttttcttttcttcccttgccctcgtagcgggtaatgatagtcagggtatacgaaaccaatagcatcgaataccaagtttaatcttttcttgccccgacctccaaaggctgcgaacagagcattatctttggccttggagtatgctccaagtagctcatcactcgtagcttcaatacacttcagccagtcgtcgtttggctcatcaaacttctccctaaatctgaaggtatacttcagtcggactagaccaccctcactagagtcagtggtggtctctttgggcatttcccagctttccacaagcagccataccctgaaggatatatgttcttgaatcaaatcccttgtg

SEQ ID NO: 173692 - DNA, 1023 bp, Zea Mays
ctcacaaaatttctcaagactcaggattcccacgcactggacggcgggttgattcttcagttttcgggggtctcttttataatacgtgcggctgaaggggtataaccgcatacaggccatcggatcggacacggatggcccagattagatctaggtaagaagggaatcgatacgcgtcggccgccctcagatcgaggatcaacgcccacgatctaaaattcccccgatcaaccctactccgtccgattttatccaacggtgtagattccccaggtcgaaacgttatttcgattctaatcgtcaccgttgcttgcgatatcaacggccaaaagatctcctacccgcggaacctacgccggcagcggagcaaagctcccccatggcggcgccacgccccaacctcgccggagtcgtccggtctcgccaaccctggccccattttctaattaaacaggcgcgatagcactactaggccatggcgagattggagaaggcgttctcaccggcaatcgatgcaccgagatagtctgcccacggcgcagaacagatccggttgcgcggcggcgaaattccggtcacccagtggtcctctccttccgcccagacgaccagtagctccgtggggactcggcgaagcttcccgcccaggcacaatggagttggcgctgtgctaacacgcaattgaccgcggcggcggaaactctccattccgcccacggttcacttggtgactgggtactcgtcgagatggttaagggagctagagcggccgggttatataggggcagggtgagtccgagcggagcagcagcgagatcaacgacggagttcgcggtttccggtggtaatagcctacggtgacttcgggttcctgtttcacgcgcggcccacggggaagacaatcctgacagcatgggtccaccaaccagagaggaaaaccagagggtccgagcgcgaccgtacaagcggtcccacacgctagagccaccgggatgacagccatgagagcgggcagtggctggc

SEQ ID NO: 173693 - DNA, 396 bp, Zea Mays
gctagcatgtggaaactcttctccgcccccctgctcagttgcggtaggttctgcttccgtgggcgctgagggcccagcttcagtttcagcacgaaccgctacagcttcggcagctatcttcacaggggtaggagttagtgaccttgttgtctccatgacagtgtctagtacactagccattctcctcttctaaggagtcgtggcgggagtttttgcaaccttcggaaattatgcttctgctggtgggctcagaattttggcagcactattgttttttcgaactctggctttttggccgccccatctttggcttcgactggctcaactataggcaccttcggcactatagtcaattcctcagcgctccgagcggcgggagcagcttgttccgcttcg

SEQ ID NO: 173694 - DNA, 890 bp, Zea Mays
tccagctcggcggggattcctcccagaccactcgcatcgtgggcaatctggaggagaaataggaaatcgcgctcatcgccttcctccaagcaaatgtcgacgtattcgcatgggaaccgtcgcagatgcctgggatccccagggaggtgatcgagcaccatctgaagatccaccctgacgccaaaccggtgagtcagaagcctcgaagacagtccattgagcggcaggatttcatccatgaggaggtccagaagctgctgcacgctggcttcatcgaagaggtccatcacccagtatggctggctaatccagtcatccttcccaaggctaacgggaagcttcggatgtgcatcgactacaccaacctcaataaggcctgtcctaaggacccatatccactcccacgaatagatcaaatcgtggattctacctctgggtgcgacctcctatccttcctagatgcttactctggtttccatcagatccaaatgtctaggcaagataggaagcataccgcttttgtaactgtggatgggctttactgttatgttgtaatgccttacggtctgaaaaatgccttgccaacatttgtacgggcgatgagtaagacttttggtgacctgattagggacagggtagaggtatacgttgatgacatcgtggtcaagactaagagagggttgaccctagtggaagacttaaccctggtctttgacaagctgcaggcaacacgcacgaagctaaacccagaaaagtgcgtctttggtgtctccgctaggaagttgctgggattcctggtttcgcaccggggcattgaagcaaacccagagaagatcaaagcaattgagacaatgaggcctccggcccgaatcaaggatgtccagaagctt

SEQ ID NO: 173695 - DNA, 428 bp, Zea Mays
atgaccagaaatgagagatttaggcaagatcaacatccgatacttgagaacgggtcatagcagataaccagataacgaggcagaatcattaagggatccagagattcggatggtaaggcaaatatgattcacaagaaaacggattaccagatccaggcaaaaggagaggtaggcaaacaggattagctaggatgattaacagaagtgctatgaagttttaggggcaagggtttatggaaagaaacatggccttgatagggtttgcgtaactagacaccaaacaacattttttttgacacaacaagtgcacagggagacttgggttggtctagcggtcaagctgtgggtgtctataagttgtgcaggtgcaatttcaagtgtaaaacacacaagggcaagaaaataccaacacaagcatgttttttttt

SEQ ID NO: 173696 - DNA, 520 bp, Zea Mays
agctgttggagatagtataacaagtggatttagtgcagaatgcagatcgcgctctcgttgggtgggattattcctcgtttcctctactcattgcattggcgtccttatcctagtcttatattcatcttcgtcatttttaatttggagctttctgttcctttggttgcctgcgaaatattcacttgcttttcctgcctactcgacacataacgcggaacataatacattgaatcagcgtccgtctccaatcgaacacgatttccgctcactctgttttcttccagagcggaggcttttggcttgtagactgtagtccaataaatatctcagcgacttgtcaggaatcaacgtacctgtctacatatcctcgacgctgcgtctcttttgaacctacaaaagctactcaactcaagtcaagtgaagcttatttagcttccgcgggatcctttgcaccgcacggttttttcgcagcgtgccgaggagctgtgtcgctttcgtttctttgcgtttttttcttctt

SEQ ID NO: 173697 - DNA, 500 bp, Zea Mays
ggtgtagttgccaaggatttcattgcacatagtttcaatcatttctaaccactcttggcatggcttcttgaactctttctcaaacttgaaacggtaagggagctgaacaagttcgtgctttttgcccccatccttcttcttgggcattccccagccactagaggttggaaatactctatttgctaagaattcctgcactagatccctagtgatgacttcggtcgctaccactctgaactctacctcggctacttggcatggggagccaagttgcatatggcacaagggccttgtcatcccgaagctcaatttcagtggacccatgaccatagtcatcagcttctctctccttttctcgtctgccttcatgtaaaaccattcacttttccaactagtcggccacttagtacggtagctaagaaccggagccttcgtatcctttcgatacgcaaaactgtagcaaccaaaattctcatgaaggccatctgctctggccttcg

SEQ ID NO: 173698 - DNA, 500 bp, Zea Mays
ctcatgtgcaaaaaggcctgggcgaaggggtacagtgggatatcagccgcaggatccagaatcgagggctaggattagatttctttctaaacgaaacggtacgcgttctgtgccgcgagatcgtcatccaacgacgcagatgcctccacgaactactcaagcgatctaaccattgatagtaaggccagcggctcagattctatctcctactatcagatagtccccccaccatcatggccgttgctgagtggatcaacggcccaaatgcttagcccgagagatcccagcgctcttccccccgcacagagcgcacggcggcggaacacacagcaacagtggcgagggacaccgtcgacacgattctggtactccggttcccattaacctaaccaactccctaaatcgcagcggaataatacgaaatacagtagggagggatttttaccggaggtctacgtagcgataacggcatgcggcgaagagcgggtccgcagcgattg

SEQ ID NO: 173699 - DNA, 519 bp, Zea Mays
cagtggcaccgcatgacctcagctgggcagacattccatcaaccaaatattgtggtcgaagacagataagcataagaaagataatttaccaatatgaacaataaaaggcaagtagttgactcacctgaagattggagaggaatgacggtagacccaaggcagggggagctatgtcatggcttgatgggggaagatcagcaggaacaatttgaagggcattgtcaggggtgatctcagccactccagcagataacatacttctcacatctagctcgccgacctctaaggcaaattgtttgttcaaagctgtggaagcatgcatcatcgtcgccccatcgggccgaggtggagacaacccaacatggacgtccatggaggtgtgggaaggagagcccacctgaacaccctcaggggctgggttgcagcttgcgctacccaccagagccggatcactaccggcaacacccttgggggctgggtaactgccagcaccaccctcgagggctgggtcttctgcag

SEQ ID NO: 173700 - DNA, 418 bp, Zea Mays
cccgtcaacagcagccttaactcctccaatctcagcaggagctggctcgagcggacctcaagtggtggaagaagtggggtcaagtccgtcagtcaaagtagtggaagcaggcttgactagagcagtcagtggagtcagctcaggataaccccaatcggagtcatcatgctcctcctccacaaagatggtctgtaccatccgatctagacctattgactcaaagtcatgggatggacaaggtgcagtctcatcgaatgtaccttcacaagtctccaggttgcgagtagtatcccggttaagaacacgataagcttgagaatgtaatgcataacccaggacaaccccatcagaagaccgagactcaaatttgtccaaattgtcgtttttcaccacaaagaatatgtaaccaaacaccctg

SEQ ID NO: 173701 - DNA, 343 bp, Zea Mays
ggcaattggtcttcgttcttgcatgagcacgccttcgatcccaattccactggcatcacattcaatttcaaatgtcttaccgaagtctgggagtgcaagaactggggttgttgttaacttcgtcttcaattcctcaaatgccttctattgtgcttctccccatttgaaaggtacttatttttggtcaattcgttgatgggagcagcaacagtactaaagtcttttacaaaccaccggtagaacccagcgagcccaaggaagcttctcacttggctcacattctgtggaggcatccagtcacgtacaactttgaccttttgttcatctacctccacaccttgtc

SEQ ID NO: 173702 - DNA, 467 bp, Zea Mays
ccatccatccacacacacatgcacaaaaaccatacgaatccatgcctacatatgcacgatcgcatgcacagccgccgccgaattcttcttcgccgtttcggtgcaactacgagggaagcaattaagcaacgaccgagtacgccattattgaatcgtagcactagcacaagtagaactagcagaagactttgacctcgcaaagccaatcagagcggaccctcccttcttaactgccctccactcccctccttccccccgtctccatcacgcgcctgcccacctctccctcgccgtgtgccgacctcgctccccacaaccatccgcaaggagggcatagccatggtgcgggcgagccttctcgccgtgcgcgaggcgctagcggtcggcgctgctgcggccacgcggcacggcgccgacgccgccccgctcggtcccgtggcgatcttgctcctcgcggtggccgcgac

SEQ ID NO: 173703 - DNA, 583 bp, Zea Mays
gtgggcactgaaggcccagcttcggtttcagcctgaattgttgcagcttcgacttcagcctgcttagtatcagcttcgggttgcgacttggaagcttcagcaactttccttgtaggagcaggactcaaggtttttgttgtttctaacacaacatccaacacatttgccatccttctcctcttaggagttatggcagagcccatttgtaccttcggtactgttgcctttgttgaagggctcaaaatctctgacatcttcattatttcttcaatttttggctcttcaaccttatcaaccttcgtttcaaccagcttgactgtaagcaccttcaacattatagccggctcttcagtgctctgcgcagtcggggcagtttctcttattttggtagcagaagaggtccctgcgctaaactcaggcaccacggccggtgggtaagaaccttcacctttttgcccttcggcacaggctcaactggggtagccaaagcagcagttttcctctttttcccctgtccccacagtgggtagcggtaatcagggtatatgaagctgatggcgtcaaaaactctgttcaatctttt

SEQ ID NO: 173704 - DNA, 603 bp, Zea Mays
tgaatcatctgccatgaatcatctctatgactctattgcaattgccaagttccaacaaattcaactcgcgctgaatccgcagaaaggagtcctctacccaaaagatccttccacgatatcttcttaagggtccgttcggcaaacctagatcaaagctaggccaggaagccagccagccagcctaggatcgagtggaacactcattcttggccaggaatcgatctacgtgagaggacacttggatttgttctaggtggagaagtgagaatgtggagtcaaaatcagatggatttgttctcaatccggatcaaaacgaacaactagatccgggtcaaaatcagatgaatttgttcaacctgaaaggaggctcgaaacatggcaatccggcagatactaacgcgccctaaaccaagacgtactattgtaagtacactagtacgccagatttgttctcggagcaagtctagcgcattcagtactaaggcttagacttgttcggaataaataatataggttcacacaagcaattagtaaccaaaaaaaattgaaacccctaaacccgtactagaaatacgagtcatgcactaaaatatacgacgaatc

SEQ ID NO: 173705 - DNA, 548 bp, Zea Mays
gagtcgcaggatgaggcagacgtggagctccaaactgggatggtacaggagcggtcggtgctggagtgggcgcggccaggtactgagggaatcctcgcataggcacgaactgaggagtcctcggcatatagaactgctgctgaggggtggtacagaaaattgttgctcagcgcatgacaacatgttgacagtgcccagcgaagaggaagaagtcactggctcccatttaagtttctcattgggattcctcctacacaccacatccttgtgatcctggctgcagatagagcatctaccactccactaacactcggcacagcaatgcgcttcaccacaacagaaacacaccaaccacaacctaggcttaggaatagcccgatacctctgagtactccctcctaaagtacttgattcagagggtttgttatgataggggtggtggtgctggtgttgtgactttcccctcttgtgggctggacccccagtgttgcccctcctcgcgtcctggccacgaggctgatcaacacctgaagacttctgagattcca

SEQ ID NO: 173706 - DNA, 1411 bp, Zea Mays
gggcattgtattcacaagagacggtattagagtacaactagtggatgaagacgttattaagctagcaaatgaccttttgtgatagcaaaatacctaaaatcccctctatttaacgcatacctagatggtatttgtgtccactcaagtaaaacaccgcacatcattatgccacatcgtttctcaaaataaaataaagaccatgggaaatttagccaaattgcgtgagagaactttccaaacataggttaaggttgtaagacaccttttttccaccatacagttgctaaaaagcaggaatataaagaatttaaaacaatagatcaccttttataccacaaatgacgtttcccagatgtcaagggcattgtaattgcacgtgaggttattagaatacaactagtggatgaagacgtcattaggctagcaaatgacattttgtgataccaggtttcctataatcccctctattcaaggcatacctacaaggtgtttatgtccactcaagaaaaacaaaacacatcaatatgccacattgtttctaaaattaaaataatgaccttggaaaatttagccaaattacgtgagtgaactgtacaaagataggttaaggttgtaaggcaccttttttccaccatacagttgcgaaaaagttggaatataaagaattcaaaacaatagatcaccttttaaacctcaaatgacgtttctatgatattgagggcattgtattcacaactagtggatgatgacgttattgggctagctaatgaccttttgtgatactaggtttcctataatcccctctattcaaggcatacctagatggtgtttatgtccactcaagtaaaacaccgtacatcattttttccacatcgtttctcaaaataaaataaagaccatgggaaatttatccaaattgcgtgtgagatctgtccaaacataggttacggttgtaaggcaccttttttccaccatacagatgctaaaaggttggaatataaagaattcaaaacaatatatcaccttttaaacctcaaatggcgtttctatgatattgagggcattgtattcacacgagtgggttttagagtacaactagtggatgaagacattattgggctatctaatgatcttttgcgatactaggtttcctataatcccctctattctaggcacaccaagatggcgtttctgtccactcaagtaaaacaccacacatcattatgccacatcatttctcaaaatataataaagaccatatgaaatttagcgaaattgcgtgagagaactgtccaaacataggttaaggttatatgacacctttttccaccatacagttgctaaaatgtaggaatataaagaattcaaagtaatagatcaacttttaaactaaaaatgatgtttccctgat

SEQ ID NO: 173707 - DNA, 351 bp, Zea Mays
gattactctatccaccctggtagcactaaggtgtatcaggatttgaagtagaaatactggtggtatggattgaagagagatgtggctgcacatgtggcaatgtgcgatgtgtgtcaaagagttaaggctgaacaccagaggccagctagactactgcatccactgaagatacccgagtggaagtgggaagagattggtatggatttcattactggattgcctcgcacccagaaaggatatgattctataacggtgattgtagatagattgactaaagtagcccacttcattcctgtcaagactacttataaaggctcatagctggcagagttatatatggctcggattgtg

SEQ ID NO: 173708 - DNA, 1335 bp, Zea Mays
gtagaaactcggcgtcaccctcatttggacgtcacggggacactcaccgctggtcggcgatgccatcgctagtgatggtgcctcgtggtcgggaacgacagtggctgctgctactgttgcgggtccaaatatggacctgaggccgatgccggtgttgcggggtggcggcgaagaggaacatcagcttcagcttcatctaggcgtcatcgagcttgtggacgagcgtctggcgggatgacactcgaatgatcgaccgtgagttgttggccggttaggttagtgaggaaagctcccaccaattattggaaccaatcgccattcggcagtggcagctacaggagaagctggtgcaaccttatctaggcgggcgccctccttcttgcgggtggagaagcgggtgggagtctgttgtggagtgggcgagtgggacacgacgactgacatggcatggaggttgcagatggcgtgaagactggcgactggcgtggaggtcatggtttgctggcggaggaagttcgttgtgagagccaatcggcgcgaacgcgagaagcgagaggctggctggggcttgtcgtgcagagggtgcgggaggcgacacgggtgttggcgagcgtgcgcgggcctgggggtggagtcatggtctgcttgtgtacgatagaggtgagttggtgtgcattttggtgcgggtggagaagcgggctggagtatgttgtggagtgggcaggtgggacgtgacaactaacatgtcatggatgttgcagatggcgtgaagacatgcgactgacgtggaggtcatggtttgcaggcggaggcagttcgttgcgagagccaatcgacgtgaatgcgagaagcgagaggttggctggggcgtctcgtgcggagggtgcgggaggcgacacgggtgttggcgagcgtgcacaggcctgggggagagtggagtcatggtctgcttgtgtacggtaggggagagttggtgtgcgttttggtgtgagtgtgtgcgtacatgaacagatactacaactgtacttgtaagtgagaggcaataaaaaatccattgcactgctcgggagacttgccgccagctacacactactggggttgggttgtttttgcacttaaactcaactgccacttctacgtgtatgtcgttgttgctaattgttgtcgggctgtcgagctaccaagtgtaccgaactgaagctagttgtgttgggcttgggcctccgatgaaaggccgccatgcttgggcctcgagaccggaatggccaatagaggccgcgacgggccgcatatctgccggtggggtctgggaagggtgaagtcatgttagtgtcg

SEQ ID NO: 173709 - DNA, 490 bp, Zea Mays
cctcgctccacgctgcgctccgcctgctgctcaccacctcaccgtcggtcatcgccgtagtctctaccggattttcgtcaccggcccccttccgtgcggcgccccactccagactctggctctccatcggtgaaatccctaaccctaatcagaaatccctaaccctaatctcctcttctccggactgcggctctccctcccgtcgtcccgcgtcatcgtctccggctctgggctgcagcttggcagataagtccctctccggctctccctctccagtcggccatcccaatccctaaccctaaccataatctcctcttctccggctctccctctcgcgtcgtccgtcgtcgtcacttgaacctcgtctccagctccgggctccggctcggcaggtatagtcactcttcctcaccagtccccactccctagtcggcattctctaaccctaatctcctcttcgctgcttgcttgtggactttggtaggtcgcc

SEQ ID NO: 173710 - DNA, 556 bp, Zea Mays
ctgatgcatgtatggagttaacaaggaacataccatatactatgtcggcatcctcaggcgctgattctgcagtgacgtgattgacccttcctctgctctggttctatggtgtcttgttctgagcagatccacgagcgggggtgttctggtcattcctctgattattgcctttctggggtgtctgctggttgcgccttgggcagttgttagcatagtggcttagttcaccgcacttgaaacatccattgggttggacaggtgcgttgtttctggcctgcgtgttactggcgccaccttgatggttctgtgaatttccaccagacctctggttggtctgggagttgctcctttgctggttctggttttgattacttctctggctttgctgtccagagcgttgcacttgataattatttccaccctgatttccagagcggaactgcgaaccttgagcattgtttggccgggtgttcctgctagactgaccttggaattttcttttgtggtcagatagctccttccttttactctcaaggccaattgccttgttcaggag

SEQ ID NO: 173711 - DNA, 557 bp, Zea Mays
cgaagatacaagtcctaaggaaaattcttcttcatataagcttcagctttggaagcagccacttttcggccacctttatctcaaatattcataaagaaccatttaacaacattgaatacttccttctaaggcttctttatgtcttcaacatccatactgaagtcgtctttgctgattgccttgacatggtcgcaacctaccttctccagcacagaagccatgccgcaagatactatcatggcacagtagtcacctcgggcattaatgaaaccttcaagctcccctttttctttctccacccaagtaagagctccaccaacatctcccctagaataagagtcctctctcgaagtagcgccaatagaggaaaacaccctttttagatggtcacaatgacgagagtcaataccgaagcaattatcctaaagatggctcaaacactctagcaacttcatgttttcctcgcccttggcaccaatttcttccttcgccttttcaagagtgacacgaagctcttcgacagttttaccttgttctttaatctttgccatatcttg

SEQ ID NO: 173712 - DNA, 488 bp, Zea Mays
gaagtattcctcagtccagaatgtaaccgggagtgtgatgctcccaaggggatacaccagttgagggcccactccagagaatgggcgtgagggccccagtcgggaccctaggatctgcagctgcttgaacgcagcgtggctgatgacgttgagcccagccccaccatcaatcagcacatgatgcagcttcatgttggcgatgacaagggcggtgatgagtggtagtataccagcccctgccatgttttcggggtagtcggatgccccgaaggagatagtggtgctccgccaccgctgatgtggggctgccttcgggacccctggagtcgtcgaaaggacctcgcggcgtagggacttcacattcctacgggaggtgagctcccagcttccgccatacataacgtatagcttcttgcgaaggtcattgtcatcaccagagtcgaagtctccagtgagaatttccttgagaacttgatcgggggccagat

SEQ ID NO: 173713 - DNA, 810 bp, Zea Mays
gatcgatgttgttgcaatgatggtcttgactatctcatagtcattcatatcgtatgcttctcgtcagcgcagtgacaggcggcgcgtcccctcctcattaaatgcaggggctgcacgacttcacgttagactcgacccgatagcttatgtcatgggccataagcagtgggactccatctgagcgggaagtggagggcgtgtcagcaccggacccctgctcataccagggtcctcttcgttctgggaccttgctgaggttcggacctacccggaggctccggacttatatgtatcgaggtccagtgtccttctgtgggggcccggacctactgggatgtgctgtctctccttaccacgtggcgccctttggcctgcccatgtggtggggtcaggcgccgtctccgtgtggctaggagacgtcgcatgggtgcagcgtcttcatgttgtagaagagagtacccctgatttagggtaccgacaatgtcaaatccataattcatatatgaggcaacgtttaaccccactacctcaacaaaagagtttcaactccttaagtcatatgaggcaaccatctctaacatgatggttggggatccaatgcccctattgtaaaatatcatttttatccaacaagatagttcctccacttctaatgattgcaatatatacttcctatcataccagggaatcccctctcctatcagtagctaaaactcgcctaagatcgtcaatagtgagatgacgactgtatttctctttgaaacatgaaatgacacacctatataattgttcaacgctgtaagcaatgcc

SEQ ID NO: 173714 - DNA, 666 bp, Zea Mays
aaagacagtaatgatgtatgtggtctgaaagtaaaaattatacagttgcaacttatgtcatggaccagttgcaacaaaaggtacactgcagttacaaaagaagtggaaacatctgagatgataatctagaacacaaactgcttattcaaaaatgaaatgtatccgcataaaatacaacaattaataattccaatcaacgaataatactagttgcaacacttggggaaaaaatagggtttaccagtctattaccgaaaataacaaaacaaatccaaaaaatggggacagagaaatgggagagagagcggatgcgcttacacggcgggcgcgcgcgcagactactccggcgcgggctacgtcgacgttcgcggtctacgtctccggcgagcaaacgattctgacgggagcggaggatccgttcgcggagatgtgtggagggggccggagcgggaacgagcgggagcgtgcgggatggacgaagacgggaacgggagcgagcgcacaacgtctacggcgagggctaggtcgccggggaagagaagagattgagccgtacgcggaggaccgggaaagtggaaaaggcgcagtcgggcgcggggaagtgaaaaggcataatagtggagggggcagtcgtcggttccgctgcgtcggttcggctgtgtggct

SEQ ID NO: 173715 - DNA, 607 bp, Zea Mays
aggcctcgcttgaggctagggataggaccctcgaggtacaacggacacagtagtaggaaatttctgcaaccttgcatagacatcacctggagctggaggagaaagctacctaggttacctttatcaaggaggaggtcgagaaaaagaagaaactcctcgagaggttgaactccaacaccacaaccttagagaaaatccttgacaagcaggcaagctaattggccgagcgtgaaaagaccatgaagcttaaggaggacgacttcgacgaacggatccgccaattcgatgtgtctcatgcattgctggacacctaggtgctggaagccacctagaaagcacttgaggccctccaagtgaagtagcgtgagggggttcaccatatcgtcaactgggccagcgaggccagtattgggctggtgccatttggggtaagccccatctaggcgggaccagcggcctcgatcatcaatgctctaccctcctagatgttggcgtcgagcgactttggcgtctggaccatgttgttggtgcccgacttgaagctaagggccatgagctcattcgaacggtgatagatcacatccttgtctgccttaggacccatgat

SEQ ID NO: 173716 - DNA, 736 bp, Zea Mays
ctcgggaccgatttgggggaaatctcgaattagcgagctctagtggatgatttgaggcacgagttgctggattaggtgcttgactacctagcggagccgagggtgtgctcaatttatagtgtgcttgagtggtggccagtgaatttgatggagacgcgcggcggccgaagaggaggaggggcactggcgcaaacgattagtggctttcaccgtgtcagactcaccggcgacgagccagtgatatagagcggcttgcggcgaagtggtgaagcttcaaggcatgtggcatctgatcgacgggcgaccaactccggtgaacttatctaagccggccgcaaagcaaaagggggtacggcggccagcctccggtgttatcctgtggcgaagatcttttacccagaagcgttatccgggcactagtgagctcgaatcacaacgacggcgtgaacccgaccgcagagatcgccggcggtgacattcaatgtactggggatattttcagtgcactgtaccatgggaaatctcattcagagcatctgacagacaggattacagtgcctagatctcggatttttgtgtgaaaactcaccaatccatctgtagcaaacttgtagccctttatttcaactataattctgctatagcaactaccctcaatcgagcaatgaatctaactctaaatcgagctctaagttcatcctactttactgctagtgaggattcagacttagggttg

SEQ ID NO: 173717 - DNA, 750 bp, Zea Mays
ggcgatcccgcatgaacgtccatggaagtacaggagggagaccccgctcgggcaccctcgggggctgggtcatagtctgcactgcccacttgagccggatcatccctagcagcaccctcgggggctgggcagtggcttacacttcccacccgaaccaagtcatccccggcaacatcctcggggactgggcatgtgtcaacaccaccctgggggtccaggttctctgcggtagccacttctaaggctgatgggccctcagttacttccatgggaccagaacgatccaattcagtctcccgaccctcgagatcgcgctccaaggtcgacgaagcacgggatgacctcaacccagcatctggcacatcagcacaaacttccatcacaccatcatccactggttccgataacaaatcctctggaaccatatcctcaagagcctgatcaaaattggccagggacagttcttgcaggccaatgagagcagacaaagcaggagaagggaccccactactctcaccactagcaatgaactgccgactgtttttccgagttaaaggaacttcatcttcttcctcctcctcgtccatgttagcagcacaggcggcacacccattgggatcaacaacaggtagagcacccacattgggatcagcaacagattgggtacacccattggggtcagcgtcagtaaattcagtcactggcacttcttcagcggcaggaaccgaagtaccaacgtcccgatccaaa

SEQ ID NO: 173718 - DNA, 846 bp, Zea Mays
ggtgtggaggtggtgccatggttgcgccggaaagacctggtgggtccgcgcctgacgacttgctgaagaatcgtttcctccacacctatatattgggccctgcgctacacaggcactggcggcctccagcaccagtgtggcaacacaacagtatacagagcgcagggcgaaccacgtgacagaggaagtcgtgcagacggcgaggcagcccaacggttgttcggccggccatttcgcaatctctcctcgccgctcatccctgagcgcacgcaaaagaaaggttgcccatcgttgcgcaccggttctctgtgcgacgtttgtttgtctcttttaggatcctttggggttttctcttctttcgaacgcgttgagttcttctctgtgcgacgcggtctgggtttgggatctagtgcggtgacttctcgtcttccttgtctggcgacgattagaaaaggactcgccctcgccatcgccatcgccatcgcccggttgttgcttggctctttctctttgtctcgcacggtcatttcttcttgacacacttcggtttcttttttttttcttttgcttcctagtttggacacaaggtttatttgaaaaagcgggattgttgatccctacctatgtgttccatttcatatgtatatattttctaatatttttgtaaaacgactgttgtgcgaaaagattggggttttgtggcctaccacatagtcgtgggcctcgtggggttttagatgacgaactccgcgttggttttctgagtcgtggggttttcgatgacgaatggtgttctatataaataaagtttaatcatttatggaatttatcatgcgagctagcctt

SEQ ID NO: 173719 - DNA, 804 bp, Zea Mays
agtccatcatcgtatagcataagatatgaagtgttactactggctattacaataaggtcatcatatcacatcattaaaagtttgtggctttaggccatcaccacatgcatcacaatagtcagacaaataattattacagaccaggtgttcattacataaattaaaagtgctgccaagatgagaatccttctccccctttttggcaactagcaccaaaaaggagagaaccaccagacacacatcaccactgaggaggaggaggatcaaagaactgatgcgccaggtgagttgcaaagtgttcttccccagactgagctgggggaggatagcttcctgaaggatcctggggcggaggataagaagaggattgacccggatccccctggtgggggaggcgaggcaaactgctcacgatcatcaaagtattcttcatcttcttcttcatcttctggagacatgaaaggcaccccatatgcctgctggtgccactcattgatttctggtggaggaggatgcagaggcatatcaggccaacggggagcaaaaggcatacccatagaggaagcttaacgacgaagattgtcattagtctcccgctgccaccgagccagctcatgcacatctgaagatatatttctgcacatggaaaagaatgctgcaataccatgggccagacgagcgcccatcctgcgaccatgacctcgaccacgaccatgaccacgtggtgtgggagatccgcgaccaggagatggacgcgagggtccggcagcagtaggtccacgagagctggagggcgctttcctc

SEQ ID NO: 173720 - DNA, 493 bp, Zea Mays
gccggatccgctcttctagctttttctctttctccttcgcctcgagctcatgctcgaccagcaacttatcccacctttcaaacatttcctccatgaaggcgaggtccttctcccgccaggcgagatccgtcgcccgcttatctagggacgcatccttctccttgaggttctcctcggccagggcaatgttgctggccttgtcctccagctcccgctcccatttttggatcctctccacagccgcggtctactgggtccgctgctcttccaagatttcgttcatggcactcagcttggcctggagctctgtgatggcctcctccctctggttcaaggcctcctccctcttggccaacctcttctccttctagctcgcctccagctcccgggcgtacaccttcggaccgctcggaggtgaactggttggacgccgccttggtgtgctcctccagctgggtgcgccagtcactgaggcgctagtgctcggcctcga

SEQ ID NO: 173721 - DNA, 622 bp, Zea Mays
ctgatgcatacttgatctggatactccgttgttcgcagaaatcaaagaattcagagctagtgaagttggatcccaggtcagttatgatgctattcggtattcccaaacctgaatattatgtcttgtatgaattccactgccttggctgaagttagagaagcaatgggtttgtactctgtccatttggtgaatttatcgatgacaaccaacacgtgagtatagcctccctgagctttcttgaagggtctaatcatgtccaatccccagcacgcaaatggtcattttataggtatggtctgcagatgctgtgctggtaaatgttgttgctttgataagaattggcaagcttcacatctctggactaactcggctgcgtcaccctttgctgttggccaatagaaaccagacctgaagactttccccaccagagttctggacgctgcatgtattccacactgtccggcgtggatctcatctaatagctgcttccagtaactgaggaaatgcacttcatgaggactcctgccgcaccccttctatatagtgcgtcccctatgagggtgtagtgggctgactgtcttgcgatgcgttctgctgcagctttatcatccagttcttcttc

SEQ ID NO: 173722 - DNA, 495 bp, Zea Mays
ttttattgggatgaatgctcgaggtaatttggatatcagcttggctgcatagtaaatcatttgttctatttttttcttataacgatatgaatattggtggtcttacactatgcttttaggacatccattttattttaaccttttttatgacttggtgtggtctgtgcaggcaagaggagggctctaatccctctcctgatgtaggctacatcagtgaaatattgaagcttatacctgaagaggtgcacgatcttgatgttgtactctttatctagatttgatttgacggaacattagtacaatacttccaaaatataaattttgcataagtttgatagttcttctgcttattttttttattgaaattgcagtttggaccaaggcgaagtctactgtcactcgtgtttgatgttcagttgctgaagatcatgtgattctgcatttctgcaaccatcgttatcatcatccttggtcaatgcaaacaatgcttcaagg

SEQ ID NO: 173723 - DNA, 676 bp, Zea Mays
ccgcgctcgtctcttctgaatcctcctatgccgtttcccctctcactctcttctccattgcaatccctaagcttctcttgccgtactaccattgctggcgtcgttccatgcccgctcgacaggcgtacgtgatcgatgcgcaacgacatagtactcctgcagcgaaaaaagcgtggagatcgacaatctgcttgtcctgaaagcgcacgcaagctcagctcctgcgctgatcagacatcattttgcaacatgcgtggcgtcgtggtcgctggctggctggctgaccagatcgacttccagagattctctgaagccaaagcaagggactgctggtaaaaaaaaaaagtgggggcataattcgcaccacagcgacgaatgatgtgcgttagcggtcacaggcacccatcggttggcaggcagaaactgcaaggtcttcattagaaccgagtcaattctattcttgtcgactgaatagaagaaagtctttaccggcctctcgagaaaaaaatgaggacagaaacggtgcagtgtttcaataataaatgaggacacggcgctacatggttcgtagagaacagaaaacaaaacaaatatacaggctacggatgcagggtatggagagcaccagtctgtaaagaacgatatgaaggaatacttgcactgaattgttgacaga

SEQ ID NO: 173724 - DNA, 677 bp, Zea Mays
cctccggtgaggcaatgcctcggctcaagcttggtgaagcttcacagggtcttggggaagctatccaagggcttggtggaggctgaaggcctctagaaatggctggccacggtgaccggcgctcgggtggcttgggcgggtggcacaggtactcgtcggagctaaggggggtgtctggccagcgagggtgagcgcggagtgtggttaggtgcatccatgggtggtcttaaaagcgcgagtaagcacgacctaggggtggctctgacatgtgctcggggtgtgcgcgggtgagcgccagtgcgcgctctggcgtctgggcacagcgtcgagcatgaggtagcgcagagagaggtcatgttcaagcgcggattggctccaaatctttgagattatggccatgatcccattgagagatctcttcccctgacatttctttgtcgtttgtgtgtggaggcttatgggttttgctgactggatcaagagatatggaggggtgaagttgggtttgtctcaatgctgaacaccgagagaagatcccgggtttgacgtatctagggcacgcgtcccaatgccaacttcaggtatgaggtagaggggttagttaagcacatttttgtcaatgggagctttgggttttgagatagagattaaggtgaacgcgctcggttttggtttag

SEQ ID NO: 173725 - DNA, 659 bp, Zea Mays
tgagtaactctagcgatcgatatttcactacagttgagttgtcatgcatgcatactgtaaatcagaactattaatttgttgttgctgctgcagatgccttaggtcatggcttcatagcacagaacctgacaatcagatacatggcagggccggaaaggaggtaggacatggcgctaaggtcaaattcgaacaagtcggtcgtctatcggtgcagcatggaaggtcatgaggacaccttgtacgcggagaacgggatcctgttcaacctacagaccttgatctagggcaccgtgacttaatttgtgtttggcaatgcccaggccatgttccaaagctacccgctgctggtgcgccacccaccgaaagtcaagcataatgtgctgacggcgtagggctacaacaacgccagccatgagtccaacttctcgttccacatgtgcaccatggaagcggtgccgggcgtggacctcgaaggtgtggagacctaccttggccgcccttataggaacttctcccacgtcgccttcatcaagaagtctctcagtcgcgtggtcagccccaacggctgggtagcgtggaacatgaacaaggtcgtcgaggataccacccggaccgtcatctacctggaatacggcaacgatagcaccgttgccgacatg

SEQ ID NO: 173726 - DNA, 576 bp, Zea Mays
ccatcgtcgttgtcccgccggtgcccagcactccagcagggacgcgaacgaactctagttcatctactgtgccaatgccgcgcgctgcaattaggaatgcggaggaggccggaaggaccttattacacggctacagctacagcctacaccgtaccctccctctccctgctacatactatatttatacaggcgcaaggcgagctgcgatgcgtgctccaggaacggacggggtggatcggaagtagtggttcgcgccctaccagtagacgagtggtactgtacgtagcaggcatctatcatatcatcatcagtgtagagtagaccgaccgacgtgcagggcatgaattgaagccactctagctgctagcgaagtatggaaaggagtggttactggtcgtggttaggcaattagcaatagcattggaacacgcatatatcattccattccttaagttcattcctacgccaatcgaatcccaattataagtgcatgattgacgggctcatcgatcgatatcatcctgccgtcctagctctgcatgcgcgatatatgcttcagcaatcagacagtacgtg

SEQ ID NO: 173727 - DNA, 596 bp, Zea Mays
gtaacatcgagttccttaatatccaatttcttagttttggtttactgaatactagcatttgaatgtctactttttgctaggatgaagcagattctagtattctacaatggttgagtgttgttgttggtgcagtattgaattggtctctatgtgttatgttattcctaccgctattggtttggtgtataatgcattaatgctgtggacctgtgaactgttcgtgtttgacacacagcgccggccctgagggcgggcagacgggacagccgcgctgggcctcatattttcgtgggcccccaccatagtagatagtacttatatatatacaagtaaaggagactaattgccggctccaacatattttttattcacctctggttacgaggtgaggacgcgagacatccgaccaggcgggcaggcggccaacagatttttttattcaacgccagaggacgccagaggccagagcgaggcgagtctggaaactggaattctggatctgcagttctgccgcgcgaataggacgtccgcagaccgcagccgacgcctacgctgatccgctaaggattcctgcaaccgcctctcgcctaccgccg

SEQ ID NO: 173728 - DNA, 459 bp, Zea Mays
ccgaaccccgaaaaaccgaaacttcgggtcggttttcaaaaattcggttcggtaattcggtttcggcttaaaagtgcccaggcctatcagtgcagcaggtatgtggtagtttctgaactgtgtgacaaattccgcccaagtaatagcgtcagcagcgtcatgggcagcaacataagaatcacaccaatcagcagcaggaccagtcagacgaccagaaacatagagaaccttctcccggtcagagcaatgggcaatgtttagcatcttctctactgacttcaaccagtcgtcggcgtgaagaggatctagagaactggcgaaggtaggcagcttgtggctcataaattcctggtgcttgtcccggggtggaagtggtggtggaggtggtggcaatggggcttgctgctgtcgccccatcctctcctgacgcatctcctctcgcatatcttgcctttcttg

SEQ ID NO: 173729 - DNA, 1020 bp, Zea Mays
cagtagtctgggtacacaaacccgataacatcaaacaccctattcaatctcttcttgccccaagcaccgaaggcagttgtcatagcttcgtcttcggccttcgagtacgctccaagcagctcatcgctagttgcctctataacatctagccagtcgtcattcggttcatcaaactggcttctgtatcgaaaggtatacttcagatagactaagccattttgactggagccagcgacagcctccttgggcatttcccatccgtttgcaagtggccacactctgtaagcaatatgctcttggaccaagtctcttgtgccgatataagtgcacactatgttgaaagctgcctggcacgcttgcacgtcattcctaagtgcaatgagtggcctcctaatgccgaagcgagaccatatgggacactgaataatcccttttatatcctcccttttgatttaggtcaatcttcacataaaaccattcctgcatccaagagcctggctactttttccgaaatgttggcacaggataactagcctctgagcggggcacgaagctgtagcagccaaaattgttgtggtattgttctttcccagttgccttcgtctaatatgataattcgtgaatattgcagaaacacctggcatctggctctaatccttggctcctcatggcccatataaaaaaacactactttgataacagctttgggggtaagttgatgaagataaaattcaaaagtttttaaaacttcgaccaacatcttatccaggggaaatgaagtccagctttcatgaaacttctgaagatcaccacttcgtcagcttagggaagaggaacagtattctcccctctggttctcacgattgaagtatcacgaaagtatctgactctcatagcttcgatctacccttgtttaacagttgactttccgaaaacaacatggctcgacctccatggccggtcttcggcatcttcatttcctctttctacgtcgaaagtctcactatcgctggagttttc

SEQ ID NO: 173730 - DNA, 297 bp, Zea Mays
tcggggatggtgttgacacttacccagcccccgtgggtgttgccggggatgattcggctcgggtgggaagcgtgagccacgacccagccctcgagggtgttgccggagacgatccggctcaagtgggtagcgcgagctatgatccagcccccgagggtgtccgagcgaggtctccctcttgtacttccatggatgtgcacgcaggatctcctccacactctggttgcatggtggtagcccaagctttgggtcagggagtcgctttagaggctagcgttcctgccgaccaagttttgg

SEQ ID NO: 173731 - DNA, 602 bp, Zea Mays
agaggaagaagacccgccgcggggaacctcctgtctgatcgtcatctgcatcgtcggtgtggtcagagacctcccgcaggctcagggaaagacattagtggccacactactcgtgattgatcgccagctccgcaccaatttcttgccgtcgatcgcgcgtcgccctgattccgcaccgcgctgtcgccggaagtttctgcactgtaaccttcggtgagtatccaccctccatgttcgcgtggccatccacttcatttagtgctagtagaatcggtaaatggccctcgggatcaccgagtatgagttcaccgacgtatcctccgccgcgctcagggtactatgtcgccatgggatagctcagggggtgggggagaagacgaacgcctgccattcgatctatctgggacgaccatgatcgtgtccagtgtaacgatgcgacctaggctgattcgggtctcttcgatcacaatcgggtgaaccagaacggtcaaagagtctttaaatccgaatcgtagatctcagaacagacggttggcgctgtatacctcttcatcgccctagagatcgaatcccagccatagatttagtatcctgcggtcctg

SEQ ID NO: 173732 - DNA, 547 bp, Zea Mays
aagaggaagaatttcgggaattaactcaaggagggagatctgttagtgaatacatccacaagttcactgaattggctcgctatacgcctgatgatgtcagcacagaagccaagaagatggcacgtttcttgaaagggctgagaccagaactcaagactatcctcgccagccaagattttctcagcttctcgcacctctcaaacaaggccatacaagtggaaagggctagagaagaagaaaagggtcacctcaaaaggaagttccaagtcctccgagctcagcatcaggacaggcaccagagagttcgatcttttgggtttccacccaagggaccaagtttcaacaagtcagtagggttcgctccatcacgtttgagtcagcagggtcagagttccctctaggccccctctgttgcaagcaaccaacctccagccaatgcttgttggcactacggagaccccagtcactacaagaataattgccctcagttgaagacatctgtgcctacctactccaactcggtgaatggtcccaagaatgctccagc

SEQ ID NO: 173733 - DNA, 463 bp, Zea Mays
gccgccagcaaacgcctgttggcactgcggggaccccagtcatttcaagaacaactgccctcagttgaaggcaccgggaccaacctattccaactcggtgaatggccccaagattccatcggcacctacctccaaggcgcttccttccaacagccagcagagcaggactcagtaccagggcagggcccgggtcaactacgtcgacgctcaagaagctcagcaagccccgggagtagtgctcggtgagttccttgttgaatttactcccgcttctgtgctttttgattcaggagcatcccattctttcatagctgctaagtttgtggaaaagcatggcatcccctctacacccctagctatccctttggtcacccgaaccccgggatcggacctcctgtgcaaactcaggtgctcccaagtcagaatccttttaagtggggtagtgttcctggcagacttaacc

SEQ ID NO: 173734 - DNA, 1201 bp, Zea Mays
gtggggccgtcttggtagaccttctccaccatgtggcgaactcatcgcagagtttgtttccatcactgtaatccccgtaatcaccggagttggttttgccaactggacaccggctagccgaatcacctaagcattgatggatttcatttcagagtggacagaaaactaagtccataaaaaccctgagccgatggaagtctggaagatgtatttcgatgggtcattgaagctgcaaggggccagagacagaatcctcttatctccctaaggtagaacaactcaagtatgtgctacaactcctcttcccggtgtcgaacaacatagcagagtatgaggcattggtgcatgagctacacatcgtcatttcatttggcatcaagcggttgatggtgtatggggactctctggtggtaataagtcagatcaacaaggattgggactgttccactaaatctatgggcaagtactatggtgttgtctaacaagtagaagacatgtttgaaggcccggagttacaccacatggaaagggaccgcaatttggcagcagatacactgtcaaagcttggttccaacagagtttaggctcctctagatgtttttgtgcaagaagtacgatatccaagtatcccacaagactcaaaagaaaagtgcaaggcgataagaaactccatactccttacagaaccagacccaaacgactgaagaatacccattggtatatcaaaaatgaggacgatccacatgacaaagtggccgcagagcgtctcaactagtagtccaccaactacacacttattgacaatgtcttgtacaaacatggagccacaagagttttcatgaggtgcattgacacgactatgggtaaacacctgttggaggagatccaattcggacagtgtggagttcatgcagcatcgaggacactggttaggaaggcttttagagcggggttctactggccaacaacaaagaaggatgcaacagacctagtctagagatgtgaagtctatcagttccacaccaaacaacaacatttgcgagtgcaaccgttgcaggccatccttgtttcctaacccttcgcatgatggggactagacatgatcggggtatccaagaaagcttagggaggatacacacacgtgttggtggccatcaacaagttcacaaaatggatagagtacaagccgatcatgtcactg

SEQ ID NO: 173735 - DNA, 734 bp, Zea Mays
ataaagccaagaactagaacaggcattctatttcgaaagcacacccacgccacgcatggcagtattttacaagtggcatgtgtggatatggaccaacaacatccataaattcagaaagagcgagcagtggagccgcgagacggcagagacgtagtacgtaataatgctcagcgaattaactcgcgagcagcatcgctcccccatccctcaagctccatggccgatagcgtgctcgcttgaaaagatgcagaggcacctgttccccccaggccccatcccaagtcccaaccgtctcctgtgtccgtccatgccagtgcgtacgttttagggtcccggaaaggcactccacaacactgccgctttatttgccctgcaccatcgcgagtgggcacagagatgggcagaaccaacgagatggtcgggggtcgacgggggcgcgccgcgggcgagcaggcaggtaggttgcccatgtccggtgttggcagccgccgacgtcgcgggctttggccacttgtgtctgtcactcactcactggtcatttgcagtgcagacgtgcagtcagttgaactctgagagcggatggaaggggttgtcctggcagcgtcgcttcgcattgcactaccactgctgcgtacgtcctggccaccaaactgtttgttggatcactagacattgctgactgactgttgttagggatggtccgcaaggaggacggacttcacagacagcacgac

SEQ ID NO: 173736 - DNA, 740 bp, Zea Mays
ttcaattcctcaccctcaaaaagattccgcagatccccctcaccaatgctcgtcccaatcggcgaagacaatagctctcgtttaccaaaccgatctactcgaagacggtcccgctccatccccatccggcggcgcctaccacttcgcgaaacctcgcccacgctatgcttcgacaccacccctcgtcgccggcacttggtcctcgcactaggatgatcgacctcctcgccaacctccacccgcggcggggactcgccgcggccacatctaacacagcaaaataatccaagtcttcaactgaagactcttcggtccaggaaaacggactcccatactcaccatcagacgaaaaagaccaagatccagaaccagacaaattgtcgttggcaggcattacagttgcggccaccacaaaattagtatcatcaacagaggttgcttgcgcaggcccatacgtcagaacctgcacagcaactgagtttcagtatcataaaaacaaaatcctacacccgataaacctaacccctaccccgccacctgtgaagggtcggccgatgctgtagggtcttcggcagctggttcgcctgccaccaccgaagtgccctcaccagtcggtgcagcggctggcacagggtccacacaggtcggcgcagaggtcaccacggggccttcgccaacattggacggtggcgccagctccccctcagccccctccttcgcacccgacgcctcgggcagcg

SEQ ID NO: 173737 - DNA, 458 bp, Zea Mays
aaaactcctcctggcacagtatgaaggcctcaagcatgcggtggatccatgcggcacagcacctcctcgcttgccctctggcgatccttctcgtcgctggccaggagcggatctcgtctctattgcttggtcgaacggggaacgagcaggccttaagagttatcgggtgcacgctcgctagacgcgtgaagtggctcgttggcgatggggatgtgcgtgtggtgagctgctttcatatgagctcgcgagattaaggggtgattagttaaattaagggaggcgagttcggtacaaagaaatataagggggttttcaaagtgttgacgcgcgacgatggtggaaccgtgaaaactggtgagttatagtagtagagattaccgtttgccgccagaggattttgatttatagtagtagagattatcgtttgccgccagaggattttggagaggtaaactcaa

SEQ ID NO: 173738 - DNA, 449 bp, Zea Mays
taaaggggagaatggatgaacagtggactaaacaagatcacgggttcagtgcatctatcgccgccagtgatctccgcaccgcggttcacgccggccaccgcgattcacgtgtgaccgccgcgattcgtgccctgtgtgaagtggataaccgcaggaggtaaaaagatcggagggggaatggatcgagtcgacctcaccgtacccacttgaccggcaacgtggccgcgcgaccaccaccatcatgccgccgttaacttcagtcacgacacgccttaagtcgtttcaccacgtcatcacgggttgtggaggataaccagtgacggtcgtaaacctttgcccagtgaatgccacgttagcgaactccggtgactcacctttgctccggccgccagcttgtcttccccaaattcggagccaccgcttctggacactataaattgtagcccccg

SEQ ID NO: 173739 - DNA, 612 bp, Zea Mays
aaagtcaggaagttggagtagtggcgcatgagtaagcttctcttttaaaagagcaaaagaatcctcttgtgactgcccccaattaaatgaaacacccttcttggtcaactcatgtaatggggcagcgatggtgctgaaatccttcatgaaacgacgataaaatcctgcaagtccaagaaaactccgtacttgtgtcaccgtcgatggcgttggccaactctgaatggcatgcaccttggcatcatcaacctcaataccctgtgtagtgacaacatagccaagaaacgatacgcgttcggtgcaaaaggtgcatttgttaaggttagcaaataagtgcgcggcgcgcaaagcatcaaaaacagcacgtagatggtcaagatgttcagataaacaagtgctgtagatcaatatatcatcaaaataaaccaccacaaattttccaataaatgggcgcaaaacctcgttcatcaaacgcataaaagtactaggggcattagttaatccaaaaggcatcactaaccactcatacaagccgaacttagttttaaaagcagttttccattcatcgcctaatttcattctaatttggtggtatccactgcgcaaatcaat

SEQ ID NO: 173740 - DNA, 586 bp, Zea Mays
cggcatctgtggatgacccaaacgcctccacgtcacccgtggaaagattccgtaacgtccaagagctggctgtctgatcatgtggctgcaaaagttatctcaaagtcagcaaatccatgcctgcattccatggcctgcgtggccaaccaacgagctggatgataaagcatcagttcgtatagtagcataggggagaacaacaaaaaagtcaaatccctttttccaaggaaattggagatggtgagatccttatatccccccttagttccattggtgtttacacgcttttacctgtcatcacagaatcggtatctcgccaatttgaaacgctttcaccatcaacgcctgcctcacaacacaacataagttgcatacacatttggaaaatcaaattagattgggacaacatgacgtgttttggactaattgcatcatcacacctccataaacacaaaaacaactcaacctacgaggccttgtaaatcaggtcgagaaaatttttgaactcctacctcagcgtacatattggtatcggaccaaacctaaaatcttaaagtgtgctacctatcctatgaatacatagttg

SEQ ID NO: 173741 - DNA, 780 bp, Zea Mays
tgctgatgaacggcaggtccattttgaggtgcccctgaaccctagtgatgcggacataaatgacatgcttgatctgctagctgaggattcctccgacgctgctcctgctggtatgttggcagtggtgccccttccagcggttgatacaactttggatgtccagaaacctgtcagtactcgcccgagacgccctagccgaaccaatcagcctgagccttctgctgatgagcaaaagaagaaaagaagacgcctccggcgagtatccagttttgatgaggacgctggtacctcagttcctgctactgaagaagtgcctgcaactggacttattgatgctgatcccaatgggtgtacccaaactgctactgatcccaatgggtgtgctgcttgcgttgtcaccgtggaagatgaagaggaagagaatgaggttcctttaactcggaagaacattcggcaattccatatcagtggtgaaagtagtggagttccctctcctgctttgtctgccctcattggtctgcaggagctgtctctggctaactttgatcagactcttgaggatatggtcccagaggaattgctatcagagccagtgaatgatgatgcggtggaggtttgcgctgccatgcctgatactgggttgaggtcatcccgtgcctcatcgaccttagagcgcgatctcgagggtcgggatgctgacttggattgtcctagtctcacggaagtggttacaggctcgtcaaccttagaggtggtcgctgcgaagagcctggacctgaa

SEQ ID NO: 173742 - DNA, 340 bp, Zea Mays
accagttgaagctttctgatgaacaaccatctcccttgaagttgatgatgtgcaccccatagacaacatatcgaggcaccataaaccgtcatccaacgcccttaaaggggaggaagcctctaagaagagagtacgagatcatgggtccaccacgcataagattgatgtcaccaccaacatgagacggatgacgaagcagagatgtcaatggtcacgtaaccaagagctacgaccattacagtctgcaaggccaaagccaacagagaagaacacacataagcaaccatcaggcaagcagagacgatagtgcgaaagtaggacacctcctcgtgcaccgggc

SEQ ID NO: 173743 - DNA, 590 bp, Zea Mays
gcaaaatggcaacggcgaagaggtaccggggatccagagccgttcgatcataagctgagggcctagattagatgtactaccccagtgaaccggtacgtgatgtgagtcattggatcctcatcacgcggctacatttaattggagcgaagggggatacggtgatcaaatcccacacgtcggattcaaatcgggcaaacgacattatccaaggccgaaccgcaacatgagatttgatcccaaccgtccacatccgaacgaacggccaggagatcgcctccgaccttcagcagccaagctcggtcgcgcacaccacgcccgcggcggcgccattgccggcaagccaccaccccacgccccagtgctccaaactacaaccgagcgcgtgcaacacgtagaggaggtcaaggcgaagtcaagatgaggaaattttaccagagaaaacggtgggcacaaggctgtccgcggaccaggcggatttgcgatggagatgagtgctccggtgagaaatcgcccaactgttcgggcctcccgcgctcagctgtgacccaagaacgaaccacgcgcaaacgcgatgctccccgaccacttgc

SEQ ID NO: 173744 - DNA, 472 bp, Zea Mays
tattgatcgagcagggcattcagtcgggcttcgtacaggcacctgcatcgccaagcatcctgaagaaagtctgaggcgccaaggacttctaggtcggcgtcgtatcgaatctcatctgaaatgcatgcatctcgtgacagaaaatcgccgtcattttcccctaggactgaccggtagagcctcccaaggatcttttcggatctgtaagagatggcgtcctccttccccatgaagtcggggtactcttttggcgaaagggctggtggcattcttacaatttccccggtcttggcggagtccacggcgatagatgcgagccgagccaactcgatgcacttgggatccatcgctccgtcgtcgctccgatcagcatgagcagcatgggcgttgcatattcgaccaaggttgtcgtataccatgctctccaagtagaaatcaatggtatcctgttacaacacgagcacgcgagaaa

SEQ ID NO: 173745 - DNA, 451 bp, Zea Mays
ttctttggcactactatgcggttattgaaccataacacaccttgatcgtcttccttgaaacatttggctgttccagcccttattttctcccgtatgtgcttcatacccacattatccttttgagcatcaactattctttgcaagatgatagactcaagctttagctgattcagagtcccttgttgaaccatccccaggtttagcttttccatctcttgacataaagtattgtcagaggtcttcgccataagacagtggcaggaaaccttacggctcagtgcatctgccacaacattggctttgcctgggtgatagtgaatttccagttcatagtccttaataagctcaagccatcgtctttgcctcatatttaattctgactgggtgaagatatacttcaagcttttgtgatctgtataaatatgacagatatttcccagcagatagtgac

SEQ ID NO: 173746 - DNA, 773 bp, Zea Mays
cacttttttcctactatcactctaatccaacggacaatattatttgcatcgtccttcccctctcccacgacctcgccgcccccagcctccccctcacacgcgccgccaccaccgccgtcaacctctcacctcatgctaccgcccccaccgccgtcaacctctcacctcacgctgccgccaaccctttccctcccctccgcgagatcgtaactttagcacgtgttatatgctagtttaattatgtcgtggtttcaaaaactgggggcagtaataattgtgttcggtgggggatgctagcgtagactcactctgaatggtgaatcgctgggactcgaatggggtgattgagatagagggaagtaacactggttcaggctcgagccctggtccagtgtagtgttgatcgtagtattgtcttggagtgtattataactagtgtgtgaacaaagaggggacctaccattttatagctcaagggtatgaccttatagatgagacttgttctctactgatgagggggtgatcaactgccttgagtcgatgtagtgctcttgattttggttcgttgcgtcatgcgtagtcgtactcccgccatggtgtatcgacccgcatgttcatcatacgggtccttgtagcgaatctagtgctaatgtcttcgtagtagtgtgtggcgggtcccgcgggctagccccatggtgcgatcctgcgtggcgtggcttcgtctgtcatcatgagccccgcgtcacctcccagcgtgtgtaggcatgcactcg

SEQ ID NO: 173747 - DNA, 347 bp, Zea Mays
gtactgtgtttggctttgtgttgttgggagatgagaccgttgaaacatttgaatgggctttcaatgcattcaaaacatgtatgggatgcgagggatcgagagttatgctgacaggtatgtggtatgcgaatttgttatgctaattcgtcatgaaattaaaattaaatgaatgtgttgtgatcgtttgcagatcaagatcctgcaatgccaattgctctgcgaaatgtatgtaatacccaagttgtaaaggataagaaatggaaattatttcctatatatgagttgcctctacatataaacacatgtgaacaccccatttaaaagtaaataattaataaatgatatca

SEQ ID NO: 173748 - DNA, 338 bp, Zea Mays
gcgagatgggagtctgggagacgaggcctaaccggatcggcaagggcgagacaggcgtgggacggaggatggcagaggagagcgcgcgacatccggcactcccgaccatctctggaggcaagccgttgagagagatggcagaggagagcgcgcggcatccggtggcgtagggcgagggtgaggacggggttggcggcggcggaatcggggaagaggaggcaggggcaaatcgcgatgacttcggggctggggcggcgggatcgggaagcgggggcagaaaattgggtgggcagcatcggacggctcagattatagaagtgtagaatggacggctgaga

SEQ ID NO: 173749 - DNA, 732 bp, Zea Mays
ttataagccacatgagggacaaagcggaccaacttgttgaagcccacttcatactttgtgacagacttcttctcctgcttgtaggattgcaaatcaatcttcattttctccaggaaggtgaccgggtagaatctccattcaaactgtctgatgaagacatcccaagacaggactcctggtgaggaggagtgcgctgcctgcacgcctctccaccaattttgagcctctcccttcagcagctgtgtgccaaagcgaactcgatctccatacacaatctcgaagacattcatcttatcctccacgtaagttagccaatctatcgccttgaccggagtaccactgccatcaaaagaatccaacttcatgcccatcaactgcatcagagaaagaccactgattggaagaggcacctcggccccgccacctggagcagcacccgcagggacagcgcccctgggcactcctccaccaccagcaccctgagcagcacccgctggggcaacaggaatagcttgcctcagaatggccaactcctgctgcatggcctgcatcgcggctaacattgccgccggactcatcgagtccccactaggaacttgtggactaccccgagccctacgaggcggcatagctgcagccatagggatgagaataataagtaaataagattgacatagcatctcttcagataatgtcaaactagctcagacaataacataacatatcaatagt

SEQ ID NO: 173750 - DNA, 1377 bp, Zea Mays
gagaaagagagtcgggcgattttctgcaggttcgggccgttttgagaggcgtaaaaccgtacttcctgagatggctttgtatgtgtgtgtgtttacaagtggtgttttctgagcggagaggtgctaatgagatgaaaatgatggggttcccctaggccttatatacacgatcatggggcactccctacgcacacgctaatcacactcttctagcttatctcctagctaataatgaacagacttttcttatcttaaggaaaacccagtggcttcgttgcgatctatcttcggcgtttgagggcgtcgggcgcgggaaagacaaatggctccctcgagattatgcctaatccacgaacgatccgggcgtgagcccatcgccttcttggattggcccatttccactatagtccttgcccgacccacgatgagatgaccttgtggggtgactggtttgtggccccacgcaagggttttcgccttctagtggacccgagggatatctgtcccccacaggcgccatcgccagcaccacccaaaacccatctctacgcgctcaaacttcgatcgggctaggtctacacgactaggatgcaactgtgaatgtatgggtgaggttcgtaccagtattcaagcggtgtgctgccctacccacggtgcacggcgaagccacaacgacgacgaagaattgcggtcaccgagatcgcccttcctccctgccaccacccccgatgcgatccagatgctcgataggagcctcctgaccgcgcacctatccccaaagaagaacaccagtggtgattcctcacgtcgactttcctctatccctctctcacttccggttgtttggcttgcacgacggcgggtctgcgataagtggcaaggtgggcgaggaagataaccgtgcgaccttttatgcgccagagtagctcctagactacgcaccctcggattgcgtgcgggttgttgcgtcgccgcgataagtccacacgatgggattctgaggaaggggacggcgcagttggccactagggcccacatgacagtgagtcgtcaagcgcgcaagtggcagctggccaaggggaaccactggacagtgacaaggcttcagttaggcgcgtgcggatgagagcttgacacgctaggcccacctgacgacgcaataacgtcactgggccacgcggaggagggagttagtgggccgaaatggggatccgtggcccaggtagggttttttccttttctttttcttttttctattttattttcttcttattttttgaatttcaaattttaatttgaatttcgttgtgggtttcacatttaggctaattgcacaacttcaaatcctagtataagaagaatatatatttattttct

SEQ ID NO: 173751 - DNA, 379 bp, Zea Mays
gaatgatggaacaaaaagagccaagttacctgaagattagaaaagaatgatggcaaccccaagtcatgagaagccgtgttgaagctcgacgaaggaagatcaactagaacaatctgaagagcatcgtcgggggttggttcagctccactagcagatatcagaattctggcatccggctcgccgacctctaaggcgattccctcgctcgaagctaaagaagtatgcatttgctattacttcatcagatcgcagtgggagatgacccgacgtggacatccatggaggtgtgggaaggagagctcgctcggacaccctcgggggctaggttgtagctcgcactacccatcggagccggatcactaccggcaacaccctcggg

SEQ ID NO: 173752 - DNA, 363 bp, Zea Mays
tctattatgtgtttaggatttgataattgatatattgtcaaggatttttaatatgatgcattcagttagccttcccccgcaataatattgcctgagagaattggcattagaacatttctcctacattgatggatcctttctagctatgtaagagagttattgagcattatatgagaggaataacgaggatctctacgagctaatttggttttgtgcccagaaggccaactatggaaaaccattttcttaattagacgagtgatcatgtagtatagggagcaaaagagggaccttcccattgtttcaattgactggaaaaggcttattacaaaataccaagaaatgttatgtggtgaactttgg

SEQ ID NO: 173753 - DNA, 375 bp, Zea Mays
cttaactgttgagccgcaaacaagggcttctgagtctccgtggatcagaggagtccaaacttctgctcaatgacccaaatccattcgtcagcttcgaggggatcttcggccttgacgaatagtgggggacaagtttccgagaaatccaaatatgaagttttgcggggtccttgtggataagccctcctgccttgctgctgaagttgttgtcccgccatttcacgaaggaagcaggtgttgtcagcggtcgcggtgaccaaggcagcgatagcctcggccagcgtgggtggaaccggtggtggatttggtgtatcttcttggccacgggatgttcccgcgccatcatgtgaacgagttcgagatggcatctgaagc

SEQ ID NO: 173754 - DNA, 499 bp, Zea Mays
ctccgctagggacaacacatatagaccctcaatggccggttcaagggatagctctaaagtctccctagcaacattatagagccgacttgggaaaccttgccggctgatgaacaactccagttcaaggagcacaaggagtagctgattcaagaggcaaaggcgaagtttctggccaacttcaaagtggacaaacaataaagtcgtccggcaacgggcgacggatccggcttcgctctgacccacaccagatatacccaatgtaagtaacacaaacgagctacaatctcttaagaattatgtagatgaacaacgagaacaaatgtaaaatatcatagggggtatgaaaaatgattataggagactagtacatgcatttgataaatctactattgcaaattttccttcgcacgaggttgattagggggaaacgcatgtaatacatcggctataggttgtcacgaccagtcacaactcctttatgggatgccgatggacacat

SEQ ID NO: 173755 - DNA, 420 bp, Zea Mays
gattcaaacaacgataacttctaaaatataattccgaatcgaacgcataagtactcgttggaaaggtacaacaaatatctacatgattctcatattgattatccctaatttcccactaaaaatccccagaaactgctaatactactgctgttcgcccacctgcagaaatctgtttttttggacagcaacatacccggattcaaacagcgataacttctaaaatataattccgaatcgagcgcataagtactcgttggaaaggtatgaaaaagctatacatgattctcacactgatccccactaattgcccacaaaaaattcccagaaatcactaggactactgttgttcgcccacccactaaatttctggacagcacctctaccaattcgcatacgtaacatctattcaatggaattgca

SEQ ID NO: 173756 - DNA, 814 bp, Zea Mays
tgttgttatgaagaattgggagataattaaacccaaagttgggctgtcagtcgggttactgactgaaaaatgaccaccagtgttattagtcgagctttggaattgaaattatgtatgatctagtgctcaactgagttcagttcctatagtcgaaatgtagctggtttgtaactctacaactttgctgcagaaatttgggtgagttgccacgaaaactttagagaaaatccaccctaaactttggctgtcaggagcactgaagaacattgccatggtacggtgcctgggaggataagcttcagaccctcgccgccgacgaccaatccgcgtcgtgatttgcgccagggtcgggatgggcgtgcggagtgcatctcctcgcaaacatctttttgatccgggtaagatcgccgcggtggagcgtgatgattccagccgccacgcgaccactaatcactctggccatatccggtcatcgacgccgctcctcttcgttcatccacgccctcactgatttgaccgtgttactgtcgcggcagaatgtggcaagctcgtaggaaaggatagcgctcgatgccgttgttgatcgccagctaaggccggcgatggttatcaccatggccatggcagtggctcactgcgcctataaattcaccgcatcctcaccccctctgttcaaatcaaccgagcacagctcttcgtctctaaattgcgaagccgaagcacctgctcccaccctcgattagccaccatagccggagaatctcccttttcccccaaattaggtcgccgtgccaccgtgaacagctcaaccgtg

SEQ ID NO: 173757 - DNA, 596 bp, Zea Mays
gcatcacacacgtgcacacgcatgctagcaggatggttctcgtgcacaggttccctctggtgatcgtgtcagcgacctcccggcatggagcatccgaaagaagatcatggagttcgcgccgactatgttgcaaaagggcacacgcaagcggttgagattccgaatgtgggcggcggcagccggtggcggtggcgtcgtggcctgctggtccttggcggccatcacaggctgaggcacgatcgcgtggaaccgcggaccacggagcgaaggtcgtccgcccattaagaagctggctatgctcaacagactacggtcgatgggacagttcagggactcaacgtgtcgcttaggatgtctggatggagcggaggcatgccgcaaacatggtggtacagagctgaacaaccaaggggcaacaaaaagcagagagccatccagacgattaagcggatacgacacaggagacgggacttccggatccaaggtatggcgtaagccatacctggctataccggaagctccgccactgtcgtagagtacatgtataagaaaataagtaataatgtcatagagtgtatctacgaggttataacatc

SEQ ID NO: 173758 - DNA, 367 bp, Zea Mays
atctgaatcgtagacatgctacgtgggtggagtttcttgagacatttccctacatcattaaacacaaaaaggggagtgataatgtgattgctgatgctttatctagacattattccttgttgtctcaacttgattatcgtatttttggacttgaatccattaagggacaatatgcattagatgatgatttttaagatgtggtattaaattgcaaagagggacgtacatggaataaatatgtgcttaatgatggatacttatttagagctaaccgcctatgcattccagttggttctgttcgtctcttgttgttgcaggaagcgcatggtttcatgggccactttggtgctaataagatggaggttgt

SEQ ID NO: 173759 - DNA, 1162 bp, Zea Mays
gccccgcgcgcgccctcagtccctgacaggcggaccccgcctatcggcgccagcccgcgcgccccttctctccctctcctctcgctgctctgtggggccggcctgtcggcgccatttcttttcgcacacgctcgctctctctgtctgccccgcggcccacacctgtcagctgtccctaacctctcgcccacgtccccaccgtggatgcgcccatgtccgcgcgttctccggccacctccttacgccctcgcccctttagagcccgcaccccgctcgcccacttccccttgctcacttgcgccctcagtcgagctctctcgccccctctcccgccctgcgcgcgtgaccaggcaactctgccgctgctaaccgaagttcgccgcccattctgtgaccgtcgttgagccctcgtcgcacccgttccctcggtaagctctgccgcatcacccgcagctcgggacacccttcagttcgtcctttccccctctgttcatccggtccacgctcaccggagcacttcttgcacagccggagagccgccgccgtcgacccacgtcgtcgccgcgccccaacctccgttcgtgcgttccttggacttccctcaaggtaaccgccctagccccgcccttattttcccctgtcttgcatttacctgcccgtgattgctcgccagagtattccccagtctgctgaggactccccttcgccgtccggtcacctcagtcccgttcacacaaacctgaccccgccatagtgttcgccagaccctccccaacctctccagctacccggaccgacctctcgcgccctagaagacccagtctgcctcgcctccggcgacggcgccgccatgcccgcggggagcgcgacccctggcttctcggcggagacaaagtcccttggcacgcatcctgtctgccaaaccataatcggacgacccgattttaattaggccagatctaatcccgaccgcccgatccagatccgaccgttctccactctctctcccaccggtgccctacagctggggccgaccggtcaggccgtctcgcccaggccgctgacacccttggaccgttggttagcccccgcgcgcgttcgcgcccgcgttcgctcgaccagatctaatctaggtcgttgcccactgatccgatggccaaga

SEQ ID NO: 173760 - DNA, 286 bp, Zea Mays
aagcaaaacccctctcaaagtatcccataacaacaagtattgttgtatctctcttaaggaaagggggctttgaatgtcgctgacccactgccagttatccagagcctacgccacagttctagaagaaaatgccctgcggccaaccatgcgtaccacctcaagggcaatgtcctggatagtactcccatacacccatctatccgaccagaagagagcattagccccatttcctatcacggtgaactcagacaactcaaagaattgtctaacctgccgttgcactggg

SEQ ID NO: 173761 - DNA, 505 bp, Zea Mays
cacattgtcatgacttggactaattataaaagttgtagtacacttaataccctacaaaacatagaaagagtgtgaccccaaaaaggattcagaagaaccccaaaagggtcaccaaagagaaaggcataaaagaaaattcaggtttttctcaagttcaaaatcgaccctctttcaaagatcaaacatgttcactttgatcccaaccttaaaaccttatggctcaattgacaaaatggcgcccaaagacccctagaacaccctggaaaagtttgaacccaaccctaagccatttgacacgacttggcatggcttttgtctcggtgtggacagctctgacaaagccgacttctcacccccatatctctctagtctgaccgtatccttgcttggaactcacataaaaaaggtaggatttggtgcagggaagagaccgtacatgggggttttgccaagatctgcacgctaaggcgatcaaatcgaccgttgaaccctggcagaagtaaac

SEQ ID NO: 173762 - DNA, 485 bp, Zea Mays
tcacgttggtacgagtcaatacagggggcataacatcttaaccaaggacgtagatgcaacctaaaccctaatcaagacatggggatgcaacggatctggaaaagcgaataggagtagcgatgggggagacgaagatggtacctgcgtagacgccgagatgggaaagggggggaggagtccacaggttgacgacagcagagggagttcacgacagagttgccgctccgcggtcaaaaccctagcgctgtgaagggttacggagccatcaaaacgactgcggcggcggacgagaaagtagagaagggcggcatggatgacagggcttaccggcgaagacgacccgcgcggcggcgggagatgcgatgggaggagagctgcggcggcgatgggagtagcgatggggacgagagagctgaggggcagcggggtgcgaaccctacccaaatgatgcggctttctgcggaagtggcctgaggacagcttct

SEQ ID NO: 173763 - DNA, 343 bp, Zea Mays
ataagtttgatgaaccaaatgatgattggctgaagtgcattgaagctactagcgacgagttacttggggcgtattccaaaaccgaggacaatgccttgtccacagccttcgggggtcggaataagaaaaggttgaacagggtattcgatgctattggcttcgtataccctgactattgttacccactgcgagggcaaggggtaaaaagaaagattgcttcttctggaaaggttgccgcttcggccatcacatctgagccgaagggcaagaagatgaaggttctgactcaccggccgcgttatattgaaccggccatgatacctgaatttggcgaaggggcctc

SEQ ID NO: 173764 - DNA, 912 bp, Zea Mays
gggagggcatcaagatgtaatttgtattatttgtgcagtgtggtcgacgacccttcgccatgtttatgtacactacgaggacatgttgtgaaatgggatggcgacctcgctttccgcggcgatgttggatgcttatgatgcgtacctggttgcgtcgtaggttgctttagttcgatcgtgtcagacagcatagactttgcaccttgaaggtgatcgtacttgacatttgtgccattagggtgatgtcgcgtattcgtgcatttccggctgcacccttaggcgacttttgcaaagatgttttgtagtagagacctcgtatcgcgcacttgttgtgcatatccggctgcacccttaggcggcttttgctcggatttgtcttatagtaaagacttcgtgttgagcacttgttgtgcatatccggctgcacccttaggcggcttttgctccgatgtattatagtagagacttcgtatcgcgtacttgttgtgcatatccgactgcacccttaggcggcttttgctcggatttgtcttatagtaaagacttcgtgttgagcacttgttgtgcatatccggctgcacccttaggcggcttttgctcggatttgtcgaacgcgagggtagtctaggctacctcttgcggtgactatgtatatgtcgaatgtcgaaggccgttgatgcggtctttttccacacttatggtgatgatgcttgctagaattttttgcaggggctttttggcggtatattacatggcaccacctcgttaaaaacctcaccccccgggaggaaaagagtgcgggcctaaatgacattgtttgaagaattacaaaggcgcttgggccttggagcttaaatgaattttttttggagattatcgatgttccatgagtgttctaagtcttcaccggat

SEQ ID NO: 173765 - DNA, 732 bp, Zea Mays
acaagctgtaagctttcttgctgcgtgttaatcagcgtcggcttatggaattttcatctgaggatttcagaaccggtgactcaatgagctttttttttgcactctgaaaacaactcatctttgatccgaccccatatatataaaacaaactgccacaccgccttctcctgtcatggtctgtagatcgttaaagtggaagcaggtcaaccggaggactcggcaaaagcacgtgacgtcgacgctaacgccgagtgctcatgccgcattcgtggctctggtggtggtagtagagggcgacgagctgccgccgccggtggtgattgcctggacaaccggccgtataaggtcgccgacgatgagacgagtctcgttactgttggggacatggcgtttgtgatcgggaagccttctgacgttcctggcgtgctgctggtgccgcctgttgtcaagtccgaacctgccggtgacaatggcgtcgaaactgctgaagaagcttcgtacgaccactgtcctgagacaatggccttggcccatgagaagcggatatttgacgaggacgatgacgaggacgcctgatgttttgcctcgcccgatcgaatccctccctggtgtctcgcatagctgcatagctttatacaatcagcactgtgtatttagaatggtcccaatgcgatttcgttcagtatgttcttcgaaatggtagtaccggcggatgaaagacgccattttttt

SEQ ID NO: 173766 - DNA, 915 bp, Zea Mays
ctcaccccccgagaggaaaagagtgcgggccggaataaaactgtttggtgaattacaagggcgtgttagccctgaggatttaaacaaaaaatttacggagattgtcaatattctaggaatgttctaggtcttcgccagattgcgttgttagtttgtacgcgctgggagacgacttcgtcttgacgataaatggtccttcccactttgtctccagcttacctcgtgactctgtctgggttgtgcggacaagtacgaggtccccttcgttgaattctcttgggacgactgcgtggtcgcgctaggcctttgtttgggcttggtatttgttgagggcctggagggcgaagacacggtttccgtcgatgagatctttggaggttagctcgtcgacgttgggtactgctaaagcgcttgtccgcggggacccatgtttgatttcctgcggggtcatggcctccgatccgtatagcaggcgaaagggagtgaatctggtcgcccgacactcggtcgtggtcagtgcccagactgcttcaggtagcaggtcggcccatttacccttcttgtcgtcgaggagcattttcttgattgccgtgaaaatcttgccgttggcgcgctccacgacgccattggattgtgggtggtacactgaggcgaaggcaagcttggtgccaatggagaagcagaagtccctgaagtcttggctgtcgaattgtttgccattgtcaactgtgagctcggacgggactccgaatcggcagacaatgttttgccagaagaatttctgggcggtcttcgatgttatcgtggatactgctcttgcctcgatccacttggtgaaatattcgacggcgacgaaggtgaacttgaggttcccttgggccgtgggtagcggcccaacaatgtccaggccccagc

SEQ ID NO: 173767 - DNA, 742 bp, Zea Mays
agaatgggcgagagggccccagccgcgaccctagaacctgcagctgtctgaacgctgcatggctgatgacattgaggccggcccctccgtcgatcaacacatgatgtagtcgcatattggcgacaacaagggcggtaacgagcggcagcacgctggcccctaacatgttatcggggcagtcggatgccccgaaggagatggtagtgcccctccaccgttggtgtggagcagttttggggacccttgggaccgtagaaagaacttcccggcatagggacttgacactcctgtgggaggtgagctcccagcttccgccgtacattacatacagcttcttgcgacggtcgccatcatcgctggagtcagaatctctggtgaagacgtcctttaagcacccctcgggcgactgatagccgaggtcttgtccttccgcagccgcggcctttctgttagctcccatctggcttggccggcgatggggcgtcgctcgctaatgcgccttgcgagcttgattatctcacggcagtcagcggcacggtggcggctgttggggtgcaatgggcatgcgtcactgatgcttccctggggccgtgggtgcttgctgcgctcgcctcggctcctggtggcagcagctactgaaacagctaaccgcgacttttcgtggccgtagttcttgtttctctttttcttcctgcctccgccctaggcgacgacatccgagttgcccaccttggtaacctcg

SEQ ID NO: 173768 - DNA, 462 bp, Zea Mays
cgaggagttaccgggtatgccacctgaaaggaaagttgaattcgctatagagcttataccaggcaccgcccctatatccaagaaagcctatcgagtgtccagaccagagttggtggaactcaagaagcagattgatgagttgttagaaaaaggttatatcagaccaagcacctcgccttaggcagccctagtgttatttgtggagaagaaggatggcacgaagaggatgtgcatcgattatcgagccttgaatgaggttactatcaagaacaagtaccccctgcctagaattgaagatttattcgaccagttgagaggagccagtgtgttctcgaagatagatctgaggttaggctaccatcagctcagaattcgaccttcagatataccgaagacagcattcatcaccaagtatggactgtatgagttcacggtcatgtcattcggtttgacgaatacgcc

SEQ ID NO: 173769 - DNA, 765 bp, Zea Mays
aaggggttgctagagcacctcaaacgcgttcccgacacattggagcatggggaaggaccagagcgatcgaaattacctcggggccaacgatccgggtaaggagtgcatcagatagttcacggttgtcttggctacattcgttaccggtcgttgtgcatggaggtgctgggatggctagatcggggttacgcctgttagcgtccactgtggcgaggaggcgtcgtcctgttttgttggtgaaaggagaagaatgaccgtgcgttgttagattagacacaagtggttcagattagaggaactttgtgaccttcaattttctcacatatgatccccgcgccctcgcgaactccttcgattgccttctagcctccgaatggtggtgtacacagggtgatgccgacagctccctctacctctatgttctctcgttgctcgcttcaatgggcccgtggctcatctactacgacgcttatgggtcaaggggttgaagtgcagtgtgtatatatagtctcccaaggtcctggctgaagaaagaatgaacggcatgagaatcccggtgttcggtttgctgttggcccatctctgacgcgaggtaagagaacgcctaacaaggggtccctgctgtcagcgacattcgagtgtggtgtgggtgcaaggaaacgtgcggatgaggacgcgcctgaggatgagctgtgggaagggaatgtgcttttctttttccttttttgtttcttttcaatcttcttttctgtattattttcatat

SEQ ID NO: 173770 - DNA, 487 bp, Zea Mays
gaggtggcgaaaggccgactatagcgaagtatatgataatcagggttcgaagccataaacaaataataaagcaaaagggcattaaatggaagtacctataattaatgcacgttcgacagcttcttcagcttcatttgcttctactcgggcatcatgggattctttttcattttctttattgcttcgtccgctatctcgcggccgcccttcatccaaacatcagaataaaatttcccacccatcagagtagcttcggctgaaggttcccttgtatcgtctacggagaaggtaacttcttcctaggctgcagctttaacatgttcacagccaactttctccaaaactactgcaacccctcgagcaccggcgaaggcgcagaaatccccacggtcgctaagtatttcgtcaaaagcttcagcttcttcgccgatccattcaatgactcctttgggattgcctcgaataaatttttgctccgatgagtatg

SEQ ID NO: 173771 - DNA, 542 bp, Zea Mays
gccagcaggatcactagagggaccaggtttactcatgccagcggacgcagcaagcatgtcagcaacaatgtcctcaagcaccacaacatcgtgtctccaggtcttttcatcaggactcgaccagcacaaacatctttgtccatttctttgtcacacattgctttcatgataccacgttcatcctctaagaccttgatgtcacgacgagcagtttccaactcctacgaaacaagtttcttcgaagcacgcaactctttgatgacagaatctcttgaaggcagtaacttattaagctgtgacacttcagtctgagaaaccctcaactcatccctatgacggtcaagctccgacatagtaaagcggtgactcctctccaaagtagtaagagagctactagcatcacggtacagtttgtccagactatcatgggaatcaagaagtcttcgcatctcctcctacagacaagaagagtgctaaacatccaagcaaatgcacaaaacaaaggcatcatgaacaatcagaaaaacctacctcatgggctc

SEQ ID NO: 173772 - DNA, 395 bp, Zea Mays
caacaggcaaccagatcgatccggtgcttgcctggtttctatgtttctagccaagatctcggaggacccatccctattcctggtctggtgcgccagccgagagcagaattccagtagttttttggaggaaggctcaacgactatttgttgccttgggctataaataggcctccatttcgacctccaaagcacaccaagcataccaagagctagtacttcactcatgcacatttgacagacacaccgaagcgatctgagtgccagctctagagagatagtgacattctgctgctgagctttcgtgtgtatctttgtggtgctgttttactgctcttgtgtatgttctcattctccctattactgttctaagttgtaactttcaaactgtgtacgac

SEQ ID NO: 173773 - DNA, 461 bp, Zea Mays
tactccccttaaatataatctcgtcctcgagatttaagaagatctaggggaaagatggggaaaatctatacgaagctcttcttctctttcccacgttgcttcatcttctccgtggtgactccattgcactttgcacatctttataaccttattcctcgtgacacaagtcagtgtatcaagaatcttgatggggtactcagcataagtcaggtcatcttgaacactaaggtcctccattggcaactgctcttcaggtaccctgagacatttcttcagctgagatacatgaaaaacatcatgaacatccgcaagatgatccggtaactccaattgatatgcaacctctcccactcgttttaagattaagaagggtccaataaaacgaggggacaactttcctttgactttgaatcttctcatacccctgagtggtgacaccttcaaatagacataatcaccct

SEQ ID NO: 173774 - DNA, 844 bp, Zea Mays
cttctactgtggagaacaaaaccactgggcgaagaactgtccaaagaaagcagctcagcagtcgccagcagtcaatacgccagcaagacaaggagcgccacaggaagcaccaggaggccatggtcaggcctacaaccgtggaaaggtgaatcacctggaggccaaagaaatccaggatgctcaggacatggcagtaggtatgtttccagtcgaatcctaccgagcaaaagtattatttgatactggtgccacacattgttttgttgctacatcttgggtagaatcacataacacccccatagaaccaatgatcccacctttaagagttaattcagttgggggaaaagttcagtccgataggatctgtccgaatctaaggattgaaataagggggtagacttccccgctagcctagtagtaatgggaactcaagggttagatgtcatcctagggatgaattggctacatagaaaccaagccactatcagttgtgacaagagaacggtcaagttggtgtccccatccggaaaggaagtagtaactatgctgtacttgcctaaactagaaggagcctgtcaccatttatcagtagatgacaaagagtccaatccgattgaggcaattaggattgtgtcagaattccccgatgtattccctgaagagtaaccaggtatgccacctgaaaggaaagttgaatttgccatagagcttatcctaggcaccgcccctatttccaagagagcctatcgagtgtccggaccagagttggtggaactcaagaagcaaattgatgcgttgttggagaaaggttacatcagaccaagtacctcaccttgggcagtcc

SEQ ID NO: 173775 - DNA, 922 bp, Zea Mays
ccagtgactgctctcatccgtgtgtggctttatgtgtcactgcatgtggggcccacttgtaatgctcgtctccttcgtcgtcgcgaaccggggtgagcaccaacagactccgtggatctcgcgtaacaaaccccgtcactcaggtgcgcggattccgggggattctttcgccgcagcctgatctccccccgtcatgatcttcgtagaatggcctataagacccggccactgccatccctagccctatgcctagtgagcttgagccgcgctgggagttgcgtctgtcgtagctaccgataggagagagagggaaaaagggtgagggccagaggattgaaccggccgtcgaaacacgcggtgcgcgcgggaaaccaggggcggtgtcaggcggagaagcgctccgcggcgttgcccacacggtggtggtcggctcttcaccgggccggaacgccactgctgatcagtgtcggcgccaggaactctggtaagaaccactcctagctgtttctacttcatttggttgtgccggtcgtgttcctgggctatggttttaagtctggcaacgtgcgacttggtcgccggtgttagtggttgccctgggtggggacaacatcatcgccggcgggacgcgctgttgacggactcagcgccgctggtgcgtgtaggtagaagaagatcccctgaccgtcgattcagtgtcgaaccgatcggattggaagtaacgtaacgatgtggtcaagtatagcgtgtgccgtcgattctgaaatccatggttcagattagatgacacttaccctttcgccattttaaatctgaaccgtagagttccgatcggagagttgagagcttatgtggactcggggggctattgaccgttggattagtatccagtgactccaggcgcataccgattcaggtatgg

SEQ ID NO: 173776 - DNA, 374 bp, Zea Mays
ctccgccgccgcggttcagtgggcgcggagtgaattaacgcaggagctctgcaaccgttgatctgtgaaaacacggccaggattagatcttgaaatatccgttcggcttattcgatcgcaaccgtagatcctagatggatggcttagaacgaatcatggcgttccccttcgcctagcttaaatcttgaccgtccaaatctaatccagtggcccgtttcacgtaccggttcggttaggtttaggatctaatctgagccctcaaatgtcgatcggacggctcagattggaagttagcccttcggcttgcgcagattgcaaatgaacccctgcactttacataaaacaacccgccgtccagagaagtgtttactgag

SEQ ID NO: 173777 - DNA, 819 bp, Zea Mays
gtttttgtgatactgaaggttggttgctgcgtaggtttcaacgttcgggcctacgcaagcaacccataccgatgttgatattaattttgtggcggttgtgaatgcagtgcctgataatagaaactcgtctgattctaaaactgagtcttggtcgtcagacgagggtgattttgagagttcgttttcgtggattgaggagtcttctgatgaagatttagattattttgttgcgttggatgtggccgcggcggagtccttaccacaacctgaagtgcgcgaagggtctgctccctcggctggggcgatagccgaagagcaccaccagcgaagggtggtgtcgaagcacaatgttagtgagatgtcacgaagtgggaggcatcgacgaatggggatggaacgatcccgtcttcgactggatcggggcggccaatgagatttgctatcgtcgacgtctgagacgtgtattggggaggggatctgtggaatcttttttagggcgacgagttgaagatgatgttgtttaactttcgagaggcaggccttattccaaaggctgagctgatgtagcatgtccattgccctcgctctcgtgttgcggtagtaagtgaaaacgctgccctcccctggctcgcaatagagagggagggcaacaagtgatttctattatttatgtaatgtggtcggtgggcccctgattctgtgtatgtaaactatgatgatatcgcatgctgcgcttgttgtgaggttgtcccgacctgtaattgtgttggcgtggtccgtaaatggaatggggaccttgctttccgcggcaatgatggc
